United States Patent Application Publication US 2006/0134663 A1 - sequence listing, part 61

SEQ ID NO: 151403 - DNA, 1046 bp, Homo Sapiens
gacggtcggggcagaatggggagagactccccgcgtccaagataccggactggagccgaggccccaaatgaagggaggccctgcctggaatggggcttcgaatagtaccgaggggcgcccaggtcggcgtcctcagctggccgagcatggtggcagcctgcacccttggctcccttgtctggtgcagccagcagagccgccagccttgggcgcccatggccctccgtgtgagggcgtgagcggcctgccccagcctcacctgctgatggaggactcaatggcccagtgacctgacaccacaccaccaactccctcccaccagctgacgaatggtggacccagtgacgagtggcccttgtaagggtcatggaataatttgaagcgaggcatgagcggcccctgtggtcgcctgtgactgctggagatagaggtcccagcaccccaagccaacccagcggaccctcccagccctgcttcaaccaatggggccagtggggcttcaagcagccccctaaccatccagaccccaccccactcacgcgggcatggcgggccctgagggcttccagtaccgcgctctgtacccgttccgccgggagcggccggaggacctggagctgctgcccggcgacgtgctggtagtgagccgggcggccttgcaagcgctgggcgtggccgaggccggccgaacgctgcccacagagcaggggcctggatgaccggaacttcacgaacgcacacgggaagcggaggttgatttccctgtcaactaaggggcaagacccctggggccggctgcccctgtcatgccagatcgtgcccttatcccactactggcccccgtccacctggccctcacggatttcccgccgactcatatccccacgaaaacacactccactacacattccatccccagcgcccgaagaaagcaatcaccgctacaagcccccccctccgttattcgccgctcgattgaccacacctgatacgcccgattatatacctgcctcccggaccagtggatctgcattgcctgtagcccg

SEQ ID NO: 151404 - DNA, 895 bp, Homo Sapiens
aaggacgcgaggcctgggtggcgaattccgcacgagggcggcgcccatcttgcggtccttttcctggggccggtggtctggtaccctaaatctctcagtattgttgcccttggggctgcgtaaggcccactcgggcgctcaggggttactggcagcgcagaaggctcgaggtctgttcaaggacttcttcccggagacggggacgaaaatagagctcccagagctcttcgaccgtggcacggcgagttttccccaaaccatttactgtggcttcgaccccacggcagactcgcttcatgtgggtcatctacttgcgctgctgggcctgtttcatttgcagcgagcgggccacaacgtgatcgcgctggtgggaggcgccacggcgcgcctgggagacccgagcggccgtaccaaggaacgcgaggcgctggagacagagcgcgtgcgagccaacgcgcgagctctgcgcctagggcttgaggccctggcggctaatcaccagcagcttttcactgatgggcgctcctggggcagcttcactgtgctggacaactcggcctggtaccagaagcagcacctggtggacttcctggcggcagtggggggtcacttccgcatggggacgctgctgagccggcagagcgtgcagctgcggctcaagagccccgagggcatgagcttggccgagttcttttaccaggtgctccaggcctatgacttctatttacctcttccagcgttatgggatgcagggtcccacctggggcggaatctggatcaactaaggcaacatcatggtccgggataatgagtttcatcaaccaagttggcctggaaaaaagatggaatttggaaatccccccgtttccctcttaatttacaaaggtcccaactt

SEQ ID NO: 151405 - DNA, 1367 bp, Homo Sapiens
  misc_feature (616)..(625): n is a, c, g, or t
atgtgtgggtttctatgagatgtttattctttaaccctcacccgccggggttgtgctgcatgactgcggtgcgattaccagatgtcccccacacttagggatggacccataggcagcgcgaagagaggggggcaaattggggcagcgggtgggattgtgtggaacgaagggcgggactctttgcagagcgttctttacggcgcatggttgtggctctcccgtgttggtgaggggagaacaaggtttaaggactcgcaatcctgatgggagattccttccaggggtacactccctttaatagactctgaataactttttctcgtgtatcctataatttaggtgatttgaggggggggtttttctaggcgccctaaatggttcccagtcagggggtgcgaaccttggtattcccagagagatggttcggggggcatttctcttgccggttttccagcagagatatggagttttttcccctcttgccgggatttaggaattatttaccaagggctcgggggtcccaatttcagggaagtggttcccaccccaccgttggtgggggcccggtgtgaccgagaagggtgcccattgggggaaaggtgggattaggttgatnnnnnnnnnnttcaaagaaggaagtgtcagcagggtgcccccttcccctttaacaaagatggggcttcgcctctacaaagcggaagccgtactctcggaggatgacttgggttttttctaccacctggagagggagggggagcaagaacgtggcgttacggggggagcctagagtgagggcgggtgggggctttgggtggttggagccgagcactgatccatgggtcccaagcagtacgggacactccccaaacctcccagggccaagcccttccacccgtggcgagcagcgggtgggaaggagaaccctggagtgactggctgggggcctcctctcatccagagacttctctcctaggatggccatggtcacctgggtggcagcactgttacctggaaactgccactgcctgctcttctgtccctttgcccctttcgtggagcttttctgccagacgccactgagacagatcacaaggtattagaaggttcatacccaaaggtaggccatatgcatctagaacttcagcccagatttttttggatgggtggaagtggtttcttcctgggcttgggcttgcctttggcaaaaaatctttttccccttggccccaccggttcttgcctctggggatttaatggttccgggcccagggggggaagagcaggggccccctggggaaaaaaccacgtggtcccgggtttttgtttccttggccccaaatcttgggaacacgtgtcccacttgtggg

SEQ ID NO: 151406 - DNA, 1119 bp, Homo Sapiens
tacgctgatagcctcccaacatgctgggcgtaagcagccagctatcttgcctccagtgacacagtcacactgcaccaagaacgctcctggttccacggtgctgggatgcatctctccaggacacgacacacctgggatgatcctccccaggcagcagtcccattcaggcatcaactcctgtgtcgtcttccgggcagactcccaacccgaatcctggctcaggtgccagtgctacccaaacccagagcacccctacagtccaggcagcagcccagggccaggtgaccccgcagcctcaaaccccagttcagcccccgtcttgtggctaccccctcagtcatcgcagcaacagccgacgcctgtgcacgcccagcctcctggcacacccgctttcccaggcagcagccagcattgataacagagtccctaccccctcctcggtggccagcgcagaaaccaattcccagcagccaggacctgacgtacctgtgctggaaatgaagacggagacccaagcagaggacactgagcccgatcctggtgaatccaaaggggagcccaggtctgagatgatggaggaggatttgcaaggagcttcccaagttaaagaagaaacagacatagcagagcagaaatcagaaccaatggaagtggatgaaaagaaacctgaagtgaaagtagaagttaaagaggaagaagagagtagcagtaacggcacagcctctcagtcaacatctccttcgcagccgcgcaaaaaaatctttaaaccagaggagttacgccaggccctcatgccaaccctagaagcactgtatcgacaggacccagagtcattacctttccggcagcctgtagatccccagctcctcgggaattcagactattttgacatcgtaaagaatcccatggacctctccaccatcaagcggaagctggacacagggcaataccaagagcccctggcagtacgtggacgacgtctggctcatgttccacaatgcctggctctataatcgccagacatcccgagtctataagttttgcagtaagcttgcagaggtcttttgagcaggaattgaccctgtcatgcagtcccttggatattgctgtggaccccag

SEQ ID NO: 151407 - DNA, 279 bp, Homo Sapiens
ccggaatatttcttcttccggtttcttttcatccacttccattggttctgatttctgctctgctatgcctgtttcttctttaacttgggaagctccttgcaaatcctcctccatcatcttgagaaaaacattacagataacatatgaatatcaaacacctttatgttaccgcaacctcacgggaagactcttacaagcctaaaacaggtttgttaaaaccttcctctagtcagagttgcatttatgattcctcctctcttccggagaagaaatattccg

SEQ ID NO: 151408 - DNA, 1027 bp, Homo Sapiens
  misc_feature (207)..(215): n is a, c, g, or t
ggtcctaggtagcgaggcctgggtggcgatttcggcacgaggccaacgcctcagagagatacacctgcaccctccagtcagggtcagtgttggctggaaaacactgaaaagtcttcgctctgtctttcaccttaaattgtgttttctcaacaaatgagagagaagcttacgggggagatgcctgagagatgcctatggcgctgtagnnnnnnnnncttccctatgatctcacatgagaggtgctatgtaacaaccagtatgagtcaaatatattgaaaaaatcatcttatgcaaactttaggaattaaaaggtatttttaaaatggagagttagtgtaagctgggtcctttggaaacatcaaactgaaaaggcctgatttggaaaggtgactctgcccaaaaggttggcaagaatctgacaaagatggtttccttccgaggaagactccggaactcaggtgtggccagtctccttttcagtctgtttgtacagctgcggttctctcttaattttggacacagaggaggaacagaacagggagaaataatcattgtagagtgccaaggcaacatctgacccagatgagctcttcacttcctccttccctgtcgttgtagagccagactgggtagaagagggagggcagtgtcctcaactcatcagcctcacaagcaatttgggacccctctggggtggatttcgccaggttgaattagaaccgcagataatacttccctgttagtgaggaccaaccaagcgcccagctctgtcccttttctcctagagagctgggttccttggctcttggcaccttacccggagctagtcctggggcccttgaagcaagcttgaaggggaagggggttgttcctccccaaacaaaaattgtcaagatcttcaacctccgtggccccttcttttgggtcccccctgggccccctgtctttttttggaggggaggcccaataccccttgttttgggaagagctctggctttttcccttttcctctcccccctaggggagt

SEQ ID NO: 151409 - DNA, 974 bp, Homo Sapiens
  misc_feature (19)..(19): n is a, c, g, or t
  misc_feature (630)..(693): n is a, c, g, or t
caataattcgtgcgcctgnctgcgccagagtttcattcccacccggggcgggggaaacccacgtcttgccaattggagggctgtgtgtttttccgtaggccgtccaaagacccccgtgtttttcccccccggagtaaggggtccctccctcgggtgccaggtggctcgggggcaacaggttccaaggattgggcaggggagggaggcacccgctcagggctcttggcggggtctgcgggcgctctccccgccccctgtgttttttcccacccccttttccgacgacaccagctgcagctggcttcaaaggtgtgaaaaatgtcaaggagattttcccatgataggaggggggtaaccatgttcgcgaccctcggttctctttttgagatcctcgcctgtccctgtgacctctactccggctcccccaaattatgagaagaaaaatcccagtcctgcacaggattgaaacgctagccttctcccggctccgtcacgataggctgcttttcgagaacgggacgagaggccgagctctctgggttcctctcgcctccgtggtgttcgaggcaggtggcacgaatctcagcgccgggcggagcgcggctgccggctcctcccgctcgcgggccnnnnnnnnnnnnnnnnnnnnnnnnnnnnnnnnnnnnnnnnnnnnnnnnnnnnnnnnnnnnnnnnggctcccggcctgtgcgcctgcctgagcgcccctgcacccgcactagctcagtgacgctgagctcgtggctcctcaggctgctgctcctgctatctcagcaaagaggcggccgggagcgcctcctcggggtttcctcccccgcccgccttgcctgctgcaggttgttggctgccaaggagaaaagtctccgcttgtgcgtcaggtcgcttcacatcagtcatggcagagaaccttgtgcctgctctcctcgtgcgaaatcgccacccaggcctcgctcctt

SEQ ID NO: 151410 - DNA, 958 bp, Homo Sapiens
  misc_feature (237)..(237): n is a, c, g, or t
  misc_feature (257)..(350): n is a, c, g, or t
attcaagggggcggggctgcgggagcagtagatcaggtgtgttgtggcgggccaaaaccccacttttcccagcagcccccccttccctgcaactgtatctggtaagacataaaaaatcttctgcttataaaaatacttctgctctgtctgggagtgggtggggtaggagaggaaaggacagtcccttggggatcaggtcagccgcaggcagaggcctccgggagtgagccgggctcncaggtcacagcccctatgannnnnnnnnnnnnnnnnnnnnnnnnnnnnnnnnnnnnnnnnnnnnnnnnnnnnnnnnnnnnnnnnnnnnnnnnnnnnnnnnnnnnnnnnnnnnngttggctggtgcaggggagccccggcgggaggcggtggcgctccgcagcttctgcttccgccgcttggccaggggtgcgttctccacgctcttcaggaagaagccctcccgcttgccccggttgaatgccatgaaggtggcgttgagacccgagcgcactgcgggcccagaggactcgagcacgtcgggcgtccggagcgggggcgaggagcgcgcgctgccgtcctgcagccacgagctgccccgcagtccctcgagcttcagccgcttggcggggtccacggtcaggagccctcggaccagctccttggcttcctcggatacaccctgccaggcctccccgtcaagggagaagcgcccctcgcggattttgcacatgatctcggccgcctggctctgcccgccctggccagaggccccctggaaggggacctgccccgacagcatcatgtacagaatgacgcccaggctccagaggtcgcaggactcgtcgtagccctgctgcgccagcagctcgggggcagcgtactgcagcgtgaagcagggcgtctgcatgggcaccccgggactctgccctcgtgccgaattcgccacccaggcctcgctac

SEQ ID NO: 151411 - DNA, 913 bp, Homo Sapiens
gcattgttctcttcccagaagcttggaaggaggctgatcaataggagggagtatgggaagcccacaccattgggggctgttgcggacagtggaaactccaattcggaagtattgatgttctttttcccaatacagcatccacatattctgacaccaaatccacagcttcttctaaaaggtcatagtttaagtataaacgaagcaattcagcagcatcaaccttgtaactgtttataagccaattaggcagaggcactccatgagacaagagcttgttgattacacagtggtgatacaagttattctggactttgtacctctccaggtaagtggataatagtcgccatgcttcatctgtagcactagactccttagtagtgatgacagatgagagctgattggctgctagccaggcccaggcttctgcttgtgctgcctctcctccaaattgcaatttgatgcatttgaaggcaagcccttcaaagactggcgttaagggaagcttaaaagtctgacagagtgatatggcagtgtcaaagaggcccgcctgaaccaagagagtgaccatttcctctgctgatgaacttccagcaactgcaaccgctgatggatcatgctgagccaaagtgaggcggatgcgagccaaggaacactctttctccagatcttccagttccaggatttcaatttgtcgatttgtgggggcagctgtgcattctccatcatgattcctcttaggggatgctccagggcgatcatacactgcaccagacactggctgcacaatccacgcatattctggacgaataagtcgtaaacaattgagagcagccagataacagttgcctttttctcaagtccccggagagttcgaaccctcgtgccgaattcgccacccaggcctcgcttcctt

SEQ ID NO: 151412 - DNA, 967 bp, Homo Sapiens
ttatggaaaacatcaaaaatcagaaaccccatcatatggggcaatgagaaaaatcagaagcaatgcaaacctttcaaaccagccaagggagggcataaggaaaggagaagtatcctttccaggcccagtcctgaaatcattttggagcctctgtcttttaaattaagatcccggttgcccaaagctgatgtatgtaaggtgacctaagttgaatggcactttcccggtggtgataaatgcatgttgcctgccaagatgggctgagtatagacgtggattcccatgcccctcggatgctcaagctgtgaactgcaagatggagagtgctgtgtgggtttcaggggtttagagttctaatctggggtgcaccatttactccacactcttggtcagatttcttcacctctcagaactctttctagagccacagagtgatagagtggggaaggagatcttgtagatcaatgccatcatttgatggatgggaacactgggcttcagagaggggcagggacttgctggttgtcctaggggcagctcgaaggtaggcaggttcctaggaggtctcctcccttacagtttgccccatttcctgctgtgcatggcttttgctcaggagactcatcattgcttttcagagcaaatggcattcgttggcttcaaaggcagcttccggcccatctgggtgacactggacactgaggatcacaaagccaaaatcttccaagttgtgcccatcccttgccttgccccaaggcggggtgtccataagagcaggtggagatggttcaaagaaagagaagatatcattcatatggctggccatgtccagaacttgctgcgtcctccacatttctaagctgtcaggaggctgtcacttcaactcccctccccgatggggaagccaggcagaagcaggactctcttttcctccctcgtgccgaattcgccacccaggcctcgctcc

SEQ ID NO: 151413 - DNA, 1028 bp, Homo Sapiens
tgagcccttttcgttttgcgtggagcctactccttttggtgcaagacccatctcaaatgggtcttggggaccggggtttttgccatcaccgggcctggggtgtttcccttgggtaggggcctctctaggcccctgggctgaaccagccgtggtgttccccccgggatttccttcttgggcttgagccgggtggcctggcagggttcattcccggttgcccccaccaccaggccctgacattcctggcctgggggaccttgcccggtctgtgtacagagcagagggccctggctgtggcactcaggccagagcacggaaggaaactgttctgcagccagagagtcagaggatctgccctgcccaaagtccagaagtccagcgttcccaccccttctttcaccacttcacagctacccagaggacctggcccagagccccacccaggacaaacaccctccctccctccctctgcccacaggtcttcaaagacgcccaattcccgtctccttccccaagccagcctccctcattgcaggcctagggagctactgtctcccaggaagggaatgagagagagagacttaaccagagacctacagcaagaggcgtgtctgggaaaggggagggaggaacacctggtcactccaaacccagtcacttccatggttttgtctctgtcacggtcacctacaaacaggctctgagaggaatcaccgtagggtgcctccacaatgcccgatgatgcaggaaagaatgggaggtctgctgaacggctgccgggtcgcaaggaaccgcggcgctggagtgggtctcctgggcctggaaacgcagtagaggagtgcctcgggctgtcgacctgccctggtgcccagggttgggagagtgagatgggcgggggcggcaggggggaggtgtggatggacgactgaggtccgcagctccagcgaggacgtggaggcctaacgaccccgaggtcactgagtcagcctcgtgccgaattcgccacccaggcctcgctaccttggacc

SEQ ID NO: 151414 - DNA, 978 bp, Homo Sapiens
tgggccccgcagcttcaagcaggttcttcttgctccgggacccttgcagcctccttcgccttgaggttcttcagggcctccagctcggcctgcaggtggtgtatctgcagcagggcagagttgtgacctcgctccagctggagaatctcctgtcttttctggagaagcacttcgtttttttccgccagattctgttccttctcgtctattatggctgtccaggttagctgcctgttgctggaactcttccctttgcttccgcacctcctccagggcttgagccatggccacgctcacaatttctctttggctccattcttccttcagcttctttagttcaaattggtgattttgtaaagaacgttcatattcattcctgcattctttaagggctgcattttcttgctccagttgtctcatcccttgctctgcggtggtctggtcagctgcccgcgttctctccagggccactatctgggcttctagcgcctgggtgcgctccaagaactgctgctccagagcaaggtctgctccagttctctcacccgagtctccagggtgttaatggccttagcctggctgcttctggctgccaagagctgttgtctggtatcctccaaattctgctcagcaagtgttttctctttcaggagttcttgcacgtgttcttctcctgataagttctgttctagtctcttctccaaggatgcaaccttctcttgcaaatgtgtgataacgtcttctttctcttgagtttcagcagtgaccttttgcaaatcaatggaaagctgctgaatgagtgcttggagctcttgttccttttgttccagggctgtgatcttactttctgcacctgtttttgaagctatcacatgatctctctgctcttccagcgttgagtagtgtctctgcaattcttctagcttctggcttaagtctgcctcgtgccgaaatcgccacccaggcctcgctaccttg

SEQ ID NO: 151415 - DNA, 999 bp, Homo Sapiens
cagttcgggaacccagtattccttcttgggccaggggtttgcctttttgagtctggaatgaagatccttcagacggagggttttactttttcaacatttaaccttcaagaaagggcaggacaaattcccttcagcccctcgtttggctcaagaaggagcagccactggaattcccttggggtttcacgggactcatcaggcagttcaggagctctaaaaattgcttttcttccctgggtgtagagaacttcatccagacggtttctttgaggcatgacaccatgaaagtggcagatgaattgggaccctgctcttccacaaacctaagggcagggaaggcagtgagaatctggcccaggaacttgtgggtgccgagattgaccacagccaggctgcacattttcttcaccgtgacttccgggtgcactatgaccaggcgggccacggaggccacagcttttgccaagccctgttcggaggcactctgagtgagctggttaaaagttgtattgaggtcttcctgaaaaccctccacataagccagcaacttttcagagaggccctttcgcccccaggaacgcaggatacctgcaaggactttatttttacctggcagggagaggtctgcgtaacattccaggatcaggtggatcacctgccggatctgagactcagggatggctctgtcagctgtgctgacgtctatcactgtttccagcagcctcaacaccaagtctggctctcggaagagggccctgttactccccaggcaggctacccactcgtccgagaaggcccacttcttctcagaggcaaaaatgtagcacacttccatatggcggtccatcttctgctggatgacggccatggcaatggaagctgtgatatcctccaaggccctgttcttcagcaccgtgctcgttttcctcaggaagtccctgacacactccgccagctcagagacccctcgtgccgaattcgccacccaggctcgctcct

SEQ ID NO: 151416 - DNA, 1494 bp, Homo Sapiens
  misc_feature (231)..(231): n is a, c, g, or t
gggcttggaaaggggagaccacccccaagctggggaggcccttcggaggaatgaagggcccacgaaggttttttgccggctcaaagaaagcggttgctttcttccctgagggttcaacgtggtcgaatggaccagacccctggttctgccccgcgactcgaagggccccccgttcccgtcggggcctggacaccacgcggcttttcctgccggtcatctccgcccacccgntgggggccgcccagctggtcgatgagctcgtccagggtgttgactggcagttcccggccccagccgccgcactttgtccagcagatcctgcttcagccgctccacccgctcccaggaccccggggcccatgcgggtctctctgcaggaggcacaggggtccccggtcgtcactggggagcccgactgcatcaacgatgacaacgtcgtcatccaccagggactcgggggaggagttgaagtcgctgtccaggccagggtccgactccgtgctgctgtcgtcactgatgcggatgacgcccgctgtctcgcacgccagccggggggctttggccccgcgtccccgaggtcgccgtttccgcttgctgcccgctcctctgtcccgctttctcttggtggacggaaagtgcttctgaattagcgacaggaacacgccttcagcggccgagacgaagcagttgaggtgcccatcgttttccccccagcacttcccgggtgcgcgcttcgcccgtgggactgcagcccgatgaccacgcacttgtctcgcgccagctcctctcgggccagctccaccagccggcgcaccttggctgcgatgcacagatacttgaagaagcgctggtgtgccgaccagaactggccccacagggacttgcgcgactccaggccgatccagtcggccgcctgctggaacacgttcagggcctcggcccacagcagggccgcgcggttgtagacgcactcgaaggctggggccagcgggatctcctcgatgcggaaggtgacgccggagaagctgagctggcgtgcgatgtacatgccgctgaccttcatgtccatggccacgatctccatggcgccaacgcccctcttctcgatggcgtgcaggaactcctcaaagttccggaagggtgtgccctcgccccagatacccaagcggctcatgtagatcatgttccgaggctcagaggcacctgtggcgctggcgtagaccacgcgggccaggggcagcttgttctgcaggtctagcacagccttgcccatcttggtggagccggcattcttggctttgtgacactcgtcgaacacgatgacgccctcgaaggcctccccacaccagtccaggatctgccggaggcgagtgcggtgctggccgccggcctggctctccccaatcagggcggagtaggtggcgaagaggacgccctctgaggtagtggtgtcaccgtacttgatcttgcctcgtgccgaattcgccactcagc

SEQ ID NO: 151417 - DNA, 1088 bp, Homo Sapiens
  misc_feature (94)..(94): n is a, c, g, or t
tgctggggtttatgcccccccatggcgaaggaggccctcagggtttttcaggtctgtttgcaccacaattttgcctttggggcccccatccaancaaggggacagcatgagcagaaaggggcccagtttaccaccagtgaataataccttatggccagtcacaacccacccgggccccggccatagcgggcagccgctataacacagccatggtaggaatctaaccctagaggaaaggctaaagccccatgcactagcagctgggatgggaaacaatccgagttgctgatgtccagctctgaaatcccatgcagaagctcttctctgtcgtcggagaggtcatcttcacaactaaccaacactgggatcttgggcatcttcttggagactttaaagaaactcgtgtcccctttgttgtcagtaaagtaaatgccagccacactggtcacgaggttcccagggaacgtgaacagaaccctttcatcctccccctggttggcccaatcccaggcttgtcctcctatgagcaagccgccaccacatttcatgaacttgaccagcttttctgtcatggtttcattgtaggcatcaatacagtaaacccccagggagtctttcacttctggctcaacctttgcatccactccagagccctcgaggattttggccaaaggtgccagggatgggtgtacaccaatgggagccccaggggaagagcaaagccaccccactgcgttcaggagaaagggcgtgagctgggcttccaccaagtagtcctcatgggacacgaccaccaggcggccacggccataggaggaggcagcaatgaggacctggcccatgtcattcaccatcacaggaaatgaagcctctccaataagaagcagttcacatggaacagcatcttcgggtacatcccagcttgtcacaccattcataagggcctcgaaggcagcagagggagtcgccatggctctattggtttcaggtcaccctgctgatttccacgggggcaggtgggagcggccacgcgcctggcgcatgagaggaatgcacagggaagaggcttcactgtaccagtgactggc

SEQ ID NO: 151418 - DNA, 972 bp, Homo Sapiens
  misc_feature (51)..(51): n is a, c, g, or t
  misc_feature (332)..(352): n is a, c, g, or t
  misc_feature (906)..(906): n is a, c, g, or t
caaggtagcgaggcctgggtggcgttttcgggacgaggcagagcagtttcntgggagttcaagacacaagtaaaggacaagttggtctaccttatgccactcatccataagaaagaggcacagctttggtagacctcttcggaatttggaggtgatatgtatgtaactgtgcaggccactctaattcattcaccaggtgagctatccctgaccacaggacaccaaagaaccatgttacctgagtggtccattatcaactagagttatctgatccacctagccacaatatcaggaagcattccattatcaatggatacatacacatgtgtatnnnnnnnnnnnnnnnnnnnnnaacacggagaatcctgaggtcacaattaagttgcaggaaaagagaactcctcctcccaatatgctgactcctgctatgtggctatccttctctcatcccacacctaaggccccaagaggacttggtagaggaggggaaacagctctgttcactgatgactgcccaagatatgatggaatctgctggaaatgaacagctgcaaccttatatgtgagatggccccaaaggacagcaaacaaggaaaaagcctcacagtgggtggaatttcaagtggtacatgccattggccaatttgtctgtaagaatctaaaactgattcatgggagtgtccaatagtttcctgggatagttaggattgtggaaggaattctattggataaatgttaataaggagacgtttaaaatcaggaaagaggcatataaatgaacacctcaaaatgagccccgggggagatatttggtgacccatgtaaatactccaccaaaaggggcccggcagtctaaataacaaggtggcatgggctgtgcacatcagccaagcctcttttcacagnccgtcctaatgggctcatcaccaaagtagctgcaatggccagcaatggaaagctttggacacggac

SEQ ID NO: 151419 - DNA, 929 bp, Homo Sapiens
ccaggtgtctgtgtggaaaggccagtggggctgggggattgggggccgggatggctgggaaggactttcccaggcctgcagggttctctctttcctcaggatgaggctgctgagctcctggagcagctgttcctctagggacccccgtgcctgggggactgctctttgaagggggggcctggagggggctcaggtggcctctcctcctggccaagggtgcttgacttggagagaaagggttgatccaatgacttctggctggtgagggggttctctggcttcactgtccactcccgtgtggtggagaaggaggtagaagtgtcctggatcaactcagggaaggcccctacttcctcatacactggctcctcgtacacaggctcctccagctcctcttgctcctccacagacccctgggatgacttcattggaaagaacatggacagggtcctccggttgtgtagtcgccgcagggtctgattggcagagaggagggtggctccactgtcatccccacggataggcagcaaaggcatagtgccaaacttctgacgggcaaggtcagaggaggaatggcgtcgtaagaccactggctgctggtcatcgtgctgggctttaaggatgctggtggtccaatcccacatttcatcctcgtcagtgcaggacaagtagaggtgcatcttctctagtatcaatgtgaagccccacggtgttgggggctttaacttcttgcggattcccaggtagaccttggcaccttccaaaggccactcccgttctggtttagagcttttcttctccttgagcagcagcaggcagcggccacgcagcagaaagaacctctcctggaagcggcttcccagcaagcgaggtggctcctcacgacaccgcaaccctcgtgccgaattcgccacccaggcctcgctact

SEQ ID NO: 151420 - DNA, 1674 bp, Homo Sapiens
  misc_feature (1147)..(1207): n is a, c, g, or t
  misc_feature (1366)..(1374): n is a, c, g, or t
  misc_feature (1551)..(1551): n is a, c, g, or t
  misc_feature (1578)..(1587): n is a, c, g, or t
caacgaggggcgctagcctggcccgactgggcgagtccccgcgtcctgcccgttccgtctgctcagttccacgacacgctcccctgccgccccgcctgttcgcgggtgggtgggcgcttccctcggctccccgtgacactttgcagacgctccccggcgccgggcatgggcgccgccgccgtcggtccccgagccggattccgcgagcggtgcccctgaggccctcggctgctggggtccgcaggaagccgcgccatgaatgaccggagcagtcggaggcggacaatgaaggacgatgagaccttcgagatctccattcccttcgatgaggcaccccacctagacccacagatcttttacagtctgagcccctctcggagaaacttcgaggagcctccggaggctgcgtcctccgccctggctctgatgaacagcgtcaagacccagctgcacatggctctggagaggaactcctggctgcagaagcgcatcgaggacctggaggcaagagagggacttcctgcggtgccagctggacaaattcatctcttctgctcggatggaggcagaggaccactgccggatgaagcctgggcccaggcggatggagggggacagccgtggtggggctgggggcgaggcctcggaccctgagtcagcagcctcctccctcagcggagcgtccgaagaaggcagtgccagtgagaggaggcggcagaagcagaagggaggtgctagtcggaggcgctttgggaagcccaaggcccgggagaggcagcgagtgaaggacgccgacggggtcctctgccggtacaagaagatcctgggcaccttccagaagctcaagagcatgtcgcgggccttcgagcaccaccgcgtggacaggaacaccgtggcgctgaccacgcccatcgccgagctgctcattgtggcccccgagaagctggccgaggtgggcgagttcgacccctccaaggagcgcctgctcgagtactcccgccgctgctttctggccctggacgacgagacgctcaagaaggtgcaggcgctcaagaagagcaagctgctgctgcccatcacctaccgcttcaagcggtgatcgcaccacgcctccgcgcctccacccgggccttcctcccccgtggannnnnnnnnnnnnnnnnnnnnnnnnnnnnnnnnnnnnnnnnnnnnnnnnnnnnnnnnnnnntgggttggggggtcccttagccgggcccccaagcgcgacggcccccgaccgggccgcggccccttcccgaacgccgggaccccctttccggcttgggctggccagccctgtcctcgccgggggcccctttcctctggaaaaaccaggcaggggggtggnnnnnnnnntcgaggggggggatgtacagaccccgtctccgccctgggccccccggagggagtctgcccacctggattcccgggaaggaccttcccccacttccgggggagaacggaaaattattcccaataatttcaaattaaaaaacgcaccggcaacattttggaaatcggccgcgcgaactngctcctctccgggcgctctattgctcnnnnnnnnnnagaaaagaggtgaagggaacggggccccgggggccttagagtggtttccctgaccacccgttttctttttgcacaaagggggggcag

SEQ ID NO: 151421 - DNA, 1153 bp, Homo Sapiens
  misc_feature (381)..(465): n is a, c, g, or t
  misc_feature (575)..(605): n is a, c, g, or t
  misc_feature (631)..(631): n is a, c, g, or t
  misc_feature (678)..(728): n is a, c, g, or t
  misc_feature (986)..(986): n is a, c, g, or t
  misc_feature (1006)..(1006): n is a, c, g, or t
  misc_feature (1123)..(1123): n is a, c, g, or t
acaatttataaaacatcagccgcctgcccccgctcgcccccagctcagccccgagtggcccggcgcccgctcgttccctcctctcgcccctttgccgagtctttgtctggccccagccccgcggggccccgggtccctgtgccctcgggggtccctagaaggcgacaatggctcgagtccaggcgccgagggtggcgagcgcctgcttggcgcacagctgcccgttgagcggcggagcctgctcaggaggagtccggatggcaggggccaccgcacgaagaaggaagagcacaagagggaagaagggggggccgcgcgggcggctgaggagcgggcgcgaccagggcgggaggcggaaggcggaggcgtcggcgcgtgggnnnnnnnnnnnnnnnnnnnnnnnnnnnnnnnnnnnnnnnnnnnnnnnnnnnnnnnnnnnnnnnnnnnnnnnnnnnnnnnnnnnnnaaacggtgaccgcggggctcgggaggtgcgcggggcgggatgcgcgacggcctgccctcctcgccgagggttgcccgtctggcgcgcctcgcccggtggggatgactagnnnnnnnnnnnnnnnnnnnnnnnnnnnnnnncaccgggtcgcgccgccacacggctnagcggggacagccagcccgaagcatgcgtcgtcgcggccgtgtcccnnnnnnnnnnnnnnnnnnnnnnnnnnnnnnnnnnnnnnnnnnnnnnnnnnntgtcacgtggagcgccgggtggcggcggcgggagggcgccgctcgccataccgccaccccgcgcggaaccgaacggcagcgggttggaccggaggcgggcgagcagccggggggcagcggggagtgattccgcgccggcggcgcagaggacgcgcgcggaggaagatgcgcagatggtaagagcggagcggcctgcagaccgctgacatcactatgtatgtagtggccgccgcccctggtgttgccgggggcggcggncgaggggcgcgagttccaantaaccaatcaccccgtccgccaattatcccgccccgataggcaagcggtacagataaacgccgcgccgcagctgcaagacgcacgccagccaaaactcaccgtgacggcgggcgcgngcatatgcgagtatcgcgtgcgtgattccg

SEQ ID NO: 151422 - DNA, 1010 bp, Homo Sapiens
  misc_feature (347)..(348): n is a, c, g, or t
  misc_feature (354)..(354): n is a, c, g, or t
  misc_feature (363)..(363): n is a, c, g, or t
  misc_feature (365)..(365): n is a, c, g, or t
  misc_feature (367)..(369): n is a, c, g, or t
  misc_feature (371)..(371): n is a, c, g, or t
  misc_feature (374)..(374): n is a, c, g, or t
gagggggggccctggcccccttgtccgacaggcccaaagggcgccccaagaccccaacccattccccagaggggaagatggccccccttcggagtttttttcaatgccgtgagccccagggcaacccgagccgtgttccccaggggttgccggggaccacagaccctttttcactgtccctgcaggaaccaaattcccttcccccctgtctggctttggagtcaaccccagccccgggagatagcagtgccagccctcgagggacagcagcaagttttggagaggagagggcaccgtctgcaggcgtgcagagggcatcctgtgcgacagggtagggcccagcaagnncggggncttcctttncncnnncncanccagctcacaagcgtctggcggggatcaggagcacaggctggggacggggaggcttcgcaggctgctgggtgtgttctggtcaccacgcccaaccgtaactgccctcttcagctgccagggagggtccttggttcctgccatctgcacagccctccggatggttggagctgtcgagagtgtcctggggtttgaattgatgcctgtcgcggggccgttgatggcaccccatggggtctggtcgccagggttggagggctggagccagatgctggctggtttggacaactcttctggaccaaaggcagaggggacctggtggcactcagggtgacaggtgtccctgagggaggcctgggttgactgggggtggagccccttcaggatgacccctgttcccctccaggcccctgcctgagctcctcacagcatccgggagggggtggggagcagccacaaggtaggggtattctgagccccaccagccccagggccttctgctggggctgaagggctaagcctcccagctggccttgactcccaagaggctcaagagacccccagctgtgtacagcaaaggctgctgggatttgaaccccaccctcgtgccgaaatcgccacccaggcctcgctacctt

SEQ ID NO: 151423 - DNA, 1428 bp, Homo Sapiens
taaacacttctagatcacctgagttttttttacattcctttggtatttgcaaaataaataaaaaactacgaaacaaatatactgagatcctcctatctccatcccaacccggatgccccagcatcaagggtcgaacgggacctccattcagcccctattccagggcctgaatctccagggagtccctgcagggatctcactacctctcagctgtgttgcttcactatttgagaatcaagttctttcccaggcgaatgagaatcccaattggcctaaactgtttccagatcccccgaggctcctgggtctccacgcagcttgggtgcgacttccctggatcccgtcacttgcccacacagaagtcctggaagatgatgtccaggatctcctcggtaccccctccacctgtgagccgggtcaggtgaccccgggccacccgcagcgcctctgccgccagggccaggtcttttgactgcttgtagtggccgagggcatccaggcaaccctggaggtggtgctggtgccttgctcgggtcagcagcgggggatctgtggacgggtccccacacactgcagctagctccttcctcagcgcctccaggaggccgtccagcccctctcccgtcagacaggacagcagcaggtgcggggggcaggtcaggaccgggacctgggccctccggggacagcaggtccgacttgttcagcaccaggaggaggcgctggctgctgtcactggggctctgggctcccacagaggctacgacggtggccaggaagttgcaactggagggagaggccaggtcagaagcatccagcatggccagaatgaggtcagcctgctctagcctctcccgggcgcgccgcacgccctcctgctccacgggccccacgccctcccgcaacccagccgtgtcgctcagcagcacaggaaatccggccaggtcgactggggtctccagcacgtcacgggtggtccctggctccggggacacgatggacacaggcttccgactgagcaggttcactaggctgctcttgcccgcattggggggtccagtgaccactacgtgcacccctgagcggagcctctgcccgcgcctggcatctcgtagatgtgcacccagggccacctgcagtgcccgtacttcgatgtcggcttgctccaggaccccctcctccaggttgtcatcctcgccgaaatcgatataggcctccacgtgggccagagcctggcggggcagggagagcagaggtggtgtgtgcacccagaaacccaccttcccacacccaatttgtccagcccgacttcaggggccagaatggcggctcataggccggaagctttcacgcagggaatgaatgcgggattgagagggggtctcatgcaggggttgcacagatggggtctctgagggagagaatgga

SEQ ID NO: 151424 - DNA, 980 bp, Homo Sapiens
  misc_feature (291)..(331): n is a, c, g, or t
  misc_feature (728)..(761): n is a, c, g, or t
aaggagcgaggcctgggtggcgattctcggcacgagggggagagccgcttaggggccagacctgggtccccctgcaggtccccaggcagcagacaattccaccttccctgccccaggaccttgagagacagcagcattccaggcacagacagacttggctgcaccccactgtcccttgcaagacaggttctggagccaggagcaactgtccagccctccagaagagacagcaagcagcccccctacccactctggcctccccaatggtactttgacctccagtgtagggcnnnnnnnnnnnnnnnnnnnnnnnnnnnnnnnnnnnnnnnnnattttggaatttgtttctcataatacagaatatatagtggctaccttgtatcttggtctggattctctctctgagaccccggattttactttctctttggagggcgctgggacatacatctctcaatccagcttcctccgcatcctcccatcttgccccatttctgccacgtcagacacttcctgagagtctcaccttcaaaatgacaccgctgcccatccattgctcaatggtacagagtgtggggtcagtccaccacccttgacctcccggcagggcaaggtggggaggcggacccaaagcagtaccagcaggacttgttgccagtgataccaaaacagacttttcccaagcagtgcctcacatgtctgctggtgtggctttgggattctcctgnnnnnnnnnnnnnnnnnnnnnnnnnnnnnnnnnnaagggctttgctcacacctgaaaacagaaaggaggaagggggatcccataggaatatgggccccgcgaggggaaaatcatgcaccccccaagcccaccaccccccagcctttcagggcaattctcctgggctggaaaaagacccctccaaaaagggggaaacagggctggcccccgcccctccaactgcatccgaaccccccatccttctcctcgtggg

SEQ ID NO: 151425 - DNA, 995 bp, Homo Sapiens
  misc_feature (43)..(43): n is a, c, g, or t
  misc_feature (178)..(178): n is a, c, g, or t
ctttccacccccaaccctggttaaggctggttgcccaggcggntgccaacttccagggcccaggggtgacagtcccccctgggaggccccagtgcctggccggggcagggctgctcgggggttggttgggtaggaagccacgcacagcacattaggaagcttaacgcttggaaaaagnaaaatgcatctccatcagaaaagggtcataggtgacacacagttggaaagaaaaaaataataagttcccttcagaagaccccctttgctcaaaaaaacccttgatttcccctctgtgggctttactttcctttttaaaatacgttgctctttccgggaagctgctgactcgtggctatccccgtcgcaaggtggacactgaggaatgagaaatgactgcggtccccctccccgacaggtggtcctgggcctcccccaaggacagcccttcttggtcccctgtgatgccctcactccgccctgccctgccccatgcttctggttttgttagtgtgtgcctgacgcggggcctgtcctggctttgttcctagtggggccccctggtgaggcactccagctagggtcgaagtggacgacatgtgttgcaatccactgtagggacactcacttccagaaagggatgtaggacaggggtcttctgggggctgggtgccccccagctgtcctgcaggccagggccagggccacgtgcacacctggcttgaggagcgcatgggagaccccgggaggtagaaggcagagtgccctgcctggcggtccgtcgacagggcggggaaggggccctggacaaggtagaggtgggcagtactggccagaggggagctcagacatccttagaggcaggagttggccgtgaaaaagacatggctcaagtggtctcttcttccagtgtcaggacccctgaagagctctgctgggcctggagagaccccgaggcctcgtgccgaattcgccacccaggcctcgctacctttgga

SEQ ID NO: 151426 - DNA, 930 bp, Homo Sapiens
caagaatgtaaagggcttgcccccacggaccccccttccatgggggaccggcacatggtaggaccatgcggtctttttcttctttgaacccgccaacccccccaccccagggcaggagtagggcttcttccccagagttgggacagcttgtgccgggttaagatgatacacatcacggaagatcttgccgcagatctcacaagccacctgcttcctggtccggctcctctttcgggggccgtcggggtcttcagagatgggtagcccattctcacccagcctcggaggaggaaggtcgatgtagcccagctggaggctggtgacaccgtgctgggcctcgtgctgccggagccggttggcatcagtgaacaccttaccacatagaccgcatggaaggatgcctgcctccctcaggccccctggggacccaaacattgagtccagcaggttggccttccttgggcggccccggcctcgcttgccagtcaggggaggggcactggatgccacactggggaatggggaagtcagcagttggggggataggggtccagccaccatgggcaagcggtccaccccaggtaacacaggcaaagaggcttggcctgcaatggctgcaccagccgcccgagctgcctcctcctctggctgcatgctgccggcgatgccattgctgttggctgccaaggctgccccgttggtcatgtccaaagggaagcccaagtccgaggtcccaggggggcgaaagagcattatatcggcgcgggcagggggtaccaggatctgtacgttggactgtttgatgacttcctggcagatctcgataaccgacctcatcagcaggaacttggcggccgtcatgagttcgggaaagctctccaagcgcaccaccctcgtgccgaattcgccacccaggcctcgctaccttgg

SEQ ID NO: 151427 - DNA, 938 bp, Homo Sapiens
ttccgttccatgagctgcaggggcggtcacccagctccggggcacatttcctcaacagtctctttgaagggcccaaggccaggctgtatcaatgtggcagtggcctgtggcatgaatggtgtgttggctttcacccccatgtgtgccaatagaacctggagtccagggcctgggccactgggaaggtctcgggctggcgcagggtcacacacgttcaccatctgattggctgtgtacagggcctggaagctgcgctggttgtccttcccgaggcccttggctatgcccagcagcagctccagatccaccaggagcatgtggacatcccggtggaacacagcctagctcagcccggctcagctggaacatcttctcagggtcaggggctgcaatcatgcttcccttcccggcccccaggagcccattgcaggctacttccacatagagagtgaggccttcgggggtctctttcccccagcctgtcagtcaggacatagctggtcttctcaccctctttggttaaaccctggacaggttctccatcacgccacaccagaccttctccatcactttcccagcaaaggtgaacttcctggcccacccatgcctctgggatggtcagctccacccggaaccagcaggtccaccatgtgggtccgaagctgtcgccgacctgcgcggggcggaagtcccgctggactgcctcctggtagggaagtctctccggcgtcaggaagctggagagcacagccacagggcagctggccccaaaaagcctgccgcggaggttacagtcggtaaagtagagcggcgacacgaacttctccacccgctccagcgtggtgcgccagtgcttcaaggccggcgcagccgccatcgccgggctctcgctcctctttcccctcgtgccggaacgccacccaggcctcgctaccttg

SEQ ID NO: 151428 - DNA, 718 bp, Homo Sapiens
  misc_feature (547)..(547): n is a, c, g, or t
  misc_feature (586)..(586): n is a, c, g, or t
ttttaacaatggatattctgtattatattctgtccaaaacaagactattgccagtaatgtatacaaattgtctttttgtgtacttccagcataggtttggatatatgaacatttttcttttattgttttatcttcacagaaaataaaaggtgttaatttgctttttaaaacaaatttaattatcacattttaaattactttgtggactgtgttttcaaaactttgcaaattcatctgttacacagaaaattttgacttaaaacatctgctgaattccaaatttctgtaatagctactgtatctgtgataaactttcctatatctttccttgccatttctatggattttataatgaaagaaaaaggcactggagactgaaggcagaaatggttgtgacagtgctgtttggctttttcattcttcaaatgccaagtcatccactttgttttcctgtttaggctttgcacaaatacaattgctttcaggaatcctaaagcagcattttattgagtttgaattattaaaggtacagaggaaatgtggtgangtagaacttttcctaacacaggtatctaggaagtaagtnctgagttgattttctaggttcttacgtatttgaaaaataaaattgcaattcgagataagtgcttgagcactctacttaagtattctctgtgttttatgaagagaaaatgatctgattttccccttataactt

SEQ ID NO: 151429 - DNA, 964 bp, Homo Sapiens
  misc_feature (37)..(37): n is a, c, g, or t
  misc_feature (238)..(238): n is a, c, g, or t
  misc_feature (281)..(281): n is a, c, g, or t
  misc_feature (302)..(302): n is a, c, g, or t
agttttcactgcttttcgctgctctcggggttcccancctaatttgattactatttttagcccccattttcctgctttgattcttgctgttctcagggtagcagcaacaaggcatttctgagacatatggctgcaaactccatactggctacaggaatggccgaagactgcccatcattataaccagtattctgtatagactgtgatgccaaaactattttacgatgatagccttganccaacaatagactgtacaattccttttttgctgggaaggcctntagtttcttgttcagaagtcnccttattggcagcaatgcagcattcagccagccgtagccagaggcgaggatttgcatgataaacctgaacagcttcaatcagacattcgaaggcagcaagaggccttccaatgtgaagaagctgaattccacagttatacagcaactcatatctcttattggttagtaacgtacacatgggtcttcctgaaaattttttacctggatcagtgctacctgcactgagctgtgcacagacattgtcattctcttgcagagcctttttaaagtagaatattcccaaattgtgcttgctcatggcaaaatggatgcaaccaaggttattccagaacatgcatctcaagcattcacctgttttcatgaatcctggatgctcagcaatgtttgaactatttaatagcttcacggcttttcgataattacctcttaagtactcaaaattgcttttaagaaagagagagggtgcggaatttccagctgtattcatgactgacttgatttcccttttacatgctttcagagacttcatttggatataagctcgtactttgtactgatgtatctttgattttgcagcttctattagagctccactttcagctttatgattagatccatctttgttgttgcctcgtcggaatcgccacccaggcctcgctcct

SEQ ID NO: 151430 - DNA, 1098 bp, Homo Sapiens
  misc_feature (78)..(86): n is a, c, g, or t
aaggggggtcctcttaaaaaagggcgggtggggggccttttatagggagggccccctttgggatcctcaatcccgcannnnnnnnnttactttcccaggggtttccggttccaaaggaattgttttgggccccttttggttggggtctcaggaggggtaggggaggcctctcctctgcagaatgagtgcatgctggagagggtggggcttgagtcgtccagtcgtctgcaagatgatagcaccccttcttgatgaaggtggcctggtcctcaaggggtaagcttgcccttccgcttcttgcggtagcagatcatggcaatgatgccagcaatgagcaggatggctgcgaccaccacggccggaatgactgtgtgcaggtagacatcatcctcactgctcttctcagggtccctgtcaggcacttctgtgggcggcgcctctgagggcactctcctgggtggtaccacagggataaactgtaggtgccgacaactgccagagcccgtcacagtgatgcttgtggccttaaagtcaggctctagggcgttggagaaggcaggccgaggttttccatcatcctcagcgatccggcggctcagcccagcgatctgctccttggggcagggctccaagggcagtgtgttgttggtccattccaccacgatggagccccgggtgatattctgcagggtgatggtgctacagtttcggtctccaaaggcgaaggccagtttctttaccaaggcaatcttcttgtggatgtcattcaacaccagtgccgggtcacccacaaacttggccttgaaccttgcaggagccctatccccttgggggcgcctgtggacgtggatctcgaaggcatccacagccgacaggccccccttgtctgtggcatgcatgaaatactcgtgtttgcccacgtggctgctgtcgggaaggccatacatgagctggctgttgctgttgaactgtacccaggacttctcgcccaccagctgctgctcccgcagtttcagggtcagcttcagcttgtcagtggtggtgtcctcatggtcatagaaagtgtctgaccctcgtgccgaattcgccacccaggcc

SEQ ID NO: 151431 - DNA, 914 bp, Homo Sapiens
aggcctgggtggcgaattcggcacgaggaaacaaccggtaccccaatttacaactgcgggagattgctggacatataatggaattttcccaagaccagcatgggtccagattcattcagctgaaactggagcgtgccacaccagctgagcgccagcttgtcttcaatgaaatcctccaggctgcctaccaactcatggtggatgtgtttggtaattacgtcattcagaagttctttgaatttggcagtcttgaacagaagctggctttggcagaacggattcgaggccacgtcctgtcattggcactacagatgtatggctgccgtgttatccagaaagctcttgagttttattccttcagaccagcagaatgagatggttcgggaactagatggccatgtcttgaagtgtgtgaaagatcagaatggcaatcacgtggttcagaaatgcattgaatgtgtacagccccagtctttgcaatttatcatcgatgcgtttaagggacaggtatttgccttatccacacatccttatggctgccgagtgattcagagaatcctggagcactgtctccctgaccagacactccctattttagaggagcttcaccagcacacagagcagcttgtacaggatcaatatggaaattatgtaatccaacatgtactggagcacggtcgtcctgaagataaagcaaaattgtagcagaaatccgaggcaatgtacttgtattgagtcagcacaaatttgcaagcaatgttgtggagaagtgtgttactcacgccctcacgtacggaagcgccgctgtgctcatcgatggaggtgttgcaccaatgaacgacgggtcccaacaggtgccttaataaccccctggatgaaaagaacccagttatgcccaaccctacgtggttccc

SEQ ID NO: 151432 - DNA, 1294 bp, Homo Sapiens
  misc_feature (1069)..(1161): n is a, c, g, or t
tgatcatgtgcttggttgtatgggtcttttcgcgtgcctatccagcttgccgccgtgggggtaacccgctgcctctgtcacgggtctcgttgagcatgtcgcctgatccttgggtggcgccttctgcgtgggtcctgtgagccactgattgcttggggggccccggcccctcgggccccaaggggcctcggaccagggggaccctgctgcatgaaggccagctttgtccttggtcactccggtttcaggtcaatcccatctgtgcttaaggtccttgaacggagcggggcacctggctgacggaggtgattttccgggctatgccttcccaaatcttgtccctgtcagcatggacagccgcatggtctccctcccaaagagcactgcttcatggtgggtcacctctgtgacaagaatgtccagctgcctccttggagaacttgggcttcctcttacgctcagccaggtgtgccacattcctcatccagttggctttggtctcgtctgagccatctatgggacttatagcggttgttcttgtccacaatcagccaggagaagaagccagctgatttgtcctgggtggagatctgcccctcataggggccgaagatgtggcccttggggatgacctcgtttacacatcgcacgtcactctctccactagtgtccttgaccacctccatgccctgtgggatggtgagcgccgcccggtctgggatgcccacgggcaccggtgtgtcagacacaaacaccggggggccatggtttgggcattcatccacgaagtactcctggcaggactcacagaaccagaagtccacttgctggaagcttttgggcacgatgaggtcgcgcttccccttcagtttcttgggctcaacttccatggccgaggagtccggtctcctagagcagggctggccatactcctggtctcggagtggtgagcagacctccgtcttcaccaccgtcaccatatcccccacggctgcattggtctgggccaagcactccttcatgttctcggtcattctgtccttcccgggaatgctgcggcagccgcggnnnnnnnnnnnnnnnnnnnnnnnnnnnnnnnnnnnnnnnnnnnnnnnnnnnnnnnnnnnnnnnnnnnnnnnnnnnnnnnnnnnnnnnnnnnnngcgcgctggtccccggcgaggcaaagtttcagcgccagcctcggcgcggcggcggcggcgactcgatgctgctctcctcccctcctcgtgccggaatcgccacccaggcctcgctaccttaggaccgtatagg

SEQ ID NO: 151433 - DNA, 969 bp, Homo Sapiens
cctggtacgcccccgggattacgggatcttcaagcgccggcggacgcagcagtccggacccaggcgcgcccctcccgccccagaccaccccggactgaccgcccgtgagggcgaacatgccgcgctccttcctgcgtgaaatactgcacatccagccacgagtggtccccaactagcggtggctggagacgcagagagacttcattggtgcctgctctggcctgtggggggctggtggtgcccctccttccccgagacaaggaggccccttctgtgcccggtgaccttccccagccctgggaccgctcctcggccgtcgcctgcatctccctgcccctcctgccacggatcgaggaagctctgggggcctctgggctggactgccttggaagtcagcgaggtcgaccctcgggccagccgggccgccattgtacccctcaaagacagcctgaaccacctcaacctgcccccactgctggtgctgcccacacggtggtcccccgacctttgggcccagaccgtgcacggggctccggaaaaactgcttggggcctgagctggatgccccgagccccggtgcggctttgagtgctttcactgccacaaaccctaccaacacgctggtcgggcttggccaggcaccggcagcttgcaactgccaccttgcaggttggggcgtgtcttcaccttgcaagtactagcgacaaggagtacaccagccttgggtgccctcaagatgcacatccgcactcacacgctgccctgcatcttgcaagatcttgtgggcaaggccttctccaggccctggttacttgagggccatgtccgaaccacacaggggagaagccctatgcctgctcgcactgcagcagggcctttgccgaccgtccaaccttcgggcccatctgcaaacgcactcagacgcaagaagtaccggtgccgggctgaccaagacttttcccgatgtca

SEQ ID NO: 151434 - DNA, 938 bp, Homo Sapiens
  misc_feature (27)..(27): n is a, c, g, or t
  misc_feature (45)..(45): n is a, c, g, or t
  misc_feature (55)..(55): n is a, c, g, or t
  misc_feature (78)..(78): n is a, c, g, or t
tgtcaagagggtcatcctgatagctancccaggcaactcagtccntttcagctcnttcagcagctgctcagggtgaancaacagctttgctccagctgtgaaccatgtctccagctgttccaacccgtggtcaatgggagctctgatgcaggcttttgctgctggggcctccacttcctccaactttggcagcagtagctcgattagggtagttaatcggcctagcagtgctttggaggcatccagcacctcctttctccttttgtccagttcattgagagtttcctgcagaatcttctgctctttggtctgatgggggtccagagagggtgtcttccctttggcctggatcttatatcggaagcagaagacatcctgctggtctttcagttggctgatggattttaccagcttctccctcatagcctttaaatccaggatccgggattcaatctcatgttgctggctctccacaggtgtttcgagaactggctctccttgttccaattgggccctctgagcctggatcaaaattctttttttcttccagaaggaggttaaagatcatctcagccaactgggtaggatcctgggaaaagggctgaatgtcccggcagaatttccgcaaattgtgctgcagcaacaaggactctgggtcctggctgcaacgggcacactcatagttcagctgatccaagaagtggaagaatagcatggtagccttggaatcatcactcccaagtgcagcttcctgccagttctggtcttcaatccagacagccaagtactgtcgaatgtccacaggcaggaggctgtgcgagtaaagctggtgcagctgatcctgaagggggctgtcaagattctgcagcatttcccactgcgccatttgggctctgattagggttgcagcctcgtgccgaattcgccacccaggcctc

SEQ ID NO: 151435 - DNA, 1674 bp, Homo Sapiens
gtcatctagaggatctctgtggaaggggtctcacactgaggaggcatccgcacaggaggtggagcagctggacttccgagactcctgggaagaaggtgagtacaaagaccctatcggaagacgactgaaggagatcccagccgagcagatggatttccgtgccaacctgcagcggcaagtgaagccaaagactgtgtctgaggaagagaggaaggtgcacagcccccagcaggtcgattttcgctctgtcctggccaagaaggggacttccaagacccccgtgcctgagaaggtgccaccgccaaaacctgccaccccggattttcgctcagtgctgggtggcaagaagaaattaccagcagagaatggcagcagcagtgccgagaccctgaatgccaaggcagtggagagttccaagcccctgagcaatgcacagccttcagggcccttgaaacccgtgggcaacgccaagcctgctgagaccctgaagccaatgggcaacgccaagcctgccgagaccctgaagcccatgggcaatgccaagcctgatgagaacctgaaatccgctagcaaagaagaactcaagaaagacgttaagaatgatgtgaactgcaagagaggccatgcagggaccacagataatgaaaagagatcagagagccaggggacagccccagccttcaagcagaagctgcaagatgttcatgtggcagagggcaagaagctgctgctccagtgccaggtgtcttctgaccccccagccaccatcatctggacgctgaatggaaagaccctcaagaccaccaagttcatcatcctctcccaggaaggctcactctgctccgtctccatcgagaaggcactgcctgaggacagaggcttatacaagtgtgtagccaagaatgacgctggccaggcggagtgctcctgccaagtcactgtggatgatgctccagccagtgagaacaccaaggccccagagatgaaatcccggaggcccaagagctctcttcctcccgtgctaggaactgagagtgatgcgactgtgaaaaagaaacctgcccccaagacacctccgaaggcagcaatgccccctcagatcatccagttccctgaggaccagaaggtacgcgcaggagagtcagtggagctgtttggcaaagtgacaggcactcagcccatcacctgtacctggatgaagttccgaaagcagatccaggaaagcgagcacatgaaggtggagaacagcgagaatggcagcaagctcaccatcctggccgcgcgccaggagcactgcggctgctacacactgctggtggagaacaagctgggcagcaggcaggccccaggtcaacctcactgtcgtggataagccagaccccccagctggcacaccttgtgcctctgacattcggagctcctcactgaccctggcctgggatgggctcctcatatgatgggggcagtgctgtacaggcctacagcatcgagatctgggactccgccaacaagaagggggaagggactagccccatgccgcagccccctcttttcaacgtccagaaccttgctgcctgaccacaaatataaagttccgggggccgtggcaatcaacggggtatgggaacccaggaagcccaggcccagggagtttgaacctcccaccggggaggg

SEQ ID NO: 151436 - DNA, 983 bp, Homo Sapiens
  misc_feature (907)..(907): n is a, c, g, or t
agaggcaatttcttaaaagtcttttggttttcctaagggcctttttggggccttggccccctgtgccaagccccaatcctccgggataccccttggcaatggtttctttccgtcaacgatcacaaaaggctctgccatgactcgagttcccgcaggtgcgttcccccacagaactcaacagaagtcagggagccagcaggcccagaggggtcatccagcaactcggacaccgggacccccaatggagacgactcgcacagggtcaggataggtctcatcaaacacagcccgtagggccctggatggctttcgctgctgccagggggcaatcctgggtatagacggccttggctgcctcaatcatctcattagcaatctcttcagccttcttgatctgttgggtggacatggctcccttggcagtaaagtcaaatctgaggcggtcaggagcaaccaatgagcctttctggtcagcttccccaagcactgagcgcagggcgaagttcagaatgtgcgtagctgtgtggttgctcatgatgggtcttcgtcggggctcatcaataaacagccagacctgatcccccactttcaggtcaccgtagatggttccaatgtgtagcacataccctcctcggacctgagcattcttcactgtaaactctgttttatcttcactgctgtcatccaccttcaccaggtagccttcgtcatagatctggcctccttgctcagcatagaaacaggtcttgtccagcaccactccacactcctggcctgtggacacctcttccacgaacatcttctccctgcgcagagccatcaccgtagccactgtgttctcaaatacatagctaccactggagtccaaatggtaattgtactttggggaatcatctgtgacctccangaccccgtgcccggagctcttcgatagcgtaaatgtcccctcgtccgaattcgccacccaggcctcgctaccttgg

SEQ ID NO: 151437 - DNA, 989 bp, Homo Sapiens
cttccactagctggatctatctctcccattttccatggctctgatgtcagggccgtaacttgcagtctgtcttgggaatcacactctccatgtctttgtctacttcatcaaaaaccattgcaaaactagtaaaattatacatctgggcagaatttggaggccgtggggctattcgccatagaagaacgcttccagggataatgaatacactttcagaatccggcactggcatttcatccaactcctcagaggtgctcatctgtttgctgttcttcttctctttctgtatttttcttatcattttttttgtaagcgtcaaacgtggcagggtcaacactgtataaacattcagtccacttcccatagagggcacagagcttctttttgcttttatcttgaatgtagccttcaactttgtgtaattccttaccaaaaaggccacatggcttaaaattcaacacacatttgtccccagtcttgtggtttataatttccacattgccatactgttcgatccacagtttacccacaatgatattatgcacacagcaggtgggatttgtccatgtatatgcctcattgtgttcaaggagctccaaggtgatggttcctttgggttctgcttctacactcttcccccagaatttcagtttgggatagatagagccatgaaagatgaagtcattgtttaatccttcagcatgaaatgcactgattggtgggtgatggctgacctgttcggagatgagtctaaatccaaggtcatctcgcactaattcataagtctctcccagcagtgggttgaaaggttttccagtccgttcccactgagaagcaacagcagatacagcaaacgcagctacacactgcatcctttccacaggatcagagagtgaactggccttgtggatgaggtaagtatgctccatgtattcagttaggcgctgtaggaagctcagaggctcattaaatataactggcatcgtgat

SEQ ID NO: 151438 - DNA, 1364 bp, Homo Sapiens
  misc_feature (71)..(123): n is a, c, g, or t
  misc_feature (162)..(162): n is a, c, g, or t
  misc_feature (174)..(174): n is a, c, g, or t
  misc_feature (185)..(185): n is a, c, g, or t
  misc_feature (303)..(342): n is a, c, g, or t
  misc_feature (508)..(581): n is a, c, g, or t
  misc_feature (1228)..(1279): n is a, c, g, or t
cgaaactaaagggtaaccggctaaacgcgcgcctacagggagtgagagcgtcaagcggggaaaggggcgtnnnnnnnnnnnnnnnnnnnnnnnnnnnnnnnnnnnnnnnnnnnnnnnnnnnnnaggacagttaggggggaacaataaaaaaggtgcatgtgnactcaaggtaanccgcggcgggncggagacccaatggcggggtaaacctggggggggccaggtgcggggaaccggatggggaaacggggaatagtgctacgggggtgggtggccgaaaataccggaacctgtgttgtatannnnnnnnnnnnnnnnnnnnnnnnnnnnnnnnnnnnnnnnacccgggcgcgaaggacccgcgccaagcacgagggggccaaaaggcggaaaaaaaccggttggaaagaaagagtgtatgcgacggaaaaaaagcgtggtgaaagcggaacggttgaatggagcagaaaatggcgcaagagtggaagggccacagaacgtaagagcnnnnnnnnnnnnnnnnnnnnnnnnnnnnnnnnnnnnnnnnnnnnnnnnnnnnnnnnnnnnnnnnnnnnnnnnnntttaaaggactgggagagggggcaaggggaaccggcgcaaagaatgatggaacccggaagaatgaacgaaaggtttcatgggatctagtgtgctccttaggagtaggtacaggcttggtacgtgtagtggtacaggattcttggaggcagggtcagagcctgacagatgggccgctgcaggaggggcccggattgaggaggcgcttgtggtgaggctgcgaagggctgggggcgccatcacggggccgggtgtgatggggctggtcagggtgggcaggctcgccatgatggcaatgccggagaagagcacagcagagacgaactgccagaccctgagccccaaaggctcccgaatggtaaacttgatttcattgcctaagacctggctgatcttggagcgatgcacctccccgtcgtcatcctccccgcccacgccgaggatcttgcgggtcttcaggcggctcacgaggtccgtctggctgtgcttcttcatcagaggcgggggctgcttggccgccatcttctcctccagcccggcctctgcagaaggggggcctcgcgcgtgccggcgctgggctacgtggagctgatgccaggcggaggctccgggctcggacgcctcacatcgcgccgcccgtgccgggccnnnnnnnnnnnnnnnnnnnnnnnnnnnnnnnnnnnnnnnnnnnnnnnnnnnnaccgggccggcatcccagaaatgccgggccggtgccagccgacatagaaggagaggaacgcgaggcggccgtacgtcgtgggggg

SEQ ID NO: 151439 - DNA, 1042 bp, Homo Sapiens
  misc_feature (189)..(189): n is a, c, g, or t
  misc_feature (278)..(291): n is a, c, g, or t
gggattagaaagcacccccttcctcctggcatcgaaaggtgggggggcgcccaagtggaggagacccctgtggggaggccttgcaccccttggtggcacccccaaaatcttttcggaagtgaaccggccttggctggctccccacccttccggacccccaggggggcggagggggtattgagcaccttncccggggcaatcccgaggctggaaggagggtctgggaagtgaatggctttgccagccaggaaatgtttctgagtgcccccgaacaagcnnnnnnnnnnnnnntcacggtgctcccaacagaaacctgtgggcttctgggcggtggcttccttttgtatttgactctgccgcaactttttcaacaacacgagttttgcttcttctaacctcaattcttccttcagctgcttgatcatcctttctcgttcttcaggactgcttttcatgagggcctcggtgctagtctccttcaaggccaccgtggtcagcccattcactctcgggctcgagggctgctcgttgtcggagagcacaatcacgtcaggtgaggggggtctcctctcggacttcatgtcactgtgtgaggtgcgcatgtccacgggcccatcgcccaccagcccttcgcctctgcccatggccatggccgtggcctctgttgccctcagcaatccttgggttggacctgctcccggctcaggtgtcaccctcatgtctccgtcagtgtttaaatctgaagccaacaatcctctctccatttttattttcttgctctccacatcgtcctctgttgggtcccgttcaagcgctcgtttctgactccgtgttcggcatgcttcttcggtcattctgaactggcttcggggtatggggtgctggtcctaccagttggccatggccacagtgacatcaaaaggctacttgagacaatgtgctgaccaaccgggccgcgggtcggccgggccctagggcagcgcgcaggaaagggggctgctggtccgggctcttctgaatcgccaccccaggcctcgctacc

SEQ ID NO: 151440 - DNA, 710 bp, Homo Sapiens
  misc_feature (88)..(88): n is a, c, g, or t
ggagccacaacctcttatctctttgcaaagcagcctgttcaattcctttatcaaaccaacaccagcaacaataacaagaaatttttanctggtatcaatagtggagactgcctgtgttctgtgcataagagttgggggagagtaggagagggctcaatcttacaactggagtaattcttcagtagacaagcttttcaggtgcgcaagtctctttggggttatgttgttcagatcagcttacattttatctgaaaggttcttcactctttcattatcatgcttcatccactttctatcttccagaaatatgctgagatcctctccacttataaccaaatcccttcagttttctttgctgagatgtgtcagttcctttttgcatttcttgacttcaatttcagtggggcctggggagggagggaaggtaaacttatgtttactccattatctcaaattagaaattccagtggaggcttttagacacggaagtaacatggataactttatattttaaatatatccccgggatgtactgctaaaaatatattaaagagggcaaggatggatacacatattctcaaagatggaggatctaatttcctctctgagaacatgcagtgtttgggatctctgggagtcaggcacttcactgaaatagtccatcattcaaaatccaacaaactagagaacactttcatggtaccctagaa

SEQ ID NO: 151441 - DNA, 1369 bp, Homo Sapiens
  misc_feature (44)..(44): n is a, c, g, or t
  misc_feature (70)..(70): n is a, c, g, or t
  misc_feature (82)..(82): n is a, c, g, or t
  misc_feature (114)..(114): n is a, c, g, or t
  misc_feature (201)..(201): n is a, c, g, or t
  misc_feature (245)..(245): n is a, c, g, or t
  misc_feature (274)..(274): n is a, c, g, or t
  misc_feature (424)..(424): n is a, c, g, or t
  misc_feature (551)..(551): n is a, c, g, or t
  misc_feature (557)..(557): n is a, c, g, or t
  misc_feature (561)..(561): n is a, c, g, or t
  misc_feature (564)..(565): n is a, c, g, or t
  misc_feature (568)..(573): n is a, c, g, or t
  misc_feature (575)..(576): n is a, c, g, or t
  misc_feature (578)..(579): n is a, c, g, or t
  misc_feature (582)..(582): n is a, c, g, or t
  misc_feature (665)..(675): n is a, c, g, or t
  misc_feature (715)..(740): n is a, c, g, or t
  misc_feature (800)..(836): n is a, c, g, or t
  misc_feature (981)..(993): n is a, c, g, or t
ggcgggaaacgggcgaggatgaggtgacgagcgtgcaattgcgnctatagaggtgagccgacgaggttangtgagagatcancactaatgttaagatgcgcgcgagggttcatnctcacgtgtagcgtacgccagaggcaacgacggtagttcgtgaggatgagggagtgatatcaatcacagacgtcgagctgagaatanctgaagactgcgagatcgtgcgagcgcgcgagactctcctttcntatattgtatgagtcgtcgatggtgcggngagagtcgcgacagtgaagaggagcggatatagcggtatgataatgtgataaaaaatcgaagtgagcggcgcgaccgcgcttagcgctacgtttgcgaaagagctggcgtggaggagcggcgcgtacatacgagtcgggacgcgcaacanattgcgggcgaggcggggatgataaataatgagaagtgtgtgatataccatagaatcagtgtattccgagttatcgcgccgattattgctgttcgtttgctggggggtggtgtgtttcagtagtatnggcggnttcnatnnctnnnnnntnngnntgnccgggggcgacggattagtggccgcgggacgttggtgggcgtatggtataggacggtgggggcgggaggttaggtgagacgtnnnnnnnnnnntgttataggtggttgggtagtgtgcgcgggtagattgcannnnnnnnnnnnnnnnnnnnnnnnnngatgacgctattgttggtggagttgttttggtgggtgtcggctcggtgtgggagtcggtnnnnnnnnnnnnnnnnnnnnnnnnnnnnnnnnnnnnnagagggtgcaattatcaaaggggagtgtggtcagtgggcgggcggcgccatgataagaagggtagagaataaaaagggggggaggccggggcttgtatatttgtgcaggaaggagcgcgtatcgcatccacaatcactccccccnnnnnnnnnnnnncgggaaaaactgtggctcggccgggttttgggtgggcgtgccttaaaaagacgaaaattagctccttgcagtcaacaaaactgcttgtcctgtgaccacgggagagaataatctgaacaatttcaccgggtgatcttcttcctctctttatcagggagagtgatgtaccatttctgtagccgtaatttcccttgtcgactgaagagcaatatgaaatgtatcatcgtggctgggccgccgcctcccccgccttgcgagcaaggagcgctggagaagcgagggcgagaggcgagcgctggagccggtgcggtttgcaatgaggcgcccggcttagcagtcagcaaattcgccccccaggcctcgctccttagaccgt

SEQ ID NO: 151442 - DNA, 973 bp, Homo Sapiens
  misc_feature (617)..(617): n is a, c, g, or t
  misc_feature (683)..(683): n is a, c, g, or t
  misc_feature (685)..(685): n is a, c, g, or t
  misc_feature (727)..(785): n is a, c, g, or t
  misc_feature (830)..(838): n is a, c, g, or t
  misc_feature (963)..(963): n is a, c, g, or t
aagtgtgggggagaggggacgatacagggtgtgtgtctgggagtgcctgggggacagggaccccccggtggtcctatggcaggatgagaagggagggacttggctcccccagagcccggtggaagctactgttctctccagtgtctcgagcgtagccaaaataaggttgggaggctcccggcctgtctgctgtggtctgagctggctgcaagcccaggtgggggagcgagtctgggaagattggctttgactctctgttgccagaggagatgccatcccagcacggcccccactgtagtccaggctcgtggtggcagcgggggcaaggggaggggcaaggctgcccccaccccacgcaccaagtcacgccaagtctcagcaggtaaaagcacgtgagcctagggcgagcggagggagctcctggtggccccgcaggtcaggaggggaaagcagggctcagagggcatcgtggccccagggcagggtcctacctgggggtcaggagcaccttgggcttgatgattgaatgatggaaagaatggaactgggtttgaacctccccagctttgacttcctggaaattttttttggggagacgaaccacccccccgggaaangttcccggtcacccagcaaggccctggaggtgggaaggaggtccctctaaaagagaccgtgcgtgnanaaaggggtgccgcgccatagatccggagcccatcgcgtcccnnnnnnnnnnnnnnnnnnnnnnnnnnnnnnnnnnnnnnnnnnnnnnnnnnnnnnnnnnngtgtttgtggggggccgcggagggccggcggggacagtattttcnnnnnnnnnccgcttcggtgaggaaattccctcccccgccgttctccccccggcgggggtgcgcaagcactttctccaccgcagatccgccggccgggccgccatgcctacatatgctgttgtacggtgagcgnctgaaagccg

SEQ ID NO: 151443 - DNA, 980 bp, Homo Sapiens
  misc_feature (284)..(284): n is a, c, g, or t
  misc_feature (920)..(920): n is a, c, g, or t
tggggtggcttctttcccgggggcccccgggccctgggttaggccttggggtttttcgggtccccccttagaaggcctccctggcggcccttcctggggtgcggctcttcaccgcagcttttcccttccttgggcccggggctcgcttccctgaaagaagccgctggctgctccctcctggctgtcgcccagctctgggctggagcccttcaagcacgttgggggttcgacaggatccactctgcttctcgcctgctgctgctgggcacttctggggcatgttncccgggccagggcgatctgaccaggctgagaaggactcaggttcctgggtttcatgggaggcatcacccttcaaacctccccatgacttcctgccactcgtcctccagctcaccctggagcttctgtctccattcccgctccttggaggcatcatcttcttcctcctcttcagcagaatcccaggggggtccccagcccaaaatttggccaggggtctccccatccttattctttattcccatggcggagggacagcggcttagcagcgggaggaagaaatcggtgtaggcatctgggccctggcgggcagcagcatgcagtgccgtgtccccatggcggtcctggtgggcagggtcagccccgagccgaagcagcaggcacagggcaggggcatcgtggcgggcacaggcccggtgcagtggtgggggctgcccagcatctacatcgaggcctgggtgtcgctggaggagggcctgggcccggaccagccgtcctgcagacaagtaacgacgaaagcgacgttctcggcgttggcggcgggaagtggaggccatggaactccttgggccggcagacagatgtggaggcttcttcctctggaacctggggggaggggttactcatcagacctgccnccgcccccccaagtacccccagagccgtaggcccaaggcctgtgtaaagaagctcggaga

SEQ ID NO: 151444 - DNA, 981 bp, Homo Sapiens
ccttttgtatcttacttttattgttaaatggtttacaaaagcacatacaattttataccatgtctggtaaaaaaaagtgcttgataaattgctactattgcttcattgagatgcaaaaagcaatatggttcttacccgattagtggactgccacgcaagcactggtaatgcggatgccgaggtgcagtcattgccacgggagatgcttctgcgcggagacaggaccctgcttctggcaggcccaaggggaaactggatttgctacagttgatagttgtccaaagtcctgtgcatggtttcacacatttcacctgaaatgagagcagctgctgcatatcttctggaactgatctgatccggcgccttgctctgtctggtccatgctgtacttaacgtgcccgcaaaaacaggccctctgcctctctgccctcattatgtgacttaatgggagatgcccaggtggggcaggtgctgcggctgcaggtctccccttccgctgctttaatcttggcgcatggagggcctgacgcaggtctgcaaaagctcgaaggtgttccttgagcccctcacaataacacccagatcccggcatacgcgccaaccgaccctcccaagcccttggttagtgcgcctggcagcaacccttgaaggcaaggacgggcccctgtaatacccacagtctcccctggggcctggtattccccccttccccctggggccgaggtacggggtttctggcgcctcgggcccccccttcgcgacagcccactcggtttgttccccatcccccccaactacacccgacctgcccttattcccccctcacaccgggggtttgtttcattcttttcccccaactccttttcctttttagatccccacccgttaaacccccacaacttttcccgccccatggcactcctttataatacgccccataaagttcgcagccccaccctttcgccagcgcccccctctccc

SEQ ID NO: 151445 - DNA, 937 bp, Homo Sapiens
  misc_feature (123)..(132): n is a, c, g, or t
ggaaccggcggcggcggtaatgcataagagggcgagcaatagttgggccagagtggggacgaagaatacgagaggccaagaaaggagggggtacagaggagggctcgaggaaaaaaagaagcnnnnnnnnnncgcagaaaaaaaccagaagccgctggggcagcgtggtgcgtcctccctcatgtacaggggatcgccagcgccccctttcttggcctccatcaagaccaatgcggggcccacgccggattgggcccccccaagtccgaacgcggccgcaaaaagatcaaggcggagaacccggggggtccgcctgtccttgtagtcccctatcccatcctggcctcgggcgagactgccaaggagggcaagacgtacaggtgtaaggtatgcccactgacctttttcaccaagtcagagatgcagatccactccaagtcgcacacagaggccaagccccacaagtgcccgcactgctccaagtcctttgccaacgcctcctacctggcccagcacctgcgcatccacctgggcgtcaagccctaccactgctcctactgtgataagtccttccggcagctctcccacctccagcagcacaccagaatccacacaggcgacagaccctacaagtgcccacatcctggctgcgagaaggctttcactcagctctccaacctccagtctcaccagcgccagcacaacaaggacaagccctacaagtgtcccaactgctaccgggcctattcggactccgcttctttgcagatccacctctcggcccacgccatcaagcacgccaaggcctactgctgcagcatgtgtgggcgggcatacacctcggagacctacctgatgaagcacatgtccaaacacacggtggtggagcacctggtgagccatcactcgccccagaggacggagtcccccggcatcc

SEQ ID NO: 151446 - DNA, 989 bp, Homo Sapiens
gccggcgcccctcctccgtccctcccgcagccactgcgagatggaggagaagctgcgcggctttacccgcgcctacgaacccgacagcgttctgcctctggcgcatggcgggctcagcttcatccaccaccagatcatcgagctggcccgggactgcctgaccaagtcccgtgacggccctcatcagccacggtctactttctatgaattgcaggagaacctgggagaagctccttcaagacggcctatgaacgctctgagagcttgggaggtggccttcgttactcagctggtgaagaagttgcttattatcatctcacgccctgcgaggctgctggagtgcctggaattcaaccccgaggagttctaccacctgctggaggcggccgaaggacacgccaaggagggccaccttgtgaagacggacatcccccgctacatcatccgccagctgggcctcacccgtgacacctttccagacgtggtgcatctggaggaacaggacagtggtggttccaacacccctgagcaagacgatctctctgagggccgcagcagcaaggccaagaaaccgccgggggagaatgacttcgataccatcaagctcataagcaacggtgcctacggcgctgtctacctggtgcggcaccgcgacacgcggcagcgctttgccatgaaaaagatcaacaagcagaacttgatcctccgcaaccagatccagcaggcctttgtggagcgcgatatcctcaccttcgccgagaacccgtttgtggtcggcatgttctgctcctttgagactcggcgccacctctgcatggtcatggaatatgtggaaggtgtggctgcctgcggggctgcagggaagatggggccgtgctcactggtcagggctgcggggtggcctgcctgagccgcagtctccatattgattagtcggcctgtatgtttatccatctatttattctccagtcattgattgtccatcattc

SEQ ID NO: 151447 - DNA, 1353 bp, Homo Sapiens
  misc_feature (885)..(925): n is a, c, g, or t
ccgtaccagttcagcccttccaactgatcatgtgcaggtgctccagtggctgtgataaaccgtggctgagtctcatatttcacggtaggatcattagtgggagaactgggaggcccatcaccctgtagctccttcttcttcttcttatacttgcggggctgggcagggtcttcccccataattagttctcggtgtctccagtagctttgcttatgttcttcgtattcagggatattcatttcatcttcctcccacgtggactggtcatatggtaagtccctccattttactagatagtggtaattcccctttttatccacactgtggttgatgatgcggtggacggttatccactctggcttgatgccaaaaccgatagtacttctccctccatttcagcatagtgcgggtctttcactttacgcttgtcgctcttcccatcatcctcgccggagccatagtccaggggtgggggctcatccatgtcattcttccgctggtagtttcgatacataaccaaatggaagatttccagctgaagctccttggcccaggagcagtgccagtaggatagtcctacccacttgacaaagaactctcgctctgatctgccttgaagaggacgggggggtgggacatctggatttccatctgcctgttgaggggctggcactgctacaggtggctccccccaccgccaatgtaggatcttctgcactcgacccttcagcacggggcatgtgcatcggggacacagccattcaccattgggaatgtcaggcaggggagggtttagacaatgaatgtggtaggaggagatgcacgcgtcacagcacaggagctccccgccgtccttgcatacgcggcagtactccatgtgatcannnnnnnnnnnnnnnnnnnnnnnnnnnnnnnnnnnnnnnnngtattcttcttcttcctccttggcctcccactggaccccctccttctcacagtgagggcagctccatttgccctctggagcccggtcaagctcaggatcaaggcagacgaggtggtaggcacgagggcaggtgtcacacagaataatttccccaccctgctggcacacctcacagtaatcctggtgatccgtctcgtagccatcaacctcctcctccccggccactgcaggacagcccaggaccttcttcttcttccttcctggccggcctctctttagtttcttggtgcggacagggccatcaggccggcctgaggcactgtggacactgccagctgtccaggtctgattcctcagcctctggttcaggaccttcgtcgctctgaaaaacatacgagcgacgaagggggatgacaaacgatcctctc

SEQ ID NO: 151448 - DNA, 918 bp, Homo Sapiens
ggaagagcagaggggtgaaggcggttggggacaacagcagcagggtcagaagagggtggcagcatctcagaccacagccgaggaggaagatggggatgaggaggaggctgccgaggaagacggggaggatggactgttccagaagagccaacgccgtttgggctgccgcttgaggtggaggtagtcctccttctcacgctccttccgtgcccgctggtaatgatcttcctccttcaggtaccacacaggtggccaccgatgcttctcgaaatactcctggttttctggggacatggccttcatgtctcgggggaacttgcggcacacgttgttgtagttggtgcagatgtggtggagacaccagtcggccagctggtacgcacagtggaactgagccagttccaggaacacaaggacgtccccatcgatgtccaccatcatctgggtcgcttccatcagcccggtcactgtgtactgctctgtgagggcaaccaggtgtggcaggcagaggcggttggctagaatgatgagcttcatgtcatccaggtcggggctggaggtgaacatgccggtgtagaggtattccagcacggcccgcatgcagctcttgcttgtgtagggaaacaccacctcccgggtggagctctccacaaatggccccgcaaacatggcagccatccagtcacagctggaaatcaacaggggcttgtgggcgctgatggtgccatcatccaggatgaaggtcacatctgtccagaagaagcatcacaggaggactggtgaaagaagctgggagaacaagccccaaggggagccacggagcctcctcctgaacccagaagattcggggcacggaacaaagccgctcccagctggggaaaaccaggcttcaagagcatggcaaccgcatcacccgtt

SEQ ID NO: 151449 - DNA, 1065 bp, Homo Sapiens
  misc_feature (184)..(192): n is a, c, g, or t
ttgggcgtgatatttctgcgccgctatagatggtcgggggtcttttccgatggggggttacacgcgggggggcctccccgaggaggggcacaaggagagccacgggttttatcccacccacttttggcccactggccccaaggttgggcccaatccacgcccccttgtttgtttttccctgggnnnnnnnnntttccccttggggcttgatgggaaaccacgtgcccgtttggccaggtgggggcttgttggaggccttggggggcctggctggcccctggggtttgtgcctgcaggggtcccccctggccggggagctatgaggggcccccttgttcgcctgctccagactcaggaactgctgtctcgctgccaggaagtcaatctgctccctgtcaaccacgttctcctccaggggcgtggaccgaggtgggccgggggtcctggggtctccgtggtcaggagtgccctggagcgtggccacggtgctgctcttcctgactgcctggccctggatgacggcccagcgctcccgctccaggtcacacagcctcctggggtcagcgtccccagcatccaggcggtaggtcttcatctccttgtcctccccgtcctctgggcggagtgcccatgttggacgtccctggtgggcatccctggcgcccaggcggtaaacctgccaaccctcatcctccctgttctccgagtggagcccccgtggggacggctggccagtgtaggcatgcacgctgtaggacaccccctgcctctgcacgccctgctgggccctgtggtcagtgggccatgtctgcggctcatcctggccccagccgctggcctcggggcccatgcacaccagatggtatgtgtagctggtgtctccatccagcaccaggccggtgccacggtgtgcctgagggatgcccaggatggggtatctggtcacgcggtccatctcttccggggtcttggcctcagccttcctcccgtggggtggagacctctgggcttactgccggctcccggctccacagtctgcaatcccgggaattccggaccggtcca

SEQ ID NO: 151450 - DNA, 177 bp, Homo Sapiens; identical to SEQ ID NO: 2853

SEQ ID NO: 151451 - DNA, 974 bp, Homo Sapiens
ccgtcccattccgaggggggtgccccagacttccgttggaggggtgcacgggttcatgggcctggctggaattcccttgaatttccacgtccgccccgggcgggcaaaacctgacttgtgcagctctataaggacgtgggagtcgttcttgggatccacagcatttgcagccaccttcatgccctccaagcacttggctattatgggcaccacctccagctcggcctccgacaggagcccatacccggcacccaggcgggtggccctgcgttcatccatgtcttggagcttatcgaatatctggggcatctgtgaaaaatagaagtgggcttggtctcggttgaagcgctgcagttgagccgcatattcgtttttgctttcttcggccatgtgactccgaaggtgggcttgctgcttggccttctccacatcagccttggtggcgttgatatcctggtctagccgttcagcagtctgggctgccttctctgcctcccggcagtcccgctcaaatttacgcttactattctccagctgtttaaagccattttccagctgctgctgggcccgccgcccttcttggaagtgcatcttcctctcctgtttcatctcttgtgagtacttggtcagctcaagacatacacggacactgaggttctcagccaccagctcccgctggcctgcaaagtcattcacctcctggagaatctgtacgaaggactgttgctggctgaatttggactcaggatcatccttggcaggtctcttgggcagatattttttcaccaggctccgcagttgtttggcgtaagcctgttccacttcggtgcgttctttcacgaactttacatatctgtccaacaggtccagcccccactgcgtgtggcgctcgagcacctcgaactgatcccacagctcagtgccccaatccatgctgctcccgccgccgccgccgcagccaccaccgcacccgt

SEQ ID NO: 151452 - DNA, 661 bp, Homo Sapiens
tcgcttcaaggattacattcttggggcttaacccttttccacctggaggtgcgtcctggggcatcagcctgctcgggaggaggggcctgactccctgttccccgattctcatccaaccccagattcagccagcaacagtccttcgtacagattctccaggaggtgaatgactttgcaggccagcgggagctggtggctgagaacctcagtgtccgtgtatgtcttgagctgaccaagtactcacaagagatgaaacaggagaggaagatggtgaggagccccccgattcaggttttacaaagggcttctgctggaaccctggcgagccttatcactcttctttctgtagcacttccaagaagggcggcgggcccagcagcagctggaaaatggctttaaacagctggagaatgtgagtttgcagaggtagcagtgactgtggcccggaggcatgggggcagggttgcggatccggagtcagggagctgccctctttgtcagacctggaccttccctcccccataggcttccagtactcccttgacccctacttactggatgacatcccaataatccctgaaaccttggtttcccaccctgctgtctttgggatggtggctccctcactccggttctgtcccctacacagagtaagcgtaaa

SEQ ID NO: 151453 - DNA, 955 bp, Homo Sapiens
  misc_feature (103)..(103): n is a, c, g, or t
  misc_feature (146)..(146): n is a, c, g, or t
  misc_feature (151)..(151): n is a, c, g, or t
  misc_feature (180)..(180): n is a, c, g, or t
ccccaagatgtgtacagagagcttgggggaaagccatctgtcccatcccttttccaggggattttgggaacaagtttggaaattagacaaggatatttttgancttgaaagaactgggcttccaatggcttcaagaggactcatgnttttncatctgtcagcttttgtaaattaagaccntgatgcaaacacccttaaaacttttttcagcagtcgaatgtgggtttctggtttaatggcacagttccccaaatctgcacagccacagttttccagaagagtgaaataatactgcagcctttcgtgatcaaagccaccaatagtagggtaaatatacttgaccatgtgctggtgaaaggcttctggatcagtcttcaaagtctcaaagagatgaaggtcttgggctctattttcaatttctagtgtggacaaaccactgtccgtgaagaggaactccaaatgggtcataaaaacttcccagcgggagacactgtaacgttgtgccagagaaatagcaatgctgtagacgctttcctctagagtttctgccagaccaaggatagtttcccttttatactggtcatctgcagtaaaccgctgcacgtccacacccttccgaaggccctgaaggatctgcgcctgagtgaaatccaggagacgttcattgtagcagtgtaactgcttggtcagtgaaataaggtcttcaggccaggcttcgtgctcatgtcgagtcacatgcctggtgaccatcttgattagttctttgggatcagccctgtaaagaggatggcacttgtccctgaaacatggggccaatcgggcatagatctggaggctatagtaatacgctgccagctggagagataatgcagagggggactgcttttcaaagcaccggttagcatctaacacttgtggtaaggcaagaaggtaagcaagagccaaggtcagtcat

SEQ ID NO: 151454 - DNA, 1254 bp, Homo Sapiens
  misc_feature (135)..(135): n is a, c, g, or t
  misc_feature (1061)..(1061): n is a, c, g, or t
  misc_feature (1088)..(1088): n is a, c, g, or t
  misc_feature (1154)..(1154): n is a, c, g, or t
tcatctagaggatcctttgtgctttgggacggcggactgggttctgcactggtgaggctgagtgtggggagcaggctctgagcccccagctccccgtgtcccctgctccccaggtgtacagtgccaccaacgtgnagctggtgacacgcacacgcacggagcacctctctgatcaggacaagtcgaggagcaaagcggggaagactccattccagtccttcctggggatggcgcagcagcattcctcccacaccggggccccccgtgcagcaggcagccagccccaccaaccccacagccatctcccctgaggagtacttcgaccccaacttcagcctggagtcacggaacattggccgccccatcgagatgtccagcaaagtacagaggttcaaggcaacactgtggctgagtgaagagcacccgctctccctgggtgaccaggtgacccccatcatcgacctaatggccatcagcaacgctcactttgccaagctgcgcgacttcatcactctgcgccttccacctggcttccccgtcaaaattgagattccccttttccacgtgctcaatgcccgcatcaccttcagcaacctgtgtggctgtgatgagcccctgagctccgtgtgggtgccggcccccagctctgctgtcgccgcatcagggaaccctttcccgtgcgaggtggaccccaccgtgtttgaagtgcccaacgggtacagcgtgctgggcatggagcgcaacgagcccctccgggacgaggacgatgacctcctgcagttcgccatccagcagagcctgcttgaagcgggcactgaggcggagcaggtgaccgtctgggaagccctgaccaacacccggcccggtgcccgccctcctccccaggccacggtttatgaggaacagcttcagctggagcgggcccttcaggaaagcctgcagcatgtccacagaggccaggggcccaggatcctcctcgccaggacacccccagcccccaggtccccccagctcttgaagagcagctgcgccttggccctggagttgtcttcacggggaancagaaggacgggaagcggcgcggccanccagggaggaggaggacttacagcgggattctgcaactgtcactcactgagcactgaccccaaaancccccggaagggctggcccaggcaactccggcccggtttttggaattttatttatttataattccctggcttcctgaaccttggggcctggaaacccccg

SEQ ID NO: 151455 - DNA, 1259 bp, Homo Sapiens
  misc_feature (34)..(34): n is a, c, g, or t
  misc_feature (67)..(68): n is a, c, g, or t
  misc_feature (100)..(100): n is a, c, g, or t
  misc_feature (744)..(744): n is a, c, g, or t
cccaccccccccactctccttctccaccaaaatntttttcgttgtcaaaaagcagggctgggtaccnnggtccggaattttcggaatcgaggacctccgnaaagcagctgtcgcacctgcagctcctcaagctggaggccgagcagcggcggggccgcagcagcagcatgggcctgcaggagtaccacagccgcgcccgggagagcgagctggagcaggaggtccgcaggctgaagcaggacaaccgcaacctgaaggagcagaacgaggagctgaacgggcagatcattaccctcagcatccagggcgccaagagcctcttctccacagccttctccgagtccctggctgcagagatcagctccgtctcccgagatgagctcatggaggcgattcagaagcaggaggagatcaacttccgcctgcaggactacatcgacaggatcatcgtggccatcatggagaccaacccgtccatcctggaggtcaagtagaggcaggaaggtccagcctgagctggattcgggactccaacaccctggagtggttccgtcagaccatgaggatgccaagaccagcaggtcccgacatgctgacagtgcccagagcatgcagggaaccctcgtgcagctgagctggggccgccaaagaccggggctgccaaaggggcagagggtggtggagaggagagggacgaaagggaagtccctaggggccggggtccacagagggatgaagggttgntggcaggggcccgtccatcagcgctggaccttccggggggcccagagcttcccagccctgagtcaagctggccatgaacgcgtacacttcagttcagcaggatgggctggatgagcctctctgtgcagcggtgtggggtgagccctgctgtggcctccttgtggtggtccctcttcccacgtgcagccctgttgggaagaaaggaagaaaacaggtccctccagggcgtgctgctgcctaagccagccacataagtacgctggtgccgtgtcacccatgttgagccgtctcctgatggctgacgggctcccagaccctcacctcggacatggtggtgggggacggacgggtgggcaaggctggtgcgttccccagctctcctacgctgctcgggccattgcccatgcagatgtggtcacctcagttcccagctctgcggcctccaggccatgttggcttgttccaacggcccagctcctcgctgctgtaccccttggggctctcaccgactatgg

SEQ ID NO: 151456 - DNA, 1097 bp, Homo Sapiens
ctatattgagagtggttttggttgctactctatgcggggaaggaggatgtttagagggaatgcccaatatcatcatgggcgggggaccgatggataggacgagattgcgctgatatgggggcaaaggaataaaggctcgtcgaaagagggtcagccctgccgccccttttaagggcctccccatgttgttggggagggttttgctttttccatggtgtatcccgatattgcttaacaggttaagggcttagaagggctcccatttccaggatttttcccgaaggggggtttggggtgagttaaaggggttgaaagttaccatggctggccccatggcttttccccatccaagccctccagtgtacagtctcccagctttaaaggattccttctctgggcaccccccttgattcccttgggcctgggggtggaatgccaggaagcctttttggccatcaaatctgccctcttgtgggttagaggcccagccctctcttgcttgacgtgacttgtgtgaagggcctgcagttaaaccattttcaggcaaccaggggcatctgagcataacgtgagcagtaacaacataaatcaagggtcagtaatttggggtggatgagacctagccagccatccagtcagatgctgccgtgcaggtaagcatgattctgaaggcgtggggtaccttttgtcctgtaaagtcagagagaaggctaagaagtgcatggccagaaccccaagaaagtgcagcttggagttttggcttccttccccaccgcttgggttaaaagttcgggtggaatgcacttgccaggacctgctgggcctgaactctgaagtgctgcgctcacattactgtcagtgtatccaggacaaagggcccggagccagacaggtgccccctacagccgagggtccaaggcaaccctgtgactcagagctggcttcagcaagccagcagagcagctgggaggaagcctcatggcatggctgtggcatcaagtgggtgtctgtgagcagcttggctctcaccactgttttgacctctgggatccttactcttgctgggggtcagatgtcaagaaaatatcccggaaatt

SEQ ID NO: 151457 - DNA, 984 bp, Homo Sapiens
  misc_feature (85)..(85): n is a, c, g, or t
  misc_feature (443)..(455): n is a, c, g, or t
  misc_feature (634)..(928): n is a, c, g, or t
agataaaaagagcagtttaaaaggtgaggagttttagtgctcttgtagccagcccaccttaaacctaaattagaagctttttacnacatacaaaatagactgataactatgcagatcacattcccatcttcaatagtaaatatacatagtaataaatctattattaacagtgggaccaaataacatataaggcagacatttaaacaggtgttgtatcatcaacatgctctaaaaaaaactcatctgactagatctagacccaggcctttttgcatgaggccaagacaacaagtatacaatcaataccccatgtgacacagtccaagtgctggggaatatgagggggcagtgggccatggggaggaagatatcagccccagtgaaaagctggggtttggctttactcgtgatattttgatgctctatgtctgagtaaaggaggnnnnnnnnnnnnncactttgataacgtacaaaaggcatcgactcccatttcaaaaataaatgggaagacttcacagtcaaagttcagtcacttgttagtatctgccctggaactctgatgcagtatcaactcttgtactctctccttttccctccactagcatgccctctctcagttgtttggtttgtttgnnnnnnnnnnnnnnnnnnnnnnnnnnnnnnnnnnnnnnnnnnnnnnnnnnnnnnnnnnnnnnnnnnnnnnnnnnnnnnnnnnnnnnnnnnnnnnnnnnnnnnnnnnnnnnnnnnnnnnnnnnnnnnnnnnnnnnnnnnnnnnnnnnnnnnnnnnnnnnnnnnnnnnnnnnnnnnnnnnnnnnnnnnnnnnnnnnnnnnnnnnnnnnnnnnnnnnnnnnnnnnnnnnnnnnnnnnnnnnnnnnnnnnnnnnnnnnnnnnnnnnnnnnnnnnnnnnnnnnnnnnnnnnnnnnnnnnnttgcttcaggatgctagggatacttctgggagataactgctaacagattagaaaga

SEQ ID NO: 151458 - DNA, 945 bp, Homo Sapiens
tcggtaatgctccgatggaaggacacgtggtcccagtctccaggggtcgtaagtgaattgtggccccatagtcccatgtccgtcgaactcaccttgtccgggaattttgcactttttcgtccccaagaccacacctctgcagggtaggaaggtcccgggatttctaaagggagggttacccttaaaagggggacaaatgagtgcccagttgaattacaacatgtacagcttgccacaggggaattggacagtatgtgtccagagaccagcgggtgagaagaggagtccccttctctccaggcacaggtaatagatcctgatccccaggaggaggcatggctgctgtcacacaatgagggtaggaggagttcgtgtggaacccagggatccccttgggggcctcctggttccccttgtcccattgtaagtgtgaggagaatcgtccagccacccaacctgagagggtttgatttccaagagcccagacccctcaggaaggaagatttcagtcgcatttccaggtaatttcccaaggcctcgttcctgtgctctgacatcctcagcagcattggtgcagaggccctacttctctcaggctgttcccagcgggtgatgggtcacaccagggacaccaaagcaggaccattcctgggacacagaggactcctttgatggccaatagtggctggaggactcttccacggccttgatcaactctccttagattacctgtgttctagaatgcatccaaaacaccttctctccttctgcccatcacttgggggcacacttgcatctcagtctattgccttttccagagttgtaatgtaaaaatgagatcatttctgccttgattgtaattgtaatctgcccaggtctggatcagggccacggctcccgagaacagcaggaggagggttcgggactccatgacccgctacttgg

SEQ ID NO: 151459 - DNA, 801 bp, Homo Sapiens
  misc_feature (537)..(547): n is a, c, g, or t
ggcccgggggagatttaaccagttcctttggcaagggctttgtgggccaccagtggtggccagccgggtgcctgtggtgatggaaggtggagaatgatgaacccttgcccgtgcccgccagaggaagtggcatccttttgcttgcctttcacttgcttcatgagaagaggacaagggtcttttgggaggaagtaaaggtggtttgggtacattctcaggaacagactctgcttcagaattaggctggcttccagttgagcctagtcgtttctttaggtcctcttctggaatagctttcctaagacttgctaatcttactggctcttcctctacttggactggactagatgatctggcattccctatgggggtggtatggccattctttaacatggcatcgcttggctttcctggatcctcaccaccttgctcagggtcttccaacagaacccctcttttaaccagctcttctcttggctttcgcatagatattttccgttctaaaacttctgaagtctctttaaatttatcactacnnnnnnnnnnncctccatttccagggcttgaagatcttgccaaagcctgagaacttgctcttccttttggtaggaggtgttgtgtctcctgcttccacactgtccaggaccatgcctggctctgtagtgggctggtctgcttcctcaaatggatcttccatgccactattaaccagtttagggaggtgagatactgtttccagatctccgccgccgcctcctcagcctccacagcagcctctcccggaaatcctacctggcccgt

SEQ ID NO: 151460 - DNA, 902 bp, Homo Sapiens
  misc_feature (270)..(270): n is a, c, g, or t
  misc_feature (273)..(273): n is a, c, g, or t
  misc_feature (276)..(276): n is a, c, g, or t
tacagattttggcttttattctggccatcacacatctacttctaagacaacacagaccggcagtaccccatcccccatgaccactgtcacaaccccaatttcctcagccccctcctcccaccccaccccttctgccaagctccccgtatgggggctctgcctacacctcaccccgggcatgcagcatgaagtgcccgtgcagctcccccaggttgtcgaaggaatcctcacattccgtacagtggtaggttcccttcttttctctttctnctnctnctcccgcccagctggtcggccctccccagcccgaggtggttcctcctcttcctccccgagggccctgccttcaggggctggtgcttcctggggggctgtagcagggcagcagagcctgcagggtggggttcccggtggggcctccccaaggggtgagcggccacagagctggcaaggctgggccgggggctgggctgcacggggggcccggcgggatgggccaccacggcccccgccaaggcgctgcttcaccttgtagccaggatcatattcaggatcgtcagtggtctcctcttcctcctcctcctcatcttcttcctcttcggagtccggctctgagagagtgtattctgaatcagaggaatgctcggggcctggggaaaggtcttcatcatcttcttccaagctggcgtagcccccagtctcagctggctcacgggtctctgtcatgaccgggggaggggacaggagacaggagcagagcagcagctgagcagcgtccctccccggccagctctccacagccacacctccggccacaagttctctaatacaggatgttggcaggtagagagggatgcggcgccggcggccccctcgtctgagaacgccacccaggcctcgcg

SEQ ID NO: 151461 - DNA, 1218 bp, Homo Sapiens
  misc_feature (59)..(120): n is a, c, g, or t
gcttttaagccccccaagggaaatggggtttcttttccgcaatttttcccccgggagannnnnnnnnnnnnnnnnnnnnnnnnnnnnnnnnnnnnnnnnnnnnnnnnnnnnnnnnnnnnnccaaaaaggttcggctcggggggaatttaacccagggggccctggaaacccccaccttggccgccctcggggcctgccttttcagccccttttttaatgggcaaagggctctgggaaggcccacccctgcttcccaaagggctaggtctgcccttctaacttctagcccaggctggaccctggggacactgactgaagggaggaaggggtaggaagggcaaagaggtggtaggagaacaaagtggttgaggtttccatatccaaggccaaaagcagagcaggggttttgccagccctgataccccatgatgacacaatccaggagacagctgcaagtcatgctttgggcccctgcatttttcagagcattcagaggagaagcaatttcagggtgggtccagaggtgaatcggggttcttcagggggggaccggctcatctgtgaccgatcgaacagccaggagggtgtttccatgcaaacaggacacggaagtcaccgtgtaagggtgtgtctcatccaactgcactggccgagggagtccggcatcctcatccctcctccccaatcgacctcgcgcccctttgccccaagagtacacttcgctctctgccccaatagctacagtgaaggcatccccacaggctaccattgccatcttgatgccctcaaggccttggaccttacagggtgcccgactgcctcggcgagtattggtgcccaactgtccgtgctgattgctgccaaaagtgtagcaatcacccgaggcagtcacagcagctgagtgagcagtgcccaggtctatactcagcagaggctcctggtccaggggtgcagagcctagtagtgtgaagctcagggcctcctccacttgctggtgggggacaggctcctcccccagggagaggtggtccaggcccagcttgttgaacctgttgctcccacaggctagggcttggccaggcacagtgaggatcatggaggaatcgataccacatacaactcgctgagcttcctgtcctgggggcatgggcacctgctgggggcagctgtgggactccctggtgcctagccccagtctgccgctgtctccacggcccc

SEQ ID NO: 151462 - DNA, 989 bp, Homo Sapiens
ggcctaagtggcatagcccactgtccctctgtcaccctcaccctaggctatctggatcctttgccactgcacccgccacaggagcagaccccttggctcacctgaagctgcatttgggagcatgacggaaatcatccgggagacaaagcaaatgagttatgagatgctgaggccacaggctgggccagggcaccaggcctctggcagggggagggcgggaaggggtgggtaggcagttttggtcccaagataaagtgcacaagaataagaccttatgataggtaggagcagggtgagcttgaagtgagcttttcaaaagacgacccagacatgccagcacctagttcaggcctagagaccagcacagcgcagcagtcactggcatattcacattatggtgggattggctcaaaaaggcctgcccctccaacaccatggcacccccacactcccgctgttttgtcctccaggcttgtctaacccttctccccctcctcacgggcagcaggtgggctgctcctcaggagagtggcaggcccctcagggcaatgtgctgcagagccagctggtgggcaccagcggctggcagagaggcaacggccatgcccatggaaggcccacctcagcacacttcccctaccctaagatgccaccctgcagcggcctcttcctacacatgaatgttcacctctggcctaagtctcccctgaggtggagaccccgggggagggaggcctggggctgcaggtggaggcttccattctaggtggggtcaggagggggctgcactgaggctggtgcttccccctggtttgggcctttcagatgaggggtcaccctgctcacacccaccccaggctctgcttccctttgtacagcttgctcttccttcctggtctgcaaatgggagggagatgggagccagcagcaaggggcctctgaggctgccagagtgagaggcgacacatgggtatggccccaccatcagg

SEQ ID NO: 151463 - DNA, 1081 bp, Homo Sapiens
  misc_feature (28)..(28): n is a, c, g, or t
  misc_feature (261)..(261): n is a, c, g, or t
cttttccaaagggttattcatccacccngacatgaaaagcaggcttctggataaagctgaggccaggaacaagggtaagtgtaatgctctcccagagctcttttgtggtctccagtgaggcaacgtgctgagagagggcatctgtttccgtgggccatgtcctttcaacatgttttgggacagctcgtttttcttctaggtcttcaggaagctcaattgcgtatcctttgtgtactaattctagcccaatatcaagttttncttcccattggctagtatcatataagtagatctttggccaagttgagatcccagtctggacatagctagagatcttggctaccagaggcttccagtcagcacaatgagtgagtctatcaaactcatccaaagcttcctcttcccactggtcacctgagggagcaatccgtgccagactacattctattgcttgaaatggaaggcttaggaagtcactcctgagagccctgaggtccttcagtgggcaatctccattatctccaaagtcaacaaaatagaggtccaagttcccattctccaaggtgccgaggacccgggctcgataccaggaaccatttgtaggtaaaggtgctgctacaatgtctcctacatgcacagtcaagtcttcaggcacactattctcatagtgctgggtcatctcattgacaagcttatccaattgcaggctgcgggagccaacgatctggatccagaagtggttagggtgctcagaagcagaaacgtagacttctaggtactcatcagcatgaaaactgaagtcaggactggggatttcaaacatgggcatctctgggatggcctgggcttcagacttctgaaagctgtcatcactaggtttctcccaggaaccttcctttgacactaccacagccatgtcgcctcctcctttgggtggaggagtcaccaggggtgcagtcggctccatgctagaactggtgtttttccataatgctggctctccagctccacctggctctgtcatgtttctcttctcacactgatggccctcgtccgaaacgccacccaggcctcgcttcct

SEQ ID NO: 151464 - DNA, 847 bp, Homo Sapiens
  misc_feature (83)..(83): n is a, c, g, or t
agttccgttctgcgttaggttgtatcccaggtcccagtcgaagttgttccacagccgccggtggagcatgacctcccacctgncccattccccttggtctggagatgccatgtgcccgctccgacagcaacacaagcctgcttttgccatcctccatgaaggccgactgaaccatggggtattaattccgggcgatgctgttgttcacataggaaacgtagggcctccggtgcatctggtagccgttgttgtctgagtagatgacctgctggctgtttaggttggtgctggtcctcaggacagcctcacggttcagctccagggggccggcttggtactcctgctctatccggtggcagagcagctccccgtcatggccctgcggcacatgggtgagccgggagcggattgcatacgtgtaattctgtgctgtcatgttcctgtagaagtactgccggatctcagtcacaagctgtcccgccacaatctccatttccacagcttcccacgcaggcaccgcggccttgcccggtgtgaacaggtagttatcggaaatggggccctgtttcacatccccgttgacgtggtactccaggaattcctgggtcacgcgcaccgttcggttactctgtctctcccagatgctgtgcatcaggttggtatcctggtcgagcagcacaatgtagcagtcgtttgccacaggcaccaagtacctgcccgcatggctggtgcgtctcctcagcctgcggccaaattgaagggtgctcgccacagtggcagccggctcctgggtgccctcttgggcccctgcagtgggtctgatgctgtagtgccggtaactgaggcc

SEQ ID NO: 151465 - DNA, 953 bp, Homo Sapiens
  misc_feature (56)..(56): n is a, c, g, or t
cggttagcctgctcgagggtagtcatgcccatatggcacttgtgatcgggacttcncaggacaaatgtaatgatagtcccatggagcatgggggaaagattggaggccagcatctgtgcacatgctggatacctctgagggttcaaactggagggaactcccctggacttgagagttctggggaggtcctggggggtaacacacgggggtgaggggcaggggcctttccagctgcctgatgcccaggacatcctggggctgggaatcatatcccgtgtctatggttggcagatccaggcctgctcggttcctgtgaggctggggccgttgcaccatctcctggctaccgcccaaggagtctgctgaggcattaggtaaactttggtctgatttgtctgagtcatggccagtgtcaggagaagccgctgaaagctgagataccagccattgattacgtttttccataaatgaaaactgatgctctgcagggagggctccaaccacagactcagacgcaggctcgctgactgcagagcacccagaagggaaagctttgcccaggcctgggtgtctcctgcagaaactgtcttcactgtcctccagaacttgagtgcgcaggcaggtgacctgccgggatacaggccgctggtgatttgcaagtttcagggttgagtgagcttgagaaaagtctccggaggaattgtgaagcattgtgggtgcagacaagctgttgggtgccatgttccttatatttggagccaggtggttctgattcctcttccggggaatattctgggattggtttcagcaactgacttgggtatggttctgattcatcaacctccacaggaatgcttcggttcattctagtttcttagatccaccacggacagacagactgggcccggagggtagtcggctctcggcggcttctcgtctccctccaccttctc

SEQ ID NO: 151466 - DNA, 1083 bp, Homo Sapiens
gtaggtgaatcggatctgccccgtggacaaggcgctggcgatccacagaagggtccaggaccttgaagggcaccagcacgaagctgacgttggcgggcaggttcttggcactctcagggtacatgaaatggtgggtggttcggctgccaacatcctgctcaaagcccacggttggcgcctgattcatcctcatgatgaagttgtgcccgtccacgtcctgcccatagccagagccccgcaggttgcccgagttccccaccacggcacagcgccggcactggtgggggtcccggaagcggtaggggttctcgccaggcactatctggaacagcttctccagcacctcattggtgttgtgtgacttgaactggggctgcagcatcatccaccacctctggacgtccggtggaagatccatgttctctcgggtccagacgggggaaatgttaccgtcaaagtggctgtcaaaccagtcggaggcaccggcatcgcccatgcagcggcgacaggcacagctcttgcccgagagcctctccttgctgaggcgctgcaggccggcatagccgggcaccagcttcacccggtgcgtcccatccagggcccctgagtccaggtaggggagcgtggccatgctgtggtgcgagtaggtgaagagcagggacatgatgaacaccagcaggaaggccacggagaggaaccacacccgcagggagcacttcatggtgccggcaggcgggtgacggtcaccgtggccactcttttcccagcccgctgaggggccagccacggcgtagcctgcctattctggcaccacatgcaaagggcataggggcacgtgctgcagcaggggacagtggcaggggtcccttgccacgccctccctcatgtagggagaacacacgttggcaggagtggctgtcctgtccctgagtcaggcggggcccctgcttagggcttcatcgggtctctccgtcactagctaggccacagaggctctgcctctcctgccaccctggtgagggggaggtcagtccattgcagccctctagtcccttgggattgctgggggacagctctaggggt

SEQ ID NO: 151467 - DNA, 808 bp, Homo Sapiens
gggcttttcaaaagaagcaagatccaatgcccactgcccttcctcacttcccgctaatagatgtagggcaaccatggactttgtaccagactgagggacatactctggatgagaatagtgtaccctatcaaggaaaagtaagttccccagatgaacgccacagataacaggcatattgtaagtcaggctttgtacgttttccgaaactcactacaagggatcccctttgaggtgcagaatcttgtatcacaataatcacgattccttggccaaaggccttttgatgtcatggtccgtgtttttctccggatcgttgggcatgcggaggcagaaggagagcctggcagagtgaatgacaaacgcaagggaggctgcagaggggagggagtgagggcggcccagggcccagcccggcgggagccgaggaagagaacggaccagccagccaagggcgggcggctccagaggaggcccgggactcccaagtttcccagcctcttccaccccacgcggatccctgccccgacgctgattcagggggtcaaagcctccaggcggggcggaccagcggcaggtgactggaggcgccccagtttctctgggtgtggccatgcggaccccctcgggagcaggtcgtcccagcaccagtgtctgcccccggccccccagggacacctgcacccgccccactcacgacggcgcgtcaggtccccaaccaggcgtggggcggggtgggaaggtctcggattcggccgccccgccatgtgctgtccccaccgccccccggcctcgggcagcgcgctcccgg

SEQ ID NO: 151468 - DNA, 1056 bp, Homo Sapiens
ttcaagggcaccaaacccctttcctttgccccaaggccctttttttgtgaaccttttcctgccatttcaaggatgttcgtggccttttcccccattttttgtagggagacctttttcatagggaccgttggtttccggcccccaccaaactcaagaattttttcttcttcttcggatctgtcggaccaaggattccagggccttttctgcgcatctcaccgaggtcatccaggctcatcctgctggctgtccttaacctgctgcagctggcgcataagagtggagatctggacagacttgatggaatactcatggtccatgtaagtgctcaggaagttcacttcctcctgggtcttctcaatcttggcattcagctgctctgcctgctgctcaagatagctcatcttgcatttcttcttttcttcccactcctgaagctcagatttcaattgctgcagcctcttcttgtttgagtactccaagatgtcgatgatggtcgccaaggtgtcctgctgctgcagcagggcccgcacgtgcagggtcgtgctgttctccatctcctggatggtctcgatcagctcccggttgagcttgctgaggaagttctcacggcttcggagctctcgcagagcggccctcccgctcctgagcgacgtcttcattaaccagattttggcatgcatcttcccagggtccaacttccgccttctatgtagttctcttggattcttcggctggcagcttgtcaccaccgtagtgggcttgaagtgaaacactggttggaccctagtcaaagtcttcattttgcttgtatgaaggctgttggcttgttggactggaggcagagtagatggcttggtttcctgcttggactgctgccatggaacataatccggaacctggaactcctggactatggagtgagtcccagagtgcttgggtctggaaagagttgggaagggaaagaacttccattatccccagcccaaggggcagcaagcagcaattcgaaacaggattggagtctcgaaccagaaactgcagtttaccggggac

SEQ ID NO: 151469 - DNA, 852 bp, Homo Sapiens
ctgggttaccgcgcgatctacactgagacaaggaagttggaaaagccgagtagttataccaggaagatcagggtctcacagactcgcaacttctcttccattttccccaatggcgcatgtcttacaaaaacccaagcactctgggactcactccatagtccaggagttccaggttccggattatgttccatggcagcagtccaagcaggaaaccaagccatctactctgcctccagtccaacaagccaacagccttcatacaagcaaaatgaagactttgactagggtccaaccagtgtttcacttcaagcccactacggtggtgacaagctgccagccgaagaatccaagagaactacatagaaggcggaagttggaccctgggaagatgcatgccaaaatctggttaatgaagacgtcgctcaggagcgggagggccgctctgcgagagctccgaagccgtgagaacttcctcagcaagctcaaccgggagctgatcgagaccatccaggagatggagaacagcacgaccctgcacgtgcgggccctgctgcagcagcaggacaccctggcgaccatcatcgacatcttggagtactcaaacaagaagaggctgcagcaattgaaatctgagcttcaggagtgggaagaacacagaagaaatgcaagatgagctatcttgagcagcaggcagagcagctgaatgccaagattgagaagacccaggaggaagtgaacttcctgagcacttaccatggaccatgagtattccatcaagtctgtccagatcttccactcttatgcgccagcttgcagcaggttaaggacagcagcaggatgaagctggatgac

SEQ ID NO: 151470 - DNA, 1148 bp, Homo Sapiens
ttgtttttggaagagatgtgggacatatggcatgtgtgtttcgccggtgccccgggttgtgttctttcccaatctcgatgtatcatatttctcgtgtctttctcggctgtatgccgacgtcacggtttcgattatgagatctgtctcatgaacccagatctcggcatcaatgaaggctcttcatgatccccggtaaagtcctcctggcccttcaggtttcccccagtgcttccttgtgtctccttccctcccaggctcatgccgtcctttcaatagacagcattctttgcagtgggagaccagttcgcaatcttctttgtgtctatgcagggaccccagccttggcatggcccatggcccacctccccaccattttctgaagctacttggcctcttgacttttcagacattggagcttcctggaggggaagaaactgtctgtggagtccacggatgatggagggatacaagggatgttgtctgggagagacagggacctggaggaagggcatacctttctccacttcatctcagggatgaggacttccagagactcaggttcccctgaaaattctcttacactcagactcttcttgctggaaggctgtaggtgggtgcagactctcctcagcaggtcatatacactgtcccgggagagcagtgacacaaagatatacttctggctggtgttggtggtgatggccagtccattgggaaggagccgtgccatcttgtgttttttgatcatttgcacagacaccacaggaatgaccaccttgatatccttgccaaagaggctggcatggaagcagagccagttgggggagatgtagagccggccctggaggaggaagtccctctggagggcacaggaacacactttgagaaccacttcctccaagggaacatccttaaacagcttgtggtattgctggttgtatttattcagtgttatcccttctcggccacacttctttatctcttcacccttcaagccttctggccagtgcagactgtagtgccgggggctcctcaactctgtctggtttctctttgcaggcacacaggactgttcagagaagctgtctcttctgtgcatttgttggttgccgccctcctcggtggcctcgctccggcttaaagcggtc

SEQ ID NO: 151471 - DNA, 1118 bp, Homo Sapiens
gtaggtgttttcaatgagcccttcttcatcaagctccacaatgatcttctgcccacagactgcacagatattgtccgataagctccttgtaggcaaccggctgacactgtagaaccctatagtggaagccatgtagtctgagcagatctcggcaaagtctctccccattactccatagtagaggccgtagaacaaagacacaatgccaaaatccatggaatctctagctttgattttgaaaaacagattgaatccacacattgtaaacatgatcgccaagtaacccacaacaccaaatgcatagctgagtttgtagatcaaaagaaaccatttgtagaccaatcgtggtgtccttcctgagaggggttttcgggtagctctgaagaggatgtaactggtaataacggagaacatcccccacatagacagaaaccgccaccagtataattttatcgtgaaatataaggggacaacccacatctgcaacaaggtcaccagattgtaggatcggccatgcctctgtctccactgaaccagcactatctgggcaatgaccagaacgcagaggaagatcaagatcatttccacgtgcatggaatcgtggccccggtgcatcttgtacatcctctcctgctgcaggttccatgtgtcttctgcagaaagctttgtatgagagagctgctcctgctgcgggggggcctccagcaccggcgctgccttccgcgccgccgtccccgcggccatgcctgagccactgtgccttctccagggcacagcgcctgccggggagggtcccgcagagtccgcagaaggaggcgccgcggggcctcgggagccgagggtgagagccggatctgcggcggcggcggagcggcggccctgcccgggttgtgcggggcgggagatgggagcctcccggcacgccccgcctccgccccctgcacgctggccagcgtcctccccagcagcggcctcgaggtcccggtcgccagcacccccggttccttcaggacctcaggcctcccattcagccagccattgtcgccgataaagcgtcctgagccctaccgggtgcgtgtggcgggaaccccggttttgttaccgggcggcaggactgg

SEQ ID NO: 151472 - DNA, 941 bp, Homo Sapiens
tggatcacatcttaatcatatgcggccccttacacggagatgaatccagacgcctatcgggtttgggcgcccaacgacccacttagacgggtatctgttggtttgctctgaaaatgatctctggcttgaggcaccaataatctggaaacatccggaagaccctgttctgcgcggctccttcggggcctgcaatcacagagccggctccacagctcttcccagcctcttctgccaagttgccggacatacagctgcctcaatctgcacgagaatgagtttggagcgcaaggtggccatatccggaactcttccccgaagcacagcaccaaccctgccgtcaggaagccggccctggctgttatagaactgctgcagctctcggaagaactggctggtgtcgaagacctggaccacctcatcacgctccagcttgttgggcctgcctttgcacaccacggcgttgccgctgcagaacacgcggccctggcacagccgcttgacgaacacgccctgccggctgctgtgcagcagcaccccgcgctccaggtgcccgaacagcttccgcgtcacctgcctctgtcgctcgctggggatggcgtcggccggcgggaagcgcaccagctccaggccctcgggcccatacagcttggtgccgggcagcccaggctggctcagggacaggcggcagccctcggggcaggtggtggtggcctggcccaccagcttgcccccatagtagaagctgatcaccatctgggagaatgctgaatggtgcgcgtcgtaggtggtgtaccccgtcaccagcggcacgcccccagaataccactggactgcatacccaccacccagggcttatctctgggggagagcctgggggtgcaagctagctttccggatggtgttcctgcagcacagacagaggtgcctttccagggacctct

SEQ ID NO: 151473 - DNA, 839 bp, Homo Sapiens
ttggagggaatctgggagcaattgagagggggacagggacatccttcggcattccacggcaccacttttggcaagtgcagttcctgcaatggtcaccatctacccaagagtcttgatctcgatagagcagtccactcacttgacaagtcttctcacaatgacagttttccaattgactaagtcttgtctctgcataatttagttttgcagtcatcttggccaaaagctcttgtaaatccattattccttgcaccaggcttaagaaatcactgcaggttgggcaagtgtgatttagatttggacactgtgttatatatccattcggcataaagatgatcttcccatcttggatgatccctttgaataagccatgcttttggttgcgctggccaagccataaattgattcctgggggaaggttggtatctggagggtctatcacacgctcataaatcctgttacagtcgacatggagcaggagatgagaggcgctaactgacagtgcaaccttgtgccattgtccatctgccatgcggtaaggaagtgcctctgtccttggcttcccattgtgtatgtagtgataccgaatctcatccctcaggccactgctctccagttcaaaatagctgtgctccagttctcgaatggacagtatcactcctgaagtagatggcttctgctgtacagtggccaaaatggtgaattcactcttgttccggaacagctgaattaatttctcactcacatgaggagctgcatggatctctctttctatgtcttgaaataaaaatgctttgctggcattgtgcattccagacacctgagcaactccaagggtg

SEQ ID NO: 151474 - DNA, 1029 bp, Homo Sapiens
gggcgtgaatccaacctccggcttcttggagcggacccttcagggatctctgtgcttggccgagatataatgctcctgacagtggccaggctgctcctttggctggagccataggaccctgcttgtaggtattggccaggattatccatgggtgatggtgtttgtgctttcccaagagagtttgaggtagatcaactatatccgtccacctgcttggttcttcagagggactccgactgcctttacagccggcgatgacgtcctccctggtgattctctggttctcaccctggcccaccttgggaaatatctccaggatcttgatcttgcggctatgcaggtaggagtacatgaccgacagggcagggggctcgggcagctggagctggggcaccatctggcgggacagccgggagagcctgggggctttcttcctggtggtcctggtagttgcctgggaggcatttggctgggcactctgctcctcgtggatcatgtgtaagaccttggcctctgaaggcgtgatgctgggcttgttctccagccacctctttacatcaccaaaggactctagctcctgccgcagcttcgacctctggctcagccaggtcttcctgtcctctggctgctcttggatatctctagcttccagaactttgaagctggggatgggctttgggggagcctgaggttgggatgcaggattaaggggtgtctgatcctccttgcgaggcaccatgatgattcgccggcgggtctgaggcaggcggaagtccttctgctggaactgcttgaagcagtgggcaatgaccggttcaggatcaaagacgggagcattttcattgatgggagtcttagacgggcagagtccgagcagcgacaagaacagactgtggtacgcttcatagtcgtcgtccatggtcgtggtgctgggagggggtgctgaagggcgtgtgtgaatgtgtgtcgatgtgggcttgcttgcgtaggggtaccggggtatcagataaaccgtaactccaagtcgtg

SEQ ID NO: 151475 - DNA, 730 bp, Homo Sapiens
tggcctccgtgatgtgcacccggccgggtactccggctgcctccatccggttggccagggacacgtcgtgggaccacacgtcatactgccacttgcgcagcccgatgaccccgcacagcacattccccgagtgtatgcccacacgcatgttgatgtccacgcccgtggcctcccgcacctgcttgatggcctggcacatgtccagccccatcttcacgcagttccgggcgtgggtaggcagcgacacgggcaggcccgatacacagtagtagcagtcgccgaggatcttgattcgcatgcactcgttggccttggcgatctggtcgaacttgccaaagagctcattcagcaccaccaccagctccttgggagaacagtcgctggccagctgcgtgaagcccacgatgtccgcatagaggatgctgacattctggtgcctcttgacgtagaggctgtggaagttgttgtcaggcatgcagcgacggtcaccatgctccttgagccgttcgatgatggccagcttcatgcccatggagatgtgggccggaagcactgacagcagcaggttctcctgctggcgcttctcgatgcgcagcttccggcggatctggatgcacttcacagtgtaggtgaagaggtcccgggacgcatcctgcatttggtgcttgtggaaggcgcctgtcaggttcccacacaggaagatgactgcgttggccagcagcccttggcc

SEQ ID NO: 151476 - DNA, 832 bp, Homo Sapiens
cttggctccccaccccttcgggtctgacagccaccactgtggagccaccaatggaaatataggactctcctgggtaaattcatgcaacaaagagattattggtgagaatagaaagatagagaggtaggggaactagaaaggggaagaggaaggaggataagggggagcaaaggtgctcttggatttgcaaatttcttcctgctcctgtttcttgtatcctccatttttctactctcaagacacacattcagtaaaggctactgaatacattcaagaagagggtggaaacagtgtgtttgaggtaggtctgtaaggcaatatatcagaaagagtggggaaaccccgtgtgacaccttctgggtggtcctgaacaaacccagtgctctctctgagcttctgtttctccacttgtcaagtgtgcaggttgagttggattctcttcaggggagcttgcagtcttgacttctgtgatctccagtttagacagcaaagtaagaggagagcctgtttctgtggctgacaggcttgggctttgtttaatctgtctacactgaagccaggtctgtggaatcacgcaaaatagccccagaggaagatgttgatggccagcaaaaggacagcattgatgttgcagacatgtctccagagtggctcctcctcaatgcttgtcagcttctgttctagcgcagccttctctgctgggctcagggcctgctccggtgttccagagagcccacagaaccagctccagagcaactttccccaggacctgcttggggcttcaggctgctcctggcccaggctcgagttctctgccgctccacctcctgca

SEQ ID NO: 151477 - DNA, 542 bp, Homo Sapiens
cagcagagcagctcgcagccgtccagcgcgggcgacgagctgttacaggcgcgccctgccgtgcctgctgtgcccaggcgtccgctgtacgtgcagaagttgggcgatttctcgaagtagacgaggtcgtggggggagggcggtttgtgggccgggtcttccggctccaggcgcagcagctccgcccgcgaagcgcggttgctgccgcggttgccgtacaggacgcgcgaggcgccgtcgaagcggtcgcgcagcacatcgcccacggcgcgcagcgtgggcagccgcatccagcacgtgcgcaccgtgcatgagccggacatcccgtggcacttgcactcctggcgcatctcggagaatacggtctgcggggataggggaagaaagagtgtcccagggcaccgggccagagtcaccctcccagacactgccctctcccggacgccacgggggccggacctcagcaaaggcccaggcctagctgagcccaggggaagggaggcgcgaaatgttccgctgagatttggaaaccctgcccaacc

SEQ ID NO: 151478 - DNA, 799 bp, Homo Sapiens
tgggggcacaacggggtgccacccgcgtacccgctgcccgccagctccggtcacccatcaaaatagcagccctctcctgggtcccggctccttggcagccctggcaagtctctgacatcttgtttctcagggcaaacagggcagcactggtcgggagcctgcaccgggtgtgggcagctgggcggtgggcacaccaccgggtcacagatcaccgttcgtctctggcaggtgcagagtgagcagagcgggtcgtagttgggcgcccagcgagccccgtgggggcgctgctgcccctcgaagaagcatgtgttggggtctcggggccgcccaggaccaccaggtttggcgggcgctagggccgggagaccaggcaccacaggcggcgcagcagaggctgtatccggagcccccagcgcccgcaccccctcggccccggccgcctccaggcgcagtccgccaacctcacattggttggctatgtgcacctgccctcggagctcccctctggggctacccttggtggtgatcatcagggaggccatgccttttgccaggtgccgcagcagttccggctccaggtccttcaccacaccctgggcctctgagccatagaatcccttcagcagccgccgaggccctggcgttccaggaggcccaaggaggtgggcagtgacagtgccttgttctgagccaccaagcccagccagcagcacttcatagtgcaggtgacagtgggtatccaaggaaagccaggcgtgccctgctgcttggctgttcacagggggtagcaccaatcccg

SEQ ID NO: 151479 - DNA, 820 bp, Homo Sapiens
cgtacccacatgccttggcaacacaaaaggggtggcatccgtggcaggatgatggcttgcccagcaggaagagaacagcattgacttccagggaaatgtagtcactggtgacagtgggcacactgaccatggaatagcggatctgggactcaggacccacggggttgagccaaattaaggtgcccaggtggacattgacaccctgcaccaggttggagatgctcaggcacagcttgttactcaagacagcgtttaatgtgcttctgcaccaggaccagcagcgcgtgggaggtgctgttactgccatcaaactcgttggcgtggcccgagaataaagagcaggcagagatgctgaccacaggggtcctgatggagctctgggtcacgcgggtgtcagccagcagttccacaggcagcgtcagctccaggggctctggggcgcgaaagaccttgaaagtaaaattagctgctgccagcaggcgcactccgaaaccagcaatgaatttcaggtggaggcggggcacatggacattcagaatccggatcctggtgggctgaagcgcctctccactccagtccaggaaatgagggacagtgacctgcagggcccgctggagaggggctttcccaatttcagacacgtagctcaatgctgccttgttgagtcggaccacggtgcctggcgtggaggcaccgaccacgggcagcagcagtgccagcagcaggcccagcctacttgcccaagccatggctgccctggccgctgcccacaggatctgtgggctcaggtggttcctgagacaggtgaactctcagcccc

SEQ ID NO: 151480 - DNA, 926 bp, Homo Sapiens
acgagtaacctttttggagtcacgctgccccgggtctccggcgttgcgtgatatatcaactatgatgccaatgatgttgcttaaccctgcagagacataaagaatgcccgcgctgagaatgacgcttgtgtctgctgcggtggaactcactggctgccacgcagagcccgccgaagaacagcagcgtgacactgaggatgggggaagacactggaggccctcacagctcgcaggagatattcggctgtgtcctgttcgtagtcagcatcttcagggaagtgatcgattttcttgcacacgcctcggaaagccccttctaggcagcaggtcctccacagccccgaatgggtcattacttcttcattcttcctgctggtttcattatcacttgtagatttagtcctgcacacacctctggaatataaccagtagtccgtgcccactgcaatggtcattaaactaaaagcggcaaaggctcctacagtggtgatcaacatctggatacctctgtcacacatcctcataattcttcatggtactctggacggctgggggttggagggggagagtcagtgccggaggggaaaatcactctgcagccgggtaacctagtacaggctcttccaaaaattcaggtctccttttgtcagcatccacagggactttgggaaagctgggatttcctttctggagctctctccagttccctgggtcgcctatggccctcggaagggtgcaggctccggggggttggtccgcatcactgctgccttctgagggtcctgggttcctttcattcctcaggagcgtggtaaagacgagggtccgtgcagggcatggctccggagcctggagctgccagctcggtttgagatgcgcctggcttctcacagccccgggagactcaaggcaaagaaacccagaga

SEQ ID NO: 151481 - DNA, 851 bp, Homo Sapiens
cttccttagcaaagtcaaaggatgaaagaacgcattgtcccatcaagcttttgagttctgcctcagctgctctgccattgtaaaggcgaaaatggttacaggctttaagattgagtgcgatggtactatcaggaatttgctgaaggtaaacagccaaaacttcttgagacacatcatagtaatccaacttgtagtagcagagggccacataaacattaagggcaaggtattccctgttatctagcagtattcgcttatatatatctatagcttcttggtagtgagatcgcatatagtggattgaggccaaactgagttgatcttctgtgacatcctgaagattttgatgaaagctcatcaattttttctcatcattaaacttgtgagccaagtggaagaggaggcggttttggagtcggctttttgaagctttaaatccagctgcttcagcttgtttatacatcccaagaaagaagtaggtgcaagctaggttcacccagacttcagaattacaattttcctcttttgtagcattttcgtattcctccagagctctcttgtagtcacccaggtgaaaggcacaatatccaatccacaaattagtatcctcttcttcttccccaacatgacgtttgaactccaacagggtaatagctccagtgaaatctctttttgaaagtagctcctctagttttggaatcttcctacctttcttctttcttttgtcagtgtgctgtacgcctctgcctacagcaggtttggcccttgaaagcatcatcttgacgtcggtcttgtgagtccccaccacacagcgaaggccgcgcctcagcgtttcgccgcatccacacagc

SEQ ID NO: 151482 - DNA, 1002 bp, Homo Sapiens
acgccagctgggtgggcgaaagttatcagccatcttgggaggtaaaggaggccttccgtcgtacagggtcgcatcgcggagtggaagggcaacaatgaggaacgtgggcagtcagctggggctcgaaatttcgggggtcgcctgtgccggattgccagtggacggagcagaaacccagccgggcttccagcgtgtgccctgggttccgctgtctcccccaggcagccagggaggtgcctggccaccctcggacacattgctccagcacggcttgtccagtcccgtgcggcacgtgcgcagaatcctccgggcgcaccagtcccccagctctgcgtatttgcccgccagctcctcatctgcctccccgagctgctccaccaggttcagtagcatcatggcaccgccatgggctccgcagccggggccccctggagctggggccggcccagtcccgacgcgtcctcctgcacccagtggacgatctgatccatcatctccaccgcttccgtctggtaccgcacttcccctgtggctctccacagctcgttcatggccatggtgtagaaacactcactgaagatggttcgctgcaccttgaccgggcggccgtcccgagtcagcacaaaggcacacttcttgccaggaggtgccacccgggcataccgcagcaagaactcaccacctgcttttgctgcgtccagaagctgagcatggcggaagcgctcgaaagtgcggtacaggcgacaatacatccatacctgcctcccctgcagccacacatacttgaggtcatcatacacccgcccctcgcggccaaggcacgtgaagaagcccccgtgctcctggtcgtgggagtgctccatccagaaagccaccacgcggtccagctcctgccccacgcgctccttccaggcctgcagagtctctcgctctttctccatgtcctgtcgcgctgggagacccttgctcatccctcctgctcctctaggaagccagacagag

SEQ ID NO: 151483 - DNA, 907 bp, Homo Sapiens
tttcttgtagacatttcgatcaccatgccagagtgaattttgggaggaaggacacttgcggccaagcccatgactggccagcacagagaaagggatagtagataagcttagatacatcatgtcaccgtgcttctatgaagagtcatattcctactgaggaggtggcaagcggccagtgcagttctgaagatgacctggagaatggtgaggattcatcccgtccacatggctgttggtggggatgggaaatggatgaactgggaattccactgaattatgggaagaaacttttgttcaatcctggtcctctccctcagtgttgcctagaaaagaagttcttgaaggcgctgttgtagttcttcgttgaaagccgtatagatcagggggttaaagaaggagttggagtagccaagccacaggaagatgcttttccagatggcggggatgtcacaggagcagaggggactgatgagctcggtgagaaagaaggggatccagcagagcacgaacacgccaatgaggatgcccaccatgagggcggcccgctgctccttctgctcccgccacgtgtccccttctggctggaaggtgacggtggcgtggcggaccgtgaacaccatctggggctgtttggcagagtccttcacctccacagcttcggatatgggtgagacgctattggtcttcctggagcccacgcggaacttggcagccttgtagatcttccagtacacgaagagcaccacacagagcggcaggtagaaggcgcctacggtggagaacacggcgtaggaaggctcgcggcttacctggcactcctcgctgccctcagagtacgtctctccccagccaaaaagcagcggggccagagagatgacagcggagagtgcccaggtgagcgcgatca

SEQ ID NO: 151484 - DNA, 874 bp, Homo Sapiens
cgggcaacccctgtctcgctcgctgcaccctggttcgtttgtagcttgccggatcttgccgctctttcacgccccgggtattgatcccctcgtcggctcccaggtctgttcagcgtcactcggccccattgtaccgtcgcacccagtcacgcacttcgtaagtgcttgcgcccgccgcgtgttccaagctgcgccactggtggtcctcggctcgccccctctctggggtttccgagaggccggggagcgtgcaccatgaagtccgcgcttttgcacccgcttctttatcctcctgcccctggatcctaagtgtcatgcatcatgctcgacgtggacacgcgcagggccagtgcccccgctcaccccgcgcccctacttctcgtccctacgcggtgggccgcgggggtgcccgactcccgctccgcaggggcggcccggctcacgggacccaaaagcgcaaccagtctcggccgcagccacagccggagccgcagctgcccaccatctatgccatcacgcccacctacagccgcccggtgcagaaagcggagctgacccgcctggccaacacgttccgccaggtggcgcagctgcactggatcctggtggaggacgcggcggcgcgcagcgagctggtgagccgcttcctggcgcgggccgggctgcccagcactcacctgcacgtgcccacgccgcggcgctacaagcggcccgggctgccgcgcgccactgagcagcgcaacgcgggcctcgcctggctgcgccagaggcaccagcaccagcgcgcgcagcccggcgtgctcttcttcgctgacgacgacaacacctatagtctggagctcttccaggaggtaaaggccagcctgccccgctg

SEQ ID NO: 151485 - DNA, 883 bp, Homo Sapiens
  misc_feature (314)..(331): n is a, c, g, or t
cagacttcggcgtgcggcggagctgcggctgctcctgctgctggggggagcggcggaggtggccgccttgcgcctccctggacttcccaagtgggggcagagcagtcgctcgcgggagacgtcagttagaaggcattgggaaagagggaccttcaaactcctcctcggcgtctcctctcctcccccttttggcccctgcctttggagaaagtggagtgtggcgcttggttgtcgttatttcttcggactgcttcgcggtgcacggattcagcttctgcccagtggggctttcagctgtttgcgcgtctctctgnnnnnnnnnnnnnnnnnnggcacacctctgtctacgatgaggaaaggtctgcgggcgacagcggcccgctgcggactgggactgggatacttgctgcaaatgctcgtgctacctgccctggccctgctcagcgccagcggcactggctccgccgcccaagatgatgacttttttcatgaactcccagaaacttttccttctgatccacctgagcctctgccacatttccttattgagcctgaagaagcttatattgtgaagaataagcctgtgaacctgtactggtaaagcaagccctggcacccagatctatttcaagtgtactagcgaactgggttcatcagaaggaccacattgtagatgaaagagtagatgaaaacttccggtcttcatgtcccgggaagtgagcattggagatttcgcgccaggcaagtgggaagaactctttgggacctgaaggattactgggtgccagtgttgtggcctggagctcccggggggtaccacaaagagccggaaggcgtatgtgcgcattgcattatctacggaagacatttggagcaggatccc

SEQ ID NO: 151486 - DNA, 721 bp, Homo Sapiens
cacacctggggagagttcgagtcataagcatagcacctgtacgaccacctgcgactcgggctcacggggcccacagagaagatggcccgggaccacccatgggtacggggctgtgagttcaggcattgtgggtgttcatcttctccttccttacacagaatgaagctgccaaatgccacctgtgagacacaatggagggtcacgttccctcctgaggtcaccacagggctgggtagagccgagagggtgggtttgatgtaggctcctgtcaccaccagctccagggggtcactgggctctgaccagcctgcagtgtggctaccgtagaaacagcgataccgcccggtgtgttcccaggtgatggacgggatggggaactggcccttcttcacaatctcctgtgggatccgtgtaatccagggtgctgttttcttttctctatacagacggtactcctgggtctccaggatcccctgacaccagagggtcacgggactcccctgggtgatcacagagcctggctcagcccagagtgtgggcttggggagggtccctgcctgcacgtgggtccgggggcccagactcagcccatggcagtcgtccctccagccctggagatgcttcagggaagaccaaggtccatgctgcaggcagactcagatcagcagagaagcatctcgcatctggctgtgtagctcaggttgagctgcgtgtggcagtg

SEQ ID NO: 151487 - DNA, 797 bp, Homo Sapiens
tcataccatagcacctgtgcgccacttctgattcgggtccccgggcccacggtgaagtatggcgcgggcgtcccccgggcatgggccctgggagttcaggcattgtggtgttcatcttctccttccttacacagaatgaagccgcctaatgccacctgtgactcacaactggatgggtcacccttcctcctgaggtcaccacagggctgggctgggctgagagggtggcttttgggtaggctcctgtcatcaccagcaccagggggtcactgagctcagaccaccgagcgcggctgtaatactgacagccatatcgccctgtgtgttcccaggtgatggatgggatgtggaactggccgttcttcacaagctctggtcgtatccgtgtaatccaagatgctgattttttctccctatatagacggtactcctgggcttcaaggctcccctgacaactgagggtgacgggactcccctgggtgatcacagagtctggctcagcccacagggtgggcttggggatggtccctgtctgcacgcgggtcctggggcccagactcagcccgagacagatcaggactgtgacgatgggggtcatggcgtctcctcccactgccctgctctgcggatggatgagccctcggtgcatggcagtcgtccctccagccctggagatgcttcagggaagacccaggtccatgctgcaggcagactcagatcagcagagaagcatctcgcctctggctgtgctgtccaggttgagctgtgtgtggcagtgagcacagaggagaaatgca

SEQ ID NO: 151488 - DNA, 815 bp, Homo Sapiens
tgttaagcttatgaacacctaatcttattgctcagtggagaatacaatctaaacgaacaggtgaatacagaagacagtgccagtcggagggtggcattaacaccagtgtgccatatggtggtatctatgtgaaatccattgttcctggaggaccagctgccaaggaagggcagatcctacagggtgaccgactcctgcaggtggatggagtgattctgtgcggcctcacccacaagcaggctgtgcagtgcctgaagggtcctgggcaggttgcaagactggtcttagagagaagagtccccaggagtacacagcagtgtccttctgctaatgacagcatgggagatgaacgcacggctgtttccttggtaacagccttgcctggcaggccttcgagctgtgtctcagtgacagatggtcctaagtttgaagtcaaactaaaaaagaatgccaatggtttgggattcagtttcgtgcagatggagaaagagagctgcagccatctcaaaagtgatcttgtgaggattaagaggctctttccggggcagccagctgaggagaatgggggccatttgcagctggtgacattatcctggccgtgaatggaacggttccacggaaggcctcatcttccaggaggtgcatgcatttactgagaaggggccccagagggaagtcacgactcctacctttgccgagcccctccaggtgcgcttgcttgagctggagcaggaatgagcagagacctgaactctcagctgacaaggaattcaccggggcaacatgttctgactcatgtaccagacccaatctgg

SEQ ID NO: 151489 - DNA, 1025 bp, Homo Sapiens
  misc_feature (36)..(36): n is a, c, g, or t
  misc_feature (62)..(62): n is a, c, g, or t
  misc_feature (79)..(79): n is a, c, g, or t
  misc_feature (112)..(112): n is a, c, g, or t
  misc_feature (119)..(120): n is a, c, g, or t
ccataaaaatgaagggggtggggaacttccagggangaattgtggttcaaagggaaactggnccccaaaggttcttctnctctgttttttggccccccattgtggccttctnctgatgnnccttttggggaaagacttctggccctgagacccaggccctttcccctgcatctgggggaggcactgtccctcccagctgtcctcttgatcccaggatggggctggtacatgagtcagtacatgttgcccctggtgaattcttttgtcagctgaggagttcaggtgtctgcccattcctgctcctagctcaggcagcgcacctggagggggtcggcaaaggaggagcgtgacttcctgtggggcccctctcagtaaatgcagcacctcctggaagatgaggccttccgtggaccttccattcacggccaggataatgtcaccagctgcaatggccccattctcctcagctggctgccccggaaagagcctcttaatcctcacaagatcacttttgagatggctgcagctctctttctccatctgcacgaaactgaatcccaaaccattggcattcttttttagtttgacttcaaacttaggaccatctgtcactgagacacagctcgaaggcctgccaggcaaggctgttaccaaggaaacagccgtgcgttcatctcccatgctgtcattagcagaaggacactgctgtgtactcctggggactcttctctctaagaccagtcttgcaacctgcccaggacccttcaggcactgcacagcctgcttgtgggtgaggccgcacagaatcactccatccacctgcaggagtcggtcacctgggaaagggatagatgtcatgtcatgacctggtgcttgaggctgcaggaggttcccttccaggaggcccctgcccggcacccctccatgcagcctggagaagtgggaaaggaagctgaggtgccaggtgtccccctggagtcagcaggaatcctgcctctctgagcaatcccgggaattccggaccc

SEQ ID NO: 151490 - DNA, 956 bp, Homo Sapiens
ggggatttagggagccctagtgtgttccagtccatgcctggccccaccgtggatttcccgcaccttggattcgtgttgttacacccaattaccttttccagctgagggaccctctgccaaccaggcctaagaggttcaggccttctggccagggcccttaaccctgaaggttggggcttgaagaagggtctttgcggcttacgctggccggccattgggggctcgctttctggacctaccggggcctgatgtgaccgagccaattcctttcaagggacccgaggtgacctggggcctctggcagctgctggaacagcggataagggcagtttccatggggattcttcaggggagtctaagtgattagatgcactgagcagtcggggtggaggcgcagccgtcattgtcacggggggaggccccggggtatcactgccacaagtcaccagccgcagccccgtttgtcattctcgtggaacttgtgcaggtggtcagcgaacttcttggcgcagaaggtggcacagtccctctccatgctctcgctccatgccagcttgtagagcaccaggaagaccaggcagtgcaggaacagtgtgtagaagaagccgatggtgcgcgccatcttgttggagagaaccagacgccccatgctgagggtggccttgtcccagggactcaagctcaggtacttcctctgccgctcccgcttgctgaaggaggagaaggggtccaggcgctcctcgtactgggacgagtaccgcagctccgtgtcatcactgccgctgccccggccagggtagctctgcaggaacttgatcttctcaaagagcttgatgttgtcggcgcgcaggctgtccagctcactctgcagggcctggagggtgtgctgggccaggcggttctcggcctcaagctcctggttccgggcacggaagcgctccctctggctggagatg

SEQ ID NO: 151491 - DNA, 857 bp, Homo Sapiens
  misc_feature (273)..(306): n is a, c, g, or t
  misc_feature (527)..(549): n is a, c, g, or t
tggctggcgctgcctttccccccgggccgaggttccagctggagtcgacccatccccagtgagaagggctgggaccgcagttgcctggggccacctgcgttgtatgcccagccagcctgtcagtggagtttcggtggattctcttgagctgatatgcagacgatgaaattggcctgaagaagctgtaagcacctcccagactagttcgcatcctctgattctcattccaagtggcatcagctcgacgggaaacgggggaaggggggagcccgnnnnnnnnnnnnnnnnnnnnnnnnnnnnnnnnnntccgagcgagtgcacactcgcactcccacccgacagccggccagggacagtcacccccaagatcaatatcgcagtttgaattgttccggcaaatctcccctcgggctcgacggatgtgcgccccagatgtgctgacacatgtccgatgcctcgctgccttggaggtctccccgctcgcgtgtctcttctcttcgcaccagcggcggaaaccgcactagcannnnnnnnnnnnnnnnnnnnnnnagcagccacctgaagccaccaacactgggctcttccagcaaaaacgagaccccgattcgtctggcgccccaagaagacatagacgatagccccccgccgggctgcgccgtgcaattccgggctcccgggagcgcgtagctcgctggctaagcccaggcagtccgcggcaagttgccctcgaagtccgcccccctcaccggggcatggtcggagggtggctgctgcgctccggggcagttcttctcctgctctttggggttattgaagaagaggagggagcgtagagggaatccctgggaagatccagg

SEQ ID NO: 151492 - DNA, 605 bp, Homo Sapiens
tcactttgagggtacttgttttgtaacttgtggtgcaactcctgaactctgtataccggcgataaatattccattcatcgtcttttatccggatgtagacctgatacacgtggaatgcatttgctgctttgccccggagaaacactgaggggatccagacgttgatcagcgcccggtttgatatttcaaaatccgacaaactctggtcttcggacgtttgactcaaatctccaggcaccggtccccggagatcgatgagctcctgcctcatctgggacacgagggcttccttggctaccagggccctgtgcaggcgctcgttgaactcaatcagctcgccatgcatctctgccacctcgatgagctttctcttcgtaggagcttgcgagttcttcagcaatttctcccggcttctgttcagctactgtaacttctccatcaacactccaaagatttggcacttcagctgtttgaccttctcttttcagcatctggacagctcctacatatttcttcagttggactttgagcacctcgttctctctggccagcgcctggaccttcatgccctgccgctcctcctgttcagccaccttccttttcaa

SEQ ID NO: 151493 - DNA, 642 bp, Homo Sapiens
caagtcacagtccaactgggccgtcgtcatcgtcaaaaggggcgcgtactccaggcccggctcagcgccctcggtcagccgcggggtctccgccacaatgtggcccccaggccggtcctccctggtgagcactccctccttctgccatcagcatctgccggaatgtccccactttctgccgaatctcctgcctccgaatacccctgctcctccatcatctcctgcagctccatgcacttgagctccacccgccgcttgcgctcgtggtccaggatctcgcggtgcgcgcgcttcaccaggcccggctccgcggcgcgcagctcctcttccgcccgcggccaggtccccgaggaggcgctgggctgcgggaagccgttcgcggcgtcgggtgtggactgcatgctggccgccccgttgttcacggtggaggacatcgtggctggccctggagccgctggcctgggccgctggccctcaccgctgaccgccgcgatctaccgggcgctggggccaggccctcgggtcccgccggtccgggctgccgcactagtctgggctgagttgggcagggcagctccgcggcccccacggccccgcaccctctgcctccccgcgggtgctgccgccgcttgctgaaatgct

SEQ ID NO: 151494 - DNA, 792 bp, Homo Sapiens
acacattttctggacatcataggactgctcagctcttcacactccagtgcccactggtgacaaagacgcacgctgacctcagggcctgaagatatggtcacccgaatagcccgggcctcaggcagcaaatcaaaggagaactcgggtcctccatgcctttgtgagtccaatctgggaagactttcccatgtctctggatccgaaggttgggtccttttagagcgaagtcccttgtgggagatgtctggggaggggatggaaatgtgatggctcttctcagacaggtgacgacgaggcagcagcttcctctgagcaggtgctggcatcttgtgtctcctatagaacttgaatgtggaagactttttggatttctgcaccaggaggtggaagaggccccgttgaagacctgagccacctgacagcagatgctggcacaaacagcgggaacagtgccagactcgcacacaccaaggctttgtggagaagagggcccaccaggtgcggcaagggatataggcagaacttccagtgaaactgtcatccgtgtgggaggccagaggacagcgggtgttccagtggggcaggtggcgaaagccaatcccagcagagtcagagaggtcgatgactatgaggaggagaggccaggagcagggctgccagtctggagctccccatgggcttctgtgcaattagggctcccggaacatggctgcatggcctgaaagacaaggggctcctgctgtgggtgagaagtaacaggaaaggggctagcatcaggttgggggacgcacc

SEQ ID NO: 151495 - DNA, 588 bp, Homo Sapiens
ttttttatgttggtgagattcgtgtgacttttaatttattatgttactaatgtcttacagtaagtgtgaggagtaaagacagggatggggtaaaggtaaggaaaagtatttttcaagttccttgaactattgaagcatgtgctaggataagaaagttcagtaaaagcatcatgtccttatcaccagagctcttaaaggagacatggaacagagacggggcaactcttcagctctggccgaagtgactgctggacagagaacaaatcctgcatcagccttggcacacatgaaagactgggcaatgcagatgctacacagttgggcagatgaagagctgactgtccagaatctacttctagcaagcgagtaggcgcatgcacaccccttctctggtctgagtgtctcttcctctccggcaggaccccaccaactgtgcagccatggggtaagtgttagggaagtcttttagaaaagagaaagatgtctttcttatatatacgctggtagtgttgattgaccagaagtggtttcttttactttggggcggtagcattgtgttctggtgacaaaatatcctacacttagcac

SEQ ID NO: 151496 - DNA, 915 bp, Homo Sapiens
  misc_feature (42)..(42): n is a, c, g, or t
ggggaatcccccctattcttgggaatttggggggttgggggncttcaagccaaaccaggccccccaatttttagggggggccccacaggtgttggttggaaaagagcccggggggctttgggaggttgttcatcaagagaaataattgtgcaaaaggtagccctgttgctggtggggccctgttgtgttggtgaattctggaggttggcatgggagctgcatgtgaaggtttgatgcagaagcctctttaatgattactatttgaaaatgtggttggtataacacagttgggagaaggctaacactttctggaagttctcagtgctgggctccatgccaggctttttcactggtgttatctcagcatacacaggaactttagttctctctggccctggtgacagtcctgcaccaggtccggcgtgaggcgcttggcctgcagccatttctggaacctctctgttttccgcaggacacgctcaatgctgcaggtctttggggctgatgcagaggcacagattttcctgtctgagatctcgttttgatatttgctgaccagtctaaagatctccacagggcgccagattttggaatcatctgagtaatttgcaggataagaaagcaaggaatcgggaggcagtccaaggtgggaagccagccagttgtcagatcttatttcttctttaaagaacttcttgcaaatagatgtcccgatgcaggcattgcatttatcaagaccgaggaaagtccttccaaaattgtagctggttctgacttggggcaccagagaagaaagggaagaagctggcaaggagaaagaacagctcagggctgagacccacagcagcagggccagccagccagggcggagggcggcagcctcaggccccagctggggctccatcttgggctctg

SEQ ID NO: 151497 - DNA, 341 bp, Homo Sapiens
ttgtggtctggccatgcagggctgtacagagtaaaccacctgatagcaataactcaagcataccctgagaatgactttgtatgggagaatctgtgcctctgcatcagccccaaagacctgcagcattgagcgtgtcctgcggaaaacagagaggttccagaaatggctgcaggccaagcgcctcacgccggacctggtgcagtgacgattcgagaaagttcctagctgcgacctctggcctgaagatctgacaggatgacccttgccagtccacccctctgccagggctcaactcacctgcatcattctctgacagctctttgccagaaccacaaatatcg

SEQ ID NO: 151498 - DNA, 708 bp, Homo Sapiens
tttttggaaccaactgaggaattctgtacacaaagcttcagcaaacacttagagaaaacaagacaaacaaacaaactgggtccttggaaacagttctggcacacaggcagaacactggaggccacctcaaaggacagaggccatgctttcgcatttggaatgtggctctgccacacagctcactcctatggtggggtcagaggtcagaacacaaaccacccatgtgggctctgctccctcccaacactctgtgttcccacagggcttctctgcgggcagccaggcacctgtcaggcttgggcaggggcctgctgagaatctgtgaatgcagaggggagggctcatggccaggattccagccagagatgaatttccatgctctgggccagggctctgtgccggcccctcatgaggtggctggctgcattatggggagatgctgcccacggcggagatggtggcagtggctgtgaagaacagaggtacctgaattctgtgtcctcagctgtcactttccggtgagacaagtggagcagggcctttgatcactgtggtcacagacctggtactgggttttgcccttgtgtgctcaaacatttctaaggtgtcccaagccctggaaatagggaagggaagggtggaggcttggatctgaggtcttgctgtccactccctgcctgcctgcccgcatctcaggcatgggcaaac

SEQ ID NO: 151499 - DNA, 1035 bp, Homo Sapiens
gaggaacaaccgcagcggtacggggaagcctggaaaccgaactgtccctagcaaggggcctggccggaccccttatggagaaattccaaacaccgtcccagggtgcaagcagcagggcctttggggtcaacaggcacatggggccccagatggagggaccttagagggagggacaggaagacagggccagacagagcaggccatgaggacttccccggcacctcctttcttttcagagcagatcctgtgtccctactgtggggactggaacactggcccaagcttggcccttgtgcaggggcctgccaggaggctgggatgattagttccattgcacagatggggaaagtgaggttcccaagggagggaagacttggcccaaggccacacaggaaaagccagtgctatgtctgttgcaccagctggtggcctccccctcaaccctgctggattatccacctccctgctcccaaccccacacctgtcctgtggttccgtgggagacaactccctggttttgggcatctctggagcaggcataggagtttggcttagggctttctggaagatattgtccctgcagctcttggcggcttcgaaggagcctagcagctcattcgagggctcccagtccttgcagatgtggcagttggggtctaagaagtggtggtcatgctgccccgtggtgtcctctgatgcgatgggcagggcctgtgggctgcagtccatgaacatctgcggtccccttttctcctcctggtcccgccagcgggccagctcctggggggccagctgcatcgagctcatccgcaccaggtcgtagggggtgacatctccatgaaccactttgagaaacaagtccaggttcctggggtcccgcaggttgaacagcaggctgcgatacttggtcttgtaccggccattggtgccttgtgtcaggtcccagagggctgcctcaatgccagcagcaatgccctccaccacctcctcactcagcactgggtctgggagctcccgaaggctgtggaggccagg

SEQ ID NO: 151500 - DNA, 781 bp, Homo Sapiens
tggtctccatcgtataaatcatgtcttctttgggatagccatagctggagaaaatcagcgggcaggagtgttcgtccatggggaagttgtgcagctgcagctggcactcagcattgatggtgagcctcaaagtgtaaaggattttcccgtcattccgaatccggaggagctgattgggtgtggtgatccagtgagcctctgcggttttagaattgcggaagatggtgtctgggatccagattaaccccaccatgttgctgttcagagtaagaattttcattgtgctgttgaatcgaaggcgactatctgtccaggtctgagcaaaaatatgtcaatttggtattccatgtttattgatgacacaggaccaatgctgttaacataaatgtcaacgtcaattacggtcggttttattccaatatctggcctcagctttttatcatattctcttagcaacttgttgagaataagagtcacgtcggtgtcttgggattttggagccaagacccacttttggtttgatgatgaatcttcatattcatcctcttccacctttctggaccgcgcgtgcaagcccgagaacaggcagaggaggagcagcagcttcggggccatggtgccgtggagctcggggcgcagggtccggggcctcggccgggcgcggcttcctccggcgcggacctggtctccgccggccctctttgccctggcttcctccgaggctgctggccgcggcgggcgggacaggtatctactctggcgctggccgcgcccccgcggg

SEQ ID NO: 151501 - DNA, 806 bp, Homo Sapiens
tgggaccccgcttgacgcaggaatggtggactgtcaaagtgatcacccctcatggggttccttctaagggcctcccccccgttcatgcttcatggcgttagccaagcgctttcctccggcctcttgatctttcaggactcaaaagtgactttatttctccgcagaagacgcccttccagctgggctgttgcttcacttcccctccgggacctgggggtccccccccaccctcatccccaggcctcctgcccagatggcctggtttcctggagatgtccagctgcctgggactcagagctggcggagagacagggaggcttcacgtcgggggaggagtgagagccacaggccacagccacggagctgggccaaggctgcccccagccccagccacgccaggctggggagagggcagccacaggctcaggggagcaagctcagaagccccgtgggaaggaggagacatcagggcccagcccagaggagggcaggccccaggctgagcaggagccccccggccagggcccaggggctgtgccctgcccctgccgccccattgcacaaatccttctcgcagcagtccacgtcgacctttaagatcccagagttaataaaccccatcagatagtctgagaaaaagtgtcgcttaacgaagtcacaggaggaggcacacatcttgttcaccgagtgatccttcctgctgctgctgggatcggtgattcggacactggcacacaccgtgtcggacggctggcactgctttggggtgcaatggctggagttggtggtcagggtgcagtcctggc

SEQ ID NO: 151502 - DNA, 853 bp, Homo Sapiens
gagcgcacctacgtggacgaggtcaacagcgagctggtcaacatctacaccttcaaccatactgtgacccgcaacaggacagagggcgtgcgtgtgtctgtgaacgtcctgaacaagcagaagggggcgccgttgctgtttgtggtccgccagaaggaggctgtggtgtccttccaggtttcagcgcaagtacctctaccaaaaagtggaacgaaccctgtgtcagccccccaccaagaatgagtcggagattcagttcttctacgtggatgtgtccaccctgtcaccagtcaacaccacataccagctccgggtcagccgcatggacgattttgtgctcaggactggggagcagttcagcttcaataccacagcagcacagccccagtacttcaagtatgagttccctgaaggcgtggactcggtaattgtcaaggtgacctccaacaaggccttcccctgctcagtcatctccattcaggatgtgctgtgtcctgtctatgacctggacaacaacgtagccttcatcggcatgtaccagacgatgaccaagaaggcggccatcaccgtacagcgcaaagacttccccagcaacagcttttatgtggtggtggtggtgaagaccgaagaccaagcctgcgggggctccctgcctttctaccccttcgcagaagatgaaccggtcgatcaagggcaccgccagaaaaccctgttagtgctggtgtctcaagcagtcacgtctgaggcatacgtcagtgggaatgctcttttgcctgggtatatttcttctccttttacctgctgaccgtcctcctggcctgctgggagaacttggaggcagcaagaagcagac

SEQ ID NO: 151503 - DNA, 826 bp, Homo Sapiens
tggacttccttgtctgatgtactgttgagcagcagccctatcttgttctgctagactttttgccccagacgtacatgctcatgttcgaaaagttcaggaggcacttgtgtagaatcatctatacccagttgtcctatatttaagccaagttccacaaagcattcttgtcaattcagggatgtcttttactttcagtggaacgttgaattaaacccaaatgagtcctgaaactaagagaatcaccgttttcataatttgggttgcgaagattaattaatacctcaagaaaatccttaggtgcataaacaggtctgaaaaggcttaaatctggttcatcagttcccatttcattccatttattaagaagttctttctgttctccaactggcctctttcgtgccagtgggatactcagttcagtgcacatactatttaaactcttcaaaattcttttttcccaacttccctgtgctttcctcatgtataccaaaggttctttaagatgttcaggaggtgcagcaggatgactaggtaaaggaaacacactcagttcactataaacagcattctgaagtttcttctcccaacctgatattttaaagaattccttaatatcttctttcagtgattcaagtttaatctcaggtctctgaagactggcccaggcctgccgttccagctgagagtacaaattggagcccttgagcttttggactatctgggcaataatgagagagaggtccgactcctcctgcaacatttcccctgccctagcccgccaagccgcggggacaggccgccggcgcggagcgaacgggctaccggg

SEQ ID NO: 151504 - DNA, 958 bp, Homo Sapiens
ctctgagattagtggctataccacgcgggttcaaaccagaacacgagggttctcctattccaccgtgtaagcattttttgaaggaagtggcactattgccccccgtgttctggggaaatacccagggtatttcatccagtgtccccaaccagcgacagccaccatttcccgaaacatggtgaaagaggcaacaggtggatggcccacaagcaagcccgacgctgccaatttccggcagcgaccaccggatgcaatctcaaggtcttcttcatcatagaggagttctgcagcaggaagaagggacggagaagccggcggatccgcaggggctcatgacacacgagactcagggacacggtccagtccaccagagacaccaccagcaccacgaggtagcccagcagccaaaggtttttctggaaatgggcccacccgaacaggtaacccttcacagagaggtcggccgcaaagaccagcaggcagagcacctcgacactctcggtcaggccgcagggcggctcccagggggcagcgcggtagcgcacgtccgccgtgctggtgagtgaggatggggtctcgataaaagccaaaaacaggatcaagaagatggtgaagctcaaagtccgttggcatacgttcgagtaataccgtcggtaaagccacatcgagctggcatccacccggtggttgatggagcggtactgaatagcatcttcgatgaagaccacagcctgatcaatgcagaggtcccacctggccgcggcaccagggccgacttggatgctgcggtaagtggtcagccccgccggccagtcgccgccaccgccgcgggccccgcccagcaggggctccgactccgcctggggttccgccatccagcagcccacgcgctggacccgaccctcagaagctcaagccccgaaggcgcccagcttcactgcgcaggcgcggagatcag

SEQ ID NO: 151505 - DNA, 775 bp, Homo Sapiens
gttcttgctcatagcctagagacctcctcgtggctctgcctctcggttcttcctataaggccatagtggcctcaaggtcaagacatctggcagaatagaaagcttcacgctgagccatataagcccaggttccggcagcttgggagatcctggtgttttcctctggggaaatggatagtaagctggtttgccagacctgtgtggttctttatggaaagaggacattgagtgctgaattctaagccagattccactgcctttgctttgggtattgcccacctggcatggaagctgggcagcctctgggattccggttccttgctgagtcatctgattggtttcaaaacaagtgtgtgtctccttcaggagggagcctttggtcagatcccacaagcttgcccctatgatgtacttgatgactggtgtcctggggggaggtttggaccaaacaatgcatctccaggtgcgtgtgccatggagacttgggggcctgaaggcagccctgggcagcctcctccagcctcccctccacctcagaatctgcctcttccagggacagtgagcttcttctctccttgttaatccaaacagcattgaccatcgattctgcaggagcaggtgtgtttcctccttttggaagcaccaggaggtgggcctgggtcctctgctgcctcttcaagccttcatacctgggcttcgcaggaactggatgctgagtgggggccctttcccaggggcctgagtcctggagccctcagccattaagtgagatcca

SEQ ID NO: 151506 - DNA, 795 bp, Homo Sapiens
tgggcataggccacattgtcataggcaaggggctcagaggctgccggctggggatgttgaagtctgcgctgaaggcgtttggcaggaagatcacagggtgcactggcctgggcatggatggcttggcacccgaagtgcatggcaatgaccgctgtgaaggactccaggacagtgaagatagtaagcacggccagatagcgcctgtccacatcccggtttggtaacaccgggagtgccatgagcagaatggctgtcccagcaaaggccgccatgacgctgaggatgttggttgcccaggctgctcctcaccaggcaactggtgtggttcttctcggctgccactgagagggatccggagatgatgaagcaggctcctccccagaaggggacgccgccctcgatgaagaagatgcccacgtggccgcggcgaaccatgagcagcacgctgccaaagcctaggtggatgaggccgatgaggatctgcaccgtccccaaaactttgggctctcctgtcaggaatgtctccacgggccgcaagtcaggtggctgtgtggcccttggtgtctgtgccccccgcggtggctcctcaaacgtgcataatccctggaggttggcacatggatgtgggcagaatggccggaggtgggcagaggccactggcgttgtcttggcgggatgacaacaaacactccattgctggcgggagctgcagacatcgtgctcagagagcctgggaaaccaaggcgggattccccgaaaattgatgagttttcctccttcaagcgtaacttcaag

SEQ ID NO: 151507 - DNA, 696 bp, Homo Sapiens
cccttccttcagaactcccttcctggctggaggagatccccttggccccggacgctgtgctcaatgtggaccagcttctgcaggttttccccttgctccatgctgtcgttggcacggtctgtgactttggagatgaggctcagtgcaccctgtgtgttgtcgtactcggcggagtccggacaaaggttgtttaaatagtctgtgaggagcacttggtactggaagaggcgttgaaccacccgcagcagccgatgcttcgcagtctggctgcctccttgtacactctgctcaaattcacggacagcagctgccagccggggagagtggaggcaattctcactgagcagacctaggtacctgtcgaactgcaggatgtgagtggcgtggtgatcaaacccctgctcccgggcaaggaagacgtcagctaccttctgctggctctcccaatttgacagcctttcctccagctcctccaggatgccttgatgaaggtcgtggatggctgggagttcactcaggccctgcctcagctcctcccgggccaatgtgtctctgccttcatggtccatgtcatccaaggccctcatgacagctccatggaaatccagatttaagtgctggagcatctccacgtatgctttctctgaagatagcagttcctgtgcgatgacaagggctctggactgtccttccacc

SEQ ID NO: 151508 - DNA, 949 bp, Homo Sapiens
cctcggcactccttttctcctttcccctgcttgcgcctcccctttgattcctgtgcccttgcctccgctctgtgcctaatactgccactgtccttcctactccttcctgcgggtggcctctccagtacctgagggccacacctggtcttggaccaggccttgtcaaaggagtaatcttgcacaatttaggtagttcttggtctatttaggatctggccagtaaataattctgggatgagtaagattacaggggaaggtaacgcctggcctacgccagggcataggcacagaggggcgagatgggactgacccagctggtaagccgccgcccgccagccccaagggaaggtctcaaggaaggccccatggacagtggcccaatgctcctggggtaagtctggtgcctggggtgactcagcagatccacactggttagccttgcaactgccgtggactctggaagccgagggagagagctaccagccttgcagacagatgggccttgccccagttccccgcagattctgggaagagggagccatcgcccatgcctgtgcccaggtcagggggacaaagggagccctcgaatctgatagttgtttctatgaaaaagttggtcagtggcttaacattataaaaatatataaatggaggttgaaggctgatgacacctttacaaaatagagccaggagcagagccctgaagagtgacactgtggctcaaggttagaatggaaggagccctgagccccgcaggggtcaggcccacctcacctgacctgtcctccggccagctccatcgcagtggccaccacattcctcgcattgcggtcggcaccgtagtacaggtggctagcccctgtgaacacgaccatctgctaagtaccagtgacattgcgaagaaatccggcttctccggggaccctggcctgcctgtcgggcctcttgc

SEQ ID NO: 151509 - DNA, 705 bp, Homo Sapiens
ggccagtagaaaaggtagcctctagcctagggcagagggaatggcctttgaaatctctttgatgggaaggaaggaggcacagaagagaggctccccttatagctgcagtagaaagggggcggggaagtgaggggaggagagacccagcaaggccttggagggtgactgcccagatgggaaaggtgggccacaggagagactacgtgagggtgggggctggggggaaaccctagagagaggaagcaacatggtcaccaggaagagacaggagtctagatggatctgaaatacaaatcctcttccaccctgggggcctcggactcaggatgatgagtagaaaagtaggagctggggaagccctggccacaacccgaaaggagacctcggaggacagaccagagagagcaacaagggagacatctgaggacctgggaccagtccaggcctggctgagatgcctgcagaggcacgtggcacagagcgaggctcatactgtccgggccacttggggccactctgggttccaaggttcctggtgcagagatctctgcccagggcatccttgagtcttgggtgggggaggagggcagcaccttcccttgcctttatgtgcagagaggagacagccttgcagcgctgtggagtaactgctggcacagaagtaaacagaagtctgagagggagcagctgactccagctgagatc

SEQ ID NO: 151510 - DNA, 823 bp, Homo Sapiens
ccgttcaaggacgtgccgctgagatccaggacttcgagcgtgaccaggggcgcgccatcctctccagcgaacgccgcctcggcgatgccccccctgggctccgcgacccagcgcggtgcaggagaggttgaggagctgcagcgcggggaagcaggcgaaggcccggggctgcagcgcccgcagcggattcccggcgagcgccagggcgcggaggctgctcagcgcgggcccggtgcacggcggcagagcggccagctggttgtagctgaggtccagggtgtgcagccccgccggcccacccgggccccagcgcagcgcggcgatgcggttgtggcgcagggtcagcacctgcagctgctccaggtggccgagctcggaagtgctcagggcgcgcagcaggttgtggctggcgtcgaggctgcgcagtgtgcgcggtaggcagccgggcaggcgctccaggttgcggttcgccagggtcaaggccgtcgcatccgcggcgggcagcccctcgcagggcgagtcggtggcgttgctgccactgctcccccaggggccctgctgagtgacccggaagagcgggaccttctcctggggagggtctgcccagctggggcgcagcaccgtcagcagcagcagcggtagggtttgccgcatggcgtctggaagtggtccttttggagtgtggcttctctggatgcacctctgaagttctcagctttgttttatagattctagggaccactgatttggacagcaactcagctatgaactccagagggaggcctgtctcccagctgcctctctcccacaacccccatccact

SEQ ID NO: 151511 - DNA, 1088 bp, Homo Sapiens
cagttttttcttttggccacccccccgggggagagccccaagggccaaattccccccaccttccaaggtggggggggtgttcgccaaagaaggtttgattccgatagggcccttgggaaggaattccccggttcccaaggaggggaagggaacctcaagttgcacgtttctggaccagaaaggaacctgtagatgtgggagtatcctgaaagattgtgtgtggcgacagaagccaagtggtggggagtcctgacagtccagctgctgcaggttgggggtcatctggaaaattccccctccagggtcgtcagccgaggcatctccctcaggtagagggatgtgagcttcggcaggtctctgatcccaccctgactcaaccccgttcaaaggaacgtgccgctgagatccaggacttcgagcgtgaccaggggcgcgccatcctgctccagcgaacgccgcctcggcgatgcccccctgggctccgcgacccagcgcggtgcaggagaggttgaggagctgcagcgcggggaagcaggcgaaggcccggggctgcagcgcccgcagcggattcccggcgagcgccagggcgcggaggctgctcagcgcgggcccggtgcacggcggcagagcggccagctggttgtagctgaggtccagggtgtgcagccccgccaggcccacccgggccccagcgcagcgcggcgatgcggttgtggcgcagggtcagcacctgcagctgctccaggtggccgagctcggaagtgctcagggcgcgcagcaggttgtggctggcgtcgaggctgcgcagtgtgcgcggtaggcagccgggcaggcgctccaggttgcggttcgccagggtcaaggccgtcgcatccgcggcgggcagcccctcgcagggcgagtcggtggcgttgctgccactgctcccccaggggccctgctgagtgacccggaagagcgggaccttctcctggggagggtctgcccagctggggcgcagcaccgtcagcagcagcagcggtagggtttgccgcatggcgtctggggagagaacagcaggacgcccatcaaatccacatcccgggaat

SEQ ID NO: 151512 - DNA, 818 bp, Homo Sapiens
cgggtttgggtcagagcacttccggctccgccagtgggtgcagtccagcccacagcccgaccactggctccaacgggctccagctgccgtccacgtagacgatgacagcagcggaggccctgcggctgacgtgccacgatgttcttggccacgcaggtgtagttggccgtgtcagcaaggcgggcctgtcgcaccaccaggctgtgctcccgcgtgatgtatacattggggtccagggacgggtccaccaggtcctcgttccggagccactccacctcggctggagggatgccctccggtggacggcagggcagcacgatgccctgctccagggacacctccttggccagcggctcctgctcgaagttcttgcgcaaataggctatgcggatgtaggccttctgactcttggtggtgcccgaggagctccatgccacgcactggcaccagtattcctccagcccgaacaccttctcgacctgctgccttgagacattaatgcggacctccatggtgggcagcccactgctcccgtctgtgctgcgctcgatcacgtggtccacctggcgcacccactccccgttgcacttgaagaagatctgcgtggcgggcacggccttgcacacaagcagcactggcttgttcttgacgatgtacacatcctcgggctccaccaggaagtggggaagcaggtccgggttggcaccaggcactgggttggccacggtggcactctgctgggcacccgagccgcggagccaagcggcgaggactatgcccaggagcgctggccacaggccgggccggacggccatggc

SEQ ID NO: 151513 - DNA, 842 bp, Homo Sapiens
cgtaggccgctccagccgaagaagggtggcagaatccaggccagggcatagagccaatcgcccagcaggacaaatgccgcacgccctcttggacgccacaccaaaggtggccagcgggcgtgtgattaccaggtagcggtccagggcgatggccgtcagggtgatcatggaggaaatgccaaaagagagctccacagaaggcatagaactcgcagcctgtctccccaaagagccactgcttatagaggctactggtgaagaagacaggggcctgggtgaaggacatgaggaagtcgctgaccgcgaggttgataatgaacatgttggcaggtgtccggaggcttctgctctgcatcatcacagtgactccacgaagcacagctctgcagaaggtatagatgaccgtcaggttgcccagcatccccgtgagtcccaccagcaagatcactgtgcccagggtatagtgggcatggtctggaacatcaaccgtggggagggggacccaggcagcagccacaagtcccaggtgctgtgggactgatggatggaagccggcccaggctggagatgctgcatctgggagctgtcccaccagctgggtggtgctggggtggccatgcagctgggctcttgggttgggctgggcaggactcttggccccgaaggagggttcatcctgagttgggatggtccttgctcgagcccacagagaagtcaagggcacagggagctcaggacttcagctgtgctcagcctcccaactttcctccatcctcagcacccctgcttagcctacccgctgctttctcctgtgtccggcgcagatccagcctggagctgct

SEQ ID NO: 151514 - DNA, 746 bp, Homo Sapiens
  misc_feature (728)..(728): n is a, c, g, or t
cgtgcatgaggttggctggggcaggggcctcaagctggattctagggtcaaggccaggggtctgtgggcagattccatttccagggctcagccagattcttgaactggtgtgagttctggaactggattgggttccagaaacaggctgggttccagaactaaggtgggctccagggctgggctgaattcttgagccggtctgggtttcagagctgagcccggtctcagagctggactgggttctggaactaagttgggctccagagtcgggctgaattcttgagccggtctgggtttcagagccaaactgaatcccagaactgaactgggttccagagctggactgagcctcagagctgagcctggtctcaggactggactgggttctggagctaagatgagctccagggctgagctgaattcttgcagtggtctgggtcccggagctgagctggtttccagaactagtctgagttctggagctgggttgggctccggaaatcagctgggttcccgaactaagctgacttccagagctggcttgaattcttgagcttatctgggtcccagagctgggctgagttccaaagctaagctgactttcagaactgctctgcttcccaaagtccagttgaataccagagctgtctggggctgtggtctggagctggtatctagaacctggcagggttttagaggcgaattgagtcccagaggcatcccggganaaacggaccggtaccagc

SEQ ID NO: 151515 - DNA, 740 bp, Homo Sapiens
gggcgctgcagatttcttgggtcattggaaaatcaattgtctcattgtgcaatagggattaacactggttgagttgctgcgtgccctttggtggcaggctttaggaaacaggaagttactactttgtgcttctagattttccaggcttttctcgagaggaagctgtggaagattccttcatgaagaatatcctcctacaggtcttgcctcgatcattcccagctgcttggagttgagcagcctccgaggccagtgctagatcaggaacactgctgggcccagcctccgatgtgtctgccagctgcacagatgagtggaaaattcccgtccttgccctgggcacaaggaaatctcaaagggatcaggatatttctcatcagggctagagccatcatcactggtcttagcattacagagcatcagggacctggagatggaccgaaattttgcagattttctgctctttccagcgcggctgtgcgactccatccgtcaaagaggaagtgaagctgcctttcttcctttcctggtctctggcccttggctgacgggtggccactggacagggcttagctgccacttcatgagtcccgttctgccttctcgggaagactctcttctgcaaactcattgcacagggtttgagggagggagagagagctgtgaaaagttcctcccaaccaggatcaggggtccatgggaggatcgatggcagcttctcggctgggagtatttgatcc

SEQ ID NO: 151516 - DNA, 983 bp, Homo Sapiens
ctcaggaggaaggaaggaaaaacagccgtctctggcctctggcctctccaggctctccaccctgggggcagaatcaattctgtagccctctagcaccggcagtggctccgcagtcagctgggcagtggccgtgactgggtcactctaccctaggaagtgagtgcaggggctgctggagagccagaggctggcagcgactatgtgaagttctccaaggagaagtacatcctggactcatcgccagagaaactccacaaggaattggaggaggagctcaaactcagcagcacggatctccgcagccatgcctggtaccatggccgcatcccccgagaggtctcggagaccttggtacaacgcaacggcgacttcctcatccgggactcactcaccagcctgggcgactatgtgctcacgtgccgctggcgcaaccaggccttgcacttcaagatcaacaaggtggtggtgaaggcaggcgagagctacacacacatccagtacctgtttgagcaggagagctttgaccacgtgcccgccctcgtgcgctatcatgtgggcagccgcaaggctgtgtcagagcagagtggtgccatcatctactgcccggtgaaccgcaccttcccactgcgctacctcgaggccagctatggcctgggacaggggagtagcaagcctgctagccccgtcagcccctcaggccccaagggcagccacatgaagcggcgcaagcgtcaccatgaccgatgggctccctgctgacagggtcaacccgcagcgatggctgccccaccagtacgtcgctgccccgcctcgggactccatccgcagctgtgccctcagcatggaccagatcccagactgcatcacccatgtcgccatctccgagagcctagtccctgctacagcagtgaacccgtgtccatgccgccctgagcccttctgcacagattgctgcctccttgtgccgcgttcaagtgagccag

SEQ ID NO: 151517 - DNA, 923 bp, Homo Sapiens
ctgggctcatggacggcgggcaaccagggacgcagcaaactgtggcagaagggctccaggcggcatggacacggttacagtgctgtagccagggagctagcgctctcggagatggccgacatggtgagtgcaagatctgggatctggtccatgctgaggggcaccagctgcggatggagtcccgagggcggggcagcgacgtactggtggggcagccatcgctgcgggtgaccttgtcagcagtgagcccatcggtcatggtgacgctgcgccgcttcatgtggctgcccttggggcctgaggggctgacggggctagcaggcttgctactcccctgtcccaggccatagctggcctcgaggtagcgcagtgggaaggtgcggttcaccgggcagtagatgatggcaccactctgctctgacacagccttgcggctgcccacatgatagcgcacgagggcgggcacgtggtcaaagctctcctgctcaaacaggtactggatgtgtgtgtagctctcgcctgccttcaccaccaccttgttgatcttgaagtgcaaggcctggttgcgccagcggcacgtgagcacatagtcgcccaggctggtgagtgagtcccggatgaggaagtcgccgttgcgttgtaccaaggtctccgagacctctcgggggatgcggccatggtaccaggcatggctgcggagatccgtgctgctgagtttgagctcctcctccaattccttgtggagtttctctggcgatgagtccaggatgtacttctccttggagaacttcacatagtcgctgccagcctctggctctccagcagcccctcgggaccccagcgcggggcaccttcggcccacagcagtcatgcttcccccgctgtcgccgccggcaacccggggacctcctaaacccagcggc

SEQ ID NO: 151518 - DNA, 1149 bp, Homo Sapiens
  misc_feature (549)..(549): n is a, c, g, or t
ccgccccagaattggagccccccgatttcgccggaaaagccctgtcccacccctcaaagaacccagtttcccaggggggggcctttttcaatggtggccctctcccgggaaaggcccctgttcccccccaatggcagcccagccggtttttggcaattggctgggggcaccaaggcaaaacctttcggggggccgaagccccaggcgcaagtgccctgcttgggaaaagctgcaagttactgccgaatgtgtttctggacccctggcgcagggtttccagccgggttttgcaaccacttttctgtttgggccccactaatggtcttccaggtcgctgacccagagcctgcttgcgctgctgcagtgcttgctccaggtcctcgaacgctgcactgatctgggccagggcctctgccttgcgctcctgcagctgctggctgatgcccccgactaaggcaattgctgcggacagctgtggcaatcggccacgcacagcctcgagctggcgctgcagggccgccttgtgctgctccaccacatcctcagcangcactgtgccatgctcacgatgctccccggcgcggcactcaccacacatggccgtctcacaggcctcacagtaaaactccatcgtcttgccttcatggttggggcaggagagagggcggccagccactacactgagggggtgggggtcctccgggtcgtgggccccatcaggtgcctgctgcattgcctccatgaggctgctgatgaagaagttgttctgcagtgccgagacgccctgctctgggaggatggacgtctgccggcatactggacaggatagcgtcaggctctgggcagggatatagttttggagacatctctcacagaaggtgtgcaggcaaggaagaaccttggggcactggtaccgatccaggcagatgctgcataccaggaactgcttgtccattggctggacctctgggccagggctgtcctccctctttgccatggcgcccacagatggctcccgccactcacaccagcctcgcgttggaacaggatgcgagggcaaagctcggactgcggccactctgaagggcccgcggcgctgctactgctgccagcgcccgtccgcccggccatcccgggaattccggaccg

SEQ ID NO: 151519 - DNA, 986 bp, Homo Sapiens
tgaaagattcaggggcaatatagccagccagaatccagaggaggacccagcatcccatgggaagagacttcaaggtgaccagaagtagggactcccttgttacggcacagggttcagaatgctggtgaagtgaatagtttatcttggtgataagacagatgatccattaccacccagctgcaactgtgtcccacagacattgcgccttcctttaaaaagccctctgcgaattaggaactagaatgaaaatccacctttccaagatcagctttcttaaatatcttggtatttcaataaacatacacttcatacacacagatagatttgatatacaagtacataaacctgacatgcacattgaagagaatttatcattcatgatgttaatatatacagaaattctaaggaaaattgcaatgttttaatataaactttctttgttaatttcagagttgataattcaacattttcagccaaaatttggccaaagggggttaaaacctgatcttatgtctggaatcccaatgtgatcctcctgtcttcctgggccccccacgacttcttgctttggtccttgggtctagccactaggtccacatcctccaagtcaggaagtcattgaatccttaaaaggacaaagtagcctcttcccttgtcagaaaagcggacgccgccttcccagactctcctcatgaaaacagcacccatctaaatagtgatcatgaaaaatgcccctttcagtccacagagaaaaagctttctccttttctaagagtctatgggcgccgccatgttgctgtacggaaaaacgtttccagggcgagttgagcgttcagggcactcctcggcgctcaagctgcccacaggtcttccgacctaactttaggggtcgtgccagtcttcgtagggacggccacactggcccacagaccccagttcctggggtgacgcagctgggcgcgaccagcacgcagccttccagcgac

SEQ ID NO: 151520 - DNA, 610 bp, Homo Sapiens
attattatgcttagtttattcctataactgttaaatatgacattaatataccgattcgttgatgaactgagattatctgtaattattttcactagagtctagacaactactttacagaacagtattctacatcattgcataatgcattcttgaaaacatgacagaagtcaagaacaaacgacagacttacacatttttaaagactttcaactcttaagagcagaacaaatgtaataaaatcccccataacacccatggtgctgcttgtaaaatggctccccatgatgcagcctcctgacagtcatggttttgtccaataaccatgttctgatcaatttggagcctacctcaatgatttgtttttaactatgtcaattccatgattagattataaagacttccatgttacttgcatttgctgcagcttgtcttgcttgcttgcccctaatgaagcaagctgctgtattgtgacttgctccataaaaagggctgcatggcaagaatgcactatagtagatgggtgaagaaataagaccaagaatcgaaaaggaacttaattctgccaactaatcacctgagagatctcagaaccatactcagtcaatctttc

SEQ ID NO: 151521 - DNA, 589 bp, Homo Sapiens
gtgtttagtttagttttggtttgtgtgtttggttgttttaaccagtaaaaaaaatttttagtaagttccaattgtgtgtcagaattgtgctaggcgcagggggcaacgaataagcaagacagatcaagcctataccgtcttgaaatttaagtttagggaccactctctgtcaaaggatccagcgctggtaatatagattgctgaaggcctttgccttctttccaccaggcaacagaatttgtgtccccgtcactgcttcttcttctgtgaaaaatatagcttcagtttggtccacgaatacagaagttggtcagagatatgttgtctgtcaagcacacaacaagcaaaacttggccaatacacaccaatcaaatgcacttcctttttccctgggagctcctgccacatctcagccctgcagggcagtcttcataagggagacaaaagaagggctatgcactggcactgacagttgggcaggtagtgctcaaataagcctaaatctcaacattccaagggaatcttcaagatcaaggtagacctagtccagtcatctcttaatcttttaaggatcactggactggatgtg

SEQ ID NO: 151522 - DNA, 896 bp, Homo Sapiens
gactgcgatcagacgcgcgtgcccagctgaaccaggtgcgtgagaaggctgccttcagggtggccgggggctccctccagctgtctctggacggagggacgggaagtggccagaaggggaagtgtgaggagttcccgtccagcctgtcatcagtctccccaggtcttgaagcggcggccctgctcctggccgtgaccatggaccctctggagacccctatcaaggatggcatcctctaccagcagcatgtcaagtttggcaagaagtgctggcggaaggtgtgggctctgctgtatgcaggaggcccatcaggcgtggcacggctggagagctgggaggtccgggatggtggcctgggagcagcgggtgacaggtcggcagggcctggccggcgaggggagcgacgggtcatccgccttggctgactgtgtgtccgttgctgccggctgaccggcgagagctgcccccgggacaccggtgccttcctgctcaccagcaccgagcgaagccatctacttggctgctcagcaccgtcaggcctggctgggccccatctgccagctggccttcccggggacagtggaggcctcctcaggatccacagatgcccagtctcccaagaggggcctggtccccatggaggaaaactccatctactcctcctggcaggaagtgggcgagtttcgcgtggtggtgcagaggactgaggccgcacccgctgccagctgaaggggccggcctgcttggtgctgtgccaagacgcgatccagctgagggaggcgatggcacccaggcctctacagtggcctacatttctgcgcaagttcggtccgaaagggcgtgtctctttgagccggccgtcgtgccatcggtgagggctcttggcttcagaccct

SEQ ID NO: 151523 - DNA, 776 bp, Homo Sapiens
ccagggttagggccctggcgggccgggagcaccaggactcactgcagcttgtgcggcgtctcagcggaccagcgctggcactggacacccttgcgggtcttgctgaccgtgccgcggtactgctcccccgcgccgtggtagcagtctgcggccggtgcggcagccatcaggccgagacctcgccccggccctccggttccaggcttccagccccggctctgtagcccccaagcttgggcctcacctgggccgcacgtcgtctgtacaacgccggatctggtagcaaaagcccacgcgcgtgccgggccgcagggtgaagcaccagggcgcctctgagccgtcgaggttccagcagaagttctcccgaaggtctctaagcaggcgctccactcagccctagcccgccagcctccagccctaagcccgtgactaccctcctcccgtctcacccgcagcagcacgtcccaacgcccgcccccccgcccacctcacttgcacgcgtatttttctggcgtaaatcggtgctgatgcgggatttgcgcgtccccaacgctggcaaaggtacgcccgcggtggtggtattggctgtgccccggtagccctcacccttcccgcggaagcagctgacagttgtggcctcttggcggggctgtgcctcggacccgcagcgggggaggtcacagaactctcgctcgatctgcggatccgtagtgtagcaccatggccgctcggagccgtcaggattccggcaatagttgtcgtccagaccttggtcg

SEQ ID NO: 151524 - DNA, 521 bp, Homo Sapiens
ccaatttttcctccattaggacgcccaatagcagaatcaaagccatctgaagagttgtgtcgtcgacggttcacatcataacgattctctgtccatgcaaagttttcagaatgcttctcaaaattcaatgacgactttgttgatgatggtggagtagggaaattaagccaggctggagcaaagtcatgctgcgccatttaggtccagtctctccaactcagtgaaacaaggcttcaacacctcatggcaagtcccataatagtacttacaaattccaacaggactgcacaggaaggtgttggttttttctctgtaatctttattttccagtttgtatttttattttgtatcctctgaaataatatcgaagttctttgaagatacttaacctacgactatttgacatagagttacttcaagtcagctacccatacttctgttttaaagttttcatatggctatctcccgaattagccaagttctttagatttaagatcaaagtcttctttattattccatgt

SEQ ID NO: 151525 - DNA, 987 bp, Homo Sapiens
ttcactgtccccatgacgtactttttccccgggttccataagtgattgctgccttcctttgcgtgatccacagggttatctgaaattactatgtagtccacacccagagtagtatcggtcctgtttcttttttccacaagttcctccagggctacagagccagcctcttccatcccctcaatgatgaatttgatattcacaggaagatcttgctccagggctctgaaggcgctcacagcattgatccaagccaagacagggcctttgttgtcggtcgctcctcgtccataaagtttcccgtctacctccgtcagcacataggggtccgtgagccacccatcgccccggtcagcaggctgcacgtccaagtggccgtagaagcacacggtgcctttcgtgggatcgctccccagttcggccaggatgacgggaggtattggaagactctgaccatcgggcagctgctgaggacccatgtccaccgaggccacacgggcccccaggcgctgcagcgtgtccgcagccacggccatcattctgaagagctcttgtctgaagcgaggcacaggctggacagagtcgctctcgatggccacccactccttcagcgtctgcacaaattcatcctgatggaggtcaatgtactggaagactttctctaacagcgccgggggcggggagggtgaggagaacatgccgcgctcatgcatgcagcatgcaagcacagccagcagggacgcagccattctcccgagtttgggatccattaggctggagttctgaagcctctagcaactttcccaacctccaaaaatgtggcagagggagtcccatgaaagccccaagagggtgacattaaatatctctctgtgccctgacccacgttgtcccccggaaggaagacgaggctggtatagtggagctacttcacatctggagaacaaagcggcttcggaggtattcattcatcccgggaattccggaccg

SEQ ID NO: 151526 - DNA, 1014 bp, Homo Sapiens
  misc_feature (51)..(51): n is a, c, g, or t
  misc_feature (55)..(56): n is a, c, g, or t
  misc_feature (61)..(75): n is a, c, g, or t
ttgggccattaagggcccagcccctgggggcccccagggatccaacccagnccgnncccannnnnnnnnnnnnnnccacaacaccaggggtccattccttttcttggccgttcccccaggctggtgcccttcgccccccacatccctgtgctggtgacccccggagccttgggctctttctgccctggaggttggggaagtcctgggtcagcaggggtgggctcgggcgtcctcttcaccgtgcgcgtgtgttgggggcatatgtaggtgtgtaatgaatgtgcgtgtgtacgaataggtaagggtgaactctgcatgcactggcttcctcgggtctgtacaggaagtggctccgtgccccccgcctggcccccaggtattattttttccggaccaggaaggccacaccgagaatcagggctatggctgccacggccacacccccagccaccagcagggggttgaagttctcacaggaccagggacctcggcccccaggccccccactggcagcctcatcttcctccgccccgtccccaggacccttgggctccggggttgcatcgggactgctggggaccgtgggggctggcttcaggttgctgtggttgttgagaagggcagggtcggccttggccgaggtcttcttggcaggtgccgtggtgggggctgctggcggctgctgcttctcggccggggcctccttcttcgagggcttggtcaagggggctttcccatcggctgccgggggtaccttggcctcggtggtgacctggggcaccttggtgtcgggcttggggctgctggctgacttccctctggactccatggtgggcggggcgtatgggacaggcaggtggctgcaccagaggggctcaggacagtttgtcgcccctgggcattctatgggcgcgtcctccggcctccccggggctgcgcgctcctccgcgggatgacggcggctgcgaacgcggaggagagctcgggagttttcccgggattccggaccggtcc

SEQ ID NO: 151527 - DNA, 923 bp, Homo Sapiens
gggaccagctgtaacaatggtggcaatgtctccgtgggcctggtgccgcgcacccaagacctcctgcccggcagcatatcctggcacctttcaggttgcgtgccatcttcataccaagtgccacttgcagggtcatggacgtcgtgtcccacccctccggccagcatctctgtgacgttggccttgatgtcctcgaaggacatcttggctgtctccccaggaggtcgtgtagagggaatgccacgggtaatcagtggtgaacacgtgcttgtctgtctcgagttcccagtagaagttctgggtgtatatgtcagctttactgaaaatcacgtcccatgcagccacatggtccttccaggtctttggtcctgaacaggacggaacaggtctgggggaaggttgagcatggggacgctgtgtgtggaacatctggtagatggcatcaatgaatcgctgggcctcggggttcactacttcctgccagcatcccctggcgctccccaaaaatgacgttagtgatggactcaaaggcaaagcggaacaggtcatcactgatgtcccccgagtaatttccggagcccgccttcttgatgcgcctgtgcaggacactgacgaagtcccgagacactgcatccaacaggggcaaaaagttcttggtggcctctggagccatcacctcctggttcagggccacccggtctttcttccaggctgccgacttcttcaacaggactcctatgggtctctggtaatactggtgataggcgacccagggcgggatgaggaatcgttctgggttggggccctcggacttaaagagaagggccacatcttcagggtcgatgacataaaccgactccacgttgccgagcttctcccttagcgcgccactgtcggctccggtgggctcgggtgagctcgga

SEQ ID NO: 151528 - DNA, 291 bp, Homo Sapiens
ccggtcgtaggtggacgtgcatgagtcagggggtccaggggccggtgcggctgtggggcaggctccgagttcttcttggcgtagcgggtctcgtacagctccttgatcttcttgaacagctcagggctacagtcaaactgcaccagctggagggccctggtcgacgagctcgtgcttcagtccactcttactccggcccacgaaacccaggagcatctgaaggtgtggagactcgaaaacctcatcaccatgtttttggcctccaccagctccgccgccatcctgttcacc

SEQ ID NO: 151529 - DNA, 1044 bp, Homo Sapiens
  misc_feature (146)..(146): n is a, c, g, or t
caggggccccttgggtttaggtcctggggcccctgggggccaagttgaaaggggaggcccagggggtgagaggaaaagggcaagggtttggaagaaggttgggccttctccctgggccggttttgaggaaaggccaggggttggangggtaagccaggggttgaaggaaaagccaggggtggaagaaagccggggctctccccaggagggcgcacacttgtcggcgtgctgcagcagcaggtccactgcctctgcgaggttgtccacgtacccatcagccctcacttccggatggtgctcgtcactgggcctgaacttcccggtgcgcacctgcagcgctctcattccacaccgctgggcaccgccgacgtcgcccacgatatcgtccccaatcatgacggcctggtgggcttccactcctatcgcttgcagggcagacttgaaaaactcaggagaaggcttccccaccacctcggctttgatgccacaggcatactcaagcgccttcatgtagggaccaacgtccagcatcaggccagaggtctccttgtagtaacgcccttttcccagtgatatgagcacaggtttttccagctccatgagcacctggaaggcgttattcatgttttgataagaaaagctttctcctgcgtctgcaattaccacacagtttgggttggatgtgtcgatctgatcaaattctgagcggactccagtcatggatgagcaggtatggtcgcaggcctcgctccttcaggatctggcaggcagctggtgccaggggcaggtcacctcctgctcagagatgtcaaatcccagcctctgaagctgccccaccagctctgcccgggacttctgcgactcgttggtgcagaacctcaccttcagccgggaacgcttcagtctggccaccgcctccaccgagccggcgatggccgtgccgccgcccgcgccgctgtcgtacagcacgcccgagatgtcaagcagcaccccgcgcacgccagccagccgcttgccccacggtgccatggcgcccggcactgc

SEQ ID NO: 151530 - DNA, 795 bp, Homo Sapiens
atgatctgcagcagcagctctggggttaagcgtagtggagtccacaatcaccccagcattcccagcttcctcttgtccggtcgggcgctattaaggaggtgcacatcctggggtagcagtgggaaaaagggatgctaaagctggaggtcaaggcaaagtggggagcaacatggggcaagcgatgaacgggacatggaacaccgtcggccgtgtagttcatgttgcccatccattcacagcagcgttcgtcctccagctgctcgaacaccggctgctgcccctccatctcggccgctgccgccgctgggacatgattagctgtgaggtggacagcgtggctcacggttgtgaccaccacacgatactggaagtgactgcggcagatgatgtcccgtaggatctccacggtccggcctttcagcaggcagctcagcacagacactgccttgggctgcttggctccaccaccaattgcgtcgggctcgaactctcgcaggtgacagtcaggaccccccaccgcctccaggagacgggtggatccgcagccccagtgcaggctctcggcgcaggcggcgtccaggtaaaccacagcccgtttcactttggccagcacctgctcccatccttgctgggtaaaggacagtacgcccgaggcgctcatgattggggattcgcagacttgggaaactacggtgcaggaacttctttcagaactcaccgcttccggaaattgggctccgggagactttgacagtctccacagtacacgtgtcggcctctgacacgctccgtgat

SEQ ID NO: 151531 - DNA, 974 bp, Homo Sapiens
  misc_feature (21)..(21): n is a, c, g, or t
aagcaggcttggtacagcccnaggagtatggatcagtggcaacctgcggtagtgttgccgcgagtactgggtctgcagtggcgacagccagcgaggagcaacgtcaccagtttccagaggaggggtcctagagccagcgtgaccaacgacagcggccctcgactggtgtccattgcgggcacgcgaccgtcggtgcggaatggacagctgctggtatcaaccgggctcccagccctagaccagctcttaggtggaggtttagccgttggaacagttcttctaattgaggaggataaatataatatttactcacctttgctcttcaagtatttcctggcagaaggaattgtcaatgggcatactttgttggttgcatctgctaaagaggatcctgccaacattttacaggaacttcccagcaccatttacttggaattgataattggtaaaaaggaatttgatgaagatgtatacaatcataaaacaccagaatctaatattaagatgaacaatagcttggcgttaccagttattacccaagatggagattggaccagtatcatcttcaagatttggtcactattatgatgcatcaaaaagaatgccacaagaactaattgaggcttcaaattggcatggattttttcttccagagaacaatatcttcaactctcaaagtagaaccctgttctttgacccctggctacacaaagctgcttcagtttatccagaacatcatttatgaggaaggatttgatggatccaatcctcagaaaaaacagagaaaccattttaagaataggaattcaagaatcttggtcacctttatggggaagacgatatttgctgtgcagaaacatggtggcacagttcacagccttacccaagttcctctaatgttctccgtggtcttctgagaacctctctttcagcctgcattattcacaatgccaacacatctgatccagaataag

SEQ ID NO: 151532 - DNA, 881 bp, Homo Sapiens
gtggaccggtccggaattcccgggatggacgctgcagcaggcggggcacccggactggcggcttcgctggcgcaaggtcggtccggcggccagggacctggaaggctgcgaggccctgcgaggtcgaggttcggagtttgctggtcccaggcccggcccgaggtaagaaagagccgcctccccgcacggccggaggacccgggcgccccgagttcgacttctcagcctccgtccggacgggaaacggagcacggagatgttcctgaggtctctttcctgggaagcgcagccccgatttcccgcccctgtcccttagcaggtcggcgaccatccgagcgctgggcatcggcccacgcgtacagaaggcgctcaataaatgctcactagtgaatcagtaaaataaatcggcagcaaagagagacgagacgcatgctgatcttcaggtgttggggacatcagggacgcgaacatttattgagctcttattgtataccgcgtcggccagcatttgtgtccatttcacacatgaggaataagaggcccagagaggtgaagtgacttccttaaggccacacagatagtaagtggccgagacgaatttgaaaccaggggtgtcctgtttgaacttggtgccaaatagagtaactcggactccagttggaggggttcgggagaaccatagaagaggaagggccgtgtcttccgtggacaggccaccggagccgccagctgtttggaactgagctactgcagaaagggaagtggagagtaagggccaggcccgtgggggcagatggccggcagaaggctgaatctgcgctgggcactgagtgtgtatgtgtgctgctaatgggcggagacagtgtctggggactaggggc

SEQ ID NO: 151533 - DNA, 1054 bp, Homo Sapiens
  misc_feature (102)..(103): n is a, c, g, or t
  misc_feature (131)..(131): n is a, c, g, or t
  misc_feature (172)..(172): n is a, c, g, or t
  misc_feature (181)..(181): n is a, c, g, or t
ggggctctccgtttcattctttccgggaattcccccaaccaacattgaaccctgccccattcggtggaaagcttgaagaagccactcgggtgcccggtcttnngactgcaagcccagattggtgcccatancacagggtcctcggtggctggactcaaatggtggatagctncgccaccanggctgccctttcgggtgtcccagcaggctatctgtccattgtaagcagccacccaaggagtacgtgggaatctcttggggttgaactccaacgtcacgagtggagacgatggcttcagagcaagttcaggctttttgggttttccaggtcccagatgtatgaatcgctgctcatgcccacaggtgcccgctgaaaatccaagcaggagtatgccactgccaacttcctgttgccatcggggtgccaggagaggtgtgtggcagccctcttgatttcctgggggtccctgaacacattgatggttttagctgaagggtcctcctccatcacttccatggcctcctcgtcattgaaatactcttcatagatgtcaatggcattgttctgcttgatgcagtgctccatgatagagccgagctgcatgatggcgttaacgtagttctcatctttctccactttcttccggaaacggatggtctgctccagctccagggggttcacgtccttgggccagcccccctcgacatggttaactccccgggtctccatctcaaaccgctctgagttggcctcgtgttccgacatgctgatcgagcactggatgcccgtgtccactgggttccgctccacgaactgctcggccagctcagggttgggcatgatgtcgatgttcagctcggcctggcggtccgagaaattgcactgcttcccgaactcgctgcgcttcttgacgtacacgtacacaatctccatggtgccggctgcctgggtccgctccttctgcttctgggtctctggggaagcgtccaatccacccggtgctcctcaaacggcggcgtttaccggttgcttgatcccgggaattccggaccg

SEQ ID NO: 151534 - DNA, 985 bp, Homo Sapiens
  misc_feature (311)..(362): n is a, c, g, or t
cgcttgaaaactaaaaaagtttgtgttctgttggaaccctctgtaaaacactttacactcagttctgatggaccttttcaggggcgatttttttaaaaaccgctctcgaaagtagtcttaaaatgagagcactttattgatggcttttcaggactgtgttggtatttttcatgcagtgtatttgtcagcttacatttttcagttgagctacctgatgctactgacacacatatgattttcctatcttaccaggcaaatactactgttaacgttttaatagtaagtctacttatgcacattgattttacttnnnnnnnnnnnnnnnnnnnnnnnnnnnnnnnnnnnnnnnnnnnnnnnnnnnnttgtaatggcagtgaagcattttatagtttctcctccctcattggttctgaattttggtgacaggtgtatttcttaatgcagatatgaaaaacagtagctccgtatcgaatacattgacaaatggatgtgtcatcaatggacatttggacttcccctccacgaccccgctcagtgggatggaaagcaggaatggccagtgcttgacaggaactaacggaattagcagtggattagccccaggacagccgtttccgagtagccaggattctctctgcattagtgggactgaggagccagagaagaccctgagagctaaccctgagttgtgcggttctctgcacctgaacgggagtccaagtagctgcatagccagtaggccttcctgggtggaagacattggggataacctgtactatggacactaccacgggtatggggacactgctgaaagcatcccagaactgaacagtgtggtcgagcattccaagtccgtgaaggtgcaggagcggtacgaacagtgccgtgctggggcaaccaatgcacctgcaccaaggttcctaaaagacactgacctgagctctcggaaacgcagggagtccctactggatagccagctcacaac

SEQ ID NO: 151535 - DNA, 1505 bp, Homo Sapiens
ccattccatacctttatttaatctgcatcttctcagcctcctcccttccccgccaccccttaaagggcgtggaagccctcgttgaaagggaaggaactcctctttcctccctgggggagggtcagtgtcccctgggccaaaactcgttgatgggagaagcaagggcctgcgtggtggagcaaggacatcatccaagaggctgtggccaaggcccagcccctcggatgccctttaggcctgggccccatggatcatcaggaaagtgaagagtaaataagtccgggagggcaaggaacgggcgtccctgcgtgtgtgtggctgatggaggcagacatggactttgggaggcaggagcagaggccaggggatgtggggaccaggtgaggccctgagaaggaaccccaggttgtaggggtagctgcatgtggggggagtgactggccctgagcagcgggagagagggcaggcaaggaggaggggcctatcaggggaggatgggaatgttgggtgagtagcagggccaaggccatggtgccaccacagccagctcttcagccccagggaagccaacctggctgggcatggccccaagcctccaatttgtgcttctgcgtcactggggggggctcccagcatggcctcagccccggtagggaagtgtccacaggcagcctctgctgcaggcaacagctggccgcaggactcctcctccatcccagcctttctggaagcttcttctcctgccctttgtgagaggccttcaggccagatcatcggccatcttgggggatgaagccatgctgggggcgattcttaggcttccacttcctccaaaatgaccacaggtaactgcattttagtctgtttaaggacccccacccccaccctcaccctgccccttgtgtgtggctggtctgttttcccgcctgttttggacaacaatcactcgggcatctaagcccatggtggaatggtggggagggggccactactgggggccagtgagggaggtctcagagagcaaccgtgcccgatcacccctggcagcgcgctgtcatccgtggacaatgagcaccgggaagctagagggcagtcctcatagcagggcgggctctccaggggtaccagagtcgcactccacggcgccccaggcggccccgccgctcaggctgcggaagacccctggacgtggccagagccgccagggcccagcgagaggcggctgaggctgacggggcacgcggggccccgctggtgccgggcggggggcagcagagtcgcagcagaccgaagcggagggaagcgctggcagcctctgacggcaaggcgccggagcccgagcacatgaaccacggacccgcgaataaagctgagacacccagatgcccggtgggagcagatgtggcacatcacgagcacaagtgaaggtccactgtggccaagcggaacagcgggggcccgatgcggacggccccggcagggcaacgagcgcaaaaggatcacac

SEQ ID NO: 151536 - DNA, 1091 bp, Homo Sapiens
  misc_feature (290)..(290): n is a, c, g, or t
  misc_feature (296)..(296): n is a, c, g, or t
  misc_feature (305)..(307): n is a, c, g, or t
  misc_feature (319)..(319): n is a, c, g, or t
  misc_feature (321)..(322): n is a, c, g, or t
  misc_feature (324)..(324): n is a, c, g, or t
  misc_feature (326)..(327): n is a, c, g, or t
  misc_feature (329)..(330): n is a, c, g, or t
  misc_feature (332)..(334): n is a, c, g, or t
  misc_feature (337)..(348): n is a, c, g, or t
cacgcggcgtctctggatgtgatgagtaagggaatggtgagtagtcctggggtcggacctcgtggggagactgggagtcatgcggaggcgggcgaaggcggggcgagtctcgcaccactcccgacgattcaggtgtgtaccaccgaatatgtggctgaggatgcatatgctgcaggatgcgcgcgcgagctcatattcacggtaagctcatactgggccaacagggagcggccggatcgacgaagtggagaacaggctatatgatagtgttgtgtcggggtggaagtcgngtgtanaggtgatgnnngtgggggggcgngnngngnngnnannnggnnnnnnnnnnnnggttggagaccacactacaactttggcgggatcgatggctgaacctcctcatcctcgttatcctcggcggtgctacatccttcaagatcgtcggccccagggcgctctaagggtgcaccagtcaggccctcggggagagtatgaagcacagacgcagccaattagctcaaacacctgcttgttcgccatcacgttggatgtgtccagggcctgggagagctggcgcacgtagccctggttgctgaggatgtactcgatgccctgccgcgagttcatgacggcgcgcacgcagctgacgcaggtgagctgcagcagggcgtcggagatacgtgcaacgccgcggcccgacagccgcgccagcgcctccagcagcaggtccaggccgctctgctccaggaactgcaccatccagccgccgtcgctgccctccaggcgcttgcgcaggccggagtagttgaccacagagggcatctggagcagccggatgcacagctcagggtccgcgctctccaggttggcctccgtggggtccgaatcctgtggccccagcttctccttcagcgctgcccacttgcgctgtgcgccctccttcaccgacatcttgccgagccggtgaggcaacggccagagggcggtggtgcggccggcgctccgtccggggccgggtcaggggctgcgggcagctggcgcccactgccgcgctccgcaaggctcggacggtggctcctggcgggcgcggggcg

SEQ ID NO: 151537 - DNA, 1096 bp, Homo Sapiens
  misc_feature (205)..(205): n is a, c, g, or t
  misc_feature (895)..(951): n is a, c, g, or t
  misc_feature (966)..(1007): n is a, c, g, or t
acccccccaaaaccccctctgtttgataaagggggtcccctggttaggggaataattgtggaaggcccagggggagggggtttggtttggaaccccggtgtttcccccccaggggtggggccagttactccatggcgggtaaaagactggcttggcaagggcccttggggaggaaggggccatgcgaagggaagggccccccccntgcttgaagcccctcagtccccagccgttgtccttcccccatgtggtgacattttcaatggatgtatttccccttccttgtactttctggctcgtctcaaaagcttggctcatatttccagccccagtgtggttttgcagctctcacagaaaaatgtcagctaccgagtggagccccgtgagcaagaggcgctgttcagctggcccgcaacccacgttgaccacggagttaaacaggtaggctcggccatggctcccttggaaggaccctgggtgatgttcgggctagcctggtgcgcgagaggaggggaatggcaggtccccgcttcgcgtaccttggaaataagctcatcgtgtttggccaggtgtgcacggcagtggacacagctgtaagtgcggtgacagcggggcagatagctgcggaaagtcttggtggggaggcaggcagggcccggaccggggtcacagctgggcatgacgggctggaggacaatgccctggtgggctggaggggctggcgccgtgcagcccccgcagagacggtcgcaggtgaagcagcggagcaggttggctagagccgtgtttcagggcaggagaagtgttggggggctgcccggccagggcccccccagacgagaaccagatagaaatagaagtcaccttgaggtctgctccagagatctccgtctannnnnnnnnnnnnnnnnnnnnnnnnnnnnnnnnnnnnnnnnnnnnnnnnnnnnnnnntccgctccttcaatnnnnnnnnnnnnnnnnnnnnnnnnnnnnnnnnnnnnnnnnnnctcaagactggggctgcaaagctggccagctgctgggggggcagaggttgtctctcgttctgatcccgggaattccggaccggtaccac

SEQ ID NO: 151538 - DNA, 918 bp, Homo Sapiens
cctcacccagagaccagtgctcccaacggcagagcagcgggtgagataaagaactggtgacacgtggctgtacattcagcgacagcatgtggtgtccccaaggtgccatgacccaggagccattcagagaggagctggcctatgaccggatgcccacgctggagcggggcctggctaagaccccgcgcagactatgccccagacgcgtaagccgagcgacctgcagctgtcgaagatgactgcccccctgcttcagccacaagacgtgggtcttctctgtgctgatggggagctgcctcctggtgacctcggggttttcgctgtacctggggaacgtgttcccggctgagatggattacttgcgctgtgctgcaggctcttgcatcccctcggcagttgtgagcttcaccgtctccaggaggaacgccaatgtgattacccaacatttcagatattgtttgtttccacgtattgcttgtgaccactacgtgtttaatttggtttggatgcaaactagtcctgaacccatcagcaataaacatcaacttcaagctcatcctgctgctcctgctgtagctgctcatggcggccacggttgatcatcgctgcaacggtccaagcgaaggaggactgcaagaacacacgaagggctccatgtctgaccagcgccaaacattctggacgaaagtgccatttcctgctcgcggtcctgaaatcttactcaagtcgtcgaggtacatccgcagggcattcgtctgccggtccatcggggggggaatcattggcccttagaacggtggattgacatccagtttcagggcccagcagctactcagtgacggtccattagggaatacctagtggccgtggctacccaagtgtgccatgccaagtccatgtgcagcagagggtgtacca

SEQ ID NO: 151539 - DNA, 729 bp, Homo Sapiens
gaagtaggtccgttgtgtcggtcgggaacgaggctcaggcggcagtgcccgcgcgcgagccggttgccatggcagccgccggcggggacgcggacgacgagccgcgctcaggccactcgagctcggagggcgagtgcgcggtggcgccggagccgctgactgacgctgagggcctcttctccttcgctgacttcgggtctgcgctgggcggcggcggcgctgtgcctctcgggccgggcgtccggcggggcccagtcgccgctgcgctacttgcacgtcctgtggcagcatgatgcggagccgcgcgacgggctgcgctgcaagatacccgactggccggctgaggcgcgctgccaggccccaccggcggctcgggcccacgggccaaggaggtgcacgcctctgaagagactgagggacctcggccaatgccaatgatgtggaaacaagtgcagcagctgctggaagatggcggcggatccctgtgcagccttgatgacaagggcccgcaccagctctacactttgcctcatgcaatgtgcaatgaccagattgtgcaggctgctcctgggaccatggttgctgatcctaaacgagcgagatgggctggggaacacgccactgcacctggcggcctgcaccaaccacgttcctgtcatcaccacactgctacgaggaggggcccgtgtagatgccctggaccgagctggtcgcacacccctgcacctg

SEQ ID NO: 151540 - DNA, 1431 bp, Homo Sapiens
  misc_feature (1045)..(1045): n is a, c, g, or t
  misc_feature (1183)..(1183): n is a, c, g, or t
  misc_feature (1187)..(1187): n is a, c, g, or t
  misc_feature (1241)..(1241): n is a, c, g, or t
  misc_feature (1305)..(1305): n is a, c, g, or t
tctcgggatccgcgccgcccgcgccccgctcgactccggaggctcccgcagccccggcgtcgccccgctgccccctcccccgggggccatgggggcgcccccgggctaccggccctcagcttgggtgcatctcctccaccagctgccccgcgccgacttccagctccgcccggtgcccagcgttttcgcgccccaagagcaggaataccagcaggccttgttgctggtggcggccttggcgggcctgggcttgggcctgagcctcattttcatcgctgtctacctcatccgcttctgctgctgccggcccccgagccccccgggtccaagatcccctcgcccgggggaggctgcgtcacctggagctgcattgtcgcccttctcgccggctgcactggcattggcatcggtttctatggcaacagtgagaccagtgatggggtgtcccagctcagctctgcgctgctgcacgccaaccacacactcagcaccattgaccacctggtgttggagacggtggagaggctgggcgaggcggtgaggacagagctgaccaccctggaggaggtgctcgagccgcgcacggagctggtggctgccgcccgaggggctcgacggcaggcggaggctgcggcccagcagctgcaggggctggccttctggcagggagtgcccctgagcccccctgcaggtggcctgaacatgtgtcctttgtggaggagtacaggtggctggcctacgtcctcctgctgctcctggagctgctgggtctgcctctttcaccctcctgggcctggtgaagcagagccaagtgggtggtgatcgtgatgacagtcatgagtctcctggttttcgtcctgagcttggggctccatgggcctggaggcagccacggccgtgggcctcagtgacttctgctccaatccagacccttatgttctgaacctgacccaggaggagacagggctcagctcagacatcctgagctattatctcctctgcaaccgggccgtctccaaccccttccaacagaggctgactctgntccagcgagctctggccaacatccacttccagctgctgggcctggagcgagaagctgtgcctcagttcccttcagcgcagaagcctctgctgtccttggaggagactctgaatgtgacagaaaggaaatttcaccagntggntggcactgctacactgccgcagcctgcacaagaactatggtgcagccctgcggnggcctgtgccgaagacgcccctggaaaggcctgctccttcctgctactctttctccctgctggncttgcaggaacccctggggccactggccccttctgcagccctgccccccagacctggggcccttctttccccaccccagggtgcccgatcttccatgggcccccccgaccggttggccggaccctt

SEQ ID NO: 151541 - DNA, 997 bp, Homo Sapiens
ttggccccaagtggcattccttcagttgatgttgaaagcgttttggatgttcagcttgctcagccccatccagcgcaatgtgaatcgggcattggtgggtcaaggcccctctcctcggatatgagaggggccgggttcagggggctctttttcaagctcccgcccgtgcctcttcgcactgcttcgtggaagacatgctgcacgtgcctccaagtccagacaggcagagacctcgatatacaggcacccaaacctgcctgccaaagccacaccctctgccttggtgacttgcctgttactgagccatgtccagctttgttgcccagcagcagggcagggatgctgcgctgtgtctccttcgcgtgcaaggcaagcagctccaggtagctgctgctgctatcaaagctctggcggctgtcgacgctgtacaccaccaggaaggcatgggcccagttcaggtagcgctcgcagttcctgggggtgtccaggtctgcagtgtccatgaccctcaggtggacaggctggtggtccacagtctcctcggagctgtaggtgtcctccaagttggggtcatattcactgataaacctcttggtcagaaacttcacggtcagggcagacttgccagccccgcggcgccccaggatggccaggttgacctcgaggggcgcgctctgaggcccgctgcccgcgcggggttttccaaacaccgaggacatggcgacgccctggacggccacgcaggtctgcggccggtgggccccggcgcagtgcgcccgcccgtcggggcccaggggagcgggatgcaggcttccctggagcgcgcggccccggacccgtcggcgtccgcgccctcggccccgcgtccagcgggctgccaccccgcggggaggaggggccggtggagcctggcgggcggggccaccccaagcgccaccaaattccttgtaagggctgcggagccccccgcggggcgcgctcagccggctcctggagc

SEQ ID NO: 151542 - DNA, 842 bp, Homo Sapiens
cgtccggaattcgcggatgtgcggaactcataaccgactgcggagagcccagcgggcgggagctggggcgcacgttggggccctgccgagggggcgggcagggcccggtgccagccccggcaccgacgggacgcccttcctcccgtccgcagggcgggaggatgccgccgccagcgaaggagggcgggcgcaagggcccgcgggagcgaagcgggaagagcgcgccaggcacggcgcagggtgaggagcgtgccaagggggcgcccgcgacagagccccccaagccgggctgggccctgacgccgcagggactggcggccatgctccctgcgcagcgccaccgccatctgctcttcggcgacctgctggaggacgtgggcgcggcggcctccaccttcccgtgcgggtcggtggaaccggggtaccgcatgcccgacccgcgcccgtggacgcagtcgctcgagctgcccgccgagcgccagaaccggctcctcggcgtcctcaaggcagcggaggcccgcgggcgagtccgcgccctgcggctgcgctacacccgcatgcgggccgaggagatcgcgctgctcatccagcggcagaagtccgcgcgcgccgccatccggctggagctgttcctgccgccgcagctgaagcccgcgcggatcccggaccccctggaccgccaagaggtgcagacaagccccggtaggggcggggaaaggggaggggccctgcccgcctccgcacacgccggaccccagcctctctccccggcagcggaggcgcgtggagaccatcctggaggagaacgtggatggcacaaacttcccggggtgacggcgact

SEQ ID NO: 151543 - DNA, 1008 bp, Homo Sapiens
caaggctggtaccggtccggaattctcgggatgggggttgtacagaagaggtccggtttcttgaagcagctggaagtcctggatagttcccacctgaaagtctgtttgcaaaggcaatgcgcactcaggcaccagagggcagaggggctcaagttccagggttttaaggtgcttggaactcccaggagcctggcaaaccttcatccagaacctcttcctcaagcaagacaaaaagctgctaagcactgctccctccgtctctgtgaagagaccagcttctaacagacggtgccgggctgaccccccatcatgccaggctggctcaccctccccacactctgccgcttccttctttgggccttcaccatcttccacaaagcccaaggagacccagcatcccacccgggcccccactacctcctgccccccatccacgaggtcattcactctcatcgtggggccacggccacgctgccctgcgtcctgggcaccacgcctcccagctacaaggtgcgctggagcaaggtggagcctggggagctccgggaaacgctgatcctcatcaccaacggactgcacgcccgggggtatgggcccctgggagggcgcgccaggatgcggagggggcatcgactagacgcctccctggtcatcgcgggcgtgcgcctggaggacgagggccggtaccgctgcgagctcatcaacggcatcgaggacgagagcgtggcgctgaccttggagcttggagggtgtttgtgtatccgtaccaaacccagccggggccggtaccagttcaattactacgaggcgaagcaggcgttgcgaagagcagggacggacgcctggccacctacttaccagatctaaccaggcttgggaccgagggtcacggacggttgtaaacgcgggactgggtgctcaagggctccagtgcgcaaccatgaagatcacacaaacgcgaccagtagacaacggccgagaccgcccggaataccgaataaggaacca

SEQ ID NO: 151544 - DNA, 788 bp, Homo Sapiens
tgggagaaagccgggagtccggggcacagccagcaagcctgggcaaggcaagctagggggttgacctcgcaggccccagcatcctggtcccctcggaagtagatggagtcggcagagtagaaggaggggtctttcgtccaagaagttgtagggtcggaggaagaagcccacgctgttccccacagtcactgtgttaggaatgtcctctgcatgtgggatatgcagaaaacccgctgtcacccaggccaccgaatcctttgccagcaatggtctcattgttgatgaagtcactgaaatccacagtgggggcccaagggtcattctgattgaaacgctgctgctactgggctcctcctccttccgctggggtcacaagccagctggtacctctcccagctgaagcctctcgccatggagctgttttggggcagcggctctccagcaaagctgagcatctggatgcggtagccccgggggtgaccccacttgttgctgtggttgctggccaggtacaggtagcgaggggtggcgcttcccacgaggaaggcggcctgctcctccatctccagcagcttccgggtcacctgcagcctctgcagctggtgctcagggctccagggcacagccatggggacagctgattcaaccaaaggagagcaatgtattctcacgccagcaagacgggggctctgttggctcctggacgggctggggggctcccggactctgcctgaggttcccggtagtcagatgcctgggactaagggtgggaagacacaggaaggcta

SEQ ID NO: 151545 - DNA, 1237 bp, Homo Sapiens
  misc_feature (49)..(49): n is a, c, g, or t
  misc_feature (67)..(67): n is a, c, g, or t
  misc_feature (115)..(115): n is a, c, g, or t
  misc_feature (149)..(149): n is a, c, g, or t
gggatttcccccatgccccaaatatcttctcccaatgctaaagcaaccnttctcagactccaggggnggaccctggtgccgggagataatgggcatttctggcctttgaaagcanctctaagaagggttggctttgtgaactcgccttngaagcttcctgcacattccatgtgttttgggggaatttgttttccagtgttcccatctggctttagagcaacatcttttgatctggtctcatcagcacatgccattccaatcactagctgggctggaactaggaccttgttctatggtgttggtggaaacctcttgattttggcatggaacagagatgcccttgctggggtctacgtccttagatggattcacagaatctttctcttgggcttgtggttgctcttttatgaagcaggcagttctgttattttgagagagtggctgctttttgctcttcatggggtctttgaggccagcatcatgtgaaggaggcacctgggacttgcttttgcatgtgtcttgggccatacgggttgccaatgctctcattttcttagcctgtggggctctgtgcttctgccttccctgtggtgagaacacgagaacatcttctggtctcttctgaaatccattccccaaataagaggagaactttttcttcatggtttctgcttgctgcaacctctgcagttctttttggagctgcctctgctcccaggtcagcaatttcacatggtagaggcaaataacctttagtctctgcagtctttggtccagtctggcttcagcctgcttggcattcttcctctccaaatcaaaatgcttatacaattgtcccctgaccatgtgcctctccatcttctttatggtctggagttgagtcaatttggagagccaagtgaaatacaggggtggaggaggcagtggagaggtcctgggggctcactgcatctcctagcaggccattcctgcctggcaccatggggatccatcaggagggtgaccagaggagcaggggtagaactccatggggagagggaaatgtccagctgaactttttaacaatttggatggggcgagacgcctcctggtcagaactcaggggagggcgcaaatctggtgtgcagactccacaggtgggggacgaaccaagcccttttctttagcagccggtagcctggggcaagttttcaacctgttacagcctccacctggaaacagacttggggttgttgcg

SEQ ID NO: 151546 - DNA, 710 bp, Homo Sapiens
gcagccagaggcctccgcctccaccaccgccgccacagtcttccagctccacatcctgagaggacgcctctggagccgcgactgcccggggttgtgccggccgccgctgccgcccaggccgcctcagctctcctctgcgccggcccgctcactccgcccggccccagccctagcgctggccgcgaccccggcggagatcatgaatcagacagataaaaatcaacaagaaatcccatcataccttaatgatgaaccaccagaaggttcaatgaaagatcacccacagcagcagccaggcatgttgtcccgtgtgactgggggtatcttcagtgttacaaagggagctgttggtgccaccattggtggtgtggcttggattggtggaaagagtctggaagtgaccaaaacagctgttacaactgtgccttccatgggaatagggctggtgaaagggggtgtctctgctgtggctggaggtgttacagctgttgggtctgctgttgtaaacaaagtgcccttaacaggaaagaagaaagacaaatctgactgaaatatagagatacacttgcgctccacagcactgtaatgccagtggcattgaattgctaaattatggactacaagcaagtcaactgtctcggacgtctatcttctaaactgctgtgtcgaacagtatcgatgactggctttcatctacacaagacgagacc

SEQ ID NO: 151547 - DNA, 945 bp, Homo Sapiens
ggttctggtctgcctgcattgtttctctacgtcgtttttctcttttcgtctcgctgtcctgttggtgttggtcctggtcttctgtccctcccgtaccgtcggcacgcgttccttgtgcttttgtgttgtgacttgtgtctctctctcgatttgctactatgatggtgcctctgggtgtaccctttgtggtgctcctcttgacgtgttttgtactctatgttccgtcgtgtgtctgccttcttttgttgtggcccggtcctgtggccccggtggctttgtcagcaggatggtgggggcagcctgccctcgagggcggccctctggcttggaggatgtggttgccatggctgctggagcgggccctgtggacagggagctttcagaatggggggcggttactgtcgcagcgatggtggagatggtgtgcgtaggagggtgcccctctgcacggggtgtcggtgttgccatgggagctgcagcctgtgaggggggtccatcgggattgggggtcagcatcaccacagaagtatgtctggtagagctgtggggtgctgtcaccatggttcccgggggagtgcctgaagggaggacctgaagagattccctgggagatggttcctggatggcaaatgccagcgcttcggtcagtgccaagatcagcaggaaacttaacagttggcaatagagggcctgtaaacttctcttcatggtatcatctggtcctgcttatcctccagtttattcatgattctgtcctggagtagagggtgtggaagccttcaaacgcacttacatcctcatgacccatcggctctgctgcttttcactgctcattcatttctgcatgttggatgaccaccaatctatcaccaactcgggagaagcgctccggctccctccgacggctcaggagaaagccccaccgctcgcgcacgcgctctcgcg

SEQ ID NO: 151548 - DNA, 1114 bp, Homo Sapiens
cggcctgagacggcgttgagaactgggaacttggagttgctactgacgtccatgcgcacgaaggcggaagcgggcgccctggacaagaccacgctgtcgtcccggaagcgtccccatgcccccttgggggctagggaccaccaatgtcctcacaatgccccgcatggcccacagcagaaatgtatggtagtggttctccgagtcaggcaacacgagtgggagtgcaaacctgccagagggccattttcaacgctatttcttgttgcaggaaactgtctgaggagagcagcagggcacagagaaggtctaaggggttcactggcgtatcaggggtggccagctcagaaaaggaataaatgtcggcagcaaggtcatcagctgggtcccagtagatgatctcctcgttccatctggctctcctgtctccacaggcctggcgtctgggagcacgtccagcaccatagtggtattcctggcatcagcattgagggcctgcaacttcctgaggaaattccagggcaagtctttgggaacctgaggggcccagttcttcatactgtcaaaactgatctgcagagagtcctggaggctgagtttctggacctggtacgtctctaggcccaaaagtgacagcatttcttgaagcctgcttctctccactgttggaaaatcattgtcctgagcctcatttgtaccatctccataacggaactcgcaatcatctccttccatttctctccattccaaatctgcaatggccacagctgttcgtctctctgatgcttttatttctggggctacttctcccaaatctgaatgccctttgcccagtaattccacttctatcagagttaagaaccactattctcaggagttatatgacagcctgggaagacgcccaggatgtaggaacagggagcaggcgagcgtgtggcaccttgagggtactccgcgcgtctccgtaaagccaacgagcccctcctcttcgctggcctctccggggccttgctgactagtggtcgaagccacaggaccaggtgcgggtggccagcgtaacccgggcagcccacgctgcttcccctcggccgcgccaggacgctcggcacgcggcgac

SEQ ID NO: 151549 - DNA, 374 bp, Homo Sapiens
ttttttttcttgtccagacatggaataactttttattttttaagtagcatggtagtaaaaggcaatgggaaaaagacaaagaaaacacttctgcccagtgtgtggcccttggcaggttgtttggaagctctgggcccagtatcctgatctgttggaaaatcattgtcctgagcctcatttgtaccatctccataacggaactcgcaatcatctccttccatttctctccattccaaatctgcaatggccacagctgttcgtctctctgatgcttttatttctggggctacttctcccaaatctgaatgcccgggcgacgccatgagcgcagcgaggtctccgctcccgcctccttcgcttcctcccgcggccgc

SEQ ID NO: 151550 - DNA, 300 bp, Homo Sapiens
acaaattataaaaaacatttttatgataggttaacatgggagcttgcatacataagaagttccagaggagaaacatgacattcagttaaatgcaacatgggccaaggaagacagagaccccagctctgacaagcataaattaggatattatgcacctgacacatttcagaatgtccattttctttcccatcagagtatgaagtccaacaatgaagtcaatacataaaaaagttgacctgattttacctggtgtaaaattttagttagcactactagcaaattatgaagtttggaaatttg

SEQ ID NO: 151551 - DNA, 695 bp, Homo Sapiens
gaggtgtatgtcaccgaggaggctgctgcgctcctgccccacgccctgggcccttgaagcctggagagtcaccgccgagggatgaggacgcgccagcccgggggaacgcgccagctgctttcgcggccccaagcgcgcagtgcccatcagccgcgccgagcctgacacgctgtcctctcccctcgcgcacagggctctgcgagtgacccggcgggcgagctccgtgctgcatgggaacggctgcagaaggccaagatggacaatcaggtgctgggctacaaggacctggctgccatccccaaggacaaggccatcctggacatcgagcggcccgacctcatgatctacgagcctcacttcacttattccctcctggaacacgtggagctgcctcgcagccgcgagcgctcgctgtcacccaaatccacatcccccccaccatccccagaggtgtgggcggacagccggtcgcctggaatcatctctcaggcctcggcccccagaaccactggaaccccccggaccagcctgccccatttccaccaccctgagacctcccgcccagattccaacatctacaagaagcctcccatctataagcagagagagtccgtgggaggcagcctcagaccaagcacctcatcgaggatctcatcatcgagtcatccaagtttcctgcagcccagccccagacc

SEQ ID NO: 151552 - DNA, 734 bp, Homo Sapiens
  misc_feature (562)..(612): n is a, c, g, or t
atggggagatctttgtcattatcttcatggaaaggaaatagaaattgatatatcttcctgaaaaaccgttcaatcttatttttcacagaggaccagctaggttggcaggttgtataaattctcatgcagttattttccaggcaagacctgcattcaccccaggaatctgccaaagactcccggcatagcctttcttcttcctccagatgttcttgaacttcattcagaagtttcagggcctcctgcttttcttctctgcatttcttcagggtgctcattagattggtgtgttccttctcttttctttccatcatgattttcatttgcttaataccagtcaaagccttcttcacctcttcatctgcatctatctcccccacctcagaaaaactcttcaggttttcactgatagcagttttgtccttccaagtgggtgcgcagtgactgtctttcaaccacagcagacacacaataaacaccaagagtggcggcttcatgttcccgctgttactgtagtcccaggtcctcatggggctgaggtaggagggtcacttgaacccannnnnnnnnnnnnnnnnnnnnnnnnnnnnnnnnnnnnnnnnnnnnnnnnnncaaccgagagggacgcaactctgtcattcctaagatgcgcttgagtgctgccccctggaggcgtctgtgccaccggctggaagtcagccgagggcacagggtgtcagcaacctccagggtgg

SEQ ID NO: 151553 - DNA, 1114 bp, Homo Sapiens
gtgtgtaaaaaagaaccctcccggagaccctggaatactgccaagggggtggaaaaggggcccgcctcggaaaaggggggtccagggtttcttcgggaaagggggcttttcttcccctcttggggggggccaataccagggagtaagggaagtcccccttcggtgcgtaatttggcccttcccgggacttttcaggatgaaagggttcaggagcccacacagaagtccactggggggccactgcgcaagaggccatcagcggcccagggatgcccaactgagggagcaggctcagtgccccacagcacagcatcgaggccaggagacacttggagcgcttggccagtcccgggcaggcaattgagggcagatgacccaggtccaggaataaagacgcaggagttaggagagcccacctggtagtactccacgtagccagttctggtcggatagcttggtcagctccatggttgacctccctccacacgggcagtcctgagagctgaacaaacaacgctgcccagccatctgctgtatgaacttcagggtcttgcaggtaatcgccccgggcagcaaagatctcactgagccgggccaggtgctgctctaggtccaccttcatcttctgggtagttccggaaaccagagcatcgatcccagagaaggtgtggttggcatcgtccaaggagtacatcagctggtacgccccatcgttggtctcgctgtttccatagaaaccaacgcccaccgcagcacagcagatgagcccggccaccacggccgtccaggtgatgcagcaggagtggtgctgcttggtctgcaccgcatcgtcccgccggcagtggcatgcacagaccaggtaagccacaaggaagatgaggttcaggcccaggcagacggcggccaccagccccaggaacagcagcgactcctggtaactctcgtcgccggggctgaaggtgctgttcacgggctgcaggcgcaggccgacgtgcgggacgctgtgcagccacacgacccaccagggagcgatgtagtccacgcgcgccgcctgcatggctcggcccgagtgctacccacaagctgaacgacagctgcgctcacctcccggccg

SEQ ID NO: 151554 - DNA, 1158 bp, Homo Sapiens
  misc_feature (944)..(944): n is a, c, g, or t
gggtccggaattcccgggatggagcctgagccctgcggaacctcggcgctcggccccaccccgcccgtacctgcacttatttattgttgttatttcttaccgcggagccccgcagtcgggtcctcccgcccgctcccgcgcagcgctagcattctccagtccctcagtcccttcccgcgcggtgcgccgcagccgaggcgatgcgcctcattcagaacatgtgcaccatcgccgagtaccccgcgccgggcaacgccgcggcctccgactgctgtgtgggcgccgccggccgccgcctggtcaagatcgccgtggtgggcgccagcggcgtgggcaagaccgcactggtggtccggttcctcaccaaacgattcatcggtgactatgaaagaaatgcaggtaatctctatactagacaagttcagatagaaggtgaaaccctggctcttcaggttcaagacactccaggtattcaggtccatgagaacagcctgagctgcagtgaacagctgaataggtgcattcgctgggcagatgctgtggtgatcgttttctccatcactgactaccagagctatgaactcatcagccagttccaccagcacgtgcagcagctacacctgggcacccggctgcctgtgggtggtcgtgggccaacaaagctgacctggttgccactccaacaagggttgaaccctcagccttggacttggaagctaagccagccagggctagggctggtccctttcagatgaaaaggggcttggtccccgggaaaaacattaaaaatggatgttctaaagggctccctcgccaaagtggccactcggaaacacaaagggccggatcacaataaaaattaaggccctggatatagggtcgcctgctacatggcgggaaataatcgtaccccccctactcacgaggacccgaagccttcccantaactgtccatcgacaacctccacaaaaaggaagttgtatcccgaatccttctatccctcagttccggccatcacgcagtttattccccccacccttctacctcaatattagtagatcgccgtctctccatcgccgtacatacatcaatactacccctccataaatgccgctctcgttaggagaatatatcccctatcacgatacaagatatac

SEQ ID NO: 151555 - DNA, 805 bp, Homo Sapiens
tgggtggcctccaccatcaggtccatggtctcaggacaggcacccgcagggttgtgatggtggcaggatcccggagccggcccctcctcatctttcagattgtagccttctggcctcttatcacgctcgctgactttccacagcttcacagtttatcattagtagacagaagaaagtaagctgcattctgctgggggagccatcttattttattgattttttcttctatttctaaactcttcaggtaatcgaactcgggttcatggctctggaatgtgctgtaaacattgtattcacccctacgatgaacctgatttttactctcctgctctcgttgaaatattacaacccgaccccccttgtcccctgtcgctagtaattctcccgtgtggttgaattctaccgtagagataatgtcagcttcggttgcataactgtggttcgcgcagggaaaactgtttgttgattttgcgggtatcaatttcctcctccattgacagcaggcttacttgcgtgggaaccagaagccggcagacaagtatccatgatccctccccgcagccagtctcacaggagaggggggcaggggagccagtgggactgcaccatggtccgagccttctgtggttccaatctcgatagtgcctttcacttggctgaagcaccatagtgtgtcctgggtgagtgtcccaattccaggtatcatctcgtcagagaagagaccctagtgagtcctgagaggacggtcagttctgcaagtaaccacgtcctgctgtgaatcactgctctgtctcctccgtttgac

SEQ ID NO: 151556 - DNA, 1137 bp, Homo Sapiens
  misc_feature (238)..(248): n is a, c, g, or t
tggaccctggcccctttggttttcttccccctaattccgcgcttttaaaatgggccaaagggggttttccccccggggggggccaaccccggaggcccattgccagttccccgaaagtagaacgtccaagtccccttgatggctgatccccgtgcccgggaggaagcgggcccctgacccagaggggttttcattgtcaagcacccgtgggggatgcctagaaaccccctggcggggnnnnnnnnnnntgggttgatccagaaggagacccaggacatgggcgaaccagcaggacggagggcaatgtaggattggatgaatgtacacgccgcgtttccctccgcaggtggaagtgcaggctgatccgtgggaactggccagcggacttgaagttcatcagctccgtggtgaagcggtagctggtgatggtgaactgcgccagctgcagcttgtccagcccgtggatgtgctcctggctctccgaccagtagtagacgatgtcctccgatgagtaaccgtagctctccaggtccagcatgcactcctgctcgtccatggggtatttggccaggtccatgtcgcaggccacagtggaggtgattcggatgctgtacaggatcacgccgtcgggctgcagccggatgagcttgttctccaccgtcacgtcgtggaaccaggccgacttggcgttcacgatgaaggtgtcgggcagccacagcttgtccacgaagcggctgtccagacccagggtctcgttggtgtggttgtaggagagcctgctgtcccgccagctctggtgcaggaacaccgtcatggtgtactccatgttggcctctgagatgtggtcgatgctggccacctccagggcaagggccacattcacgggggggcctccgatgccaggccggaagttgcgggcgtagccggctatcagcccgtccaggttggggagccaggagatctccaggttggagcccacgtagtcgccgatgtcattcatcgctctggtgccgcggagctgctgcgcgcagaggagcaggagcggggccagcagccgggcgggcgcgtccatgccgcggcgggctcgggacggggtccgcgcaaactggatcccgggaatccggaccggtccagccg

SEQ ID NO: 151557 - DNA, 1137 bp, Homo Sapiens
  misc_feature (573)..(573): n is a, c, g, or t
ggctggaccggtccggattccctggatgggagaccgcatcatccagattaacggtgtagacgtccagaaccgggaagaggcggtggccatcctgagccaggaagagaacaccaacatctccctgctggtggcccgacctgagagtcagctggcgaaaaggtggaaggacagcgaccgggatgacttcctggatgactttggctctgagaatgagggggagctgcgtgctcgtaaactgaaatcaccccctgcccagcagcccggaaacgaagaggagaagggggctcccgatgccggcccaggcctgagcaacagccaggagctggacagcggggtgggccggactgacgagagcacccggaacgaagagagctctgagcacgacctgctgggggacgaacccccgagctccaccaacaccccgggaagcctgcgcaagtttggcctgcaaggggacgccctgcagagccgggacttccatttcagcatggactctctgctggcctgagggggcggggctgggacgggggcgactgtcccgggcctcacggatgaaggagtatgagcgctacncgtgagctccttggagatcaagtgccacctggagaacggcaaccagctgggcctcctctttccccgggcctccggaggcaacagcgcccctggacgtcaaccgcaacgagagcctgggccacgagatggccatgctggaggaggagctaaggcacctggaattcaagtgccgcaacatactgcgggcgcagaagatgcagcagctgcgtgagcgctgcatgaaggcctggctgctggaggaggagagcctctacgacctggcggccagcgagcccaagaagcacgagctgtccgacatctccgagctgcccgagaagtcggacaaggacagcaccagcgcctacaacactggggagagctgccgcagcaccccgctgcttgtggagcccctgcccgagagccccctgcggcgggccatggccggcaactccaacttgaaccggacccctcccggccccgctgttgccacccccgccaaggcagctcctccaccggggagccccgccaagttccggtccctctcccgggatcctgaggccggccggaggcagcacgcggaggagc

SEQ ID NO: 151558 - DNA, 1453 bp, Homo Sapiens
  misc_feature (359)..(359): n is a, c, g, or t
cagatacccttgggctttcctgggcccagatccaccccacacctgggcaggggccggggccccagaagagggagcagcttgtggagtactaggaggtgaaacccgaaagactggcccatgatcacaacactgacagggctgggctgttctagcagcctgtgagagaaagtggagagtggctccggacgggacgcaccaccatgacagaaacgagacagtcactacccacagggacatgggatgggaacagtggccaggatccccagtcttggggcgagggtggtgtctttcccctgcccccgctttgtcctgggcagcccctgcacctgatcgtagagggcagctggacccccaacccncagagtgagcaggtgtggcccaagaggggaaagccttccccaggccagtccattccaggctagggacacacgtcctgggcagtgctatccccttctcaggacctcagtcctggggccaggtgctgagggactgggggaacttggcaggggcagcccagacacgcgggtccaccccctcttggccccggatggcgcaaagcggccacctactctgtccgcggcactgagctggaaggacccaagggaggtcccggagaccctggggcctgcgttggtggggtggccttgtagccctggttctgtgcctgccagccgctagtaggcggggccacctggtacgcctttggggcttgttgtccagggtctcggtgaagggcgggcttttggtaggtctcggtgcccttccacgccgctggcccaccggatagtcggggtaggcctggctcgtccccggtgctcagctgttcggtggcgaagagtgacatgtcggtgcccaggcggaaccgctgcagggccttcacggtgagcgccacccagctgaggatggagaagaagctgaaggcgatggcggcccgcgccgcgtcccccgcctgcgtcgtggccggccctggcgccgtgcgctgccactgattggtgaggaagcagaagcccacgaaccacaggaaggaccagagtcctgagaagcccaggtccagcaacaccgcgcgccggcggtcgcggacgctgctgatttgctggaagcgcacatcgagcagcaggaaggcggcgcaggcgaggaaggctccgaggcccagcgcgacgccgaagcggcaggcgcccgcgttcccgttgaacacgcagcgcagctcggggccgctgtcggtgttcacgtagcccatcgttgacgatgggcccgaagacggcgatggagaacacccaggacgcgacccggagcagggtctggggccaccgcgcaaagctcacggggtccagggcggccctgcgcggcccgcgccgaaggaggcgccctccatgcccggcccgggcggacgcgcgccctggcgccttcatgtccgcctgtccgtccggccggccccgcccgaggccgctgccgc

SEQ ID NO: 151559 - DNA, 932 bp, Homo Sapiens
tggggaattctttgagacttaggacttgggtttaccggagaagcggggccctggggagccttggagatttcctgttgggaaggccctgggcagaacagaaggcttgtcaagtcagagggccaccttcttcctcctcaaattctgccagagaaagctcctgtgctgggctctgaaccccttgcagggaggggtgcaggttatccctcttggagcaggagggctgggtgcttggaaggaaaacctaggagcttaggggccccagcctcccagggagagccaggccctctggggtgacacatttctacagaagcaggtgggaacatcacagacgtcccagggcctggggcccagggctgccaggtacagaagggctgaaggaggctgtccaggccagggtgggcagtggcctgagcccggcagctggccctacagctctctctcttcgctggtcagtgtggcaattctccgcaggttttccctgactttaataaactcgggggcgtgatcctcttccttctctggtggtttttccagctggttcagcctctgctgccgtctcagcagctcctgctcaaaggggcactgcagccgcttggcttccagctcctccttcttcttcttgatgagctggttccgccggcggtgctctaggacacgctgcagctctggcttgctgtccacaccaaggccccttctgtggttcatgagcagctcccggtggagctcctggtgactccgagaggccttcacggggttcagcagcttcttgggcttgatgagctccggattccactctctgtattctggccgggccatcaggcccccaatgtctgcccgctccctctggatctccgagtacatggcggttctcaggtcgagtccttgggaagggaagtcaggagcgtgttgctgggttcctcactccaccagga

SEQ ID NO: 151560 - DNA, 814 bp, Homo Sapiens
cgcgggcctccccagcccggccggccctcccgcgggcggcactcgggcaccgggctcgccgggaccagatccgcgagcccgtcagcctgcgccatgggctgcgacggccgcgtgtcggggctgctccgccgcaacctgcagcccacgctcacctactggagcgtcttcttcagcttcggcctgtgcatcgccttcctggggcccacgctgctggacctgcgctgtcagacgcacagctcgctgcccagatctcctgggtcttcttctcgcagcgagctctgcctcctgctgggcagcgccctcgggggcgtcttcaaaaggaccctggcccagtcactatgggccctgttcacctcctctctggccatctccctggtgtttgccgtcatccccttctgccgcgacgtgaaggtgctggcctcagtcatggcgctggcgggcttggccatgggctgcatcgacaccgtggccaacatgcagctggtaaggatgtacccggaaggactcggccgtcttcctccaggtgctccatttctatcgtgggctttggtgctctgcatgagcccccttatttgctgaccctttcctgtctgaggtcaactgctttgcctgccaatatgcacggcaacaatccatctcccgacggccaccctgttccactgtctccagcgttgctgtgccagcaccacgtaagatgccaatgccttggtccaaccaagaagttcacagggctgactcccaaatggaccgggccaggcacccgagtgtcctatgccttctggatcatggccttcatcaactcttcccagttgcc

SEQ ID NO: 151561 - DNA, 919 bp, Homo Sapiens
gggtccggaattcccgggatctgagaaagagcacattgtgggggcccactccatgtgatgtttgcttggttgcctgttcccttttctacctgcagagcacggttcccataagggcggcgagatcagcctcctgtctcatctggaagaccaccactctggggtctcagaggaatgatggaagccttggggtttctaaaattggaagtgaatggccccatggtgacggtggccctgtcagtggctctcttggccctcctgaaatggtactccacatcagcattctcaagactggagaagttaggcctcagacatcccaagccttctcctttcattggaaacttgacatttttccgccagggtttttgggaaagccaaatggagctcagaaagctgtatggacctctgtgtgggtactatcttggtcgtcggatgtttattgttatttctgagccagacatgatcaagcaggtgttggttgagaacttcagtaactttaccaacagaatggcgtcgggtttggagttcaagtcggtagccgacagcgttctgtttttacgtgacaaaagatgggaagaggtcagaggtgccctgatgtctgctttcagtcctgaaaagctgaacgagatggttcccctcatcagccaagcctgcgaccttctcctggctcatttaaaacgctatgcggaatctggggacgcatttgacatccagaggtgctactgcaattacaccacagatgtggttgccagcgtcgcctttggcaccccggtggactccctgggcaggccccctgaaggatccctttgtgaaaacacttgcaagcgtttcttcgaaattctggatccccagagctatctggtttaactcttatacatttcctccataatggtccactgggcccggatttggccatatgaac

SEQ ID NO: 151562 - DNA, 853 bp, Homo Sapiens
ccacatgtttgctgtgtcgccgttggcaaccacgcggtcagctcccacgaccacagctgacacgcccctatggccatggcagcagccaccatgctgtcggtgataagggtgcggggatctgctcatagaccagctcaaaggccgtcagccgggctcccgagcacagtcccgcccaggggccctcgcagtggcagttccctctgcctggtatgctcttcccaatgctcgcatagctcccgtttcacgttctagggctgtaccatagccatcggtggccagagcaccagtgttacagtggtgtcagcacaagtcaccttgccaccgctgggggcccaacccgcttccaggaggtggcgggcttcttaggtccccaatggctttcggttgttctctgaggtctttctccagcatgtcctcgggtgcagcagatcactctctcccggaccgcctcttccggtagcgcccttcccgttcggcctcccgggctgcaacatcagccaggtcgcgggcggcgcgggccatgttgacagcggtgggccgggcggtgacgaggaagctcagcttgtcgcgcacgaaggccacgagcgcggcgagtcccggtcccccggcgcccgcctgcagctccacggcgaggctgagacagcccaccagggctatggccggggcgccccgcaccttcatggcgcggatggcctcccaggcactggtgcaccgagcccaccgcctcgtagcggctctgcttgggcagcagcagctggtctaggatctgcagggagccccgcgagtagcggatcccctccagggtcatggtgcagcagccaagcccagcgcaactcagagggagtagggtccg

SEQ ID NO: 151563 - DNA, 869 bp, Homo Sapiens
gggaccggtccggaattcccgggatcctagctccctctgagttgcgctgggcttggctgctgcaccatgaccctggaggcgatccgctactcgcggggctccctgcagatcctagaccagctgctgctgcccaagcagagccgctacgaggcggtgggctcggtgcaccaggcctgggaggccatccgcgccatgaaggtgcggggcgccccggccatagccctggtgggctgtctcagcctcgccgtggagctgcaggcgggcgccgggggaccgggactcgccgcgctcgtggccttcgtgcgcgacaagctgagcttcctcgtcaccgcccggcccaccgctgtcaacatggcccgcgccgcccgcgacctggctgatgttgcagcccgggaggccgaacgggagggcgctacggaagaggcggtccgggagagagtgatctgctgcaccgaggacatgctggagaaagacctcagagacaaccgaagcatcggggacctaggagcccgccacctcctggagcgggtggcccccagcggtggcaagacgtgaaacggagctatgcgagcattgggaagagcataccaggcagagggaactgccactgcgagggcccctgggcgggactgtgctcggtaagcctttggcaatccacgcccagactaggagcctgcacccctaaccaatggaccacctgtctgtttgcccctccccgggggcttctcctggtgggtggggcccccgacagggtgtgattcgctcactgcacagcctgggccgctggagcatgccttcttgacagagaaccggcctacaacagggaagccggctgacggctttgaagctggtctataagcagatcccgg

SEQ ID NO: 151564 - DNA, 860 bp, Homo Sapiens
tgatcagctcggtgtgtgtctcctcctaccgcgggcgcaagtcggggaacaagcctccgtccaaaacatgtctgaaggaggagatggccaagggcgaggcgtcggagaagatcatcatcaacgtgggcggcacgcgacatgagacctaccgcagcaccctgcgcaccctaccgggaacccgcctcgcctggctggccgaccccgacggcgggggccggcccgagaccgatggcggcggtgtgggtagcagcggcagcagcggcggcgggggctgcgagttcttcttcgaccggcacccgggcgtcttcgcctatgtgctcaattactaccgcaccggcaagctgcactgccccgcagacgtgtgcgggccgctcttcgaggaggagctggccttctggggcatcgacgagaccgacgtggagccctgctgctggatgacctaccggcagcaccgcgacgccgaggaggcgctggacatcttcgagacccccgacctcattggcggcgaccccggcgacgacgaggacctggcggccaagaggctgggcatcgaggacgcggcggggctcgggggccccgacggcaaatctggccgctggaggaggctgcagccccgcatgtgggccctcttcgaagacccctactcgtccagagccgccaggtttattgcttttgcttctttattcttcatcctggtttcaattacaactttttgcctggaaacacatgaagctttcaatattgttaaaaacaagacagaaccagtcatcaatggcacaagtgttgttctacagtatgaaattgaaacggatcctgccttgacgtatgtagaaggagtgtgtgtggtgtggtttactttt

SEQ ID NO: 151565 - DNA, 778 bp, Homo Sapiens
gacacatggcgccaggggtcagacactcgcaccaatagctgcagctttgcagagcaggcatgcgccttgggttcggccggaaagttgttgctggtgcgcaagcacatgcgagacgcggctggctgcattggcgggcacaggccttcccggagcgcgccacatgagaatgcacagctggaactggtccttgaggtggacggtctgcggcgatcggtgctcaatctgggcgcactgctcaccacgagcgccactgcacacgaaacggtggccacgggagagggcctgcgccaggcgctagtgggccagcctgcctcgctcactgtcactaccaaagacaaggacgggcggttggtgcgcacaggcagcgctgagctgcgtgcagagatcaccggcccggacggcacgcgccttccggtgccagtggtggaccacaagaatggcacatatgagctagtgtacacagcgcgcacggaaggcgagctgctcctctcggtgctgctctacggacagccagtgcgcggcagccccttccgcgtgcgtgccctgcgtccgggggacctgccaccttccccggacgatgtgaagcgccgtgtcaagtcccctggcggccccggcagccatgtgcgccagaaggcagtgcgtaggcccagctccatgtacagcacaggcggcaaacgaaaggacaacccaattgaggatgagctcgtcttccgtgttggcagtcgtggaagggagaaaggtgaattcaccagtttacaaggtgtgtccgcagccagca

SEQ ID NO: 151566 - DNA, 1151 bp, Homo Sapiens
  misc_feature (1113)..(1113): n is a, c, g, or t
ggtccggagagaccgggccgcgcgcttttccgttcctgagcgcccttgttcatttctgggtgaaagggacccagaattgtgcaacaggtttgggcgttagtccttattttccagcgggtctcttttgccagcgtgcaggaaccagatgtggctccctgctctcggggcgagtcccgcgtccagcgcccgcgactggcgtcctttgtgtgaccggtgaccggccctgtcggaattaaggaagttcactggagtaaaatggaggcctcagtaatattacccattctgaagaaaaaactagccttcctttcaggaggaaaggacagacggagtggcctcattttgacaattccattatgcctcgaacagacaaatatggatgagctgagtgtcaccttagactacctactcagcattccaagtgagaagtgtaaggctagaggatttaccgtgattgtggatggcagaaaatcacagtggaatgtggtgaaaacagtagtcgtaatgctacagaatgttgttccagctgaggtgtcccttgtttgtgtggtaaagccagatgaattctgggataagaaagtaacgcatttttgtttttggaaggagaaggatagacttggctttgaggttatttttagtgacccgccaacaaattggacttcgttatataagaacccctggccatttaacaggacgaattttgggtgggcagtcccccccctattgatccaccttgggacctgggctaaaataaaagaagggcggggtttttttggacaagattctaaaaaaagggaaaacctaacctccccatttttttatatgggaacttctgccttgggattcacccaacggtgcaagactttaaaaaccggaaattccaggctggggggcaccgctcaatgggtccgccgggggatcttcaagtgatcttctgtggcccttaccacgccgtgactccccgtataaccgagggattttcttttcgaaaacgatggtcccaggcgcaacctttgttatatcccgcaataatatactgtgaaattacgaaaacactacctaaagacggggcctaaactctactgccagggccatggactcgacatgtgtgatgcncatccattctgagaccgaacaccgcgcgcttactacgt

SEQ ID NO: 151567 - DNA, 1024 bp, Homo Sapiens
ttttgtaaaatagtcttcccttttattttaaatcaacccttttccaagttagtgccacgagttgagatcagggggtcagagcccactgggatgtggcaggggcagcagggggactcatgtcccccacccccagcttagtccctccaaggatgggaccggcagccagggatgaagggtgcgaggcgaggctgtctgccccctcccctgccagccctactccctagtctgccccctcagctactcccaaggccaaggacagaaatgggagcacagtggccaagagcagggaggcggtcctgtgcaggctgtccatggccaagagtgttagtggtcagagcccaggcaggctgggttagtggggtctcctccggcagccagggaaggaacgaagaggggagccaggctccagtccagccgggaggaggggctcagatagacgactgccactgcacaaagcgcttggattcctgagggttgaaagggtcgtcatcgtctgtgtcatcgtagtcgtcactgggtgggaagagggcccaggctacggggcaggctgcagagaggcagtggccagcgctcctgcagacagcagggagacagagtagcaggaagagcaggccttccagggcgtcttcgcacaggccccgctagggctgcaccatagtccttgtgcaggctgcggcagtgtagcagtgccaccaactggtggaaatttccttctgtcacattcaggagtctcctccaaaggacagcaaaggctatctgcgctgaagggaactgaggcaacagcttctcgctccaggcccagcagctgggcaggtggaatgttggccagagctcgctgggacagagtcagcctctgttggaaggggttggagacaggccggttgcaagacggagcataattgctcaggatgtctcactgagcctgtatacgtgctgggtcaggttcagacatagggtctgaatgagcaaaatgatgaagccacagcggactgctccaggccatgaacccagagtcggacaaaca

SEQ ID NO: 151568 - DNA, 849 bp, Homo Sapiens
tttgacattttttggcgtttatttaaaaataaaattattttctctagagcatgaaggaaaaatttaaaagtatttctgctgtgctagttctgtaaaaagttaaaaaatgagaaatggcggcaccattttataatcctgtgtttttcaaggagtggagggtcaaattgttaagaaaaatatttacataagctattagcaatcataattagagtgtcatagaattctgcatgcagcgactaaggaggaatccctagaagtccaggtgcttcttgcctccggccatcatgccacagcctgggcccagccgcttggcggattctgccagatccattttgcttgagcgggtcactgtgtctgacaagtctggaggcaaatgcagtcgctcaatggtgaatagcttcctttttaatttaaaagctaagtctttgacatctgattcatcacagatcaagttattaagccgaggaatctgccgtatatgaatcaatccatgataataccttatacaatgggttagtttctctctcagaaccaataaatgattccagaccaactactagcatctgacaaggttgtgacacgggcaagtaagtggctttattctggatcacgatgtgttggcatatgtgatagatgcaggctgaacaagagaggttctcagaaagaccacggagaacatagaggaacttggttcaggctgtgactgttgaccaccatattactgcacaagcaaaatatcggtctccgccatagaaggtgtagccacagatatctgaaattccgtatttcttaaaattgtttcctcatgtggtcactgaggaataggtgataccatcaaataccttcctc

SEQ ID NO: 151569 - DNA, 1100 bp, Homo Sapiens
acaaaggcgacattgccatggaattattatgtgtcacgagcacttgagtgacctataaagcaaaccggacgtgattatgccaatcaatattgcaaggttggagatatgctaaaaggttggaaggaatccaatcctggggctattgcacaggacttggggaagatcaagttgctgcagagcagctcctgacttgaggaaggtgtgcagtaggagggaccttaatagccatttccaacatcgtgtgcctttgaacatattttattactgatccatgatatcccaacgacattttcaaatggacagggaaaactgtactatactagacccaaattctctggatatttactttccatccctgctctagggatgtgggggaggtgacatctgtcagttggatcagatcagactagaaggttcttgtgattcaatggagactgggccatctctaagcaaacaggcagcaacataatttaggttccctctatgtagttccacctgttgagtttttctcatatgctgcgattgttctccatcatcaacagctcccagcggaattagcaccaacgctcttgtggacgatctcctggaacattttggcaattggcaatggtggatccatcccggatcatatctggttctgttccaaacacatgttctgatcgctcttatttgcctgcgagatactgggtgtcatcgaatatattgcaatccacgggtgtacgtcctagagtcatggaaacaaccatcttgttggaactctttcttattggagaaacacatcttcaacgatgatcgtttcacctgtttttccagcgcagtacacattcatgtgagggactagacggattgacacttttcctatagctcggccgaggtatgactgttttagttccaggctcatcaaacgcgccctcgatcccatgaatagaaagagatgggtacctccagaggtgcattagaatctcctccttagtatcgaacagcaattgctcaacccggctgctattccggtattcttctaggtctagatggatggctttgtatgtatgtatttcctcttctgtaagaggaaccacttcatcatagattccagggaccag

SEQ ID NO: 151570 - DNA, 656 bp, Homo Sapiens
gtcagaccgaccagagtgttattttcggacgtcaggccgtcccactcaaggccccggggtctccctgtgggcccacttggccagtgagggcaggccacgttctcacagtgcccaccaccaccttctgggagttcgcctgctgctgcgcgccaagggccacgctgggactggatgtgctaaggaggggctgcacgaggggcttccccaggtgcagtgggctgaggacagtgtgtgacggtcgccgccaaaagcagttctactctacctgttattgcattatacgctggttagactcaggtggtgctgggtgcaagctggaggggcagtctagcggggcagggcgggcacagctgtgaggggccctcgacatccctgcctccccgccggcgtcggggctcccctggagcacaagctggggaaggcgacccttgggcagcaccccctccacacgcaggcttcagggcctccgtcttcccacccagctaggcttgggtggtgtggggaggtggcattgaggctctgctgaggtgagtgcccaccccaggtccgtcccactgcattcgcccaggcagacccccggtgggtacgcaaagagcagaaatggggcgagtggagccaccgcgccctttaatgtccccacgaggccgggcccagcc

SEQ ID NO: 151571 - DNA, 520 bp, Homo Sapiens
tttgcagaaacacacagctttatattattacaaaaaagaaaaacacctcaccttgtctttgtttcgcagcacagacagaaatcattttaagacagaggatcacataggcagttgtacacccagctgacaaacactttgggtctggatttcctcccccaaccacattacatcagctttgacacatctgtaaaacatcttctctgcagaaagtcagaccctaaagatcaaacccagggaggcaccctctccccaggccagctactctaactcataaccctctgaagacacttggtaaaggcaacacagctgacgagagcagtgctgcctcagcagtagtgggctctggccccgccaaggcagggaggactagggccgagcttctgagaagccatccagataggcaagggagaaggggagggggtgcagtggggataaaagaacctgatgaaatggaagaaagcattaccttgggagttaccattttgaattattatataatcagactctagcctggcatccc

SEQ ID NO: 151572 - DNA, 1173 bp, Homo Sapiens
caatcaaatggaattgcttaattaaaaaaaacttatctcttttctccttacatactaccagacaacctcattttatcgcagcagacacctaggaacaaagacactggacccaccagagaaggaactgggcaataaaagcatcagaagttcaagtcaactatggaagaattactgttagctggcagctttcaattctaaacagaagtgtcccaatacctattgggtttgacaaaagtttcttagaacctggtggagctagggaatgttaggactccttttaataactattccaatcatttcctagtatagggaaattaaagtcaatgcatcaaatgaagacccaaaagaaacatttaaaaacttgtttgactagtattcagtatgtgagattattaagtaataactctgtccacctagttaaccttgtccctggaatataatatacggttatttagtacgccgccactgctcatacactatttatctgaaggatgccagaactagtatgcaagatacttgttgctaaagtccagactgtcgacactgatctcgtctatttaactccgcttgccccccagcacacacttaatcggggtttagaggatagcccggggctttgctgtagtctccctacgacacgcctcaaggggtcacatacacacttggtcgattcctagtcagaacatcctgaagaagatagtggtacggagcctgtcatgatgacactgtcatgaccccaattccacaactagcactcgaaatgttacatcaagatatgcaggtcagtttacatagaggggaacaccaactaggctgcggaggtagtcatgaaccatgggcaggtctcgatgagggcggtaccccagattagacgatcccaaaaccttatgaagacacagatagtcccccggaccagagaaattgccgtcccaactaagcctgaacttccaagatcccaaaatcgataacataaaattccgagacaacgatgaccggctacatggaaacaccgggaccacacaaaacactggggaacccggtcaaaaaagggcaaatcgccggagatacaagacggaatgtgcccctagagccgcgcaaacgaaggggtgcaaaagaaggggagcaacggcgcgggacaaccaacgaagcctccaatctggaggcacagccaac

SEQ ID NO: 151573 - DNA, 1067 bp, Homo Sapiens
ggaacgcggcgtgtcatcatccaatcctacatgccctccgtcctgctggtcgccatgtcctgggtctccttctggatcagccaggcggcggtgcccgccaggtgtctctaggcatcaccacggtgctgacgatgaccacgctcatggtcagtgcccgctcctccctgccacgggcatcagccatcaaggcactggacgtctacttctggatctgctatgtcttcgtgtttgccgccctggtggagtacgcctttgctcatttcaacgccgactacaggaagaagcagaaggccaaggtcaaggtctccaggccgagggcagagatggacgtgaggaacgccattgtcctcttctccctctctgctgccggcgtcacgcaggagctggccatctcccgccggcagcgccgcgtcccggggaacctgatgggctcctacaggtcggtgggggtggagacagggagacgaaagaaggagggggcagcccgctcaggaggccaggggggcatccgtgccccggctcaggcccatcgacgcagacaccattgacatttacgcccgcgctgtgttccctgcggcgtttgcggccgtcaatgtcatctactgggcggcatacgccatgtgagcacaaggactcaggccaccctcgcttgtcctggcgcccggcggcagctgcccagcaacttcctgggagaaagagccctcgggctgcctttccctctgcgtgtttcgaagtgggatgacagtcggccacggaaaacaagaggaagcctcaggcctccctgagctctgaccccagcctcacccggaaggccagcactggggctctccgttgcaggcagcccgagacctgcacatgatgtaagtgagcagaggttctgagcgcgagtaggcctgacgccaggccggcggtctgggcccttacagggagccgcggattgtttatggcttcagataagtcggatcctggtttcataggtctttgctctgcaggatcgggatcagagcgtgggaggaggtgggggtgacgtccatccggtgaacaggttaccgcctgtgggagtcttt

SEQ ID NO: 151574 - DNA, 978 bp, Homo Sapiens
ggttttaaaatatagagaaatggcccagaggtggccacgtagattgacacattttagtagtaaagcatttttaaagtattggaatacggattttcatggccttaacattggccatgcataagtgtaagctgtgaataagaggtaacccaccatcgccatcaacaatgatcaggtcatcaccctgcgtgccaagtccttcggtgtcctctgtgcatcttgttgtcttagaagccatcttcaataggaccaaatcattgaactagatcatggtccagctagtttataggttctctcttagcacggatcaatccaaacagtctgatgggatcatcatgaatgttttcctctactgcctggctttctggggagaaactgtctactaaggtggtcttagaaacgctggcatctattgcatgtagttgctcatctccatccttgtctgagaaatgagtattctgtttcctgggctttctacgcttccccttaacgctgtgatcaagtgaggcgtagcacatctgtgtttcattggttgcctgtgcagatggggtggcttcctgcatcttatttacagatttctctggtcgggctttcatttgttcatagcaattttcatccattggttctgaaatcatatcatctaagttaccataaattggtgtgtcttcaatataatactcatcaacctggtgtggtcactggagtagctgtacattttatcttgtcgttgcttttccacatagtgggaaatattgaagatcagtgatataaccaaagccaagcccaacaatgctagaagtccccagaggaaaaaggggcacccagagattcctgacatgcttctttttttcggagaaatctttatctagccataagacaaatatatggattaaaaatcctcctacaaacttttttcctaggtgatgttgctctgttatgttaaaagcagcatgacagtaaaacttatctttatctgtgcct

SEQ ID NO: 151575 - DNA, 1581 bp, Homo Sapiens
gctcccttgcggatagtctatgttctccatataaacccagcacttcccttaatcgagatacgtgggacttcactccgtccccagcccggaaccacaagtgagggcactgcgtttcctgattgacctctttggcgattacttccgcccaggggcctggaatactggaggcccttcgacggagaacaacaagaaaggcacttccggtgtctgttgccaggcgcgggcccagtgggccgtaggggcgacattgttgccgtcgtctttccccccccagtcccggggatggagatgtcgggactcagcttttcagagatggagggctgccgtaacctacttggcctactggacaacgacgagatcatggccctatgcgacaccgtcaccaaccgcctggtgcagcctcaggaccgccaagatgctgttcatgcaatattagcatacagtcaaagtgcagaagaacttctgaggcgtagaaaagtccaccgagaagttatatttaagtacttggcaacacaggggattgttatacctccagctactgaaaaacacaatcttattcagcatgcaaaagattactggcaaaagcaaccacaactgaaattgaaggaaacgccagagccagttacaaagacagaggacatccacctatttcaacagcaggtgaaagaagataaaaaagctgaaaaagttgattttcgtcgcctaggagaagaattctgtcattggttctttggacttcttaattctcagaatccttttctaggaccacctcaagatgaatggggaccacagcacttctggcatgatgtgaacgcttaggttttattacaccacatcagaacaaaatgttatggactaccatggagcagaaatcggtgagcccttcgtttgctgtcactagtaaaacgaagaatatcttttttctcaaggcccaactatgattcacatgggactgcgaattgtggcatcttctccctcatgggcctggtactggggtgggagttgctcgggcctgtgcactccgcgggaaacaccttgtttgggcgctttggagacaccacttttggggagcccatccacgcgtggcccccttggtggtgggcaccacctctgggaatcaccatttttcaaaccgtggaaaatatgtggggacaaaaattccccggtgcttcctgggacatatccgagaccccgggtttaacatgtggacacacggtgtttaaagacggtaaatgaagtacaccagttgtgtgtgccccacgaagtagacacaatgataacaacgagccccggcaacagggcccgagcgggccgacccatggcgaggcggcgcacaacaccggctcgccccgacagacaaggggggtgtgaaccccaaacctgacagagtgtacgccggcacaacctaccttgacggcgcccacaaaacagcacgcggcggtgcgggctcaaccacgagaatgtaaacctgacctcgaggaacactgcaattgcactactcatgggcgctagcaacgcgaaccacccacacccgtgcccacagccagccaactacagtcggcgtaccacctgctcttgctc

SEQ ID NO: 151576 - DNA, 927 bp, Homo Sapiens
ctctggcttgggcaggcgtatgccgcagcccacatgcacctcctgggaaggggatgagtctggcatacagccacacagggtgatgctgatgaaggagagggcccacaggaggcagatcaccagggtggccacagagggcttccggaacttcgtggaagagatggggtggacagtggccaggtagcggtcaatggccatggcggtcaggatgtaggtgctggtgaactgactattggcatccatggccgtgatgagggtgcacatggtctcccctaagtgccacaccccattgcccatgagctggtggatcatgaagggcatgcccaggagaaagaggagatctactaccgagaggttgatgatgaagatgtcggggacgttgttgcaccagtgcagcttggacttcttcacgaccgcgaagatgaccgtggagttcccgatgatgcccaggaggcagatggtgccgaacaccgaaggcatgatgatgttgatgtaggagatgctccccgtgcgaggaggtgatcctgccgaagtgaggttatcggggccatcagaggtgttgctggcattgggaccagtgggcagcagcgaggcttccaggtccatccagccagtgccggtcgcctgctcccacaaccgagctgagctcccctccacccacgcaggctgcggcagcctccagcgcctgccaccttgtcccggagcgcaagccccgcagtcgggaagggggtcttcctccgtagcctggcagccgctgccgcctccaagcccaactgccctccccactcccttcttcatggctcccactgacatcacctagacacattaacattcggaggcagatgcacattaacctcttcagtcccaggctgtggctggcttccacttctgaatgcctgcagagccccagggcctggggaagctggg

SEQ ID NO: 151577 - DNA, 843 bp, Homo Sapiens
tctccagacgctccaccaagtttcttggatcacctggtccatctggctaagtttcttggccatttcaggttggtgaggcccatgctgtgtgccacattgtccacacccaggaagtgagcaatcagcacgtcccattcacacactgtccatgttgggtagaggtgttccaggatgccattgtccactgtgtctagttctctgacattgaaggatgggaagaagaaagctttggagaaagcaccagggaaaaggtctttccaggtatcatctcccatgaagactacacgccttcctgcactggtgagctgcttaatgagattgtcttccactatggcgtggctggcgaagttactaccagcatcaataaaggtaggcagtgagccagtggtgagggccttgaggcgctgcatggtgttggtaggagggtcaacctgagatcggtagagccgggcatggtggggctgaatctccaggatcctctgcaaggagcttagtttgcccaggaagggtagggagacaggaggctctctaggcacgtgtgaatgctggggactgggcgaagtcaaatcgcagagcatctatcagcacctacacaccctgcgaaaactcgggaagccatccagacaggccccaggtttcccttggctcccccatggcagggacccagggcctgggggctcttggcagctgctatggcttggtgagctccaaacgggtgagcaggaagccactggtgaagagggccatgccagcgtagaagaggaagcagacccaggccaggaagagcaacactgaggctttctgcatcctgcaatgacacccggaagtgcggcgcgcggcgcc

SEQ ID NO: 151578 - DNA, 1396 bp, Homo Sapiens
tcggccgtatagcagcccttttccctcaaccggtgttggccatggaaccttgcgccgcagtgtgtcctcaccaccctcacccgggcgtggccagtggccacgtccactgagctctcagcactgcccagctcatttggtggccaggcagctgtaggtgccttcctccagcttgccaaagtcggggataagcaggctgccattggcaaaggcctggaagcgcggctgggagctggcaacaggggtgccaggcagggcacgcccagtcagtgcccacgttggggctggtgatctccacaatgccactgggtatctggatgtgccagtgaagctgaggggccggctgcccgtccacatcacagtgcagtgccagcacaaaaccaggccgcagctcggcaccatccctggcttgggttggtagcatgagctgcactgagggctccgagctatggcagtggcggcagcggcttcagcggtgtaacccttgagcacatggggtgaggtgcaggcgatgttgtcctgctccgggatggacacggccgtggtcagggcccatgtcttgagccacacgatgccgcaggtgcagtcgaaggggttctcgttgatctgcaggtgggacagcgcggtgagcggggtgaaggtgccctcggccaatgtgtgcaagcggttgtggttgagttgcagcgagcgcagagcacggaggctgcggaaggcgtcgcgggggatgaaggtcagctcgttgctgtccatcttgagcaattggagggcactgaggttgtgcaggtcgctccaggcaaagtcagagatgagattgtggctgaggtccaggctcttgagatggctcagagaggccagggctccggcggccaccgtgcggatctcattgtgtgccagccacagcgactgcagcaggggcacctccctgaaggcaccctccggcaagcctggcagccggttggctgacaggctcagtgtagtcacattggccgggaagccaggcggcacggattctaggtcgcggtaggcacagtcggcgatctggaagccatacttttccccacagtcgcagggctcagggcaggcctgagccaggcccaggagaagcgcccaccagagcagatgcagctcctgcatggtgcctccttcaagctactcttagtcaagcggagcctcttctaaggtggaaccaaaaagcaacagaggaccttagccctgagagtctgcagggccacgggcgcccaagggaggacattggatgctggggcgaggggcagcctggtcccaccccaccttcgatgtgcaggcctgtgccctcctgccccagacagggtgccatggaaccatccactgagaggaggcagacagggaggagcccggggcagcacgcgcactccctcat

SEQ ID NO: 151579 - DNA, 1017 bp, Homo Sapiens
  misc_feature (146)..(146): n is a, c, g, or t
  misc_feature (989)..(989): n is a, c, g, or t
tttccacggaatcccattattcaggaaacaggggagccagccagggatttgtggccacagaccaaatcccccacaaatgatccacccacctgatttcccaccccaagacccagaggcctcaggggctgcccggggtcacccagtgnttcgaggctcttccggggctgacatgcagcacaaatgtttttcttgaacaccagggttcccctaggtggatactgcaggtgtagtttcctccatctgacctccctcactccttgaagcatgatggaaccgtcattgcggaaaatgtcccccaccaggttcacacgattctggaagtggccccagctctgggagtactccgcagacatcctgagtttgtggtagtaacgaaatacaatctcctcctttgcgcgccgtcctgaaaatatccattctaccttggtcacgtgtttcacttctgtgctctggaaaacacatcccatctgaatcaatccacccacatggaccatgagctctttgggctcctctggaagcacatgcagtaccaccgccttcttgaacacctggctctcccctttgaggcggatttcacagatataggttcctggtcagcctcttgcacatcttggagcaggagagagccatcattgcataagttgtcccccatcaagtgtacgcggttctggaagcgcccaataggcacactgagattggagtaatagtatagcacatattcgtccttggcgtgctctcctggtgacagagtccagtctatcttgaatatacatttgtcttctgtgctctggaaaacacatcccatcagagctgaatcacccacatggactgttagctcaggcggggaaacattcaagtcattcaggcccaaggaataatccagtaacactggcagcaggatgagtttcagtgggccaaacatgctgctctcaactttcaaatccaagatgaagagcacccaggggaggcaatgcactgaaatctccccnacagctgcatcccgggaattccggaccc

SEQ ID NO: 151580 - DNA, 1285 bp, Homo Sapiens
ttctcgtaatggtcaaaatgtgccaggccagggcggtcccagtcatccctcccaagattcagtacacccagatcccacagcccctgccctctcagagctcaggggagaatggggttcagcctctggagaggagccaggagggacccagctcaaccagtgggaccactcagaaacctgccaaagatgattctccctcctccctggaaagctcaaaggaagaaaaaccaaagcaagatcccggagccattaagtcctcaccagtggatgccactgcaccctgcatgtgcgagggacctaccctttctccagaaccaggctcgtctaacctgctctccacccaggatgcagtagttcaatgcagaaagcgcatgtcagagacagagccatctggggacaaccttctttcttcaaaactagagcgaccatctgggggttctaagcctttccacaggtcaaggccaggaagacctcagagcctaatcttattcagtcctcctttccccattatggaccacctgcccccttcatccacagtgacagattccaaggtcctgctgtcccctatcagaagtcccacccagacagtttcccctggccttctttgtggagagttggcagaaaacacatgggtcacaccagaaggggttacacttaggaataaaatgaccatccctaagaattgccagagactagagacctcaaccagctgtttttaccagcctcagcggagatcagtaattctggatggaagaagtgggaggcaaatagaatgatttcggttcacctgctggtgtctgaaaaaaaccgtgattcatctggaagttattacagggccagcttgccatattccaggcacacgttatcaagtttgggcctattgtggcctctgacttctctttcttcagccttttgaccacttattaattagtccatttgctagaagagtggtcaagggaaaaacgagagatgaaatttagttaagtctatgtgagcaagtgagagaaggttaggtaaggggagaggatggaatgcttgcctccaatgaactttggagcttgtatgtgagtcagattgctcccctattgctattatctattactcttgagagctggctgtcctttgaaagaaagaagtaatgttctttgacagaaccgaaaaatctcttgctgtgtcaaacctcaaaatgttgctatgggggttagaaggcctcctctttatgctttttaatgctctttcaacgtgttcttttagaccagtttctaataagcttgtaaatgtactatca

SEQ ID NO: 151581 - DNA, 995 bp, Homo Sapiens
gaaggtgggagccggtctgggggttggcccatggcgtggctccacggctcggaggaacgttctccagggagggtggtcccagccaggttccagtctccacaagggttctgtgcgctggggagccagttcatgagggcgcggccccccaggagccaacgttatttccagcgcaggtccagctgctggagggtggtgtgcccttcagggctagggccagctcctccgcgcgccttgtgactgatctggttttttgcgggaggtccagccgctggcagggcgccgtttggcccgcccaggcccccgcagaaggttggcgaaggcatcggtcccacgtgcccaaggctgttccactccagcgtgaggctctgaatggaccttgttctgttggaggagttttcccagagcctcggcccctgcagcccgaaggttgttgcccttttaagtccagaaagcgcagcacggtgttggcacacaggcctgcggagcagcagtgtggccccttcctcgctgagcatgcagtcactcaggaccagctccgtgcacagcgtctccctcggcagcagctttgcccagggccctgcaggtctccaccgtcaggctttgcgtggccaggtccagccggcccctgggaagctggtgcagctgctgcaggacagcctcctggggctcggccccactctgccctgcacaggcaggctgtaggagcgccggaactcctccatgacccgcggggccggcagggcctcctccagcatgctcccgcagctagctgaaagggagccgcgcggtgcaggagcagtcccagcgccgggtacaggagacggggcctccgccgacccgggcggagagcaatccgagtgggctccgcgggcagggaggtcctgggagcgcggggctgggcggtagtcaaggtccgctttgggctggggcccacgcagtgcttggggaccacccgtgcaggaagcaggcaggtgcgtcgcgcgcccccacccagc

SEQ ID NO: 151582 - DNA, 828 bp, Homo Sapiens
cattcatgactgcgttaatctctgcaacagcctcatcatccgtggggaactggtagatctggaccccgttgctgaccaactcgcccatgatcttgatcttgaacttgtggagctcgctcttggagatggtgtcagccttggcgatgatgggaataatgttcaccttgctgtctagtttctttcactggtcacctagagtctagagactctcacgggagtgtcccctgttggccttgatgaattagaggccaaaccgtggatccttgtgtcatggtagtcgaagagcgagcggcggatcttcagctcctcctgcagataattgagttcaaactgcgcatcgatgtagtctactatgggcctgtaactctcatccttattgatctgatcccccaaagcccaacggcatccacaaatggtcagcttgagctgcacagttgctctcacatggaggtcataggtctggggcccgcaggcagcacgcatgcctcatggtgacatggcattcctcagtctcgaagttcgtgttgaagagtgtgttcatcagtgtggatttgccaatgccggtctcccccacacagaggatgttgaaagctgaagccactgaagtgaccgacttgctgaccagctggtcggggaggctgtcgaaacccacatggccgcccagggagaggctccaggggctctggctctgcattcgagaagcgctccaggtcagtgccaccacggcgagctcacgcaccagggcagcggtgagctgggacgagcgcaggggcagcagacaggaccagccggctgcggacgcgctccgcccgggcggctgcggctgaa

SEQ ID NO: 151583 - DNA, 1278 bp, Homo Sapiens
  misc_feature (42)..(57): n is a, c, g, or t
  misc_feature (114)..(114): n is a, c, g, or t
gcccagcctttgggccaaccagagcaaggatctttgtggtcnnnnnnnnnnnnnnnngaattatagatttttaaaatggcttttacttttattatcgctaaaactttctcaaanctggatcctgcttattacaggaaagagttcttggttgttttctccttggccctatccctgatttacccttagagccacaccagggtatgttgaggtgatccagtatatggacagaggaagggaaacagctaagaatgactccagcccccatcctatgcactcacagaagcttcccatatcctcttggagagagaggaagaaagtttttccttttattccttatagtctggctcccactaaaatatgtcaaggcataaagtcttgctattccatcaattttagaggatgtgacaaggggcctttcctttttctcaaaccaaaacggttacagaccctagatattccctaagggaggaagagaaagcttagagagagcagaagaaaagtcagaaggatccaaagtctcatagaaaggcactggggttggctctaggatccttctgattccgaaatctcattgctagccaaacaccaaggatctctgtaaagctaaagaagagtccaacaccccctaggattttcagggcttcgtctgaatgcttaagaaacttttctccacacatctggcatgtggggctctggctcttgcagattgcagtgcagaaatcataatcttgttgatacagggttgtgaggttgaataagccacaacaatcaaaacttctttccagttcatcccgagtcttgttgctcatgacccaccaagaagcattgatgacatctgtctgtttgcttcggttaatagccagacatgagcaagagattacaaattggaagatgaagaccaaaccaaggatgatcatgtaaaagaacagcaggacttggtggtggttgacagcacccaccagtccagccactgcaataaggagaaggaagactcccacagcaatgactccgccgatgatgtggatgctggacaccagacccaggcccttgccccaagcagccactccaatgagcaacaagctcaccagcatgtagaccacgttgagagcgcaaagcgcattcttggagcaggcaaagccgccacaaaccatctccccagctctggggacccaagtggtcccaaggacttggggggagggtattggggaccgtcttccaggaccccgacagcttctgtctctttaaatcgaggccatcccgggaattccggaccggtcc

SEQ ID NO: 151584 - DNA, 752 bp, Homo Sapiens
tgggctataaatcgtaaatgagtctcccacagcatgagctcctgtggtacagactgtggatactgcatgatttgggcccttgagtttatatcgaatggctgacctggcctgctgccatattgaccagaatcttagggacaaaaaatgggctaactttattgtaaccttttgtctgaaaattcgaagcagtttcagaaacaacttcaagaggaatcattcccaatgccaattgcaacaccagtagccacttgatcagcttctgactgaggatgccagccagaatccttcatggctaattctgcagccccaatggccatgatggtgggagaagacatggacttgatatctgatttggacacaaagttttgttcattgaactgaccttcatcactacctcttggcacataagcagcaacactgcaagggatactcttatactcttcaccaaccagtgaaacaattccactctctcctccgataagacgatcccaaaccaggtgagttccaacaccaagaggagtcactaagccaatgcctgtaatgacaactcgcctatgcaatctggatattggcacagttccgaaaaacttccttttacttcttaactgttggcataatcttgaacatagaagacgagtgcttgtaattttcaggaaattttgcaggcagttggacatgattaagattcagatgatcagaaacacattcctgtaacggggctatccccggacacttctccacagtcgggggcg

SEQ ID NO: 151585 - DNA, 1133 bp, Homo Sapiens
  misc_feature (83)..(83): n is a, c, g, or t
  misc_feature (1009)..(1069): n is a, c, g, or t
cccctgaagtttgttttcccaagcgcggcgggggtcccctatgttgattaccgcagccgttccttttcctttggcctggctgnccgggcgttggctttttggggggatttccataaggttccctgtgtacccttgggcccggcgcgggaaagggtcccacgatgccaaaggggttcgccccggttggccgccgcccgccggcggttgccgggcccgcaagcagctttcttgttccgcaagcccttttttgtgcagcaggtcggcagtactgcaccgagacctttgcggtgcaggtctgggctcatctcggctgggcagcttggccatggcgaagagcgcgcggaacatctggtccagggctgctgttcttcttggccgagatctcgaagtaggcgcagcgctgggggtcgtcgcccaccagctgctcgatctcgcgctggtccacctcgcggtagaagtcgcggtcacccttgttgccgcagatgaccaggggcacgtccacgttctccttggttttgttcttgaggcaagacttggtgtcgaggatctgctgcctgagccgctgcacctcctcgaaggagtcgcggttgtccagactgaacaccaggatgaaaacgtctcctgtgaggatggagaggcgccgcatggcggggaacgggtggttgccggacgtgtcgaggatgtcgagctggtagacctcgccgcggatggagtagaacttgcggtggaagtcctcgatggtaggcgtgtaggcgtcctcgaagcggccggtgaggaagcgcgacacgatggccgtcttgcccaccttggacgagccgaggatgaccatgcgatagcagttcttggccgggatactcagctccgagtcgctcgggcacatcttcttgatcatcgcggccagtttcattgggcagaggggccgcgagggcgggcgcggggccgagagaagggcagagagcggctgagggtcgctggggtggcacgcggggtgagcggctggagggctctnnnnnnnnnnnnnnnnnnnnnnnnnnnnnnnnnnnnnnnnnnnnnnnnnnnnnnnnnnnnnggctgggctcggctggggttctccccaggatctgggcacatcccgggaattccggaccggtcca

SEQ ID NO: 151586 - DNA, 843 bp, Homo Sapiens
tggccaccacgacttttgacaggcgccagcagctcccgggcctggcttgcgctgtctgtgagggagagactttccgggcgtcaagggcccaattggtcagcacgtcattgatcaggtagatgaggtgcagccgcagctcgaagtgtgccccatcagccgtgatgcggttccggaggtggccggccatcagctcacagtgcggcggggacttggcattgctgaacatccagttcttcccggccgagatggcgtccttggtgcacgtgtcgatgatgggctgcaggaggttgtcaaactcgttcatgtctagctgggtctcctccagaagcttctgcatctgctgctccaccgcgtgggccacggccgctgtcacttgctcctgtctgagcgccagcaagtgctgctcctgctgctggaggttccactggctctgctggatgagctcgtccatggatggcgcgccctgggccggcgggatgggcgcggcgggggccagcgggggctgtggcacggggtggcatggtggcggctggctccagctccggggtctgctgcttgcagatgagctgctgctgctccagcgccagcttgcacttgtagtaactgtagaattcgcctccgaaaagaaacgagaatttggggttgtccttctgcttctccatagtcatcttctcaaactcgggcccattgcgagccacgaactgggcgagcttgtcgatgacatttcgaagctcctggtcatcggggggcagcggcatctccatggctccggccgcggggaacgtcctccggcgccacacgatcgaccaccagcgccgtctgcgatcccgggaattccggacc

SEQ ID NO: 151587 - DNA, 938 bp, Homo Sapiens
tgtgtccacgtgtctcctgggcgttaagggtagctgggcctcgggttctccgcatccaccagccatacgtgcccagaaattgtttctgcctgttgctcagcgtgagaggctctcctcgccctactagttctccacatccggtgttctcccctcgtccactcctgagatagccacgatgggctctcctgtcaaaattcgggaagcaggaacttcagttagctcggacttcaagttcctggaaggccaaagtgtccaaattccacgtagaaacttctctggagcctggtggcacagcccgagcagtgtctcgggtctggggacactggccccttctcagccttgctacctcctggctgctgctttccaacctcctggccagattctcattttcttgccttagtcgcttcttctcgttcctccagaactgacttgtctcggaggaggttgctgtaggcagtctccaactctctggtttgggtttccagctggtcccgctcccgcctcagggtgcccagctccctctgcagcccctcctgggtctcctggggcctggcagcctggtccaaggtcatttggtggaggaggctctccagggagctgagtcgagctttggtggcctccaggtctaagcgttgggtgctgctgtctctctgtaagttatggatgactgacatggcctggctctgctctgggcagctggattcattgggactggccacactgaaggtatactggcatcggccactctggtcattggccttcctgagctgagctgtcctggcccccacatcccacaccaggcaggccagaagcagcagctggacacgctggcatctcaggcccacagctgcagcaacgtgcacagaagaacctcattgcagaggcttggtgaggcttcctctggaaagctctgctgtgctgagaggtgcctggatggg

SEQ ID NO: 151588 - DNA, 1389 bp, Homo Sapiens
ggacctggctgctgggccaggttgctggccagggctgggtgcttctggcgcgtcaggtagcagggccggccgacagctttgggcttccctgtgaccctgctgcttgctggcattcagcatggcctgcttcctctgcagttcagtgatggagaagcctgtctcctggtccagctgcacctgctccctctccctggcataggccttgagccagcgctgcttctgctcgggcttcctggtgcacagcaggtggctgtcccctgtggcgccacggtgcagccggaaggcgttcttgatgctcacatggaggtctctgtccttcccgtcctccaggtccaccacctccaggccgtccatgtccagccggcccttgtagtacaacacgtcgcggcggagcaggtccttcttacagtagatgagctggtggtcaaagagaaagaacattcgctgctggcttttggcttgaggctgtgtaactcgagtcagctcccccgagtagatgagttctgagctcctgaccaagagatcttttccttcccagtcctttatggagctgtgccactgagcaatcttgtcgatgttctcaagtctccgcttccgctcgttgatgagctgggccacgttcttcatggcatgcaaggcggcttcaaacatccttgaagtccctgtgctgggggtgcgtgtatttgagcagctcggccagctgcagagggtacttgcagatcttctgcaccggagtcagcaggaagccatccagggagatgtcaatcatcttctgcagcagccggcaggcctcgaagaagtacacgtacttgctgagcttggtgagccgggagagctccacgcaggcgttggggtggttattgcagtactccgagtagatctggaagtcggcttgatgctccaggaagcaggcacccagctcgctcaggtgtgggcgctcgcggttgaacctctgctccagggccttcacgaaggccttctggcagcggtagatgtcctcgatgttcccgaagatggtacgcagctgctcctcgctgaacatgtctgcgcgcttgcggcactgccggacgtagccctcgcagatgtcgcgcaggtgcttgatgtagtcccgctcagtgctgaggatctcgttgatgacgttggtccgcatctggtccttgctgctctgcgcctccgccccgccgtcctccgctccgctgttcccggccagaggggcgtcgtcatccgcgggctcgtcctgattcaccctcagccgaacgaagctggctggaaaccagccctcgccatcggcgacccggccccaccaccactctctgttggtggcatccatcacttcgatgacgtccccagcttgaagcccagctcctggatcccgggaattccggaccc

SEQ ID NO: 151589 - DNA, 810 bp, Homo Sapiens
taaatgcattctgcaggttgtactgtgcgttagatttctttagtttgtcaaaatctatcaggtcaggccggtgtttgtgtatcagtgcattgaaggccatgccgtccctccagctagtggtgaaattgtgaatgttgacattggggtacccagctgtcttcatctggcaccacaacagcaatgcatccttggcagatttcttctctttgttgtcttcagtttccacactgatatcctggatctggaagcgcaggatgatggtccagatgaggccaagggtcagccggtggtttccatccacgatgtcatgggaccccatgttctcaagatggactctctgctccttcaggaactgaagggccttgtccacattctctaagcagtggatgcgcattcgtcccttggtgggtttaggcagcctctctccagagaggacctccagcagcttgatgagcatccgtccatctcgaaggtcagtgtacaggtctgtgatccggcaggacacacgggcaaggtgggaattgacccacttggtgaaggtcttcttctgcacaggcttcacgctcatctgccagagccttgatgcgggaccgctcaaaaagccgcgcagagctgttctcattgtcccagtcgtcgacatcccagcaggttgttgacatcactgtactgctgctggatctcaatgttgtcatagtctgtggctactgtggtcgtcatcttgaactgtctcagctgctcctccacatcagctccttcttagagttccaaagcaggcccggagggtcctgcgctgagacaaacctgttgaag

SEQ ID NO: 151590 - DNA, 1037 bp, Homo Sapiens
ggggaaattgcagaaaggggcctaaccgtaaaaggggtgaaaaatgttcccccgggtggaagggggcacgtgtttttccggtccagattcccgggggatggattccaaagcgcctttttttccacagggggttacccggttggtttcgggaatctcttttcaaaggcaaggtgggcaaagtaaaggcccttggggcggaggtgaagaaaattacatccccgaaaagggggggctcagaactccatagtaggccctccttgattcttctcgaaaaaggttagattccgtttcttcatagaacggggggtatccacagagcaatatgtaggtgatgacgccgatggaccagcaatccacagccttgctgtagggtttctgggccagcacttctggagccacgtagcctggggtcccacaggcagtggacatgatgccattctgttccatcttggacagaccaaagtcagtgatcatgatcttagagttctcttcaggggtaaggtaaagcaggttttcgggctttaagtctctgtggacgatgccattctcatgtaggtatttcactgccgacaagacctgctggatcaccagactggcatccttctctgtgtagacaccccgctccaggatccggtcaaagagctccccaccagaaacaagctgcatgaccaggtagtagtgggtggtgctctcatagatgtcctccagggtcacaatgttttcatgcttgatctttttcaacacagcaatctcattctccaggctgctgtcccggaaggcaggtgacttcttgatgcacttcagagcaaagagcttcccagtcagtctttgcttcaccaggaaaacttctgagaaagctcctgatcccagcacttccataaaaatgaaggttttccggatgttggtggtctgtttcttccaggaactgcagtcatcttcttcctttcgacccattgcctccagagttgaagcttctgaggatgccagggactcgggaagaatcctgcttgagctcccactccagcatcccgggaatt

SEQ ID NO: 151591 - DNA, 1051 bp, Homo Sapiens
gtgtcccactcgtattctctgcggcgcccttgtggtgctccctccttaattttgttttgggcgtttgtctgttccctcttgtttggtgttcctgctctactccctcccatgctcgcccatatggtcttttcggataccctgctgttgtcgtgctctttttctctaactcctgcgtatctggtgcctccaccactcctgggcgggtggctgcggtcaccctttctttccggggcgacttcttggcgcgattcccttggctatattgatatctctatccctataacgtctgatttcattggaccatgttgctccaaaggcgacaacttggccgaaccctcgcgtgccatccataatcggtcgcttctctccccttttctgcctgctctctttgtctcgtgtcacccccctctggtggtgcccgctttgcccctttttgtccccataacgtgtactctgttgccctgttccccagtggtttgagtggcctcttcctttgggtattgtgtgtccgaaggtgttatacatctatggtctcagttgctcgttcttcaattcttaatggttcaccttcaagggccccaaactgatattggtggagtcccagcactgtagcgtcaaggccatggcggcagtcaaccgctcacttgcaggcatgttcccacgtggtcaggcgcagggtcatttctgccatcatcacatgaagtggggacattgaatacaggctcttccttttcttgcatccatccatgtgcccatccatggtaaaccagatccccacggcctcagccgctcttcatcaggcctgacattgggcttccagagcctgcaccagcccacagtggggcatggtttggcaaaaactgggctctagattttgctttagctgttttcttttccacttcattgtttccgtgggatgtctgccttcccaaaataacaccggggcattccaggtaaacatcaacatcgcgacagagaatccccattcagcggcaagtccgaagggtcctggtttttgctacttgttttcctcccttcctctggctcaggc

SEQ ID NO: 151592 - DNA, 462 bp, Homo Sapiens
gggcgcgcgacgccatgggccggtcgggcccagagctcctgtctctcagcccggccgcaccacctgggtctccgccatgaacgggcctgccctgcagccctcctcgccctcttccgcgccctcagcctccccggcggcggccccgcggggctggagcgagttctgtgagttgcacgccgtagcggcggcccgggagctggcccgccagtactggctgttcgcccgggagcatccgcagcacgcgccgctgcgcgccgagctggtgtcgctgcagttcaccgacctcttccagcgctacttctgccgcgaggtgcgcgacggacgggcgccgggccgcgactaccgggacacaggccgtgggcccccagccaaggccgaggcgtccccggagccaaggccccggccccgccgcccctggcctgccccaaggcccgccaggctctgagggagctggccccgccc

SEQ ID NO: 151593 - DNA, 927 bp, Homo Sapiens
ggatgaaccaagggatcaagaaaaatggtcatcgagtgagttcagcacgttcacagctttaagatagatgatgtcagaaatcttgagccagtggcgggagtggagtcttatctgcgtctttatagacagtacagagggtgttcgtgttcagggtcattatcccagactcccacaacacgccagcacggctttgcacgtgtttttaagttctattggcgtacttcggctgtacaatggccatgtatctgtcagcactaatacaaggccagaagccataaagccactgcttgggtacaacactgtgagagctccaagaatctggcagcaagtactctccatatggccattcatcttttgcataatgatacacttcgaaagggtaaagtcattataaatatgcaagtccagctacatgccacattcatcatatagatggttaccgtggttctcttcttggtggtacaactgaaaacccataatgcagtgatgcttaactattaatccgattatgaagatacagctatagtagacaagggctgcaattttgtattcatctggatgtcgagctgcttacaaaggcgacaggttgatcttgattgttccagggtgatcattctctacagcttgtctggtaggcatgatacttagaaactcctgtccatccaaagtactgtgtgagagatgagcatttttcagcacttccacttctgtcgaagggatatctttgagttgcttctgttaaaatagctctttctggaaacagtgtatttaagaaatgttgtattttgttttagactcttttgttgctttaaaaagtagtttccagtgtaacgcttggcgtcggagttggtgctgggctgactttaattgctgctttgtctctttcaggaagtgctctctgaaataggctttttcaccttatgactt

SEQ ID NO: 151594 - DNA, 1345 bp, Homo Sapiens
  misc_feature (77)..(77): n is a, c, g, or t
  misc_feature (1270)..(1282): n is a, c, g, or t
ttcttttttcccgggggttttctttatttgttaccggtgtaccgtttcccacggattggaagtagctgggaaagganggtttctggtcttctggaccctggtttctgtgattaccagggctgccattctctttttgtatcttgaaggctccataggggaaatttgcggatttgaaaatgacttctcatttttcccagtgcataaaggggatgtgtcttattacactttgcagtcatgttgggtggagttaatatctcaatctgtgaaaagacgacaaacttatctgtgcaggggataccgaaggctgcgctcctgccccgcaccaggatgtgggaactttgagaaccgctggagagtcgagagatgtcatcgaaacgacacccgatacgtgttccctgagcatccgttttgtagtgaagacactcgtactgttgacgcctgttggcaacgttcaagtacaggtcgtactggacgtccgcgggggcccccgggcctaccgcccagctgcagctcaagaaatccacgtcatgaatccagcaggtcagattctccgcacctgcccaaggcttcccactgttctcagggaagaggatccacgtggagaatggtgggttggccactcggacggtgtagttggtcacttcacataaggaaattgctccaaactggcaatagctattgttcactgccggcatagaatagtcggcgtctttaacacactcgatatcggtcacatttctgttaaggtcccaggtcaactgctgagcctttgctttcatccttaggttcgtgattggtgggtttggatcttccttcgtttgcaggagacagggcagggcgatcaggagcagcgtgagccaaaggaggaccatcgggaacgcagctccggaacgcaggacagaggtgcctgcttaaatggagatcaaagtactgtgtggaagaaacagccttcgtggttccagttgagaagatctggggtgtcctgatcctaggatgtttctgatatcttcccgtgtgcgctgaaagcagctttccccggagagcaaccgaaggttgtactccccgattgagctgttttataacctccactggggccccacccctgaactcagaccccataaggatctggcatggggaggggtgggggcttcagagacccccttctctcccacgggctgggatcctgggggtcagcagcttcgtaaccatgaacctgactttccttgaaagaagactctttctttgaaaattatcatgttcccgttctcannnnnnnnnnnnnctgcaagtgtttctgtttgctataattagaaattcttgctggctatacaggcagggttggcaa

SEQ ID NO: 151595 - DNA, 808 bp, Homo Sapiens
caggcgaatcatgctcccggagaaaccaggccaggtgccccatctttgtggtccagtatccccccctcgccaactcggcaatgtaggtcagccccccgggagagacagttcagcaattaggtctcttatcgcctccaaggcttcgtagtacatatttgttagcctccatatctgtcttgcccgacatcaaccaggatttgatcacaatattcatcaaaactgtccccgagtcctccaactgagacatggtgttgcacccagttcccactcactgggctgaggaagttgggctagaggccaaagggcttttcgatcttcctgaggaccttgcggatgttcctgaccgtttcagcgaagacctggttgccagagagttcagtgaggtgtaagaattccaagtgcagggatccaaactccgccaagatgctgctgctgccggctgtggcccagccccagttcccacttttgaagctcaccacgccctttgggattcccgtgggggtgttgaacgccggcaggagcttctctcccagcctgatggcctttattcggaacacctcttctcctgtcaggtagaaggctgagaggagtcccccgatgtagcggatgttcacctcaaacaaggatgcttctccgctcacgttcaggtggaagctctctcccacccaggccttggcctcctggaactcctccttcaactccatgaggtagagggtatcgagggagtcaatgactgttgccccgctgaggcctccgaacatgttaccctcgtagccatcttttgttagtggacggagttcgtttttcc

SEQ ID NO: 151596 - DNA, 827 bp, Homo Sapiens
  misc_feature (425)..(494): n is a, c, g, or t
ctccgggtaaaaaatgtgccaaaaaaatcccgctgcgcaaaatttcctccgcagccattatagggccgtgtgttgcacaacccttcataacacgcgtcaagtgttgtttaatttgtcgcccgcagaggcgcttaaaaatattcggtcatggaatagtggtcgcccacattaggtgcgcccccgccccgagatctggggggtgccgttcctcccaccaagaggttcccctcacggtagacggtgtgttttcccacgctactcggggagctggtttttataacgtcgcgcctgcgtgtgcccgcgtcttaataaagacgggctcgcctctttagggggggcacaccctctcgtctcacacaaaaacaaccggggggggaaccagtataaaaatcgtgtgcgcccctctggacgggaatttttggggnnnnnnnnnnnnnnnnnnnnnnnnnnnnnnnnnnnnnnnnnnnnnnnnnnnnnnnnnnnnnnnnnnnnnnaaatgaggtgccagagtttggtttattggctcatccagtgccaaaggtccaatgggcaccctcttcccaaggaaccgggagccccgcggctcctgcatttctctttctccttcacgtgttcctctggccctgactgaaccgtggcagaagctggggcgggtgtgagcagaggctgggttctgccagggttcttagggcccagtctgcttggtacaggatggggacctggcaagaggggatggaccccaggggcagaggagaggggcccactcacgcaggggcctgtaccaagacagagcaggggtggccctgaggagcacggagtcagcccag

SEQ ID NO: 151597 - DNA, 1236 bp, Homo Sapiens
  misc_feature (101)..(101): n is a, c, g, or t
  misc_feature (1015)..(1067): n is a, c, g, or t
atacacatccccgtgtgttgtggtgtccccccccacggggttaagagtgttttgcggcctttcccctttttttggggttctcctctttccccaaccgggtntgttataataagggccacccggtgttttaagggagagaggggccccaacacaaaagtgtcacccccttctttctttcccccccggggttggggccaagggcaaaaatataaaaagggtttgggcccccgggccaagtttttgcgggccaccgcggtaaggcccaaaagaaccccaccccccaagccttgaagcccgggccaagaaaaggccaggctcccggaggccgtgtggttccaggcccgtaagggtgggggggccagcttcgttcctggggatccatccatggggccacagggggcggcccccttcaggaaacatttttccagggaggccattcctcccacacttgaagataacttcttgtgggttttgccttcctttttggcgctacagttgctgctggaggatgtggtccggctgcgggggtcctcacggcgcaccgaggcgaggcgctctggtgacaagtagcggcggacactgctgcgcccggaggtcgcctccttcttgggagaggatggggacgtggcatagccacccacgcgccgcgggggtcccgagccattaaggggcgtcctggtgggaaggcctttcaagagctgacacaccgaggcagtggtgcctaagcgcggaggcgcccggcccttgggggtgccccgcgcgcgtagcgccgctccctgttcttcgcatgcccgcaggcgacgcagagcatccgccagcgccgcctttaggaccgccagctcgtcttcctgtaactgcagccgctgctccagcgccgacacgcggtcgtccacttccataccgctcgtgcccgacaaattgtcatcgttgcagtatcgcagcagcgaggacgtgtcgtacaggccgcagaaggccgggccgcgctccgccatcgccccaccacagccaccgccgnnnnnnnnnnnnnnnnnnnnnnnnnnnnnnnnnnnnnnnnnnnnnnnnnnnnnttgccatagcaacgcccttcgttccagcatccccagctcagctcgcctggcatcaggcggccggcgccgggcccggcgctggggtcatccccaggatgcccagaaaggggggtcgggacaccgcctgccaagccccccaacacaatcctagggccaggattgctgcgcc

SEQ ID NO: 151598 - DNA, 812 bp, Homo Sapiens
gagagtaatctgggacgttcgtgatcttcatagcccatgatgatatattcgctcagtgacatgaactggagggcagaggcagccagagctggtatagaggttgacagtgtcccgtggaatgtttaccagagaggacttttagaatttccttcacctccactactgcagtcacatcatggcacttagtctttatctctgttaactttagcccgaatgacatagttgtaattgttccggaaataggtcttctgtgtagctctaataggcttacatttacagcgttcactgcttgcccctctacagtttccgttactagaatccataggaaaatcagctccgtccgcagtaacgatggcctcgggagagatgcacacgcccctgtcgtacactggcagctcctcgcaggccaggttctccggccacgagtggcggtacttgatgagtatgggctcacagccctgccgggcccgctcgcacacagacttacagggcttgatgggctcgtgctggaagtcaatggtgcagatgggcgcgtacatggcacagaggaagaagagcagatcggggctgcagtgggtgcccagcagaccttcgaactgctcgatggccaggatggcgttggcctgagtgctgtggtgcaggtggttgggcatcttagtcatgttccagggcagggacttgcacagggggatgcggacgggctcacaggctgcagcccgagccccgggcacccggagcaggcagagagcagccagggcaagcagcccggcccgcagcagcagcatccctcccgggcctgccgcagaccatat

SEQ ID NO: 151599 - DNA, 837 bp, Homo Sapiens
ttctaaagcaaaaaagtaccaatagaatacaggaattaaaatgttcatgagatattttatgcagaaataagtccagcctccatcaatcgtaacattaaatgtggatggattaaacattccaataaaatcagagattgtaaaatgtattttttaaaagattcaactatgtgctatctacacattttagacccagagatgcaaatagattgaaagtacaacgaatggagaaacgatatgtcatgcaaacagcaactacaaagaagctgaagtggttgtactaacactcagacagaaatcaacgttcaatttttaaaaacgttattagaggtaaagatataaaagtgctaaaataataaaaaggccacaccaccacaaagatataacaataatgactatatatgcatacctaattacagagccccaaaatatatgaagcaaaattggacagcatcagggagataattcaacaatactagttgaagatatcattatatccgtcactgtaaaagtgttagctagaaggaataagaggtgctggcttcccagcattccatctttcccccaaagaacagcactgagcaagggtcagctggatacactgcagaagaagaaattaccttactgccaaggagccctgaaccaaaggctcctgcctctttatgaaactgagctgtggaaaggcagaacacaaagtactgagtctaaaccattaaatagagacttaccatatgacccagcaatcctactcctagatatatacccaagagagagcgaacacatatgtccacacaagaatatgtatatgaatatttgtcacaaacaacttcatgcccagca

SEQ ID NO: 151600 - DNA, 770 bp, Homo Sapiens
gggtccttgagggttcccgttttggtccctgatgctgaggtctttgatcagactggttcacagcgcaggcggtcactgcctcccggtgccatagtgagctgtccatttcaggcaggcattcccagatgctggtgctcggttggtcaatctgaagagggcatttcctgtccaggtctcgccatctggtcattgttgccataattccacaagagaaaagtgtaggtcccttgactcatcttcttttggcgtgtgccagttcacggctgaagttcccacaatggcaaatggagtcagctccccggttgctgaggctttcacttaggaccatcaccatgataagggcctcaggcgctgggctccattccagggtgggtatcagccatcttcacttgggcaagacttggggtgagtaacctcctggggaattgatgtcagcagatacagctccccattggccactcacccttggggtggggcccttctgggaaatggccaaatgtggtccactcctgtgcgcggcggggcgctccgggcagcggaccccgcgccgtcaccgccagcgcttggccaagtcgtccggggtgcccgccgcgcgtccagccgcgcgcacgctcgcctgccggcgccgagcgctttgtacgagcgactcccggggaggaggaaatcgacttgtcacttcctgaagtgtttgcaactcgtccctttaaccggcaccggccaggccgcccgcacccgccgccgccgcggagccgccagaccgcggctgcgtg

SEQ ID NO: 151601 - DNA, 268 bp, Homo Sapiens
cgcgcaggctgcggtcgcgcaggcgcagtcggggcgccttcccggtataggcgccttttaccccagcgtgtcctgagtctttggttcgcgaagtgccgttaggccaagcaggtgctaaaagcccggggtcgtggaccccggccaggtcttagcagcatggaggcgcagggtgtagcggagggcgcggggccgggcgccgccagcggcgtgccccaccccgcggccctagccccggctgcggctcccaccttggcgccagcctcggttg

SEQ ID NO: 151602 - DNA, 914 bp, Homo Sapiens
  misc_feature (885)..(885): n is a, c, g, or t
cagggcctggtaccatggcaccacgcttgagtggtgcccagggaattactccatcattgtccctccagtagttgcttctccgtctgatgctggcttcattcccggcttcagggaggctgttccgggtgtgtggtgtttcccctcagatcccaagccacaaggtgtgaaggttcctggcagcaacttgctgacttggcttgttgtggaatgaggatggaaaactccagcagcaatgaggaggcccactcaccaacaagccaggctcctgcccgtcaccaaacaagccaggctcctgcccgcagggtcaggaagctgtgtcctgtgtctggggccagcctccttcagctgggagttgggggaggtgaagggaatgaaactcccatctgggctttgttcagcctcagtcaaatgactagaaagagacgcagggcgaggctagaaagatgctgtctgtaaaacttccagagcctttgggagaaggtgaagatgggtgcttttaaatagaaaggccaggaagcagggagactgggccttcttgcaaaagcctgttaaattcctaatgatgttgaaatggtgggaagggtcatccagggaggacctccacgcccgcccatctcctctgggttgcccgggcaatcctgcaggagccgaggctggacgcagctgaccccaacagacaggagaaacaagccagcaccaccggagagaaccaggctgaaagggtgacccagggcttccgtggcctagaatgagagagacatcgcatggcgcaaggttccaagtagggttcgcggcggggagggcccctgccgcaaagggactcagtgttgtgcgagggaggtgaagtcgcttctctgatcagccgtatttcttgcctacacttgnacaccgtcaccagcccaggcgcctttccg

SEQ ID NO: 151603 - DNA, 883 bp, Homo Sapiens
cctgggaaggcagggccagcctgcgagatgaacagggaatagccacgaaacgaatgcttcccctcaccccttctctgtgccacggcaattaactactagagagcatttgcaaggcttggtgctttcctggtgaggccggacgtcaatgacagggagtgaaaccccagaccactgaaggggggcttcctggagcaggggtgaggtgagacacggtcttggatctcttggatgaggaggagggaaaaggacttgagcacattgcagatagaccacggaaggcagctgccgacgattgaggagctcccaggagcttgccgcttctcggggctcagtctccttgacgacagggggtgggacctgaggggtggattgattgggggtgtcgctgaggaaggatggtgagtagatgctattgttcataaccttggttgcagtctcttgggagggtgccaagtccaggcaggtgaaggagttgaaggtctcctccgagcaggagctaagccctccccctctagtcttagtttttctgtccataaactgggatgatgaaccccgctggaggtggtgagggtcggggagcagagcagagcagccattatgctcaagacaggactctggactgcacctgactgaggtttgcactcctgggttccctgtcctgaaacacaaagcaagagcttgtccccatacagcacaatccctgctcttcagcactctttgcaatgcctctgggctttcctttctatcctggcaggatgagcgttgggattcctcactggtcttagttttcctgtccattaacattgaaggatgaacccacctggaggctttcaggatacagaagatgttctgaagaggaaggctgcacctgtgtctgggcagc

SEQ ID NO: 151604 - DNA, 929 bp, Homo Sapiens
gcggtaccaccggcaccatcgagacgctcacgcggcagccctctgctggtggtgtcacaagacagcagttctggggctacaggacaggcggtcaatgtgtccccagagaatggattgagaccacgatcggatgccacagctgctgtggagaaggcccaggagcctgcacagttgccttggtcaagaggctcatgaatcaggttgggccacttctcagaggcctcgaaggctgtgggaagcacctcccctgggttcagcactgtataaatttcatgcatgttcatgaccgaggaagatgggcggatggtgcccaggcggtagcgaatgccctcatccagggtcatgccccagaaggcgctgtggttcccagcctgccagccatagttgccctggttgatggctttgatcatgtctggatccaccaggcatggttcttggtcacactgccactgcctgttctcctggcaggtgcaacggttacagttgtcccagtacgttcccaagactggatagatacgacctccatgcatacatccttggatcgggggaaaagggggtggcacgccgaggcagaagtcccagaagtcagggcagcagtcggagaccgtgcggttgcagaagaggtcacagtaacagatggcgcccaggtagggcagggcacagtcgtcggcacggccgcggcagcacaggtcctgctcctggcagtaccggcctcccgcgtcccggatgccccgcaggtgcagacccggtgctagctcccggcgcccacgaccctgctgggcacccagagccaagtggccagccagcggcagcaacagcagtagccccagtggacatcgccacatggtggctcctgggccctggtgaaggtgtgggctggggcccaggctggcccgcgcgcctccgcctcctggctctgcgaccgccgg

SEQ ID NO: 151605 - DNA, 868 bp, Homo Sapiens
caggccccgtgcattccctccaggccccccatcacatggtgcagcagcacatacccatccccggagtctggggacttttcatggctccaatcactgcatctgtggctagagtggtttttaaaggctcagactcgaaccactgatccagcactttggtaatgggagctgtgaggacctcataatatcggggaagctgggctcccaggatgcggcctgccttcagcaggggcttgagggtggagagcgacctcatcctttgcagcaaggagccatgctggaaggccgccatgtccacgggggccgcatccagcagagggtcaatggctaatgccaagcgatgcatgaactcctcatatttgggaaagacctgggcatccttctgggagaactgggcgatctgcttctggttttctgccatgtctgtgcccagcagaaggcacctgggcaccttgctgcctgcaccctcttccagcatgggggtgaaggagtaggggtttcgaagatgaagcctcagcccatgtttcttcagctccagatcagtgtaaatctgcggcctcagcaggctgagcaggtaggacgcacgggagaacttaaaccctgggatgatctcctcagtgacagctgcacccccgatcacatggcgcctctcgaagacggcggtgttcacccccagtctctgcaggtacgctgcagccaccagtccgttgtgtcctgctcctatcaccaccgcatcatactcaggcttcagacctccctggcttccgtgttatctcgtctccacgccgggaagggagaggcggccacagccttgcagagacctcggccacttgcagccatttctgccccaggctgggccttgctaggcagg

SEQ ID NO: 151606 - DNA, 810 bp, Homo Sapiens
tcttttccggagcatcctgaccgaagtcaccggtcggccatgccataagtcggtgcctgtttgttgagatctgcccacctgctccctggttcaattcatccacgtccacctccacgtcgatgtcggggatgacctcatcttcgtccgagttgctctcctcctcggccgctgactcctcctcctctggcttttctgccgccttctctacctcggtccaaccgtgctgtcctcgtaggtataaaccgatggaagccttcttctctgccagcttcttcttcctcatcttcgctgggtctctggaggcctccgtacaactcatcaatgtagatctggtacaggcactgctcctctgagatgccggcaaagtcgttcttgcaccaggccctctgttagcgcttgtagttacaaccttcccgttcgtccgactcctgttctggggagatggtggtgagcacgagggggggtgtagtcggggatgtggtccaggtgggcacggacatcgaatcggtcaatcatgttgttggtgtccccctgccagggcatcatattaacagggctctcagcggccagggcgactgcagaatccaggtgcaccattgcaagctcaggccatgtacctgcaggaactgggctgggtccttcttgatcttttcataatactcccgtctccgctccgccctcttcttgtagtcgaccatcatgcctcgaagcttccgctcatgcttccgagcctcgtgccacattgtggtgaggccaagcctggggcctcaaccggctggtcgccgcctcccaccgctgcgctcgcgcgcg

SEQ ID NO: 151607 - DNA, 1463 bp, Homo Sapiens
gcggcaggagcccccattgaagcagggggagtcggcgcagctcaaggtgctgtgttcacaatgcaggccatagtagcccggaggacacaggcagtggtagccatcctcctggtccttacagctgcctccattgcgacaggggttgctgtcacactcgctgagctccagctcacagtccacaccagtgtagcctgggcgacaggtgcaggtgtagcttcgctgcccactgttggagcacgttgccccattcttgcatggggagtgttgggtgcagtagttgagatcttggtcacataacaggcctccccagccctcagtcacaagtacattgccagggagtgcctgcaggtgccgtggcgacagccattgtgggggatgcattcgttacacagccggccctgccagcctgggcggcagaggcactctgctggcttgctgcagtagccattctgttcatgacagcccgaaagacagataggctgttggcaatattccgcacgtccaaccgggcaaggcaggacaagttgccatctggctggcacacatagtggccgaagtggtcattgcgcttcttgcacaggcgggagcagttgtctccatagtagttgtcactgcagatgacccggtaagagtagcgcagccttgtgagggtgctggtttgctcatccaataaccagttctgacccacagctagggagccctggatggcgatcttgctgatgagtgcatctggtggcaaggcctctggccgcaggtcgtctcctggcgcgtgccaagcttcgatgatgagcgagaaggtacccggccaggtgaaattgaagggcagttggagagggttgcgccccccgccgctactgtcgtcccggacagcgaaggagttggtgcccagtaccggcgtggagacggtcccgaaggtgcagggtccgggcgagacgaccgcctggaagtgcttagggcagacgcggaagaaagttcgggcagccgggctcgcaaggcccgcccactggccagtacgccgcgctcgttgatgacctcctgcagctgcagctggaagacgcccggagccggcccgcgcgctgctgccaaagtgccaccagcagcagtagcgcccagccagaggcgctccgggacgctgccgccatcccctcgggcgtcgctctctccacccgcgggccctcaatctggctctgttcgcgacgccgctttcccgcgcgtccgccagccggcggggtccctgaaaagaggcgctcctctcgggacgctgctcccctttggccttctcgctggctccgctgcagctgccgctgtaggtaatccaggtgactacggctgggcggcgaccgcgccgaggacgcgtcttctgtctaatcctggggctgcaagcgggctagtgccggtgtacgctgcaccaaggcggctggggctgcggctcttggcctcgtgttcccggcctgcgcgcagcg

SEQ ID NO: 151608 - DNA, 1311 bp, Homo Sapiens
  misc_feature (940)..(988): n is a, c, g, or t
gcagtggtagccatcctcctggtccttacagctgcctccattgcgacaggggttgctgtcacactcgctgagctccagctcacagtccacaccagtgtagcctgggcgacaggtgcaggtgtagcttcgctgcccactgttggagcacgttgccccattcttgcatggggagtggtgggtgcagtagttgagatcttggtcacaaaacaggcctccccagccctcatcacaagtacattgccagggagtgctgcaggtgccgtggcgacagccattgtgggggatgcattcgttacacagccggccctgccagcctgggcggcagaggcactctgctggcttgctgcagtagccattctgttcatgacagcccgaaagacagataggctgttggcaatattccccagtccaaccgggcaggcaggacaagttgccatctggctggcacacatagtggccgaagtggtcattgcgcttcttgcacaggcgggagcagttgtctccatagtagttgtcactgcagatgacccggtaagagtagcgcagccttgtgagggtgctggtttgctcatccaataaccagttctgacccacagctagggagccctggatggtgatcttgctgatgagtgcatctggtggcaaggcctctgagggggcagagggtcgggtcagggaagggtcgccaagtccccaagggtgccagtgacggctggccaaatgtccttcttggctgtgatgatggtgatcagccaaccaatcagcccagttatccagatgacccccgcctgccagcaagaacaggccagagggacccaaagccccgctacgtagctgccctacgtgtgtgcatgtgcagggggcctgatagtattcaaaaaggggacaatagaaggactgttaagatatcccagggtcttggaggcagatagggaggggnnnnnnnnnnnnnnnnnnnnnnnnnnnnnnnnnnnnnnnnnnnnnnnnntccccaggctagagaggaccctgggagcagggggtacctttggtgcccattcaggggttctgcctccagaggtgggtaatggttttcttttttccttttcaaagtgagaattgttgtgctgctgaaatatccttttcctctgtgtcagaacaacatcccaaagccattattccctttccaaaggagcggaattcgcgaaaggtgtaaaatacaggaaggggcccgtcagcggcgctggcagcttcagcctttctcaccgccgtactccccgcgttcccacgccaaaaataacccgcaggaaacgcaattgtgctctgagtcca

SEQ ID NO: 151609 - DNA, 788 bp, Homo Sapiens
tgttttccaccctgtcaccaggcctgctgctctcaggtgcttaggaaaaggcattgtctagacgcaatgaggtgccaggggtgtctcccgaagttggccattcactgacatgatctcctggggggcaatacagctggtggcccactgtccgggacatgcaagatccaggcgcagaagactcgtcagaacgctgcacgtggccacgtccttcaggtggactctcgttggtggccggcgtcggctggccccctcgcacccggtcccgtgtcacatgctccagggcgcagcttttgtccacctttacctcagtcgaaagccttgtttttggccttcggttaatcccttgcattgagggctttgatccaggattccttctcctccccggtagggtgcctggaatttgatagtcgctgaccttgttgccctggggatcgcagcaggataaagcggtgttttcgcttgaggagggcacgaaggtcctggcacttctcatagctgcccagctgccacagtctccacacacttctgatcatcctcattctcatagaccagcagctgggcctggcagaggagcagatatcggtctttgccagaaacccacggaggcccccactgctcttcttgatccagccagccttgtcacaccatctgtgctcccacgaggcttctcaccggcttccttcacaccctcctcctccatggcgagtccgccgaggtcccgccgctccgccactcgcttccagcgccgcgcgggctctagccaccgcgtctacgcccggccaggcggc

SEQ ID NO: 151610 - DNA, 1110 bp, Homo Sapiens
  misc_feature (56)..(376): n is a, c, g, or t
tttacagccatgttctggggggggtaaacaaatttcccaatggacggggggggccnnnnnnnnnnnnnnnnnnnnnnnnnnnnnnnnnnnnnnnnnnnnnnnnnnnnnnnnnnnnnnnnnnnnnnnnnnnnnnnnnnnnnnnnnnnnnnnnnnnnnnnnnnnnnnnnnnnnnnnnnnnnnnnnnnnnnnnnnnnnnnnnnnnnnnnnnnnnnnnnnnnnnnnnnnnnnnnnnnnnnnnnnnnnnnnnnnnnnnnnnnnnnnnnnnnnnnnnnnnnnnnnnnnnnnnnnnnnnnnnnnnnnnnnnnnnnnnnnnnnnnnnnnnnnnnnnnnnnnnnnnnnnnnnnnnnnnnnnnnnnnnnnnnnnnnnnnnnnnnnngtagaatgccttgtccttgtaggcagacaaggacagacctcggtctggtctcccctaggcctagacacagatacttgataaggagggaggattctagggaaccaaggtcagaagcctcatagagcaggaagtatgggttttgtggcctgttgatggcagaagcttctatcttaggcttagagtctccagctaggctcttgctgggaaaacagtgcagtctttgctttcttttatatcagagctgcattttcaaacgtaaccatcccacacccactctccagctattcgaggactttgatgacagccctccagtttctcaggatgtaacagcagcaaatcactgtgcactttctcacttgctgcccatgatcccccatgctccaaccaccgggcaggcccatattgggcatgaaaggatcttggccttaatttttcttttgcctcgtggcgataaagggagcattttgtttttttcaaaagacaaaaccaaaaggtgcatcttaattagggaacaggtgcagtgagaccagactgaactctgccaggcagcagcctttcactttgtgcgcacaatgcttttaatgcagccccgttgccatggcgattaccacgtctcagcttactgaggtggcgttgcaaaccaggttgggcagcctgtcaccatcttgtagccccgccattgaaagaacgtaggctctgagactgtcactacagggaagacagagatggaggag

SEQ ID NO: 151611 - DNA, 370 bp, Homo Sapiens
ctggtacgccccggtgtacgggatggagaagagggagaccgccgcctccctccctccctagctgacttgctccctcccgggctgcggctgctgcaaaagccagcagcggcagcgggagctgtccggaggccggcgtcgagggtttgccgctgtctctgctattccatcctccccataggggctctctcccctctcccatctcaagatggcagccagcagctctgagatctctgagatgaagggggttgaggagagtcccaaggttccaggcgaagggcctggccattctgaagctgaaactggccctccccaggtcctagcaggggtaccagaccagccagaggccccgcagccaggtccaaacaccact

SEQ ID NO: 151612 - DNA, 789 bp, Homo Sapiens
cttttgggcaggtgtcagcgcccgtgtcaccgccacgtcgcggacatggtgatttcagaaagtatggatatactcttcagaataagaggaggccttgatttggcttttcagctagctactcctaatgaaatttttctcaagaaggcactgaaacatgtgttgagtgacctgtcaactaagctgtcttcaaacgcccttgtgttcagaatttgccacagttcagtgtatatatggcctagcagtgacataaacaccattcctggagaactgactgatgcttctgcttgtaagaacatactgcgctttattcaatttgagccagaagaagatataaaaagaaaattcatgagaaagaaggacaaaaagttatcagacatgcatcaaatagtaaatatagatcttatgctggaaatgtcaacctccctggcagctgtaacgcccatcattgaacagggaaagcggaggacaccattatgttaatatgactttacctgtcgatgcagttatatctgttgctccagaagaaacatggggaaaagttcgtaaactcctggttgatgcaattcataatcaactaactgacatggaacaaatgtattttgaaatatatgaacaggaacatctattgtggtccctgaaccactgcactttttattaccagggacaaaagatcttgtaacaagtttcatatccttcaggaataccagatggcagcctgcaggcctataggaaaggagttacatgatcatttcaatctgcctcacgacagaccctatttcaaaggtctag

SEQ ID NO: 151613 - DNA, 1301 bp, Homo Sapiens
cggagaaagcctattttcttttcgtaatagatacatgcctttgccataggctggcgtcgagacttgaggccgttgcagactttggcgcggctcgcgcctcctgcttcaagagcccagcggtgagagctggcctgcggcacgcggcctaatgccagacagtaacagtttggaggatcaagatgttgaccaacttgaggatattctgcaatgagtcatcagacaatacccagtgtgtatattaactaatatatgctgctataaaataagagcaagtttaaaaagattaaagccacatgtgccgcttggaagaaattgcagttctctaccaggcttaataggaaatgatatcaaatcccttcattccatcatcaatcctcccatagctaaaatccgtaatattggaattatggctcatattgatgcaggcaaaactaccaccacagaaagaatattgtactattccggatatacaagatcactgggagatgttgatgatggagacacagtgacagatttcatggcccaagagcgagaaagaggcattactattcaatcagactgctgttacatttgattggaaaggttatagagtcaatctaattgatacaccaggtcatgtggactttaccttggaggttcggagcggtgacctaagagtgttggatgggtgcaagtggatgtaatatagattgcctcatgtctggtgttgagggccccagacatcctcgacaggaatggaggcaaagcatgcataaaacacaatattaccatcgaaatttgttatacacacaagatgacgacaactggagcaagatttaagcacatggccaggcggaagaggccagcgggaggcagaaccggtagaaaagcgaaagcgcgcgtcggggccttgagcaagagtacacacacataggcgcgaaggagcaagaaccgtcccaccgggcacgagcagccaactgcaccacgcgacagcaaaacacagacgccgggagcagtgcagagagagaaagaaaggggagaaaaacaagaacagcagcaaaaagccccccaccgggcaaagcaaaggcgaaccgtcgaagggtcgccgtgaaaccacgggagaccagagtggcacgcaatgcaccagagagccgcgagggacaagcaacgggtgaccaggatcgcgacaaaggcaggagatggaagagaacacgagcagagggcgacggcagagacgacagcagctcagcagcagcgcaaacggagagagcgaacacaagaggaacgcacgcgagagaaggaggacagcagaacgagcacac

SEQ ID NO: 151614 - DNA, 804 bp, Homo Sapiens
cgatcagcgccgtctcattctgtcacctgggaaatggcttcttgtcctgcatcacttgatcatccactgaggggacagcaggtggattggttctatcctaaacctggcgaggccccggcctctagacaagcctccctgtgacaacaggtctaccagggcctggactcagcccctgtgccagagggcagcttggtgaaattcccagtctgctgagcgcacggctggggagctgccgtcgcagcaacccagggcagacatgggtggatttgtggtgtgcggaggagcacctccttacctcgcctcaggagcccagggactctctacactgatgagttttgcctatccggggaagttttgcgctattcctcctaggctagtgagcaacttttagactagtgtcggtgtacttgtcggctccatctaagatagtgcttggggacctcgcgagccctggatcagcccgcctcgcttcatcccatgaggagcacagaccatgaattgtggaacatggaagctccaagcttcattgaacttcatccactgtggcttatccttgcgcatgcccatgctcctcccgtgctccgtggggccactgtgaggaaccccgtgggtcacattgggggacatcggttatcagccctcactgattgctctgaatgtaagagaacctcctgcggggaccgggaacacgagctggcctgtgacagagaagatgagggaagcgctgaggcacattcgacgtcctgttcgcggagtttgagctcaggtactgcagctgtgggtccacagctctggctgtatgag

SEQ ID NO: 151615 - DNA, 836 bp, Homo Sapiens
tcccttcaatataccccagcccagaaaatttccatcaagacactcctgccccaaccctctgcatcccactgattctttcctatatacacagactctcactccatgggaagaaaaaatgcaactctggccatttccagtgtgcttcctgaagcctgatgacggccgagagcaattcatcaccactcgtgcattcaggttttgaatttttccttcacagatctcttcttgtttatctgtagttgtgcattcatagtcaaagctggtcacgtcatttagcttcttttcctgatactctggtggaccaatacacagcacatcagaaacggtggaatttgtcatcttcaaccacaggtatagccacttggctttgcagtcacattcaaatttattacccctcaaatctagttcaatcagagagtctaaatcactgaagacatcccttggttagtgcttttatgtggttattggccaaagaaaggtgagtcaggtcacggaggccacgaaaggcatttcttgaaatggtttctattttgttcccttcaatgaacaggtattcaagatgaaaaagtccagcaaaagcatcatcccggatgatcgtgaatgagttagaattcagcaatagcagctgcagagaaggcagatgggaaaacattcggtccttgatttctgaaaacgtcccatttaccaggctcagggagctgatgtcgcccggcacgatcctgggcacccaggaagagcccacgcagatgatagactccttggtacagctgcaagtggcggggcagcgcgccagccgcctcacctgcgcgctccgcggtatcaggcacgcgggcgcc

SEQ ID NO: 151616 - DNA, 1147 bp, Homo Sapiens
aaagagaaaaggcagttttggggaagtaggatgggaataattaatttggggattcactaagaagggcgatgaggccttaaaggttttaaacctggacagggtttcacccttttctccttcgagaccgttggtcgccatcgtgagtctgaaaaggtttcccctggtcggtgtatgtgagaaaggtggagggggctcaacttggttcatggtacctgttgggaatcttttttggtagaaggacttgcaaattaggaaagaaacccccaagccaggttaaggaggggagagcctttgggagtagtccccaggttaagccaagtctgcgcgcatacagtgcccagggggcagaaataatggtgaacagaggccaaggattccccgggtagttcccggttcaagtacccagtccggaggttttctccttgcgggttcaggaaggttctgtatgacaaagtggcagctcagacttggatgatgtacaggtagctggaacatggttcggatgttctggagggtgatggccaggggctgttgccagcttttcttggggtcccaaaggcacggtagcccagttgctcataggcacggatgcccacgacccttgaggacttgagtagcaggtggatggagtagctggagagcaaggcgacagctgtcaacaggaacaggaaaaggataatgcccgtattggccatggcataggcgagtcccaggatgccgctgcccatgatggcattgctgaggttgaacactgacatcccgaatgatgtcttcccctcgaagtcagtgaagtgtggctccttgctgggacttttctgtaggaagctcttgccctccatacagctccgtgcagggtcctcgaccctctggttgcctgccatgggggtgatgaccgggagcagcccctctgagtgtttgccattgggcaccagctccaccatctctgtctgcaaaggcgcctccatggctcagggcacaccaccaggagcactggtctcacaccaacagtcagatgtctggcctcgcggttgggaacgtgcggcgctccgctcgggccggtgcggttcgctctgctcccggatcccgggaatcccggacccggtaccagccttgtgggagacactggggttgtgatgagaagtgtgga

SEQ ID NO: 151617 - DNA, 852 bp, Homo Sapiens
  misc_feature (668)..(702): n is a, c, g, or t
caaaatatattgaaacgataggtacttactgtattatctgagtatttcagtgtcctacttcgaagtgtggcagatttgctcgggtttcacattggagatggcgtgggaagtagaaatgtcggagaactgtgcaagataggcgcgttcgacgttgtcggagtgaacacattgacacctagcctttaagactgatttatctgttggtgtactgaaggtttccatgtaggacttcgaagatgtggacatacaggaaaaggcagctcaggaaaagtggggcattctttggagagtcacgcgttgttgagttcggacatttccgtaggagctcggctcccagtgttgtgttcctcggtcgaaagggtctctgctgtattggggactcgactggcctctcctagggactcctttgtcgttgtgaaccccacgctgttggattctgtatcattattgctgaattctctgcacagttttccctggccaacctgcccacatccttggagatttgctttgccagtgggaatccttacattggctgtttcacagtagacgggacgaggtcagcgggagtcgtgctcctaacacacacattgaacgaaacagaagatgattcgcaacgtgtgaggaggctcgtgtgcaagggagaacagggttactatacatattagtgnnnnnnnnnnnnnnnnnnnnnnnnnnnnnnnnnnnggtcatatctcagatgagagtcaatgcaaactaggtgcacaactgctgacattcagagtctggattgaacctctctgtgcccattatctctgaccgtgcaccctggtccagcgagcttttgaaagcctgaactgtcaggcactacattcc

SEQ ID NO: 151618 - DNA, 840 bp, Homo Sapiens
taaccttgttattttattagaagcatatttacattcttgtagttaactttccagagaacattttacaaaaattttgtataaagtctggaaactacataaaaataatttctatctttcataaagggaaaataaaagttagttacatttactcttaaaccagacagaggaaaaaaacccagttctgtctgtcccttatacagaaagcactaacacagggcacgaggaataccgcgtgggcctctcagagatgggcattgcacggtggctccacggtgaggctaggtgaccccgccagtccccatccagaaaagcacaggggagctctgagggctcaggcggcactgagcggggacgcggcaactccttgaagggcaaaagtgatgtgaaggacgagccacgaggggaatgatcacagactttcacctgaaccatgaaactggcatttcacctaatactttctcacacgccaggctacacatggaaatactgtaagcaaagcccaaagcagccctgtctggtggttcccaacgctggcctggcctggtagaactgggtctatgttctgcagttacactgccgctagttcatgtttccccagcaccaatgcaccaaagagaataaaaggagacaattgtttcgcttgtctcatttgtgagagacctaaaaaacacccccatctgggtcaaattctgcagcaggcaagctaaatgctcactaacctgagaaccattgctagctccaagagaatcttgactgtgcatttaagatttgggcagtccccttttcctgttgaagggctgcccctcccttcccaagcattcagttataaccaatgttgag

SEQ ID NO: 151619 - DNA, 903 bp, Homo Sapiens
agttcacgatggcctctttcactgcgttcactttctccggagccagcttaaataattcatcaaaggacgtcctttggaggctcgtccttgtctgtgctgtattcagtgaggatgttccaccgaccttctctgacttcagaccacttttggtgctctcgatagtgatgacctccaacctggacgttggttgggagggagagttcgggctggaagcgcttggccagggccacaaggaggtgcagggtagacaacaggtccttgttgaagatgctctccacgctccacttggccatgccactcctccagctgcagactccggttcacggcctccagcaccactgtgagcttgtgcttctggcttgtggctgtcagggcgatgtcctctgcttccagcttgagcgccgccagcctctggaataggtggtgtaggatgagcccgtcgaacatgtcctcctccaggctgcggaccacaatgtgctcggggagaagagtggcattgatccactccatcaacaccttctgcagttcttcaaatttggggtccttccgggaagtgggtggcaggtatttcttctttcctccttttgagagctcctcctccgctgggggctccacccccttggggagctgcagcaggtcgtacaagaactccggctccatcgcctcccaagcccaaccgctttccacgcaggaaaacaaaggcctactgagtgcaaagggtggtcctggattccgaatggaagcaagttccgggttcttctggggtcttcggggaccaggccgggaggcaggagccccgctgctcacttcctccaggcccgctcagccggcaggagcttcctcctctctccacactccgccccgggccaggccccttcctctcccgggaccatcaagatgcga

SEQ ID NO: 151620 - DNA, 1202 bp, Homo Sapiens
tttccccctctggaccttcccaggctggtccagaaggagctgctgtccagtgattttccttacagagagaccagtgccagcccacctaccagggcaccatggccccgacacagtgtgccatctccccccacacgcacctgcacgcagcctcttaggagcttgccctgcttgaaggaggtcatccctctcagtcacatctgagcagcactcactcaggcctgggacctgaggggcatttggggggacctgccgggttcctgctgtgtcttgtctggcatctgcctttggactaccctcttgctacagctcctgggcctgtggctgctccaagctggactccagctcccctgggctgcagtgctgctcccagtggtccagaaacaaggccaggcattgcggctccccagctcagcagcatccctggcgcaggctggcccaggagctctgtgcagggtgccgcccgatgacctagccccagttgcactcacgtccgagaaccgggctggctgggggtcctctttgatggagctttccttttctccaagtcttgccgaatttcctgaggaaaagcattgatgttctcccggacacaagggaggcagaatctcttggagtagaataaactgcattccgggcccacacacaccagcctgctgcacaaactgcagcacgagccgaggaccaggaatctgtccttgtcggaggtgaagggatccttcatgacatagctttcctccaggaggaccatcgactgggtgttggggggcttctgtcccacatagctgtacggagctgtcaaggtacagagttcacactcaaacactcccagaggacggcactctacatgggacgccatctgatcccgcttctcttctgcacgccggggcgtcctaggcccctgccgaggctcctgggggcggcgcctgtgaacagggacggctgagagggtccggggatgctggtggtccccgcagagcctccgcctgccctctctcgccccagcgctgcccgaggtcaggggggacagtcccgtgaggcccacaccccgcttctcggtcccgtccccaaagctgagagcggctgcgccgactcctggcgcttggaacccagcaggccacgccggcgcggaactacagtcccggccgagcgggaggcaccctgaggcagcgcagggaagggccacagcacgctcgccccagtca

SEQ ID NO: 151621 - DNA, 933 bp, Homo Sapiens
tgatggcggtgggacccctggcggcatcgttctcaggatgttgtggtccaggttgagctgcatgagtttcttgaggcccatggaaggtgtcgggcttgaagacgccgtcgctcagcctgttgtgctggagatccaggagcagcaggttctccagcttgctgaagacaccaggcgggattctggagatgtggttctggctcagcctcagctgctccaggttccggggcagggccgaggggacctcttccaactggttcttctccatgtagaggaacaccaggccgggcagtttctccagcaccctctggtctatcttgcggattcggttgttgtccaggttaatccatcgcaggcctgtggcattctggaaggactccaccgggagctcagtgatgaagttgttctggagatagaggtaatggatgcggggcgggatgacagggacctttcgcaggttgcggctatcacagtagagggcagatgggaaatcaggggggcagtagcattcgcggggacagtcagggaagatagatggagggcctggagggaggggaggaggcaggtctgttggctctgctggttcatcaggctgaggaaagctgggtgtgggcctgggcctgggcctgggtctgcgcccgggcccagtcccgggtcttggtcgtcttgttggctggccttgggccactgaggccaagatgagaagtgggaggagccagcagaggggtgacctcatgatccaggtgatgcacctgcacacacctgcctctcctctcagctctgagtttagtcctcctcttccaccccctcccttcggcggagctgtggcagcagagagccagctagaagatctgatctcccagtggtgtgtgcgtgcttgtgtttgcctgacttttcttccaccagatcctatcccgggaattccggaccggtcca

SEQ ID NO: 151622 - DNA, 458 bp, Homo Sapiens
gtgggcgcaagtgctttattcacagcgatggtttgtggtggtgagacccgccatgcatgggccatcggggcaagaggcgggaccaagctcacacagggagaggggcaagaatcaattctgttcttcagggtcgcaggcagcaggcaagagagttggggggccagggtccagcgcccactgtgccctcagggagcctccccagggcagcattgcatagtgaccagccgactggccttagcctgacctgcgctgagtgggggaggccctgccttcctgccgggcacctttggggaaggggtgcgtgaaggcattggcaggccctgcaatatgagccgaaagacccctggacccaagggggaggctggtcaggggcagggctggggctcagggcgtcctcaagagtccacagagaaaagacgcaagacaaagtcagacgaggcctatagcaaacccactcg

SEQ ID NO: 151623 - DNA, 816 bp, Homo Sapiens
gtggacgcaagtccgtgctgccaccctcatactctcgtttctcattgggtcgtgtaaagttatgttctcggccagatccggacatcctgcccaacattgtatttgcctgtgacagtaaaaatggatgggtctacggcaaatctagtgttatgccactattagtgtcactcgttctgacgttcttatattccgagctccttctttttgcatgtttgcatatacgagacaccatctcgcccagctgtcttacagctaccatctgaacttgactgactactgtttctgctgctgttcccagcactgctaatggaaccatttggggatgctttgattgaggacgcggactgcttggacgagaggaactgtgatctttttctcgcttcaacatggtgctgtcgtgttggagaagtcacatttctaatacaaggagtgagctgagactccgttctttcatgagatgaagtctcgtgatctgtcaccttgaccttcgtgctatctcttgatctcgtcatgtcccccactagcaccatgtagacgtcattttggtgtggtcaactcctcctttagcgatacgcgaggaagctacttgaatgtttataaagtttacgaggtctactatgcaatttccgatcccaattctctggatcactggagcttaccatcatagggatgaggccgtcctgccatcccactccaagcttcctcacactacatgctctgaaagcacacatgtagcacccataactctcgaacctgtagtcccccttcagtgcccacacaagattggggcaaaggccggggccagtgacaccgtcc

SEQ ID NO: 151624 - DNA, 1256 bp, Homo Sapiens
gaaggcgcccagctgttaaggcggttgttcacaacagcgacggtcgggaccacattattgcggggaggccataaggggggaaaggggcccttaccccggggcctcgtgtgcaagcgtccgggaagtgttccgacggaaccaggggccctcggggccaaagggcggggacgaatcgacggtgagggggagaccaatggtggcaaagcttggaaggtgaacagaaacggagaggggaaacggcctcgccacggtcaaaggggcaggtaaacaaggcggcaatgtccaagggaaacagagggacaagattgccggttcgaaatggagcgctgcacgggaggaacccgccgcgggagggcactagaagggcatgagagggtccagccacaaaggtagaggcgcggaacacccatgggacaggagcatagctcaagcccagccaattctccggtccttggctacgcacccagaggtacctctacaagcacatggtttgtgtcaagtcgtatacgtgggaggtgcaaaccgtgctaagggactttgataattcattgggcgtactgtctctaaagcacatgcctatttgtgtgggtcttgtacaacggggtggggaacaagttgcacagagtttgaaatgggaggtaagttgggcccatctgagtggactccctggggctctaggtcagcaagcatggatgtaactgttggtgagtctacttatcagcacggagaccaaggattaggagtagaggtcaaggtcttcgtgatgagattgttcgccataagatcccttgaggcttggcgtcagtcgcttcacctcactgggctgcttgctcccgttgcaatctgcgtcgtcagttctccagccgctctctattgaccgggcgctagtcgcgtgtggacacactggcgagcatgaccgtagaggtacaccacacatggatcgggaacgtgccggtgtaagatatacgcaggcggacgcacagagcgccaggatagcacgatcccatccagaggcgaccgaacaccaacagtggagctcgttcggatgagtcacgacgtaccggtcgccgtcggtgcacacaatgtctctcgtggtagatattctacacgcacgggcatccttccacaatcaaggctagcacggtcagcctgggacccaggatggccgctgtgtagaagatggcaagtgtagacgggcgagcagctggacttgacgttttcatccgggtagttgacgcccagcgtgtagaggggtg

SEQ ID NO: 151625 - DNA, 964 bp, Homo Sapiens
  misc_feature (712)..(737): n is a, c, g, or t
  misc_feature (741)..(851): n is a, c, g, or t
gactgaggggacaatgaggagtgaccagaagacaagagtgcgagctttctgtaatgcccggacagggccaccagagggctccttggtctagcggtaacgccagcatctgggaagacacctgttgccaagcccaccgtggtctagctgtagcgttagtgtcaaggaagacacccgctacttagcagaccaggaaagggagtgtacagtgagatcaggatgagggtggtgaggtggtgatcagggggacccatgcttctgctcagggggttggcagaagccagcaaggcttggggtttccctgtttggagctctccaagttgagagtgcagaggagtgtgagatgcgtgtgaaaatgcaaacttggctctccctggctggaggctggcattgggtgagtctctggtaggaccaggccatgtatactttttaagcttttttattcttgaaaagttcaaagatatacaaagatagactatgcaggataatgagcccccacatactccgcatctcttgtctgtaattatcagctcgtggctacctctacctctcccctctacctcttgtctcatctctacctctccccctgacccctgcctctgggtcattttgcagcaaatcccaaatgcctatatcatttatcctaaatattccataaacattccactatgtagctctgaaagataaggacgcttacaacacaactgcaatatcnnnnnnnnnnnnnnnnnnnnnnnnnnaaannnnnnnnnnnnnnnnnnnnnnnnnnnnnnnnnnnnnnnnnnnnnnnnnnnnnnnnnnnnnnnnnnnnnnnnnnnnnnnnnnnnnnnnnnnnnnnnnnnnnnnnnnnnnnncagccaagtgcagtatcttatcacacctttaaaaattaataattccaatcatcctatagttgatcagtgttcaaatttccaattgcctcataaaaagatcatttcttaacatt

SEQ ID NO: 151626 - DNA, 736 bp, Homo Sapiens
  misc_feature (532)..(585): n is a, c, g, or t
attcccgggatcgcagccatgaatccgttattcggccccaacctcttcctcctgcagcaggagcagcagggcctggccgggccactgggggactcactgggaggcgaccacttcgccgggggaggagacttgcccccggcgcctctctcgccggccggccctgctgcctactcgccgcccgggccgggcccggccccgcctgccgccatggccctccgcaatgacctgggctccaacatcaacgtgctcaagaccctgaacctccggttccgctgcttcctggccaaggtgcatgagctggagcgccggaaccggctgttggagaagcaactgcagcaagcgctggaggagggtaagcagggccggcggggcctgggtcgtcgcgaccaggcagtgcagaccggcttcgtcagccccatccggcccctggggctgcagctgggcgcccggccggccgctgtctgcagcccttcggcgcgcgtgctgggctcgcccgcgcgctccccggccggccccctcgcgccctccgcgnnnnnnnnnnnnnnnnnnnnnnnnnnnnnnnnnnnnnnnnnnnnnnnnnnnnnncgcttcatgcccggcaccatctggtcgtatctcgcacgcccgcacggctcgggccgggacttggagcccactcttggtgcaagggcctggcttgttcgtgggtgcacccggatggggtgggcgtccagatcgaaccatcacgcccgagatc

SEQ ID NO: 151627 - DNA, 918 bp, Homo Sapiens
ggatgttccacatatggtccgacccctcaagattaagcggtgtcttccccagatgtcactcaggctgaacgcggttttctcacacatcaacgtcgtggtgaaaatggtcgcccgcatggtcctcgtgtgattaaaaaccgtcttccttttagggggccacccctgtttccgacaaaaaatcgcgggtgtcctgctgaaacgatggtgctgccctcttcctcagggggatttcttctttttgagctcgccccgcccccctctttttcttgttcttggtccgtagtgtatgacatgggtatgtagtctgtggtttgtgtttatcgtgtttgtcttttgcctgtttcatggggatttattgtcattcctccaaggtcagcaggggaaggggacaccagccacacttcaccacaggcataggtggcactgagccacctggcactatctccacgtgctccacacggaggggtgccttctcactggcagcagctgcacttctctgcttctgcctcagctgcctctccgcctttgcacacacagtccttggcacacttctcacactccgcagggcagcaggagcagcagctcttcttgcaggaggtgcatttgcatccctcgcacttgcaggagtccgcgcaggtgcaggagccaccagaagggcaggggcaggtctcagggtccatgtcgaggagagcagcagctggaggcggtgaacgggcttctccaagcaactggacgcgcggcttggctagtggcagcaggtggcgatgcttttatagcctcgggcgggggcgcgcatgccaagcccgctgggcgcccgcccctgcgcaccgcgcccgctctttccgtttgtgcgcttgggcttccggcgcacgcactgcatctgtcgcccgccctgccgtgtgtgtgcactgccgggcc

SEQ ID NO: 151628 - DNA, 1327 bp, Homo Sapiens
  misc_feature (103)..(103): n is a, c, g, or t
  misc_feature (107)..(107): n is a, c, g, or t
  misc_feature (182)..(182): n is a, c, g, or t
  misc_feature (187)..(187): n is a, c, g, or t
  misc_feature (219)..(257): n is a, c, g, or t
  misc_feature (262)..(262): n is a, c, g, or t
  misc_feature (276)..(276): n is a, c, g, or t
  misc_feature (289)..(549): n is a, c, g, or t
ttttcttaccttaaaaaaaatcccaacccccaaaaattttatcccccgggggcatggtggttggggccgcctgttagttctccaagctacttccccggaaggnctgnaggcaggtgaaatggcgcgaaccctgggaggcacagagctttgcagtgagcctgagattgcgcccactgcacttnccagncctggggcgacagagcgagactccccatctcnnnnnnnnnnnnnnnnnnnnnnnnnnnnnnnnnnnnnnngaacnttaccaatcatggntggtggaaggtgnnnnnnnnnnnnnnnnnnnnnnnnnnnnnnnnnnnnnnnnnnnnnnnnnnnnnnnnnnnnnnnnnnnnnnnnnnnnnnnnnnnnnnnnnnnnnnnnnnnnnnnnnnnnnnnnnnnnnnnnnnnnnnnnnnnnnnnnnnnnnnnnnnnnnnnnnnnnnnnnnnnnnnnnnnnnnnnnnnnnnnnnnnnnnnnnnnnnnnnnnnnnnnnnnnnnnnnnnnnnnnnnnnnnnnnnnnnnnnnnnnnnnnnnnnnnnnnnnnnnncggcttcatccaatgtccgtaaagcagtcagggttcagcagatgggggctcagggggtgtcagggcagcgggggcccgatggtgatgctgctgttggtgaccctcgggccgtaccagccggcccagtaatgagtgtccacgccgccgtgctgaaaccagatgtagcggacgccgggcgggtagttggagaatgtgtgggagacctccctccacttggcatcgctcttctgctggatggtcgccgggtctggctggaaggtccccagaggcgcgtgcgcggacgacaggagctgaacgcacagctggtacttggacccgcaatctggcctggctgcgaacctggtcattggggaattccttcctctggtctcgagagagatcctccaccttccactcatcgcctccattcacatccaggctccagaactcgaacccctcttcagcgcacgggttgtgcaggaggttcctgtgcaggctccgtaagaagtagaagatcttccagtcggccacgggctggtcccagtcctcagtgatgaagccctctcgcaggcacttgcgtttccagagggtcacgaggtcgatgaggtcccgccagaggctgcagaccaggcggcagttcagcagcagctggcgggcgggcacgtgcgtgaacagctccagcaggatgttctcgggcagctcgttgatgttccccacagccatggcttgtggcttctggacaccctcctgtagctgcgctcggccgccgcggcacgatccgctggccgcccaagctgca

SEQ ID NO: 151629 - DNA, 1213 bp, Homo Sapiens
cccgtcccaaccccagcccttttctgacagcagttggtttaccagttcagggttccagctgattgggggctcagggggtgtcaggccaagcgggggcccgatggtgatgcttgctgttggtgaccctcggccccgtaccagccggccccagtaatgagtggtcccacagccgccgtgctgaaaccaagatgtagcggacgcccggcgggtagttggagaatgtgtgggagacctccctccacttggcaatcgctcttctgctggatggtcgccgggtctggctggaaggtccccagaggcgcgtgcgcggacgacaggagctgaacgcacagctggtacttggacccgcaatctggcctggctgcgaacctggtcaattggggaattccgtcctctggtctcgagagagatcctccaccttccactcatcgcctccattcacatccaggctccagaactcgaacccctcttcagcgcacgggttgtgcaggaggttcctgtgcaggctccgtaagaagtagaagatcttccagtcggccacgggctggtcccagtcctcagtgatgaagccctctcgcaggcacttgcgtttccagagggtcacgaggtcgatgaggtcccgccagaggctgcagaccaggcggcagttcagcagcagctggcgggcgggcacgtgcgtgaacagctccagcaggatgttctcgggcagctcgttgatgttccccacagccatggcttgtggcttctggacaccctcctgtagctccaggggtcactggggcggtccaaggagcttgggacacatcaggtactttaataaaaggtgagctctgatttttttctctggcctctcacaatagaggtggaaggcactgcccaaggtcaaaaataagggcagagggggaagaagcccggatcttctttgattccagggccagcctttttcagtaggccagtctttaatggggatataatgcgcagccgggcagagcaccccaggcctccggtgccgtcaccatcctctctcccatcctcagaacatgatgggaggaggaggctaattatcactgcctcccgcggaggtccaaagggctccagccaccttctcaagatctcagaggacatgatctcctgcctgcgctcggccgccgcggcacgatccgctgggccgcccaagctgcaccgcctatcccgggaattccggaccggtcca

SEQ ID NO: 151630 - DNA, 771 bp, Homo Sapiens
gggaccttcgactctggcgctgctggcgtgtccagtgcttgaccctcgatgtccggccgtggtggtactcgcatcagcgtcgctcccttactgtctcgtgcggcccttgacggtccacgcacctgggagcttgagcatggtgtcttggggtcaggcagatgggtcctatgcgcctgggctcaccactagggcagtgaggggctaggactgccccttccagggtgggagagaccccagggtaaattgatttgggctttcccctaccccaagtccccggatcttactaatatgaagtaacgaagtatttcttgacctggtcattggggaattccttcctctggtctcgagagagatcctccaccttccactcatcgcctccattcacatccaggctccagaactcgaacccctcttcagcgcacgggttgtgcaggaggttcctgtgcaggctccgtaagaagtagaagatcttccagtcggccacgggctggtcccagtcctcagtgatgaagccctctcgcaggcacttgcgtttccagagggtcacgaggtcgatgaggtcccgccagaggctgcagaccaggcggcagttcagcagcagctggcgggcgggcacgtgcgtgaacagctccagcaggatgttctcgggcagctcgttgatgttccccacagccatggcattgtggcttcatggacaccctcctgtagctgcgctcggccgccgcggcacgatccgctgggccgccacaagctgcaccgcctggacctgcg

SEQ ID NO: 151631 - DNA, 413 bp, Homo Sapiens
tggagcctggatgaaaaggagcctaagagtggaaggtggaggatctctctcgagaccagaggaaggaattccccaatggtcaggtcaagaaatacttcgttacttcatattacacctgcctcaagtcccaggtgtgtggacctcaaggccgaagggtattgggaggagctgatggataccacacggccggacatttaggtcaaggagtggttcgcagccaggccagattgcgggtccaagtaccagctgtgcgttcaggtcctgttgtccgcgcacgcgcctttggggacctttcagccagacccggcgaccatccagcagaagagttatgccaagtggagggaggtctcccacacattctccaactacccgcccggcgtccggtacatctgggttgagccataaggggcatg

SEQ ID NO: 151632 - DNA, 977 bp, Homo Sapiens
ggtggattcattacttttactgcttgaatagtcccaattcaagtgacacattatttggagtagggtggcttggagcagtgaggaggaaagggaatccgagagagcaatgccagcgagctgaatgcaagtgccctgggcaaggacagcgagaggccccactgtatttcgtaaaccacccgtccttcctcaactgtgccctccagtcccgccacacaggcacgcggttggtgctgcaccaagattcagggcgtcggctggcgatgtcagaatgtccattctgctggctggtgcggtgttttgatttccatggtggggcctgctggcatggccctggcttcggggctgggatggtgctgtcccgactttgtccagatcagaatgcggtgcctatgcccagatctcaggggtctgctccccctatcccccctcctctctcgaccctgccccttagtgggaccggtgcaaaggggttgggaagggatctggtatcttcgtcattgtcggtactgcttctccgggggtctactggcccctcactgaccttgccaagtgctcctctggcgagggaacacaggggaccccacattcctgcgcggcactggctcccgtgctggccgagatgcacaggagcacctgatgatacggccgcccagggctgggagctggggcctcagttgggggctcgctgcctgcgctcccccaacacctgccgcccggtccgcgacaccgtgtatgccagcttctgcagggagtacctgaacacctcacttctcgcaatgggctgtgtccctggaggatttcgaaaagcgaatcctacccagtaaatgcagcattccaggaacacctgcagcagcacgcggaagatgtaccagccgatgatgagcagttcagccgaggccgccgccactgccgccatggttccaagaatggtaggtgggtggtcgagaaagagggtttgccgagatccgctgctctcg

SEQ ID NO: 151633 - DNA, 908 bp, Homo Sapiens
cggagcagaggtgcagaagcaactgagtccaagttgtctggcggcttcaggtggacccagaagacgtccccaactcagggagattcagcgatcactcactcgctgtacagaatgatattcctcacggcactgcctctgttctggattatgatttcagcctcccgagggggtcactggggtgcctggatgccctcgtccatctcggccttcgaaggcacgtgcgtctccatcccctgccgctttgacttcccggatgagctgcggcccgctgtggtgcatggtgtctggtacttcaatagcccctaccccaagaactaccccccggtggtcttcaagtcgcgcacccaagtagtccacgagagcttccagggccgcagccgcctcctgggggacctgggcctgcgaaactgcaccctcctgctcagcaacgtcagccccgagctgggcgggaagtactacttccgtggggacctgggcggctacaaccagtacaccttctcagagcacagtgtcctggatatcgtcaacacccccaacatcgtggtgcccccagaggtggtggcaggcacggaggtggaggtcagctgcatggtgccggacaactgcccagagctgcgccctgagctgagctggctgggccacgaggggctgggggagcccgctgtgctgggccggctgcgggaggacgagggcacctgggtgcaggtgtcactgctgcacttcgttgcccacgagggaggccaacgggccacaggctgggctgccaggccttccttccccaagacagcctgcagttcgagggctacgccagcatggacgttcagtaccccccggtgattgtggacataactcctcgtggaagccatcgagggctccaagtgaactggacgaggggccgaacacacccc

SEQ ID NO: 151634 - DNA, 756 bp, Homo Sapiens
tggagtgcgttttccaggcccaagccccaggatgcgcagcacgttccagacggcgctctctctggcgccgcggcccttcacgtagatgaggctcaggatcatgagcaggaggcctgtcatgggcaatcggttgctcagcgccaccctgtccagctcctcgggctccagcgctttgacccagcgcatactccatggtgtgcaggctggttagcctcaggtgcagcccgtacacccgggcgaggatgaggctggtgcgccggaggatgctcctgcaccacttcttgtagctgccgatgacatctttcaccatgtctggaaaccagatgatcatcttcttctggtccttgaccagcacgtaccacatgagctcgtgcgccttctgcaccagctgcgccggggctggcggtgccgggcccggctgggccgcgctcggggcctggtgggcgcggccctcctccgcagcgtgctgcagggccttcgggtcgccctcgtcgttcggggcctggggaggcggcgcggcctgcggagcggccgtcgggcctagaggagggctctgcggctctgccagggtcgcggacggaggaacgcccgctcctgaaatccccatgggactgcatgtgcaacctcggagttgggggcctcggctgcaaagttagggtcgctcagatccttactttgttctgacatgtctgcgccgtctggcaagggcagggcctctgcgtccaggagctcttcgagcctgcgctccctccgcgg

SEQ ID NO: 151635 - DNA, 927 bp, Homo Sapiens
cttcctccatcagcctggctggcagcagccttggactccgcccgtggagccctgggcctgttgacccaccagcttaggagcacccaccaagctctgggtcaacgtggaggtaccaggccaccatgctcagtctcaagctgccccaacttcttcaagtccaccaggtcccccgggtgttctgggaagatggcatcatgtctggctaccgccgccccaccagctcggctttggactgtgtcctcagctccttccagatgaccaacgagacggtcaacatctggactcacttcctgcccacctggtgaggggaggctctgccccaggccgcggccttgagctcagagggggtacccaggcgggcagggaccgtccaggcccacgggctgcagcggcagtcgcgggggtccgcggcggcctgagcacgcgcccgccgcaggtacttcctgtggcggctcctggcgctggcgggcggccccggcttccgtgcggagccgtaccactggccgctgctggtcttcctgctgcccgcctgcctctaccccttcgcgtcgtgctgcgcgcacaccttcagctccatgtcgccccgcatgcgccacatctgctacttcctcgactacggcgcgctcaagcctctaccagtctggggctgcgccttcccctatgccgcctactccatgccggcctcctggctgcacggccacctgcaccagttctttgtgccttgccgcggactcaactccttcctgtgcacgggctctcctgctactcccgtttcctggacgctggaaagccctgggctccgtaaggtcctccgaaccaggagcctcagctatccatccctgttcgacaggcctccaaacttaatcggtcgcgccgtgcatggggcaggggccaccgatgaggccagaagccccgagcaccagacag

SEQ ID NO: 151636 - DNA, 878 bp, Homo Sapiens
ccattatcagtcagcactggcctccagctggaagttgggtgtcccagcactgcccagatgtggtataattgctggctgtggccgatgtaatcaaagcgtcctggtgccaccctttcagtcagtttgggagtcgaagaggaagccagtgagcagcgcgcagaagagatggtagccatggctggttgctcagggcctcctgcccacagccgtggcccctgccccagcacagcccgagccgataaaagaggtgggaggttgtcgaacaggaatggataggcgaaggctcctgtgcggaggaccttactgagcccagggctttccagctccaggaaacgggagtagcaggagaggccggtgcacaggaaggagttgagtgcggcggcaggcacaaagaactggtgcaggtggccgtgcagccaggaggccggcatggagtaggcggcataggggaaggcgcagcccagactgtagaggctgagcgcgccgtagtcgaggaagtagcagatgtggcgcatgcggggcgacatggagctgaaggtgtgcgcgcagcacgacgcgaaggggtagaggcaggcgggcagcaggaagaccagcagcggccagtggtacggctccgcacggaagccggggccgcccgccagcgccaggagccgccacaggaagtaccaggtgggcaggaagtgagtccagatgttgaccgtctcgcttggtcatctggaaggagctgaggacacagtccaaagccgagctggtggggcggcggtagccagacatgatgccatcttcccagaacacccagagcttggtgggtgctcctaagctggtgggtcaacaggcccagggctccacgggcggagtccaggctgctgccagccagg

SEQ ID NO: 151637 - DNA, 660 bp, Homo Sapiens
atggagctgctggcctgtccctgcaggtgaccagcgtagaggcagtgggcctggccgccgctctgccaggccaggcccatcccgtgtccagtcctccacggagacgtgccctgccagtagacgggagctgcagggtcaggttcagcaaggaattggctgctgggcgaggccactttgtagaagaggcgggactcgtctcgtggcccccgtgccgcgggcgcatgcctccggggaggatggtgtcgagaagtccagcagtgccccgttgtggtccacgcgggtggggaaggcgatctcatagctctccagactggacaggaactcatcttgagaccggaaggcgtgcgtgacctcgaacatgaggcccagccccagggcgagggcccagcggaggatctggcaggcgggagccatagaggccacgtgtccacatgtctctccccagccccggctgccggcagcccccacagtgccgcctcccctgttcacagccttcgcagcatcaccgggctccttttgggggcttcggttggtggagtagtgttgggcccctgtacggatccttccctcgcctgctccctgcacctgggcctccctctctgggcgttggtttcttcttctttggagcctgcgccgcagcccggggcctccgcgccgtcg

SEQ ID NO: 151638 - DNA, 756 bp, Homo Sapiens
  misc_feature (371)..(371): n is a, c, g, or t
cggcgaggacgagtctgtgctccatcagctgccgcacccgccgcctcccgcccccaaaccccatccccgtcggttgagtccacgagtgatgcggcgatgagtcgtgtgatctgagccccaggcagaaggaggcattggccaagtttcgggagaatgtccatggatgtgctgccggccctgccgaatccatgatgactattattctccgtgcgttggctccgagccagaagcttcgacctgcagaagtcggaggccatgctccggaagcatgtggagttccgaaagcaaaaggacattgacaacatcattagctggcagcctccagaggtgatccaacagtatctgtcagggggtatgtgtggcgtatgacncttgggactggcctgccccagtctggatacgacataattggacctctggatgccaagggtctgctgttctcagcctccaaacaggacctgctgaggaccaagatgcgggagtgtgagctgcttctgcaagagtgtgcccaccagaccacaaagttggggcaggacaggtggagaccatcaccataatttatgactgcgaggggcttggcctcaagcatctctggaagcctgctgtggaggcctatggagagttctctgcaatgtttgaggacacattatcccgaaacactgaagcgtcttatcgccgttacagcccccaaactgtttcctgtggcctataacctcatcaaaccgttcctgagtgaggacactcgtaacaagatca

SEQ ID NO: 151639 - DNA, 1563 bp, Homo Sapiens
  misc_feature (83)..(83): n is a, c, g, or t
agaggggatgatttgaggtagagatgaaaaacggggttaggacgagtcacacctgaattcacatcctggcaaatcccaccgtngggcttccccacactaggcctcagttgctccatctaaacaggactgatcatattcctctctgcccagcattgctgttcaggggaaaagagacatgggtgtgtcgtgcctggcacattgtagggattccagcgtgcccccttccctacctcccaaaggcttcagtgcctccttcaagcagctagagacagtgctgggaggggcggtgggaggagtacagcttcccggcctggtgaatttgattacacatctggactttgcagcccccatgcatgtgcctttggcaccggggctgtccctctctggcctccgtcaggttgaatggctgcgtaaaatgcctaggctgtggtgctagctcagagtggtgcccggcgaaggttcctgtccttccctagctaacaaaggttaatccagcagcagtgttgtggggctggggagcagatcttcctcccctcctccctcaccgaggcctttgccttggtgtcccaaggaggcagaattgaccacgggcaccatgaaggaaaagccaagcaggccctgcatgaggcggtggagatggaccgggccatcgggcaggcaggcagcttgacctcctcggaagacactctgaccgtggtcactgcgggccattcccacgtcttcacatttggtggatacaccccccgtgggcactctatctttggtctggcccccatgctgagtgacacagacaagaagcccttcactgccatcctgtatggcaatggggctggctacaaggtggtgggcggtgaacgagagaatgtctccatggtggactatgctcacaacaactaccaggcgcagtctgctgtgcccctgcgccacgagacccacggcggggaggacgtggccgtcttctccaagggccccatggcgcacctgctgcacggcgtccacgagcagaactacgtcccccacgtgatggcgtatgcagcctgcatcggggccaacctcggccactgtgctcctgccagctcggcaggcagccttgctgcaggccccctgctgctcgcgctggccctctaccccctgagcgtcctgttctgagggcccagggcccgggcacccacaagcccgtgacagatgccaacttcccacacggagcccccccctcaaggggcagggaggtgggggcctcctcagcctctgcaactgcaagaaaggggacccaagaaaccaaagtctgccgccacctcgctcccctctggaatcttcccccaagggccaaaaccacttctggcctccagcctttgctccctccccgctgccctttggccaacaggggtagatttctcttgggcagggcagagagtacagaactggagaccattctcaaagcctcttatataactagcgaacgtatttctccagaccagagggccctgaagctccgtggacaattcggatctgacctccaggtgtcatctctgactttccatccccattcttactttgggaccc

SEQ ID NO: 151640 - DNA, 149 bp, Homo Sapiens
acacaatgcagtcctccttccgcagagaggcagttcgaccgcccacgggctgcccaacgccagaaacagcatcacgcgggtgacgagcggctgcagacgccccagctgcacgagtccacgactgcgagacacggcttcccacccgactg

SEQ ID NO: 151641 - DNA, 1469 bp, Homo Sapiens
  misc_feature (37)..(37): n is a, c, g, or t
  misc_feature (66)..(66): n is a, c, g, or t
gaatcgtgattttgagtaatcagaagaacctggtcantagtggcttcctatgagggttcaccgccnggtgaacggcgtggcgggtcagtcgagtcaacttcggaggtacgataaattaggtgggaaatgtgggaccactgggtaactttggggtggcccacctcgggtgtgttctttcgttgtatcctgtcatgcggcgcgtaaagatccgctcccttgtttagacgaacacctgggtgacgcgcctcattagagcgcttagggggtgctcgacgggtcacgcgtgtcaatggtccgttattccgcgcgaacgataatatgaacgtggctgatctattaggatgtcttcgtctctgaagagtaagcccgcctcatcgcgagaggagtgctcagtggtataataatcattgtatatgtcaacccgctctattctacataagaaccactgtcaggcgttgcggatttcgtcggtgcgttggtctaccggcagaaacccgcacatatattctagagccaaggagtcactacgccgctcccgccggttcctccgggggggctttgttgggtccgcagagttggtgtgcgccccccacattatagtggacatcgggttaatgttgtcttgcccacatagggtgggggtgcgccccctgtcaggggtgggagtttccaaccggcgtgggtttcaagttaccttttaaggcttgctaaatgcaggaatttcctaggcgcatggccttcttcgggagtcggggggcttttaggggtaggggccccttggaggggggtttcctcggccacatgcccaccaaaggttggcccttcaggtcatgggttgcgccccccccggggggctcggagcaaggggcgtcctctatggaggcacccatcggtgttgggcgggctggccagctgaggttcatggccctggcgtagcacggcggcgtggagctgcagctggtgcagctgggcccgcagggcctgctggttgccccgcacatcccgcagctcctgggccaggcgctccgtctcctcctggatgcgcagcaggtcccggggtgggggtgccggcagcctcccctttggcgggggcaggaccagcccagcccgccgcacctcctcctgcaggaaggtgaaggtcttctccagctcctcacagcgccgaacatcaaccacaaagcgtctctggaaggcgctcaccgaggcgttgaggtctctgaactccacgaggcccagctcgcccagccgactcacgcaggtgtaggcagccgctgtgggcagaaagagctggaccagggccacctcctcgctccggaacatggagcccatggtccccgggtgtgctgcgcgccgcgcctccgctgctggctgccccgctccgcgcacgccgatccggaaaattcctttccttgtaccctttatctatttgagaatggggtcgtatatgagaaagaaaagtagtaaaattt

SEQ ID NO: 151642 - DNA, 1109 bp, Homo Sapiens
ttttttaggagttgaatctaagtttaatattcttttttcaacagctgctggcagcaaaccaactatgggctgacagcctttcctcacccctttggcatcccagtgaggttgagaatataagttagtcccctgtagcttcatcaggtggggtggaaacctaccttggatgtcatcattgaacatgcagtacttgttacggtatttgttgagcaggcggaaggcattggcattggcgaagtcttcaaattggatgaggcaatttattccaaacttgtctgtcacagcctgcatgaactcatccagcaagtcatcgtatgccttcccgtgcacgcgctggtgtttcaggccgatgtacagagggtctctgagcagctcctcattgttggtgccgacgtccagcagcacagggaggcactgctgcgggttcacccctccgcatgccgtgtacagggccagcttgcccacagggatgcccatgccatagcagcccaggtctgccaggcccaggatgcgctccccatcagtcaccaccacggtctttatagttgtcttctggccaagaattcagcattgttgcaagatgacctttgtcatgaatggtgatgaacagtccacggggcctgcggaaagtcaggccatagtgctgacaggctagccccacggtaggcgtgtacacgattggcatgaacttgctccacgtccgaagtcagcactcggtagaagagcttctcgttccggtcttggagtgtcatgagaatgatgtacttgtccaggtcactctgctgccgctcgtaatatctcatgattcggaggagctggacgtcctggctcagaaagcagggcgggattaggccgtggattccaagctgcagcctttcttcaagggtaaaggccatccccttgttgagatgagggttcctggtgacatcgtatccgcgcttcttcaggggcacagggcgcgccgggccaggcttggagtggcagccttgggcgggcgcggtgggtgtccagcgcgggagggcgccgcaggcccggcccggccagggagccacgccgcgtgcctgtccccagcggcggaacccatggtccttgcagacctgcgctgctcg

SEQ ID NO: 151643 - DNA, 978 bp, Homo Sapiens
  misc_feature (812)..(842): n is a, c, g, or t
  misc_feature (877)..(892): n is a, c, g, or t
gagtaagggttttacagcctcgggatcaggaatctgtggagggtctccagatggttattgccaggcctaggtgtgtaagcgagcgaagtcctctgagggcattcttagagatggaccaatctcattgtcctcgatgaagagtactgcagctggacaggcccgcaaatgcatcgtcctcaatcacggagaaggagttggaggttgaagaggagcaggtgcagagacggaattctcaggaagctgccggccttcagctgggtgactcccgtcctgacgagtgagagtgacagcagggtcggagagaagctgacgggcaggtccggggagccctcacacagggcgctgtctttagagcaggagcagcgcaggggacactttccctttgggggtctccaggccaccaccacccccgccccagccagcagcagcagcagaatgcctgcccctcccatgcctcccacccccactctgaggcacccgcgttctcccggcccacccagctcagcccaggccactacgtgctgcctccgtccaccaggccgccctccatccgcctgctggcacgctcggccctggcttctctctcctcttctccgtctttctttcagtcggccttcctgccctgttcgtatgtctttggtgtctaattttctgtttctctttctccctgtctttctgtctctgtatttttgactctgtgtgttagtctgtttctatttctgtctttgtctctctttctgcctgtttctttttttctgtgttgctgtcagtctttcaggctttaggtagctgtctatcctgttggtctctannnnnnnnnnnnnnnnnnnnnnnnnnnnnnncctgctgcctggtgtcttgatttcttgtctcctgnnnnnnnnnnnnnnnnttccagctcactgcctgtagtttctttgcctcctcccacctcccttctccccgaaggtttgggaaaggggttcgctgacacccggc

SEQ ID NO: 151644 - DNA, 1041 bp, Homo Sapiens
  misc_feature (69)..(69): n is a, c, g, or t
  misc_feature (134)..(154): n is a, c, g, or t
tgggtggtattatcggggagggggtggtataggcgagaggagggtgctcgcttggggcgccaccggtgnatataatggaaagataagggggtggttgggtgagggggcgggaagcgttggtgttcggatatatnnnnnnnnnnnnnnnnnnnnntcccgagcggcaggccattggggagtccggggaagggtccaggcgccggtgggaggggcccagcgggggccccagaggctactgcgaggtgggggcagggacgcaggtcgtaggagtgctggcgcccgagcccactcccatgtggtctggccccgcagcagcagcatcccatggaagagcagcccagccccgcacagcagcgcacccgccacgcacgtgtccgtcacgaaggccaaggcaaactgtgccagagacactctgcctgtgagcaacatgagccagggaagcaggaggagggcagccatgtggaggggcgtgtgggctcgcagcagggccgacagtgcagggcccagcagcacagagacgtggagcaggacgccggcggcatgaagcagcaggcacaggaagggccggtagttgccgaagcccacgcagcggcccagcaggcggcagtggtggtcccgacgcaggatgcagacgcggcaggcagagcagtgtccgctgcgtggcggcacctggctttggcattggtagcagtaagcccagccctggcccagaccgcggccggccagcatcacgccacggatgctgggatccgagcgcaggaagagccccacgttgcccagcaggttgagcagctggaaggcggccagcgccagctgcaaggcccgggccaggggtcccagcggcggcggcccgggaccgagcaccagcacgtaagccagctccaggcccacggccgcggcccacagcgcggtgagcacgagaggcagctgcgcgggcgccccgtccgtgctcccagccgcccagggctgccccatggcctggacacccagctgtcggagccggaggactagcccgcttccgatcccgggaattccggaccc

SEQ ID NO: 151645 - DNA, 904 bp, Homo Sapiens
gggcacagtgaaggagcctggaatggcctttctccaaattgaccttagggtccgcgtggccgtctccgttcccttcccagccctgcccgcgttgtttcctggggcctgcagttttagcaaaggtttcctgcccaacgctaggaatcaggtcagttcgcactcccaccctacacccctaatcttgcccattgtgtctctccctggtgtctccggcacgacccactctcctccctgccgtccccggagcccctctctccgtttccccgctcagccttctccccaaccgctactccctccccgtccagaatccccctgctcccacggggttccccccacgtccccgaggtccaggccagccgggggaaggggcaggggccggaggccgaatacttttgggaggacctaaacacgtgggagggtccggacgggtgggagcggcgggaggcctaatcctcccggcgcgggggctgccgcgggccaccagccagccccagtcgctaggaatgggggtctcgcgccgcccagcccttggctttcccgcttcaggcaaaatcttccctccttcctcttttttctggggccttccccacgacccctcttcctagcccttctgatccgtcccctgatgcatgactggggccaccggaggggctgaccctcccggagagccccgtcggtcctggtggtcttgggaccggagagcgacagatgtggaaaccgaggcccctcagtgaagagctgccagggtggtcgccttagagcaaaggcgttcctcattccgcctgcgcagctgcccctccgcccggctgccgccccagcccgcttcccctcctcacgtccttcctgcgcctggaggtctccctgaccgtcccgcagctgaaatcttggcctcgctgtccgcctc

SEQ ID NO: 151646 - DNA, 799 bp, Homo Sapiens
tgggtatccgggttcgcagagaggcggttctcagagatttccagctcctgttcgcctttgggaaaccgtgctggtggtcatttgatgtccagcacttggatcctccacatggatacagaagccaatattcccctggtggcaagcacatcaaaggaaaccaggcagggatcccactgtcggcatagctgctctcgatccagccgcctgcctgtgcttgagcaagccttgcctcagagtccaccgtgaatggggagcgcctgaggcagctgcaacacctggaaggcggccccagcttgcctccgcctctcctcccggcccagttcctgggacagcttcccgatcactgtaccagatggcacttcgctctgacacttggtatttcaccgtgagagtggtcacctcctgacaatcccctaaaagaaataagtagccacctggccccaataagccccagcagaagttgcagaagttgcatcatgcttaccgccaagtgggctagattcagaaaccactagagttctttcaaggctggacaagtcctccagtgtttcctggatggcttgatcagccccgtgctccttcccccagagctgccggcacaaccttgtcccatagttagatgattatgaaacaagcaggaccccaaggcaaggccatcttcattggaagcgatctgagatgtccaaacgccgatcaagaattgccaggggagaccccctactggggaactagttggtccacttcagcaaatgatggacaagagctggtctaagagggacctgacccagttgagcaggat

SEQ ID NO: 151647 - DNA, 1249 bp, Homo Sapiens
agcgctgccttcactcacctcgtccgcgctcccgtcctaccccgtgccgcgctgggtggagtccaagtctgatggcgagagtccggaacgccgcctcgggggctggactccggccccggggatcgagaacggcgcccagggtccctacgtctgccttgggggctcgagtcccgccctgggcgtccgtgacgtcgcccagggtctccacgtctgtcctggaacctggagagccgccgtgggggccccggaagccgcccaggagtccccacgtctgccctgggggctcgagtccagctctcagggtcccggacgccacccagggggtccccatgtctgctttgggggctcgagtccagccatgggggtcctggacgccgccttggcgtccccgcgtcttgccttgggggcccgagtcccgccctgggggtcctggacgccgcctcggcatccccgcgtctgccttgggggctcgagtcccgccctgggggtccccgatgccggccgggggtcctcacgtctaccttggagactggagttcccccgtgggagtctcggacgccaccccggagtcaccgtgtctagccttgggggcttgagtccagccctgggggtcccggacgtcgccgaggagcccccacgtctgcctttggggcttgagacctgctctggggggtcccggtcgccgcccaggtgggtccccacgtctagccttgggggcttgagtccagccctggggggcccggatgccgcccgggggttctcctcgtctgccttgggggtagggtccagccccaggcgtcctgaccaccgcccaggggcccccacgtctgcctgggggcctcaaattcagtcctgggggtcccggacgcctcccaggggtcttcatgtctgccgtgggcctcgagtccagcccgtgaggcgtccccgacatgctgccttgcgagcggtggagtccagcctctgagggtcctgaagtcagcttcagggggttcgaacccatccatcccaggggtcctgagtctacattcacggcgctggagtcccgccttgacggtctccactgctgccttgccggcctgcatgggatccagcggggtctgagtccagccctccgggagcacctgcgggggcgctctgactggggcacggcgcctgggagatgcccggagcgctgcgagcggcgcccccgtggtcccggggaccctcacaggcaccgcgttcagagacttcccaaatgtccccgtggcgg

SEQ ID NO: 151648 - DNA, 852 bp, Homo Sapiens
ttctcctcaggctctccacgggctggctggtatatctgccagttagtttccttggggtatttcgtcaccctcttgctgtatacacaagctctttcctgctccacagtctcttgagtcgtcatacctcgaaaggcacattgcccgtagcgccgggaggaacctgtcttggggaacttggagctgcagctgggtgatgatccgagggggtaggcggcaggcccggatcaactccagaaagacccgcaggggagtccccacattccctctgggcatcagcactggtgggttcagctccggcagttgcttcaggtcagccagggtgaaggcttcattctctgccttccaactctgcagttccttccgggtcttgaagggaaaggagcccagacctgatgcctccgtaggtagccgaagtctgcggatgagacagcgacccggtagccaagtcccgtgagaatccagccaccggcggcccgagtacatgcgaataagcctctgagcttgagccaacccccttaccgagatgacgcagcagcaggtgcgggtctggattggagtagagtctcgagtggagagaggccggacatcggtggccgaagtctgagagagaagctggccctcagcggctgggtcggtaggaattagggcagagttaggagcggcctgcggaggggcccgctcaggccgatgccggtagtggaaacagaggaagccaccgccgcgctcttctcggaactggctaaaatagctccgtaaatgggccgagcgcaacacggaggggataccgctcactaccaggtaaactgtcgcctcctcctccgcctcgccgggcaccgccatcttggattgtca

SEQ ID NO: 151649 - DNA, 1073 bp, Homo Sapiens
  misc_feature (615)..(653): n is a, c, g, or t
  misc_feature (949)..(949): n is a, c, g, or t
ttgatttttctccctattgttttcttttgttgtttcttttatcttattcgtcacatctattatcatatactagtttctctttattgttcttcatatactattctacttttattatatttctctcgatcgtatttttctctcttattctgaatttgttgtggtattgtatctgttatatgcatgacccattttatatacacctaagctacccccgggaaaaaaattgtttcataaaatcaaaaactccccggttatcccccaaactttttctatgtcctgctagtcactaattagtcctctggtgagaccagcatatagaacaccctgcaaagatgttttaataatgttcccctctgaagctctttaattttctgttaagttaatgttggtccgcaactaatggttcaacaccccccacgaaattaaggggtccctcctcaccaccagatatcccccacaggtcacactgtgtttccccaacgcagcaactctgttaaaacgcgcgccccttgcctcttgctttatatatatcgtagtctctcattaggggcccccttttcaaaaaaagggggaaacaaattgggccccccggggaaatttttaggggcccccccnnnnnnnnnnnnnnnnnnnnnnnnnnnnnnnnnnnnnnnagtgtgagctgggtgagtagtttagtctgaaatgacagaatattcatttttcgtctctctgagatagtgaccacactgtcctcaccaggactggcaggggaagccccggggctttgtgaccctgtccctatggggcaccctggcgtccagtgggcactccccagggcagcagcctggtttaaatgcctgttccccagaccccacagtcagacggtagagaggagcctcagggacatagcccagttcttcaggaccgtgggccacatgggctgcttgacctctgaccaccaaggagnggagtttctcaaggactggccaggttctgtgctgacaacttcgtgcttttcatcgacaaagcgagtcatgctgtcccttccccagctgagctggctgccaacaggcccagtggagagcagattt

SEQ ID NO: 151650 - DNA, 850 bp, Homo Sapiens
gttcacaggtgaggattcatcggctagttgggtgatagcattctgtgccggactccagacgctgtcgttaaagttgcttcctgcactgatagtcgcagatcgtggtgcaccagactctcatggcctctctgtatcatctggcatctacctgtattacatgatgctttttcttggaacacaggaatcttaaacatttggcaccaatatgttgtatctttgtttgggatggggacgtcctgatttaccagatcaaagtatggtaaggctgtagatagcacactagttttctcaggattcagtaaccgcaaactcttggtgcccctattggagtcatggtacttgggaccagcttctcctgcatcttcatggtggtaggcccagatcactctcacagtgctatccgttatactcttgtcatttatgtcacatgtatgcagctctctggtaaattcaattattgtgtgtgtgctattttccatggcatattctagatggtaatcttgctgagcatcttttttcaactctctatttgcatttgtaaaataatcctggaggtagggccgcccgtgggccaccccgcccacgacgatgtcggcggacgccatggccccggtgggcgagaagccgaagcccacgtagcctgcagtgcgcacctggaggcggaaggcgatctggctgccccgctggctccagcccagccagtacttgccctccgagtccaggagggtccggtgcggataggttcggcccgagccccccgccgccgtcccggggagcagcccccacagcaggagcagcggccagcagcacatcctcgggcgcctcctgcccgccggtaccggcctccagc

SEQ ID NO: 151651 - DNA, 1141 bp, Homo Sapiens
  misc_feature (113)..(113): n is a, c, g, or t
  misc_feature (184)..(184): n is a, c, g, or t
ccttgttagaccccgggccggtgttcccaaggctgaagggcgtttggccgtcagccggccaagttaaggttcatgaggaagcccgtcctttggtccatctgccgctgcgcctnggcagtctcgctgggctcgtagcgctcaatgagggagagggccagcgcaggccctgccgcctccttcccgntgctgtgctgcaggaacgtcactaactgatgcccccgacagagtctcccctgatgcccgcggcctcggcgaaggtgcgttcgatctccatcccgctgggtcagcatctttgtagaaggcctccaatctccctcgtcttccagggagtctgtctgggagtggtcaacactccctgaagatcttcccgggcatagctgtcgtccacctggatgttgagctccttcaggaagttctggcagctccttgaagctcatcttgttgtccttgttttttgtcagcttttcgcaagcaggagtgaatccagtgctgtagcttctgacgctggtccatggagcctgagtggtggatgatcttgtgcagccccagcacccagtgctgggcatcagctggcgatggggcgatgaggtctagtgtattgcgctggtccttgaagacaatggagaagcagcggtcctcgggcacatcacgggcgaacttctccagaccctccgtgcggtgccccattcgcacctcctgaatgtcctcgatggagaacagctgggactccggggtccgcatgaccttgcgggactcctgccagatggtcttgcagtcctcctgcaacttgtagaagcgctctctcctccatgagctggacttcaccttcaggagctggctgcccttcagcagcgcctgtagatcctcatcatcctgtaggccgtgcagggtcaggaagtcccggcccgagtccatgcccgacgggcggcgcggcgggaggggcaccgcgggactcacttgagtagcgacagcaccggcggccatggggtccgagcggagtgcggtgacagggacctgaatggaccgcggtgggaggaggcacgggggtggtcccgggacaccgccccgccccacgctgccctgcgcccccagcccctgagcccgccaaccctcgtctctccccgcccccttctgggacgcg

SEQ ID NO: 151652 - DNA, 975 bp, Homo Sapiens
cgtggcaacccgctggcgttggcatctcccacgggcttctagcgcccaaagagggaaagggccagcccaggcccagcccgcctcctcccgctgctggtgctgcaggaacgtcactaactgatccaccgacagagtctcccttgagccccgcggcctcggcgaaggtgcggtcgatctccaccccgctgggtcagcatctttgtagaaggcctcaatcgtcctcgtcctccagggagtctgtctgggagtggtcacaactccctgaagatcttccgggcatagctgtcgtccacctggatgttgagctccttcaggaagttctgcagctccttgaagctcatcttgttgtccttgtttttgtcagcttttcgcaagcaggagtgaatccagtgctgtagcttctgacgctggtccatggagcctgagtggtggatgatcttgtgcagccccagcacccagtgctgggcatcagctggcgatggggcgatgaggtctagtgtattgcgctggtccttgaagacaatggagaagcagcggtcctcgggcacatcacgggcgaacttctccagaccctccgtgcggtgccccattcgcacctcctgaatgtcctcgatggagaacagctgggactccggggtccgcatgaccttgcgggactcctgccagatggtcttgcagtcctcctgcaacttgtagaagcgctctctcctccatgagctggacttcaccttcaggagctggctgcccttcagcagcgcctgtagatcctcatcatcctgtaggcccagcctccgtccattgagcgccgccaccttaaggctccgctcctgcaggtagagctccctggagcggctccggctccggatccccaggcactgcatggccctccacagtgcccctgcctgcgcggagccgggtccggggcagtgccgcctccagtgttttatgctcacaacaccctctgctctggtccgg

SEQ ID NO: 151653 - DNA, 1007 bp, Homo Sapiens
ctggccgcaggtggactatcacccctatactgttccaattctttctagcatcgttgacttccccgccattatacacagccacataatcatatcggcagtagttatctcgctccacatcaaacttctcaaactttaattctataagctgattctttggggctacaatgtgccacacacaagtgactcctgcagggtaatcccggtctggccagttgggggttttaaaagagccggaaggtctgtcaaggagtcctccacaatactgatcccctctttcgtttggttcagcagcggagaacatggccatgaagccattgccagctgtgttggcatcagaaatcatctgcaccatcatcttgttgccactggacccaagggctccaggccggaaagtgccacagaagcggccaatgcgctggccattggcatggccattgtacacatccacaaagtcatagcggcacaggttgtcactctcgaggtctatgaatcggaaacttgagaacgactacttttcccttcgggaactgtgattcttccaagtacatttgctatttggagggtacactccaggtaaaccttcactgccaataaatccagactctccagtaagaatgccaccacatgtgaaaacaggtctctctggggactgctgccgcgagagctgggctgtcggcagccagcacgcaggcagagtggcgcccaggcgttcgcgcccctcatggcagcgtagacgctcggggtttgcacctcacggcgcgcgcgccggcacacacgcccctccagcacccaccgcgctcacaccgccgctcacactggcagacagcgcatggctcacaccggcgctcggctgcccgcgcgctccctctcacgcgcgcaccgccgcggggcggcccaggtagccgggggatacgcggccggcagggcggaggcacttttaaaggcgagttatggtgccgtctgactcgacgcttagtttctcctgaggagctgctctgcagccacag

SEQ ID NO: 151654 - DNA, 1082 bp, Homo Sapiens
gagaaaccctggaaaaccctctctttatttatccgggaggaatattccttcccgggttatgttccctttccccgatttttccatttagccctgatttgggcccccgctggctcccctggctatttgtatgccaggaggggaattcatcgcccttcccctaaattttcaggggggaacagggaggcctcttgggcttcaccattccctgcctttttttcacagaccgccaggctttaatttctttgcagtccttgggaaggttcatcccattaaggatggcccccacagtctctggcttttgggctggtgccatctattttaatagggaacagttcaggaagtgaaaggggttccatccatccacagccaggcccttgccactgtcagggcgcgagaagccctgtccaataagagtaggagaactcagagtagctctgagacgcggcaaattccaggtcttcttgtttgtttatcgttcagcatggtagagttttcactaaggcagaaatatttacagtcctcccaacttttgctgtcttttatagaactggtagcaattgtctccatgccatttccattgttctgtacaagggctgcacctgtgtgctccagctttgttatacagctcacgacagagtttttcagccacatgctgcagacttcctgcaagctttatattctggacttgaagagattgcaactcttgggacgtatttcctaatctttcttccatttgagaaatggtgtcttgaccagtattggagagctggtagtactgaaaaaacaaaagccccagggctgccagccctatcagcagcaccaagcacaaagtcagcagggtcagggccactggtcgccacgttgaagagggagccctgtgctctgtgcgccggggctctggatgccgagttgtggcagagccttgagaatgcaggctcatggtggtgtccccatcatcatccagcatgtccctcgtgctgctgtacttggcctgcatctggattcctacagcggtgagagtgaaatgtggtcggattgccctgggccgccgggctactgtgagctagttcaggaagcaaggc

SEQ ID NO: 151655 - DNA, 1256 bp, Homo Sapiens
tcggtgagctacccctctctttggccgcttgcaccaagcagtgggatgtggtaagctacctcctggagaacccacaccagcccgccagcctgcaggccactgactcccagggcaacacagtcctgcatgccctagtgatgatctcggacaactcagctgagaacattgcactggtgaccagcatgtatgatgggctcctccaagctggggcccgcctctgccctaccgtgcagcttgaggacatccgcaacctgcaggatctcacgcctctgaagctggccgccaaggagggcaagatcgagattttcaggcacatcctgcagcgggagttttcaggactgagccacctttcccgaaagttcaccgagtggtgctatgggcctgtccgggtgtcgctgtatgacctggcttctgtggacagctgtgaggagaactcagtgctggagatcattgcctttcattgcaagagcccgcaccgacaccgaatggtcgttttggagcccctgaacaaactgctgcaggcgaaatgggatctgctcatccccaagttcttcttaaacttcctgtgtaatctgatctacatgttcatcttcaccgctgttgcctaccatcagcctaccctgaagaagcaggccgcccctcacctgaaagcggaggttggaaactccatgctgctgacgggccacatccttatcctgctaggggggatctacctcctcgtgggccagctgtggtacttctggcggcgccacgtgttcatctggatctcgttcatagacagctactttgaaatcctcttcctgttccaggccctgctcacagtggtgtcccaggtgctgtgtttcctggccatcgagtggtacctgcccctgcttgtgtctgcgctggtgctgggctggctgaacctgctttactatacacgtggcttccagcacacaggcatctacagtgtcatgatccagaaggtcatcctgcgggacctgctgcgcttccttctgatctacttagctcttccttttcggcttcgctgtcagccctggtgagcctgagccaggaggcttggcgcccccgaagctcctacaggccccaatgccacagagtccagcgcagcccatggccggaccaggaggacgagggcaacggggcccagtacacgagtatccttggacgcctcccttggaggctcttccacattcaccatccggccttgggccgagctggccttccgcgagcacgctgccccttcccgccggcat

SEQ ID NO: 151656 - DNA, 1043 bp, Homo Sapiens
  misc_feature (37)..(37): n is a, c, g, or t
  misc_feature (40)..(40): n is a, c, g, or t
  misc_feature (53)..(53): n is a, c, g, or t
cacacattccccggaaggccaggccgggtgccccagnccngcgcttccaaggngtgatggaggctgcgggctgatcttcccaggcgttccttggcccaggccccagcgtttgcgggtttcatgatgttgcagggcgcgatgagcaggttgcacagcccgtcattcacctccatgtagtgctgcaccagctcctgcaccgagttgaactgaacccgtgtggtgatgtagtagccgcccatgtccagtttgcggatcttgtaatgcttcacatgatcgcctctggtctgatcccagtcccggatggacagggagtaggcacctttggtggtctcgctttcccgaatgagaaaggccccctgggggttgcctggtgaaagcagctgcctctctgcatcctttctcccaatctttccaaagtaccactcttcagcttggattgagtcaacaggggccacgtagttgctgggaatgcagccagtttttccggagctgagagaccgagcctcccaccagtcaccttcagtattgttcaggatgtggaacttctcgcccttggtgaaggtgaggtcatcctcagttcgagcctcatagtcatacagggcaatgaacagggtcaccccaatccctgacacacccctgatggtgccactatcaaggaagccagggttgatggcctgagaggagaagttgctgtagttggggatgtgggcaaatgaggatgcaggccgggccttagtggggtcaggcccatagtggtctgctgccccgtagcttctgaagtccccttccaggccagcatcctccttggccgtggccaccggctccaatttcttgcagaacacacagcccattccaggttccctgcccttaggcccctactcctgggtcagtggggctgcggcatgatccttgggaggggtcagagacctggagcccaattctgcccggccccggggtgagccagccggggctccagcagccgcgagtgccggcgtgcggggagaactggggtgctgcccgcctatcccgggaattccggaccc

SEQ ID NO: 151657 - DNA, 1931 bp, Homo Sapiens
  misc_feature (168)..(168): n is a, c, g, or t
  misc_feature (274)..(274): n is a, c, g, or t
aagagaccctccagaggacatgaacgtttgggaagagacgggttcataagcattatgaaggacgatgatgtgaagaagggtgactagggcgggataaaccgtcgacgacgacagaataggaccgctatgtatcgtcatcagctcacagcacgtccaaaccaggcagtncggtacctagtggagtggagcagaagcaactcctaggtctatgttctataattgacgtgtagagtcgagcttgtgagtaagaccggtcgcgaccggtcattcgcantacttgtgaccgcgtaagtagcaggtgagacacgcggtcagaatgatgacataggatgagtcaatagcaggtatgagtggtaacatactaacagacagcgatgttccacaggagatacaccaatagaggaagtgtggacacgcgtgcatatggtgccgcggccggtgacccgggccgagcgcagacgacgcagcgcaccgccgccgcaggagtgcgccacgccaatatggtggagcggaggtgtcaccacgcgcgtagtgttcaaggttacgagtagcgtgaatgtgtagtgtcatatgacacgctgtgtctgtggtccgtatcaacagtaactggcgcatgtgcatgcattgactggacaggcgtactagatagggtggttgtgtggttgacacgcaataagcgagtcgcaagccaggcggagttgtcagaacacgagtcaaggacgaggagatgaagaaagcggttgcgaaaagaaggatagccgtatctacttgagccacgacaaaccaggtataacagggtagcggcaggtgaaggaaaaatacttaagtagtcaagtgaaggtcagagatagaataaaggacagaagatataagagctaagcatagagtgtccatgaaatgtatttagatgagcgttaagaatatagacaggaagcataagttggcataattgatggtcagaatgagcacactagtaccaaataggaggaagtagaagacggcgaaccacgaggtgggcgacgggaggttgaggaaggagctcttgtaagtatattaccgcagagcccagacggtaaccacgacctcgaacgacagtcagtcgcgggacaaagagcgggagacgaagagacccaggtatgtgtcgaacgtcgtggaggcgggacagggcggagagttcgcacgcgcaccacatacagcgccgagtgagggcgcacgggcctcgccccgcaggcgcaagggcagcagcgcgcgccacttgtacgcgggggaggccgcatcctcccggcagcccgccccctccggggccacccaggaccaagagctgtaggcgaagcccgggccgaagaggcgcaggaggaaggtggcgtccggcgtgtcccgcgccgcccctccgcgtacccaacccgcgcccgccgctccatcctcctccaggcagaagcccagcactcgcgggcccggcgcggcctcccccgcggcgttgcccaggcagagcgcggcgaacaaccagcctaaccgacccgccgcagctaccgccgccgccatcgcctgctgccccctctcggcctctcgcgcagcctaccccgctcgccccgcgcctccccgggccaatcgttacggctcttcgcgcctcctcggccaataggcggtgggcgggggcgggccccagggtcggactaggctgcgccggggagtaaacaagtggcggccaggggcgggccgggggcgtggggctccgggccccgccgagtctgctgcggctccggatgcgcggggtggcagtggccgggaggacgcggggcggcgggcagggcctcccaagcccggctgtcctcggcccgtgcgcggcgcccggagtcccactcctcccgatgctgtcccccgcgcccggaggccgagccaattctctgggaagttcccggcttgggagcgga

SEQ ID NO: 151658 - DNA, 724 bp, Homo Sapiens
caacaagcgagcacggtccttggtaatgtcaccaaactctaagttgccttcaatgtccaagacctgcaggtgcttcagcctccggaaggcactgtctccccacgtagcccacagccagcttgttaatcctgagtaagatccccttgaggttgggcgtggagtcgaaggcattggcgggcaccgcactaatcttgttgttgtgcaggtaccggtactcaagtgactcggggagcccctcggggatctctgtgagctgattcccggcgatgtccagcagctgcaggggtgaccaagggagtcagggactcccacctgcagatgggcgaggtccacccaggcacgggggcccagggctcggctgcgcagtcggttgctggtgaggtacagctcacgcagctgagccatgcccaccagcgcccctcgtgccaaggcagccagctcattgcgcttgaccttcagcacatggacatttcgaggcagcccaggtggcagcgtgtgcagccggttgcccgacaggtccagcgagcgcagcaggcgcagcttgcggaaggcgtcgcggtgcacctgcgggctggtgatgcggttgtagctgaggttgagctcctccaggaagtaggtggtggcaaagtcttcgcggccaatgcctgtgatctggttgtgcaggatcatgagggtgcgcacgcggcgaggcaggccactgggcacgcgctccagcgcgttgttg

SEQ ID NO: 151659 - DNA, 874 bp, Homo Sapiens
tgtagaaggcaagatcctcatcggaaggtagactggttgctctcctggtcactctgctcgtcccacttctcctgctcgggctctactttgcggcccatggtagcttgtagctgcagcaggaagtcaaatgaagaacctcgttgatgccccagtactcgatctcctggctgaaggagaagacacatagctcagccatgacgtgaagcttgccggtgtgatagaaatgcagcacgtaggggaagagctcagggttgcggtcgaagtagtactcccgctggacgtcgtcgtagtcatcgcagagctccagaatggcctcgcgcgagtggcaagagcagcaagcggcccaaggcgcgtctcggggaagcgcagcagcgtgtgcgagcgcagcctcctcttgaagccgcccacattgatagcgggtctccccgtcctcgacgttagcctccgacacgtcccacaggctctggccggtcatgctggaggcgccaggccagccacagcagccagcgcagaggcggcagcatactacactgcggaagcaacagggtgcacacgcaggcacgaggcacaggcgggaaacttccccaacccgcagggcagagcatcagcggcaggtggccgctgcactgctggcggtgcagtgcagcagggtgcagagtgtagtgcagccacaggcagggccaggcagggcagggggccgcacagagcgtctcctacccgtctcgggccgggtacgccgccagccgcccgcagctgccgaaggctcacaggtggactgagtggtcaccgcacgctaccggagccaccctctccgatccgcgcgccccatcacccacacaagagaggcagagacccgcgcagcattcgccccgtg

SEQ ID NO: 151660 - DNA, 908 bp, Homo Sapiens
tagccaccgcgaaggcaaaggctcgggagaagcgccgtggggccgcaggcgcagcagctcgaggccggtggggccaggggacgtgctgagacgtgggggccgtcagtagggaaggtgccgggtcaaaggcgggacacaggacgagtccggttcggagaagccctcgttgccgcagggtctctgcacacagccagggcagcttgcaacctgcacgccacgaatgagcacattggtgctacgtgcgtgtacccagcacgttggagagatacagcttggccatgcacctttggtcccttgcgcctgcaagcctgtagggcctgcttggctggcccgggacgtacaccgtcgtgccttgtcaatgcttcacctggaacttgtgtagacctgtccaggccagggaagtcctgccaggtccccagtgctgatgttgaagcaggcgccgtgccaggggcagcgcacccgaccacgggacagaacgctggccatgtctcgaggtccttgacgtggcagacagcagcctccacgcaatcctgagggctggggtaggggtgaggggtggacaggcgctcctccgtgtggaagtggcgggccgtgccattgccctggtaggcccgggggctgcccttcccactggccgacagctcctccttgcctcgctccttctcaggcagcaccacctcgatcttgagctccactggtttgggtttggagaagcagccgcccatggcgagtggcctgaggatggccggcaggcaggagcacagatggggagctgtcggaggcctagggcgccccaccatggggctggaccaccctgcaggccttagagacgctggagccgccatcctgctggagctgctctaggacctgggctcggcgcgggcctgggctcgggaaccgcttggggc

SEQ ID NO: 151661 - DNA, 996 bp, Homo Sapiens
ccccgcaaaaagggttctttcgggtaagggaaatcccgtgggatgtctcccccccaaaggaaattggccggttcttctcttcgattctgccggggccattaggttcttttcggctaggcccacctctttaaaaagcttctttctttgctggaatttctggaattcctggggaaactttaagctgggggttttcggagggggtatgcaaaaatgtctcctgttgatttttgtccttggatctatccgtctctccataattctgtcttgcatccgatgcaaactgcaggtggtatttgtgagggggattctgaatcaatgagtaggacattttccaaatcatcttctttttcactatctgatggatactctaaaatttctatagaacttggcttgggaagctccgacagcttctcatcacttgtcaaagactgattacttgcacaagaagcacagtctgagatttccacagcaccctcgtcatcttcaaattcatcacagtcactagcctctgccctgtcactgtcaatctcccagtcgataaactgtaattcatctctctgtaactgagaaagtgtcttatcttcatccgacaaatcacttccactggagctccatgttatgtctgtaagcccactggtgcttttagatgtggtggtttcttgcttgggtctagggcataattcaaggtgcttttctgtaatcgtcttctcttcagctgttaatgacggattcccagaagtgttctgaaacccttctccacacctgagccatgcttcagagagagaggcagctgcccctgctgtcctgagacctgctcttctgacctgcagtggtctttctcctggaaaggatgggcattctgtattccaactcctttttctcttagagccccgagcgcggctgccgcggggcatctccgggagatccaaggaattccggacccttgccaggcttcaaaagatgtataggtgacggcgaggcgggtggggaccgcgg

SEQ ID NO: 151662 - DNA, 860 bp, Homo Sapiens
cgggctcgcggcttgctgggcgcggctggacccacgtcttcaggtcgcgcggcggcggaccccggacggcgccctgggcgcgcttctccgcctggctggagtgtgtgtgcgtggtcaccttcgacctggtagctgggccaggcgctggagctggtgtatccgaagcgacttccggctcacagacaaggatgaaaagcagcatctgctacctgtcttttcccgacatcgcgactcaggctgccttggagacagctcaggttcagcttccgcatgcgccagtgtggatgggcatgaggagcccctggcatgccgacgacgaggcacttacaatacagcgagggaccccatgatggtcacttgtcagaagggatgccagtgctacacatacttctggcctactgtgtacttcaggcaggtgacggacagctctgtgaagaggggctacttccagaaggcgttcctggggcagctgtcctgtgaagttggtgggactgtgctaccctgtggccagctccagtctttggtgctggtgtcccgcttgccctttgtcccggctgttccaagcgctgctaagcctcatcgcccccgagtactttgacaagctggcgccctgcctggaagcagtgtgcagtgagatcgaagcagtggccggtgcctgcgcctggggcagaccctgaacttacctgtcatgggcgttgttgtccaggtgcgcatcccatccagggtggacaagtccgagtccagtcctccgaagcagtttgaccaagagaacctgctgccagccccaggtggttcttgctaggcgtccacgagctggacctgttcaggtgcttccgggctgtgctgactcatatgcagac

SEQ ID NO: 151663 - DNA, 808 bp, Homo Sapiens
tggaccggtccggaattcccgggatggacgcgctgttgggcacaggtcctcgccgggctcgcggctgcctgggcgcggctggacccacgtcttcaggtcgcgcggcgcggaccccggcggcgccctgggcgcgcttctccgcctggctggagtgtgtgtgcgtggtcaccttcgacctggagctgggccaggcgctggagctggtgtatccgaacgacttccggctcacagacaaggagaaaagcagcatctgctacctgtcttttcccgactcgcactcaggctgccttggagacactcagttcagcttccgcatgcgccagtgtggagggcagaggagcccctggcatgccgacgacaggcactacaacagcagggcccctgtggcactgcagagggagccggcacactacttcggctacgtgtacttcaggcaggtgaaggacagctctgtgaagaggggctacttccagaagtctttggtgctggtgtcccgcttgccctttgtccggctgttccaagcgctgctaagcctcatcgcccccgagtactttgacaagctggcgccctgcctggaagcagtgtgcagtgagatcgaccagtggccggcgcctgcgcctgggcagagcctgaacctacctgtcatgggcgttgttgtccaggtgcacatcccatccagggtggacaagtccgagtccagtcctccgaaagcagtttgaccacgagatcctgctgccagccccagtggtcttgctagcgtcaacgagctggactgttcaggtgctccggcctgtgctgactcatatgc

SEQ ID NO: 151664 - DNA, 907 bp, Homo Sapiens
ggctggtactggcccgggagtatgggatcacagggcctcgccgggctcgcggctgcctgggcgcggctggacccacgtcttcaggtcgggcggcgcggaccccggcggggccctgggcgcgcttctccgcctggctggagtgtgtgtgcgtggtcaccttcgacctggagctgggccaggcgctggagctggtgtatccgaacgacttccggctcacagacaaggaggctgccttggagacactcagttcagcttccgcatgcgccagtgtggagggcagaggagcccctggcatgccgacgacaggcactacaacagcagggcccctgtggcactgcagagggagccggcacactacttcggctacgtgtacttcaggcaggtgaaggacagctctgtgaagaggggctacttccagaagtctttggtgctggtgtcccgcttgccctttgtccggctgttccaagcgctgctaagcctcatcgcccccgagtactttgacaagctggcgccctgcctggaagcagtgtgcagtgagatcgaccagtggccggcgcctgcacctgggcagaccctgaaacctacctgtcatgggcgttgttgtccaggtgcgcatcccatccagggttggacaagtccgagtccagtcctccgaagccagtttgaccaacgagaacctgctgccaggcccagtggttcttgctagcgtccacgagctggacctgttcaggtgcttccggcctgtgctgactcatattgcagacactgtgggagctcatgctcctcgggggagcccctggatagttcctgggaccctcgcccgacgtgtcctcggaagatggtggctggccttggacagctgcctgcagcccttcaggtctgctgcgacttcgtccctttgtactca

SEQ ID NO: 151665 - DNA, 1045 bp, Homo Sapiens
aagggaaaacggggcccccgccttgaaaagggccccggccattattccccctttttgggcccccaggggccgttggagcagggcaccggttttgggtgggtaaagccggcggcagtgagtccatgccgcccgagagtaggggcttatcaggccgggggcagcgaggcgggaatttgtggctggctgcggttggggtgtagcgggtgcagcattcttttgggcagagatggcctcttcccagggccaagaagatctcattgccttgccgggtttcgaactcaaagttgccctctccagagacgcagcgacggcctgcctcaaaggaaaaaggttaccttgtcccgcccaaagcgccgcagaaacctgtagggccagtcgtacagctgggtccctggctcgggcccaccccacagctccagggcactctccccagcccggagggtataggacccccgcaggtggcacctctcactggcttctgtaggtctcatggtcacagcaaattccttgtgggggcccgactgtgactgcgctgctgtacaattcattttcctccatgcagggccggctctgctttccctctggccccgagagctccttcctctgcccggggaaggccaggaggcagatggcctgcacccagtcgccgcgctccgctgcaggggccgccaggaggtacaggcgctccttggtctccaggaagaaggcactggtgtcccgggggctgctggcctctccgccggcctcggccacccgcaggcagtcactgaggcggatgaccttccgggcagcctcacaccgacgaggcttctccgggccctcctgcagctccagccgggccaaggcgcagtccgaccctccatacagtgaggcgccgaagcggcgccatttctttccaaacgtctgctgctgctgaagatacaagaagccttgtttcactgccccgtctcccatcctctgaccatctcggagccccaggcttcagctctctccttcactcctgccttgcctctctcttcatcccgggaattccggaccggtacca

SEQ ID NO: 151666 - DNA, 910 bp, Homo Sapiens
gaggaacagaggctgctttgtggattggggagctccccattagcggaggcagagccagatttcacactgagcagctgcagtcggagaaatcagagaaagcgtcacccagccccagattccgaggggcctgccagggactctctcctcctgctccttggaaaggaagaccccgaaagacccccaagccaccggctcagacctgcttctgggctgccatgggacttgcggccaccgccccccggctgtcctccacgctgccgggcagataagggcagctgctgcccttggggcacctgctcactcccgcagcccagccactcctccagggccagcccttccctgactcagtgaccacctctgctgccccgaggccatgtaggccgtgcttaggcctctgtggacacactgctggggacggcgcctgagctctcagggggacgaggaacaccacgatgccccggggcttcacctggctgcgctatcttgggatcttccttggcgtggccttggggaatgagcctttggagatgtggcccttgacgcagaatgaggagtgcactgtcacgggttttctgcgggacaagctgcagtacaggagccgacttcagtacatgaaacactacttccccatcaactacaagatcagtgtgccttacgagggggtgttcagaatcgccaacgtcaccaggctgcagagggcccaggtgagcgagcgggagctgcggtatctgtgggtcttggtgagcctcagtgccactgagtcggtgcaggacgtgctgctcgagggccacccatcctggaagtacctgcaggaggtgcagacgctgctgctgaatgtccagcagggcctcacggatgtggaggtcagccccaaggtggaatccgggtaggccctcttgaatgcccaggg

SEQ ID NO: 151667 - DNA, 765 bp, Homo Sapiens
gaagggctggtccggcggcggcggaggctggcgctgtcctgagagggagggctctgtgcggaagagatgaatcggacaaagggtgatgaggaggagtattggaacagctccaagttcaaggcttttacctttgacgatgaagacgatgagctttcacagttaaaggagtccaagcgggcggtgaacagcctccgagacttcgtggatgatgatgacgatgatgacctggagcgagtcagctggagtggggaacctgtgggaagtatctcatggtccatcagagagactgctggtaatagcggctcaacccacgaggggcgtgaacagctaaagagccgaaacagcttctcctcctatgcacaactacccaagcctacttctacctactccctgagcagcttttttagaggtagaactagacctggaagtttccagtccctttctgatgctctgtcagacacacctgccaaaagctatgctccagagctggggagacccaaaggggagtatagggattacagcaatgactggagccccagtgatacagtgcgacgtctccggaagggcaaggtttgctcactagagagattccgctccttacaggacaaactacaagtcctagaagaggcagtaagcatgcatgatggaaacgtcattactgcagttctgattttcctgaagaggacactgagcacaagagatcctctatccgaagagcttgaggtgcgacaggttgcctgagactttcttattcattccttaagg

SEQ ID NO: 151668 - DNA, 795 bp, Homo Sapiens
cgggatgtgccgctgtctgccggcccctcggagctggattcgcagctcagatgccttctcgaagctcgctcggctctgtgatggagtagacaatcagggtatgcgtccctcgacctcgcagtgcagtgggtcatggagccatgtcaattgttccccctgtatgtgtcccacatatccaggagtataatcgttgcactgtccccatcaaccatcagggttcgttcatatggtatcttctcccagcacctcgcagtcgctgtccatgctgtcatgcacacctgcaaagatgttggccagagtggacttgcccaccccctgctcccctatgagcaccactcggtagtaggtgttccctgactcagaggagatgactgagtctgtggagtcagaggaccagcttcggcggcagtggtcctcaggggtagcagaatggcggttgcggtggctgtactggtggggctctttctggaccatcagatgcctgccatcagctgggatgctccagcgctgctgctgtggctgcatgcccacagtgccctggcgcatggtgacattattcagagtcatcgttgagtccagaaaatcccagtgctgagcgcacgttccaggggttcttttctcaacttcgaaagttctgcgggctgggaaactcccactctctcccttctccgtctcgggccgtcccccttacttggctcggccggatcggcgtcggggcgtcagcgtatcgcgtgggtccgcgctgggatacccgggccaacgagcggggagtgctgcgctgtgcccgccgtcctg

SEQ ID NO: 151669 - DNA, 985 bp, Homo Sapiens
ccttttgttccacctctgctgccgacagctgttcttgggacttgccccctggtcaggtgttttccagtcttgatgcccaaagtctcctgtcccacctctgcatccttgttctcattctctccgccgattccttttcaagagtatccaatgatttgttggttattactattctgtctactgatatcctggtaagaactgggccttatccctcgcgttccatgggactagtgagtagtttttcaaacaggaaaccccggagctctatcaggctgtcaataaaattctgggcttctgcaccttctaccctgtgtctgcatctgcaggagcctagcagcctgggggttgctgagcaagagtctaaggacgttcttggtggagtctttgatctgctgcataagtggtgagaggctggatttctgcagctctatggaaaggaggcggtctctgagccacccttcctcctcagcctctttctgctcctgcaattgcctttctttctctttcaggcacctgacgttttcaaggaggacctggcagagatcctcatgctctctcactgccctcatgacgtcctcccccagcatcccctccatatcctctctgttggatgccacatacgacagcaaggtcaccagctccaccttgtagatcgcctcatccaggatggacatgatccttttggcctcaatggtggtgagtttggtcctagagagaaccaagggttttagtggatcagctggccttttagatgggtctgtctttggccctattctgttgatggcaggggcctgatacaaaggggccatggcgagaatgtctaaagccatcttgtgagcagccctctgtgcctctgtaggtccacagagatggagacttcggtagactacttgggtctcgtgcttttattgtctctggccatcctgctctgaccgctccaggtttccctagccacagttaccgccgcggtcctgcgttgctaggttac

SEQ ID NO: 151670 - DNA, 867 bp, Homo Sapiens
cgcccgtatattgcctgacccagctcagccaagccacatctctgagcgcccagaatgccccggagaggtcactggccctcagggtccatttcaatgagggcatcagggcccaccattaccgtagggcgtaattggcaatgtagatagagtagcgtccagaaccctttctgttccacacaggccaccagagcgtccggcaaagaggctggccaacaccccgggccacgttgaccctcatcgctcaggatgtcttcccaccggttattgcggaacttgaacaacttgtcggtgtacgtggccacccccgagaaggcattattggtgttgaggaagtagatctcctcccggccgtccccgtcgatgtcgcaggctgtgaccccgatggcgttcccctgccggtcccgcagcgcgtagtagggtgagctgcgctcatcgaccgcgatgttcaccagccgcttctgggcccggtcatacttcagaaccaggttgggtccattgtaccccgccacgacgatctcaaagtccccatcatggtccacatcagtaactgccacaccatagttgagctgggtgggattactgtcatagtcaggaggcagaactgagttggtgactgcagtgaacatgggttcagcccgctgggacccctcagtgatgggcagaaaccatgagcagacagcaggaacggtaacatcctggacatgccggggtcagcgctcggagccatccatcccgctcatcggccccgccgcctaggggcgtgggaagcgcggcgcttcgctgccgccatctgccgccggcgccgccgccatgcttgctcccagccccggtcccgggctggcctcgagcctcccgccccgacgccgc

SEQ ID NO: 151671 - DNA, 971 bp, Homo Sapiens
ctgctgcctctccagacttctgccagaacatgcacgcgacagtttcaggcacagaactgactggcagcaggggctgctccacgagtgggaatttgctccagcacttcacggactgcaagcgaggcacttgctaactcttggataacaagacctctgccagaagaaccatggctttggaaggcggagttcaggctgaggagatgggtgcggtcctcagtgagcccctgcctccctgaacataggaaacccacctgggcagccatggaatgggacaatggcacaggccaggctctgggcttgccacccaccacctgtgtctaccgcgagaacttcaagcaactgctgctgccacctgtgtattcggcggtgctggcggctggcctgccgctgaacatctgtgtcattacccagatctgcacgtcccgccgggccctgacccgcacggccgtgtacaccctaaaccttgctctggctgacctgctatatgcctgctccctgcccctgctcatctacaactatgcccaaggtgatcactggccctttggcgacttcgcctgccgcctggtccgcttcctcttctatgccaacctgcacggcagcatcctcttcctcacctgcatcagcttccagcgctacctgggcatctgccacccgctggccccctggcacaaacgtgggggcctgcgggctgcctggctagtgtgtgtagccgtgtggctgggccgtgacaacccagtgcctggccacagccatcttcgcgtgccacaggcatccagacgtaaccgcactgtctagctatgacctcaagccgcctgcctgggcacccactatatgccctatggcatggctctcactgtcatcggcttctggtgccttggctgcctgttggctggtactgtccctggctgcgctgtgccgcaggatggccggagaactgtggccagacgggtgaaggggccggttggcggtcg

SEQ ID NO: 151672 - DNA, 1070 bp, Homo Sapiens
  misc_feature (225)..(240): n is a, c, g, or t
  misc_feature (613)..(626): n is a, c, g, or t
cggacccctgcgcgggcgtgtaaatagagcgggtccgtttgtggggcgccttgttgtgccagggaaaggcggcggtggcggtaacggcggggcccccttggggggaggtctttatggcgggggcggccctggttatagccaagttgtgtttggtcgggtgggcccatgaggattatttattagggggtttattaagggcaggggagaaagggccttgaggccctnnnnnnnnnnnnnnnntcccctcccctgggatcctgcagttgtagtctccccgtggtggggggtgagggttgaaaaccttatgaccattctgtagggggccacagttttctaccggggtgcttccctccaaggcgtgacctgacagctgtagcttctgggaggcctgccatctccaggcgccaggctccggtatcaccctgcgggagtaaaggaacgcgtctgggggtctgcagcaaggcacggtatagccactatgtgcagcatcacccagctcccccccagctgggcagagcaggcaaccccgtgaaggaagacatagacactacagacgtgggccgtgagggccacagagcgagccgccatgagcacagccctgcctgcgtcgtgnnnnnnnnnnnnnngctctcgaagaagcacaaggaagaaaagcaggaaagcccgcagccccagggacagcaggtggaggcagagaccccacacacgcacctccaggcccagggcccttacgggcagctgggtcactactccccacatgggtgcacacccctgcccaccatgcatacacagcagctcctccctgggcggtcccgttgctgagggactattccatgtatgtgtgccccaaacacacacagagaccagcagtcacacaagcaagcccctagaaaaatacacacatggcattccagccccgtccgcaaattacctacagcctgagactcatgtgtcaacagacagagcagagcgtagggaagcgcatggcccaggagctcctcacacctcacacccacatcctggtgcagcgcccctctccccagcagccagcatcccggaaattccggacc

SEQ ID NO: 151673 - DNA, 677 bp, Homo Sapiens
cagggaccatataccacattgctgacggttaggaaaggcagatttggttcagattgtctgggagaaggccgcccaggggtggaatccatcgcagccggtggccccagcccccttgggaccggtcctgttggcagtgcttggctgcattccaggactcaggttctggatggctctggtccccaaatggagctggcgttccttccttctgttcattggggtgctggagagagggcagctctttttggagggggacagcttcctgagggagagggggacccacttccttttcagcaggagatttggtacaggtacgctagcttttcctgtttggagagtgggtggcctcctgagagggagggggctgcacttgactctgtccctcaaagggaggccatgctgagaggagtcagggtgatccatggggaggcttcgggatagggttcgggaggggggagctgcgtagccaacttcttgaaagtgctctggcctcagctgcctctgtcctgtagccgtgaagcctccctcagaggcagcagaagcaacagccaaataggtcaagaccaaggctgctctggctgtggtccccatcctggggcaactgaccactggacactcagaggtgggtcctctcaggcaagtctggatgtgaagggccggccactgaagcttgtctggtg

SEQ ID NO: 151674 - DNA, 1144 bp, Homo Sapiens
gtgtcagcaagagtggcggacaccatctaccaggagtcatcaccattaaggtgatcttgcgctcccgagcgtttgcgctgctgccagccggccttgagggccaccaatgcgcatcttagcaatgatgagcacgtagcacaggcagatagcccccacgggcagcaggaagcccatgagaaatgtgtacaacacgaagcccaccagccagcgttgagcgggctctggcatgagcatgttgcaagccaccgtgccgtcgctgttgccgcggtgcgagagaagaccacgatgggcaggatgacgagcagcgatagcacccacacgcccaggtttactaccttggccacggtgggccggcggtagcgggccgccttgatgggatgcaccacggccacgtaagcggtccacgctgagcaccagtcagacagtagatgctggtgaacatgttgacccgcgtgccacgctgagcacgaggcggcagagcagcgcaccgaagggccagtggcgcaacaacgtggaggtgactaggaagggcacgctgagcatgagcagctcatcagcaatggccagatttaggatgtagatgttggtgtccgtcttcatcttggcatagcgcatggagtcacgtagatgaccatagagttcccacacagccccaccaggcacaccacggagtagatgaaagagatcaggatggcgctgccctggccctcagctcaaggtcccgttctgggacgcatttcgcactggctcctccatgccgtccgcagcgccggccccggggcccctgctgccgccgccttcgccgcagctgcccgggctggggctaggagaggaggaaggagaggaggcggtgccattggggaacatcccagctgaggggggccagtggggctgccagggctggggctttctcctcgcgcacccgccgcctgcgccctccctccccacccgaccgcttgcctgcagcccgcaaccgcccagcgcctccagggtagagcgcaaccgctgcggggagcgcggctcctaccggcaccggcggggcagcacagcccagcggattgccctgggctctgcagttcgcagctccggggtgcccgggcacaggcgactgtggagaggagagaccagatagtggagcaccgca

SEQ ID NO: 151675 - DNA, 871 bp, Homo Sapiens
attctggcctggttctgcaggcccaatagaggttgtccccaactggtcaatccagaccctcgatcagtttgaccacattcacgtggtccagcttcttcaggatgcaatctcctggtacacccgctccagaggcagcagctgcttggctggtcctccctggcagcctgggaccctctcgggggagggcgacgtggaaagccatactgcttcagtaacttctttttggaaaggactttcattgcatagctgtctgtcttcacttttcgttgtaggccagccgtcaccacaccgtaggcacccttgccaattctcactcttgcagccttgtactggttcagctgcatctgcagtcctcctgcatctgaagattgggcacgctgtgtgggactctgatgcttgggcctccgccaggcccggggggagatgtgtctggcatggccccgtggcataaggcccagcctgcgcctccagatagcttcctgctggccgctcctgtagggaaagcttcctggctgagaggctaggccgggctgggagcagtcttgaagtactgccagggatcacagaggcagctctggcccgtggtggggggtccacaccgtttctagtaggctctgggccaccatctgcctcctccaagtgagtcacatcgatggctgccacccgttctaccagctctgcccgaggatcctggcagcagacagctggacccccctccattgcttcagtcaagggggttcttctgcgtagccttgttgggaacctgggcgccgggcgacagtgtccgcggcccggcgggcggccccactcgctcctgctgcgcgccccgccccgccccgccccgatcccgggaattccggaccggtccagc

SEQ ID NO: 151676 - DNA, 817 bp, Homo Sapiens
cgccctcggtgacgttgcatcttcctccaggatttcctcggcgcttcgttcatcttggggatcccgccgatgaagaggcggcagttgtccacgctgcagcacacgccgagcaggcggcccgggcggatctctgtagttgttgagctcacgcactgcgcgcttggcctcgtgcttgtggcagtacatgacgaaggcgtagccgcggttcttgccgtcaaagtccatcatgaggcgcagctcgtagatgcggcccacggcctcgaacacgggcaccagctcgtcctcgtacacgtcgcgcgggatcttgcccacgaagacctcgcagccacgctgcgggtgcgggccctcccagccgggcggtgggccgccgtacttgcgctgcccgttctcttgcaccatgctgtagcccgtgcgctccatcagcgccagcagtgctgcctcgttgggcgcgcccgccacgccctcgggcaccttggcggaggacccggcggccgagtcactgctcatggctgcggtggaatcctctgcggtcataatgtcaaaggcatccacagctggcggaaaccaaaaccactaatttgatttgtctggtcctttataagtcgcagaacgagagtatacaggcaaattcaggcagcttccttgggattcctctgttcaatttttgcagtgccctttgaggcaaatccaaacctcctcagtgagccaaggattgctgatctctgctgggtgacctgacgcagagtctccttccaaggcctccgttacctgagctttccttgttaagtttttggagccgcccacttcagaaattaac

SEQ ID NO: 151677 - DNA, 1085 bp, Homo Sapiens
tcctgaggtgatggttgtgatacccctagcgggtgggaggatcaaggggtgctgccaatatacccacatgggggggagaagaaaggttcctgtaagaatagccgggttttcttttgggatttcacacggttccgttgcgcttccccaggcgctttttgggggtcaaattctccaggctggaaatgcgggtgcccaaggtgagggccggattttcggagggcacgggcagggacaggtgaatggggcctgagagcggcacttctgtcccattacctgtcagcaggtgcacgctcacagcagtcaggggcatcagctccagccaggagccattgcctgagctggaggcctcagtgcccaggaaggcagggaaagcccgcatttcctgctgggtgctggcaggcgtaagtgacgcccagagctggctgtaggtggagctgacaggcaggcgggcagcccggcgctggaactgcaccaagggctgggagcgggcaccgggagagcctaggagaatgtgcaccaggtcctcatagaggatgagcgtggccggccgctcagggagcaggtagaggctgacagacgcatacaagggcagcttgtcaacacgccagggcacagagttggtgaggaagccagggcgggcagcagtgaccagcacccaggtgcccaagcgataactgaggggcagggtggccacaccctctgagtctgtggtgccagctgccagcagagtccggttcccaaacacatccactgaggcccgggccaggggcaccagctccccgctcacatacacctgcaccttgatcaggatctcctgcgggctggggggctccggcggcgacttgccgggagcccgggaggcgctgccgagcagcagccccagcagcggcaacagccgcgcgaggacgctggggccactcgccggcggcatcgcggggctaggccgggccctagcggtccatggctcccgcctggtcccgctcgcccggccccgcgcagccccagctctgcgccgcgcctcgcagctccggctcccgctcccgctgcggcgcccgctcagcgcgatatcccgggaattccggacc

SEQ ID NO: 151678 - DNA, 270 bp, Homo Sapiens
gggagccgccgggagcggatggcggcggtcgtagcggctccactcgccgccgggggtgaggaggcggcagccacgacctccgtgcccgggtctccaggtctgccggggagacgcagtgcagagcgggccctagaggaggccgtggccaccgggaccctgaacctgtctaaccggcgcttgaagcacttcccccggggcgcggcccgtagctacgacctgtcagacatcacccaggctgacctgtcccggaaccggtttcccgaggtgccc

SEQ ID NO: 151679 - DNA, 805 bp, Homo Sapiens
gtgggggtgcagtgacgacagatgggtgtgacggctgccagattcctgagacccgccctgcggtggggctacacccagccagggagtctccagaggtgaggctggtgtttaaaaacctggagccgggaggggagacccccacattcaagaggagctttcaggcgatctggagaaagaacggcagaacacacagcaaggaaaggtcctttctggggatcaccccattggctgaagatgagaccattcttcctcttgtgtttggccctgcctggcctcctgcatgcccaacaagcctgctcccgtggggcctgctatccacctgttggggacctgcttgttgggaggacccggtttctccgagcttcatctacctgtggactgaccaagcctgagacctactgcacccagtatggcgagtggcagatgaaatgctgcaagtgtgactccaggcagcctcacaactactacagtcaccgagtagagaatgtggcttcatcctccggccccatgcgctggtggcagtcccagaatgatgtgaaccctgtctctctgcagctggacctggacaggagattccagcttcaagaagtcatgatggagttccaggggcccatgcccgccggcatgctgattgagcgctcctcagacttcggtaagacctggcgagtgtaccagtaccatggctgccgacatgcacctccaccttccctcgggtcctgcagggtcaggctcagagctggcaggatgttcggtgccagtcccatgcctcagaggcctgatgcacgcctaaatggggggaaggtcg

SEQ ID NO: 151680 - DNA, 903 bp, Homo Sapiens
atttttaggcggcattaggcttctgaggcagggactggcaccgaaccatccttgccaggtttgaggccgaccttggcgggacccgagggagggtggaggtgcagtcggcagccaggtactggtacactcgccaggtcttaccgaagtctgaggagcgctcaatcagcatgccggcgggcatgggcccctggaactccatcatgacttcttgaagctggaatctcctgtccaggtccagctgcagagagacagggttcacatcattctgtgactgccaccagcgcatggggccggaggatgaagccacattctctactcggtgactgtagtagttgtgaggctgcctggagtcacacttgcagcatttcatctgccactcgccatactgggtgcagtaggtctcaggcttggtcagtccacaggtagatgaagctcggagaaaccgggtcctcccaacaagcaggtccccaacaggtggatagcaggccccacgggagcaggcttgttgggcatgcaggaggccaggcagggcaaaacacaagaggaagaatggtctcatcttcagccaatggggtgatccccagaaaggacctttcctagggtcctgatctaggacacttggagcagcagatacatttgtagcttggaaaatgctggagctctagacccttgtctcaagtggcatgtgactcacagggtgccctgggaaaatcccatcccttcccagactccagcttcctcctctaaaatggatgggaaggagtgtggaccctgccctaccccacacagccgtaaggacaacgtggggagcaggaaaaggctggaccctttgcaggagaaaagctgtagaaagggccaagacctagttcctgccccaagagagagggctggcttttctcaggg

SEQ ID NO: 151681 - DNA, 836 bp, Homo Sapiens
  misc_feature (53)..(93): n is a, c, g, or t
attcgagactgtgtccgcttcgagttctttaagttccctgcaatctgtacacnnnnnnnnnnnnnnnnnnnnnnnnnnnnnnnnnnnnnnnnncagggatcaggtaaaggagtggggctgctgcagccattcagacctcaggagctggaaaattgccaaggatgcagaaggaaatgaagatgatcaaagacgaggatgtgcatttcgacttggctgtagagaagaccccctcctttccccactgcctgcagccagtggcttctcggggaaaggctccccaaagacaccccttcccggaagctctccgagggccattttcccagtttcggtatgaacctcccccaggagacctagatgggttccccggggtcttcgaaggagcagggtctaggaaacggaagagcatgcccacaaagatgccctataaccaccctgcagaagaagtcaccctcgccctccactcagaggagaacaaaaaccacggccttcccaacctccctttgctgttcccgcagcccccgcgccccaagtatgactctcagatgatcgacctgtgcaacgtgggcttccaattctaccgcagcctggaacactttgggggcaagcccgtcaagcaggaacccattaagcccagcgccgtgtggccccagccaacgcccactccattcctgcccacgccctacccctactacccaaagtccacccgggcctcatgttccccttcttcgtgccctcgtcctcgcccttccccttcagccggcacaccttcctggccaagcagcccggaactctgttgcccggaaagcgagcccaggagagcgaggaacaagcaaagg

SEQ ID NO: 151682 - DNA, 1581 bp, Homo Sapiens
  misc_feature (270)..(304): n is a, c, g, or t
ccggttttgcggggggggaggttttcgcgcacgaggacgtggggggaaaaatttcggcggggcgggaggtggcgtatcggggcgcgccacaagaggagttgttatccgccgcaaggcgggcgacagcatgtcgggtgagagggactctttggggggccgcgataatttttttctcgtgcgcgcgcggtttatttgcgtggggaggggtcctggtgtgccctggtatttgggaacggggtttttgggacgggggtaaagtttctctccaannnnnnnnnnnnnnnnnnnnnnnnnnnnnnnnnnnttcgtggtccctcccagccccccgccctgcctgcttccctgggcggggctccctggtcccatcccctggggactccggggggagtggccaccccactcctcatcccggatcggggtgagggcagggccccgggaaggccgagatcgccagtcgtcctcgtggagggaggtgacttcactcatggcccgctccacacggccactgggggggccaggtcgagaagggtcgaagttggccagctccttctccatgtagtacaggacccgcatggagtcgtcctgctggctggcctgaatcctgtagccactgcggacagaggccacactgctgtccgtgtcccgaagcaggggtacataggagccttggccaccagctgagctactcctgtcaacgtctccagggtatcctccagggtacccgttgtaggcagggcccatgggaatcatagctggtgggggtggggtcttggcgggagacaggtgggcataggtgctgggggcataaatgctgggaacacctgaggtggctgctttgccggcggcatacagggcctcggggcagcagcacttgtctgggcagcaggggcacctgacgtagcagcagcaagtgtgcgggcagcactggcaccagcagatgcccaggaggaggaagatgaggaaggcagccaggcataccacaaccacgaagagccagtcaaggacgatgagctctgcgtaggcctcattgttcccctggaggtcctgggctgagaccacggagcagtaatacacaccacgtgtccccccacgccgtctggtcaaaggtcaggtcagcatttccggtgatggtaatcctccggccctggtagtaatctcccagggtcacagcgttgccctgcttggtggccacgaccctgacggtgcgcacgctgtcctggcactcaacgtaggggttgtagcctgggttcccggctgccagctgggcattgagctggttgtcgacgctggccggggagaaggcatcggcgatgcggtcccggcagaaagacttgtacttccagatgacgatgggttgcgtgggggtcgaggtcatctggtaggtacagggcagggtcacaggctggaagaggatcaccacgtggtaggggttggacacggtcacctggatggccctggcaggagctgtgcaccaggtgctaagcagaagccacacgaagacgaccgcgtcccggcctgcggcggccgggtgggagcccagccctctggagagcccgccggccaacagcgccatcgcggccg

SEQ ID NO: 151683 - DNA, 1107 bp, Homo Sapiens
  misc_feature (1082)..(1082): n is a, c, g, or t
gcgcgggccagacgcgcccttaccgccgcgatggcgctgttggccggcgggctctccagagggctgggctcccacccggccgccgcaggccgggacgcggtcgtcttcgtgtggcttctgcttagcacctggtgcacagctcctgccagggccatccaggtgaccgtgtccaacccctaccacgtggtgatcctcttccagcctgtgaccctgccctgtacctaccagatgacctcgacccccacgcaacccatcgtcatctggaagtacaagtctttctgccgggaccgcatcgccgatgccttctccccggccagcgtcgacaaccagctcaatgcccagctggcagccgggaacccaggctacaacccctacgtcgagtgccaggacagcgtgcgcaccgtcagggtcgtggccaccaagcagggcaacgctgtgaccctgggagattactaccagggccggaggattaccatcaccggaaatgctgacctgacctttgaccagacggcgtggggggacagtggtgtgtattactgctccgtggtctcagcccaggacctccaggggaacaatgaggcctacgcagagctcatcgtccttgtgtatgccgccggcaaagcagccacctcaggtgttcccagcatttatgcccccagcacctatgcccacgttgtctcccgccaagagcccaacccaacagctatgattcccatgggccctgcctacaacgggtaccctggaggataccctggagacgttgacaggagtagctcagctggtggccaaggctcctatgtacccctgcttcgggacacggacagcaggtgtggcctcttgaagtccgcagtggctacaggattcacggccagcccagcaggacgactccatgcgggtcctgtactacatggagaaaggagctggccaacttcgacccttctcgacctggcccccccagtggccgtgtgggagcgggccatgaatgaagtcacctcccctcaccgaggacgactggggatctcgggccctcccgggggccctgcccttacccccgaatccggaatgaaagaattgggggtggnccacttcccccccgggaagtcccag

SEQ ID NO: 151684 - DNA, 1122 bp, Homo Sapiens
actgcctgataaccatgctggctgccacagtcctgaccctggccctgctgggcaatgcccatgcctgctccaaaggcacctcgcacgaggcaggcatcgtgtgccgcatcaccaagcctgccctcctggtgttgaaccacgagactgccaaggtgatccagaccgccttccagcgagccagctacccagatatcacgggcgagaaggccatgatgctccttggccaagtcaagtatgggttgcacaacatccagatcagccacttgtccatcgccagcagccaggtggagctggtggaagccaagtccattgatgtctccattcagaacgtgtctgtggtcttcaaggggaccctgaagtatggctacaccactgcctggtggctgggtattgatcagtccattgacttcgagatcgactctgccattgacctccagatcaacacacagctgacctgtgactctggtagagtgcggaccgatgcccctgactgctacctgtctttccataagctgctcctgcatctccaaggggagcgagagcctgggtggatcaagcagctgttcacaaatttcatctccttcaccctgaagctggtcctgaagggacagatctgcaaagagatcaacgtcatctctaacatcatggccgattttgtccagacaagggctgccagcatcctttcagatggagacattgggggtggacatttccctgacaggtgatcccgtcatcacagcctcctacctggagtcccatcacaagggtcatttcatctaccagaatgtctcagaggacctccccctcccccacttctcgcccacactgctggggggactcccgcattgctgtacttctggttctctgaggcgagtcttccacttcgctggccaggtagctttccagggatggccgcctcaatgctcaggctgatgcgaagacgagttccaggcagtgctggagacctggggctttaacaaccaaccagggaatctccccagaggttgtccgcgggattccccaggccaggcccaggcaccgtccctgcctcagagatgccaaaattcttgccaaaaggagtctggcgacaccttccacgagggggaatctcttggggccaac

SEQ ID NO: 151685 - DNA, 1178 bp, Homo Sapiens
gggtccggaattcccgggatgtcagaaaactccccagctaaacacccgtaagacttcatacaacacaatactctatactgtgatgatcacagctgccaaggctacctaaaagaagacagttatctcatatttggctgccagctttttatctttctctcgaccacttaaaacttcagacttcctgtcctgctggtatcatggagaaagtccaatacctcactcgctcagctataagaagagcctcaaccattgaaatgcctcaacaagcacgtcaaaagctacagaatctatttatcaatttctgtctcatcttaatatgtctcttgctgatctgtatcatcgtgatgcttctctgaagttctgctacaacctctagatctgcagcttgccacatcagcttaaaatctgtcatcccatgcagacaggaaaacaatattgtataacagaccacttcctgagtagaagagtttctttgtgaaaaggtcaagattaagactaaaacttattgttaccatatgtattcatctgttggatcttgtaaacatgaaaagggctttattttcaaaaattaacttcaaaataagtgtataaaatgcaactgttgatttcctcaacatggctcacaaatttctatcccaaatcttttctgaagatgaagagtttagttttaaaactgcactgccaacaagttcacttcatatataaagcattatttttactcttttgaggtgaatattatttatattacaatgtaaaagcttctttaatactaagtatctttcaggtcttcaccaagtatcaagtataacacaaatgaagtgtcattattccaaatagtccaactgactcctcacatctgttatcttataatcaaagaactatttgtagtacctatcagaaatctaccttctaaaacgaacatgtacttttctatgccacattaacctcttttaacagttgatgacgacatcagttgggaaaagtaggccatatccttacattgataaaattcctttagtacattttcaagaaatccagaatctagtcctgtggggacccataatcgttcagaatttgtgtcccgatgaacggggggatatgtggaccgaattgccatccacgattcaccaccgaaacaactcctagggacgcagaaattgcgcaaactactcaccaca

SEQ ID NO: 151686 - DNA, 1143 bp, Homo Sapiens
  misc_feature (277)..(286): n is a, c, g, or t
tgattttgaggacccagggggtggtgtttccccttgtgggttccgagggaaaaagttgttgggcttcccccacatggggtttccctttgcccctggggattattccggaaaacccaattgtagagtggggttccctttttccgcacattcccttgacattaagttttccatttggttattccccagctttgccaaccaaggctggacgttcaggcaaacattttcccatgaaaagtccagattctgatggggttttttggagaaaaaagggatgtgnnnnnnnnnnggatgaggaagggcaaggacaattcaggaacccaagccccctttccccaaaaggacaaagaaaaaggcaaatttcccactgggagcaggaataggatctaagggcccccatctggtgagtcacatgtactaagtaaaaggcacaagatctgagagttggaattaaaccatgttggggatgtcccctaaagagacaaatcagccccaaagtgttccagagctgtaaatgaaatttggatttgattaagaagcagcttggcatcgtttcctctccaagtacaaaaccctgggttttcaaccctgttccagtgccaggtctgctgctccttgactgagctgcatcattccaggctcagtctgggcacaagccaccacaatcccctccttctttccatttctatagtaggacggtaacggtcatgcacaggttcctcgcttcctgctacagtcttcacatatatgtgggcctcttgtgctcccatcgtattcttctcatgtgtgggtgatctcctaggattctcagatatcttgggattgtcatcaatttctgaaatttcacatggtctgtcactttcctccatggcctcaatgctgcttcttcttcggtgaatcaaagtaaatagtaaagccaccagcagggctgtggccaccagcaatggtatgcccgccgctaatccaagagagggcccacagtccgtttctttcccacctgtgacaggagaggacgttgtgttcgccggcagggtgaagttcagtgaaaaactcatttctgacagtctcccaggaaccttcttcgtacactgcctttggtaagctcctttctcactggctatcccgggaattccggaccggtccagc

SEQ ID NO: 151687 - DNA, 975 bp, Homo Sapiens
tgcgcgcccggctggggtttccgggttcctttctggcctcgatgccatccacaggtcaagtcccgatgaaatggtcccctgctggacctcctgctcaaagctgaccgccgctccaggctccacgtctaccatctcgttggtcaccgggagcttctcgggcagcttctgtgcagcgccggatcaacacagggttgcagccattcaggaactggtagccaaacatcaggtcttcctgccagtgattcatgacccgctcagaaatagtgttgctgatcttgacaaagattttctcaaagtcggcgaagtcattccaagaagactggaacatgtgcatgaagcggttgatgaacaggttctccatcgctttggagtaattcagaacaaagtccactcctttttcactatcaaactggatatcacggggtaaatccttgtggcatttggcatcgatgctcaaggggaagccagggttccactccatccatcgatattgtttttgccgtgtttccagttctttacgtcggtgttgcttgagaatgtgaatttggtcatctcgggccaactttgcgcgtccatccctcaggacaacctcgacatcgccggtgatccagcggtagcaggggaactcgatgtagtccccgtggggcgtcttcagcgtgatgtacttcaggtaccagtcgtcattcagccagtacttgcgcttctcgattctgaccagctggatctcgcccagttcctcgtccacagtcacgtcgtatgaatccaccgcgccacgctcgaagtcgttgtagaagggcttgtccagcaggtgcttctcgctgcagcccgccgagcccacgaggctgaggtagatgtagtcgtcagtgccggcgaaccactggctgccagtggccacggtgaccgtgtaggagggcatggcgcggccgcgggagcagcgagcgccgggagcctcggcgcggcggtccaggtgtccgc

SEQ ID NO: 151688 - DNA, 775 bp, Homo Sapiens
  misc_feature (133)..(258): n is a, c, g, or t
aataatctatcctgagaatattaattgtggtattctggtgatggggtttagcaactttgatggaagaaaatattaggctataaatgtcctaaggactcagattgtatctttgtacagaagaggattcaaaacnnnnnnnnnnnnnnnnnnnnnnnnnnnnnnnnnnnnnnnnnnnnnnnnnnnnnnnnnnnnnnnnnnnnnnnnnnnnnnnnnnnnnnnnnnnnnnnnnnnnnnnnnnnnnnnnnnnnnnnnnnnnnntgagccactgagcccagcctacttttcagtttttaagcataatttttgttttatccacaacttttcaagtattgaaagtagaataaaaacatgggttcttagtctttagctatctgttaaagcctatgaatgccttcttaaaatcatgtttttaaatgcataaaatatataggattacaaaggaatctaattatatcgaaatacagttattaaaatgttaaaagataagtttgttatatattaatatgcatgcttctttataaatgcattaaataagagttaatagctatcctaaatttgaaatagtgataagcataatgaaaatagatgcaaaaaactaatgtgatatgaaaatatctgggtttttcttttgatgatgaagtattgctaatattaccgtggtttatgaactatgttcagaattgaagaaaatcctaactttcagttagaggttagtgacggggttcaggacaccctacacaaaatacagcactttgacatattgaatattttaagc

SEQ ID NO: 151689 - DNA, 887 bp, Homo Sapiens
gtgaccaggagcttcggtaacggccctggagtttctaggaagtcacagatggtggctgtcccacagtgttaaggagtgagttggacctcggtaaggaggcagttcatgccttgggcttcttagcacctccagggctctccaccagcccagctggtgtgcgtttcttggagtcatagtcatcacttcggccctgatccaaccgtccatgagggccccgggcaggaaatctgttcaggtggctcaggtgaagtgtgtgggatgtttggaagagactcagaggcttctgaggaaagagtgggggaatccggtgaggctggaagatcagctgaggctgagctcccaggatcccttgcttctggcccagggctgctacatgcagaagaggaggtgctggggacttcagtaggggctggttggagagcgtttgcaccttgacagcattccagggcactgcctggcctgggttgtatgcagccttcaccagcaccttctcacccagctggggcagacggcccttcaccacacttagctgaaaaaagacctcttcatccacaaccccaaagtagtcatgcaagctggtaacaataccagtgaagacccgctgtttctccccaccctgaaggtgcctggcattctgggacagttctgtggccacaggaggagtgagcaaaccaggaggagggcccagaagagatgttgaagctgtgcctgagtaagttgcagtcacccctggaagcgggttgatccgctggcgctttaaactgggacattgggaacgctgtcctctttcagagtcgtggggataaggctagcgggccagggcagcgacaccggggggacaaagacacccggaaccaccacagccgctgctgccgccgccaccggaa

SEQ ID NO: 151690 - DNA, 1060 bp, Homo Sapiens
cgtgaggtagctttgttgcatcagtcctggtggctatccgttccccactgtgacactgagggttactattggagtgatatatctggggtctccaagtggtctgcctccggaaggctttgtggcaaatgtcaaaggtgtagggcctctcgtcggtgttgcgtccgctcatggaatcgtaggttgtaggacttggtgaattgcggccacagaacttgcagacgaattccgttgttggtcttggaaggcagacgtcccccttgtgggcttctgtttctggagacagcttggtcacgtcgaggagggcacccagcccacctgcaggggagcctgggccctccccgcgaccgagcttggccggatcttcttgcgttgctgccaaggccaggttggcaaaatcaaagcgcggcttggtcttgagcgctggaacgctgcctccagcggtgatctcgggcttgggttgaatgacatgagggaaccagggaaaggcgggcagctggaagcgcgcatccaccaagctggacaccgtgcccggcactttggagaaagaagagcgcggcaagtgcatggccgggtagcccagcgtccactgatgcaggtgcacagcgtgcaacgcgctgaaaccatacaggttgggcagatggtccgaaggcactgtgggcaggccgttcactgcctgaaggaaggagtagttggtgagctgcagggaagggtggataggcaccggcgccggcaaggttttgctgcccatttcggtagttgcagtggcttctcaatccggatcttgttccgcagaggtcctggggctgagcacgtctctggggctttagctgaaggggactggggaagccggaggccctggagcccacaggcgccctggagctctagtgtcccgactcctctcctgccgcggggactccaagcgccggacacgcgggagcgagcgctcagcagccccggatcctgcacgccggggacggtgagcctcgctcgcggctccctcgctgggtctgaaccaggagcagctgagaacgtgccggggagaggccgagatcccgggaat

SEQ ID NO: 151691 - DNA, 1089 bp, Homo Sapiens
cccgtttaattgggggaattggggttccccaaaccgtggccctgaaggttgcagcctgactcctgtgggtccccggcctgttggacaggggttctcggccagaggcctgtgaccttcaggtgatggtgtgggtttgctttccaggtgagtttcaggcagagctgggtggatcggagggtgggacgaggcccttcaaccccttccgtgggggatgagatctatgtctgaggccccagggattgctggaagttgttgtttctatttctgtgatgcttgcaattaataacctcgatgtttgtgacagtcaccagggcttcagcgaggagagtgacatcagatcccggggaccatgacggggtgatgactggattggggccgtcggaagaggcgctgctctctgaggcccgtgacggggtgatgactggatgggggccgtcggaagaggcgctgctctctgaggcccgtgacggggtgatgactggatgggggccgtcggaagaggcactgctctctgaggacaggcccttagcttctgtggaggtgtgagccaatgtcaatatgtccattgtgagtgtctttgcctcttcagagctgtcatcggtgcaaagggtgtcaaagatggcttcctcgggatcactgcctgtgatggtctgaactgtggtcattccagctccctcggggctgccactggcggctgatgtctccacggaggtggcgatcagcaccatgaagttgggagatgtttttgtgaaactcctggtctctcttgcaggggaaattctcttggctcccctggtctctgcttctggaatggggccggctggggttgaggccctagaagaggtctcagcgctcagcgtttgagtttccagagcggcgtggcccggtgctagagtcatagcgggcacttctgtgtcgtccgttgtcatcgcagtgtctgctctgcgggtgctggggcctgcagagctcccagagaccccaacctcccagcagaagaagaaaaggggcagagccagaccccagagacagcccatcctagccggccaccgctgctccacagaactgctggctgtctctcgcgggtacctt

SEQ ID NO: 151692 - DNA, 819 bp, Homo Sapiens
gtattattaataagatggtctagctatgcagagcaaaaaagtaaaaaatcttcaaaagccaagactgtcaggcacatgaaggtatgcataaacggtcttcacatttaaattttgtatgattcgggagatacctccatgtacatctaaccaggtcaggcagcataagtcctcagtaaccctgggtgtgccggcttcaagccaaagtattctgttgagtttgttttgtggagagacatttgaaatgttgcttcatagcttccattttctggagaagtggaagaaatgaagcatgaaaaggcctaggaatcttcgtcttctccaggctcttcttctccttctgcagtttcttcctcgctcctcggcttccccgttccgcaccctccatggctatttcttccgtctcttctgtggctgtctctccttcgttcttcattcttctcctgggcttcagggaggttgcccgcatcttcactgccctctttttgtgcctcagtttctccaccttcttcagccttctctgatccctttgagtctggaggaggagccaaaccaaggaaggaataaataatattctcttcttttgcagagaagaaagagtcaaaatccccacagtactgctcctcattgaagatctggggaggcaaaggaatcccattttgaggttttttctctccaggaacattctctctcatccacctcctgttgtcttcatctccagcaatatctaattccttaaagtcgattttattcgcttccaaaaaacccactacttcttgctgtttcttcctaatctccaggcccaagacgcccctccccgcc

SEQ ID NO: 151693 - DNA, 875 bp, Homo Sapiens
gctggggcccgggctgcccagtcatgacttgggcactctggccaaggtggctggcagacaagatgctgcccctcctgggggcagtgctgcttcagaagagagagaagaggggccctctgtggaggcactggcggcgggaaacctacccatactatgacctccaggtgaaggtgctgagggccacaaacatccggggcacagaccctgtccaaagccgactgctatgtgcaactgtggctgcccacggcgtccccaagccctgcccagactaggatagtggccaactgcagtgaccccgagtggaatgagaccttccactaccagatccatggtgctgtgaagaacgtcctggagctcaccctctatgacaaggacatcctgggcagcgaccagctctctctgctcctgtttgacctgagaagcctcaagtgtggccaacctcacaaacacaccttcccactcaaccaccaggattcacaagagctgcaggtggacctttgttctggagaagagccaggtgcctgcatctgaagtcatcagcaacggggttctggtggctcacccctgtctgagaatccagggcacgctccggggagatgggacaagcccacgggaagagtacgggtctaggcagctccagctggcagttgcctggagcctacgagaagccacagcttcttgcccctggagcctcccacagagccaggctcccagccagtttaccttccaacgtgaacccagttgctgagctccaggctacacgttggagctgactggaggtgctggcagctgtgcagagtggccccagtgcatagttggaggctcagaccagcaggctgcgagaggggggcatcctgctctcctctctgccctat

SEQ ID NO: 151694 - DNA, 543 bp, Homo Sapiens
tgagctcggtaccctccacagcaaagacgcacagcaggttccagccttcccagtccagcacatacagccagccaggtcaatctttctccattcagtatggaaccgggagcttgtccgggatcattggagccgaccaagtctctgtggaaggactaaccgtggttggccagcagtttggagaaagtgtcacagagccaggccagacctttgtggatgcagagtttgatggaattctgggcctgggatacccctccttggctgtgggaggagtgactccagtatttgacaacatgatggctcagaacctggtggacttgccgatgttttctgtctacatgagcagtaacccagaaggtggtgcggggagcgagctgatttttggaggctacgaccactcccatttctctgggagcctgaattgggtcccagtcaccaagcaagcttactggcagattgcactggataatatgctgtggagtgtgccaaccttaacgtcatgccggatgtcaccttcaccattaacggagtcccctataccctcag

SEQ ID NO: 151695 - DNA, 961 bp, Homo Sapiens
gctggtactggcccggaatcgttgggatagctcttgtggccccctgcactcacctgctcttcctgggctggctgtctcctgctcatccagccatgcggtggctgtggcccctggctgtctctcttgctgtgattttggctgtggggctaagcagggtctctgggggtgcccccctgcacctgggcaggcacagagccgagacccaggagcagcagagccgatccaagaggggcaccgaggatgaggaggccaagggcgtgcagcagtatgtgcctgaggagtgggcggagtacccccggcccattcaccctgctggcctgcagccaaccaagcccttggtggccaccagccctaaccccggcagggatgggggcaccccagacagtgggcaggaactgaggggcaatctgacaggagcaccagggcagaggctacagatccagaaccccctgtatccggtgaccgagagctcctacagtgcctatgccatcatgcttctggcgctggtggtgtttgcggtgggcattgtgggcaacctgtcggtcatgtgcatcgtgtggcacagctactacctgaagagtgcctggaactccatccttgccagcctggacctctgggattttctggtcctctttattctagcctccctatagtcatcttcaacgagatcaccaagcagaggctactgggtgacgtttacttgtcgtgaccgtgcccttacatgggaggtctcctctctgggagtcacgacctttcagcctctgtgccctgggcattgacccgttccacgtggcaccagcaccctgcccaaaggtgaggcccatcgagcggtgccaatccatcctggcaaggtggtgtcatctgggtgggctccatgaccgctggcttgtgcctgaagctctgcttgtggcatggcccagagccttgcccacatgggcacccttggactcttgcctcagca

SEQ ID NO: 151696 - DNA, 831 bp, Homo Sapiens
  misc_feature (55)..(111): n is a, c, g, or t
  misc_feature (793)..(793): n is a, c, g, or t
taaaatcctccgccccgtcttctggttctccctcgtttccctcccccgagaccannnnnnnnnnnnnnnnnnnnnnnnnnnnnnnnnnnnnnnnnnnnnnnnnnnnnnnnnggggaaccccccacccggccttcctttgggtcccgaaagaaaagttgtgggcttggaagctagtcctcccttctaggaccccctggggggcgtccttccttctttttgaagcccgcgatgagaagggcgctccccaccacatccccgggggtctctgagacttcctggcgaggtggggcggcgcggcaggtgcagggctggggagggcctgacagccctggagagtgcccgaccccaatccgccgccgtcttctaggcggattccccagaggcaggtcccagtccctggcgcggggaggcggcgcgcttcagaggggcgcagggtgcgcgggggccgttggccctccgggcacttcccctttgcggtctccccgccctccttcggagctggtgcctgaggtcgctgggacctcagcctggcgtcttctctcgccccgagcgaggcaggtgccgtgggcggccccggctacttctgcatttcgagcgcttactttgcattcagctctaagtcggagagctctggggacagccgagagtgccagtggcctcatagggagactgagggttctgtttcacctcgggcgccgtgtgggtctgggctgtccacagcacctctgcgcctcagtgataggagaagccaagcgcgaggcctctcaacgcctgcgtgcactctatttcccanggtatctggaatcccggcgcctagaacgtgtttttcgg

SEQ ID NO: 151697 - DNA, 897 bp, Homo Sapiens
tatgatgatgaatacacagggaggaagcctgtaaatattgaaagggaaggacttgctccctctataggaaggatctcagttttgaagtaattgtagtggctgattgcacaggggttagacgtatctcgccgaaaggctgggcttgtctcccgatttgaccacaggccggggacatttgcaaacacgtcttcggttcctgtggttgcagtaaagggtgataaccagtgacaggagaaggaccccacaagtcccggccaagggcgcccagatgtagatatcacaggcgaagtccagccccctcgtgtgcactgcgccccccgccgctggccggcacgcctctgggcgcagggacaggggctgcgacgcgatggtgggcgccggtgttggtggtcgcggcgctggcgtcgtggtgggcttcgctggcaggaagaccggcacgaagtggctgaagtacatgatggagttgctcagggccgagcagaaatagtagccctcgttctctcggcggaagtcgctcagggtgaggacgaaggtgtcccccaacctcttgcccgagaaccgctgggtgtccagcccctcggccgccttgggcttgttttgggagaggtataggaggaaggtgggactggcggcggcgccgcgcggctggaagagccacgagcagcccgacgtcgggttggacagcagcacctggcacttcagctccactgtctcgcccaggttccaggtccgatccagcggcgacacccggaactggctcggcctggcggcgtggagcagcaaggccagcggcaggagcaaggcggtcactggtaaggccatgacgcgctccccaggacgctgcttggctcgaagctcgggcgcgaggggaggcgcgcgggagccggtggggcgccg

SEQ ID NO: 151698 - DNA, 1028 bp, Homo Sapiens
  misc_feature (75)..(85): n is a, c, g, or t
  misc_feature (739)..(823): n is a, c, g, or t
gtcccaatgttgagccggggaataccccaagggggtttctgctggggagccccccccggaagggggagcattttnnnnnnnnnnngggtttcaggggccagacatggggaagggaaaggccccaaaatgaagggtttggggcgttagatgagccagccaggggactagggccggaggggacctggagaacgaagggaggctttctggggctagttctccatagtccgtcccagggatgggccaggaagatggactggacggattctttgtgagagatcgggaatcatcccacctacagcccaggagcacgccactgggggaagcaggcaaggtgtagaagagctggggcccactggtggctacaagcaggtgcgaggtgagagctgaatggactgtgaggcctccagagaagcagacccatctattggaggagacataaccgcagggtgtgggcacttgggggccccttcagtcctgcttcagaaaggcatgggtcccttatgggagaggcggggccgctggcggcggaatttcctccgacctccctgccagggccctggcccattccttgaccctctgggctgcaccaggtggcggacattgccgtcttccagcccattcccatcgggaagcggcatcagggaccctccacacaccgcggtcaaggagagccagagcagcaggagcgcctgcacgcagagccgcagattcatgctgctccttgggccgccgcggcccnnnnnnnnnnnnnnnnnnnnnnnnnnnnnnnnnnnnnnnnnnnnnnnnnnnnnnnnnnnnnnnnnnnnnnnnnnnnnnnnnnnnnctcgggaggctccccggccgctgagtgtgcgcgctgagccccgccgctcccgctggccgcctccgctcttctgcagcctcctctcccgccgcggggcagcgccgcgaagctggcctcggcggctccgggagcggcagcggcgagctctttcttagcggctggctgctcggccgcggctgcaactgcccgtgatcccgggaattcc

SEQ ID NO: 151699 - DNA, 878 bp, Homo Sapiens
gacgacagtagcggtggcctcagctccaccagtaactgccgctggcaggagcaccacacgctctaggagtttcccgggtatcaagtatgggtccagcccgtcccagttatcctcttcccctatggcttcattcccgttgtcagtaccccgacctcagcttgcaaccttgatcttgggcttgattataaatgacgaaagaccgcggcagccttcaaagtgcgggagcgagccccgtactggtcagcgcggcggagggatctttccaggaggccccaagcccccaatgccgtgtggagagacttggtaacagctggcaagggcctgctccagccaccctcgctggctccttgcccctgcattcatgcgcctgagggctgttattcgccctctccctgctgtcccacgcaagcggctcaaggaactcagctcgatccggattccgcctcgtatgctctccaagcccttcgccacctccgcaggcgctctagaaaggcgtgatggccccagctcagtgcccgccagcccgaagaggacaagcagggctgggaaagggacttgcgattaggcaaaaatgcccacaacacgacaacccaaacaaacgtggaagggaaaaagggaaataagtaatccaagcgaaattctggatttaaactggctaaagtagattcccagagttaacgagggcaaggataggaaagagatagggagataattaaagaataaccaacaaaggcccttggactcacaataaaacgcagtagaggagaacaagtgaaaaacaaaaccaagcactatggtagacacagagcggaagaacaggggatacgaaaaccttggagtaaacacaggagaacacgaacgaatatcacaaacccaag

SEQ ID NO: 151700 - DNA, 1087 bp, Homo Sapiens
attggtgggtggagctttgtggtccggggcaaacgtggctggggggtgtagagggtgggggccctctgggagggaaagccttgtagaaggttcctgttgggacttggaggacggcggcgccccaaaccaggtgggagtggcgccacaaggtggttgcacccatcagcggggcattggggattctacccagcggggtgcgggtgatccggcccggccactagggggtttcgcaaggcccgccaccgcgggaccggcccagagcgttcgcccaaagcgaaaggcgtccaggcagctgctctcagcgggggcccccgccggggctgcctgttaggccgtagcgctctagcgcctcggccacgagctcgcgcgccgtggagcgcaccgtggccagcacgctcttgtagttggcgcccgatgccagtccggcgccgaagatctttgaggacccccggaggcgccgtggcgcgggtagccagcgggggctcgggggccacgcccgccgccagctccggcagcttcttctcgctggcccagcgctgcgcgccccccggggtcccagggcctcctgcgccgctggaccccgtggtcccggtccccgagccccggaagagctgggagatgcgcttggcgcggctaccggaggctcccccggccgccttgacagcgcccactcgccgcagctccacgtgcggcgggggcggaggtagcggctcgctgctgcggctccccgtgtccgacgaagaagacttgacagaggctgcgctgggccagcgccgccccagcttcgccagctgcttcctgggggaattgatccacaggcccacggggagatgaagcttcccgaagcgggggcttccgccctccttccgttcaccagacagcatggcccctgcttcgggtccggcacacccggaggccctggctccactggcctgggtcagttccactgctcttgcctctgccacggctcccagcactgggtgggggacaggaaaaggcaagaggaaacccggcaggaagagcggggagggggcgtcctgtgaggagaccaggcctgggggaggagatctgggtagggttgcctgcc

SEQ ID NO: 151701 - DNA, 966 bp, Homo Sapiens
ggggtttttaaaaaccaggcttcacaaattcaacctggagaggcagtgcccccccctcccagggagaacgaggaaccgccaggaggacagtctacctgcaccaccggcaaaccagagggcccaaggccagggccgtaagcccctgggagtacactccccttaaagagtgcaggggaccacagtctgtgttgtgaagttttggagctaaatatcaccaaagcatcctggtacataaaggggaatacttcagtggctgagaaagagtgaaccgggttgtaaatgctttcatcctgtgtctcataatctgggcgtctgcaggtctggcctttgagtggtgaaatcccctggctgttagcgagggggcaggcctgcatgtgaagggcgtcgtaggtgtccttggtggctgtactgagaccctggtaaaggccatcgtgccccttgcccctccggcgctcgcctttcatcccaatctcactgtaggcctccgccatcttatctttctgcagttcattgtacaggccttcctgagggttcttccttctcggctttccccccatctcagggtcccggccacgtctcttgtccaaaacatcgtactcctctcttcgtcctagattgagctcgttatagagctggttctggccctgctggtacgcgggggcgtctgcgctcctgctgaacttcactctcaggaacaaggcagtgagaatgacaccatagatgaagaggattccatccagcaggtagcagagtttgggatccagcaggccaaagctctgtgcctctgtaatcggcaactgtgcctgcaggatggccgcggtgaaaagcgccttccacttcatcttgtcctttccctcagaaagaggctgggaggcagaggctgaggcagcggtggccgggacggttaggagaaaaggagtctctgctggttttattctgcagctacctccccaggaagtggaggac

SEQ ID NO: 151702 - DNA, 939 bp, Homo Sapiens
ggtccggaattcccgggatgcggtgtttcaggatgtgagggcccgcagtgagccgagttcaggctctctccactgcctgcccgccaccgtgcaagctctggccggcgctgcccacagtccccatggtgggcagcccccgcggcggggacccctgatcggcagcggcatgccagggaagcccaagcacctgggcgtccccaacgggcgcatggttctggctgtgtcagatggagagctgagcagcacgacggggccccagggccagggcgagggccgcggcagctctctcagcatccacagcctccccagtggtcccagcagccccttcccaaccgaggagcagcctgtggccagctgggccctgtccttcgagcggctgttgcaggacccgctgggcctggcttacttcactgagttcctgaagaaggagttcagcgcggaaaacgtgactttctggaaggcctgcgagcgcttccagcagatcccggccagcgatacccagcagctagctcaggaggcccgcaacatctaccaggagttcctgtccagccaggcgctgagcccagtgaacatcgaccgtcaggcctggcttggcgaggaggtgctggccgagccccggccggacatgtttcgggcacagcagcttcagatcttcaacttgatgaagttcgacagctatgcgcgcttcgtcaagtccccgctgtaccgcgagttgcctgctagccgaagccgagggacgccctcttgcggggaacctgggtcctcgcgcctcgggagccctgacgccacgaggaagaagccgaagctgaagcccgggaagtcgctgccgctgggtgtggaggaggtggggcagactgccaaccgttgagggtcctggagggccgacctctccgcaagtccttccgccgggagctggagcgggactgcagaagaccgctt

SEQ ID NO: 151703 - DNA, 820 bp, Homo Sapiens
gccgtctcaggaagtccattgactggtgcccttgtcctgctgtcctctctagaacatcaacagccaggtcaggcctctgctgtggcttctgctcgtcgtccttgcttctgggggtcccctgctttatcgtgattctggcgatggaggcaagaagaggaccaggaggaggagacagaagaggaagaccactgagaccccgatgagaatatacagatgctcagctttcaggccttgggaagcaggtgcatgctcattgtgactgttgtccgacggcctctgcgtgggtccagctgaggagccgggctctgtgtccggggagtccgggcctccagaggtttctttcaccagcagctccaggtagtcactctgctcagaccatttagggggcttataatagatgcagcgataaggcccggcatttccttcacttactgagtcaatgcggaatctggcctctgactcagatggactagcttgagacacatcttcagtatcattgtatgtggatctactctccctctccaggcggaatgtttgaaccccaaccgggccccggcacacgaaagtcacatggctccccagggggatcacggtgcctggctcagccgagatggagggtctgggcagatcttcctcctgcgtgtggatggtctgggccaggcagagcactaggcccaggagggcggtggggtggggagacatggcccaggtcccagcagtgcagcctggcctgaggcgcaccaatgcaaggacagaactctgcagcagacacaagcagacaggatgtgctgcccgggggcctcctgcctatggggcttcc

SEQ ID NO: 151704 - DNA, 1382 bp, Homo Sapiens
  misc_feature (1068)..(1068): n is a, c, g, or t
  misc_feature (1329)..(1329): n is a, c, g, or t
gaaaactgtgagagagagaatttttaaaaagcagctggggcctgaggtttctcccccagtaccctgggtcacctcagcccagagctggcggcaggcccccagcccctcatgtcagagccccctgtgtactgtaacctggtggaccttcgccgctgtcctcggtccccacccccaggccctgcatgccccctgctgcagaggctggatgcctgggagcagcacctggaccccaactctggacgctgcttctacataaattcactgactggctgcaagtcctggaagcccccgcgccgcagtcgcagcgagacgaaccctggctccatggaggggacacagaccctgaagaggaacaatgatgtcctgcaacctcaggcaaagggcttcagatctgacacagggaccccagaaccgcttgacccacagggttcactcagcctcagccaacgcacctcgcagcttgaccctccagccttgcaggcccctcgacctctgccgcagctcctggacgacccccatgaggtggaaaagtcgggtctgctcaacatgaccaagattgcccaaggggggcgcaagctcaggaagaactggggcccgtcttgggtggtgttaaccgggtaacagccttgtgttctaaccgagagccaccggccgaccagcgcccctcctgcaggcctgggggaccagcggggtagcccgggccccgaaagtaaacgtgggaacctgcaccggggcgcggaccctgggtgacacggccccacccacctggtcccagcccgcccggcaacgagtccttggcacaatcccgcaaagaatcccctggggccaccgcagctatcctgtctggccgttccggaatccacctctccactaaaatgcttgcacagaacctgggctcacctcacacgcgctagcggaacctgggctaatccctaccgggtctttggatttctggtaaacaacaccccccctgcggacctttgccgtctctgttcccgggcatttccaggaaaccccccgcggataccttatccatccacccgcgtgggtagcgaccccaagatcaanatagcgaaccaccgtcacacctgggtgggatcacaatgtccgttcgtataccacactcccctaaacgacgtccactaccgggagaagatcctccaattacgggggtgggcactccttaaaatgcagtcccacagacagcgaaattgctggctacatatgtcaccacaaacaactcttcagacaggggggcgtatactaaatgctaaaagataaaaagtccgctccctcctcattaactaaagcccctcacccgacgaacanagttgcgatcgaaactaactcttctccagaaaagaacataacgtgtggttctt

SEQ ID NO: 151705 - DNA, 1167 bp, Homo Sapiens
catggtcggagtttccgcttggatctgtccctcctgggctcttcatcgtgggtttccggagggcccatgtccaccccgttctcggctgtgtgcccttcacgcagcacgaagttttctcctggacgtcagcacctgggctggacctccctctgtaggccccccgtcttggcttctggctcggcagccctggaggacgttggaaatcacctgtctctgggccaatgtcctggtgttttcctgacgccagtgttgaggaggaggaagaggaggagggagagaagcaggatggagaccaaccaagaccccgatcagtacttcccagtgccttctcagaccactgtgggggactgaccctgtaggcatgaggggctggtcctcagggcttgcagctgttgagacggaccttgtgggtgagggccctgggaccctccaaaggatcctgagactatgagctccagggggtcactggggtgtgacagcaggtagtgggagaagccgtgtgagctgaagcacctgtaggtccccccgtgcactgaggtcacaggactcatggggaattcagcctggtgctgctgagctccgtgctctgatctcagatgcagtaggggatgggctgcccgctccttgatcagaaggaaagtgtccattgggctccgtgactgacacagcagggtcacgctctttcctgaggtcacaagaggactcggcagggctgaaagggtgggtttactgtaggctcctgtcatcaccagctccagggggtcactgggctgtgaccagcctacagggctgcgatagtaacagcggtatctccctgcatagtcctctgtcatggatgggatggagaatctggccttgttcttgggctccagtgggttctgtctgtcccagggtgctgggctttcctctttatccagacggtactcccgagcctccagggtcccctgacaccagatggtcacagagttcccccagctgatcacagagcctggctcagcccagagggtgggtttggggaggggccctgcctgcatgtgggtcctggggcccagactcagcccgaggcagagcagagccgtgaaggtggggatcatggcttcatcctcccaggggccccagctgtgcagatggatgagtcctcagatcccgggaattccggaccggtcc

SEQ ID NO: 151706 - DNA, 1521 bp, Homo Sapiens
  misc_feature (241)..(241): n is a, c, g, or t
  misc_feature (719)..(719): n is a, c, g, or t
  misc_feature (877)..(877): n is a, c, g, or t
ttgggggttttgggcccccacaagcccctttgcagggatggtgggaaatccaagccttttttctggggtgcgatgtcccagtgttttgcccttaacttcgatgttcggaggatgagaaagagggaggaaggaggaggaggaacccattaggacggacggcccaccaaggatccccgatcacaaccccccaggtgccttcccagacccactttggggatccgacccagtgggggtgaggggnctggtcctcagggcctgcaggtgtggagatgggaccggtgggtggggggctgaaacccatggagggtcctgagaccacgagctccaggggctcactggggtgagacagcaggtaggggttggagttgcgtgagccgtagcacctgtaggtccccgcgtgggctgaggtcacaggactcatggggaattcagcctggtacttaggatattcgtgtattgatcttagacggagtggggcatcagctgctcccgccttggtcagaaggaaagtgtggaactgccgccatgactgacacagcagggtcacgttctctcctgaggccactgtggggcctggctgcactgagatgaagggtgtgccacggatctgtcctgtgatcaggatgtccagggggtcgctgggggccgagcactcagaggagaggttgtgtgcaccgtagcatctgtactggcccccgtaggagcggctcacagggccncagggtgaagttggcctgggagagcccagcctggggctgctggccagggcgctggcggaggtcacgttccccctcccttgtacagaacaaatctgtcgtagccgacatcagagccacactggagggtcaggctttgcccaggggccatgacagggccntgcagggtcaggagggagggcttcctagacacgcctgtggctgggggtcacggggcccacagggaacagggcctggaaccccccactgtggagctgctgtgagtccagggtccgggggagctggtgttctccttccttcatcagaacaaaatggtgatatcccttctgtgagccacatcggagggtcatattcccccctgaggccaccacagggctgggcagggctgagagggtgggtttgttgtagaatcctgtcatcaccagctccagggggtcgctgggctctgaccagcctgcagagctgtaatagtggcagcggtatctccctgcatggtgctgtgtcatggatgggatggagaatctggccttgttcttgggttccagtgggttatttctgtccaagggctctgggcttccctctttatccagttggtactcctgggcctccaggctcccctgacaccagatggtcacggggctcccccagctgatcacagagcctggctcagcccagagggtgggtttggggaagggccctgcctgcacgcgggtcctggggcccagactcagcccaaggcagagcagggctggagggcgggcgtcatggcgtctccttccggtgatccgcagggaattccggaccg

SEQ ID NO: 151707 - DNA, 829 bp, Homo Sapiens
  misc_feature (605)..(605): n is a, c, g, or t
  misc_feature (626)..(626): n is a, c, g, or t
  misc_feature (773)..(773): n is a, c, g, or t
tttgtccagaaataacatttattaatcaacagtaaaacacacaatagaaaaggccttataaataaaactatatatttataatgctttatttttttggtccagtactccacaaaacactacagacagtaacaaaataattcaataaatattaaaaactttcaatagaattataggacacttttttatcatatgtgagcatcaacaatgccacagccattagatatactattaaacacagtcatagatatctttcttgaataatggacataataaattttttatcaaggagtcataacatttacacatatccatacacaagataacagctcagaggaaatgaagcagactccccagtgacctggtttcatctgcctgtacatcatttaaagatattacagtgttaacaggatagaagtcaacacactgaagagaaatgttgggatttgcttggggtgggaggaatgaaagtagggtaattaatgaaagcagcttacatattttccattgctctcttagcaatatgctcccttcccttttctgccttttcttggttgaggtattccagcactttcattaacagatcttcatcccagtactgcctattntgggtatcatcattcttcggnggccccacagggaaccttttgctcaccggggcccagctttgcagtctcctgagagctgccttgattcaaatgctctttgatggcctgctccaattgttcctcttccttgcagtcatctttagatgagccttgaccaggaactcgctntcaatggtttgaaattatgtcctcaggttttacctagatcctgggccagtactcac

SEQ ID NO: 151708 - DNA, 627 bp, Homo Sapiens
cccccccaaaaaagcttttggggccaaaagtttccagggggcccccgggggcagaggggtattgatgatgtcgctcagatcaacctccttctcctcatagaagtaaagctcccggcccccaccagaggcgaagcggaaaggaatgaactcctgggcgtggaagccatagagtggctcgacattctttagcttcaaggcgtagtcaatgtcactggtggtgagcttctgccgcttccccatgtgcatgaacttcaaggcatcctgtgcgatctctttgatgcggtagctgacctcatccgttagcagtctggcaggtgctcctcctgaatctgggcgatgcccatggattcagccaccaccttcatggagctgccgagggcagcacagtgttggctaagcttcagcttcttctcctcagccattctggagtccctcttctcctccgtggaaggatgaagcccccggtggagagacggagacccgtcctctttccagtccccacaagggaccttcaaagggtctcctccggggtaccactcagacccgcccccgccacccgagcgcggggagcaggaaaactctagcggcagccgagacgctgctcacccggcgctcggcgccatcttg

SEQ ID NO: 151709 - DNA, 1185 bp, Homo Sapiens
  misc_feature (151)..(327): n is a, c, g, or t
ccggtccggaattcccgggatcccgctgcagccattgccgcagacacgatgccgaaacgaaagaagcagaatcatcaccagccaccgacacagcagcagcccccgctgcccgagcgggaagagactggagatgaggaggatgggagtcccnnnnnnnnnnnnnnnnnnnnnnnnnnnnnnnnnnnnnnnnnnnnnnnnnnnnnnnnnnnnnnnnnnnnnnnnnnnnnnnnnnnnnnnnnnnnnnnnnnnnnnnnnnnnnnnnnnnnnnnnnnnnnnnnnnnnnnnnnnnnnnnnnnnnnnnnnnnnnnnnnnnnnnnnnnnnnnnnntgcagactctcttcacagaggtcctccaggatcaaggggaccactgattccaccactgctgagtctcccacctcctccttggggtagaggcccaattcggagagggcttggccccaggtctagcccatatggtcgtggttggtggggagtcaatgcagaacctccttttccggggccaggccatgggggtcccaccaggggaagctttcacaaggaacagagaaaccctcgaaggctcaaaagctggtctcttatcaagaatacctgcccgcccaaggatgacccccaggttatggaagacaaatccgaccgccctgtctgccgacattttgccaaaaagggccactgtcgatatgaggacctctgtgccttctaccatccaggcgtcaatggacctcctctgtgagactgtgccttcccatccaggctggaaggagctctctgtgacctagcggccatttatttctctgtagccctatgatggctactgtgaggctcttctaacaccctcagtcagtgacacacccatcccatccaccacttcccccgtgtggggtccagagtggtgttgcatcactggtgcgcggcaatacgcgctttcttctgatccagcctgtagaagactcgccctttgggaccatctttgcttcctttcagttgctcctggatcttctttcccgtcatcaaatgactgctgaaccaggaaagctccttggtgctgaattccttgtggcatctggtccactgttccccagatattggcctcaagtcgtgaaagcctggagcaagttcataccattccccttcttaaatgctgctttgttcaaagctcctttcatatgtgacattcctatagcc

SEQ ID NO: 151710 - DNA, 738 bp, Homo Sapiens
taagtttttccaagaggtgaaatggttcaggtggcccaggcttgggagacccatttgggttcagatcctggtcctcccctcgccagcttgcatggcctcaatcaagtcacttagttttgacagctcagttccctcgtccactggatccccagtcatgctgtaaacagggcttgctttggagtctgtcagacctggcttagacccaggctctgaccaaatgggtgagttatgcagctacttggtggcatctaataccctatcgcaaaggactgccgtgaacaggaaggaggtgtcaaatttggcagtgcctgatgaggtgaggccaggacccaggaacttctattccctcccatgctcaggaacagtaagtgttcttctatctgcagaggtagatgcttagcacatcgtgggtacttcactcatgattgctaaatttgaatttgtgataagtcatttcaaaagtcagatctaggaccgaaaatacaatatctgtcaacatgaactgtagatcatggttttcctccagcccaggaatctcctttcagtaaacgcttcttctccaaatgtcttcattccctttctggcttgctggttctgtcggctgagacaaagcagtcccattcgcagcgggaggccaaactcaaaatgaaattttatttagtctgcactgtccccagattgggtttcagaatgactgctttaggagatagcatggatgtggctgatgcatgctttgca

SEQ ID NO: 151711 - DNA, 1076 bp, Homo Sapiens
  misc_feature (124)..(142): n is a, c, g, or t
aggcaaggctgtacggtccggagtttttggatcgctgcatctccgtgcccggcctgagctggagtcccccgcgccccccgcgttccgcccggccatggctgcggtggcgctgatgccaccgccnnnnnnnnnnnnnnnnnnnttggcgtcgccgcccgccgcctccgcgccgtccgcccgcgatcccttcgccccccagctcggggacacgcagaactgccagctgcggtgccgcgaccgcgacctcggcccgcagccctcgcaggcggggctggagggcgcctccgagtctccctatgacagagccgttctgatcagcgcttgcgagcgtggctgccgcctcttctccatctgccgatttgtggccagaagctccaagcccaatgccacccaaactgagtgtgaagcagcctgcgtggaagcctatgtgaaggaggcagagcagcaggcctgtagccacggctgctggagccagcccgcggagcctgagccggagcagaagagaaaggtcctggaggctccaagtggggccctctccctcttggacttgttttccaccctctgcaatgacctcgtcaactcagcccagggatttgtctcctccacctggacatactacttgcagactgacaatgggaaagtggtggtgtttcagactcagcccataagtggagagcctcggcttccaggggggccgtctgcagcgcgtggaggtgacctggcgaggctcccagcctgaagccttggaggtgcacgtggaccctgtagggccccttggacaaggtgaggaaggccaagatccgagtcaagaccagcagcaaggccaagggtggagtctgaagagccacaggacattgacttcctcagttgcatttgtcccggagcccgggtctgacctccgctggatcctggcttggtggctcttcctctccggtgctgtgaatgctgtggctgaagatgcccacctgtgtaaccggcctggcagccctcagttccgcccttgaccctgatcccacacagggctccagatgaccccattgcccttacctgcgccgcccaccctttgacgctaccct

SEQ ID NO: 151712 - DNA, 790 bp, Homo Sapiens
tagtagtctatcatcgcctaactatgaatcagcttccttgagatgacaatttataaccatcctggtctcttcatcatcccaagcaatgtcgcatgcctttcccaccaccacctgctgagccttgatcatgacaggtatccaatttcccttgcaattctgacagcttcttctgcatccttgactactccatcaaagccagggattgtatttaacctctgctttcttagctaataatttgctttcaatcttgtcgcccatggcttgaatagcatgtgtgtcaggtccaatgaaaacgacatcttctgctgccaaacatctggcaaattctttgttttctgaaaggaatccataacctggatgtacagcttgggccctggttttcttaatggcttccatgatggcatccatgttgaggtagcttttactggtgggagctgggccaacacagacagcctcatccgccattttcacatgaacagaactagcatcaacatcactgtggatggcaactgtcttaatgcccatcttcttgcaagttctaataacccgacatgcaatttctcctctattagcaacaagaattttatcaaaagttttttcattaggatcatatcccactgaaccaagattacgggacaccattaagcactgtcttgaatagtacagaacatgcttcagggtccgcagcgccgcgctcagcatcagctgctgcgcgccaccgcccacgccgtccggcagcgaccagcggtgctgtcccgacccagaaccccgccattgttgtccccgcaga

SEQ ID NO: 151713 - DNA, 758 bp, Homo Sapiens
  misc_feature (340)..(340): n is a, c, g, or t
gggatttgatgtcccccaacttgtctcttaggtggtcacagccatcagggagaaaggctgagtacactttcctgcatgatggtgaagctccctgagtcatagctccggaccaccgcccgaaggagcgccttgcacagcctcgtcccagggggccatctgttggctcagcactgccagggtcaagtcatggcaaatgtgaagcaggagctgtttggcaggtgtgttatttgtagcagatgggtacttgatgttctgcagcttctgaaaggcttcctgatactgctcaggggtgtcaaggctgaagatgctcttccacactgcagtcaccctctccacgaanaggcccttcggtgcccgtgttccaagtgtggtaagaggaggagcttttgccctctgaaagctgcttttcctccagatgcctggacagtagctccagaaggcaaaacaccaatctctgaccctgtagactttcatgcagctgcagggcttcctgggctcccacccagttgttggccagaagcagctcttgggcacatctgagagccagggaagcagacaactcatcctctcctacgatggcagccaactctgcagccgttctaagtgatgccgcatccccctttttggccaaactttggctgcatcataagcacaagtggcccctaaatagcatttggcagctacagcatagtggccatctctttctaggacggttccccagctgaggtacaagtccttcaggactggtcctccgggcg

SEQ ID NO: 151714 - DNA, 684 bp, Homo Sapiens
aacgggtgatgcggttggcgcgttgggccggagcactagcctcacggagaaggatctgaaagaagccaaggcgcggagccagcagattgcagcccagctgaccacccctcccagctccaattcccgtggcgtccagctcttcaacaggcgccggcagagggtgaacgagttcaccttggagagccacggccagaggggacagaagcccagccaggagtccctcagagtgctcccttcaagcctcccaggccatgcaccggggctcagcctgagttccacctcgctgccggagccaggccctccacggcaccccagtccccagagccccgacagaggggtccctggccacagcatggaggggtactcagaggaggctagcttgctgcgcgcacctggagcaaggtggctagtgcacgcgaggaacgaggtaccactggtggcttactctaacaggagcaatgcagcactgctgacagacaatgggctgcacctgtcccaaaacccgagaggcccagcagtcctcaccgtgcccaacatccagctgaggtccacagcccagctgcagatgtcaaccaaaaccttgcctcgcccagttgccacgctcaccaacagcaacttcgtaacagcagccacaatccgccagccaccgatgtcactcagaagccaccggcaactgtagtcccc

SEQ ID NO: 151715 - DNA, 790 bp, Homo Sapiens
caggcacgctcctcgtccaggtagtaatccacctgcactgcgcccagctctgccagcgtggccgagtagagtggctactgggggatggggatgagcacacccgtgcgtgtgtggccctcgccggccaccagcagcttcagcaccgtcacgatggcatcgctggcccctgtggacaggaagacgttgttggggtccgcagggatgcctccgtcacgcctctcaatgtaccgcgccacgtcctcccggatcagctggatgccggagctgacgctgtaggcccccagactgtggcccccacacgcctgcaagatgcgctccgcccttttcttggcatcgtcagggaagttggggctgctcagaagatcagggttaacacagagggccaagacctggcgcaggaaggtgatgggcctctgccccatagcctgtgcgtccccgatgttggcacggatgacctcggtgaaaggcttcttcacaccctggcgcagctcctgctccagctccaaggctcgctgcactatggggccacgcactgcgtactccactctccgcacacgcgggttcatgccgtccagcgtcagcaccttcgccctcagtccattcctcaccgcctggctccggtcacctgtgctcgaggccatgactctacccagaccaggcgggaaggcagctcaggaggtggcaggaccagaagtgggaatggcgacagctgggtctggcttagtgggccagggctgggagggggcagccgtagcagagggaactccaggcaagagagcaccctcttcac

SEQ ID NO: 151716 - DNA, 1186 bp, Homo Sapiens
  misc_feature (235)..(293): n is a, c, g, or t
  misc_feature (1088)..(1123): n is a, c, g, or t
tttgactaggtggttaaggagtttatttgggagaggagaatcatatttgttcttccttggggaggggggttctttgaacaataccgaaggttttgggaaagggtaggggtctggaggggagaaggaggggccacagccagacaaaatggcaacacacgatcacaggcactactgacatcacagacatagcagagggtgcaggataggggctccagaccaggcctccaaccacccnnnnnnnnnnnnnnnnnnnnnnnnnnnnnnnnnnnnnnnnnnnnnnnnnnnnnnnnnnnccagtcccacagacccgttggttctgtcctcctattaacctagctgtttcatcacagggaagtggggaaggagtgtgtgtggtggggtgcttctctctggatcccagcgcctcaccctacaagccatatcactcgactcttctcaggccacttccgtcccaagtcgtagccagagccattctccccccacccctaacgtaacccatctggaagccatcctatccaagtcccacctctccactgcccaaacccagccattgtaatacattttcttcactgcaccatggggaggggctgccctttctgaaaccacacatggaagccccattctaagccccaccctgtctggaagcctggcttggcccattcctgaatcccacttcttgccttgctcaagatctgtcccctttagaatcaagctcagtctcccaaatgttccaagccacaccctttccataggctctggtaccaatccaagacccacctactctggagcccaccattctgcctcgcttaaagcctcgccccttctagaaccctgccctcagcgcccttccaagccccaccccagaatgctctagcgcactcctctccttcagactccagatccactctgtctggaacccaacccccctgctgacccctccactccacacctcctctccaagaccaccttgggtcctaaactgtcctctctaccccaagcccccccaatctctgcctttctttaaccctggagttggatttccctaacggcctttgttcaggcaggcattgctggaggaaccaaggccnnnnnnnnnnnnnnnnnnnnnnnnnnnnnnnnnnnntctgaagtcacgcccaccctccccacacagccgaggtctgttccctcctgtcctccttttaga

SEQ ID NO: 151717 - DNA, 728 bp, Homo Sapiens
caggggcacagtgcacgtcagcaggttcccaatcacgttctccaggcacacattcaggccctccacgtggatggcatagatgaggccaaggctgttcctgtacacctccgtgtggtcgacgtcgcgacaaccagtaccagcgtctttcggtgcaaaacagctgggcagatggggcaggtgctgtgggagacaggtgggtctggcctccctcatgccccctcttcctccctctctgtggcatcctccacgcgcgtcgtttcctgctgtgaaggctccgctggctcccagaaggtcaagcaggcgcagtagtggcgctcggagttgatgtcggtgaggacagcaacaaagaaggtcggtggattcctctcgggacacagctgccacccgctgggctggcaaaacagctcgatgccctgggggaatgggttgtcctcccagtccttctctgggaagcgctgcagaatctggcctggccttccccactcccgcgcgggtgcggcccgaacgccaccagcacgaagtagtccgcagagccgcgccactggacgagggacgcggggcaggcaccgaggggcgcgggcgggctccgcggctcggggactcgaggacaggcgcgctcaatggcaccgcgccccggacactggacacagcgcacaccacggacaccactggttcgcatccgcagcgacggcgcgcagacgtcgaccaggttcccgccgccatcttca

SEQ ID NO: 151718 - DNA, 685 bp, Homo Sapiens
gtttaatagcgatatagaaaattgagcacctataaaactatatggtgggctctgggttacattgagcttaagtagaccaagtatctatcccacctaaattatcagcaactccaggccatgacccagtgtcccattctccttcacggtttgcatggtgtgtagcctcctggatacaggcaatgtatatagatcgcagagaatgtccgttctggcctcttccttggaagggtctaaaaacagaccttaaggagctaagtgacttccccaaagcccacagctccagtgccactgctgacttttgggtgggggtgggatcagttaaagaggaaagctttcagtactgtcagcacatacacctgccaattaaggggctggatagagttcatctctaggagcaggacctccacccccaccctccaccccagaagccatgtcatgctgtttcaccaggatcttgcctgaggttagatgggagagaacagctacaagcttgggtggagtcactcataaacacaccctgaaagctgtggagcagggagagtgcaggctttagagggctctccatgatcccttcccctcctgggggctcaaaggcaagggtcaaagatcttctcggtcaagtttggggtggcttcctgtcttggtcatcttgtctcccccttcctcttccccatctgtgatctcc

SEQ ID NO: 151719 - DNA, 791 bp, Homo Sapiens
gctggagccggcgccagcggctggagcagcaagggagtcaggtccaggtccagagagccggagagaggagcccccgaccgagagcccagtgacatgtcggaccctgagatgggatgggtgcctgagcccccaaccatgacgctgggggcctctcgggtggagctgcgggtgtcctgccatggcctcctggaccgggacacactcaccaaaccccacccctgcgtgctgctcaagctctactctgatgagcagtgggtggaggtagagcgcacagaggtgcttcgctcctgttccagccctgtcttctcccgggtgctggcccttgagtatttttttgaggagaagcagcccctgcagttccacgtgttcgatgccgaggacggagccaccagcccccgaaatgataccttcctcggctctacggagtgcaccttgggccagattgtgtcacaaaccaaggtcactaagccattattgctgaagaatgggaagactgcgggcaagtccaccatcacgatcgtggccgaggaggtatcaggcacaaacgactatgtgcaactcaccttcagagcctacaagctggacaacaaggatctgttcagcaagtctgaccctttcatggaaatctataagaccaacgaggaccaaagtgatcagctcgtctggagaactgaggtggtgaagaacaacctgaaccccagctggggagccgttccgcctgtccctgcattccctatgcagctgtgatgttcaccgagctctcaagttcctggtgtatgactatgactcca

SEQ ID NO: 151720 - DNA, 894 bp, Homo Sapiens
acgggctggaactggcaggcaccgtgagcccctagcagccgacaatgctgagtgtgcaggactgatgtcccctaccacacccacaccacatgccggtgaatgatggcttccaggcgtccgctcgactggcccgcagagccccgccgtgggtccgcctgctgattggctgcccccagtccagtgctgcttacctgccacggactgcgctgccatggggcaaccctgggaacggcagcgccttcttgctggcacccaatgtgaagccatgcgccggaccacgactgtcacgcagcaaagggcacgaggtgtgggtggtgggcatgggcatcgtcatgtctctcatcgtcctggccatcgtgtttggcaatgtgctggtcatcacgagccgatttgccagagttcgagcgtctgcagacggtcaccaactacttcatcacttcactggcctgtgctgatctggtcatgggcctggcagtggtgccctttggggccgcccatattcttattgaccaatgtggacttttggcaacttctggtgcgagttttggacttccattgatgtgctgtgcgtcacggccagcattgagaccctgtgcgtgatcgcagtggatcgctactttgccattacttcacctttcaagtaccagagcctagctgaccaagaataaggcccgggtgatcattctgatggtgtggattgtgtcaggccttacctccttcttgcccattcagatgcactgggtaccgggccacccaccaggaagccatcaacgtgctaatgccaattgaagacctggctgtgacttcttcacgaaaccaagcctatgccattggctcttccatcgtgtcctctacggtaccctgggtgatcatgagtcttgactaatccaaggg

SEQ ID NO: 151721 - DNA, 981 bp, Homo Sapiens
cggccgcgagcaccatgcactgggcggcctcggcgtggttgcccagctgcgcgtgcttgccggccatgttctgcaaccaggtcagccgaaggtccggtgagccctggtagccccgggcaattctgtacatgaggtcgatgagcatctcagggtcctcctggtgttccttcatcttcaccgtgtccgtcaggatcatgtgcaggttgaacatcaggtcctggacctgctctgcgaaggtgctgtcccgcagccccatgtcctcctcagcataggtgaggatggttttgagtgaacgtcgcaggtgctcttcactgaagttctgcgtcgtcccccaccagggacgagagagacattggtgacctgcatcttcacacgggcaaagttgtggccgatctcgaagttctgtcgcatgagcaggtacagcgaggcgctggcgtgcgtgcggatggtgctgatgcggctgccacagtgtcgtaggagcctcatgcacaggtcggcacacagcttcgtgtcctcctcgaacagcagctccgggaacttggacacaagggtcctctgggtggccaggccatgctgcaagaagagggcactcttggcactgcccaggctgtacagcacaaccttcagcactggccccaagacgctctcccgggcttctgaaagcatcaccgtctgcacgatgatctccagtgtgtccagaaccactaggcttgcctcggttgccaggttcccttccaccaaggcctcgtgttccatttcatccttggtcttgtccacgcggtctgaggtttgcttccagtgtgtgacgctcttccgccagcgcacattctccggattcccaacgggctcctctcacgacttcgccgaaccatttcttgtcgagctccgatggtacccagaatggcttcctctagccgcgccttcatatccagaaattttttgaatgtgaggctgttgatgcgttcaaaggcctttttcccc

SEQ ID NO: 151722 - DNA, 1228 bp, Homo Sapiens
catatgggtgatttgtagagcgacgacgacgccgccaagagagcgagcaaccatgctgcctatgggtctttattgcgatcgtcggtcaggaatggagcacgttagaaccattgtcataacagtgggtgggacgggtgacgtgctttggctagagtgtaaggcgtcgtgagacaagacgagtagatctttgaacagtactaacctagtgattcggtagtggtctgaatagttggattcgtgttggatctcattcgatcgtcttatgtacgcttagtgaactagtatgatggggtaggggacgctcctgagtcgtgtgcttctaacttcccggacatccggcgagcccgcacttgggcagactgaaacggcccggccgatacttgccgctaaacgcggcaggtccagctttggtgagacggtcaatagcagcacgggagcaaagagggctgcgtagaacgaccctgaaatgactgaaggcaaatcgtggaagtattggaccgcaattttttagagggggatggccttagagatccgggcttttgccccccagaggttcaaggtgaaggcccccgtctccaatgtaagtacccctgggtgtcactccagaggggcaagcccaggcccagggtgcacgctgggggagctgctgtcagggaaatccacgcccaggaggaccgtctcatcctggctcagaccttctccttctcgtgtagaaactaccagcaggtagcggagccggggaggccggggtgacctccagctgggctgccaggcggatgtcatcctgacggcctcagcagactgtaccatgaggtagcaggtgctgcctctgctcctcctgcttctaggggactctgggatccttgcccgaagtctgtctggtccccgtggagcatcctcctcactcggggccttctctgttggctcagaactggcctctgctgcatcatcattgtcccctccatcctgcagtcccatggacagccccacggagcaccagcaaagctctgccttcgctggagtcgactgccttcgctggaccgcctggtcccagggccccacagggcgtggaggcgccgctgcccgggggcgaacggctcactgtgaccagggccatggagccaggccgcgagcacctgggctggcaccgggcacggccccttccctcaaccatcccgagaattccgggccggggcccgcccctggtagagttgtgtatcagtatgtg

SEQ ID NO: 151723 - DNA, 921 bp, Homo Sapiens
gcaatggcgatgctcctgaggataggacaagcagagactgtaggttgtccagtcacatgcctgcatcaccaagaaccttctcctggcttgaatctttggaattcctggttgagtcacagagaagcattgtcatgggctccagtgaacgctgccacccctgttatctccattctccctttggtcacagcagctgtcttaagacacaagaccatgcctgggccctatgtaggctggctgagaaggaaggttgctgcaatggcttccgaactccagggagcaagtgctggcttcagctcaaagtttccaggggctgggaataaggtggaggaatagccatcagaagaaagggcagttggaagtatagtgtctggaagagggggctccatgtccctccagcctcagtgcctgcacgttcctcaccagctaagctgtgctgagaagtgggtaagctaggtagtagcccacagcagagcccaagaccacaccaaggaaaatccaggtgttgtaggacattacagccagcatgatgaagtagccgatgaccacctggatgacatggattagagactggccaaagtgacacaaataccacctgtggtgggttctgccaacagggaatgaatctgagcctgcagagtccccgtctgtctctgcgatggtctgctggctgatggaggttggcaggttcaccagtacctggttgagcagcttggctttgccaaccttgatgccttcatacagtacagccagaagcaggagcaccaacaccgaaagggccatgccagcaggactgtggacactccagaaatcaaacagaagcaccgctgtatctgagaagatgaaatgcatcgccatggtgagtgcgcagggcgggcgccaggccgcgtctgctcgctcgggtctcctcgctccgagtcagtt

SEQ ID NO: 151724 - DNA, 967 bp, Homo Sapiens
ttttcgtggcatcatccacctggatctggccctgggtgcacagcccacttcccagggcttgcgcaagcccctctgacaccaggcagatggtggcccagcccggggaaacaggtcacctggcgcctctgctcgtctgccacgatgacattgccctctgagttggagcagatgcccgctgggcagccgaaagtgtgccccgtccagccccccagggagcccaggggttggcgggcactgccaaacagcctcacatccccaaactcctcactcacagcaaggcccccatcaggccctgggcccacccagcaggggccctccagacccagcatggaggctggggccaggggctcccaagcaggacccaacgagaagctgtgcacagccccaggcaagtagtccgtcaccaggaggcggttgagggcatccacagccagccctcggggagacaggaaggtgcccactgtcacccagtggcccccggggtcccgggctgtgtgctggagtgcatggacagccccatggatgggatcgctgaccaccacaagccctgacgctgtcacagccacgtcctctggaacgaaggccccgctccccggagtgcggcagggcaggaggcagatggggcgtccctccagatctagcacgtggacacagggtgcagccccggccgtgaggaagagcaggccatcgggggagcagtgcaggccccggggccctcccacagcccctgcgggcacccggatccacccaagcagccggagctgccgggagcccgtggagtctccaggtgggtccagtgtgaggtgcagacacctggaggccagagtccagtcagtccgaatcaccgtctcagcttctctgcagctgggtcacgcttggggctgggacctgtctcgctgggccctgcttcggggctgggtggctgcagcctctgtatcctaaatccgggccgtaccagcctgacttt

SEQ ID NO: 151725 - DNA, 744 bp, Homo Sapiens
aataggtacaaatgacgctcaaggagtgctgtcacccaatacccaatgtagcttgcgtctgggcggggcgaggtaggtacctgaatgcctcttcttgggaccttggggggcattggacgaggaccggagcagtaagccggggtccggagccaggaaggcctgcgtctgaaggggctctggtctggtcgctaccggagtcccaaggagggtgggcctcccctggtcccgccttcccccttcccttctcccccggggatttgctgtcccggagtccctgctgtccctcccgcctgcaggctctgggaatgccggtctggggctggttgtctagtgcgggcgttcccagttcgcggggatggtcacttggcaccctgaatcacccaactgcgagcccattccaaccggattgtagacctgccagctccgggcccaccatcccccaaacagggcctttcccggagcaacccaggccgggcactggaaaaactccgagagggattcccagcgcagggacgcccacacggagcgcagtgtctcgggctggataagaaggggacccggccacagctccttcgccaacctcggggcgtccgctcgccggcctcgtctccacttgtcccggcaggcgcgcgtgggctcggcgtcccgcgctccctcctcgaccgctgcggctcacggcgctgccaggtttcctgtatagcactataaccagtgaggcaccggcggagagcgcccaggcagaac

SEQ ID NO: 151726 - DNA, 1100 bp, Homo Sapiens
aggccgtcgagactggcggcggggccgcaggcgaactgttgagggtgtcccagcaggtgggcggcggtgccaactccccgctctcgtctcggtggggggccctttcgccccgttttcttcaaagttgcccctgtccgcggaaaagggggattccgctggaggcccgtaagcccccttgggccccggaggggggggtctcgaagctgcccagagcccaccaccccccaagggtggacagtgccccggcgcccctttccccccgggcccccgcagcgcactcacgtctgctgggcgggcctcaggagccccaaggcccgggtgggcggggccggcaggttaggcccggaccatcgcctggggcggggcttccgaggtggtgccggagaggtttcgcggaatcggagctggcaacggcagcgaatagggacagcgacgctcaggagtgctgtcacccatacccaaagaagctgcgtctgggcggggcgaggaggaacctgaatgcctctgctggggaccttggggggcattgggacgaggaccggagcagaaagccggggtccggagccaggaaggctgcgtctgaaggggcgctggctggtcgctagcggagcccaaggagggtgggcctcccctgtcccgccttcccccttcccttctcccccggggatttgctgtcccggagtccctgcgtccctcccgcctgcggctctgggaatgccggtctggggctggttgtctagtgcgggcgttcccgttcgcggggaggtcattggcaccctgaatcacccactgcgagcccttccaaccggattgtagacctgccagctccgggcccacctcccccaacagggcctttcccggagcaacccggccgggcctggaaaaactccgagagggattcccagcgcagggacgcccaccggagcgcagtgtctcagggctggataagaaggggacccggccacagctccttcgccaacctcaactcccgctcggcggcccactgcctgcccgggcacctcggggcgtccgctcgccggcctcgtctccacttgtcccggcaggcgcgcgtgggctcggcgtcccgcatcccgagaatt

SEQ ID NO: 151727 - DNA, 918 bp, Homo Sapiens
  misc_feature (128)..(136): n is a, c, g, or t
gacgcgtagggttggatctaaaagtgggggaaggaaaccaaaaagtggcgtgggatcgataggggagggagggggctgatagggagcaaggaatgcggcggggggggaccttaaaggcaggaagaaannnnnnnnnaaaaaatagcgaagggatggatgagcgacgaacgcgaaacataggtatttagtagtggagggggataggccggatgtaggggtaagcaacgagcggtggccagggtgtggcgcaagggtggggccgtgcataagaagcccgttaggccttgtggaagaggggcaagaccagtgaagcaaaggctccagggaagccaggagatcgcagcccaaggaagggcaggaacccgaggagcaagacaacgccccaggcccgcggctgccatcgccagcgtgcgcccccgactggagacgggcgcgggccccctgcgcgccatggtgaggctgcgctccagcgcgatggccaggaggctcagcacggacgcagtgagtgccacgaagacgcctccctcccgtgcgaaccagagcgcgggggacagtttcagcgtgagcggccccgacagtaggatgttggcggcgtaggcggcgcctgccagcagatccgacaacgtgaggctgcccaggagcaggaacatgggagcgtggaagcgcgggtggcgtccgagcaccaacaacacggctagattctctagcacgatgaaggcgcacaccgccaggcacaccacggcgtcggcgcgcaggccggcacccggctggtagcgcgcaccgcggagcttgccggtgtagttgtaatgcaggacgatgacctcgctcaccggcgccggccgcagcagccccgactaccatgggccgcgcgcgccaaggtctgcgccctggtcgtgcgccacccgcagtcgcgctgcc

SEQ ID NO: 151728 - DNA, 504 bp, Homo Sapiens
gaccgtcaaagccaaagggtttattataggtacatacagtgtgcgcccgccacaccgccccacacccccgggccccagcggcttctccaggcggccatggggactgcccacaacccaatcccccgactccccagggaggtgctccagccagaagcatgcaggggtgggcttcccctcgcccctcccctcatgaagtggcatttacaactggaggggggaggagagaggaaaacagttttgagctttgacgcccctcccattaaaagccttcgcggatgcggggcgggggaggaggagatcgacgttttgcaaaaataaactaagtcaggaattaaccgcatggctctgaggcggcggagtgcagggggctagggccccttcactcccccctcccagacagagatcaaggcagcattggaagtgaggtaaaggcggggagggggtgtcccctcactgccccctagcacctggatggtccaggggacctcaccagcgcccccgtgc

SEQ ID NO: 151729 - DNA, 714 bp, Homo Sapiens
aggaggaacactggccctcaggttccaaattccctgccaattggccacccgaccgctatatatcttccctagacatctgggcttggagtgtaatggcctgggcaccctaccatgatcacgctcattataagagcatgtttctactaatgtatgacctacagtatactgagttaaccattgtgaagagtatctattaagcagggcaagtaattggtaggagcaacaagacatttgagacagaagaagaagttgtgctttgctaatgtatatttttgtatatattgctgacttcagtagctggtgactatgaaacagaatctactttattttaatacataaggaattacagcccacgcccctgggcctacatgctcacctgggaatgcgctctgtgtggattccaccctgacttcttccatgcagctgtgctgctgcctctgcttccctggacactgcatctccctgggaccccataatatcttgagaggaacactgctttcctagttccaccagcacaaatgacagtagctatgacttctaacaggaatgcacagcaggctgaaggttagcagaaagaggatagcccctcctagaagtgggggtcacagtccctcctagaagtgagagttcacaagatccagggctcccaccagacttcagcagccctgcccagcttccctgcccagggtgcccactgtcagaaaccagtctgcc

SEQ ID NO: 151730 - DNA, 794 bp, Homo Sapiens
ttggcacaggcgggccacaggcatccagcagggtgagcagagccctcacgaactggaccatgccgcaacagtggctggcgagcttcgctcactagcatttcaaatagtttcagttgctcagcccgccgttcctcgaccccatccccaagctcatcccattgcagctgccatgtcaacacacgggtcagcagatcctcgtgcagagcaaactccagcaggggcccagggcctgtggggtccgagggaactgcacggtcctctgccagcagtgtcaacatctggtaagtgtggttgcgcacagcactgagatcgtctgcacccccaggagctgcccgagggccttgccgctccaggattcgcaccacctgggaccagtgattcttgaagaccatgaggcaggtctcgggatcagccatgactggggtttggagattggccccttgaggtatacggtgcccagggccccgggaggccagtctgctcagccaattcatcctctccatgaggcaggctgggcaggactggcagccagaggcctacactctgaggatttgccagctggaggttttctccacttgtgtctccagtctgcttcatccggtctgtaggagccagtagctgcccatggagccagaggttataccaggctggaatggcaagcccagaggtcactggccagtccagatttctaaatcgttcactcacggtacgccgaacctggccgggcccggttgctgctgcggtgttaggtgagttcaggccgccgccatcgcttctcaagcgcaccagccgcg

SEQ ID NO: 151731 - DNA, 854 bp, Homo Sapiens
gtcccgcagcatgggggggctccagtttcacacaatccatggattcaagacacagtttgggggacatgctggtccccatgcgctattctctgtctgcaacccagatgcccatattctggtacaacagcaggtgtttgcgtgggatgcagctagtggctctgcccgtccttgggcacgcagtccaggatggagtccccttgggtctgacagttgccccggctcttgaaactcttcagagtgaagctggtgggtaggtgggtctcaggtcctggctcccactggcagatgaggctgctggttgtgaggttcatgaggcaggagaggttgtggggtatggctggagggtagcctgcgcgcagctcaacctggtccaggatctgcaggctgttgccccagttcaggcagcaggagagaaaggcctgagtgtggttgaggtggggcaggtgtgatgatagattcctgggtcccatcagacagacgctgctgcctgcccccgggctgaagctctgctcccagtctccacagaatctgtggctccgggtccagatggctgcagttctgcttgatgatgcaggaggctgtgatgggatcccccaggtggacgatgggggctgagacactgatgtgcccgcactcctccagacttccggggagcagcaggatgatcagggcagcccaagtcaggctgcagtttcccagccttcgccatagctaccaaacttgatgttcaccagctcttgtgatcttggacaagttacttcacctttcacgagccgagccgtcagtttccccatgttggcacctctggcccagcccctggcttggccatccttggtctctcttctcgtcaagag

SEQ ID NO: 151732 - DNA, 856 bp, Homo Sapiens
tgatgaacatgagctgctccacgctcgtgcggagagcaagctccaggaatgttcattgccaagccccttgcagcgcccttccttccagggacttgctgcaccgttgatgccactttgcgcaatcctgcatccgtgcgccggtggcccgagccgtcccagtagctgaaggtgacctccatctcctcgtccttcactttctcgcgctgcgcctcccactcttggcgcagctcctctcggagccggttctcctcctcctcgcggtcgcggtctggcaggaagctggtgtccacgtcggggttcttgcccaggtttccggcgcgcctggcctcggccgcgtcggcctggtcatcgaggtcgtctagtgcaaaggacaggcaggagatcttacgcttgcgctcgcgccgctgctcctgctcccgctgccgctcctgctgcagccgctgctcctccaggtgctggcgcttggccagctgccgctcgcgctccctgaccagggcctcctgccgggccttcatgtcgttcagggtcaccaggcccaccgtgctggacttcagctcggcctccacggcgtcgtaatgcgccgagaacctcttgtccacctgcgacttgaggatggtctcctcggcgatgcgctgcttcagcacctccatctgctcccgctgcctttcgcgcttcttgaggaggtgcatggcacggcctgcctcgcgcatggtgcccttgtactgcgccatggcccgcgcctacccgatgggctctgcccaagcaccctgtcgagcggagacacgcgggagctgacctccacgagaaccacccacgagcagaggcccactcgccccgggctctcgcgacagccgtg

SEQ ID NO: 151733 - DNA, 960 bp, Homo Sapiens
ttatggccaccacgctttaggcttgcctgggttcggatgtgccacagctcacccttcgcgtctcactggcttccaccctggctcaccctgagcatggaagcgatctaaggtcatgatgggcccgaagtaagaagtaggtcaggtagaagttgtacttgagcaggtcagctaaggagtagtgtcggtcagggtgggcacagctctccagtgcaaagctggtgcaacgcagcactgtgaagctgctgcccccatgaaacagcacctcttgaagatcaaaagtgcctgttacaaacccgctctgccaagagattaggggggtccatcttgaaggaggccaggctggccaagccaaggccaagacagagccagggctggcccaaaagcgaggccacatagaggcccacacagtgaccaagcagcagcagcaggtaccaagggcccattgtgcccatcacagccaaggccccgtacacagcatacatccaggagcggagctttggggcaaccatcgtgcagagtttagcaaacagcacatgtccggagagggcaaagatgatgacgttgcgaaaggaggtgaaccacatcacccactcgaagtcagccacatccatcttccggccaatgtactcccagccaggtcgcacagactcccggaaggccttcctgtgggccccatcttgtgaagcctcaaggaggccccggccagcataggccagggccccactcagcaccagagagtagaggcccagctcagccgccggcaatgctgtcttgatgcccatagcctggacagggcttgaggaggccgcaagggacctggcacactgcccacctcaggctctggggtccggcttccaactgtccgtccgtgcgaccggctgagctctggggccacggtggggtgtgtccagccctggggtccccacccccttgaggttatgagcggtgagtggtgacagc

SEQ ID NO: 151734 - DNA, 951 bp, Homo Sapiens
aacgggtgatgcggttgaggtgcacgcgctcgaggcggtgcaggggcgtgaagaggtcgtggggcagcgacatcaggttgttgtgggacaggttgagctcctccagcgacttgaggtcgtcgaaggcgttgcgctcgatggtggctacctgggcgtgcatgagccacagcttgcgcaggctggtgagaccctggaaggagcccgggcggatcaggtccagccggttgcccgacagctccagctcctccaggcgcaccagggccgtcaggttggggatgtccttgaggttgcacatgcccaggttgaggtagcgcaggttgaccagcccctcgaaggccgcctccgagatgtattccagccgcttgagctcgcccaggtccaggcgccgcagcgagggcacgcggttgaaggcgtaggaggggatgctctcgatggggttgttccgcagccagagctcccgcagcttggacaggtactcgaaggcctgcgtgggcaccgtggtcagccggttgtcaaaaagctccagcgtgttgaggctgggcagcccgttgaaggcgcccacctcgatcttgcgcaccaggttcttgctcagctgcagaatctccaggtgccgcaggtgcttgaacgtgtccgtccggatcacctggatgccgttctcttgcaggttcaggtaccgcgtgttgaccgggatgctggctgggacctcggccaggtctctccgtgtgcagatcacccggctggcctggttgctgcaggagcaggccacggggcaggaggtggccggcggggagccccctccggcggcagacgtcacggccactccacctccaccggcccccaggggtggggagaagagccagaggaagagcaatgccccgtggggccaggacatcctaccgggcggcagcggggggcacggggagccgcgggcacgcgccatcctcaatgttc

SEQ ID NO: 151735 - DNA, 935 bp, Homo Sapiens
ccggggcgcagtttgcacccgtagaccgtactcatccttcagtttcttgactgcagctgcaccgggccattttcagcctcttgcctgacggagttgcccttggcaagctgcacagcaccacagcctgtgtggccagtcgctgcccggctgccctggcctccctctcgggctccctgcagctgccggcccagggttgccctgaagacacgggggtgaggctcagcaggcccacgatcaggggttctctctgctccaggatggggccccaggtgagatggccactcacacacgcgtcaccagtgcctgctgccgggcctcctgatgctccagcgcccacttcacttccccctgcaggccgctccccagcctgtgctgctcattctcggggttcatggtgttcttgggctgcacctggaatctgtggtcatcagagtgtccaggcacctgggctttgtgtctgagctcttgggctgctgcccggggatgcctggggtcagactccactgggactgcacagccctggctggtgccatctcctcgcagctccagctccagtacccggctctccagccgaaggatctcactcttcagctggaagatttcagcctcatgctgctcatgtaggtggtgggttgtgatctgaatgtcgaccagctccttggagatctgcagctgctgctccttattgagcgctagatctggtgggacctctgcttccaagctggtggcccacactgcggtgcccccaggagctcctggcagccagtccttggctcgtagcacaacattctccacccgccgagagggaggtccaggcctggggcctgtggtggctgcgtgctccataggctagggaacctggccagctccgagcccggtgctgcctccacgcccggcttccccatggctgctgctgccactggcctgctaagtcg

SEQ ID NO: 151736 - DNA, 1311 bp, Homo Sapiens
ctcagcctgcaatgtgctcgggtcttactgtgcatacgcgtcagtatccttgcgtgctcataacaccgatattgcggcggacccgaaatgggtgaatcgcgctttcccgcttgctccctcagtccgtcctaatgcatactgttgtgcgtaatgtgccgtcctctcacgttgctttcgcctgttaggcgcgcttagtgaatacgcttggtctccttatctgcggaatggattgtggaatgacttcattgttttccgctgctggaaatgagtgtagctcccgtggacagtccgccgggtttccctggcgtctccccgttacttgtcgcgttttcctatgcggcgtcccgtccggcggcatatttcccgtcgtcccatctgcgttcgggcccttctcacgtcggcttccaattcgtcgatccgattctctctgaagtggccccactcggtgtatgtaggtttccgtctccaacgtcagttgcggtgtgcaactggcacttggttgttgcgcgtcgcccatgcgctatcgccgcgcggatttcctgtgcccacgtggatttcattccggtgatccaccgacaataacccagggcaatgggttcaatgtcgcacgggtctcgtgcctgacgtgtttgtgcctcttttacaaaggcggttgtgcatgggataagtactgcaagtaagctgtggcatcgtaaacgtccttgtcctgcttaaaggtgtcattgttggccgatgacgtgatatggtctcaatatacgcttactaagtttgcttggaatctacgtttgtcgggtgtggtatgtagggaattcctcaaacgatttcttgcttcgcctttcaatggcccataggctaccggtcaccagttgggtctcgcttggaaaccttctctggtccttgatccacacatggaatgaccagcagtcgcttcaatagtgccctggccgcagccgcaagtctggttgggcctttgcacaggtatgtccccgtggcatctggctagggcttcatgcatgctggatcaatgcccagttatttgtcagatccatggtgcctgcctcctcgagctcaggcatgaggctcttctttcctatctgggctactgcgtggtcaggggtctggatgggcttcctgggccaatacgaggatggcgcagccgagccgggcactgtggggtcgggctgtgcgtgcctgtacggggggtgtgtgcctgtgtcggggaaggggtgttgctggggaactgttgctctccgtatcacggcggcagcgacagcatcgcccggcagttcgcagtacccgctctcatcgccc

SEQ ID NO: 151737 - DNA, 1088 bp, Homo Sapiens
  misc_feature (117)..(117): n is a, c, g, or t
  misc_feature (268)..(268): n is a, c, g, or t
gtttccccccccggtttgtccccgggccttgctgaaccgttgcctgtttcaaggggagccccacggaggcccatttccctaggtttgcgctggacgttcctgaacccgcccttgttntgaagacccggaattcggtatttccgggagtggctcccccctggaagcccctgcaggatgaaagtggctgactacttcgcccatcgtttcatgtgcatgcgtggcccaaaaggtgtgaaagattctggccactcgcatttccacgccttcntgcttcatgtaggcatagcacatggtctctgcaacacgtttgccttcatcgtagcaggcccgaggtcctattggattcacgtggccccagtaatcctcactttgagggtggacttcaggatctccatacacctccgatgtggaggccaggagcagacgggcaccgactcgttttgccagccccaacatgtttaatgtcccaatcgtattggtctttaatgtcttgataggattatacatgtagtttggaggggaggctggagatgccagatggtatatctggtcaacctcgatgtagaggggctccaccacgtcgtggttaatcaactcgaagttctcatgtccgatccagtgctccacgtttctcttcctgcccgtgaagaaattgtccaccacggtcacctcgtggccgtccatcatgagtttgtcagttagatgggagcccacgaaccctgcgcctcctgttatcaaaattcttttccgatccttttctgataaaaactttactggtgggtatttctgggtaaagcttttttctaaatctctgattttctctcttagtggttcaaccatctcttcaatcttgctttcaatttttagttcaccattttcctggatagacctgttgagtagaaagctcatattaacgaagttgccccaaacagaggcgacgtaggccagcaaggcgatgcccagcagcagcttcatcctcctgcggttgacggcagacacgaggcgcagcagcgccttgctcaccatccccgggagccgcgcgggtccagggcctgccgcgcgggggccatcccgggaattccggaccg

SEQ ID NO: 151738 - DNA, 725 bp, Homo Sapiens
cacacctccttcgccttcctgtatctgctgctcaccgtctacagcatgcgtagacacacctccaagatgcgctacaaggaggatgatctggtgaagcggaccctcttcatcaatggaatctccaaatatgcagagtcagaaaagatcaagaagcattttgaggaagcctaccccaactgcacagttctcgaagcccgcccgtgttacaacgtggctcgcctaatgttcctcgatgcagagaggaagaaggccgagcggggaaagctgtacttcacaaacctccagagcaaggagaacgtgcctaccatgatcaaccccaagccctgtggccacctctgctgctgtgtggtgcgaggctgtgagcaggtggaggccattgagtactacacaaagctggagcagaagctgaaggaagactacaagcgggagaaggagaaggtgaatgagaagcctcttggcatggcctttgtcaccttccacaatgagactatcaccgccatcatcctgaaggacttcaacgtgtgtaaatgccagggctgcacctgccgtggggagccgcgcccctcatcctgcagcgagtccctgcacatctccaactggaccgtgtcctatgcccctgaccctcagaacatctactgggagcacctctccatccgaggcttcatctggtggctgcgctgctggtcatcaatgtcgtcctcttcatcctcctcttcttcctcaca

SEQ ID NO: 151739 - DNA, 1506 bp, Homo Sapiens
gctgcttctccagccagaccacggcaggcttcccaaaggcacgctttggctctctcattcaccaggagaataagccaatgcatggcaagcactaaatcttagatcctgaagactcagccctcgagcaaaagacatgcacctccccactcaccgggccctggaagaggagggtgctcctcttagaggcccctggaggccaggcgtgcctcagaggggcctttcgaggcagctgggaggcagatcctcacactctgccctcctctcccccaggtacaagatggtggtgaccccccggagggcggcggtggccatagccggctgctggatcctctccttcgtggtgggactgacccctatgtttggctggaacaatctgagtgcggtggagcgggcctgggcagccaacggcagcatgggggagcccgtgatcaagtgcgagttcgagaaggtcatcagcatggagtacatggtctacttcaacttctttgtgtgggtgctgcccccgcttctcctcatggtcctcatctacctggaggtcttctacctaatccgcaagcagctcaacaagaaggtgtcggcctcctccggcgacccgcagaagtactatgggaaggagctgaagatcgccaagtcgctggccctcatcctcttcctctttgccctcagctggctgcctttgcacatcctcaactgcatcaccctcttctgcccgtcctgccacaagcccagcatccttacctacattgccatcttcctcacgcacggcaactcggccatgaaccccattgtctatgccttccgcatccagaagttccgcgtcaccttccttaagatttggaatgaccatttccgctgccagcctgcacctcccattgacgaggatctcccagaagagaggcctgatgactagaccccgccttccgctcccaccagcccacatccagtggggtctcagtccagtcctcacatgcccgctgtcccagggtctccctgagcctgccccagctgggctgttggctgggggcatgggggaggctctgaagagatacccacagagtgtggtccctccactaggagttaactaccctacacctctgggccctgcaggaggcctgggagggcaagggtcctacggagggaccaggtgtctagaggcaacagtgttctgagcccccacctgcctgaccatcccatgagcagtccagcgcttcagggctgggcaggtcctggggaggctgagactgcagaggagccacctgggctgggagaaggtgcttgggcttctgcggtgaggcaggggagtctgcttgtcttagatgttggtggtgcagcccaggaccaagcttaaggagaggagagcatctgctctgagacggatggaaggagagaggttgaggatgcactggcctgttctgtaggagagactggccagaggcagctaaggggcacgaatcaaggaggctccgttcccacctctgaggactctggaccccaaggccataccag

SEQ ID NO: 151740 - DNA, 857 bp, Homo Sapiens
  misc_feature (257)..(257): n is a, c, g, or t
gggccccgctctttggggacggggcccgttcaccggcccggcagttacccccggggggccagaggagtcctggtccccggcccccatcccctttcacctccccgcgtacttcaggccccggctctgcgcttccatctccgccacgcgctcgcgcgagtcctgaacagcgcccgcaccgctcgctggggcttcccaccgcctcggacatgggactctgagccgcgcctcggaacgtgtccagggccccgcgaacaccntggggacctctgttatccaggccgcatttcctgtagggatagccgcagccactgcacctggaggtaacagcgatccgcgatctctgcgtgggcagaatctgtcccaagtatgatctacaggtttggggaagacgctcaacgttttgagccctgggggaaggtaggtagctgtacctcctctgttaacctctttagagcagatctactggcctgctggtctgggaggccctggggttcttgtggcacgccctggtgttcttgtggcacaaccgcggcccgctggggttcagtggcaactgatgcctgtgctccaaatgtcatctcttgggtcgggtggccaatgcagaagcgctgagtatgggtggctaacagagctgaggagcggaaaaccatgtcacaggtcccacagggcaggagcgcaggctccccagagtgggagtccatgggatgggacccgtttcctgaaaccagccaagacctgcagaagggatcaagggcaggggaaaggcagaggaggatgaaagagacataaagccagaggcagagaggaaaggccgtgtctattaggtctgtgatccaacgacttcggaccgtacagct

SEQ ID NO: 151741 - DNA, 646 bp, Homo Sapiens
  misc_feature (14)..(14): n is a, c, g, or t
  misc_feature (512)..(527): n is a, c, g, or t
gagactgatgtctntaaggaatgagtgggcaggaggtgggggatgggcttctctgggttccatctgatcctgcctcagtgctttccccacggaggctatgggaggcagacaggctggagagggccactttggcccactttgtgtcagacgccacctggggacgtggacggtggcagtgacccaccagggctgcacagcttcgcctcgctgtgccattcactttccttaccttgactcctggccccttaagtcctcaaacccattcccgagcttcccctcttagatgaaacagtgtccctctcaccttcatttccctccaggagacaggctcaagtgcagtaagtaacaccaaggctggggacaggggacataaagtcaacagtgcagcgcccggccccacacgcttagggcagagcaggtgctgggagagacctggggcccagagttgcatggtggccacttgtgaccaggactgtgcctgaacctgtctgtgcctcagttactcaccatgnnnnnnnnnnnnnnnngggtggcagggctgacaccaaagctccaggagtgttcaggggccatggtggtcctcaggacccctggcggctcggctggggaagctgagaaggacagatcctggaaggaagctccgcag

SEQ ID NO: 151742 - DNA, 790 bp, Homo Sapiens
tgaggcaaggtgattggtggtggtagaaagagagcagattgtactgtgatcctccaagctggctgaaaggcaagagctgcattacttgtccgttaatgtggagcttctgttctgcgttgttcgacatgttccaggtgcttgctgacaagcctcagcagtgacttactctgaagctagccgtggcgagacacgctccttctggcgtgtttgtcctgtcaaggtgagggtcagctgtccggtgatcccattgtggttgtggtatgttgaatagggtgccctgtggagcccatgctctccgaaggcagccgctcgttgcatccttccctgtatgggaatccattggcgcttcgggagcaagtccttgcccctgctccgccttgatcgttaatctcaggtggatgtgagtgtgcagatgcctctgttagcggtgctgaggtccagtgaggtgcctttgcttcatctgttccgtgtcagtctgccattcttcaatgccttgttatttctcctgcaagctatgtcaaggaagtggtaaaatataaagttcgttgtgtcgtgttctcaaagggttgataatattttctggcttctttcgttctgaagttttgctgaatgagtagctcccaatcaatgcttcctcggttagagacaagctgaagaatcttaattccagccagaagttgataagatactttggattagatcacataaaatctagggcgcagaaactggatgcacccgcggtcgcgactgccaccgctcacggacttagcgccctccggagaaaaaggag

SEQ ID NO: 151743 - DNA, 886 bp, Homo Sapiens
tctgagagaccttcatggccgattgattgggctagcctttcggctccatttgatgttgcccgtagcattgtgcgccatgcagccagcactcgggaccattgtccggcgttccccagcctgtcaggccacggtgcagccggggtcagcccttggttattcacctggttcaaggccaatccactgcgttcctttccaaggagtctgcagcaacctgagaattgtcaccctggacagcataatggaagacggtctctcccttgtagtcggtgacatccatctgagtgtggcagtactgcaccagctccaccaggatctccccatcacccttgcggcaggccaggtgcaggggtgtgcagccctcctcgttctccgcgcaattggcacagctgatgatacggctgtgatggaagcactcgcggatccctagctccacagccaggtgggccactgaccagctggggtggttacggatgaggtcggtcaggtgctgcaggacctcagtgtgcaggacctgaggggagctctcatagaagggtagcagctgggaagaatactgatggaaattcactagggcgtcagcctccaactccagctggaagagtcggaatccactctgtgagttcctggggttgaccaggacgcagtcccaggtgcggttgggagtgttctggaacagaatcagctgcccttcctcccgaactcggtcactcgaggtgtagtcggctacagccacctccttcacccggaatgggttagagaacaagttggtgacgccactgaaggtattgaccaggcggccaaagaactgcatcttctgcggggcaggtggggaggccccaccgtcttccccctctgtctcggcttactcagcacttctacttcctcc

SEQ ID NO: 151744 - DNA, 937 bp, Homo Sapiens
acgcagatggctgttgatcttttctgcaacaaatccaggagtttctcctttttgttttataattgctccaatagatgctttaggatttaactctctgctttttaaagcagaatcgccatcccaggtgtgcaaccacgaaaaaattagacatccgtgagagacaatgccctccatggcccagtttccaggcagagagaagcagctctgggctgaccgccaaggctccggcccgagagggtctttaagtggagtaaccagtcttcaagaccccgctcccaagccaccgacgcgctgacgctgcagccctggacctgctgggggcctcttcctcggacccgcatgctgacagcgggactggcaactgggcagaggtcgaccccgggtccgcacagcacctcccgagacccagctcgcagctccctcacttccggctctctggaggcgggcccggccagtgccgccgaggccagcgcggcgagctcctccccagcagcggcgggacggccacaccctgcgctcagcgcgggctcgggtggggtctccgctcctgcgccctgcgccctgcgcgccgcagccgcaaccccgacggcgccccaaacgctgttgcgccgcgcgccccgcccagcccggcctcgcgctggtcccggtctcgccccgcagccctcgatctcccgtgacttcctcggccaggccgcctgcgcctctgggaccatgttgcgctggctgcgggacttcgtgctgcccaccgcgggctgccaggacgcggagcaggcgacgcgctacgagaccctcttccaggcactggaccgcaatggggacggagtggtggacatcggcgagctgcaggaggggctcaggaacctgggcatccctctgggccaggacgccgaggaggtgggtcgccgccggggcgccgcctgagcgatcccgggaattc

SEQ ID NO: 151745 - DNA, 1154 bp, Homo Sapiens
tccgtgggggcgcgttatggtctctcaaggtgtggatgaaacgcctctccgttgttgcgaatgcgcgggtttaaggacgggcttctttagggggccaatctttccacgggggtgtgcacggccccccggaaagctcggaaaggagggacagggtgggggccccaattccaaactggggggtaaatttccccttccaggggtgccaatggggtaagggtgggccagattggccccggttcagttcggaagcggaaaggggtactgtcggagtagttgggccatgcgccgggggcagtgcagggcagtccaggtcggcccccagacgggttgatgacaaggcggcacaggtgttgcaggctgcgggcactgcttctgcgtacaaagggctgcaaccagttttaggtgtacagcagtggctggtggaggagcaggcagtgctgggtcactaggcgcatcctccttaggcataggcagggccggggtgggagcaggatcggggctgtcgcttcgggtatcagcagtgcaggaggccacatagtgctgcacaaggctgaccacatccggaaaggccaggatgcgtggcctggacaagcagttggagtccagacggaagctggagtcggcatactcaatgcgtacattggtggggccacgagtggttttcactgacagcgtgaacaggtagctggggtgcgtgctgtcacgtactaagaacgtgccttctggcatcttctgcaggtgttgtcgggcctcgctggccgtaatggaaccccaataccagccagattcccgaaggtaggagaaggtcttggctatgcacagcagatcctcctctgggtccagcacctttggctcactctctgtctgggctggggtaccctctgccacctcctcgaggaaggccccagcaggcaagggctgcatgactggcttgggcagttccagggacggggcccacaggggccgctgcccagtccgctccacagccagcaaaggacgaggtccctgaacgcagaggaccatgtccccgcggcagcggcgactccggagtggggactcggctggacggcggcggctggagggaaccagtgggcgcggagcgcgtgctgggtaggctcccggggcgcgcgggcgcagacagggactgagagcag

SEQ ID NO: 151746 - DNA, 774 bp, Homo Sapiens
tcccatcctctgacacatggctcagtataatgaagccacatgcggcctgggggcatttacctccaagtttgttgtgacacctcccctctcccatgccttgctcttgctggctcttcctgggccagctgccagaggtactgcaggcaccaggatgcctggaggagggacagtgggggtcccaagtccagctggggctgatgtcccctccagggtgcgactgggtgaggtttggcagattgccccgtacagtcagagctggaaggggtactgtcggaggttagtcggccatgcgccggggcagtggcaggcagtccacgtcggctaccagacggttgatgacaaggcggcacaggtgttgcaggctgcgggcgctgcttctgcgtacaaagggctgcaccagttttaggtgtacagcagtggcagattcccgaaggtaggagaaggtcttggctatgcacagcagatcctccatctgggtccagcacctttggctcactctcatgtctgggctggggtaccctctgcccacctcctcgaggaaggccccagcaggcaagggctgcatgactggcttgggcagttccagggacggggcccacaggggcacagctgcaccagtccagctccacagccgagcaaaggacgaggtccctgaacgcagaggaccatgtccccgcggcagcggcgactcacggagtggggactcggctggaccggcggcggctggagggaaccagtgggcgcggagcgcgtgctgggtaggctcccggggcg

SEQ ID NO: 151747 - DNA, 819 bp, Homo Sapiens
gtcttccatcctggtcacagcctgcatgaacctgtcaatcttctcagcagcaacatccagttctgtgaagttccagagagcttgggaggaccacaggggtatagagagccaggccctgcacaaacggctgcttcaggtgcaggcctggggctgtgaacacgcccaccaccgtggacagcagcagctgggcctggctatcagccctgccctgggccactagcaggccctgtacagcctgcagggcagacaggaccttgtgcgcatccagccgggaggtgcagttcttgtccttccaaggaacacccaggattgcctgtagcctgtcagctgtgtggtccaaggctcccagatagagagaggccagggtgccaaagacagccgttggggagaggacggtggccccatggaccacgccccatagctcactgtgcatgccatatatacggaagcccaagaagttggccagcatcccgaccattgcggccctcaacttgtcttcggtgtcaagttttgcagcgactagcaccagctggtcctgtagggccttttcatccacaggggatgtcttggcctgaattggagcaggtatgaaggtggggtctttgggcttcccggcattggcctttgccagctgctcacaggtactctcattgtggatgacgaggtggaaggggtgtatgtacacccggtcacctgcagccaggccagcccaggccaggaggcagaggatggtggccctcaggctcacaccggcaggagccatctcagactggggtgctcgcttccgcatacccttctgctgtagtacccagaacaacg

SEQ ID NO: 151748 - DNA, 507 bp, Homo Sapiens
gcggccccgctagctggccgtcccgcagggccccggtgcagtgcagctgcttgacgcgctccaggacgcagtcgcccaccacctcgcccaggaagttgtccaggtagcagaagcccacctcgtgcagacagggcacgatgtactccagggcaattttctccaggtccagcctcatgatgtgtcccaggggcatctcgcccgcagaatcgaggtccgggatccccagcgtgcaaccagagagggaacgatctacacgagcgcgaagccgaggcgcggggagcgtggcccggggttcagaaacctgcggctgccacggtacccgagccgctgcagcgtcggggacaagggaaagtttctcgcaactctcgggagaagggatctgccttcgggaaccagcgggagtggtgcggagctccacgacccgtttccggactggcccggcgagcagtgcggcgcaaggagtcggagggcgccttttggggatgggaagccaccactgccgcgaca

SEQ ID NO: 151749 - DNA, 1082 bp, Homo Sapiens
cggcgctgaggcggcggagcgtggccccgccatgggcttcctgcaccagctgcagctgctgctctggaagaacgtgacgctcaaacgccggagcccgtgggtcctggccttcgagatcttcatccccctggtgctgttctttatcctgctggggctgcgacagaagaagcccaccatctccgtgaaggaagtctccttctacacagcggcgcccctgacgtctgccggcatcctgcctgtcatgcaatcgctgtgcccggacggccagcgagacgagttcggcttcctgcagtacgccaactccacggtcacgcagctgcttgagcgcctggaccgcgtggtggaggaaggcaacctgtttgacccagcgcggcccagcctgggctcagagctcgaggccctacgccagcatctggaggccctcagtgcgggcccgggcacctcggggagccacctggacagatccacagtgtcttccttctctctggactcggtggccagaaacccgcaggagctctggcgtttcctgacgcaaaacttgtcgctgcccaatagcacggcccaagcactcttggccgcccgtgtggacccgcccgaggtctaccacctgctcttttggtccctcatctgccctggattcacagtctggcctccacaagggtcaggagccctggagccgcctagggggcaatcccctgttccggatggaggagctgctgcttggctccttgcctcctggagcagctcacctgcacgccgggctcgggtggacgctggtgccggattctcactgtgcctgagagtcacgaagggagccctgcatgggctaccgggatgctgtctgcagtgggcagtgctgctgcgcgtgccaggcgcttctctgggctgtctgctgagctccggaaccagctggaccgtggccaaaggtctcccagacagctgggccttggatgcccccaacggctcggactcctcgccacaggcgccatccccacggaggctgcaggcgcttctgggggacctgctggatgcccagaaggttctgcaggatgtggatgtcctgtcggccctgggccctgcta

SEQ ID NO: 151750 - DNA, 1102 bp, Homo Sapiens
  misc_feature (208)..(208): n is a, c, g, or t
tcccatattagggcccttcaagggccctccacccctgggccccccacccccattggcctggtttttgggggcctgccctgggttccccagggaacatgccttatttccccctcaatgccttgcccatagaccccctgggggcccctcccccctttttccccaggaggagctccaagtcacccaaagggggccctttccttcacccccncggagcagaagcacccccagaggccaagcagcactcccaggccccatcccacacacatgatgccctcacctccaatccggaacaggggattgccccctaggcggctccagggctcctgacccttgtggaggccagactgtgaatccagggcagatgagggaccaaagagcaggtggtagacctcgggcgggtccacacgggcgtccaagagtgcttgggccgtgctattgggcagcgacaagttttgcgtcatggaaacgccagagctcgtgcgggtttctggccaccgagtccagagagaaggaagacactgtggatctgtccaggtggctccccgaggtgcccgggcccgcactgagggcctccagatgctggcgtagggcctcgagctctgagcccaggctgggccgcgctgggtcaaacaggttgccttcctccaccacgcggtccaggcgctcaagcagctgcgtgaccgtggagttggcgtactgcaggaagccgaactcgtctcgctggccgtccgggcacagcgattgcatgacaggcaggatgccggcagacgtcaggggcgccgctgtgtagaaggagacttccttcacggagatggtgggcttcttctgtcgcagccccagcaggataaagaacagcaccagggggatgaagatctcgaaggccaggacccactggaagggaggcagggcggccaggtgggtccgtcccgcgattccgagcagccagcggaaggggggaaactcgaggccccaggaacgctcgccgtgggcggagcaggcaggggaccgaggcggcccctgctgcacgcggctcgtttttctccccatattcggatcccgggaattccggcccgtcccaccctcccgtgccacagcatctgcc

SEQ ID NO: 151751 - DNA, 1145 bp, Homo Sapiens
  misc_feature (267)..(267): n is a, c, g, or t
  misc_feature (349)..(349): n is a, c, g, or t
ctttggaaggggcactttgcctaaccaaattcttggggtggggcaggcccattttccagggcccactgtgtttcccagggcattcaaggttgttaaggccctttggagggccaaagaatttggaaggttccttttggcccccctttgggaaccagatgataggctcggcctggtcacttttttgccacccctttttcccttttgaagcccccggcagaggcccaaccaggggattgagaggagaaagaggtgcccagtagattccanctgaccctttggggtcaagcaaagcggcttgcccctgggggggaacgggccaggggggctggaaggagacagatggagacancagccccacggggatggtgtgaggctggaggtcgcacctgctgtgtgggtactgcccagttctgtgtccttctcctgatgcccgctggaggtcagagggctgagggctgccaggtcagaggaggactccagggggccaccatctggattccttgggatggctctggggctgagcgtctgcagggcttgctctgaattctctcctggggactctggcgcctgggtctcctggacaggcatggggtaacttggctccttctctctgcagctgttgtaggggatgctgtgggccgcagcaggtgtggggggccctggcctctcagcaggaagtgacggtggctccagtgggtctgggggacggtccgaggtccgaggctggtagctctcgtagacagaggccacttcgtccgcgagatcaactagctcacagcccctcagtgccgcaatgaagtactccacccagccgggccgccgctgaagggtattgaagagatgccagagggtgtcccggttccctgagagtgtgcaggtggcccgcagtcgatcctggtctcttgctgtgaggcagggcaggtaaggcagaatctctacaacatccacattgcaaaaattgctgaaattgcggcagatatacttataggtcttgtcttcagcaaacggcattgctgctcagattctggagagagggctctggccccatgaagggtggatggactgagaggaaacgagactcgggtacccccggccctgagacctggcgaccgccgccatccagggaattccggaccggtaccagc

SEQ ID NO: 151752 - DNA, 707 bp, Homo Sapiens
ccccccacacttcgccatacggccttttcccacacactccaccaaggcaacctgccgtgccactgtcctctgcaccaggaaggggagccctgagccactccctgtggtgcagtcactgtccaggaggtcccccaacatgctgtcgccctgctcagatgctttcaggatgagactggactctcccagctcgctgtgcaggccacgctgcttctcctgcctccgtcggacatgccacaggcccaggacacccagggccaccagggccagcaaggccagcacggggcccaggatcagggccagctggccatctgttcccggctgctccgaaggaggttgggtggcctccagcaccagggacacgttgtggttgcagaggtggctgtcgcagcagtagtggttgacgaactcggtggggcgccccctgcagagctccctgtgcaagttcccgcagccccgatgttcctgggggtgcctcccctcctcccgcaccagcactactgtgcaccaggccccccggcaggtaggccccttgcaatgtgggctctcacacgtgcaggtcaccagcgggccccgagacggcttcacagggtctcctgggtcaccaaggccatcagcagcatcagaaggcctttcctgggggagcccaaggtcatggtccctgcagagaggagcaagagaggtggagtaagagccatgaagtgtgacag

SEQ ID NO: 151753 - DNA, 866 bp, Homo Sapiens
attttaggtggcagtcgcaacccatactattcggacagatggcacagaaaccgctgcgcctggagaagtggataccaaaaaatgtggttctgctttggtttccagtcttgccacgggcttgaaaccaagataccattttgctgctttggaaaagacctattatgagaggcttccatatcgtttagcattcagatcttctcttctccctgactgcaaggtctcagcagtttcggagactcctttgtaaagtatctttacgcgttcagtacttgttcccatgaagctaatggatgcagcagaactggtaaaacagcctccggatgtcactgaaaacccttacagaaaatctgggcaggaagcatccataggaaagcaaattcttgcccctgtggaagaatcagcctagtcagctttttccttttgcactttacaatgacacagcagggacaggaagcgttcatccacaggtagagatagcaaatcttctcctcatcctaagcagcctcgcaaacctcctcagcctccaggaccctgtctggttttgccttgctagccctgaagtggaaaaacatttggtggtcaacatcggcacacattgctaccgttgccctggccaacaggaggcttatctgatgagcatgtcctcatcctgcctatcggacactaccagtccagtgcctggagcctctccagcacgacgtggtacgaagaggtggcagcaagttacacggccactctgagaccggcactctaagaatcgaggggaatggcgtgtagacttctgacgagacattctcacgaccatcaacttccactacaggtcattcctgtcccactcaggcgctcctctcctgctgacttaccga

SEQ ID NO: 151754 - DNA, 989 bp, Homo Sapiens
ggggttcagaacccccccggggaagagatccggttcttaaaacttcagggaactggcgtccgggggcctttcaggggcccaagtggggtggcccaattcctccttaggtaagtggggggcccccgctccaagggttgcccgaggccccaagttccacccaggaaatgacttcgaatccaggctcgggctcttcgtcgggtggcgggggaaggtcggaggcggctccctcagggctgtggctgcagggcaccccggaagaagttggtcactcgggagaagctgctgaaggtggtggagtagggatcctggaggaagcgtgacaccacattggagctgtcctggtcaaagagctgcaggtggtggaaggagttggagagagcagaggagtcgtgggggaagacaaggtagaggcgggagtcctgcggggagctggccaacagcaggtagcggctgaggacgcggagcagggcgcgggtgcccccgcggtggaagtgcagtgcgggcagggaacctccagcctgggtcaccagaaccaggtaggcccagctgaggcctggcttggagcggcggatggactttagctcccccagactcactgagaaggcccaggagccctgggggcagctgggctctgcacctctcgtgggctctgagtggcagagctgtggccgcacagtgctgatgacagcccagtcaggttcatagccggggtcaaaggttggttcctcctcagaagcacatgagtcacccccactggagtccttcttggagaagaggatttgggtggaatctccagcctcctctacaggagcccagtgcaggaggacgtcattgtccttttccacgacacggatgacaccagcgatgagagagtctcggtcctgatacttcttagcgctggtgtgcaggtacactccgcccttctcaaacaccatcctgtagccggctccttccatagtcgccgccgaagatcgcaagaattccggacc

SEQ ID NO: 151755 - DNA, 885 bp, Homo Sapiens
gggaagattctgcgttcctctgtcagccatgcctggccctcttcgtgaaggctcactgcgttcttcccctgagtcgtcattgtcaggtggcctggaggtcaggcccgtgtccccggggaggtccacaggggtcgtggggagacaggcatttcagcccaggccttgagccgtgccgtcttctccagctcctcctccaggtctaggacacacatctgggcctgcaggatgcctgcccagaacactacctgtgtggacgtgctccggttctgctttgggctccccggtagatggctgttcactggtgaccctggtgatgctgtgttctgcctgtgctccctctgggcagaggggctccccaggtgtgtgagctccacaccggagccccagggaggagcatcttgtctggtagattcaggagggtcagtggcccgggtttgctcctggcaaggctccagcccgtcctgatggacccagctccccaggtgtgtgagctccacaccggagccccagggaggaacattttgtctggtaggttcaggagggtcagtggcccaggtttgctcctcgaaaggctccggtggatcctcatggctgcacgtttcccttgggcactctcctgggtggggctccaggctgtctcccaagtacaggttgagaatttccatgggctgggggtggtcagggagtctgtagtcacccatcatccactgagcaaaagctgcccaggagtgccccggagcatctgctttcacggtctcactgtgtggactagggggagcactggccgctggagaaactgggaatccatatctaccctccaaaggacccaagaatggatggcttggcctgggctccccaagagcacttcctggctcacagtcggct

SEQ ID NO: 151756 - DNA, 1058 bp, Homo Sapiens
gtggtaccggtccggaattcccgggatagcggcctaggggtgaaaggacagccagggttagatgttctgaggaggcgggagcaaccgagagagcacgtgagcatctgtcctttctacccgttcctctttatctttagtgttcagtagcagcggggatagcccggggcccggtgtatggccacggagttacagtgtccggactccatgccctgtcacaaccagcaagtaaactctgcctcaaccccaagtcccgagcagctgcgacctggcgatctgatcctggaccacgcagggggaaacagagcctccagggccaaggacagccagtagaggtgacttcatgttttctgcggatcgtttgatcagacttgttgtggaagagggattgaatcagctgccatataaagaatgcatggtgaccactccaacagggtacaagtatgaaggagtgaaatttgagaagggaaattgtggggtcagcataatgagaagcggtgaggcaatggaacaaggtttacgagactgctgtcgatccatacgaattggaaagatcctgattcagagtgatgaggagacacaaagagccaaagtatattatgccaaattccccccagacatttaccggagaaaagtccttctgatgtatccaaattctcagcactggaaatactgtaattgaagctgtaaaggttcttatagaacatggagttcaacccagtgttattatcctactcagtctgttcttcactcctcatggtgccaaatcaatcatttcaggaattttccagaaatcaccatttttaactaatgaaagttcctccctgttggcacctaacacattttgggacagaaacacctttgggaaccaaactaaggttattttaaccaaaataaatgggccttattggaaaatcaacaatccctgggtttggaattcttccaatttgggttttacctggatccccttttgagggtgtggcaaaagcaaacattggggttcaaaaaggcctctctttaaccttccggcacggtgcggtaaattctcggaggcttatagc

SEQ ID NO: 151757 - DNA, 818 bp, Homo Sapiens
tggagactgtaggccatccagtctggcacagatgcggcttaggccacttgggcaccgctcagaggctctgatgtgcagaggacccttgatcttctctgaccacagcaggggccagccccacgttgccctggccagccctgaacttgcccacagtctgtcctgaggcagtcagcaccgtggcaccaggggtgatgccactggtgggaagggggtccaagaaccggacagggaagaggcgcttgcggatgacgcccatgtggtgggtgcgggccgtcagctcctggccaatgtagcagcctttggtgaagctcacgccgttcatgaaggccaggttggactccaggggcagggccaccccaggaggcaagtctcggaccccctcaggaacgccttgcaggtatcggtgctggtgataatcccacaagtccccgagccggcccccgggcaccagggctgggccttcatcctgggtgaggagccgccaccccatgcgtgctgttcgcgggtcgcggatgaggatggcggcagcccctgccctctcctgcagcgatgcagccccgcaggcctcaggggaactgggcaacaccgcccacactcgcagctccgggtgcggctccaccgtgaccttccgccggatcctgtatagcgcgaggtgcttctgcagcgcgccctgcaccgagctgtcacactccagaaggaagccagacacctccgagtgttcctggagcccgtacaagatgacgtcatagagcgtccggcctgcacgttcaggaagtgggcgtagcccgcgcgcgcagcaggcggggcccacgcggccg

SEQ ID NO: 151758 - DNA, 819 bp, Homo Sapiens
tcgtcctcgcccttcatgagcttgtgcttgagctggtcaatctccagctgcaggtcacggttccgcatgagccgggcgcccttctcctcactctggtgcgccaggcgcatggccaggtcgtagttctcctccttgcagcgcttgagctcgcggctgccggcctcgcactcctccttgagcctctgcacacgctcctggtgcttgcgcagcaggctgtccttcacccgcagctccttgatgaagtcatctttggagctcagcagcgcggtcaggtcctgcaccttcttctgcagcttcatgacctcagtcatcagcagctgagtcaggcctgactccccggacgcgtcgatgatcatggagaagacgcgggccggctccttgcctgtgaccttcttgtacagctgcgggtagtagagctccaggctctcgaggaaggccacgtagcccttgtggccggtccgctgcaggatgtccaggagcacacccactttccgtttgcggatgaccaggttggggtcgctgagcacctgctcctcatcatcggggttcaggaccttgcactgccgcaggtaaggtgtgatgcgtgaggggtcgatgaccgaggtgagcgtcacccggaagccctccaggacgctccagcactcgtcatcgttctcgtagtccgacatggcctcagcaggcaggctgagggtcttccaggagccacctgcactgcagacacaccaggagcctgggccgcggagcctctgggagatgctgcccggggctgcagggagggaggagcacgccggacgcctgtgcacttcctgatgggttctg

SEQ ID NO: 151759 - DNA, 818 bp, Homo Sapiens
ggtgtctcccagcagtcagttgtgctcagaaggatcagttacctggggacactggacacatatgtgcccatgatgatgaggacggtgcccacgaggaagcccaccaggccgatggccaggcccagggcacagaccagggtctccatggcatctggtggtggaataggcacctggagctcccaatgcctgaggagtggcgcatccaggccccagtgctccacctggcagtcatagacgtcctcggctgagggcacgaagggcaggtagtggaacttgcggaacaaatggtcaggctgggaatagaagctggtctgggccactccctcagtgacagtttggccgttgcgcagccaggtgatattgatcacaggggggaagatgttgtccacgatgcagatgaggatgttgggctggcccagctccacccgagacttggggagcacggtcacccgtggaggcacgttgatggctctgctgcggttggagcgcatccaccaggatgtccagatgggctttgattgcggcgatgccggccagcccgccctgcgggtcaaagcgggcaaagtcaccaaactcaggcagacgccacacggcctcgcttttcttcaggtccacagagaacagctgttcctcatcaaattcatgggtgaactggcccgaggcgccgtaagactggtagaaggcgggtccgtaggagcccatgtggtcagccttggtggcgcctgcctcctgcgggctcaggagggtcatcagggtgtggaaccccaggaccagccctgctctgagggccattgcacttctggtgctttaatcaaatc

SEQ ID NO: 151760 - DNA, 929 bp, Homo Sapiens
acattagaattttttccttttattcttgttcacatcttcgaagctgagcttcgtttcaaaaggaaggataccagaggcaggagggtcacttgggaggggaggtggaatctccctcctctagcccccttgctacctcttaacaggcttcaaagtcagaatacagccatcagctgagagcagttcattttggcacactgggaggccggctgtgcacaccggacctctctagtgggggatcaggtcctctgctctccagtggggcctggaacagctccagtgagatgccccagctgtgggctgggggtgcagcacagagcctcagctcccccaggaccctcagctgcctgaagaaaacactcacctggctggagggaaaaagggccttgccctgaggtatcaggtgggtggcaagtcatactgagctcccgctcagcaagaaaactaaacgcacagaagacagcaggaaaatgccatcctttaacagccaaaaatctgtccttcaggggcaccaggtgactccagcccctgggggacagaacaaacacaccatacctaccatcaggcaccagacgcctcaaaacgcctggagctagggccggaaaaggcgttaagtcaccttctctcagcagaaatgtgaagctggccttcagcttctgcccaggatggcagaaaccacattctgttggtggattggttgctggtgatggacagagccaaaggtcctggggttggccccaagagctgaaacggtgcttgcaggaatggctggcactccaagctgcctgaggcagcccagctgcactcaggtgacagtgacccaagctctctgggctcagggtttatggccaccatagcccaagcacatcctgatgcctgggtttaagtaatgtaccctcctttgttctggcaaaaagctagagaaaaaccac

SEQ ID NO: 151761 - DNA, 1114 bp, Homo Sapiens
  misc_feature (15)..(15): n is a, c, g, or t
gctggtaccgggtcnccggaattcccgggatcgactgctcaggtctgcaacctgggagctgttcccctggaggggctactgctcccagaaggcaaagggagagctctgcagggacttcgtagaggctctgaaggccgtggtgggcggctcccacgtgtccactgccgcggtggtccgagagcagcacgggcgcgatgagtcggtgcacaggtgcgaacctcctgatgctgtggtgtggccccagaacgtggagcaggtcagccggctggcagccctgtgctatcgccaaggtgtgcccatcatcccattcggcaccggcaccgggcttgagggtggcgtctgtgctgtgcagggcggcgtctgcgttaacctgacgcatatggaccgaatcctggagctgaaccaggaggacttctctgtggtggtggagccaggtgtcacccgcaaagccctcaacgcccacctgcgggacagcggcctctggtttcccgtggacccaggcgcggacgcctctctctgtggcatggcggccaccggggcgtcggggaccaacgcggtccgctacggcaccatgcgggacaacgtgctcaacctggaggtggtgctgcccgacgggcggctgctgcacacggcgggccgaggccggcatttccgcttcggcttctggccagaaatccctcatcacacagcctggtactcaccttgtgtgtccctggggacgtaggaagagtgcagccgggctacaacctcacgggggctcttcgggggctcccaaggggacgctggggcctcatcacagcccaccaccctgcgcctgcaccctggcccctgaggcccacagtggccgcccaacgtgtgcggttccccagtggccccaggcttgctggtgggacagccactggtacacattcctcccagggtttgcagtgccccgtaaccccccattgaaagttcccggggaatgaaaacccatggatgggatgccctggcaaaacgggtaacagcaaagcttaaaatttgcctttaaaggggggggccaaaaatttttttcttggggagttcccaggggggttccccaacaaggggacctttgggagggaaaccacctttcacc

SEQ ID NO: 151762 - DNA, 1160 bp, Homo Sapiens
gagtgcaggaactggtactgctctgccgtctggatcatcccccctctgtctagccgcagttggcacacaatacccagaatgtccacttctcctcgggctttcagctgttgacagccaattcgcgtggcgatgaagcagcccgtccggccaatgcctgcactgcagtggactacgataggcccggggtgggcggctgtctccgggctctcctccacctctgccactaggcgcagcaggggccccagctgattttggtgtctgatggtctggccaggccgaaaaagaggatgtgctttactgcccggcgctcttccctggtactggatggtgagctgccgccacagtgtattctgggcactctttcatgtcctggatgcggatctggaagggtcccataggtttcctcttctgtgggccagtagtggacacatttctccttgccctctcggagctgagtgagcatgacaatgagggacacttcctcttgccacaccatctcccagaagtccgacacagtgttgggcatggggccctgggtggcaatgtagaccttctccttcccgtcatagcctcggatgtagttggcattgatgtaatctccgtcctcctggctctgtgcccggcctagacagacacggctctggggatttggcaagatggtcttgtatcggtccttggaggcgtggccagggatgtccaggtcttcggggctgacaaagtttgaagggatcttcaagaattcttcttccagttgcttggggctgggtggctggcgctgaagggcccagcgggtaagggggtgtccagcagtgcgcagaaagtgtagggtgacctcccggggtgtgttcacagagcagatgggttctacggcccccagggaccgaacgtccagcatcagagccacattggagccccgcctctcctgcagtcgcacatgcttcttggctggcgttttttcaggcagaggctgggtcatggctgcccccaaagacaaggtcaacggctgtgctctggagcgccccccttgggcttggaccatgctgaggtggggtgctgggcccaggggaggctcactcagccatgaggtctgctgaagcagctgtggcccccaggctgcctcttgccagctgtctgtctgtcatcccgggaattccggaccg

SEQ ID NO: 151763 - DNA, 1175 bp, Homo Sapiens
  misc_feature (1153)..(1153): n is a, c, g, or t
tttttttgggacataagactgtatatatttcaggaatagtttttccatagatataattaataacacttaaaaataagaaaaatgttttccataccaactataagcttttaaaaagtacagaagcatatcctcaagatgtgaaggcactgggggatggaggacaccttgtttcctcagctcagagcttagctttctccttaaaggtctccttcatctttttgacaacagaaaggtcccctgctcccttgggccagttgtcatgatctggtacctcatacgagtgagtatagagactccggcccccatccacatccaccgactgtccagtgatgaaggaagctgcaggagacagtaggaagcagaccacagaggagacctcctcaggaacaccaattcgtttagcggggattttctgaaaagacccttcaaagaagctttgtccccaggaaccatagttctccacagcagtctgggaataaataactccaggggcaacacaattgatccgtattccactgcaggcccattccaaagctaaagatttggtgaggttgtaaacacctgctcttgcagctccagaatgcacagctaatggaaatccagctttagtagggacaatgatattgacgatagatcctccatgctctttcatccaggagctgtaaactgctttgcacatgtagaaggtacccgtcaggttggtctcaagcacagcgtgccatcccttagaactgatgtgttcagcaggggaaagaaactggcctcctccattgttcaccaagaaattgatcttaccaaaagtatctaaggtagatttgaccaaattattcacctcctcctcattccggatgttgcattgtatgggaatgactcgtgcctgctttgtgggaggtaggttggcctgcagttcatctgccgcagacttcaatctctccaacttacgggatgcaatgaccacattactccccagctccaggagctccttcacgatggcttttccgatgcccgtggccccgccggtgacgatggccacttggccctgcagcaaaccaggcgccaggtagctcctgcccttagcccaggaggccatcctgcagcggggtgccagagcagctgagcgcaggccttctggtcgtccaagaacttgcccccngggggaaatttgtgcgccggga

SEQ ID NO: 151764 - DNA, 854 bp, Homo Sapiens
agggggtccaccagagggcaaagccaccactgcctaccaccacagccgcatgcccgcaggcgccgctggcccctggaaaccagcagcacaggccaggatgtgggcatacaagtaggccatgaccagcaggggcagcaagaaagccaagccaccagctgcagcaccccgcagagccgtgcggcccacctgtgggaagttgtattggcagtgggtggcgttgaggcgctcgtcgctggtgggccgacaggaagatgaagtctgggagggcgaaaagcaggcagagcccccagacagccaggcaggtgagggtcacgcgggccgggggcccccggcggtagagctgggtggcatgaactatgttcaggtagcggtcaaagctgatgcaggccagcaggagggctcctgcgtagaagttgatgttgaagagggcacctgccactttgcagaggccagagccaaagacccactggacggcagcgtccactgcccagagcggcagtgtcagcaccagcagcgtgtctgctacagctaggtggagcaggaaggtgtcggtgctgctcagggctgtccgccggctcagcagcacggctgccaccgcgccgttgcccagcagccccagcagaaagaggaggctgtagagggctggcaggaaggcccggtcgaagttcaggctgaagtcctgtgggcagggcggggaggtacagcacgagtcactctcgttttctccatagtcataggaagagcctgaagttctccaggagggcggcaacctcggcgtcatttagcacttggtggtcactcacctcaaggaccatggctgggctggtgctctggctgctgggtggtgtgctgcc

SEQ ID NO: 151765 - DNA, 981 bp, Homo Sapiens
  misc_feature (95)..(109): n is a, c, g, or t
ccgtccacctttagggttttttgggcccccaagttaatttcccccccattaaccttatattcttttttgggcaagtgagaagatgcagatagccnnnnnnnnnnnnnnngaggtcccccagagattcactgttaaccttggggtataataaaatcagacactttcctttggcattatgtcacatagaaatgtccaaataaagtgtccatatatacacacatatatgtatacactgttttgcaactcgttattttcactttgcaatatacaatgagcatttttccatgcaaatgaatgagacctcttattaaatgaataagattgggtcaaaagatgagatgttgacaagagtcatatgtaaatctcagcaacatcgaatgactggagtaaaacgatagcaaatatttatcaagaaagtgcagacaaacagaaagcagtggcaacattaataacagaaaataattgaattgtcagagaaattaattaaatgggataaggacggtcccgagaatgcctatggttagaatgcagagccctaaatttctttctcagaccccttatctcttccaaacacctttccatctcatctccctcccttgtcatttcttcatctttaaaatgcctatagtctatgtcctctttaaattcttcgagagactgaagcagcctctgtctaaaattcccttctgtttgctggcgttcaaattctccatacgggcgtttttcctccctctttggcacgctgcactttggctttccttcgttttctttgcagggtttttgcatgatgttgttgttgtttcctgcttaactctgtgcggggtagtttcctgctccttttcttcccccagatgtctgtgaacacagatcctgggacctgcaaacaaaaaggaaggggcggggaggaaggagctatctgtggatcaaccagctcttccttcccttggccacaagcacgcacggcacgcttgtctgcagggc

SEQ ID NO: 151766 - DNA, 1145 bp, Homo Sapiens
  misc_feature (360)..(360): n is a, c, g, or t
gtgccccaccacaggggaaggggtccccccattatcgtgagcacatttgggcccctccccgtgggggaaaaagcccaaaaaaggggccccccccaaagtgggcccaatgtgtaaattttccccccaccaaatttaaggccttcaaggctgggccccccaggacccaggtaaactgggtttgcttaccccccaaggattgagattctggggattcagcatcatgttcctttgccctccccaatgcctgtcctggttcttcaggcagtgcttacctgaggatgatgagggcaaaggcagagaagcaaggatctcaacagccactacccccacggccaaaacaaccacctcttccacggttcntgattccagggagacattgagctggatggttctctccgtggtcacaccggctccggggaacgtcacctgacaggtgaggttggtgctgtggtcctggggccgtggggtgattgtgagcactgaggagtgggtggtcctggggcccagggaggtgggggcagctgacatccaggagaagatggggggtgttccctgctcacagacccagggcacagagcaggtcagattgctgggatggccagactccagggtccctgggatggagatgttgggcctgtgggtcagggccatcacacgcacagagagcttggaagatgtataaccgtatttcatccatttggacttcaaccgataagaagtatgcagcattgtccctcctccgggcatctctgatgctcagggagcagttcttccttctgggatcccagaggaggtggaatcggccccgggtctcctcctgcacttcttcgtctgggtcgtttgtggccactggaacatcagcccccttccaggaaccagtagccataaccatagtacgaggctggaagggtagtgggctatctgcagggtacgaggacgcacagaccctcctgcaccgtcagtgactctggcccctccagctggaatctccgctcctgagccagggcccctgcccacagcaggggcagcagcacgcggtagcatctctgaggcggaggcattcactgggctacctgcatgagcagagaaggggaagggagtggaggggaaggactgcggggagaacgggtggtgggaggagcgcg

SEQ ID NO: 151767 - DNA, 894 bp, Homo Sapiens
gctgcagtgaggctgctgcgtccagtgaacacttcagcacctgtagcacagaaggggcggggagctgcagtcctcgaccagcaggaggtttgctcctcagcccactcgctgcatccagatcagctcaccccttctcccttccctgcccaccaggactctgatagcccctggcagccacagcccattttgccaagatgtctagagtagccaaatatcgccggcaggtgagtgaagaccccgacatcgacagcctgctggagaccctgtctcccgaggagatggaggagctggagaaggagctggacgtggtggacccagacgggagtgttcccgtggggctgcggcagagaaaccagacggagaaacagtccacgggtgtgtacaaccgggaggccatgctcaacttctgtgaaaaggagaccaagaaacttatgcagagggagatgtccatggatgtgagtgagcacagccctggaggggaggagggagacaggggagggctggagaccctggcttcatgattaggatgcttccttccttagaagaaacgttcttgttggcaaaggattttaatgcttcagaactgatgattatccactgaactagcggtgcgaatctcttactcctaatttctgttttataagcagaagtcggatatgttggaggaacacaacatcccacaaaatcaaatagagctactagtagaatgggagctggaaggtgtccttgaagagtccattgtcaagttgactccatcctggtcccacaatacctttgtttttctccacactcatccatcctattgtgaggaggggtaaaaacgagagagtgatactttaatgtctcctgtcaggcacccaaaaagacaaagctaagccatttttgtgggagcaa

SEQ ID NO: 151768 - DNA, 902 bp, Homo Sapiens
  misc_feature (404)..(404): n is a, c, g, or t
  misc_feature (654)..(673): n is a, c, g, or t
gtatccattcggcggtccctggtatctggccacatgtcctgaggctggtccagttcctgggttggttcgctttggttctttggtggtctggcccggcccggcttccagtgaacaggcgtgtgcgccgccactccgggtcgcctggcaccgtggcttcagcaggattgaaggaagcccctcctgttcttggggagccccgccttcggcacccttaaattcggagaccctcatcttgtatgggtgctgcttggggcctgttgcccttccaaagcggacaggacacacagcaaggagcaggctttctgaaattcccgagtgtgtgtcttgtgtttgcaagcatttgagggcgtcactcaccccatgtgtgtatcagcatgttaattcgattgttggtccacgagggntaagcgttgcgcctcccggaagagggtaagggctgtgacaaaatgccccctggggacaggctcctggcttgaacccagcaggctcactcgtcgtggccttggattagggatcccgctaagcctcggtttcctcgtcggcaccgcagtccaggtcggaacattgggcaggactgaatgaaaattatgtccaggtgcctgcacacaagaggtctccaggcctcctgaatccatcaaaagttatccaagacgnnnnnnnnnnnnnnnnnnnnctctaaaccctgaagtacagaaggcaagtgggtcaagatcccaggcccagacagtggcggcacggtggcatcgagtgggtgccgtgtatcttgcaggcacagaacctcccggggaagatggagggattattgccctgcgatcccgcttcgcacgcaagccaggaagtgtgtgtctgaactcccatctgtgagcgtgtcgtcgaggtgtgcacctccagcgacttcgtgc

SEQ ID NO: 151769 - DNA, 702 bp, Homo Sapiens
  misc_feature (564)..(598): n is a, c, g, or t
gttcttattagcacaggaccccggagattaagtctactcaagggaatgttggacattgagtcaagctgatctgagctcaagggagcttgggcatttcaactccccctcctgagcctcagttttctcctctgaaaagtggcaatatgacctatgtcatctgggttatttgaatgattgtactaaaatatagcctgacaatgaacaatggttaaatccagagcagggcaaggtaagcccatcttggtctctcccgtgatgactttggaccacggggcttagagagaagttcaaactaaatacagagggctttaacccaggatacaagagttatcaaggtgacagcaacttgaggtctcccatatatgactgtgggactcaacgactgtgacctcattctgcaaatgaagtccaggccctacttttttgtttccttccttggttgacaccctttaatctgcagtcagcagaagacacaagagacaatatatccaacagtatggagtccatagcatcagggcttgagcccccatttcccacgtcttgcagataatatataggacaagnnnnnnnnnnnnnnnnnnnnnnnnnnnnnnnnnnncccattccatttcattcagactgatacacaggccaaagaaacacataggaataccattgcagtctttttggcttggctcgttagaagatgaggcatagctttcc

SEQ ID NO: 151770 - DNA, 1043 bp, Homo Sapiens
  misc_feature (38)..(38): n is a, c, g, or t
  misc_feature (86)..(147): n is a, c, g, or t
ccccatggggaaaaaccgagaggaaggggaggccgggnccttcccttccccaattttaccgcgttttagcagacccacagggagcnnnnnnnnnnnnnnnnnnnnnnnnnnnnnnnnnnnnnnnnnnnnnnnnnnnnnnnnnnnnnnccgcagccggccctgcctggcaggtccccgagtcctctcatacaggtgcagtttggtctttgtggagtgggagcatcttgacatcctccaacgcgtagtaggcggccagtgtgaagttccacgtcgcccgtggtgaggaggtcgaagacgcaggcctggtagtacaggtcctccaccggcagcttctccttgcacttggccacggctgtctcgtatgggaaggtctcgggggctgtgggtgcagggctggcggctgccagcctgcgggcaccggtgccctcagcattggtgtggaaggcctggaagtcgatctgctggttgagggggcagccccgcaggcagaggtagagaccctggctgtcccagtcctccacagcattgaccacttcctctggcatgcggacggcaaaggtcaggtagcggcccacctggcgcaccacgatggtggtgccgatgtacttggcctggatctccacgtgctggcctgacaccttctcagtgatcttcaggctgttggccccgtgcttgtccccaccgttcttagagccatccacgaaggcggccgggagctcgtccatctcagcctggtacaccttctggtccacacactcctggaagttcttgaagatgatggtgagctgcggggaagctgcagagaaggaaggcgagggtcggccagaatcccagggctgaacgtcctgcccctctccccatacccatccatccagctcggcctgttaccactagcctctccctggaagaagagttcagaaaaaaaggagaagaaaataaatcacgctgcgaagaaagggcagcctcgctccgccggcgggagcagcgagccgggaggctccgtccacctcggccgcgggatcccgggaattccggaccggtcc

SEQ ID NO: 151771 - DNA, 880 bp, Homo Sapiens
gggaaggtgtcgaggcagttggcgtggaacctgggttgctgtccttcatggttcagctgggcgaaagctggggaaattttcgctccccggatgcagcggggccatctccgcccatgcgcgcgggcaccacggacttgggccccggaacccgaagccagggggctggttctccaccactggccccgcatgcccacggtactgcctgtcagcttcttctcagcgctcaccacaaggatgagcacgcggagttcaggccagtgtgactcgggggccacttgccgagcgatgctgtccttcccgtcggcctgctctcccatctgccactccacaaagcccccatacaggctccggcaggcgctgcctgagccccggcgagccacttctgagaggtcactctccacgccgtagacacgggccagggtgtaggctaggcaggcatagcccgccgctgaggaggccaggcccgcagccgtggggaagttgttcaccgatgccacgtgcaccttgcagctgaggctggagggcagcgggtccccatcccgtgagttcctccgcttccgggccaggcagcggatctcccgcaggcaggcctgcagcctcggctgccccacatcctcctcccggccattcagccaaatccggtcctcggtgaagtccttgctgatgacggctgttgtggtggtttttaactggtcctggtgcagagtgacgctcagggaggagttgatgggcagaaccagctcttcatcgcgcttgccccagtacttgatgaccgcgatgttgaccggcgctgtacaagtgactgccgccagcggcttctccgaggccatggtcccaccgcgcagtgaccccagctccacagccacttacggcccgcgat

SEQ ID NO: 151772 - DNA, 1215 bp, Homo Sapiens
cctcggagaagccgctggcggcagtcacttgtacagcgccggtcaacatcgcggtcatcaagtactggggcaagcgcgatgaagagctggttctgcccatcaactcctccctgagcgtcactctgcaccaggaccagttaaaaaccaccacaacagccgtcatcagcaaggacttcaccgaggaccggatttggctgaatggccgggaggaggatgtggggcagccgaggctgcaggcctgcctgcgggagatccgctgcctggcccggaagcggaggaactcacgggatggggacccgctgccctccagcctcagctgcaaggtgcacgtggcatcggtgaacaacttccccacggctgcgggcctggcctcctcagcggcgggctatgcctgcctagcctacaccctggcccgtgtctacggcgtggagagtgacctctcagaagtggctcgccggggctcaggcagcgcctgccggagcctgtatgggggctttgtggagtggcagatgggagagcaggccgacgggaaggacagcatcgctcggcaagtggcccccgagtcacactggcctgaactccgcgtgctcatccttgtggtgagcgctgagaagaagctgacaggcagtaccgtgggcatgcgggccagtgtggagaccagccccctgcttcggttccgggccgagtccgtggtgcccgcgcgcatggcggagatggcccgctgcatccgggagcgagacttccccagcttcgcccagctgaccatgaaggacagcaaccagttccacgccacctgcctcgacaccttcccgcccatctcttacctcaatgccatctcctggcgcatcatccacctggtgcaccgcttcaacgcccaccacggggacaccaaggtggcgtacacctttgacgcgggccccaatgccgtgatcttcaccctggacgacactgtggctgagtttgtggctgctgtgtggcacggctttcccccaggctcgaatggagacacgtttctgaaggggctgcaggtgaggccggcccctctctcagctgagcttcaggcttgcgctggccatggagccgaccccggtgggggtcaaatacatcatttgtcactcaggtggggccagggcctcaatcctggatgaccctgtgcccactcctgggtcctgacggctgccgaagcagctgctgactgctcaacaggaccgatgc

SEQ ID NO: 151773 - DNA, 846 bp, Homo Sapiens
gcaggtgtattaaattgggttgcagagggcatatattgtgaccatatagagatccagaagctgagcagttgggttcactcccattatatagacaattgtggcaatagaacaccatgatgcccaggatagcactcactattatcacacttaagtagtatcttcttgttctggacatttcagatcttataacactggtaacaaagatcacctacgcggcaaatgaaacaaaaggcagccatggcctacatgaagccctttgctgctcttgggtctgtatagcctccgtagccatagccataaccatagccatagccatagccacttccgtagctaccaaagccacttcctccataagggtagcctacactacctcctaaaagggaagttccatagcctctgtcccaggcaagcgtggaggccacacaggcaaagatggcaatgcacatcacaataatgagcatagacaggatccgaatcactcctggaggagaggtccatttgtagaagtgaagaatttcatcttctgggtaaaaagagtaggctggctgagagagcattggtcgaacatgcatctctccaccatatatgtcattgcttggtgcataatgattcggtttgaattcatcaggcctgtaaggaggtggactttcaagaggcctggatgacatggctgattgtcaatggtcagctgatcttcaggatgagcaatgccctttagcttccaagataaaccaatccgctcgccgcaactgggcccgaccctccgggggccaacggtgccagggagcgcgctcacctggcgggcgcacctgacgccgcaccgaccgccagcgctcagccggggac

SEQ ID NO: 151774 - DNA, 878 bp, Homo Sapiens
gtcccagccagagagcttgagtattagatttttgcagacccatgaatatacagacaaatttggaggttcctccaaagttcaaacttttggaagaccgttggaatcaaaagcgcccaaggtcgatacctgttaacattattgccattgaagttcaggcttaggtttgatggcctgctccagagacctcatgtcttctcctagagatgtagtgtatagcattattctgaaaatccagtactttcagattccgtgctgggaagtctttggggaacttaatggaggaaatatggttgcttccaagatacaagctttccaagttttccagattgtgcactggaataaactcgagattggatattcccgtttggattaagaaaagatgcttcagtgacttgggcccattaagcgatgtttctgccatgaatatcaggggatttccagttaacacaagtgtgcttaattgatgatggctgttgaaaagtgtcttcatgtatccagttaatctggcacctagttaaatccaaaaaggtaagattcatgagtctgctgaaggttctattgtgaattgtaggcaaaaaattaaagctgaattcccaaaattctgttgtgtttggtagagtgtcagggatttcactgagacctaaattttcacagttatatgttttgttggcttctttctcaatgcacatctgatcccaggaggtgatgactttacagccggcagaaaacagcaccaccccaaagaagcagctgacgtcaaacgccatcacaggctaggattgcttggtgggtttacctaatgcttggagctgagaaatggaatctaactgtgtaggcctggcaatttggcagccagagaggtactcagaagggtgatc

SEQ ID NO: 151775 - DNA, 884 bp, Homo Sapiens
ggggactggcggctgcactggcggcagctggaggtgtaatagtgcgggtagtgggtttggagaagttccgaggcggcgtgtggcgccggtcaggacaaggatagcggaaccgggccctgggcttgtcgctcaccatgccgacagtagaggagctttaccgcaattatggcatcctggccgatgccacggagcaagtgggccagcataaagatgcctatcaagtgatattggatggtgtgaaaggtggtactaaggaaaagcgattagcagctcaatttattccgaaattctttaagcattttccagaattggctgattctgctatcaatgcacagttagacctctgtgaggatgaagatgtatctattcgacgtcaagcaattaaagaactgcctcaatttgccactggagaaaatcttcctcgagtggcagatatactaacgcaacttttgcagacagatgactctgcagaatttaacctagtgaacaatgccctattaagtatatttaaaatggatgcaaaagggactttaggtgggttgttcagccaaatacttcaaggagaggacattgttagagaacgagcaattaaattcctttctacaaaacttaagactttaccagatgaagtcttaacaaaggaagtggaagagcttatactaactgaatccaaaaaggtcctagaagatgtgactggtggacgaatttgttctatttatgaaagatactgtctgggttaaacaagcttacagacagtgagtgggacgaacagcaacttgtagagttgggtggctgaacaggccgacctaggaacagaccttcaatccctcggatcctggatgtgttgaccgggctcttacagtggactcgggcaggcagtaccc

SEQ ID NO: 151776 - DNA, 745 bp, Homo Sapiens
ggaaacttttgcagcggctgggtagcagcacgtctcttgctcctcagggccactgccaggcttgccgagtcctgggactgctctcgctccggctgccactctcccgcgctctcctagctccctgcgaagcaggatggccgggaccgtgcgcaccgcgtgcttggtggtggcgatgctgctcagcttggacttcccgggacaggcgcagcccccgccgccgccgccggacgccacctgtcaccaagtccgctccttcttccagagactgcagcccggactcaagtgggtgccagaaactcccgtgccaggatcagatttgcaagtatgtctccctaagggcccaacatgctgctcaagaaagatggaagaaaaataccaactaacagcacgattgaacatggaacagctgcttcagtctgcaagtatggagctcaagttcttaattattcagaatgctgcggttttccaagaggcctttgaaattgttgttcgccatgccaagaactacaccaatgccatgttcaagaacaactacccaagcctgactccacaagcttttgagtttgtgggtgaatttttcacagatgtgtctctctacatcttgggttctgacatcaatgtagatgacatggtcaatgaattgtttgacagcctgtttccagtcatctatacccagctaatgaacccaggcctgcctgattcagccttggacatcaatgagtgcctccgaggagcaagacgtgac

SEQ ID NO: 151777 - DNA, 620 bp, Homo Sapiens
cgtctttctgctatcccggtaccgtcgcttcttctttctgtcttgttttcaacggcctcatgcctatgttttcttgcctcggtttgcggggaatgcctttgtattccttggtgttttccttccttcatcctcatcctctgtggatgtcttctgtgcttattctctatctgtgtgttccttgatgcgtttggagacctctggaagtttttgtcatctggacccgtacacaggtgatgatggttctgaggctttctgcgtggatgatatcgcggtgcctcatgtggcctaccattatggtctaaggggtttcaacgtatctctgcctcttcagggcctctctgcccgcggttggcaggactgggggtggcacggcaatctcctggtatgtgtggtttccagttgggtatgagtagggggtctcctccgacaagaacacaggccgtttggagatgtgggaggtggtagactccaagtccgcgagcagggcgtcgaggtcgtccatggccgggccacgggcgcacggctcagggtcgcgctagctgcccgtacccggggccgctcgtgctatagcccacgcaacttttccgccgcgagccatcggcccggaacggaacgcgccg

SEQ ID NO: 151778 - DNA, 964 bp, Homo Sapiens
agccttgttggttgacgtcacttggttcatgaagccttcgcctagaagtgaagctgctgaacaaaccttgagaagaatcatctcctgcttcaatctgctgctggataggaactaatcagagagagagaagcggaagacggagaaggagggagtcgaaggctttcccgatcacaaatctcacctccactacaactctctttatacttttcttgcagaaataataatagaaataaggaggtggtggggtttccaaaaatcttaaccttcaaccatctggggaaaaggccagtaatcccatctaccgcaactctcagttcgagagtaaaggtgagtttaaaatcctcgggcgtgagggttgcggttgaggatgtaaattcccagtgttacaaagccggtggaaacagcagcggagaaactgcgctcgggcaatcgggggactccggagttgctgcgtggaggcgctcgccccgccgccctctcgccctccgccgctgtttatcctcgccggtcggtgcggctctttgttgtggtggccggaaggctgggtggttctcggggtcccgagtggagtttgggggaggaggacacggagatgtgccgtcctgggtgggagttggggggtgcaggcctcaggagaacgtaaactttattcctagaagccggtcgacgggacttcagctggagtagggccgtgggttgtgctcccggcccgaggcagagcgctgccgccgcgagtccgccgcctttgtcgccggccgcctggcttcagcgtctccttcctcttccccttcggcttccagcgctcaggtcgccgcctacagttttgcttctgggaaggtctatgtcagcacgcagaaggtttgaggagcattgcttctcatacagtaaggtctgctgccttggtctcatgttttagcagttcttccccgggaacgaccgccagctcccaactcctctgcttccc

SEQ ID NO: 151779 - DNA, 831 bp, Homo Sapiens
gcattttatcctttaaccacaaaatgtgtttaaaagctatgcaagaattagcaaaagtaaactacagcaatattaaaatgacttatttggtatcacctttacagacccagctcacttaggcaatggtattctagtaaattacaatattttttaaagcatagttttttttgttacctcttgaaatagtgattttaaagccaaaagggtcaagagtatgccaaatttaagatgattatttggaaaagagagatatcagcaacttaagtatgctgtatttaaggtgattgtaaaagagtttttttatatacaggacagcattaaaacagaattacaaagtctattaaccataatgatggagttcaagatgcagataaaattaaatgattgtctttaagctttcaataaatttgttagccaatttaagaataattgcagcttatgaaagcttgtttatatttatctaatttcaaaaattaagaaagaattaaaggatatttgaagttcttattatgtagtttctaacattgtgagagaatggtcaaaagactgctatgtcttatttagtgtcaaatgtgtacatactttacagttaaaggaattactgctttgctaccatcaaggtcttaaaaccctgtatcaaaacaacctagagatttgcttcattaactcctgttcatttcgcagggcaagacaataagatcctctttggcaatccacgtgtttacctgaattatattctaactctctatattaccttggaaactatacccaaggaaactccacatattcaacattacaaaacagcacacaccacatacaaccctgatgcca

SEQ ID NO: 151780 - DNA, 733 bp, Homo Sapiens
  misc_feature (204)..(349): n is a, c, g, or t
ccggatccgttgatgagaagagtcaactgtggagggggcacctgtgaatgaatcctgcggagctgctaacagagcagacttacacacacaacatggagactttcctgggcctgactcccggacctgtccccagcgcctcgcggctctcgagccccttcagtgaccaagatgcagagatcaggacgccattgcaccaccccaggnnnnnnnnnnnnnnnnnnnnnnnnnnnnnnnnnnnnnnnnnnnnnnnnnnnnnnnnnnnnnnnnnnnnnnnnnnnnnnnnnnnnnnnnnnnnnnnnnnnnnnnnnnnnnnnnnnnnnnnnnnnnnnnnnnnnnnnnnnnnnnnnnngggtgtggtggggctttccaatgattacttattaatgattacttatgaaaaacaacaacaaaaaagccatcttgaagctgcttttaatgagagaacaaatgtgctcccaagcaacagagcagcgaaattctttattactggattctaactttcctctctaactgtaactgtctcagctccacctcatgtgacttggagggtatgttgcaacctgcgtcttcaccacccattcatgaagatctataaaactaatgtaaactgctggggcaatttcaacatgagtcaactggagattgttacttggtgagaatgcgcaagtggcaaagatctaaatttgttcagctaatttgtaattaaccttcgcttctcacatgtcagtatgtg

SEQ ID NO: 151781 - DNA, 559 bp, Homo Sapiens
  misc_feature (229)..(322): n is a, c, g, or t
actctctatgtgctcgctgccctctgggctgtgctcctcttctatcggttatgtccttactctatcgcctctcctcgtttctaggttctccccgcctctttctcctctgtatacattcccaatgcatcgaggggcgtctccttgcccttgcccgtcaagggatccgcctctgggccctttcggatcggctcccccatcgcctccttgtttcttgtgttctgtgttatcnnnnnnnnnnnnnnnnnnnnnnnnnnnnnnnnnnnnnnnnnnnnnnnnnnnnnnnnnnnnnnnnnnnnnnnnnnnnnnnnnnnnnnnnnnnnnngcatattaaagaaaaagacttttatacatagtaaccaactgcaggtaagaatgagacattactcattttccagggtaggaagtcttatgaatgatttatatcagggaacctctaaagagtaaaggttccctacggaactctggtagcaccagttccagggctgagcacgcttcagcgagttcattgcaggcaacatacagcaagcagatggctgagcaactgaagcccagacttcag

SEQ ID NO: 151782 - DNA, 938 bp, Homo Sapiens
cgcctggcgccggactcctctttctcccggaagcggagcaccgagccggcaaaggcttgggtgtgagacagcagcggtggcagacaccgcagaagcaaagagcagtgaggctcctgcattcgggtggagcaccatggacgaagctggcagctctgcgagcggcgggggcttccgcccgggcgtggacagcctggacgaaccgcccaacagccgcatcttccttgtgatcagcaagtacacacctgagtcggtgctgagggagcgcttctcgccttttggcgacatccaggacatctgggtggtgcgggacaagcacaccaaggagtccaagggcattgctttcgtcaagttcgcccgcagctcacaggcctgcagggccatggaggagatgcatggccagtgcctcggccccaacgacaccaagcccatcaaggttttcattgctcagtcccgatcatctggaagtcaccgagatgttgaagatgaagaacttacaagaatctttgttatgataccaaagtcctacacagaagaagatctgcgggaaaaatttaaggtgtatggagatatcgagctattgcagccattattaagaataaagtgactggagaacgtacaggtttgggctacgtacgcatacttaacaccatcacaagctgcccaagccatcagaacactgtgatcgaagttttagagcaatcttggctgaccctaccaataaagcatctgaatcctctgaaccagattattatagtcctatgaggcaagaagcttgggacatgaagctagagtacatatgtccccattttgaacaaccactctgaatcttcaagtttgacagaatgatagccgaggcccaggacgcaatctccaaagcttgtcagtgtatcaggagttccttcactgcagaaacagtttcagcattgagatatagtaca

SEQ ID NO: 151783 - DNA, 932 bp, Homo Sapiens
cgtggtctaatctatggatgcccctaatagaccttttctgtaaccttgccatctgttatgcgtgtgtcttcggtgatagtattatgcccccttgtctgaatgctctaccactgattttggcaatccgaagggtgttgccactgtgtgggttttctaacctctcctaatgatgaccggcgccaaagatccttggtcaagattgatatgccaagtggtgaccaattgtccccatggtttgagcggattcgatggtcccaagcctggtattgccttccctatggggtgtcttcggattttggctcttcaagggactggccaatgttagccgcttccccctgttgcatcctagcaagaggcttggcaatgcaggtagatggaaggagaagttgggatgccaagtagacgaggaggcaggaccatgtaaccctcggcagactctggttccacagccctggcaatgtgggcaaatgccagacccgtgagcagcccagccaagcagtaggctcaggaagaagcagccagcaggtgggctgcgcagccggcggtcccaggcgatgcccaggggctaggagcaggttcgcggtgatgatgaggcttgccagggccagggagagccccaatagcccaccattgggaatggggctgggcacctcgccagtgctgttgggcagtcatctctgctccatggggacaggggagtcctggagcggcagccggcatgcatggctgttgggagcaggtattgcctgcccagcctgggccttcctgagtgtcagggagttgctgcagccagccctgcagcggtttggacacatgtctggtgtcactggactgaagagcacaagtggacacatagtacatggtgtctccacccagtggggacagtcggggaccaggctctcactactacaggctctgcccgtctggttctc

SEQ ID NO: 151784 - DNA, 732 bp, Homo Sapiens
gtgcaaatctgcaattttgcttgcctgctcctctataattgttttatcatcttttggggctttgcttccaatacatggctctgctggctcactcttttgctgaagtaaataaagtagtgtgtctggatccctgtcaaagatcccctgaatctcaggcaggcatttctctgtggaagggctgtacttctgagaaaggggactctggccctctgcatcctctgcagagggtttgtgagatgtctgaagatgggcagctgcatccttgtctgtgttctgctgggctttcaatctttcttcacgctgggcccttttccatctctcttggatgaggaggagctgtttcatatggctatccctttgcaattccagtgaaagatgagcctgctctgactgtgtcagcttcatggcttcagaaagatatgctgcagcctttttgtgacaagaaatagcctcttcgtatttgcctgcagctaataaacggtctgctcgtctgctctgttgatgagccaggttgaggggtccttccattacttccatagaccccggggtaagcggcggccttaggaaggggagtagtggcgccggggaacatggaggggactgcaagggagctcgacgcagccgcggagactgcggcccctctctgcgccccaagagccagcgataggcgctgaaggagcaacaacctcaccacttcctcctccggcgccgcgccgcgggcccgcccctgcg

SEQ ID NO: 151785 - DNA, 1098 bp, Homo Sapiens
  misc_feature (83)..(83): n is a, c, g, or t
  misc_feature (97)..(97): n is a, c, g, or t
  misc_feature (162)..(162): n is a, c, g, or t
  misc_feature (180)..(180): n is a, c, g, or t
ttccctttcatggcccccccaaccagggttcaaaagccctttggcccatcccacgtgtgggagaatcttgatttcgggagccncccagggcccattngggatgggattcctgcgaatgaacagcccacatcttggggatctgggatcgggaataaatgaatnttgatccccataaaactnaggggtgagtttccacaaactttcggagctacttctggtaagtcttcactgaccactcttcgtcatggtgctctccactgagctcatacaccggcagcagcctggctctgatctccatgtagagcacgttgtcctcgtagaactcctgcatgctccggaagacatagtctctgaacactggtgcgtaatggatgagaccagagatggtgaagaagatggtttcaaatgttcgaccagacaacattttggtttgtgtaaatcacctccgggtgctgggtcaccagagtgatattcctcagcaagctgtcatcaaactcagtgacgttctgcacccgcttccgataatcctccagcagaatccacttggaacatttttctagatggacggggagttgggtgagcaaatctgaactgcatgatcccccttggggtgaaacagatgtggcagtgaggcctgtaggtgacattcctcaccagccagtccatagtcacgatgccaatgtcatggaggtgcaaggcagccccttttggcatcatccttagaatattaaacacttgacttctctcaatgagatgcttggcctggaaaaagtgcatgctgggtgggaatatcagggtcctcatggcctccttcatctcagcgattttgagcgtcatgagcctctcattggccagctcctccttggtgttcagcaccagccgccccccgagccgcatcatcttttctttcaacaacagatgcgcccgtgtttcatctatggatagagctgagccgaagaaagacattgccacagccaacagcaagaagcacagggctggccgctcagatgggccatccaccaacatcgggatgcctggactaggaaagggctcagatggagactccacgggacatcccgagaattccggaccggtcca

SEQ ID NO: 151786 - DNA, 991 bp, Homo Sapiens
tggttttaaagtttcaaaagaaagggccaggacccactgaccaattgtcccagcccaaaggtatacacaagcattctccgtgagaaccccagtatgctctccaccacaggctacttggatcaccttctccggaatttcagacaccagctggggtgttctgtgattgcccaggagctgattgggaagacctaacttcccattctcaggttctccaaacacatatagctcaccatttgttacaaaagctgaatggtaatatccacaagagatccaggagacaggtttcccaatggtcacttgctgagggacacagacattacttacattttttaaaccaatttgcccttcggaattgtcaccccacataaaaagtcttccatcctcagttagggcagctgaagtattagatccagcagacagctgcttaatcttatgctcggatgtaaaaaagctaattacatgaaaagtgtttctttcttcggtgtcaccaagccccaactgtccttcattatttccaccagttgcatatacattgcctccttctgttgacaccagggtgtggttccttccacaggcagctaatttcactttttcaggttttagagctttgacacatgttggcttgctgatggctgactttgatcctaatcctaactgaccccagttgttactgccaaacatgtaaagtttattatttccggtaacaacagcagaatgttcatctccacatgaaagatgtacagggacatcatttttaaaccagaatttaccgggattattttcagcaaatttacttttcccaaatgtaaacacagcacccgaatcgggcatcagctcttccggctccctcatgccacgggcagtacgggcagcctgcgccggggccaggaggctgtagaggacggtttggtcggggctaaagcagctactccgcaccgacgcgggccgcgaaagcccccaagttccgcatggcgaaactccggagatcaac

SEQ ID NO: 151787 - DNA, 784 bp, Homo Sapiens
tggaccgagaactggaaaggtgcccctttgtcccttggtccacctataccagatgcttgtccgtcaaggtcgccgttgcggagcaggtccaacaggaactggtacaggcggatcttcttcttgcctgcctgtctccccaggcaggagcccaggcctgggctccaggccatccgccttccgccgtcagacacctccagtgggggggctctgccgctcgccctcctcctcatctgagctgggctgggctggggacagggatgggtactggaggcacatccggggcaggtaggagacctggtggccaagactgggatggggtggcaccatgggggtatcgaggacgtgcatctgctccagctccatgtgccggtagagctgctgcagctgcgggggctgcacgctctggagctccgtgaagttgttctcggcgaagctctcgaactcgctgtgcacgtggtgggggtggaagtcccagtaatggtcgctatggctctccccatcactgctgagataggggtaatactcgtgcgtttggcgttggtatagatccgtgtcatagggcaccaggtcttctgatggaggggggacgaggggaaacccttccattttgcacgcctgtaacatccagccgggctccgagtcggtcagatcccctgcctcggtgggggccaatgcagagcccctcaggatggggtgccccgtcaggggctggacggtcgtggggcgggtgcagggctcaggcctgcctcctgagctacaggagcactgggtgagccccctcctc

SEQ ID NO: 151788 - DNA, 1300 bp, Homo Sapiens
  misc_feature (106)..(106): n is a, c, g, or t
  misc_feature (173)..(173): n is a, c, g, or t
  misc_feature (267)..(267): n is a, c, g, or t
  misc_feature (271)..(271): n is a, c, g, or t
  misc_feature (593)..(603): n is a, c, g, or t
ggtgctacagggcgtaagtatacagagacacacagacatgcacgcgccacacagcgcgtgtcgctccagcacgaaccagatgaagtgcactacagtatcacacgcntgcgtctataaataatagcatggtgacataatctgtgcacgtactgcactcgagcactgtaggctcncgctgtacgcaggagcaaatcactacgacagagcgcattgagtgatggtattctcttcctcccacaacaacagcagcacgcagttcgcggcggnaggngatggcggttcatcctccgagagaagaataatagattagtgagttatactagaggcgagaagatagtggttcatgtcgtcagctgccggtgtagtgtcccacatcatagaccgatatgtgtgacgccgtcaaatggaggtgggtctgcacaggttcgtctcgatatgttgctccggggagcaatatttatggggaatggatcccacataaagagtgagccccacggggagcgaccccgcgctaattccccgcaaaatagaaagggtgggccaaattcaccctcgtccgcccccagaggatagccccccggggttctccctcnnnnnnnnnnnagggaaccgcctgctagttttattaggggaagccaccctggaggggaagcgggcagttgacactccggtagggaggaggatgcggcgtgcagaggattaagtggtatgtggtgtctgcgacctgggagcgaagccggcccatcagccaatggcaccaggaaattgcaaaccccattaatggcccaccaaaggtgtgtttcctccccaagaacctttccgatcatcttcaccagttaatgtccccaccagtcccaccgatggcgaatatggacacaagtcacagaccagagcagagtcagagtgtctgggtctattggacgtccatgccttctttcccatgactcattgtaaaaggccttgatgtacggggtgggggcattcaccaccgacaggttgtagccgtagaggaaggaggagccgaaggcgcccgcgagggaggccacgaggagcgagcaggaccagtcctttcttctccttccacctggcaccccactcctcaggtggtcacactccagcagtgccctccctggccctggaggcctggcgtggctggtgtcatctgtgaggggaactaggcccagttccttggaattcctattttgtttccttgccatgggtctcagtgacccagctgatggctcagtccagggaccccagactctgccaaggcatttccgtgagtgaggaggcagagctc

SEQ ID NO: 151789 - DNA, 1464 bp, Homo Sapiens
  misc_feature (440)..(450): n is a, c, g, or t
  misc_feature (952)..(1044): n is a, c, g, or t
tggttggagtcgaggtgtagcagggggacggtgtgaattagagaatagaaggcgtcgatggttattggagtattggttactaacaaggtcgggtgtggacgactgggagtagctggggaagttagtgggtgatgtttggtagagttagagatgagtaatgagagttggagtgataaagtgaacacgttgtgtaggcgagcatgcgggggtgatgtcgtggtaccgcgcacccctccgtgcgctcgcgtacctcaccctcggtcacgcgctctgccatcgcccgcgcttcccgtcgcctgctctctgtcactctttctcctgtcgcgtgcgagaggtcgttcggctcttaaccttgttctcgtctcgccgtcctatcatgtatgaggtgtgtgtatagagtgtggtgtggggagtgagattagtagtggtgggtagtgcgnnnnnnnnnnngtgtgtgtgtgagataggattatttttgtgtggtgatgagtgttactgggattgagggaggtgttgggattagattgcttgatgttttattgtgtcatagatgtgcttagttctgggtctgttggtattggttagctgagtagtgaaggtgtgtagtgtagtagggttggtgtggtggtgtggagtgagtgattcattatcaggtgtattctattttatatttattttgtgtgtgtagagtgaagcgtgaacggtaaggacaattgatgtgcggaatggtgtttgttgattgctgtcggtgtttgtgtgttagttgtggtgtgtatggtagtgcctcgccctcgcctcccgcctcctgtcttatatacctgcgcttcgtctatttaggcgacagctgccctttcgtcgatgctagctctggtctcgtggcgtggctgttgttcgctgcttctctacctcctagaggcgtgctcttctgtcgtctctgccgcgctctcttgannnnnnnnnnnnnnnnnnnnnnnnnnnnnnnnnnnnnnnnnnnnnnnnnnnnnnnnnnnnnnnnnnnnnnnnnnnnnnnnnnnnnnnnnnnnnatccatcccagctgtttattgaaagggaaggtgggatggaaggggtgcaggatgaggagggggcgtgaggcacaaggacagtagggtgtgccctggtgggggccgcctgaggatcccctaggaggcccttcaggctggtggagactgaaggtaagggttagggaggggaggggcgagagccttgagcgctgctctccagctgcatcagagctccctctagtggtacagaagagagatgacgcctccggcttggggagggaggggctggcgccatccatagagcacatttattatcagggtcacggccaagaccgtgggcttggtttctaggtaggtggactttgaggggaaaagaaaacacatattcctgcgccgcaccgcagaggcgtagaagacagataaaatgcataatcagaggat

SEQ ID NO: 151790 - DNA, 939 bp, Homo Sapiens
ctgcgcaccgcgacctgcgggccttcggcggcccggcgccggctgcatcagcgagggccgagcctacgacacggacgcagtgcccagtgttcgtcaaagtcaaccgcaggacgcaggcccggcagatgtttgagggggaggtggccagcctggaggccctccggagcactgggcctggtgctgggtgccgaggcccatgaatggtcatcgacctgccgggaggtggggccgcctttgtgatggagcatttgaagatgaagagcttgagcagtcaagcatcaaaacttggagagcagatggcagatttgcatctttacaaccagaagctcagggagaagttgaaggaggaggagaacacagtgggccgaagaggtgagggtgctgagcctcagtatgtggacaagttcggcttccacacggtgacgtgctgcggcttcatcccgcaggtgaatgagtggcaggatgactggccgacctttttcgcccggcaccggctccaggcgcagctggacctcattgagaaggactatgctgaccgagaggcacgagaactctggtcccggctacaggtgaagatcccggatctgttttgtggcctagagattgtccccgcgttgctccacggggatctctggtcgggaaacgtggctgaggacgacgtggggcccattatttacgacccggcttccttctatggccattccgagtttgaactggcaatcgccttgatgtttggggggttccccagatccttcttcaccgcctaccaccggaagatccccaaggctccgggcttcgaccagcggctgctgctctaccagctgtttaactacctgaaccactggaaccacttcgggcgggagtacaggagcccttcgttgggcaccatgcgaaggctgctcaagtagcggcccctgccctcccttcccctgtagtcag

SEQ ID NO: 151791 - DNA, 1069 bp, Homo Sapiens
ctgtgtggagctctattgccaatgttatgcggtcaacggggttgtcacgtgcccgcgggtgcgcctatgttggacacaccgtgtccaccacatgagatcgactgtcacgtgcccctctggttaacacaagtgcggacccgtccgtgtcccaccagcttgtaaggcccgtttagaacatttcgacagggcaaagtccctcccaagttccgtctaggcaattaggaactctgggcattgctcagccacggaggtaccttcccggggcagggacacaacacatcgccccgagagtttgtcccagcgagcgccgatttcggtccgcgatgcaagtaactgagatcgggagctgtccccggcagagcgcactcacctcggtcccaggtggactgaagtccagagcggcgctgtgcagctggaagggcgcgcgatagctcaagttagaggcggccccggggcgcggcgcaggacacaagacctcaaactggtacttgcacaggtagccgttggcgcgcaggtggcatcgcatctccttccagcctgcgggctcgaccccaccggtggcctggagtaccgcgcatctccgcgcggtgcaggagcgttggggctcctccacccactgcagcgtgtcgctttcgagaccgccggggtcggaggacagccaggagaaaccccgcaaaggctcgttctccagggtgcagtgggaacgcctgcgctccagtgcgacccagaacagcaggtctttggagccccctccgggccctgggcctgcccgcaggagcgcgagcacagcgcgcagctcggcgcccgcacgcacggtgctgagcgccccacctcgcaggatgcaggcctcctcggccgcctgccgcttcatggtagcgtggtgcaggctgtagcaggcccccgaggccgagcagccagcacggtcggcagtggggtgttcgccgccgcccggcccgggccagagcgcctgccagaggaggcacagggcgaacgccggcctcattctctgaggccccgcacgcagagctgctcccaacttggatctgtcccgctcgagatcccgggaatc

SEQ ID NO: 151792 - DNA, 1638 bp, Homo Sapiens
  misc_feature (534)..(534): n is a, c, g, or t
  misc_feature (991)..(1033): n is a, c, g, or t
  misc_feature (1115)..(1173): n is a, c, g, or t
  misc_feature (1266)..(1290): n is a, c, g, or t
tctatatgaatactggcgtagcatgcatgggacgagggcggtcacttgttgtgtgagagaggtggcagcgtcggagtacttgcggctgttcatatccccgtggagtgtgtgtgctggccgccggacgaaggtgtcgatttcgagcgaggattgcagagcaggtgctgggtgttctcttgcggtgggatgtctcgcgtctcgtacagtcggggctcggcgatattcttgttgtctcttgttctgcttcttcgtgttctgctctttattgaggcggtgtttgtatgagtgtcgtactcttttacttatagcaaaccgagagttattgtgcccgtgtattgtttttgtgagttgtgcggtgagcttgaagtggttgattgtttttcttctcccctattgggcgctctagcagtcgcgggtgcgggcagcgacgtgtttcaatatgtagggacgtgccgggccttttctcgaatgggggggtaggcgtgggtgtacgtttgagaggtgagaggactgtgacagtctagcgtcgctatnaatactgcaggagatctggtctgtattcgagatctgctgcagggggggatgtgcgcgagcacatgagcgagcgttgggctatagtagggggggtgatgcgttgacatggagaattgcatggttgttttgatcttggtgagttaggggccgttctcttaggcttgggttcgtggggggttaggtgggtatatgtagcatcgcggccgacttgcccttcgtgctgcgataccgagttctgtgcggtggggtcgggccgcgcgtatattttcggttcggggggtcgcagtgcgtgcggtgtggggtcgcgggtgtattcgttttgggtactggagggcgtcgtgggggagtcagttggggatgcatgggggagtgcgtgtggcggtgtggtcagcgcgcgggggaataaggagggtggtgtttgtgtgtgggctccggctgcgcgggtggtatagatcannnnnnnnnnnnnnnnnnnnnnnnnnnnnnnnnnnnnnnnnnnagcgtgcagcacactattagatattgtcttactgcccgtcccgtgtatagcgtcggtttcagctttggttttttggcgggtnnnnnnnnnnnnnnnnnnnnnnnnnnnnnnnnnnnnnnnnnnnnnnnnnnnnnnnnnnnctctgggcaccggctggggacagaggaaaaggcaccgaaccctgctctcgggctctctccccccagcccgctccggacactgcgctccaaccnnnnnnnnnnnnnnnnnnnnnnnnntgaacaaaatggccgccgccaccagccaggcaggaaacagggcagagcgcaggcgcgacccgccaggtcaccgctcaggccagccgcgacagcctgcaagggggacgaccgaggggagagaaaaaagggccgccgaggaaaccctgggacccgctcacgacggatcacgtcgtcgctgtgggcctctggccggccgaagcccagccagctccgggagagatcgggcaaaagagaaacgtcgtgaagccgaagtctctgggaattgtggtcctggaaatgagagagggaagcacttctgcagaggacttctggaacctgtggttaagaggagccgccggcgcccacccg

SEQ ID NO: 151793 - DNA, 831 bp, Homo Sapiens
cgtaccgttcattaactgtatgacctgcgttttaaatctttgatcggatttggatgctgagccactggaagaagcccttttggctgatgagggtcgagaaggtgtggatcctggtttagctggctggacttgatttagctgcacctgctgtgggggagttttgcatggtgagacttttttggcaggttgaagatctgtttcaccagggtcaggaggaggaattgcatcttgcccttgtcgtgcctctacaggatcatactccttcccatcgtagttagcatcatagaatttcttaaaccattggataaaatccaggttgtcctggaaacgtcctttcactagcttctccactggaattaccttagtcgacgttcattcgcgttaaatgagtgcttgcagaagtgttaaaattgtgaatatattcatgttccagctttgcttgagagttttactttcttcgggactagatgcagccagggaagagcatgtccatgagattggcgataggccgctcctggacaagagctgttccacttttgtgtagtttaaagatactatgtcattaacccatgcaatgatgtcactgtctgctcatagtctcttgggttatcgaggtagaatacacattgaccgccattccccaactgtaggaacgctccccgcgcactgtgtgcttccggaaaggaatgatggtcccgttattatcctggatgatgtcgttgttgttctcgccatttggggacagggtttgggtcggcccaggcattggcgcactcccgagaagggggaacaaaccgctgtgggctggctggtgaggaaggtggctgcgtc

SEQ ID NO: 151794 - DNA, 885 bp, Homo Sapiens
gcccaggctgtggctcagctctcagagggaattgagcacccggcagcggtctcaggccaagccccctgccagcatggccagcgagttcaagaagaagctcttctggtagggcagtggtggccgagttcctggccacgaccctctttgtcttcatcagcatcggttctgccctgggcttcaaatacccggtggggaacaaccagacggcggtccaggacaacgtgaaggtgtcgctggccttcgggctgagcatcgccacgctggcgcagagtgtgggccacatcagcggcgcccacctcaacccggctgtcacactggggctgctgctcagctgccagatcagcatcttccgtgccctcatgtacatcatcgcccagtgcgtgggggccatcgtcgccaccgccatcctctcaggcatcacctcctccctgactgggaactcgcttggccgcaatgacctggctgatggtgtgaactcgggccagggcctgggcatcgagatcatcgggaccctccagctggtgctatgcgtgctggctactaccgaccggaggcgccgtgaccttggtggctcagccccccttgccatcggcctctctgtagccctttggacaccttcctggctattgactacactggctgtgggattaaccctgctcggtcctttggctccgcggtgatcacacacaacttcagcaaccactggattttctgggtggggccattcatccggggcgagcccctggctgttactcatctacgacttcatcctggcccacggcaagcagtgacctcacagaccgcgtggaaggtgtggacccagcggcacgtggacgaagtttgacctggatgccgacgactcaatccaggtgcaaatgaagccca

SEQ ID NO: 151795 - DNA, 741 bp, Homo Sapiens
ccagatgttcaggagtggagactgagagcgccagcacgtccccaatggcctcatggaagccggggttggccccccgacgcagggagacggcagaatccttgtactgcaggtagtacttgtatatggcccatctcatggctgcactagtggagagctggtccatgcgtgacccgtgtgcactgcttgatcctgaagtctttcctgttgtagaagtcccaagccgaggcgtggcacaccacttcccgcccgtcggccggcttctccagcatcgacccttcccagaactcgggaggcatgggggagagctccagggaggtgaagcactcctctgccacccggaacatgtgcgtggcgttccagccctgctgcagcatagtactggctgacatcgaggttgggcttgtctgggaaaggcaccaccatgtcgtagatgttttcccagctctgggcccacatgtctcaccagcagatgagacagggatcgggtccccatgaggttgatgtatctgtctccgtatcggcgatgcagtgcgcggcggacgaaggcatggaggttcaaggtagaggggctctagctgttggtagaggtgttccagatcgtcctcgaaggtgggggagttgtaccaggagcgccagtaggcccccgtgtctgtgaagccgtcctgcttgtaggcttcattgctgagggcagtgaaatcctcgtacagcggtttcagcgggatgcccgcagcgttgtgccag

SEQ ID NO: 151796 - DNA, 1050 bp, Homo Sapiens
  misc_feature (178)..(179): n is a, c, g, or t
tccacggaaggcaagccttttgggccccagttggtttcggaggcctaccctttggcccctgggggctgtgttttgggtggccccaggggcccagaagcccccccttttccatttcggccgggacactgggggggaccccaggtggcttctgttggtttttgcttctggtgcccagagnncctcgttcgggggtccaagcccccaggggcctttgcgagtcagacactgggggccctttgcttgtgttttttctgggagctttgggccgagggttccccgggaccccttccctgaacttttccgcagtttcagaggagagtctgcaagtgagagctgcagtgactgtgccttgtgcttggcacccaagcagggcatgggagtcttaagtggaaccagggcctcaaggacaacagagagccgcatggcagggtagacacctggataaaggtgggtggggaagcccactgctgcaccccgggcatggctggcacttgattgcttcagagagctcagcagcaggttggtggtagcatgcttggcaagggctggtgtggatgctttggccagtctgccagatagcggcatgggaagcagtgtggcccgacctgcaggcaaccgcatggcagttcggggagcactggctggaggtgatgtggcagttgggttaggggcacgagcttgcagtttcgtctggcttgggggattagctgtgcatgaactatagccatagacatcaccactgcgcaggatggtaggttggaagccatcatctcgcaggccctgcaggaaggccacaagctgggcctctgtggcactgagatcctggctcattgggttaaagacaagcagtgcctcttccagggccttcttccctgccgtggagatgcgcgaccaggagtgcacagctttttcctccacatgctgaaccaccacactcatggcattaggcactgcagatctgcctgggtatccgcaaaccagcgcttggcaccggcgccgccgcggggacccaagacgcgcctctgcgccgatcccgggaattccggaccc

SEQ ID NO: 151797 - DNA, 877 bp, Homo Sapiens
tttttaaggtgagacgctgactttagaaatagctggtgattacagatttaattcatgttattaactccctgccttttacctcctccctcctcccttggcacaactgccagatggatgtggctggaagtcagaggacattctcgtgggttcgtgggcctagggtacaaatgacctcagcgtgacagcaaacaggacagagaagaccaggctcttactcaggaatccaccagccaggagaatgacaatgttgaacaccggaaccctgatgatatctgtcacatttgtaaggttgatttcagagtcaggagtggagacatcggcagttgacttgggtggagcttgggtcacagttctggggctggtatagagtgggcacaaggccttagtggtggtaggaggaatcttatacacattctgggtagaattctcattggagccaggggtccctgaaaaacccttggtcaccaccaagcggatgcgatcgaacagcatgtgaggctccttgggaggctggtagatcacacactgatacagtccagaatcttccacttgaaggttgaccattcggacgcgcagtaaaccatgatcatggtagtcttctagtatgatcctccccacttggactggatgggaattctttgaaggcctctctgtgcatgccagggtcttgggcatctctccgtcccttattatctgccaagctttctggctgctggcaaacttctctagcgtgtagtcacatttcacatccagggtctgcccctctttcagttcatacttttcctcagttaatttagttgcagctcggagttctgagacaaagagcatccacagcagcccccagagcctggtcttcctcatccttcctgtgcaccag

SEQ ID NO: 151798 - DNA, 886 bp, Homo Sapiens
ggcgccgcaatcatttcggggcttattttggttctaaagcccggggcagccaggcctccctgcctggcctcggcggggacgcgggacctggggccccggaccgggcctaaccgccctggccggtccccactgatggtggcggtcggtcctgatcgtcctgatggcagcgaccaggctggactcgggctgtgcaggggcgaggggagcagggcggggtgacgcccggagagcggcctggagagcgcgtgcttcagaaggcgtgggcaccctgtcccctttgcagatggggatgcaggccctggtggcggtggaggggagatgggggcagggacgttgccgggcagaggaagctggaagtttggctgctgtaactgactgggaagcttaaaataacagacaatcatctctcacatttatggggactgggaagtccaagaccaagttgccatctggggagggcctgttcctcacagcgccttccagctcaggcctcgtttataagggcactcaagccttccacgacaatgggtcctcatgacttactcacctcggaaagccccgaccccaagaccatcacattgtgggtgatggcagagcataaggtgccttccccacatgctcgggttggcccagcgtctcacgctagcagctacgtggaatagttattttttctggagaactctgggacccctctgatgtcttggagcacccacacaggccgttcactgtgcacgctgtgaggctgtcgtcttggagcacccacacaggccgttcactgtgcacgtggtgaggctgtcctctggggagttctgctgtagtatggggtcctgtctgtgtcaatgtcccagcgggaaccgcagggcacactagcgtcatccccagacgg

SEQ ID NO: 151799 - DNA, 1122 bp, Homo Sapiens
gattctgtgtgtgtcctcagatgctcagccacagacctttgagggagtaaagggggcagacccacccaccttgcctccaggctctttccttcctggtcctgttctatggtggggctcccttgccagacttcagactgagaagtcagatgaagtttcaagaaaaggaaattggtgggtgacagagatgggtggaggggctggggaaaggctgtttacttcctcctgtctagtcggtttggtccctttagggctccggatatctttggtgacttgtcctctccagtgtggcatcatgtggcagctgctcctcccaactgctctgctacttctagtttcagctggcatgcgggctgaagatctcccaaaggctgtggtgttcctggagcctcaatggtacagggtgctcgagaaggacagtgtgactctgaagtgccagggagcctactcccctgaggacaattccacacagtggtttcacaatgagagcctcatctcaagccaggcctcgagctacttcattgacgctgccacagttgacgacagtggagagtacaggtgccagacaaacctctccaccctcagtgacccggtgcagctagaagtccatatcggctggctgttgctccaggcccctcggtgggtgttcaaggaggaagaccctattcacctgaggtgtcacagctggaagaacactgctctgcataaggtcacatatttacagaatggcaaaggcaggaagtattttcatcataattctgacttctacattccaaaagccacacttcaagaccgcgggtcctacttctgcggggggcttgttgggagtaaaaatgtgtcttcagagactgtgaacatcaccatcactcaaggttcgtcacgtgtcaaccatctcatcattctttccaccctgggtaccaagtctctttctgcttggtgatggtactcctttttgcagtggacacaggactatatttctctgtgaagacaaacattcgaagctcaacaagagactggaaggaccataaatctaaatggagaaaggaccctccagaaaaaatgaccccatcccatgggggtaatacgagcagtagcggcagcatctctgaacattctctggaatcg

SEQ ID NO: 151800 - DNA, 944 bp, Homo Sapiens
  misc_feature (918)..(918): n is a, c, g, or t
acaatccttgatgacattgaagtttatgaagaacagatttcattcaaactggaagagctggtcactatctcctctttcctgaattcttttgtgtttaagatgatctgggatggaattgtagagaacgccaagggtgagaccttggagctgttccagtctgtccacgggtggcttatggtgctgtacgagcgggactgccggcggcgcttcacccccgaggaccactggctgcgaaaggatctcaaacctagcgtgctcttccaagaactcgacagggacagaaaacgggcacagttgatcctgcagtacatcccacatgtcatccctcacaaaaacagagttctactgtttcgaaccatggttaccaaggagaaggagaaactggggctggtggaaaccagctctgcctccccgcatgtcactcacatcaccatccgccggtccaggatgctggaggacggctacgagcagcttaggcagctctcccagcacgccatgaagggggtcatccgtgtgaagtttgtcaatgacctcggggtggacgaagcagggattgatcaagacggtgtttttaaggagttcttggaagagatcatcaagagagtttttgacccagcactcaatctgttcaagacaaccagtggggatgagaggctgtacccctcacccacatcctacatccatgagaattacctgcagctcttcgagtttgtggggaagatgctggggaaggctgtgtatgagggaattgtggtggacgtgccatttgcatccttcttcctgaggcaactgcttgggcaccaccacagcgtcttctatagcctcggtgggatgaactgcccttctctggactccgagttctataaaaacctcacctccatcaagcggctatgatgggggacatcactgacctggggncctgacgctgttcttaccaacgagga

SEQ ID NO: 151801 - DNA, 1093 bp, Homo Sapiens
gactggccccagtgctgcgtccttatcagccgagccggtcccagctcttgctcctgcctgtttgcctggaaatggccacgcttctccttctccttggggtgctggtggtaagcccagacgctctggggagcacaacagcagtgcagacacccacctccggagagcctttggtctctactagcgagcccctgagctcaaagatgtacaccacttcaataacaagtgaccctaaggccgacagcactggggaccagacctcagccctacctccctcaacttccatcaatgagggatcccctctttggacttccattggtgccagcactggttcccctttacctgagccaacaacctaccaggaagtttccatcaagatgtcatcagtgccccaggaaacccctcatgcaaccagtcatcctgctgttcccataacagcaaactctctaggatcccacaccgtgacaggtggaaccataacaacgaactctccagaaacctccagtaggaccagtggagcccctgttaccacggcagctagctctctggagacctccagaggcacctctggaccccctcttaccatggcaactgtctctctggagacttccaaaggcacctctggagcccctgttaccatggcaactgactctctggagacctccactgggaccactggaccccctgttaccatgacaactggctctctggagccctccagcggggccagtggaccccaggtctctagcgtaaaactatctacaatgatgtctccaacgacctccaccaacgcaagcactgtgcccttccggaacccagatgagaactcacgaggcatgctgccagtggctgtgcttgtggccctgctggcggtcatagtcctcgtggctctgctccctgctgtggcgccggcggcagaagcggggactggggcccctcgtgctgagcagaggcggcaagcgtacggggtggtggacgccttggggctgggccagcccaggtcctgaaggagggggccgtgaacagtgaccgtgggagggtccggggcgacagggtcggggtcccaagggaagggtcagccgccgccagatcacaa

SEQ ID NO: 151802 - DNA, 832 bp, Homo Sapiens
ctggtttctctatagctcttgtgcgctgaaggtaccacgatgtgtagctggggatatagagccgcgtttcctcctgagcccttcccggatgaagagttagggttccagcccgggcggcacggcttgggagccagcagacagggcccgaccgttggcctacgcactaccctccagagccgccccaccctgcttcatcagcttcttgaacttggatcgcttgttttggaaccagatcttgacctgagtctgtgtgagtcccaaaggaggccgcgagctccgccctctccggcagagctaggtactgagtttgctggaacctccggttcaaagcctgcaactgcaaactggaataaatcgtcctgggtttacggatcttttttcccttgccattgaagcgcacttcaccgccttccaccaccgtgctcttctccgagtccgcccctggagggacagcagaagtagggcccgttgttaatacgaggggccgcctttagtgcgaacagccgagagcgagtggctaccgaagggtggcggaggcagcaccagggagagaacgttcaagaaactctgaaagccagggaagggtcccccaaaatccgagggcctgtcccgggacgctgcaggagggatagagccgttcccaggagctcagctcctgcctttgcagggaaagtttgctatttttgcaggcggtagttgaggtttaattacccttaattgcatacattgtttatacgcgctacagcaatcaataattaccgagactaactacgtgcacatgtgggtttctgttttccagccggggcattgtgtgctctgcacaccgagccgc

SEQ ID NO: 151803 - DNA, 436 bp, Homo Sapiens
tttttcatttttctaaacttttgtttatttttatagcaatcgtcatgtttagagaagtaaataacacatttaaaaaccttctcagggccaaaggatgccagagtatttacaaacacatggaggaagggcggcaagacatgaggggctggggctctggggctaggactctacccaggaccccgccccaggccctgagccaagcatggacgctgatgtcagccaccaggactgtcccactggccacagtgtgggctcagggaacattctggcagccgtggggttctgttcagtgggcctggtggagaccctctagccgacctgtggccccgcctcccatccagggggcttcccgtgccccacaggccagctcaaaggggtctctgggaagcaccgaaggacagggggcagtgtgggggacacagggtctgggacagag

SEQ ID NO: 151804 - DNA, 1037 bp, Homo Sapiens
ggttcacggagccctgggtttaggggccctgcctgggttacagccctggcaagagcaccttggtctccatcccgtaaagaagccttggcccccccagggaggtatgaccaaccggccgcaggagaagccagttgtggttcccagtgtcggtcttcaatggccacatacttgcttccgccgagtccttcgatggggcgcttgcagctgctgcacttaggtgccaagagttctccataacaggccacacagtagggatcttcatcccgggaggtgaactgctgccctgccaggggcgtctggcatccggtacagaccagacattctcgatgccatggctgatcacggtatgtcactccaccctgtgtcagcgtcttgctgcagcgggcgcagcgaggagcaaacttgttctcatagcagggcacgcagtagtgagcacccttgtcgggcacaaaagaacgggagcccagtggctgttcacagccactgcacaggaagcagtgctcatgccatgtctggcctccatattccagcttccgggacccaggcatgacagtctccccacaagcggagcactgcgaggaaaacgcactgcagtagcagtcattgcagagcagctcactgtcctggcaggtgaagggttcatcggctagtgagcgctggcagcggcagcagcggaagcagccctcgtggaaatggcggtcttcatagaacagctccctcgagtcatgcccgataagctgctggcactcagcacaggtgttggcaaaggtattgtcatagcagggcacacagtaggggccgctgtctgtctggatgtacttgcgtccatacagggactcgttgcattttgcacagtcaaatgactcgctcatggtggcaaggggagagaaccctcgaagcgggcggcgggagcggggagcgcgcggcgcaggcggggccgggaaccgggcgccgcgtccctcggcggctcctacctgcgggccgggccaagcgggggccgagcgagctgccggcgaggctgccgactgcagacggac

SEQ ID NO: 151805 - DNA, 1500 bp, Homo Sapiens
gttattgtctgaacctgtagtgccccggtattttgcttccgtcctgggaatccggtggcttctggggcatttccttgtgatgcagaggaccaccacacagatgacagcaatctgaattgttccaatcacagctgcgattaagacatactgaaatcgtacaggaccgggaacaacgtatagaacactgtagtcctttttttcacagtgttgtccagtataaccagcatcacacctgcaagatggctcctgcatattgatagaatgctcacacttcccatgcatgcagaagccattgtaatgttccggacaaggtatgtggtgttctctggcactttcttctaatttgttagcattctctgcataatctgttcttgcataatgcccatcttcagacttagtagttgtagttgtgttatcttgacatcgacccaaagacatgacttcaattttctcctgtttctgacacgatgcttctttgatttggcatgcattatcataagatttcccatcagaagcgcagaggggattgaagttggtttgagaacagtcaatattacacacacaccagacatcctcggcatcttcgtcacattctgcaccaaactggcaaatatcacaggtggatgtctccttttgactagtttctccagagccttcatggactccatctccagatcctgatcctgcatctgtggcacatgatccttctgacaccacaagtatctcactctgctgtttgcatgcagcctgtcgcaggtaacactcattctggtagctctccccattggagccacacacaggcacatagtcattgttgcacttgaactgacagacgcaagtcacagtgtctccaattcttaaacattccccatcagatttacaggtgttggtgtcacacgaggaagagatcatttttctctgtcatcataaccagagctattccagccggtgggcgttttggcagtcacttaaggaggtagggaaagcagcgagcttcaccggtcgggctacgatgagtagcatgacgggcagcagcagcagccagcaaaagccctcgcaaagtgtccagctgctgcactgccgcggggactcccacagcaccatgactagttcgtgcaactctgcagcagcaaacggcttccgaggaacacaggatcgcgggggccgggcagcgggctactgagcatcccgcggacggcggcagcagaggcggcggcggtggcagtggcacccggcggggaagcagcagccaaacccgcgcatgatctcgagagtttcagcaacatccagggactgggctcagccccggagcgagagggtcgtccgctgagaagctgcgccggagacgcgggaagctgctgccataaggagggagctctgggaagccggaggacaggaggagacgggagtccaggggcagacgagtggagcccgaggaggcagggtggagggagagtcaaggcgccccgcagcccggcagccgcctctcgagctctgccg

SEQ ID NO: 151806 - DNA, 935 bp, Homo Sapiens
  misc_feature (25)..(25): n is a, c, g, or t
gcaggctggtactgcccacgagtantggatgcggccgtgggctctgtggcgactctggcgactgagcccggggatgacgcctttcggagacttttccgcttctaccgtcagagccggcccgtgaccgcagacctggaaggggtcatcgacttctcggcggcccacgcagcccgtggcaagggtcctggtgcccaaaaggtgatcaaatctctagctaaatgtgtcttctgtcagtgagcagaatgcatatagagcaggtcttcagcccgtcagcaagtggcaagcctatggactcaaaggctatcctggcgtttatttttatcccaaagccccttcctcccaggttaccagtggcactgggtgaaacagtgccttaagttatattcccagaaacctaatgtatgtaacctggacaaacacatgtctaaagaagagacccaagatctgtgggaacagagcaaagagttcctgaggtataaagaagcgactaaagcggagaccccgaagtttactggagaaactgcgttgggtgaccgtaggctaccattataactgggacagtaagaaatactcagcagatcattacacacctttcccttctgacctgggtttcctctcagagcaagtagccgctgcctgtggatttgaggatttccgagctgaagcagggatcctgaattactaccgccttggactccacactgggaatccacgtagacagatctgagctagatcactccaaacccttgctgtcattcagctttgggacagttccggccatctttctcctggggtggtcttcaaagggattgaggcccccacggcccatgtttatgccacagtagttgaccattcatgactaatgtcgggtttcaagcgcctcttgaaccacgcagtcccttcgtgtcttccaaatccagaaggaaggctgctca

SEQ ID NO: 151807 - DNA, 812 bp, Homo Sapiens
cgggagaaggtccgagcacacgcctggcactggtacttcttgacatctgagtggttctggagctgggcccgcaggttggagcggtcagcgaaggcacggtctgcagtggggacaggagaagggcttctcgccagtgtgggtccggacatggccttgtagcagccagggcctagagaaggccttcccgcaggttccgcagacgcagggcagcgtgtggcttcggatgtgcatcttgagggcacccaggctgaggtattccttgttgcagtatttgcagttgaaggcctttcgagcctggagatccttggcctcagagagctgggccagctgcttgggcacttggcccaagcctgggaaggcagcataggcctcggcctccaaggaagagactgaagtagaggagaaggacgaaggagccggtgagggtgggctggggggctgggagcctttcccactgtcctcatctgacagggaggtcagctctgccaccctgggactctcctggagccgaagggaggcccaggcaattggctgggcttggggcgccaggacagagtcccagatgagcattggcagcgaggcggtggggttgaggatctccggaggtgggatggctgccagcaggtgggcctggtcgtagggctgctggaaggtaaactctggattagagtcctgcagctcgctgtagttaggcttccgattggggtcggagggcttcctgacgaggaaagagcgcggcatagtggtcgaggcacctggggtcgccgattcgcgcagcagtagcgcagaagaaccactcgctaggccgtgcc

SEQ ID NO: 151808 - DNA, 1368 bp, Homo Sapiens
  misc_feature (519)..(519): n is a, c, g, or t
  misc_feature (543)..(543): n is a, c, g, or t
gaggtagggcaagaaggccagcctcccacaacaaagtgctctagggctacagcaaaaactgaagccagccaagatggggatacaacataaaccactcccagtgggatgatgttcaatatggcagcttagaatttgccacatacgggtccccaaaactggtcacctgaggagatactcctggtcctacatacaaatgacctgcagaaactcagatcccaggagagtaatatagggttctgttcaaaagcaacagcccctgtgtcttatgtttaacttacaaacatctgcacagtatttgttcccatggaagaggcataaggggctgtaatgactgacctctgtcaactcagcccaagcagaggtgactagaagacactaagcagcccagcctcccacatacctgccctgtgcccagtcccacctgagtaagtctcctggcccgcatcttctctgaccatctcagagcagaaccgagagctcacttttccaaaactgtttctaactgaccagggtccaaanggcacagcatgatctccttcccancaagccctcctcacagactgaagagtggaggttccctctttgggtcttccaaaatcacagcataatggtgaggagaggggtgggagagtgggactttccaaggaaggaacctcagagtcaacaactggagcccacacttctaaatggtccttttcttcactgggaggcggtgagggagagctcctcctacccgatcttggaagaaagcagcaactcttaggctggtctcctttagccaggtgagaagagctctgcctctcttcctgggcccagccacagtttgacatagcatatcgaagaatggcatcagacacagtcatggtacttcggccctggacacaggcttctatctcaggcaccgagagctggctttgcaggaataggtgcaactggctgtctgacaggagaaccacactctgcaggaccttttcaaggaagtgctgcagaccttgtcgtcgcttctcaatgaactcatctgaggtgccgaagaaggttgacttcccaggaagttcaggaacaggcaccaaaccagcatttctctgtagctgctttctcagccacacgaactcacggtagcggcgccgcacacaggaagtcttggcagtaaaggctttgctgttggtatggaggaatatcttataatccacataagagttccaggagccctcattctgcactcgggggtcctgaacacgcactgtaatcacctcctcctgttcttggttctccgacatcctacaccaaaagcccattggaaggaaacatctgagaacagcaccagctccccacagcgacaccgcccgcgatcccgggaattccggaccc

SEQ ID NO: 151809 - DNA, 827 bp, Homo Sapiens
  misc_feature (91)..(153): n is a, c, g, or t
  misc_feature (745)..(787): n is a, c, g, or t
cataatctccccctcccggcaagatcgtgatgttatctcttggcagcagaaggttcgctccgagcgggagctccagaagctcctgacaagnnnnnnnnnnnnnnnnnnnnnnnnnnnnnnnnnnnnnnnnnnnnnnnnnnnnnnnnnnnnnnncaagtgaaagaggcaggggagggggatggagattattagcctgacggtctagggagtcatccagggacaaactgaggggctgcccggctgcagacaggaggagacagagaggatctattttagggtggcaagtgcctacctaccctaagcgagcaattccacgttggggagaagccagcagaggttgggaaagggtgggagtccaagggagcccctgcgcaaccccctcaggaataaaactccccagccagggtgtcgcaagggctgccgttgtgatcccgcagggggtgaacgcaaccgcgacggctgatcgtctgtggctgggttggcgtttggagcaagagaaggaggagcaggagaaggagggagctggaggctggaagcgtttgcaacggcggcggcagcaacgtggagtaaccaagcgggtcagcgcgcgcccgccagggtgtaggccacggcgcgcagctcccagagcaggatccgcgccgcctcagcagcctctgcggcccctgcggcacccgaccgagtaccgagcgccctgcgaagcgcaccctcctccccgcggtgcgctgggctcgcccccagcgcgcgnnnnnnnnnnnnnnnnnnnnnnnnnnnnnnnnnnnnnnnnnnntgtgcgcttctctgcttccggagctgctgctgctcctgct

SEQ ID NO: 151810 - DNA, 1199 bp, Homo Sapiens
  misc_feature (49)..(132): n is a, c, g, or t
  misc_feature (230)..(260): n is a, c, g, or t
ggagtggggaaagagcgccggaagaaaacgggtgtacaggcggcaatannnnnnnnnnnnnnnnnnnnnnnnnnnnnnnnnnnnnnnnnnnnnnnnnnnnnnnnnnnnnnnnnnnnnnnnnnnnnnnnnnnnttattgttggaggaagatgtgtggggtgggtgggaaagaggggtaatcataaggcgcgccgcgttctaggtttttgcgcattgaattgatgagggatnnnnnnnnnnnnnnnnnnnnnnnnnnnnnnncagagtagtaaggagaatggaggggactagccaagggggcgaccgggaggggggcaagacgggggaggcaccacaggtgcgcgtaaaacgagccgtggtgttgcagcagggatacggccttccccccaggtgcattgtatgccctggaggatggcccatggctgggaaaaggtaagccaggcagggtttcgattggggcgcagggatgtacatggtcgggacaaaggtagtgcccaggtagaagcagaggcccacggcaccccctaactctgggcccagagacctggaaatcatgtagtaggagccaccagcaggcactacaccattcgttgcaattgcactcatggagatggccgtgagcatcgtacaggagcagcagatgaacaccatgcagaaggactccatgatgcctgcaatgcccaccacccaggtgagccgcaggaagaggatgacgccaaagatgttctgcaggcacggcaggtacacgcccatgaaggtgcccatgcgtggggcctgcaccggcttcttttttccaccctcattgttttctgcctcttcatgctccctacttccctggggcaggttggtgtagttggccaggccactgagcaaggaggacaccatagggctggtgtccatctcctcctcaaacaaggccatgttcttgccatcatactcctttcccttctctgtgtcggtgctgttgatgaagggactgctttccttggggttgccatcacccgggttggctcccccatcgccgtcctcgcagtccgtcaggttgtttagcatggtggcggcgcggcccctggtccggggatggctgcgccgcctcgcccgcgcccctctacccgccttcgccgctctctcgttcgctgtagctctgtctcgctctccgctccacggaggaagaagcatgcagtgcccgcccgcccggcg

SEQ ID NO: 151811 - DNA, 1070 bp, Homo Sapiens
  misc_feature (336)..(398): n is a, c, g, or t
cgcggtatggtgtagttggtggggcttcgggaggcaggaagttctttggtcgtcggctgagttgtgtccctggcgtgaacgcctgtggtgtaaagcacgttctaagtcggtcgctgcgcgtgtgtggtagtacgtggttcgtggccacgaaaaggtctcgacgcggtctcttccactagtgagacacattggcggtcctgttggatcataccggtatcatacgttgggtcggtccatagaggcagtgaaaggagcggaagcggggaagggcggtgggattagcggggtccgcgcaccccgccggggctcacgcctctagacaaactgcgcccgttnnnnnnnnnnnnnnnnnnnnnnnnnnnnnnnnnnnnnnnnnnnnnnnnnnnnnnnnnnnnnnnccagcctttctccttagacacgaaccacaggttgccgacccagagcaccaggttcaggaagccgtacaccaccgaggtgttgagtcccgaggtcacagggtctctcagctccttgcatgtgttccctgtctggcggcagacaggcatctccttgataatgttctctgggtctgtggccatcttcacatctgacagccccttggcccatgccgatgagctaactagccacatgaaggcgaacacagccgtggccagaaagtccagcatgggccctttgttattctctcggtacttgttctgcaggaagatgtaggtggccagagcccccatggagtagaggaaggcaaacacggccacggtgacaaagaattcggctgacgaggagtagtccccaactaagaagaccttggtggtgccccctcggcaggtgggtgcatcaaagtacacttggtgcagcctgaaggggtactcgaactcgacctcgatgctgaggtcactctcggtcttgttggcacaatccacgctcagctggagctccccactgtagctgccgcatgtggcaaaggcgaagatggcgaagacccattgcagcaccttcacaaagccgaggggctccttgaccacccggaactgacccccagccaccagctgattcaccacgtatcccggaaa

SEQ ID NO: 151812 - DNA, 1147 bp, Homo Sapiens
  misc_feature (69)..(82): n is a, c, g, or t
  misc_feature (372)..(430): n is a, c, g, or t
agcgtaagccgcctccaggcaatcctccttcccctcaatatccgctggccaaccgcgccgtaaggagannnnnnnnnnnnnntgcgggtatcgtcagataatcacggtgagcgtgaccgggcacgccagccgcccgctgcgagccatgcactgggccggcgcccgcgggctcggaacgagcgtgcgcgcctcccggggtcggtctaaaggcattgcggtgaagtgggcttagcgcgcggagggaggtggggtgccggggtctggggcgtccggcgtaactcgtcacggggcgggcgcgtgcgcacggggggacaacggggtgtcgcatccgctgggtgcccgctgcacggccctccacaatctacttgccannnnnnnnnnnnnnnnnnnnnnnnnnnnnnnnnnnnnnnnnnnnnnnnnnnnnnnnnnnccgccccccgggcgcccacgcccgcccgattcccggcctgcgggtaggggggtggcgggagccgtggcaggaggaggcgcggggacgtgcagggctgcctgggggtcgtgaggcctccgggttgaactctcacattggtccatgcgctcctggtgcaagagccggcagcgttcaggcaccagcagggcctcactcacaaattcaccaggcaggcagcggaagggcacaacctggtggtgggggtgggcgcagctgccgctccgggaacccccgcaccagcgctccatggggatggcctgcgtagcctgctccacacgtgcaatctgcagctccgggtacatctgtctgcagtactccagcacgcgctgcgggtcccggagacagcgtcgagagcgctgtgggtctggttcccagcggccggtgcgcaggtcccggtgaagggttaggcgcccgcatagtccagccacctgggccgaccccggggcctcggccgcgccggggctcccaccggccaggctcccgatggcgggctgcgcgcgcagaagcagcagcaatagtggcagcagcagcggcagcggcggctggcccgggcggcgacttagaccgcgagcagcggggctggcgggccccatgtcccggcccttgcgccctcacgtcacctgcactcccgcccggcccggccccagcggtgacaggagctcccagcgccaccgccgc

SEQ ID NO: 151813 - DNA, 477 bp, Homo Sapiens
ctcagttcggaatcgctgcatcccaggctggggatagacatggaaagggtgcacctgccggttctcagcgccttcatggagcacaggaatgggaatgtagcctggtcggagctgggggtacacagggtggccttccctagcaggcggcagcctagagccctcccgggaagggccattggcagaggatggagtctccttggggccctcagagggcacgcgcgggtcgttccacgtagtggtgcggctgttgtggtccacgaagaagggccagccggtctgcgggtcgatcttgatctcccatccggggggcaaagggtcgcggtcaccgttgccggacgccacctgcatcatgggcgagtgggtggcggcgctcatgctgggttggggtctgcccgctggggcgcgggtgcggggcgctggctccgggcgccgagtctctggccgggccgccgccgtgggcccctctccgccgccgac

SEQ ID NO: 151814 - DNA, 1061 bp, Homo Sapiens
  misc_feature (139)..(139): n is a, c, g, or t
gtgtaagagcccccaggccagggccctgggaggtgggaagcaatcttccccaggccaaatgagggggtggcagaagggggccccctttgggggtgaaagccggaacccaatttggttaggacctggaggtggaagggtncttaaggccgacccccgaatgatggacgggccaggggttccagcatcctgcagctgaatcttgagcatttccatgggacaggtcaccaacgaccctggcacatcccaggccccacacccggcaagcatctccatcttcaggttccgctgcatcccatctcccatgagcagccgccggaaaaagtcgttggccgccagctgatggcccttctctggagtgaccagagtgaggttcactgcagcccctcggtacatgccgaagaagccctccgcccgagccgtcttcatcaggcagtcgatcattcctttgtacatggctttcccatgctggttctgcaggcgagtcttggccaagtcgatggggaacacgcaggtcacccccacgagccctgctacacctccattgatgagtttggctgtgatgctcagatcctggtgggtcattctgcaggggctggggatcccaggacacaaggctgctggctccttggggtagccgctgttggggctgtctgggggaagaagtggaagcttccttggctctggccccgtagcagtgtggacagagcacgggttttgagtgcagcctggcccgagccaccttcccggcaagtgacgacctccttgggctgcggcttcctcccctgctttcggtaagaacctctgccttttctggaacccaggatatagttcagatcgctgctgagctgcaagcgagtcgacgttcatctcagttgttgaggcactcacgggccaggcttcactcgactcttctcactgcctactcagttccttctcaaagcaaagcccgtggatatatccaaggaactggcttcattgcttttaaaaattctgtccagctttaactggctagaataggggtcctcgtccttgtcatatcccgggaattccggaccggtacc

SEQ ID NO: 151815 - DNA, 798 bp, Homo Sapiens
gatcctcctagggcctagcccgttccctgaagatgctgatggtctgtggtgcataggagacacttgagctggacagttctcctccgtggtcacctgagctccttggcgtttcatctgacaggtgaggtttggtccatggtcctcggccctgggggtgaggtgagctccgaggagcggtggtctcggggtccagggggctgagggcattccccgtccaggagaatgtgagaggtggtcccgcttcacaggatcctggaaggctgcagctcagccttgtggggcggccggactccagaggctccagaaagtggatgtcgggtttctctatcagggctgtcacctccaagttcagcttattctgttggtagctatattttacatcccttcctctctccacgcggaagaaatagcttcccgtgtcctccattctggcatctccgatgctcagggagcagttcttcttctggacatcacccaaggaggcaggaatcggaccctgggtctctggcttcactcttctgtctgggttgtttgtggccacagcctcagcgtagtatgggatctccccgtcccggaaccagtagacgtagagtgggggagaggaataccaggatctccaggggtaagagaaggagcggggcacaaggacgcacaggccctcctgcaccgtcaccgacttctgcacttgcagctcgtacactggcttctcctgcagggaccccccccacagcaggggcacgcagcagcaggggcagcatgtctccatccgccagggccccagcccagtcccagtccggc

SEQ ID NO: 151816 - DNA, 1277 bp, Homo Sapiens
  misc_feature (26)..(36): n is a, c, g, or t
  misc_feature (52)..(62): n is a, c, g, or t
  misc_feature (66)..(75): n is a, c, g, or t
  misc_feature (80)..(95): n is a, c, g, or t
  misc_feature (98)..(110): n is a, c, g, or t
  misc_feature (130)..(191): n is a, c, g, or t
tctttttattataaagaaagaacgannnnnnnnnnnaaattaaatattttcnnnnnnnnnnnccannnnnnnnnntccgnnnnnnnnnnnnnnnnttnnnnnnnnnnnnncagggggggtttcccccggnnnnnnnnnnnnnnnnnnnnnnnnnnnnnnnnnnnnnnnnnnnnnnnnnnnnnnnnnnnnnnttccttttggcccaaaccccctggttttaaccccaaattgaaatttaccccaagccctttccccccatttagtctccgggggtaaaggaatgcccggcccaagtagtcagtcatccccgggtttaagaagctaaagggcgctggttgcggatcacaaagaaagcgtatcctcgggccggtctgattggagtgatttccatgtagataaacagtaagttgtccaacacttttgagatgtcacttgaaaagaggagtttgtcactccaggaggcaccacaacttcatcggggagctcaaggatagtaatatttttggaacgaaatgtgatttcaaaagtgatcacccagggttggcatttaatggtggccgcagggtgaggctgacgttggtcgagctgccgttctccagctttacgacaggaggaacagtgaggctgacgcttgactcacatttctctacgagcttcaggggaaaaaggataaaaatagtcagccaattccttatcatgtttctcgatttctcagaactctgttgcttacgggcgcctagcgagctctcacaaaacacagtaatcctcaatgttactggaagaggcacgagctcacggagtcctcccttcgcccagtgtgaaaacccggaggggaggatggggtctcgtgctgctcagtcccccggagccccgcactccgcacgtcaaccggcgctctcgcaaaggttctcctcagcgtctccaaagcaatctgagcgcccccaggctcgaggaaccgccctcacgggacgcatgagcctcgccaggtgccggtcaggaatgcaccgcgttcccctgcccggctagactttgggagaggcgggtccgctgtcacctgacctccgccacctgactcgtggggccggatctcggcgagatgagctctgggagttgtagtttccgcgcgtcttagacggacagagcgcagctgggtcgggccggggcgcagagatcggggctccggcgtgagggaagatgaggtccgctgccagggacacagagactcttggagccgccagcgcctcccggctcctttcgatcccgggaattccggaccc

SEQ ID NO: 151817 - DNA, 1469 bp, Homo Sapiens
  misc_feature (764)..(927): n is a, c, g, or t
  misc_feature (929)..(936): n is a, c, g, or t
  misc_feature (938)..(942): n is a, c, g, or t
  misc_feature (944)..(951): n is a, c, g, or t
  misc_feature (953)..(953): n is a, c, g, or t
  misc_feature (955)..(957): n is a, c, g, or t
  misc_feature (959)..(1106): n is a, c, g, or t
  misc_feature (1111)..(1112): n is a, c, g, or t
  misc_feature (1116)..(1117): n is a, c, g, or t
  misc_feature (1119)..(1261): n is a, c, g, or t
ggtccggattcccgggatacccacggtgcctccctccctgggatctacacagaccatggccttgccaacggctcgacccctgttggggtcctgtgggacccccgccctcggcagcctcctgttcctgctcttcagcctcggatgggtgcagccctcgaggaccctggctggagagacagggcagcaggccctgtgtccccaggaggctgcgcccctggacggagtcctggccaacccacctaacatttccagcctctcccctcgccaactccttggcttcccgtgtgcggaggtgtccggcctgagcacggagcgtgtccgggagctggctgtggccttggcacagaagaatgtcaagctctcaacagagcagctgcgctgtctggctcaccttgtctctgagccccccgaggacctggacgccctcccattggacctgctgctattcctcaacccagatgcgttctcggggccccaggcctgcacccgtttcttctcccgcatcacgaaggccaatgtggacctgctcccgaggggggctcccgagcgacagcggctgctgcctgcggctctggcctgctggggtgtgcgggggtctctgctgagcgaggctgatgtgcgggctctgggaggcctggcttgcgacctgcctgggcgctttgtggccgagtcggccgaagtgctgctaccccggctggtgagctgcccgggacccctggaccaggaccagcaggaggcagccagggcggctcctgcagggcggnnnnnnnnnnnnnnnnnnnnnnnnnnnnnnnnnnnnnnnnnnnnnnnnnnnnnnnnnnnnnnnnnnnnnnnnnnnnnnnnnnnnnnnnnnnnnnnnnnnnnnnnnnnnnnnnnnnnnnnnnnnnnnnnnnnnnnnnnnnnnnnnnnnnnnnnnnnnnnnnnnnncnnnnnnnncnnnnncnnnnnnnncncnnncnnnnnnnnnnnnnnnnnnnnnnnnnnnnnnnnnnnnnnnnnnnnnnnnnnnnnnnnnnnnnnnnnnnnnnnnnnnnnnnnnnnnnnnnnnnnnnnnnnnnnnnnnnnnnnnnnnnnnnnnnnnnnnnnnnnnnnnnnnnnnnnnnnnnaaccnncccnncnnnnnnnnnnnnnnnnnnnnnnnnnnnnnnnnnnnnnnnnnnnnnnnnnnnnnnnnnnnnnnnnnnnnnnnnnnnnnnnnnnnnnnnnnnnnnnnnnnnnnnnnnnnnnnnnnnnnnnnnnnnnnnnnnnnnnnnnnnnnnnncaccccacgcaccccaacgcgaagcatgatccacacctaccaagcctcccggcctcggcaggcgcagcatcccttcgtgccgcggcccctcccagtaccgtgcagggctgggagcggcgtagacggaaggtatcctaggagccccacgctccgccccaatagcctagctacaccggagcgcatctgcacagctcaacgttccactaga

SEQ ID NO: 151818 - DNA, 1033 bp, Homo Sapiens
gccaggctctccacccccacttcccaattgaggaaaccgaggcagaggaggctcagcgccacgcactcctctttctgcctggccggtccactcccgtctgctgtgacgcgcggacagagagctaccggtggacccacggtgcctccctccctgggatctacacagaccatggccttgccaacggctcgacccctgttggggtcctgtgggacccccgccctcggcagcctcctgttcctgctcttcagcctcggatgggtgcagccctcgaggaccctggctggagagacagggcaggaggctgcgcccctggacggagtcctggccaacccacctaacatttccagcctctcccctcgccaactccttggcttcccgtgtgcggaggtgtccggcctgagcacggagcgtgtccgggagctggctgtggccttggcacagaagaatgtcaagctctcaacagagcagctgcgctgtctggctcaccggctctctgagccccccgaggacctggacgccctcccattggacctgctgctattcctcaacccagatgcgttctcggggccccaggcctgcacccatttcttctcccgcatcacgaaggccaatgtggacctgctcccgaggggggctcccgagcgacagcggctgctgcctgcggctctggcctgctggggtgtgcgggggtctctgctgagcgaggctgatgtgcggggctctgggaggcctggcttgcgacctgcctgggcgctttgtggccgagtcggccgaagtgctgctaccccggctggtgagctgcccgggacccctgtgaccagtgaccagcaggaggcagccaggtcggctctgcagggccgggggaaccccctacggccccccgtcgacatggtcttgtctccacgatggaccgctctgcggggcctgctgcccgtgctgggcaagccatcatccgcagcatcccgcagggcatcgtggcgcgttgggggaacgctcctctgggacccatcctggcggaacctgacggaccatc

SEQ ID NO: 151819 - DNA, 859 bp, Homo Sapiens
ggggtacccatcatctaccggtctgtctgcagattgtggcgttttcagattgggcatgccacgttgacgatccatcttttgagtttaatgaatatcggtttcaatttcggggcccaagacttgcactgtgaattctaccatgacgagttgctttgttggacccggcttgtcagttgccactgttgcacggatctgcctccgcaggcacacctcctcccagccttgggccaccactagcctccccatctagcccccttccaggtacctatggtacctataggttctcttgtaataactagacctcccatccaccacctacccgggcccaacctgtgaggctcaggcttggcaacagtcctctgcagctgcttcctcgttcttcctgcctcctctcctgcaccaaaaagagtaatcctcagggggctgggagtctgtgggagcagggccattggagcaagacctcgtagatctttgtagggctgaggtggcaatgtcccggggcccgtcgtagatgaggcaggaagtcccggctcttgttaagggcacagcgcaggttggccttccacttggccggatcggcttcatccacgccttcggtgtatttccctgtctccttggcccaggccattgaagatggtgttatctccgtcctggctgggaccatgaccttgtggcatgcctccaggggatgcagaataatttcttttcccgcgttgacccattgaagccctgggtactggcagctgttcacctgggccaccagccagggcttcacgccgcacgcggcggggtggggtgggagccactgggatggactggttcatggcagaggggtctgtctgcggtgcgcctgcgtggc

SEQ ID NO: 151820 - DNA, 1064 bp, Homo Sapiens
  misc_feature (138)..(138): n is a, c, g, or t
ggaggttcccgctcttctacttccggatagccccattggcttaaaaaggccaccaagctgtttaagttcttgacgagatttcagtcccagtttcctgtttacttagtagacgtctgagtctttggtagcaggtacttngtctcagtaaaatcaaaatttccctgatgggattcagccatcaccagtaggagttttgtagcagtacttcttatacctggactaggagttgaaaaaagcttgaaaataacttcatctaaaattgaatacagggcttttcttcctattctgagtaaatcaccactgttgatctgtagtatattctgtagcatcatcatgactgcagatcctatttggacattgtcagcttgcagtaaatgtaagaaatgatcactttgtagtacattctgaataagttcaacatggcctcccaaaagccagaagagagaatcagtcacaatttggaaaaagtgtagtaattcatctttttcttcagccttagctgcacttgataaaacatgtttgtaattgtctccccaaaactagaaaattttctgcagctgatggaagtaattcattgtaaaattcctctgcatcttctcctggctccaagcccacacagcaatggcttaatatctgtgtaagctgggaaattgtagtccaaccaccctggattcgagaataatcttgactgaggaccaagaggcaatattgaatgagatcataacaatatatatcttgtttgattttcttcaactctgagcttcctaaaggtgtgatgtttattatttcttttaacttcaacagtataacagggacattctgctcagggctttttgcaacttcagcagctatagataagatccttgggtctgtacctgttggcttcatttctcttattaccctgttgccaggccaccgggtccggcccagccttgattcttcgggaatcacttctccctcgccgcgcctgttactgcctccacggatcactcatcctcgcttcgcgttcttccactaaagaacctggggctcccacgccgcactacagcgccgcggccttccgg

SEQ ID NO: 151821 - DNA, 794 bp, Homo Sapiens
ttcctgtttacttagtagacgtctgagtcctttgtagcaggtactttgtctcagtaaaatcaaaatttcctgatgggattcagccatcaacagtaggagttttgtaccagtacttcttataactggactaggagttgaaaaaagcttgaaaataacttcatctaaaattgaatacagggcttttcttcctattctgagtaaatcaccactgttgatctgtagtatattctgtagcatcatcatgactgcagatcctatttggacattgtcagcttgcagtaaatgtaagaaatgatcactttgtagtacattctgaataagttcaacatggcctcccaaaagccagaagagagaatcagtcacaatttggaaaaagtgtagtaattcatctttttcttcagccttagctgcattgataaaacatgtttgtaattgtctccccaaaactagaaaattttctgcagctgatggaagtaattcattgtaaaattcctctgcatcttctcctggctccaagcccacacagcaatggcttttaacttcaacagtataacagggacattctgctcagggctttttgcaacttcagcagctatagataagatccttgggtctgtacctgttggcttcatttctcttattaccctgttgccaggccaccgggtccggcccagccttgattcttcgggaatcacttctccctcgccgcgcctgttactgcctccacggatcactcatcctcgcttcgcgttcttccactaaagaacctggggctcccacgccgcactacagcg

SEQ ID NO: 151822 - DNA, 653 bp, Homo Sapiens
cgttctgctggcgtccgggtgtttcgcgtcgtgttgctggtctcctctccatccgggaccctccccagcctccccatagcgagcggctatgagggctcggaggctggggaaggcatctgggtgaggggagacgtagagggtggacatagttatgagaaggtccgaacgaagtggaaaaacctaaggagaaagagagacaggggaagactgcgggatcgaggtgggtcctatgtttgagtagagaggggaccctcacgggagctccttcgccgcagacacccgagtcccataggactgagggtctgaccaggcaggctgtcaggagccgaggacctggctctcagaggggcagtgtcagtggggagttcctggggaagaggaactatccaccatcgcggggcttcggggagtgtggaaggctctcaggagcgggtcggcgtctggttggatgcgggttcgagccgcgtgtacgtactggagggagatggtcagactgggccgggaatccacctcacagccaggcgccggccgcggctggaccggccgagcggcccgggcggaggagtcgagcgggcagagacggtgggcggctctccaggtgaccctagttccctaagatcgccgccccggcagccggcgcccacgtgttcccc

SEQ ID NO: 151823 - DNA, 666 bp, Homo Sapiens
tactagtgtttcctggttttatttgtagttcctgttcgctctgtggctgttttcgtagttctctcttctttgttgggtgctttgtgggctttgtcgtctgttcttcggttgtgtctcttcttcatgggtgcttcctcccaggctgctctttgtcttggctctcttcttcttgcaggtcttgggttgctctagcatgtcctgctgggccctcccatcggctcgcagcagtcccccctgtgtcgccctgctcgctggggccgtcagccgaggttctgtgtacatggagtcctgcctattcggggttggctggagacagatgcggggctgggctcctccccatccgggaccctccccagcctccccatagcgagcggctatgagggctcggaggctggggaaggcatctgggtgaggggagacgtagagggtggacatagttatgagaaggtccgaacgaagtggaaaaactggagggagatggtcagactgggccgggaatccacctcacagccaggcgccggccgcggctggaccggccgagcggcccgggcggaggagtcgagcgggcagagacggtgggcggctctccaggtgaccctagttccctaagatcgccgccccggcagccggcgcccacgtgttcccccctttgtgacagggagcgtt

SEQ ID NO: 151824 - DNA, 890 bp, Homo Sapiens
ggaccattttagtttgtcccagattttcttggcatccgtgtctcctttttctacttggtggcaatatcagggacatcaagacgtgtgaaataatggaattcatctttacttacaagcagctgaagccacccagagagatccagtttggttttcactgttcctcatcagtactctcatcatagactggatctcggtcagcagtcatttcagaacagattgcagtttccccttcttgtttgatgtccttgttctcgttcttgagctgcatttaataatttattatgcaaacttctgatttttgttttcttctcattcaacaccagaataaaccgcttataaagatcagtctccaaagcttccttagcactcacacatttttcaaatcgtccttgaacatcattcccatctctcagaagcctttcattttctttctgcaggtgctcatttttggcttgattttctgcaatggtgtccaagcaataacaaataagttctctaatgacttcagctgggttttcaactttctctaggttgaaggaaccaagtctgaatgagacatctttcaggtttttctcaaagaagaaataacaagactctttagaaaaattaaacgtgtatacatcagctggtcctgctcctgacaacaatgcttttctcagttcaccaacatatttccctttttccacttgccatgtcatcagcttcttgggaaatctctgattcagaaactgtccctgtccatgctgaatgaccatcagtaagtgtaataaccaaaccagattccagtgttttctcccaagatacttgtagcaaatgagttatacctgggttcagaaaccaggtggattctgcttatttttctctccatttcttaatacctcctccgtgac

SEQ ID NO: 151825 - DNA, 1016 bp, Homo Sapiens
aaggtatttcactttccgggattatgggggatgatggggttaaatttatttttcccttgccctacttaaaacctcttcctgtattttctaaatcttcttcaaaggagctttgtttgttttaatccagaaaaacatcccttgcatgccagttgttagagagatgcaagagaccagtgtgagtacatggccagcccagatctggcaggctgtagccaaatgggaaccaaggctcattatgaagacagagagggaaaactaagtgaagcactaggcctcccctgcatatggctggctgttaggtatgctttacatatactggttcttctcctgtagtaccctgatggtttaggccaggtaacaagaatcccactttgctttttgttccatgtcaatcctcatgacgtagctgttgtggcattaatgcgtttcaccatgacttcttcatattgtttttgtgtcagtaacccttctgttatgcttttactttcttcaaatttgggtaacacaactgcaatgtagccttcagtagatggcttttcttgaagaatagatggcttatggaggatgttttcattcacttccatcaaacgtcctgtaacacaactagacacagtatattcttcaccatctgagcagtaaatcttacagagaggtgcaagctctgttagaaactgtgccccccgcttaaatttcccagagaccttgttctgaagtctgctacagttggtactgatctgataggaaatgcttttaattgtttttccactttgaagaactggatgagattctgccaatgtgatgacacatattcggttagagtgctgtagtatacagtggtcctcacaaaattttcctttgacatccggtttgtaccagcgagtgaagtatcgatccacgagcgaaggcaccaccggctgccgcggcttcgggctcggtagccatggcgacctccggcgccgccacccccgccctccgggaccccagcgcttcctccgcatcccgggaattccggaccc

SEQ ID NO: 151826 - DNA, 533 bp, Homo Sapiens
ctaactcccttgggaattttttttctgtttaatttacatgtggaaatatatggtaaagaagagttagtcacctaaattttacagaactcgacatactagtttaatacaactagaagggacaaaatatcttgttatattgctattagagttctcctttgaaaggcctgccttccccctcctccatcctgggcattatagggatagtagcacagaacctaatataacagatactacacctcctgagatacctaatttgggggagctgagaatttctttaggtgaaagtatacctaaaattagcacctcaaactgctagagaagtatgctaagcatatgctactggattctaaggttcattggatctgtcattaccatgaatatagaggatgtaagtagataatcacagaattacaggaacatacccgcttaaatttcccagagaccttgttctgaagtctgctacagttggtactgatctgataggaaatgcttttaattgtttttccactttgaagaactggatgagattctgc

SEQ ID NO: 151827 - DNA, 679 bp, Homo Sapiens
agtaggtcttggcctagcttggagtctggcggaactctcagtataaaggactgctttggctttgggggcataggaaccacttttgcagccatcatgccttgcaaccacacaccacactcgtttcgcggggcctccagagccacctcttactagaggaaatctgccagagagccaagccctcgaaccgaagctccctccggtgccctttgggcggggaggcggttggtgactctcccggggagcagatgcaaggccgaggaggtgtccacacaccgcctgccgactcctctccgccgtcaaagctctgctgagagcggcaggcgacatcccactaaggaccgccgggccaggctcactctggggcctcttccgctggtcaaggaacacctttaccgtaaagctcagcgtgcgcccctgcctgaggcgctcaccaggctccctacccggccttgctccctcagcaacggacacgctccgctccccagaggcggcctcagcctggttcccgccctcacggagcccctcacctctcggggcctctgcagcccctgagcgtttgctggggacggctcagagactcaggctccgggagagatagaaaaactaggcgcgagcgctccgagccctcccctcgcccttccgagtgccctcacaggtcgccggcgactattcgttcgcg

SEQ ID NO: 151828 - DNA, 932 bp, Homo Sapiens
  misc_feature (106)..(423): n is a, c, g, or t
  misc_feature (641)..(643): n is a, c, g, or t
gggctaggctggtgtttgtcctaagtgggtacttgcttgggttgagaaatcacattttggctattccccgacttgaaccagggatagaaatcgtagtcaccggctnnnnnnnnnnnnnnnnnnnnnnnnnnnnnnnnnnnnnnnnnnnnnnnnnnnnnnnnnnnnnnnnnnnnnnnnnnnnnnnnnnnnnnnnnnnnnnnnnnnnnnnnnnnnnnnnnnnnnnnnnnnnnnnnnnnnnnnnnnnnnnnnnnnnnnnnnnnnnnnnnnnnnnnnnnnnnnnnnnnnnnnnnnnnnnnnnnnnnnnnnnnnnnnnnnnnnnnnnnnnnnnnnnnnnnnnnnnnnnnnnnnnnnnnnnnnnnnnnnnnnnnnnnnnnnnnnnnnnnnnnnnnnnnnnnnnnnnnnnnnnnnnnnnnnnnnnnnnnncgcaggcaccctgaaatcgaaacttgttaggaccaacaagccaacgacagacgaatctgcggggtcctgcgacagacacgccagccccgctcgccacagcacagggttctggaggtcgagctgttctgcgggttctgcggcggcgctgggaagagacggcgcccgggcagctcccctgtcaccggcttggaggacgcggcgggctcccctagcccagnnntgccgccgccgccgcccgggaacgccaggctcaccccagctggggaagctccgaatccctcagatcggcgacctgagtgctgtcgccccgagaaaatggaggcatcgagcaacgagctgtgctgagaccgagagacctcagttctgcgaaatgtcggtgcctggagcttgcgaatgactgcggccggcgggttgtcaaggacaacattccttatggcgcaaccaacagcgctgtcaccaagaaactggactctgagaaaaaagagggtttcggccaccgagaaactcca

SEQ ID NO: 151829 - DNA, 1186 bp, Homo Sapiens
aaaggcggggggttcatccccagggtggggactgttgttgctgtttgtttcccgtaaggtaatactggcggatcccccaccacccattatgggcaacggaggtgggctgtggtgaggagcacaaagaccccatgcttacgccagcgctttgtagcggccacacagggcgggccaggcccccaggaaggcacccagcagcagcagcatgacgtagatgagtgccatgacaaagtccatgttggcgatggcacagggggaggccacggcccagcctgcgctgctgttgccctgagggccgccctcgccactgccccgaaccagggtgatgatcagccactctgtattgatgatgacctctaccagggtcagcagcagagccacagtgaagatcacccagccccggggcccgtggttcttccgggccaggaagttgagggcaaagacgtgagccgccagacaagagaagcagatggcgaacagaaccccaaagaggaagcgccgagaggcacaggtggagaagtcgggcttcaccacacaggcaaacacgaggcagaagaggcccagggtccccagaaggaagaatacctgggtccccagcaggctccgtttcttggtgtcctgcacaaaggggaggctggccaccaggatgatggtgagcacaaacgtggtgacaatgcccgccccagccacggcctccaggacgatgccccacgccccagagcggtcacacaggttgtagtacagggggttgaggccttggctgcagccgggtgggacatggccctgggcccaggcccctgggaacaggaagagaggcagtcccaggcacatcaccaaggctttgtggatggccatcctggctcccaggccaggctctggttgggtccctccaggctgagccgactcgtactttccggctggtgagggagatgggagtttctggccctgccggcgtgtgggttgttgctgttgactgccacgcccccgcatgcgggcgcgcgcacactcacgcgcactcactttctgggctcggccttcgccggggcaattggtgtgagggtgcagccctgcgcaccccccaccgcgtcttccagagagcgcgcctacggacacgcgcggggctaccttggcgcgtctccgtgggggacacctagcctttgtcaccttcgtcctggccctcccgtga

SEQ ID NO: 151830 - DNA, 1361 bp, Homo Sapiens
  misc_feature (110)..(128): n is a, c, g, or t
tgggagaaaccttaagtggaacggaaatgtctaaaactttatcaattgaaatgcttttccggtcaattttcaaaaatccattggtacccttccggaccatgttatttccnnnnnnnnnnnnnnnnnnngcccaaagcccctccccaaactgccctttgaggaaaaaggaatatcccatccattccaggtaaaatgggattctttagtttctttttaccaacactgccaccacgtaaacaaaggtctcaaaagtattaaccaataattttaaagggagaaagattttacaaataggatgaagcactggtacgagggtaatatacgaaggtacccatttgtttaaggctcaattttttctccattataactttcttttaaaaggcattgagtaggtaatactgagtttgagtatttaataaatacaagtcgagaaactgattaaagaaatcaattaaaatattaaaaattaacccttgtatattagccatcaataagaacttagaaagctataaaaggactgattgataaagaatggattttaaacgtatggtaaacgtgctaagcattcctgttttaggtcgatggatcttgaaggccaaagaccttatgcacttaaatagatgtatggcaacatgctgtaatagagacaggtttaccaaggctcagttctgcaacctcaggttgtaaagttctccaaagcagcatctgtgcaaatttcctctgagttttatctgctcggtatggccatgattgaggttatcttctttactggacgacacaagttgtacaacactgatcttgcttctccggcagggatgaatagttcatttgcctgacgatctcagcaaaaagttcatccaccattgatttactttttgccgatgtctccatgaaaggacagccccattcttgagccagagctctgccttctgaagacataacctctctttctggttccagatccactttatttcctactaggattagtgggactttttcatatctcttcactctgacaatttgatctctcattggcttgatatcctgaaaagactgttgattaaccaggctataaaccaggatgaaaccttggccgtttttgatgtagagatctctcatggaggcaaactgctcagttcctgcggtgtccagaatttccagcacggagggggaagagtccacttcgatctctttgcggtagaaatcttcaatggtggggtcatatttctcaatgaaagtcccagtgacaactgcacagtaagggcagatttgccaacccctccactccctaacaccactaccttgtattccctcatgagtctcaccttcaccaactcctaccagagggggggaaagatcac

SEQ ID NO: 151831 - DNA, 842 bp, Homo Sapiens
ggctggaccggtccggaattcctgcgatctaattgagggagtgaggaagagagcagctcgcttctaactggactgcacgttggtgacagcgtcccaagctggtgacagacccactctgtaactttcagctagattcagccaccagatcccagaaacatgacccttgctgcctacaaagagaagatgaaggagctcccgctggtgtccttgttctgctcctgcttcctggccgatcccctgaataagtcgtcctacaaatatgaagcagacacggtggacctgaattggtgcgtcatttccgacatggaagtcatcgagctgaacaaatgcacctcgggccaatcctttgaagtcatcctgaagccaccctcctttgatggggttcccgagttcaacgcctccctgccaaggcggcgagacccatccctggaagagatccagaagaaactagaagcggctgaggagcgaaggaagtaccaggaagcggagctcctgaaacacctagcagagaaacgggaacatgagagagaggtgatccaaaaggccattgaggaaaacaacaacttcatcaagatggctaaggaaaaactggcccagaagatggaatccaacaaggagaacagggaggcccacctcgccgccatgttggaacggctgcaagagaaggacaagcacgccgaggaggtgcggaaaaacaagggagctgaaggaagaggcctccaggtaaagcctagaggccaaagaactttccaggtcagccggacagctccagcagctccacgttccaggccagcctcgcccgccggcttgcgctcccagcactggggtagggggggaagggg

SEQ ID NO: 151832 - DNA, 887 bp, Homo Sapiens
  misc_feature (635)..(685): n is a, c, g, or t
tagaggaaacagcttagaaggaaggcgagacaggtatccagtaaacattgtcttcttagagtaaattcaccaaggagcccttgcgtccaggaaattaatgctctttgaaaatactgacattttaccactttgagtctctgaaatcattttgcctactagcatttgtgacatgcttcgcctgatatatgtagaatgccctgcatttagtatatactaaataattatttattgacttaataaataacaaacctattttaaggatcctttgaccatccaatccaagcccttctgacacccaccactttgttaatgcttcttctgttctactagactagacagcccctgtgggtgtctttttaaaaacactgtaattagatatttgcttgtttattaatttgacaaatatttaattactattctggatggcacttagtagacacacaatgaacaaataatttgttgaatgaattaatggaagagtagtgagagatctaaataccatgtcctataagagacatttgacaccacagcaagatttcaacccagaaagagaggctcttagaagccttagaggctctgagaggttttcagacacctgtctaaaaatatttgaaggattgtcacggatcttgtcnnnnnnnnnnnnnnnnnnnnnnnnnnnnnnnnnnnnnnnnnnnnnnnnnnnaatacttcattaaaatattatttaacttgattaataagctttttggcatcgctttgaattctgtccataaggtaggtgccccagtaacctcacttaagactgagccccacatgtgatatttactctacgggctcagtaatttcccatctccacatattcaaatcatgcatctttcgaagctcatattagggttttgagggaa

SEQ ID NO: 151833 - DNA, 901 bp, Homo Sapiens
ctggcaaaccttcgggtaccagaaagaccccagccagttcaacctgccctgccaatctagacttcagcctggctccatgggggttctccatgctgagtccatccaggaaaagctcaccctagaccttctgagctgaatcttcatcctcacaggcagctttctgagagcctgatattcctagccttgatggcctggagtaaagcctcattctgattcctctccttcttttctttcaagttggctttcctcacatccctctgttcaattcgcttcagcttgtctgctttagccctcatttccagaagcttcttctctttggcatctatttgcagtccctcatcacaccagttcacggcctcggcaaagtgtttcagttccagatggcataaggcacctcttattattgctttgaggtggcagggttttagctttctggcagctgtcacatcattgagagcagaacgaaaattgcccagatagtactgtgctgctgcccggttggtataaaggacagcattcaaatcaggatctgcacatttcttctttaagccttcagtgtatgaaattacagctttcttgtagtcttttgtctttaaagtaatcattgccctcatctttataggtcttggcctgttcttctggagaacgctcctcatccaaaataattgactggagacaagccaagtcaggattctccctgggatcactttctgatggcgctctcgtcataaatagggggaccttttcaaattccttctcccactggtcctcatgaaagccgccacggtaaggctggctctggaacttttccaggaacgagtccatgacgtcgtctgaggtgggatcctgcccaggttgttccatagctgatgccctgccttccagcccgggtcccagcgcc

SEQ ID NO: 151834 - DNA, 766 bp, Homo Sapiens
tgggttcacacgcagctagacacagctaacttgagtcttggagctcctagagggaagcttctggaaaggaaggctcttcaggacctcttaggagccagagaagaggacgttgtcacagataaagagccaggctcaccagctcctgacgcatgcatcatgaccatgagacacaactggacaccagacctcagccctttgtgggtcctgctcctgtgtgcccacgtcgtcactctcctggtcagagccacacctgtctcgcagaccaccacagctgccactgcctcagttagaagcacaaaggacccctgtcccctcccagcccccagtgttcccagcagcctaagcagtgtccagcattggaagtgacctggccagaggtggaagtgccactgaatggaacgctgagcttactcctgtgtggcctgcacgccgcttccgccaacttcagccatcctctactggctgggcaatggttccttcattgagcacctcccaggccgactgtgggaggggagcaccagccgggaacgtgggagcacaggtacgcagcttgtgcaaggccttggtgctggagcagctgacacctgcctgcacagcaccaacttctcctgtgtgctcgtggaccctgaacaggtgtccagcgtcacgtcgtcccggcccagatcatgggctgggcttgagggcaaccttggccccccaaccaagaagccctggccctccagccacagcagtccacagcagcaggggttaagactcaggcacaggg

SEQ ID NO: 151835 - DNA, 737 bp, Homo Sapiens
ccccttttttgtggttacatgttgtttttgtatgtgccctgctgtgcctgggggttttttcagaatgagatcagctgtaatagccatgacaacattgttcagaccaggagtcaccagatgaagggaacattttgtctgtccatttgcacaattctggtgaggtgtgtggttgcactggacaatcttacagacacatttttcacattgagaacttaatgaaatagatacatacaatgtgcaaactccacagacaatgagttatgagtgtgattgttttcttattctgcctcctctgggttgggaggttgcttcccgttgggctgatggcggctgggtcctctaggaggggtactcatactcctcggcactgcgacggccaaaatccatccagcccatgtagtcccggtcacttatcctgtggctggggtccaggttctgcaggttcttaacgatggacattcgtccagaaggagctttccgggcctgctggatgtatcttgccagcagggcgcccaggtgcgctcgggactcgccatccgttctctgcgataccctcagctgcctacggggcgcctcctctgcccgctgcagcccggagcccgcgggatctgcgggaggcaccggctgcgtcagggcgccagccgccagtaccgccatcagcacgcacaggcacacgccgctgttcatggcttttggattaggacgcagctggcttggcgtttccaaccggagcagcc

SEQ ID NO: 151836 - DNA, 708 bp, Homo Sapiens
  misc_feature (613)..(613): n is a, c, g, or t
ctgtggggggtggtgactgggcgaactctcagatgcctcagcaccctcccaccccttcctcaggcagaacgagatcttgtggcgggaggtggtgacacttcggcagagccacggtcagcagcaccgggtcattggcaagctgatccagtgtctctttgggccacttcaggcggggccgagcaatgcaggaggcaagagaaagctgtccctgatgctggatgaggggagctcatgcccaacacctgccaagttcaacacctgccctctacctggtgcccttctgcaggacccctacttcatccagtcggaagagaagatggaagccagccttccccccaaccagacccaggccctccagcgtggactgagcctcctccctcaaaccttctcccttagacctggccagcctctcccagagacaaatttgggccttagccctcacagggccagggccccatcatctctgacatcccagaagactctccatcccctgaggggaccaggctttctccctccagtgatggcaggagcccccccgccactgcctgtggctgtggtgcaggccatcctggaagggaaagggagcttcagccccgaggggcccaggaatgcncaacagcctgaaccaggggatcccagggagatacctgacagggggcctctgggccctggaaagcggggacaggagcccagagagtctgctgcctc

SEQ ID NO: 151837 - DNA, 815 bp, Homo Sapiens
gaaaggaataaggtccattttcagcccaggtgggttccccccttgaaaaagcgtcttttttccatacttccaggaaccaaccccacttggaatgtgccccttctccaaaatggggcgccgaccccaggatcaacaatgggagagggtaattagggaatatcaaaggatggtcgggttcttgtactcggggccatatattcatgtcccccagacatcatagtcagcaccattttcttgctccttttgcccagtagatgcgagtttgtgccagctcttcaacagaaaccattgtgaccacaggacagcgttgcccacttctttcacttccttgggtcacgtggataacacctgaacagaagtgagaaagaccagccagcaccaagagctgaaagaaattgaggtatggacacttggatggtgatgttccctgcctccgtgtgtggcccatggcttcagatgcttagggtcaaaagtgaaagccaacaatttggacccaagtaagaccagggcacttcccaggtgcaaaacaggcagggctgatgacaatccaattgctcacgtagaagaccctccagtgatgtttacaaaacacacagagattggagggtgttcctgggtctccaaaggttgtggatttagtttcacagcttgctgaagaaaaattccactttttctttaaatcctttgatttcagggtaagactccacttctgagatgttctcttcttacagtctataaagcaatgacacatcactttttctttgggtaatcttcagagaggcgacatttccccttctaacttctgttactttccc

SEQ ID NO: 151838 - DNA, 595 bp, Homo Sapiens
catcatcttcagcgggcaccagcggttgcagcccctcttcgactgcctgctcgccatcgtggtcaacgtgtccccctacctcaagagcctgtccatggtgaccgccaacaagttgctgcacctgctggaggccttctccaccacctggttcctcttctctgccgcccagaaccaccacctggtcttcttcctcctggaggtcttcagcaacatcatccagtaccagtttgatggcaactccaacctggtctacgccatcatccgcaagcgcagcatcttccaccagctggccaacctgcccacggacccgcccaccattcacaaggccctgcagcggcgccggcggacacctgagcccttgtctcgcaccggctcccaggagggcacctccatggagggctcccgccccgctgcccctgcagagccaggcaccctcaagaccagtctggtggctactccaggcattgacaagctgaccgagaagtcccaggtgtcagaggatggcaccttgcggtccctggaacctgagccccagcagagcttggaggatggcagcccagctaagggggagcccagccaggcgtggagggagcag

SEQ ID NO: 151839 - DNA, 970 bp, Homo Sapiens
gcggccgcccagcttgcactcaatgatatagcccatggtgcagtcatcaggcagccggatgagagcagatgtgtccatgaaacgggagccactggcccacggagccatcttcaaagccagtttgcgattgatgcagaagccagcacccccagtggcaaaccagaactgtaccagcctcgtgcggttgtggggctgtggctctgaggcatggatgggccggttcaggctgggccttcccacatagacgtcgcgggccagcgggaaggctctcagaagctgcagcagcgcccttgggttcacatagttgtcatcgtccacatggcagaaccacctaagcccactggccaagaaggtgtcgaactcagcagccatcttgcaggacagagctgggtggctgtgttccgcggagcagttggtgaccacaaggtgggaccccagtctctcctggaggcctttgtctgggctgtcggtgaagacaaatgtctgttccctggtcctggaaacccacgtgtcaagcagcagctccaggcgcaagcggtggaaagcccgggtcgtcttcactgcaatgaagacatcgtgtagctgtagcttagggggccccgggttcggctggctcagctcgggggtcccttgtacccgctgcggggacaggttcaagtggtaccgcagacacaggagccccatgcacaggagggtgaggagggctccagccaggccccgcgggagccggcactgcattggttggccctgggaccccagacagctcagcccccaaatcccaaccagacagggaggggaagctggtcaggcaggggctccagcagaggcaaaagtctggcaggcatcaggggctggcaaggagggaagaggtaggagctgaggctctggacccagaggctgagccatggcagcacgatctcgaccgccgccagtcctccacctgctcccgcatcccgggaattccggaccg

SEQ ID NO: 151840 - DNA, 961 bp, Homo Sapiens
  misc_feature (82)..(82): n is a, c, g, or t
  misc_feature (381)..(381): n is a, c, g, or t
  misc_feature (438)..(438): n is a, c, g, or t
ccccgttttccccctttttttaataccaggttcccccccagggccggtatttaaaaaagaggccggcccgggaaggaccccnccccaaaagcccccaggtagggggcctaaggccccttggggggcctggcccaggaaggggattttgcctttcctttgggggggttttcccatagttgggcaaccccaagcctttccggttcccaagtgtttatccaaggcgggcccagaagttttggttttctcctcccttcccaagacagttggaccaatccttccagtgggggacccccagctcctcccagggaaggccacccggtagtcctcgtcgtggttctcctggatctcggccctgcagctctccatttgctgggcggtcanccaagcccactggctcttgggcagctccatgcggctgatgatgccctgaaagcgctngtatgtaaggggtggcttctgcccattcagctcaatgatcctgtccaggtcatagagggtatgagaattctccgtcactacttccacaccagcctccttggccatcttcatgatggctgcatcccgttctttcccaaagggttcagagtcatattcaaaggtcaagcgggtcactccccattccttgaacagccttgggaacacgtcggctggctgtccccggactacaaacaggcgggagttcagtttccttaaacttgtgtccaaatcttccagagactgaagtaggaacctccatcggttgatcccgactgaggaggaggccgcgaaccacgggtcgagaatgtaaacgcagcgcacgcagcgcgccccgcgcacggccgccagcaacgccgggttgtcgtggagtcgcagccctttgcggaaccagtgcaccgaagaggcgctgtccgtgccgggcgctggcgccggggccacagctgccgccgtcgccacagtcgccgatcccgggaattccggaccc

SEQ ID NO: 151841 - DNA, 739 bp, Homo Sapiens
ggggaagaaggtcctgtttaacaccaaatcagactataacacagggtcattttgaggacatttagaacttcatgggcaccatttcctagctgttttggattgggacccgggtgctacaatctaggggccaagagaagtctccactgctcttgcttaagcccatgacaacgttggaggagaaaagccgatctcttgtttctcctccgcctgagacttgtgctccttctagggttttgcttccagaagctgacctctgagttctgaaacgatgtctgtgaggtcaaacggcagaggcatcgaagcatcatccttttcccagtatggccgacattctggcttctgatcagcaggtaatgttcgggcaattcgtgactggcacctggcatgccattctctcctcaggttctggcgtgcagtgagcgaggcaaggatggcagtcaagatttcattcctttgttccacggggagcccctctcttttaacttcatgaagcacagcatttgtcacaccctccatcttcttccacagtgcttccagttgagccatgggttgacaccaccagtcagtgcactttctgtatcgattgccttgaaaccaaaactgcctcagccactcaaactcgacccatgggccaggaggagctggtgataatcttaacctatatatataaaacactgcccagctaaagaaacgtggagccaccacagcttatccgctaagattccggaccggaccagcc

SEQ ID NO: 151842 - DNA, 1420 bp, Homo Sapiens
  misc_feature (615)..(623): n is a, c, g, or t
  misc_feature (871)..(871): n is a, c, g, or t
  misc_feature (1165)..(1165): n is a, c, g, or t
  misc_feature (1355)..(1355): n is a, c, g, or t
ggggccgcggtgctgtccggtcgcccgcggtcgcaggcgctggtccggtccggattccctccatggcttttgccagcggcgccgcgtgcctgcgtgctggggcagcgggcacttcttcgacctcgtcctcctcgtcctgtgcggccggccgggtgaggccgggcccgcgtagggggcagtcggcggctgcctccggctggaggtgcctcgctggcgccctgggccggcccgcgcctcgtgcggcgtgctccatgcatccggagcccgccccgcccccgagccgcagcagtcccgagcttcccccaagcggcggcagcaccaccagcggcagccgccggagccgccgccgcagcggggacggggagcccccgggggccccgccaccgccgtcgttcccccgcacctacccggactggatcggccgtagttactccgacgggatgatcctcaacgaccactccatgccagcccttgtcctggcgcaagcttctattggagccgcgcgcacgcttgatcccctccagcacggattcccggctctacatctcaccgcattcaccaatggtgcccactggcagggacgtgaagaccaggtacagctgatcggagtccgtnnnnnnnnngcggggtccgcaacgccccatcgttggggtgcgcccggtcgcacaacatggcggagataagctgccctccgccaccaactctcccccctccccacagccgggtcccatactcccccctctgcccaaatccaagctagaacccgggcgggttatgccgcgcgcagccacgtcccgcttcgtgtaagtcaagtggcagtacgccccgcctgtgtgtacacggcttcgtccactttattacgccatacaanctctctcggcgtgcctggcggcattcccggcgcgcacgttatccccatcagacgaccacgccgcagaccgccactgcgactgtctcaagaacacgccgcgatgtaatggctgtataaggcgagcgcgagtccggagcgtcgtttccattctgaataacttctgacgccgcaattatgtggatattcactctcataaatggtcttatgtaagaacggtggttaatgcaccacgcgtgtaagtcaattggcttcgcgtgcgcctgtatacccaagcgtatatgtacacagtcgtcnccgcataaatgacattgacactgacgcggatactatcagagcgcgatctcgctgcgattctaacgtactctgtctcgtctctcaacgcatgcccctcatctatacgcaggcatcgagagaccgctcgtggactagtcatagcacagtacgcgccgccgctctccttgcatccctacagactccggagttngcttcgcacgtccgcgcagcagctgcgctagagccattatattctctcgcttctctatatcgcaa

SEQ ID NO: 151843 - DNA, 776 bp, Homo Sapiens
  misc_feature (673)..(685): n is a, c, g, or t
ataggtttattttatagaatttttttgtatcactgaagtgcattgttaaactatatgaagtacattatacagacaggcatagcacaatacatatttggggctcagtagtaaagattttatttagtttcatgtaaattcaattagcctaagttctgttaatacctaccgatcacacataattacattttcatggtaccttacaaaccataataaagtatgacaaattaaaaataacattatgataaactctgcctgtgctgttattattacttggtaatattaatagcgactgaagcaagacttcagaggtaagatttactactgaggcccaatgacaatgatttggagaattaggtatatatctagaaatgaaacgggtccagaacccttgtaagaaagatttgaattctataaggcagaatctggccagacacaggggcctagccttgacctctgtcctaggcccctgggccaggtgccaggacaaccaaggccattctgcttctcacctccagtgggtactgaccgtagggctaggctttgtttacactcatttttacccccatttctgtccccacttccataaaagacacttcaaaatgctgatgcttcagagaataagaaacattctgaaaaggaaaaaaacaaaaggcctgctggcatataaacttcnnnnnnnnnnnnnggtacaataaggagaccttatctattccttatccattgagtagttgtagtttttaaataactataagaacacttggtcttatgtttataac

SEQ ID NO: 151844 - DNA, 744 bp, Homo Sapiens
ccccaccaccacaatactcacaggagccctgctgggacgtgcaggtaaattttgctcccttctctcccttttccgagctgtcaccttttgtagccagcttgccttcaagaagacgactcgtgaggccacactactttgtggcaggaagtcagctctgctagctgagcatccttgctgcagggactgggtctaacttgtctcgctcctctctcacatcacggtctaaatactagtagaaatgtggaggtgtcccaagccttaagaccttgcccctttctctgggtcatacagcttatcatctttaaacttgccagttttccctctcactggcgttcgctcaacaggcaccagcccacctcctcactcactatcatctgccccataagagtcaatatgtccataggccattcctcttctgctacccgaagctctgtactctcttggcggatacctggaatagtcctcattatcaatattcaggttggttcccgaactctcgctgtcgtcccaactacgacgagtagtggaaaatggcgatcggctcctcttggtggtttgactgggggctgatctgtgcattgggacttcggagttcgtcatttctctggctggcaatcctttcccgctggctcgtgggtggcctgaaacaagtccagaaagccacacagcttttcagagaagcagagctctcggatctcacgaccgccacgaccgccagagccgctgctcccgctcccgagctcc

SEQ ID NO: 151845 - DNA, 923 bp, Homo Sapiens
  misc_feature (706)..(755): n is a, c, g, or t
  misc_feature (798)..(856): n is a, c, g, or t
tctctggtcgctcacgatgctgggatattcccagcattcccatgccaagcatgttacgcggtccagtggtgtatggcagtcaccggtcccggcctgcttgtcccaggttggccacatggacttccttgcggctgagcctttccgtccattctaccattgtaattattgattctatggaaatgatctcacagactttctccacaacatcgtcattctcaaaagtgacaaagcctatccctctgtgcctttggtacttttatcaacatcagcattgcatcttccaccttgccaacctgctcgaaatattgctctacatctctccactactgtgcttcgcagataacccgcctaccaatattttctttgttcttgtgaccatccttgggttgcgctcgacgaggaaatgcaactttggggtcaatcgtcttggaatctaactcatggtggggctgacctaatactttatctacacttgctgggtctgcgaacgtgacgaaaccgaagcctctggagcgtttcgtagtgggatctttcatgaccatacattctctaatttctccaaatttgctaaaatagtctctaaggctatctggtgaggtctgccagctcagtccaccgataaacattttaccggggtcgtgcatgggagtcgttggcgctgcccagaggtgccattggctcccatattgccatccatatctgagcnnnnnnnnnnnnnnnnnnnnnnnnnnnnnnnnnnnnnnnnnnnnnnnnnngcgatcggagcaggagcggcggccggctccgagccccgagatnnnnnnnnnnnnnnnnnnnnnnnnnnnnnnnnnnnnnnnnnnnnnnnnnnnnnnnnnnngcgagcggcggagcacggggcagcggcgagagccgttcacacgtgggctcggcttagctcagccccg

SEQ ID NO: 151846 - DNA, 1070 bp, Homo Sapiens
  misc_feature (140)..(150): n is a, c, g, or t
  misc_feature (157)..(159): n is a, c, g, or t
  misc_feature (180)..(181): n is a, c, g, or t
  misc_feature (193)..(194): n is a, c, g, or t
  misc_feature (279)..(280): n is a, c, g, or t
accacgggggggttgaatttgtgaccaaaagggttgcgcgccccttgggccccccattttcttgcctcccagtaagggtgtgaaccggtcgggtgcccccaaggctggccgggggaaggggtttccccaaaaccccgggnnnnnnnnnnnttttggnnnttgcctgagcgatggcgtcgnnccgcccccttgnnttcatcacttggtggacgtacagcgggcagtttgcctgcttggcgatggtgacagctcggtacaccgctcagccctccactcctnnggggtggctgagcacgtggccctcggggccagtgatgccgagctccagctaccgcttttgctccgtcctcctcgatgtcccggttctcagcgtgcacctgggccaaggcccccaggtcccggatgatgctgaagatctcgtacatctggctgtcgctgcactggcaccggtccttgtatgccatgaagaccaggaaggagttcacacccttctccttgaccagggcctccagctcctccttgatgctctcatgccatcgggtgatgtccacgtgcagggagtagtcgcagcaggccgcgctgtccgcccgctcccgccactgctcgtaggccgccagcaggctcacacccgtgtcggggaagacgtggtccaagatcatggtggttcctcctgctagcgctgccttggtgccctgacagaagtcgtcagccggtgtcatgcccaggacaggcatctgcagccttgtgtggacgtcaacgccaccaggaaggaccatcaggccgtgggcgtcaatggtcttgatgcccccagggacgatgaggttttctccgatttgttttatcaagccatcttccacgtgcacatcagcgtaaaaggactggtcgtcattcacgatcctcccacctctgatcagaaggcggtcactcgtgatccgggggatgcttttcttgccctggaaggacatcctgctcctgggggtctctggtaggggcggcacaagcggggcgggcgggcggacgcgtgagccggacgcgtgcgtggggacggcgatcccgggaattccggaccg

SEQ ID NO: 151847 - DNA, 726 bp, Homo Sapiens
tggggcatctcggttccgttgacacactctgcttcttcacttcctcattgaagcgggtcacctggtcagttagcgtcagcacgtgtttgtagccaaacatgggcaagcaggtggtcttcatatcatagcaggggttttcgagggcctctggtggggagatatacatgtatggtgacacagggcttgtccacaaatgccccgaagccaatccgcaggttactggtgagctttcgcatctgggtggccagcttggtacccaggttctggatgctccacagatcatccttcatggagtaagacaggtccatcaagtagtagatgtccacagggtaatcctccacctgccgcacttggatggagaaattcttcgaatcatctggccggagccggagtgcaatcctctggggactgacttgagtgacctgggagctgtctccagagcccttgtcgctgaggggcctgtcctctagtactcgggcctcactcactgggaactcgatggattctggggcacagttatccttcagcagattctccttcaggtcacagcgaggtgagcccagaggcagggcctcatcagagcaccaggcacacatggggctcacagccaggcactgctggcaggagctcacacctcgcgtggtacagatgttgggccctccacgccaacgcccgccagcgccacccagcgccagcacagtcgcccagagcggccgggccgcgccg

SEQ ID NO: 151848 - DNA, 914 bp, Homo Sapiens
tgtactcgcttaggcccacaatcccaatgacgcccaggcaggctgagcacagtgaagaggccgcagcccggaaccgttctgcaagagacagcaggttcatgggtgacagcagccgccggcacagccatagcgtggcaacttggtcagggaggtcttcaattgggtgaccctgctcaatagccagcataatggttcaaggaagctgccagcgcgtgtccagagccctgcttgggaggctacacagggggcttctggatggcggtctccccagtcaggcccgctccatgagcccgttcaccacctccgtgcatcagcccgtctccagacatgaccaccagagcgtcccagcggcccagctcctccgaccgcaccagctcccgcgcgtggttccgccgctcagtgagcatcagcgtgaaggagatttcagcctcagccaaaaggggctgcacgtgactccggaagagcctgcaaggccttgcccttgccagccgcgcgggttcagcagcaccagcacgcggcagggcacgcggggagcacgccccgggggccgcccgctggatccataacctcgacccgcggctcccagctgccagggggtccctggcgctgtgggggcgctgcccgtggcggcggctcctgccttcagctccttatcggtgctgcccaggcgggcgtcgcagggccggctgtggggctcgccttccccgcccggagccgtggctgtaggagcaccggcgtcattccctgcggcggctggacccagtcggtccggtttgctggggaggcgccaccgccgttccctacagtggcctggggcggaacgcagctcgtcccaagctcagcccacgtctgagggactggagcgccaacgctggagcggactccccggcctcgctccagtccctacagtggcc

SEQ ID NO: 151849 - DNA, 1078 bp, Homo Sapiens
tgagaggagcgtcggacaaaaagggggttctgtccctaatcttcatccgaggttatgggaaagtccgtgggatcctcgcattaacaagtgtctggggggcagaatatcttcttcccccaaagatttgtttgggggaaaatttgcgccgggaaaaggaaacccaaaccatgggttgataaagctttctactgaaatttccataatgtaatatttagggggggaattgtcagggattccaactgcatcaaaaccagcacagccaatttttccgagaagatcttctgagtcagaactgtaattgcccaggagattctttcttcataagtaaaatgaagttgttattcctcctctgacatctgacagatgaacactttcagcatacagcaaaataataaacaaagcattgtgtgtctgccaaatgaagatgtggttctgacattctggctgaaagttttagttctttggttctagaaaggaagaccttaattagtgcaccaagatttcctgttccgaggattgttttcaactaatgacctgcagactgaaatggttgcttcctccaagagtttcaactcactactgctagttggtgcagggaaagaaaatgagagaagctgattccagaacgggtcattctcagagatagattccgtgcctgataactttttcaagtactcatttttaggaagatcgccgattctgctgctattcgatcccatcttctagcttaagcagataatttgtccttaaacctgcatttccaaaagacaacctgtctcagccggctgggggatctgctccagctccacggacccgcggacggatgggagggtggcagaggggtcaggagaagtcgctgtcgccgccgcagcccaggtggcgcacaccggctcaggcctccatgtttccacgtctcagcgggtacagatccggctccggtccggcctgcagctcggccccggctcggctccagcccgggccgcgtcggtgcggaggccaggaggcggcgagagaagagggaagcgaccgagaacgcggctagggaccagacccccaggcgcgcgcgatcccgggaatc

SEQ ID NO: 151850 - DNA, 565 bp, Homo Sapiens
tttcaatcttttctgggtcatcctccccagacaggaatacaaccagcggttcctcctccatggttggagagaggggggacagtggcagcagctcgttcctgtccaatccatcttgctgttgcattgctgagggagatttgttcatgggagaagcaaccctgaggaaaatgcgctgccgccaggagatccggcgaggagtgacagaggttcctcccacacttagggactcattgctgcaggtagatgaggtcctttttctcccttctccatcactgcactgttcactggagctctgcctcagcagaggggaacgcacaccctgagccctcccatcctgcaaattcagctttctctttgtgcttgaaggtgggtggctgaacgtgtgtgcccgtcttcgaaactgcggggagtcggaatcctcttcgggaaacgtttgccaagctgaggacggtggggacgctggcggtgtccctggtggagaatcccctggtgagtagtccttctctgaagcaagactgttggaccgttcaaaactgtccacacttccaagccgacctctcattct

SEQ ID NO: 151851 - DNA, 785 bp, Homo Sapiens
  misc_feature (426)..(426): n is a, c, g, or t
  misc_feature (442)..(442): n is a, c, g, or t
  misc_feature (456)..(457): n is a, c, g, or t
  misc_feature (470)..(470): n is a, c, g, or t
  misc_feature (503)..(504): n is a, c, g, or t
  misc_feature (563)..(563): n is a, c, g, or t
  misc_feature (596)..(596): n is a, c, g, or t
  misc_feature (639)..(708): n is a, c, g, or t
ttctggtttcccgaatcacttggcaaataaccagcaggtgggcagatgtcttttttgcgttcctacggacgcgtaggcaagttcgatgcgccggagtgaacagccagggtcccatctctcagccggctcccgggcggtgctagcagggaagagggacgcgccggcgaatgaaacactactagcccggaaagccgccctggaccttccacccgggcagcgagtctggcggcccctcgccgccgccccctccgaccagaacagactgcgctgcgagccccgggcttccgccgcagcgcgcagcaattggaggtgccagaggagaccagcagcagcacttgatttagctgggctgcgggaattccgacctgtacactttccagaagcctgatctctccaagtccgcgcccagggactcgatgccccggncttccatggttgaccncgagcgcgcccccnncttcgtgctctcnggccgcgttcacctgcgctgagtgcctccgggnntcctgttaaggcccgagcaggcctgctgcctcgagcatccaccccgcatgcccacgtgntggcaagccgggggaaggggtggagtgaacggnccggagaccacgtggagaacggggccgctttggcccttccatnnnnnnnnnnnnnnnnnnnnnnnnnnnnnnnnnnnnnnnnnnnnnnnnnnnnnnnnnnnnnnnnnnnnnntggaaatcgctcaccaacagcagacagaaaagcagggaagccgcagtgggggtgccgctcccgcccagcccgctccg

SEQ ID NO: 151852 - DNA, 1238 bp, Homo Sapiens
gatgccattaaaagcggtcccacttggttccacacaggtggccaccggcccgcaccagggtttgaagccacattcatcgatgtcaagggcacaggtgggccccgctccagccccgatgggcagtgcattcgaagccggacggcacctcatggcaagagcccccgttggcacacgggttggaggtgcaggcgtgctcagctttctcacagttcctgcccgagtagccgtcagggcaggtgcagcggtactggtcaggctcggcgttgatgcacgtgcctccgttggtgcaggggtggtggctgccacagtagttcaggtctttgtcacagagcaggccgccccagttggtctcacagttgcactgccagggctccacacaactgccatgcacgcagccggggtaggggacacactcatcgcagaacctcccttgccagccgtagctgcacctgcactccccaggcacgggtgcatccccccgtggagcaaatttacccccttgtttacacacaggttccttgcactccttgcccatccagccgtccatgcagggccttgttgccgtactggtcgcaggtgtagtggccgaaaaagtcgttgcggggccggcagaacttgttgcaagtggcgctgtagtagttctcgtcgcagcgcacgcggatctgcagctccaggtgcgccacgtggccgctgaagtgcaggctcttccagcggtcctccgggttgatcatgccggcatgcgacactcgctcgatcagcagctcctcattcggggtggtatcgttgtcccagtcccaggcctccacgatgagggtaaaggagcgcggccaggcgaactggaaggggatgacgacgaggcccgggtcctggtcgccgccggcccgggcccgcgcccgcgctcggtcacccccagcagcgcaccgccaggcggcaaggtagaaggagcttgcccgccccaagcacagggcagtggcgccagtggcacgtagctgcagggccccagtgggcgtcaccttggcctggtactccttaaggcacacgcgcacgtacgtgtcgcactcgtcgtggccgcagccccccgcgcgcgttgtccaggccgtcgccgtcacagcaggcgccgctcagcagcatccccgttcacgttccgcagcgcgcatcagctgcagctcgaaatagcccatgggccgcgccgcctgcaccacagagcgccagcagcagcagcagccgccggggaaggc

SEQ ID NO: 151853 - DNA, 1704 bp, Homo Sapiens
catactggaccttctggttgttggccctcatcttgctctgaatggtgaagagcagcacttccaagttccccttctcagtaaatttgggtgacttattaccactacttctctaagatgaaggccttagctgttgaaggaaaacgaattggaaaggtgcttgacaatgctattgaaacagaaaaaatgattgaaaagtatgaatcacttgcctctgaccttctggaatggattgaacaaaccatcatcattctgaacaatcgcaaatttgccaattcactggtcggggttcaacagcagcttcaggcattcaacacttaccgcactgtggagaaaccacccaaatttactgagaaggggaacttggaagtgctgctcttcaccattcagagcaagatgagggccaacaaccagaaggtctacatgccccgggaggggaagctcatctctgacatcaacaaggcctgggaaagactggaaaaagcggaacacgaaagagaactggctttgcggaatgagctcataagacaggagaaactggaacagctcgcccgcagatttgatcgcaaggcagctatgagggagacttggctgagcgaaaaccagcgtctggtgtctcaggacaactttgggtttgaccttcctgcagttgaggccgccacaaaaaagcacgaggccattgagacagacattgccgcatacgaggagcgtgtgcaggctgtggtagccgtggccagggagctcgaggccgagaattaccacgacatcaagcgcatcacagcgaggaaggacaatgtcatccggctctgggaatacctactggaactgctcagggcccggagacagcggctcgagatgaacctggggctgcagaagatattccaggaaatgctctacattatggactggatggatgaaatgaaggtgctagtattgtctcaagactatggcaaacacttacttggtgtggaagacctgttacagaagcacaccctggttgaagcagacattggcatccaggcagagcgggtgagaggtgtcaatgcctccgcccagaagttcgcaacagacggggaaggttacaagccctgtgacccccaggtgatccgagaccgcgtggcccacatggagttctgttatcaagagctttgccagctggcggctgagcgcagggcccgtctggaagagtcccgccgcctctggaagttcttctgggagatggcaagaagaggaaggctggatacgggagaaggagaagatcctgtcctcggacgattacgggaaaagaccctgaccagccgtcatgccccctgctcagccaggcaccgggccgttccaagaacaaaaatgaacgggcgccttctagaagaatcccctccaagggggccccaggcttatccgcgaacccgaggttttctttggaacaaaagggggcccataatagcggaagtctgaattataaacctaaggcactggcgcccaccttctttaaaccccccctgaccttggcaaaaaactgttcaccttggcgatactttcgtcccagggcgactctgacttccgcgtgggaggcggaacctatacgctagcgcaccactcttcccgcaaacagcctaccgcatgtgaatgtcaatcagaacgaacatgcgcaagagggctagccgcccaagctagcacccttgctcagcacatgcttagaatgagcac

SEQ ID NO: 151854 - DNA, 1296 bp, Homo Sapiens
  misc_feature (166)..(190): n is a, c, g, or t
atgaaccctttaagagggctgctccccccacggaaagggagagtctgttacccagggatttcgtggggttcaactctggggcccaaacccgggcccccggagaatagaaggtctttcgttcgcggccaaaggcccgggtgggtcccaaaccccagaagggttcctnnnnnnnnnnnnnnnnnnnnnnnnnttagccaggaaggttgtcaaggaagtggcggtagcggctgtacacaggccaagtttcgtttgcccctgaggcattggtggccaagagcaggtgacgccctgtgtgccccggcggagcgatgaatggtggtcactgggtaaggcggcccctgcttggcgccgcacgttgcagcagaagctggaagtcttgttggtctgcgtgtggttggtgtagttgacagtgtagttgtaccccaggggggccaagtccacgagctggttgcccctggccacctgctgctccagatcgtcacagacgccggcttcataggcggtccaggagccatcgtcgctcagccactcccagacgacacctcggccaggggctgagtgctgggggaacaggtgtctccgcacagtccgcgtggtgccggtgtcctggcggaactgggtccagctggggaggtcaataatgtaaggggccagcgaggggtctgcctggcccaaggggatgctgtgggccaggctcccaagcccaaaacgttggcccttctgctggacaaactgctgctcgatgaagctgcagatggtggcactgtaggggtgccaggtgcccagcccgtcctgccattcccacacggccacagctgcggggctggtgtacacctgcaccagggaagggcttggggccatggccatcttcccaaggagtcccgctgctttcccaaacagcttcagacccctctggcctggagtcccggggtcattgcccagcgcctccggcagatcttttctctctggagagctggcacaaactgtcccttctggatgaagacaccagctccttaggaggaatgacttgtttgagttcccatcttgatacaaaccacaaacaacaaaaaccgggcaaatctgaaaggcttgctgactcagcgacacaaattccaaggcaccgaggctgaggaggacaagaggacggggctgagggcaccaccgcgctcgggctgcagctccggctcggcctgggcagggctctggctgtggctccgactctcaatcccggatatcccgggccggtcccggcggttttggagctcgttggggcggtgatattggttgttggggaat

SEQ ID NO: 151855 - DNA, 1252 bp, Homo Sapiens
  misc_feature (1113)..(1161): n is a, c, g, or t
cgggatgtgattggctcggcagggggaatgagcatgagtcctcacggcaggcgcaaagcaattgatggggcgcggctagcaaacggggggtggcggagaagttaaggtatcacggcggggcgaccccagaagtctgccctatcactgtccgcacgcggcgcggcccctcccataagggggcaccatcggagtcccctgcaaggagggggaggctgtggagaaagggggaagaacggtgccttgggcgcatggctaggagaggaagcgttgaataaaatgcgcaaggcgtgcttgatccaccgccccggttgaatatagttttggaggcgtaagcagatcacatacatttggggcggcggaagaaaatgcctgtgagggagccacgcccaggttgcgtctgcacgcatttgacgggaacgcaggtaaaaagggcatgtgtccgaggggaatcaggaaggaaggtttcggtgctgggtgccccgcgggcatcatgggctcttgcttggaaggcatgagccattttcggcccatgtcccgtccccgcaacgggcggaagggtgtcccctcctcggcgggaggaccagaccccctctaggggggggaagaggaatctcctggattgtgctgttgctgtctatgtcattatgaaagccaggtccatttggacatgcggtccacaatctgtcccaggagccgtttggcttgttcaatactttctggggttccggtaagtacacagggcctctctggaatcccagaactctctgaagcaatctgaattttgcagccagattctgcttgaatccgtgaaatctgctcacctcccctgctgataataaatccaaccattttgtcaggcactttgaattcttccgttattaccgtcctttgatgtaccaaggcccctaactggttacctactccatcatccaagggccgtttttgtactccgtatccatatactgaggggtccactagaggtgtggaattattcaagtgaggaattgaatcaattttagcagcaatctgccggacccggtgcagggcatccacgaagccctcggccttcatccccacaggagcgctctgcccctgcaccagctccgccattannnnnnnnnnnnnnnnnnnnnnnnnnnnnnnnnnnnnnnnnnnnnnnnntcggctccccggtccggcctcccgctccgatcccgggaattccggaccggtaccagccgtgttggtgtgtgtgccgcggtgggtgggcgct

SEQ ID NO: 151856 - DNA, 851 bp, Homo Sapiens
  misc_feature (70)..(110): n is a, c, g, or t
  misc_feature (117)..(126): n is a, c, g, or t
  misc_feature (163)..(175): n is a, c, g, or t
  misc_feature (202)..(214): n is a, c, g, or t
  misc_feature (519)..(519): n is a, c, g, or t
ttttttaaaaaagcgcagcagagaaatttttttcggaggaaaaaaagggggccaccccggcggggggggnnnnnnnnnnnnnnnnnnnnnnnnnnnnnnnnnnnnnnnnnacacaannnnnnnnnntcccttttgagggggggcaccaaaagggtgggcgggnnnnnnnnnnnnncaagagggggcccccaaaaaagagggnnnnnnnnnnnnnaaaaccctgtggggggggccttaaaaaaatttttggaaaaaagctcccccaggtccccaaaggaaaaaccccggggggtttcttggggggagaaaacgccaattttgatttccgccaaagaaattttaaaaaccttgggccttcgggggattttcccagttcataaacacagggcttttggcacaagattcagggaagaaaacgtgtcaaacccggttattaaccaattgggcggtccttaaaagtccactgatgaggagagtggacggacttctcggatggagtgatggagaatacccaggctnccaggctggggagcggctctctgcgcttattgatatcttccacaatcgttatgccctcggtcatgatgtctgtcatcttgcagcaggaggacagcatcctcatgcttaactgatccaccaccagcaccttccattcccccttcttcttgaccttctttatcacatcatgcataatcttctctccgacaacagctttgaggccaatgggggccatggcgctgcgcgagtctcccggctccgatctcctcgtcccgcgacgcctgcggaccccgccgcctcctcaggtgggcgcgctgggccagccgcagctctccgccccgcagccgcgctag

SEQ ID NO: 151857 - DNA, 700 bp, Homo Sapiens
cattcatcactgctgtctgctagagcccttcctctcccaacatgggggctgagaggaagggctctagcagacagcagtgatgaatgagacacggtggagaatggatgagccaggcagagggggaaagcagggatcccaaggggacgcgaaagaaagcagaggcagcctaacatgctagacagccacctggctggctcgtgaggagcctagaaatgcctggggggacatttttcctccttgtcatgatccaccagctcacgctgttctcatgggtggaaggtgaggggaagatgctaggaccttaccagcacaaggttgtatgtgagtcatgggtggacgacaaggctgccatggtttttatgctcaggaggagtcagagacagagacagagagataaactgacgggagtgtctactacttatcctgctgcttggagcatctcacttccgacattgaacatggggaccagcaggcccagcagccaccatctttccgaagagcctcttgtaagttcttgcagccagggacagggccctcaatgacaacccattccgaagctggtggcagagatctgccgcggaggatcgaacagcagctaggtggcagcagaagccggcgcaaggccaggccgatggcagaagcagaggtagagcatgaggatgacgaacatgtcagaacccaggaacagctccggagaaga

SEQ ID NO: 151858 - DNA, 739 bp, Homo Sapiens
  misc_feature (44)..(147): n is a, c, g, or t
aataagcggagaggagtatatttatttgtgaggtaaattcgttnnnnnnnnnnnnnnnnnnnnnnnnnnnnnnnnnnnnnnnnnnnnnnnnnnnnnnnnnnnnnnnnnnnnnnnnnnnnnnnnnnnnnnnnnnnnnnnnnnnnnnnngggccaactgtggtgtttagcgatctttatacattttctctttcatttagcataaatatggatgtggtcttatttaatctagtatttttttgagggattatattatgatgtgagtgatggtcaagaagttctgagaggtccgtgaattcgatcccataatccatctactctcagttggttaacagcgtctccttacagtagtttggggtctcaaagtatgtccccttcatcttgtgcaggaagatatacatgcccatgttgtgaatgaggttggtaagggtccagatgacagagacactttcaatctggatgatcagcaacactatgtagatgaagccgatcagcacaacgtaggatatccaaattctctcacttttgataacggcgtttttggagttcacatcaccatacgcttcaggtggcttcaataggagcgccgtatctccgggccctcgacgccgtccggggcggccgtggagctgcaagcccggacaccgacggctgccgccccgccccacggcacggccgcccacagtggccaaagactcagcgcgccccacagccgggccatggcggcccccttaacagtgac

SEQ ID NO: 151859 - DNA, 733 bp, Homo Sapiens
atttgcagttacgttctgccatcttatacacagccctgcgaccggcctcttgttttgcaggttcatgagcacccggccctgctcctctgatcctttggcaaagttcttctctcgctcccgggcatccgacaactccttggcgaagcggtagccgtactccacgttgtccccacagccgccccacagccagtcccggggcaggtccttgggccgcccgtccggctgcagccgcaggtggagagctcgccctcgcggcaggcccggctgatggcgttgaccacgcccgcggcgctcaccgcgtgggtgaaggcggtctctcggctgcctatctgcatgactctcccaaagacagatgcgttgtccgctgtgctgcaattccaccgccgctgccggaactggtgctggcattccttgatggccagtcttggctccctcccctatgtaggccatgtgctcctggtacaattggcacagcttcctttggccaggggagagcccgggaagctgactgcacacgggctgggcaccgatgataaacatctcgggtctctgcaccgggttcaaagctaatgaccaccaggagttggcgtctgtcagaagctgagcccagctggacagcagagcagccgtgaacagcagcagcaggctgggcatggtcggcctcagccctccccagtgcctgggactgacagtttccagagtagggttacctgcatgtcccgccgcgtgtcag

SEQ ID NO: 151860 - DNA, 1230 bp, Homo Sapiens
cagtgcgggttgggcgctggtgtattatattttcccagaggtgatgggtgcacgggctgcgtcttaccgttgtaagaaggagtactctagattaccccctaataatgaagcgctcactggggggtatgtaagactccacccccacgtagaaatgctgcatggagcgtgtgtttccaaccgatggtatcccaccccgtagagtatggcctccgagacgagccccgcccggagaccccactctcgggtttccgtcgctggcgggcctaccggtgattagtggcctcctcggagtctcccccgttagattcccaagatgcgcctaatccccctgtgtgttccccgccaagcgggttggcgtcatcctccggggcgcgggaaggccgtgtgggcgccccgggggtttatagcaagcgtttccttggcgacaggcttccccagtgtcggtggtccccggggcgccgtgctttaggtagaggggaacccccagttaagtggcgccagggcgggagtccccagagggcggtttcatggggggatcgcctgggggcccctttctggcccgcccagcccaggagggggaattccggctttcaggggcttcccgcttgggggaacttgagggcggggagggctgagccagggcagcgtttcctccaggcggtccgggcttcggtgaccaggtgcgccagcaggtcggcctgggcacgcacgaaggcggccactggcgggcgcagcagcgcgttcccccacacttccaggataggtcttcgcttcgctccttgcagccccatcttctccggttcctccagggctaggctgaagatcagcatgtgtcgggccacagcttccagattattctccagcacaaagaacgttgaacctcctgcgaggccagaacttcgctcgggacagggtccgcagcaggtgccgtccatccacagagcccagaagcagcacatctagctcggggttgctgtgcactgtatcaggcactgggagtctgggtccacaggaggactttcagcctgcaggtccagcgtccggggacaggccccaccaggacacggagccgaagccgctgccggagccggcaggtgtggtcatcaccctttatcctccaaatatcccgggacgccccttcctctctgctcagtgcagcactgtggacccgatccggagaattccggaccggtaccagcttgtctatttctgggctgtgtggggtgtgtg

SEQ ID NO: 151861 - DNA, 821 bp, Homo Sapiens
ggtcacttacaaaaaatttgacttttaagttcataactgtaaagatatcctctctttactgctgccctatcgtttctttggatccattcaccttgggtgtatctgtggaatcatcaaccctccttgtttccattattttccctgctctaggttcaaattctatgaatgcgttggaagatcttacaatctcaacctaatgacttttgctcccttgatgcatgtttattgactttgtggaaagctttgtacactggttatcccagaagaaggattgttgcaaaaccacttcagtatgctgtctgtctcgggccaactctgatgctcgtacagttgtaggttctgccagcaggcaatcggatacgtgaggtcattacgtgtgccacacaaagtcttcgtatatcacatccgcgtcctctcggcttggagtatacatagtcctcgaggccccggcgcgcagaggagaagcgctgtcctccgtgccgctccggggggctacctcagcgccccccgagcagccagccgccgcagcggtcgcgccacgacccggagccgccagcaccacctcatgctgctgggcagccgcggtccggcgccgctggggaggtggcagggaggcgggcagccggcgacctctcctacctccctgcagggatgagataatccacacccccaaaagtgcgtgggggagggggcctggccccaatcctccgaccccgcggccaaagccaagtctctttcctctcccgctcaggcccaattccgaccctgggacccaggagtcctgagagaacatgttggtgtgggcgcgaggagcggaaaag

SEQ ID NO: 151862 - DNA, 1081 bp, Homo Sapiens
  misc_feature (984)..(1026): n is a, c, g, or t
gggtccggaattcccgggatcagcaggagagggctctactctgagctcctattttccaaggctccgggccgcgctcggcgctggcctgctgccccggcgggtccgccggccggaggcgggagtcacaggaagagccctccacaaaaggaggcctcggcggatcaggacagctgcaggtgggtgtgcagactggtgagctgccagcaggggcccagacgcgccaggcctggagatggctggaaactgctcctgggaggcccatcccggcaacaggaacaagatgtgccctggcctgagcgaggccccggaactctacagccggggcttcctgaccatcgagcagatcgcgatgctgccgcctccggccgtcatgaactacatcttcctgctcctctgcctgtgtggcctggtgggcaacgggctggtcctctggtttttcggcttctccatcaagaggaaccccttctccatctacttcctgcacctggccagcgccgatgtgggctacctcttcagcaaggcggtgttctccatcctgaacacggggggcttcctgggcacgtttgccgactacatccgcagcgtgtgccgggtcctggggctctgcatgttccttaccggggtgagccctcctgccggccgtccgcgccgagcgctgcgcctcggtcatcttccccgcctggtactggcgccggcggcccaagcgcctgtcggccgtggtgtgcgccctgctggtgggtcctgtccctcctggtcacctgccttgcacaactacttctgcgtgttccttgggccggggggccccccggcgcggcctgcaaggccctgggacttcttcctggggatcccccctggtccctggctcgggtgccccgctcctgggggtgcccccgcctgggccctccttcctgccaactggaaagtgcctgggcccccaaacggggccaggggcctctgcccaagctccaacccacccttattccnnnnnnnnnnnnnnnnnnnnnnnnnnnnnnnnnnnnnnnnnnnttctcaacttagggggaatcaacacggggttcccccccttttggggggtctttta

SEQ ID NO: 151863 - DNA, 760 bp, Homo Sapiens
caggagagtcaaactcatagctggccctcaggatctggctgaagagctcaggtgcgctctcgtcgtagaagggggggtacccacacagcaggatgtaggagatgacgcccagggcccacacatctacggccttcccgtagggtttctgctccaagagctctggggccacatatccaggggtcccacaggcggtgcctagcatggttcctagcctggattttggagagtccaaagtcagagaccatgatcttcgagtcctcaaagggcgtggcatacaggaggttttcgggcttgaggtcccggtgcacgatccccaggctgtgcaggtaggagacggcgccaaggacctgacccaccagatggctggcatccttctctgtgtaggagccgcgctccatgatgcggtcaaacagctcgccacccgtcaccagttccatggccaggtagagttcgggaagggctctcgtggacatcctccagagcgacgatgttggggtgactgatcctacggagcactgcgatctcgttctccaccagggcctccattgcccacggagggccttcattggggatgcacattgagggccacgaggtgtgcggagccccgctcctgggccagcaccacctcggagaaggcacccgagccgagcctctcgcggatctcgtagacgctgctgatgtcctccgtgtgtttcttcagcagcagcatgtctggagcgggtgccgcagcgtcgtgccgcgcagtggccgcagcgccaag

SEQ ID NO: 151864 - DNA, 1365 bp, Homo Sapiens
  misc_feature (102)..(102): n is a, c, g, or t
  misc_feature (116)..(149): n is a, c, g, or t
  misc_feature (290)..(300): n is a, c, g, or t
  misc_feature (326)..(335): n is a, c, g, or t
accccccacgtttagggggtggttgttttattaaccagcatgttagcgcccctaaaggggggtttttaagaagaaaccacaatgtggttggtgaattatttnacccctcgtagggnnnnnnnnnnnnnnnnnnnnnnnnnnnnnnnnnngggagagacaaactcccttttattattccccaaaatttttaaaaaggtgtccccccttccccaaataattatgggggtgtgtttagagctccccagggggggagaaggggtttgtaataaaaaattgtttctctggggacnnnnnnnnnnngtccccgctcgcgcccattttatccnnnnnnnnnnaattccccgcgcttggagtggtgttttttgtccccggggaaaagggggaatttaaaaccataattttcccacacccatttttttggtttggcttttggaaggtttaactctttcggaatttccgggcacagaacactttgggcccattttgaaagtgttattggcccacaaaggggttaaccaaaatggttcattcccttttgcattgccacattgggaggcaatttctttatggggggcaagtttcaccagggaaattggggttaatgtaaccaaggcaggggatgttcaggtttctttaagtaaactgtactgaacgttataaactccttcttcagagtattttgatggcatgctccacacacctttcatctttacttccttttttagctcaacaggaagctgattaaactttgtcactaaggtatctgcagctgtagctacaccaataagagccacgaccttctctggtcgtgcaattgcagcatgaagcataagccaccctccaaggctagatccaacaagaatctgtggcccatcagctaagtcatcaattatagaaagaacatcttttctccatttccccagtgtgctttcctctgagttaccatctgaacttccaactcctgagtaatcaaaccttatgcaggcgtgacctagagatttgcaaaactcctcaatcgccaacgcttttgtaccattcatataagaaagatagccagggatgaagataattcctggacttttgccttttagcttcttataagccaggtttggaaggtctggtcgattaaggaatgagagtgacgtcttttgtctacaagctgggagccaccgtggcgcccgctgaggtatccgtgcaagcagcacgctgaggccacggtggggaccgaaggggacggctgcccagccccagctccgacaaggtacccaggccgccacagctgcccagcgcgcaacatcgggaaaattccggaccggaccagcgtctattagttatctcgaaggagggatggagaggtgtgttggg

SEQ ID NO: 151865 - DNA, 808 bp, Homo Sapiens
  misc_feature (405)..(419): n is a, c, g, or t
  misc_feature (651)..(651): n is a, c, g, or t
actagtccacggttggctggggaagcagcgcccagccccgtggcccgggcttcgcagcaaagagaagaagaaagtgaactgcaagcccaagaaccaggacgaacaggagattcctttcctggctccgggagattatgaggagccgccaagagatgaaaaacccgatcagtaacaagaagaggaagaaagcagcccaggtgaccttcagaaagacattggagaaggaagcaaagggagaggagcccgacatcgcagtccccaagttcaaacagaggaagggggagtccgacggggcctatatccagcgcatgcagcaagaggcccagcatgtgctgttcctcagcaagaaccaggccatccggcagccagaggtgcaggcagctcccaaggagaagtctgagcagnnnnnnnnnnnnnnngcgttccagaagcggcgactagataaagtccgacggaaaaaggaggaaaaggcggcagacaggctggagcaggagttgctccgagacacggtgaagtttggtgaggttgtcctgcagcccccagagctgactgccaggccccagaggagcgtaagcaaggaccagcctggcaggagatcgcagatgctgcagatgcttctgagccccggtggtgtgtcccagcctctgaccngctccctggcccgccagcggattgtggaggaggagagagagcgggccgtgcaggcctacagagcgttgaacgcagcggcagcagcagctgcacggggagcgaaccacctcacttcctggaagaagccagagccgcagctgtgatggagagacacccg

SEQ ID NO: 151866 - DNA, 845 bp, Homo Sapiens
agctccggctccgccgccacgattggccagccgaccaggcggcctcggccaataagcgccgccctctcgcccccgtgttactgggtagaagaaaacaaaaacaaacagagcgagaagggccagagactctccgaggcggcggcagagacagaagagcggggtcggggccggctgaccaggaacctgggcgagcagcggcgggggcccgagggattctgaaggaagatttccattaggtaatttgtttaatcagtgcaagcgaaattaagggaaaatggatgtagaaaatgagcagatactgaatgtaaaccctgcagatcctgataacttaagtgactctctcttttccggtgatgaagaaaatgctgggactgaggaagtaaagaatgaaataaatggaaattggatttcagcatcctccattaacgaagctagaattaatgccaaggcaaaaaggcgactaaggaaaaactcatcccgggactctggcagaggcgattcggtcagcgacagtgggagtgacgcccttagaagtggattaactgtgccaaccagtccaaagggaaggttgctggataggcgatccagatctgggaaaggaaggggactaccaaagaaaggtggtgcaggaggcaaaggtgtctggggtacacctggacaggtgtatgatgtggaggaggtggatgtgatagatcctaactatgatgatgaccaggagaactgtgtttatgaaactgtagttttgcctttggatgacaagggcatttgagaagactttaacaccaatcatacaggacatattttgagcatggagatactaatgaagttgcggaaatgttaagaga

SEQ ID NO: 151867 - DNA, 1060 bp, Homo Sapiens
ctcttctgtgggagtttatttctgttggtttgtgtggtaggactgtgacttctaatatcatcttgttaaccatagacagacttccgtgttttgtggggtttctcattctggatgacttcttaatgtccacttcagttgtattttacacatccaggcacgggcctgtgcacgtcccagaacgctctctcttggctgtcaaggatcttcctttccatcttgtctctcttcttgtccacttttgcttgtgcttctgcttgcatgaaaatgaactcccacttccgggcaaatgctctctgcagcctggccaggctctcagcctcatagtctgcgagctccagtcgtgccttgttttgcattgttctcttgcagaggtaaacggcataatctgtgttttccggctcccaacaatttgatggccaaaaatagggggtttgaaaccggtaaaaggtgccatcatccttgagtgtgaggacatgatctgagattggaaagaagtagccgtgggcagccattaatgttcccaaatggagcgcctccactggatcttctatagttaagttctttatcaaccattgaacaatgtctgaaccagagaagacgctaggtatcttggaaagaaagcttttgaccgtacgaataggaattccatttttttcatcttgcatccgtgctatgacgtcttccatctttctgtacaccagcactgttgggtgaatcaatcggccaccccgttgctggtctgcccataattattcccctgggccatgtcacccaaaacttggtccacactcaagatacaagaattatcagtgtgccctcctccgccaaggtcacggccccgcggcgtctcccctcccgggcgggctgggtgcaggcggtgtcagctggcggcaagcggagcagcgaggcagggtagcttcatcacactcgcggcggatgcggattccgcgccgccccggctctagctgctcaggcgaccgccaccctcgcctcgccgccgcccgtgcacaggcggctccggcagccgccactcgcgcccgctcacactggccgcctcgct

SEQ ID NO: 151868 - DNA, 1375 bp, Homo Sapiens
ccaatgacaggcaattcagaaggatggaggagaccctacggacagtcaacccaaggtctgaagccccaatcaggtcccacaagtgtgagcacacatctacacatgctgagtatagtcacacatacagacgggctcagtcaagccttgtacacaccttgtggccctcatgtccctgcggatgcacatgcttgcacacctatggctgcgcacacatgcctggcatgactgggctctgggctttgcccacaggttctctcctggtgacagctattcagaagcctgactccccacccccagagctctgatcccaagaaggagggaaagggttgagggtagggcttctggggggtgagatggaactgaccccaagtggctccagacaatggaggtcagactagccctgggagatctgagctttctggcctctcctcaagccccctcccaacccaagagctggctccaaggtccaagaggaagaccctggcagcctctggggtggggctcagctcagagctctgagactgtcacctgggtcctcacctgaagggcctcttccacttctcacaagcttccttctccaggggctctggctcaggggccagagccagagtctcccttctctccctcatcccatcgcctagggtgtccgggccctcgctgatgctcacggtccgcttggcagccttcttcagctcctgggacacccgcgcctgcttggcccgctcccggcgctcgttgcgcaggttgcgctcggccgcggcgcgcgccttgcgctgcacgagcctctccagcaggtcgcgcgcctcttcctggagcctgcgcagtgccgcctcccggagcccgacgtgcgcgcgcagcgcctcgtaggctgcccgctgcaccgcattctgcgcccgccactcctccacctgctgggcctgctgcgcccgcgcctctcgcagctgcgccacgcgggcctccagggctgccagcctgctttgcctctgctgcagctccgactccagcgtgcccagggccgcgcccttctccaccacctggtaggccatctcaccacagaccagccggagcccctcctcctcctcctgccacttcaccctcagtgcgaccagtgatgggacttggtctgagtcaagctctgactcctcccaggggccctggtgggtggtgggagtgacactgtttggctccggctgcagcttctttgagaacttgtccagcagctcagccttctctaagagatggttataggccggcaccagctcacaggaaaagcgccttttgcgtacaggtcccgaagccgcagctgccgcacgatgtggcgtttccagcgcgctgcgggggcaccggggacgcccggccccgccatggccgcgat

SEQ ID NO: 151869 - DNA, 775 bp, Homo Sapiens
cattcaatgaagttatgagtgagctacaaaatggaaaattaagaactcacattgataaaacctcaaacaacatctcagaataaattcaagctttttagcttaacatctatatctttatcaactttttaatgcagaaggacccattaaacacttatgtaataaaattcaatgttctatgctaaatgcagagaattttatagtccacagcatgatttatagttacattatcacctttcttccacaatgcttacattacttcacaattataataattattaggctattaatacaaagcagaacacttcttcaaattaaggtaccttttgctgtacgtagcaaagactgccttcctgcaccaagtaaagaagtgactcttgaaatactgggtggaatttctttatccaacataggaccgatgcgctggcagatttgcaaaagatgatcaggagccacatgcttattggacaagaccaactcctcgtagctcctgttgtgctcgttgccctcccagtccaatctcttcggcaacaactggtactgctccagctcctgcaccagcacctgggccgctctccgacacgggcccgccgataggtaccgggcgataaggaagtacagctccgactcgatgagaggcaccgggcgtcgggcggacgacggctccgccatgccgggcgcggggacgggaggcgggagcgagcgagcgagcggagcgtgtaggccgcgccgaggcctgaccgggctggcgtcccctcttctcaggcgcgcgccgccg

SEQ ID NO: 151870 - DNA, 1614 bp, Homo Sapiens
tcgtagaggcggtaggacaggttgggcaggacgcacaccgcgttctccacgctcttgtcctcgcatttgcccgcgtccagggcgtggttgatagaggtgaccagggcgtccaccagcccgtggcactcccgcatcttctggcgagtggcctgagaggctgagctgaggttcctgaggaagccggtggcgttgtagaagatctccgcctccgaggcgttctgctggatgagggggggacccccagcccccgacagggggctcaacaccaggtccgtgagctgctccagcgtgtctctggccaggcggtccttcaggtggtcgctggatgaaaggttccacaggatccctgtgacatttttgcgaagctcatcatcctgctcccgcagtgtccgcagcagctcgaagatcccgttctcctccaccagggccagcttgttgtcagcgttgtcgtagatgaggttgcgcatggcacctgtggcatggcgctgcacttcctggttggcgtggttgaagagcttcaccagcctaggcacggcctgaaggctgcgggcctgcttcttggcggctgcatcgctgtagcacttgtgctggatgtaggccgctcccagcacctgcaggttggtgtctggagccatgatgtacttgactgctgatggcaggtcaatgtcatcaaaaccgctgctgagtctctgcagggttcggtggctaccgtagctgttgaacccatgcacgtccggcaggtggcccgagtcagccaggctgaggctgaggctgcgcacagatggcgctcgagccactggctccaggacggcccccggcactgccccgcctaccccgcggctccggtggctgctctggaatcgctgcagggtccgcacggcaggggcacggatggtccggctcggggaaacctcagtggcctcgggccagtccagcccccctgcccggctggagctggagctggcctggcgctcgtacgcaaaggccctgtaggtggaggtggccgcgggctccagctgctcagacaccaggctgtagcggtcgtccaggcccccgggccccagccgcagcgagcgcagggagagtgtgtcatagtcggcccggctcccaaccccaccgcgctcatggaaggacacgggcctggtgggcatgggaggggtgggctgggcacccccgtacccagcggccccaaaggcgctgcccccattgtgggctgaactcagcctccgactgcagctcagatccacggcggagcgggaggaccaggaggctgggctgtaggccggcttggcgatgggccggaagcccgaggtcttgtccccactcaggccctgagagcgagagctgaagccagcctgcagggtgtggtactgcccctggatgtgcctctggcagtctcggcctcaggctcgggctcagcggccccgttgtgccgcggctgctgtcccagctgcaagaggcgggcgcggacctgctcctgacgcgggctgcccgcagccgctcggcctccggcccctcggcgccccggcggtccagctgcaggtcagagggcagcgccagggagcacacgccggcctcaggccagagccgcctgaagacagacgcctgcccagc

SEQ ID NO: 151871 - DNA, 824 bp, Homo Sapiens
ctggagcaacaagcaggcctacaagccgaggagggctgtttaaaggcgcagggccattttaccctccaggttggccctgctcaggaccaggaggaaacacctccaggcccgcgacctcctcccacaggtggaaaaggaaagcaggaggaccacagaagctttggcaccgaggatccccgcagtcttcacccgcggagattccggctgaaggagctgtccagcgactacaccgctaagcgcagggagcccaagcctccgcaccggattccggagcccaagcctccgcaccggattccggagcacaagctccaccgcgcatgcgcacacgccccagacccaggctcaggaggactgagaattttctgaccgcagtgcaccatgggaagctctgaagtttccataattcctgggctccagaaagaagaaaaggcggccgtggagagacgaagacttcatgtgctgaaagctctgaagaagctaaggattgaggctgatgaggccccagttgttgctgtgctgggctcaggcggaggactgcgggctcacattgcctgccttggggtcctgagtgagatgaaagaacagggcctgttggatgccgtcacgtacctcgcagggggtctctggatccacttgggcaatatcttctctctacaccaatgatggtgacatggaagctctcgaggctgacctgaaacatcgatttacccgacaggagtgggacttggctaagagcctacagaaaaccatccaagcagcgaggtctgagaattactctctgaccgacttctgggcctacatggtttgtctctaagcaaccagaa

SEQ ID NO: 151872 - DNA, 952 bp, Homo Sapiens
cccggctaggcacaggccaccaaggcccaaggccagccctttccttcccagggggcgggaagggaacccccccggggtaaggggcccagggttccacccttttgcccccaattaacaaaacctcgcgccaagggggaaacatggaaaagcccggattttgcagggcttgcaggcgaattgccaagcccaaggaaagtcgccagccagtgatgacgggccaagggatgcctcccggtcaccagccacgtctcatttgccagctccaccaactgcattgttcgagacagcatcttctctttgtcttccacgtatttggctggcacagaaggtgaagcttggaacagtttgaagctgctgcaataggtcttcaccagttctgccaagcacagagatggcacatccagtcccaggagcttcactatctgcatgtaagtgctagaaaacacatccaaatctgcatacaacagcgtgcagatggcccccattgttaggggccagttatgctgtcggcaggtgattaagacgcagcacccaaccaacacctccttcttttgcagcctggccgctcggatgccagagtgccgatatgcctgttggtagtaggcaaccgcggtatcctcaaatgttggtggcaactgcagaactcgacaaaggtctctcactcgccggagacctcgttgctggctgcgactaacttgttcgttttcccctgtgcttcgggaatatgttacctctcggagattgccctcgtcgctgaaggtagtggtaaggaccccctcggtgaccacgcagccgcagtcggagcacaccagctggctctgcgaatagtgcgagtcttccaccagctccgtggagccgcagtccgggcagcggcctctgcctggcatctcacaaccggccccaaagccgcggaagccttcagagactcctgggtctgcaacagcaaccgtga

SEQ ID NO: 151873 - DNA, 828 bp, Homo Sapiens
  misc_feature (163)..(163): n is a, c, g, or t
  misc_feature (171)..(171): n is a, c, g, or t
  misc_feature (174)..(176): n is a, c, g, or t
  misc_feature (179)..(180): n is a, c, g, or t
  misc_feature (182)..(182): n is a, c, g, or t
  misc_feature (184)..(189): n is a, c, g, or t
tgggtgggaaatcccaagccacttagttcatggcccgggattttccttaaggaaaacaggctaaggaccatgttccacttacctacctgggccccgcgcgcccaaaacgaagggttctagaaaagcttcttggagggcccgagggcggcccgacaagttttanttttattnttnnnttnntntnnnnnnggttccaaaacaggtttttaattttccccatttctctcggtttataataggtaattgacataaagggggcagaatacagtgacttccacgatgacatgttgacctcaagaacacattacggtagcttcgatcagagaccaggtagatacgtatgaggttgatggcactggaaactagaatgctgcttcagtgctacccacgttctccataagtgtcctaatcagtagtggccttcagtaattcgattttgtggccaatccagcgtgcgcccttctgttaactctctcaacttcctggtattttccaagcgctctaatagtaccctctttatcatcgcgcataggtgtttaagctcctgtattatatgattctcaatccttcttatatcttgtttccatctctatatccgtttcaagaggaggcattttctcgattatttagcgctgctccttttttctcaggggcggtattacgaccttttcagttgcttttcttagaaacagggaccaaaatcaaagattaaagaggtcctctgaagcagggaatgaaatagacgttgaaaactattcccgttacgccatctctgcgcgcctcacgtcagggccaagagcctagcgcgtagctttatggctgactcgg

SEQ ID NO: 151874 - DNA, 876 bp, Homo Sapiens
cttgggtgtcttgaagcccagaccgatgttccttgtagtaccgcggagcttctcctcgccaagtttcctcccagcaggaccctcttcttgttttgaaaagatggtcggctgcttttggtaggcacgctcagtctacagattatgaggagaaactgatgagctgctaagtttgaagccggcagccaaccagccctagagaccttcccagaacctgcccagaccccatgctctacatttacttgcaaaagcgccggcgtccaaggcctggtgccccagaatcaccctctaagacatgaccaccctgaccttacctgtaattcatactcagatctaagcccgaggttatttcaatttatatactccagaaggcctctcagggattgcaaaattcatcctctaaaccaggatcaaccctctcacaccctggacacctttcagcgaggatcattctccaagacccaagatcgcccacccaggattcactccttatgtagtacataaggattcagaattaaataccagacggcaggctccctggattagcccttattgagtccgtttccacagaattacccttgaagaccggagaactccaaaaaaaaccttcttaaacttggtttttaagaaggtaagtcctaaaacgcttgagcctccattaacgccaggagcccccaggaattaggaagcactcatctagaaacacaaaacaagcgccctccactccagttaatctctagaaaataatcacggacgcccggaattaacccccgaacttggccgccgggctctgccctcccggacgcgcccctgaaggccaaggcggaccccgcacactggcatccaaccccgagtccgcacctgaatgtccgccatctt

SEQ ID NO: 151875 - DNA, 1054 bp, Homo Sapiens
aaggcgcaacggtctcccttaagagaaacggggggacctcgcaccccacgattttcgaagaaggggttccccggcgccgtgcccaccggcccaagatacaggaaggaggcccttccctcgcggtgcaaaaacctggcctccttgccggttaagccttttttggggagtcccgtgcttttttaacttggcccccaacggcccccttcgcaaggccagctctgataccagttcagggacgttgacatacacatcatcgtccgtcttgaggacgtatcgggccatggggcagtgtttctcagcccagttcagcccgctgagggtctttagggtgaggttgcggtaggagtcctggaaggcggcctgcaagatatccccctgggctgctgactccgaggccaggtcactcccctgggaaccccacacggggtgctgtgcgttcggctctcccagcaagaatagcgtctgtaccctgagcccccgggcctcgcgcagcccgccccacgaagcccgaatggcgtttctctggttcaggttctccggagccgtgcacaccaggatgagcaggaagggaggggccccgggaccactgcaagcttcctggttggggatcaagaggcggggcagggccaggggcggccccggtgaggcgggggctgggagcagggaggctagtgagaggctcagcagctcctcccccaaccccgaaggcccgaagagggtccagacgatcaccagcagcaaagcggcgagaaggaggcgccggaagagcctgagctgcatggtgcggcgtactccgaggggatccgtaagagcgaagggcggagactagctccccgggcctgggtcacggccggggacttaaccgaccacgcccgggatgcggaggtctgagcgcgcgaccgggaccagcgcaccctggggggcggggagaggcggtgcagctgcggaccgcggtcgaggcatgctgcgggggtggctaccttgtcgccgcggcctcgccgccagcaagctccgctccatggctggccgatcccgggaattccggaccggtcca

SEQ ID NO: 151876 - DNA, 825 bp, Homo Sapiens
aatgacttggatcatacagcctaaatgggaagaaggacatttttgctgcatcaaggaagccgttaaactcctgctaagctaactagctcttttttatgggtccatgcacacgaccgaactcctctttcactgaccagagattatttctgacaacccaggatatcccgaaagcttggaggcatatggctggaaaatgaaacgacccaggacatcgtttctggctgcatcattattttgtgtcgcgtagtaccagatgggcagtcagtgagcggcgcagggatgtgaacggacggttttataatgtgaaaattttcccttggtaaagctaaaacagatttaatttccctctcttttctttcactacttccccctctttattccccctctgtctgcaatatcagtgaactcaactttgcagtgaggtggccaaaaagagagagaatgaggagatcttgatcatcttagtgtcggaggagtcgcagcggactgggaactgcagctgcgaccccccgcgtcctgtgcggatttcagggctgataccgcataggcggttatggaaaggacggtacaccggagcggcggaggatagagaccctggcccccggagaggtctgctgatttcgcagcagccttcgaagccgtggctgcctttcatctgctgcgttttattactattatcgccgttccggaaaagtcatggaagacagcccgctgccagacctcagagacatcgagctgaagctggggcgcaaagtacccgagagtctagtgcgctctctccgtgggggaggagccggttcccagggaacgggaccggggaccctg

SEQ ID NO: 151877 - DNA, 1065 bp, Homo Sapiens
gtgcggcagagcctcgtgcaagcaggagagaaaggctgtatcttaatttctgcaccccggaccctgcccacctgtctgcctgccccgcctggagcccaggccagtgtgtttccagcctcaggccacgggctggacgggcctggccgcctcttccgctccctgccatcagtcaaggccgcccgcccacgtttctacgcctttctacttctcaatctgatttctatgaggtttttttaaacgagcaatccttggctgcttccttttcttaactctttcagtactgagagcagcccctccacactgaaaacacccagcactgtgacggagtccagcctggttctgggtcccgtgggccctgctcctgcccacttagcgaggcatgggctccttgcctcacctggccccggcaatcccactgaatttctactctggggtgggtggggcacacacttcggtttttttaatgccaattccgttttcatgccgaatctaagaagccacaacttgctttgtcagcttcagggcaggcagccatgacttcatttctcgcctgaacaaggaccatgctgtcctgcacgctgggtctgaccgtctgccctctctccccagcaccaagcgtgaccttggctgtggcgctcaacggccagctccggcggccctctgctgctccttcggctttcccggaagtgggagagcctgcctggcctcggcctttgtccagcgaccaggctctgtccccgagaagctacggccgacctgggtctggtgttgggacgcatggaccgggctggggaggtgcacagagtgatgttaactttttcccgtgtgtagatatgtacagccaaagggtcgtgtaaatgttctgcaaaagtgggtctatacagagtgaaagctatttattctgtgcagagaaaaaagtctggagggatggaaccttcagggttattcatatttaagatgtagctctgtgttttcaggcattatgtataaagcaacgattatttatggaccaagttttcatgtaactgttgcagtgaaagtgcaatatctgaccccctgtcccag

SEQ ID NO: 151878 - DNA, 1619 bp, Homo Sapiens
gtggggtggctctctcggattgtgtcgcttggtttgtaggttcggttgcgcctgtggcttctagcaattgctcgacggctagccgtgggactgcgtgttctcggccgagtgctgggtgagtggctggatgtgtttggggcgcttgagtgtggccctgttgggccgctttgggtgcctgcggttggcccgctgttgctggggtgacccggtgtgtggcttgggtgcgctttaaggccggatgatatgtggctgggttgtgcgcagggagggttagggtgggcctgggttctctcctgctaggccgcgttgctacggggggtgacctatgtctggagccgagctgttgcgggggcgcccgaacgttcttcgtgtgtccgtgctggtgtgaactgtgcctcggtgtggggtagtgctgttgggccaggtgtggcgtgccccaaggaggtagcgccgttgctggccccgaggtgcccgttctgtgccgactccgtggtgctggcgcggatgggtagtggtgttgtcgctggtgtggccgggggggctagtggattggttgtgttggtgcgaggcgtgttttcgggggggtgcgtgtgtgtgcggtgcaggtctgtttggtaccatgctagtggtgctcttgggtccttgtgtgtgggccggctctggcgtgttttgtgcgttgtgtgacgtgctgtgctgtgcaggtgtcgggtgcaggggcgctgcgatgcgggtgtcgtgctgtgttctggctggtaagtgcgacgcgcaggccagggactggccgattggttgtcgctctgttgggcagtcgtgtcggtgtccgggtatgggcatgggtttggattcgcggcggcggccacgtgcagggagcggggccgacctccttgtgcgccgtgcagtggtagccggtcgcggcgtgaggaggttgcacacacaggagtgcccagacagccccatgaggcagaagacagggacgatggcgatgaccgcgtactggtcgtctgtctcctctgggccacctgcccgggtgccgttcccaggctgccgtgtctcaccaccgctgctggcccctgctgccacctccactgccacgtcagggcccagccgcccccatctcatcacagccatgagtacccagaggtgcccaggaacatggttgacatggaacgcggggaaccccccaaggcccaaaccacccaggccagcagtctccacagagtgtatctcgagttgtccatgcccacctgggcctccagcctcctccaaaggctgcaacgggcatggggctggcatgggctggagccccatgcagctgagaaggtgcctggggggcagggcctgcataatgtgccctgccctgggtccaggtcgggctcctccccaggtgggcactgccaaagggttgttgatgtcagggtggcgagaggccagggcagcagcataaggaagcaggacaggggccaggcacagcagacttggcttcatcctcaggcccctggtggtcgccggcctggctgcgccgcggcagctccagctcggctccccgttcgactcggcgccgcggcccggctcggcgagcgcccggacagccgcgcagcctgcgcgccttttgaatgaat

SEQ ID NO: 151879 - DNA, 1099 bp, Homo Sapiens
tggtggaggaaccgacgataattcggggcaggccgccccagagccccacgccataaccccaccagaccatggtttctgccaatctcggttagcgcctggaaacatggccctgatgcttatactggtgccctacagcaatttgctgaggctgcctgtgcctgcaggtgtgtcttcaccatgtagatggggctccccaagtaggctcccatgaccccagccatggccccagctgctgcgctgcgggcaggactgtgggtgccttcggctgtgtgcagttagcccccaagcctcagccagccccataggtgcccagtcggatgccattcatcaggaactgttacaagagggcgggggccaggccttttctgcagggcaagcaaggccatccaccttgccgatggtgatgaaggcatggaagacatttcggtagtgccgctggtatgtgccaggggcctgcagttctccttgcaactgcatcctggtcttcaccacctccaggggattggtgaatacacaggccccgcaggctgccaggccactcatcaagaagtccatggtgggatagctgtagcaggaactgacccaagagtaagaaagtaaaaatgggtgtcagaaagcggggttggaagacagggggaaggcctgtttcagcagtacaggttgcagaagataagaatttagatttgcagtcaagggtgtcagggtcaaatgtcaagtggtcaaacgtcagctggaatttgggagtcaagagctggcaagcagggaagagatagaaatctaggagattctggtgagaagcttaaggcaggaccctctgaggtcaaggaggggcaaaagacagaaggttgcaggtgggatggctcaggatggcgggcgacgggagcacgggagtagaggagggaatcgcggggttgggagatggaagccagggagtcaggaagaagaaagccagcaagtgagagaagaaaaggatccgggagaagagccggtgatttcctcgagccagcaacgagatctcgatccgagaaagaagtcaggactctggccaggaatgagcgtccctgagcgtccccaggcagccaccggagctcgcagtagc

SEQ ID NO: 151880 - DNA, 598 bp, Homo Sapiens
gggactggtggactgggtcagattcagatttccaatcccgggaagccctggtaagggcttgatgtcctctgaactgctgacactgttgacgcacatttagatgagagctgggtggggcaacacaaggttgatacgctggaggcgactgacaagtgctcctgagggtgagcccatggcagagttgatgactcgatatggagagcccagggcattgaggggggtccccactgcactcagagtccgtggggcactcactggggtatctgtgtagctggggtggctgtccattggcttccctgtggacaaggctgctgatgggctcatggatgtagagccagtgtggccaggggagcctccatagcctgcgggaaacttcatgaagtgagaataatttccatacatgtttactcgtcagttcatgttcctctcctgtgcagcttctaaatattaccgcctctctcggcttccaggcacagcccggctttcttcaacttgggctaacaagagtggtcatcgcttcatagcagcccggggagcacaggctgggccagccctctgggattagtcaggaatctgcctctagatcggagagtccaca

SEQ ID NO: 151881 - DNA, 582 bp, Homo Sapiens
agcattatgcgtgattactgacaggcaccagctgctgccgccacagccgtctcaaacgcactatgtggactctccgatctagaggcagattcctgactaatcccagagggctggcccagcctgtgctccccgggctgctaggaagcgatgaccactcttgttagcccaagttgaagaaagccgggctgtgcctgggagccgagagaggcggtaatatttagaagctgcacaggagaggaacatgaactgacgagtaaacatgtatggaaattattctcacttcatgaagtttcccgcaggctatggagggtgttcttcccctgctctccaacttctgctctccacatcgctagggctgtgaaaacagatactgtgagccctgaaccctccaggaggctgcttccccatgacactagtgaccagtaaaatgaaacggaggagcaaaggagattttgagtcacagaaatgaaacccaggcaaccagcctagaagaaacactccaaaatattcattaagtgctttgtttcccgttcctctgacatcttgtaaatgctttttggattaaagatgataacaggctta

SEQ ID NO: 151882 - DNA, 1318 bp, Homo Sapiens
  misc_feature (20)..(20): n is a, c, g, or t
  misc_feature (65)..(65): n is a, c, g, or t
  misc_feature (117)..(117): n is a, c, g, or t
  misc_feature (132)..(132): n is a, c, g, or t
  misc_feature (994)..(1025): n is a, c, g, or t
cggatgtactcttcccttgntttcctcccgtgacccggatgctctcgccgccctcctttcagctncgtgggtcgtcaccttgcccagtatctccatgtcctggatgaagtacagctncaggccacatctttncaggttgttctctttgatccagacaatggagttgtagaactcagggtcaatggactccaggtctttcagggttggtctcttattgagcatccgcttgtagaaagggagggtgaagcccgtgtcgatgaactttccatggtacagcgccatggcgatgaatctgcctataaagcgaaagtaggtgaggtggtccgggttgatggaggaggcggggttgatctgcaggcagtaattgttctttccggcatattcaaataaacaatacatagggttgagcacctcgtgagacaggaggaaaaaccactctctggcgatgcccccatagtccaggccctcctcgccacgcatgatgatgtagagccggcggcgcaggtcatagggtttcatgttcatgatctgttggaaggaatcttcgaaaagcgtctgcctggaaacgctgatcttcacgtggctaggtagggcatttgaatggcagaggaaacggaactggtgatacttccaccgaaaactgcggtcataagcaccaggggaaccttgcttcgtccccgactcaaaccccgggcgaggatccttaaaggtggtggtgcgggtattgtggtccacaaagtatcgcaccccctcgctggtgtatttcatctcccatcctgggggcagagctggttcctggatcatcccctgggtccggggatcctcccactggttcgtgcgagtgttatggttcacgtaatacacccgtccattgtcctgtcttttctcccagccaggagggagggggcccaggggatcatggtcagtcgaagcactcgaagactaaacacaagaaacacagcagaacacagaggttacaaaaagccactggtgnnnnnnnnnnnnnnnnnnnnnnnnnnnnnnnngccaatgactggcttccacatttgagtgctttgcagggaatgcagtgggactttaggtggcatctgctcctctcaaaagtctctgttttttgttttgatttttacagaaaaaccaaaaaagaaccctgcgcacggagggcccaagtgagttttggaaaaggcagagcgacggggaggaggcggtacgcgggtgaaggtgtgccagggtggcggaggcagggagcagcctggcatggtaggaaggcccgggaagcaggctcggcccagtgcctccgctcagctccggctcaagc

SEQ ID NO: 151883 - DNA, 1076 bp, Homo Sapiens
  misc_feature (326)..(326): n is a, c, g, or t
  misc_feature (384)..(384): n is a, c, g, or t
taaccttggatttccccaaggccaaccaggggggtggggttccccaacacgggaccctggaagggttccccgaagttccccctttcccaagggggccctgaaccggcccttcccctgccattttttggtcctttgggggagcccccggccttgccccttttggggaccctccacttgggcccacggggaccccaggttccagcccaccggggggtgccaggggcagcaggggccagctcccagcccccaagggcttgaaacgaaactgaggaggggccaagctcgctaggatggggagactgggttgggagccagaggttggaggnctgggagcaccggggctgtgtcccccagggcttcccatctctgtccactgtgccttcntgctgggaggtgaccggcacccaacttcccagccaggccacttcctgcagtggctcaggcagccccaagaggcctggccggcccaacctttgcagagggctcagcgtcaggacggctgctgaggcgcacagcctccccaggacagaccacactcaggcggcctcaggacgaagaattccagacacaggctgcccaggggccctccacctggcgctaagggtcggggaagccctggagggccacggctgtgggctctcccagaaaaagcacctggcgtttgccacgggtggtagcaaggctgcctcctgaggacacaagggacagacacctgaggtggcaccctatgcacagcgcagctccatccctgtgacctggccactgaagaggggaacccccgccagcaggctgcccggataggagtcctcaggcagcccccagccctggtctggacctggccttgtggcccccaagacagctggcaccggtgcagttgccagggtctcgatgccaatcccgacctatgcagatcttagctgcccagcgctctacagcccgaagatgcggggagcacagaaacctcagcagcactttgtacacagccctgtttacaaagatccagggcaagacagagcctcacagcctgcgtgcatccgaagcagatggagagcatcccgggaattccggaccggtcc

SEQ ID NO: 151884 - DNA, 828 bp, Homo Sapiens
  misc_feature (48)..(48): n is a, c, g, or t
  misc_feature (743)..(743): n is a, c, g, or t
tactttcatcctccccacccccccaccacaatgatacgaagcccgganccggtccggaattcccgggatgttagatgtgacttggaaaatgagaaagatttagcaaaattccaccgtgtcttttgccaggctagagacaggtagagcagagtaaaaccctcaggctgctgaaatttctaggctgttaggaagcccctcgaattctgtgaaaatgagggtttcttaactcacactgagagcggaaaggggcagacccttttcataactccctcaagtgtgtgttacctttctttaccagcatggtaagcaacaggacatatcccagcctcggacatgtctgtatgatccaaggtacccaaagtcagacagagtaaactcaagcctggcactggctttctgccgcttcatgtgctttggaaaaagcaggagaagcaatagcagcaggagtccccagcagctggagccgcaagaatgaactgcaaagagggaactgacagcagctgcggctgcaggggcaacgacgagaagaagatgttgaagtgtgtggtggtgggggacggtgccgtggggaaaacctgcctgctgatgagctacgccaacgacgccttcccagaggaatacgtgcccactgtgtttgaccactatgcagtgggcacgtattcctctgggacgggtcgttgggtaactgatcagcaggaggttaggccgaagggcacgggtccgcagaggacaaatacgtggtnaacatgatgtatcggactacggttatgtcgatcttggtgcatcgggtcgtggatccgtgcctccttggaccatagtggttgacag

SEQ ID NO: 151885 - DNA, 1208 bp, Homo Sapiens
agagctgcacggccaatggggccgttcgccccaaaatgccacggccagggtgctggaacccacccttaaatttttggcgcgaaggccctggaaccaagttcgggccaggctaagggccccttcgccgcgtgtggatgccgcaggtgggtttgccaaagttgaagttctccccgaaggctttgcccccagtgggggcaccggtaaggggcgctcggccgtgtgtgtgcgttgttgttccagcagcccggagctctgcccggaaggcctgcccgcactgcggaccagggtagggccgctcgcccgtgggcgtgcgcaggtgttgagccagcgcagagccttggccgaagcccttggcgcacaccgggcacttgtggggccgcgggccgccgtgcgtgcgcaggtgctgtgccaggagcgagccgtgcccgaaggccttgccacacaccgggcagtggtgcggcttctccccgctgtggctgctgcgatgtttcagcagcgtggagcgccagccgaaggccttgccgcaggccgcgcactggtacggccgcgccccagtgtggatgccacggtgctgagccagggtggcaccgtggctgaaggacttcccgcagtcggggcagcggtacggcttctcgccgctgtgcgtgcggcgatgctggctcagcccggagctgcggcggaaggctcgcccgcaatccgggcaggagaagggccggggcgggctggcgggggcggggagcaccgcggggctggtgtccaggaccttgggggtggcagtgaggccagaggagatggggtccacttttggatcgccggggctgagggtgtcgctgttaggatcgagaatcaggggtacggggccaatcacatctggatcgaggtcgaaactcgaagacatggggtcgggatcttggggttccgagcccggagcttcggcgtcggggtccagatcctccgagacgggctccagatcttcatagctggggtccacgtcttccgggacagtgttgaggtcttcaggatcaggctctgggtcttcagaaaccgggtcctgatcttcaggattggggtctaggtcctcggagtcagagtggagctcttcataaacgggtctcaggcctttgtggcctgggttcgtgaccaggactgagcgccgcatttcaggcgtggatgtgccggcagcttctggggcaagacccggcgcccct

SEQ ID NO: 151886 - DNA, 691 bp, Homo Sapiens
cagtgatctagtgtctgacttttctagggaatccaatcaataaaatgaagactggctgcaggatgcggatactctgaagaaggattttctgaggaagcaggacagtttatctacaatggcttctgcagccatgggaccagcttgaagatgacttgaccctgggagcggaggccacactactggccgccaatggcaaactcttctccaggagtttcctcgagacagccaggcctgccagctacttgatcttggctgtagtttggcttccagcagcatgactggggggacctacaagactagttcaagcatctcagaaattctggacaaagtgcaagaagatgcagaagatgtcctcttcagtctgggctttggccaagaggatcacaaagacacttctcggatacccgcccgatttttcaccaccccctctcaggccaagggcattgatttccagctcttcctgaagtcccaggtgcggaggattgaaatggaagacccctgcctcatgctggccagcaggtttaagcaggtgcaaacactggctgtcactgctgatgccttcttctgtctctactcctatgtgtctaagacacctgtccaaaagttcacaccatcccacatgttctggaattgcaaccatccaactgatgtgccatccatcaggattctgtcccgagagcctgaccccagc

SEQ ID NO: 151887 - DNA, 658 bp, Homo Sapiens
cacatgcctcatcagcaatcatagtcacccagctcagcctgcacagcgtaggagcccagtagggcatgcgtgacaaaggagcatggcagccggcccgtgatgatgtctgcccgcagctgcaggcacaggtagtatcttgtgatgtcttctgtcagctgggcaggatcaggcgggtagaacttgactgtgaaggcaaaattccaggggctactccggatctgcttcttgatctccttggaggggtccagccagttcttctggctgtcagcatcacagaaggtcaggccgaagtagtccttctctaggaggttgaggtgttcacagaccaggtcaaacagcacctggccccggccatgtttctccacctcacactcatactccgaggcatcaagcagagtgacccggcagatggcactcttgtatttcttggcatcttctggggcgatttctgggccttgctgggcgtggtcctctccgaaaggccatcggcctcactgtagtccttctcctccatgtctaggctctggcccggggttccccatgtcgggcaggttgggcgagggcggccccctcggctcctctggcacggcagcccagggcgggcgcgcgggtcgcgcggctctgcgagcagcctgttcggcacacccccgcccgctat

SEQ ID NO: 151888 - DNA, 865 bp, Homo Sapiens
cgttcttgtctgttgtttgttcagtgtgggtttcttttgttcgcgtgtagtgtgttcttggtatttcctcgttccgtgatttttgtgggtggcttcctgtctctttcttggtctggggattgtttcgcgtgtcatacggtcggcgtttgttgttcgttcttgtgtctcgcctggtgccagtcgtggtcccgttcgcaattgtgtttctcatgtcgggatggttcgttctgattcgtttgtggtctggcttcgccgtgtgctcgctctgtgttcctgcctgttttctttctcggttttgtggcctgttccttcttgtggttctctgttccttcttgcctctcgggtctgcgcccgttacgtgttttttgtcccgtcgtccttgtattctcgtcatgtctgtggccggcccagtccgtcacgggtgttatgtgttctcgtctgcatgtatccgcctcccggccgtgacgcatcttgctcggtcttgccgtgccgcttggcccattcctccggtggtcgtgggtgcgttgtgccactgcgccgggttggcgtctccgtcgggtgtcggctccctgggctcccgcccttcgggtcccacagtttccagccgccgctctcctcagtgcccggtggcccaggagggcctgggagcccgaagccgtccccgagtcgctcctaggtcactggcgcgatgcgggccgtcctctcggctgatggtgcgtgcgggcgcggatctcctccctggtcctccgcaccgtccccgagtcgttctccgctctggcagaacgcgagcgccgtccggttcccgctcccgctggcccagcagccccgggctggactcggcgtagggtccgcacgggatgggctg

SEQ ID NO: 151889 - DNA, 871 bp, Homo Sapiens
ggggggagctgactgtaacagatgcgacccttactcgtgtgcctctcgtggacggtcctgaggcgaattcgactccttcgtgtccagtacaaggataaggatgtcggctcaggtggtgcggtgcagccaaccagtgggaggtcacagtccagtgcctggagcccagtaggaaatacatggttcctgctctatggtctgtcaggcaggaaacgactgggccccatctctgttgacagcaccacagttcccctggagaaggagctacctccccacctggttgaactgaccgtggttgaggagacctccagctctctgcgcctgtcctggacggtagcccagggcccctttgactccttcgtggtccagtacagggacacggacgggcagcccaggcagtgcctgtggccgcagaccagcgcacagtcaccgtagaggacctggagcctggcaagaaatacaagtttctgctctacgggctccttgggggaaagcgcctgggcccggtctctgccctgggaatgacagccccagaagaggacacaccagccccagagttagccccagaggcccctgagcctcctgaagagccccgcctaggagtgctgaccgtgaccgacacaatcccagactccatgcgcctctcgtggagcgtggcccaggcccctttgattccttcgtggtccagtatgaggacacgaacgggcagcccaggccttgctcgtggacggcgacagagcaagatcctatcctacaaggcctggagcccagaacccctacaggttcctcctctatggcctcatgaagggaagcgcctggggcccctctcagctgagggcaccacagggctggctcctgctggtcagacctcaga

SEQ ID NO: 151890 - DNA, 687 bp, Homo Sapiens
tttcctgaatgcgaggatttaataccaatgcgggcacaagaattttcttagaaaaggtcagtggggagggatcatggacaccttggtttcaacaactccaactccttcatacatcatcttcagttaggctggctgatcagtgtgctgatactttcttctacctctgacagcgtcttcagaatttggttgactttgacctcatcaaattccaaacacagaaattcagattcctgtccatatttgcctaattccagctctataatggcaacaggtgtgtgtatttgagctgagtgccttgactgagacttgccatcaactctccagctcaggccccgaagcccgctattccagcggctctggttcatgaggctctcacggatttttgtcttgtggctcttccagaatttggaaatgacagcagcttggtcagatgtgatcccaccttgctttttggtttgagcagtcaagaatgcctccagctggttgaaatccatgtctgcagacgcaatagacttaagaatccccctcatctttgccagaaaggggcggaactcctcgggtggcacctctggatatagctggctccgtagcagctcctctgtgatgccggggtacccgtggaaagtgtcctgggccagcgcattcagcagcccgctcaggggttgccaccctcaagctcgcccgccg

SEQ ID NO: 151891 - DNA, 1369 bp, Homo Sapiens
cagatatgcgggaaggggttaggtgtcaggcgtgtggatgacgtaatgtacgtgagtgtcgggaaggtaagaactaggtggtgtgtgatattttgggtcgaggtgagagtgcgtgggtaggatgaggctgatcgactagagggtatggggtgtagcgaagagggtaggttgcggattggagtatggagtcgatcggaggtagtgtgcgggctcggtgaggggagggcacgggatttcgagtggagctgcagtgcgggggggaggcgggtgatggagttagggtttgggatggtaagggggtagggttgtggggggcggttatgcaggcgatgtagtgttagagtgccggtggcgttggcggggtggcaggggtgtaggggagagaggtgaggttaactgtggtataccttctctggccagaaagctgcccttaagggtaagccgtggctagcgggatgcccgagaggggctgaacttccacaccctgtagggggtactggagcggggagttggcaggggctatgagcagctgggtcagctggggactggctcctcgacagaaaggccctggaactcctgctctcttgtggcagaggcagccctcagctctgcagggtcaaaggccttggtgaggtcaatagctcggacttgtttctggaaggggagggggaggccccccccactggactcacaactgcagttgttccaagccagcagccccactacttgctccttgatcctgaccgggatgtgtgcgtagcggggctcaggagcaagatctggcagctcgggcctgcgggggctttgcgggggcgcccacggcgcaagaggtagccggaggccgggcgcgtcccgggtgctcgcgtacaggagccccagcgaggcgcaggcgagcagaaggaccagagcgcacagggcccggcggcccagccacatcctgtctaacgctctaaggcagcggcaaaatttcggtccgggctgtgccgggctctcgccccggcctgagggtcctcatggggctgggggctgcccgatgggggagctgggcatgagcctgagggtgtgggggaccctcctgcctctggagcgcgcccgatccctcccgtcttggaactcccggggcttttgtggagcgcggcgcggtggtggttctgggcgtttcctgcccgggggcggttggcggggcgcgaggaccaagttaagagtctgttgcaccccagccccggggcaaagccggggatcctggctccgcgtcccactggcagcgcggggagggctctggccgccgcccggctcttcgcaccgcagcgcagcgcggctcagctcccggctcgttgcggctgcttcggctccgcatccggagaattcc

SEQ ID NO: 151892 - DNA, 852 bp, Homo Sapiens
atgctggtacttcaactatttccaaagtagtccatttggtagaatcacataccttctttctgatacgtcgtctttctctttctgggaagtgaacaacctccttttatttttcaagctgccgtttcttgcctttctgcatcgcttgctgtgcggtcgttgagcttctttctgagtttttcaacttgctgttctagctgatgaatccttttccgctggtgcattgtatcctccacagtatagttgtggtcacagaaaactgagagattaaccaggggtctgaagaggcggcattagtaatccaatagcagcatcaacctgggaaacaggaggcggtaaaggaggtgggggaagctgttcctgtggctccagaagatcttctttcttgtcatgtggctcagtacaaagaaatattgtgggcacagcattctctttcagtaacttgttgttgcactctctcttaaagcagtctggagtaaagtgctctgaacaaatactgctatacttggtgggtttaaagttttttcttctgacagctgcctcccattctttacaaagactgggtcgagtaagaggaaacttgtggaaagaaacgggcttgtccttgtcgtagcggttcttgcagccgtaggcggagcaggactgcaccatccttccggtcctcaggcacttcacttctgccgccgcagaaggcaggggaagctgttctcagtgtcgctgcgctcggttggattccctcgcttcttttgtagctttggccaacagttacagtgatggtggcctccctcgggggtgactagtgtgcaccgttttgttgtttgcattagcagaaggaccacagccatcgcccgtctc

SEQ ID NO: 151893 - DNA, 918 bp, Homo Sapiens
cagcgcacgttttgagttttagtttttggagtcacttgatatcagagatggtgccggggaggggccttttggttttcttctctttctgcagaccaggcaggccaccaaggtgctgaaccccacgagggtgcccagtgcaagccccagcagcccacgacaatgcccagcagtggcacttccacccgggtagccagaagccctggggctggaagcgacgcactggtgacacccacgtcattggtggccaccaccgagaggttgtgtgccaggctgcggagctgcagctgcaccgtgtggttggtgagccaggggtagttctgcgcatccagcaccaggaagtcagaggtgttgacagtcactggcccatcctggtcgatccaggtgacattggccggcgggttggcacgcaccagggcaaacaggacaaccaggaggcctgggccctgagcttcctggtacttggcgccgacttgggcaatctctggcttgaattgcacattaaggatgacagaggcgttggctgatcggccacttctggggtcctgcagagagcagttgagctcatgctgggcccgatgggcagtgacagtgaaggtgctggtgcctccagagaaggcctcccctcccacgctcagcagtcttgaggtgctggcctcctgcagctgtccatccagataccaggccaatctgggggtgccaggcccccctgccacccggcaggtgaaggcgtggcgttcattctcccgaagtgcccgctcagcccaggtctgaccatctatttgtggctccaactccccccaacctgagctcagaagggctggcaggagcagcagtgtgtgccggagggcggctgggcctggaggcagcgccatggtggcccgggcctaggccctaggctgctggctccctccccgagcg

SEQ ID NO: 151894 - DNA, 888 bp, Homo Sapiens
gtgtgttttgtgggggtccgcctgttgggtgagtgggttggttttgttgttttcagcgttttgaggtatgttaagctttatctcgacacctgtcccgtcggatctgttatgacaccagtcagattcttgccaaagtgcgggtccaccgttcacatcacacaccctcaagctctaccaaatgcctactcaaagagctgttggacccctttgtgcggctatttacatcctccctcctagtaaatattttcatcgcaaattcagtctgtcttaattctctcgggaaatttcagggacaataatttttttggcctttgctcagaagccactattccaggggatctaagaagaggtgcattcccagatgtagagaggggcctttttgtattgagtgggagcacaaaggctccagggctcctaagcttgggatttcctctgagaaagtgaaattggggcttgtggagaagagaagtagaaccaagaagcttattggcgagctcaggattcttcatccatgacatctagaatattgctcagaagaattttgaaagtgggacgctcatctgctttctcatgccaacaactgtacatgatggtatataccttctctgaagccagatgaggcctgtagagacgtaggccttgggcaatgtgttcagcagtctcactgttagtaaatctctcatatggcatcttccccagggagtaaatttcccacatcaaaaccccaaagcccaaatgtcagatttgctgctgaacttgctatacatcaggacttccggtggggaccaccggactggaaatttggagcctactgagcttgtgtattcatcatccaggacatacctggacaggccgaaatcagatactttaacaactccttgatcgttt

SEQ ID NO: 151895 - DNA, 981 bp, Homo Sapiens
  misc_feature (12)..(12): n is a, c, g, or t
  misc_feature (579)..(579): n is a, c, g, or t
gcggccgcgcanaaagggtggcggcttgagtgtggcggcctcggcgatgcgtacgtggctacggcacacctcgcgcaccacgcgcaggccggggtcggcctccacccacgtgccgttggtgcccagcacgatgccgttgtcacgcgccagagccttggctgtctgctcccgggagcgcagcacggcccgcgggtcgcgcaccaggtgcacgatgcgtaggttgagcgcggggtcgctgagcagcgggtagagcacctgcaggttgaagaagcgcacctccttgagcaccacgtggctgtaggagcggcaggcctcccgggccagggtgaaggactgccgcgcgcacagtggcttgcacacggcctcgctgctgatggcgcctcggggaaaggcactgcaggcgggtggcgagcacagtgcacggctcacggcccactggaagaggtcggacaggttgcggcgccaaggcagataggcatcaaacacgtccatgtcgcacaggaagacggagcgcaccaggtcgcgcacagccatgtgcagcgttgcggcgctgccctgcgacagggtggtccacacgtngccacgcgggctccattaggtagaagacgtcggggtgctggttgaagagttggcccacgaaggacgagcccgagcgccacgaggacagcaccagcacatgcacgcgcgcctcgccgcctgctggggacgagggccctggccgggaaaccagaaagaggaggaggaaggtctgcgccaggaggagcgcggtcactgctgtgctggagacgcgcggcagccacatgctgactgctgggggccactgtccagggctgctgggagagctgcaacgctgatcacaaatccatgggagatgattagaggttcctcagcaccccaaagcttggcggctctgcccgagctgcagcggcacggtgggggacgcctctctccctggactcagcaaaggctcccaaacgtcgt

SEQ ID NO: 151896 - DNA, 957 bp, Homo Sapiens
cgtgggagctcgcttgaacaccttcgacggcttctggtggatgatgtggggtccaaggaagctggggagagttggtgctggaggtgctgcctgccccttgggcgtgggggccccaccgacaccttcgggcgctgccggctcgaggccagggaagacgcagaggaggcggcggagagtctgccgtcgggcaccaccggcaggtgcactggctcgggaatccggggtggtctcgccaaggtggcggaggcgggtgttgcaggggccttgatggctctttcgagacagggtgcctgttcttgacagctgcgtgctgaggtccttgatcccatggccaatgtcgtccaggcagccaaagttgaggggtctcctgcagtagggcgtgagagggggtaggttctctggggcgatgaccttctggccggggggcagccgctggacagtggctaaggtgccgatctcccttcgggccaccttgctccatatgcatggttcaccatctggcccagcgtgcttacacgggcttccacctgccgcagggcggccccctgcaggtccaacatgcgcagagtgtgcccggccaggttgcccacctggtaggccacgctggccagtgcctgggtagtgaaggccatggtctcctccagcgccttctgcttgtctgtggcctgcacatagttgtcctcgcagtagtcagcgacccgcagcagggcactgtggttgcccctcagagcctcccggccagtggggatctcaaactcctgcagctgctgtagctccgccatcacccccagcctctgtctggctccccagggagcccgctcgttttgagtctcaccctgcccttgattggttgctctgccttccctccctcttattgcttttggtttcctctgcgtgagacccaaacctgcttgcaaagggcaggcatgctcattccgggacaagaggaagtcagtc

SEQ ID NO: 151897 - DNA, 759 bp, Homo Sapiens
tggagcccgctggaacacctcgacggctgctggtggaggaggtgggtccaaggagctggggagaggtggggctggaggtgctgcctgccccttgggcgtgggggccccaccgacaccttcggcgctgccggccgaggccagggaagacgcagaggaggcggcggagagtctgccgtcgggcaccaccggcaggtgcactggctcgggaatccggggtggtctccccaaggtggcggaggcgggtgtggcaggggccttgatgctctttcgagacagggtgcctgttcttgacagctgcgtgctgaggtccttgatcccatggccaatgtcgtccaggcagccaaagttgaggggtctcctgcagtagggcgtgagagggggtaggttctctggggcgatgaccttctggccggggggcagccgctggacagtggctaaggtgccgatctcccttcgggccaccttctccatatgcatgttcaccatacgggcttccacctgccgcagggcggccaccctgcaggtccaacatgcgcagagtgtgcccggccaggttgcccacctggtaggccacgctggccagtgcctgggtagtgaaggccatggtctcctccagcgccttccgcttgtctgtggcctgcacatagttgtcctcgcagtagtcagcgacccgcagcagggcactgtggttgcccctcagagcctcccggccagtggggatctcaaactcctgcagctgctgtagctccgccatcaccc

SEQ ID NO: 151898 - DNA, 905 bp, Homo Sapiens
tttctatatccctctttgctgtctctcacctcttcctgggtttgactctctattttctcctctactgggttccagtcttctcccccgaccacatcttcataggcaatgttattagccttgtagatatcatcttcatcatccgtataaagtttttgctcctcatccatcctctcacgtttctggttgtttggtcctgtcagtttccccagctcttggaagacagattccaatgtagcaaggctttgaggagtatattgttcctccactatttcatttgtgcgtttaaaggggttatccctggaattctcttcatacataggagggaattgcatgtgcttaagctttctttctggccactgctgtgtctcataatcatcactcatgtccattggaaagttcttttctgaattcaaggcatagggcttattttcttttggtgcagactgaggctcattttcagcctgtctcaaagcttcgagtattattctcatccagtcttcttcactcagtgaatccctctcgggcaagtggctttcatcgccattttctgttttgctgaagggggacagagacaaccttggtagggattattatctgggctgctttcttccttatgagcttgttgtcggaggttttctatgtactccaaagccctgatcatttcaggactgggaaacttttggacattttccaacctgaggtctggttctttctgaagcagctggtttctctgaaatgaagctgcttcagccccagagatgaggaaaattaaagggataagagacagggctgctccaagccagtgggtctttgcttcagccatgtttgaaagatttcctctttttgtttatatggcagaggagctccacagcatattcctccccgttctccgggcgagatcccgg

SEQ ID NO: 151899 - DNA, 700 bp, Homo Sapiens
ggtatgtgcatgggctgtagggaagggagtgagagagggtacgggaagtcagggacgtgaaagccagtgctccgaatgcaagggagacttttggaattctgtcacgttgtttcctaggagcttgagcaagacagacacagggtcagagaagaccagaagagaatatgtgtggaactaaagagtcaagtctcaggggcctcagtgcagcagctttccccccatccccatgggatgggccaggctaccctactctgagcatctaggctcatctgatgtgagactgcagaggaggaagaagcacacgggggggagagctccatcccagctgcctgccatcagctgctctcaatcataacacttccttcttctccaggaaagtcttttttgcatgtggtcttgtaccatgctcagtagaaagtgacgtaaaacccaccaagtcgtcaggcctgggcttgctgtggtcagactcatcatggagacagtaggattccacggatcttaacaaagctgaaaggttcttaccagagagcaggaaggccatcacaaagagaatgttactcagtcccatagtgcactggggatccattttggctgcttctgctgtgacctaatatctggaaatgaccccactcatccgtgtgtctgtgctagtccctgttacagcagcagagaagcaaagctttcaccctgtgcaagcctt

SEQ ID NO: 151900 - DNA, 813 bp, Homo Sapiens
ccttagctatggaaactctataagagagatccagcttgcctcctcttgagcagtcagcaacagggtcccgtccttgacacctcagcctctacaggactgagaagaagtaaaaccgtttgctggggctggcctgactcaccagctgccatgcagcagcccttcaattacccatatccccagatctactgggtggacagcagtgccagctctccctgggcccctccaggcacagttcttccctggtccaagcctcgtggtgcccagaaggcctgggtcaaaggaggccaccaccacaccgcaccgcacataccacctccgccgccgcgccaccactgactccactaccgatgccacccctgaagaagagagggaaccacagcacaggcctgtgtctccttgtgatgtctcccatggttctggttgccttggtaggattgggcctggggatgtctcagctcttccacctacagaaggagctggcagaactaccgagagtctaccagccagatgcacacagcatcatctttggagaagcaaatagggccatccccagtccaaccccctctgataaacacaacggagcctcgacggaaacagtgggacccaattttaaccacaagccgcaaggatcccaatctcgaagtggtcccactggcctgtttgcggaaatcgcggaactatccccctcatgggaacattgttccctgctttttcctggatgttctaccgtcataccacaaaggtgtctggccccttgatgaaatcaaccggaaatcttgcgcctggttcttcggcgtatatttcccactcgta

SEQ ID NO: 151901 - DNA, 1214 bp, Homo Sapiens
  misc_feature (179)..(179): n is a, c, g, or t
  misc_feature (214)..(214): n is a, c, g, or t
  misc_feature (224)..(224): n is a, c, g, or t
  misc_feature (300)..(300): n is a, c, g, or t
gggcttttaggagttcacctttccctggagggtgggggggccactgggccatttttttccggggcagcccttcagggagccagcacgtttgctgtccagggccttcgagccccggcccagaggaatggtctcacttggaactcgtagttcttggcccccagtggaggcctccaagcttntgcgctctgccagccggccagcagctcctctgccnacgggagctnccctggcctccccggggcagtctgggtcctgaacaaggccgtgtaagattgggcaggcgcagcagggccactgacnttccagctgagccacaccgccggtctaggcttggggccctctgcaggatccgggttcagcagtgtcacattttccagctgaattcgcacagccagaagctccacaggctccgtgtagtcctggggctcctggatggaaacccgggctgcgcggctctccctatgtcctgcgctgttggtggccacacacatgtaggtcccttcgtcactcttctctgctcttgccatcagcagggaccccccggacactgtgtgccttccgggctggagggccaggggtttcccatctttccaccatgagactgtgggctctgggtggccccagggcggcccacattccagagtaaactgctcacccaccacagccaccatgtcccgaggctggatctggaaatcctcccggaggacagccacagacagccgagcgcctctgctgactgccgtgccaagccggttgctggcctcacatgtgtagacacccaggtctgtggacagggcctggccatcgtgggcatgtccccgggcagggggctgtagcagcagaagggtcccatcaggcaggaggtggtgtgggtctgggggcaccatgctcaggggctgcccattcagcaaccatgcggatggtggcgagctggctggcactgagtctcaggcagctaatcctagccagggccaagggtcctctggaacagctggtcctgggcggtggactaagatctgggacggggagtcctgagccatgcctcccatgatgagcaggagcagcagaggcagggaacacctgcccacacaggacgtctagtctcccatccagagctccactggctactcatcagcactatgtccgtcgtcccgagcacatatgtcctgatgctctgagcgtacagcccgttaaccccggagcgtaacagcctg

SEQ ID NO: 151902 - DNA, 1251 bp, Homo Sapiens
tgcaggctgtaccggccggaatttttggatgctgtgggctggcagccatgggtgccaggcagtgctgagagcagtggggcatgctgcagccctgcaggtcctgccccgcttggcccgagcccccttgcatccactcctctggcggggctcagtggcccgtctggccagcagcatggccttggcagagcaggccaggcagctgtttgagagtgctgtaggtgcagtgctgccgggccccatgctgcaccgggcactatccttggaccctggtggcagacagctgaaggtgcgggaccggaactttcagctgaggcaaaacctctacctggtgggctttggcaaggctgtgctgggtatggcagctgcagctgaggaactactgggccagcatcttgtgcagggcgtgatcagcgttcccaaggggatccgtgctgccatggagcgtgccggcaagcaggagatgctgctgaagccacatagccgtgtccaggtattcgagggtgcggaggacaacctcccggaccgcgatgcgctgcgggctgcactggccatccagcaactggctgagggactcacagctgatgacctgctgctcgtgctgatctcaggtgtggtaccacattggcccaagactgttggtggggggtgcaccacctgatctctcaggtcttcgagagatcaggtctgagcccccggggtcacagggtaaagttaggagcaagggaggtggtgaggagcctggatggtgactcctgggttgccttgggctagtcgtctggcctcccctgagctgtggagtcctccccctgagctgaccttttcggtgacagtgagagggtgcatggggagcacataatgcagggcctgacacatccgtagagtccttggaaaatgtcactgctattgctgctgtctgtactaatgtcacctggggctaggccctcagacctcatggagtcctctccttgatcttccattgtgtgccccctgccctgcctcctgttctagtctcttaaggagtagttagttcttccggtgcctaactgggacctggggtaccccaaggcaggggcaatctcaggtggccaggactgtggtgactgtacacatattgcatatccacaggggggcaccctaaccccacctttccagccccctttttctactgtgggcttgtcacccctgcttgcctggttcctggggtgggatagcccctctacctgataccctcattgtcttgagaggtggggg

SEQ ID NO: 151903 - DNA, 940 bp, Homo Sapiens
cccaaggcttttgggggttggaaggacatgcagggccccgaccgtttctggcagagcccgtcgttccccctttttgtaggggtccaccagctcctgcagagtgctgaaggtgcttcggggggatatgtagaagcccccgttgtcccagggtccggatcttgtaatgttccacgggtatctccctgccgagggtcgtagtctcgcacggacaaagagtagcttcctttagtggtctcgctatcccggatcatgaaggagcccagcatgttgccggggagccagcagttggcgctctgcgtccttccggctgatgcccttgaaaaaccactcctctgtctccagagagtcaacgcgggcgacatagttgcttgggatgtagccctccttccgggtggccagggatcgagccttccaccactccccggattcctctaggaccaccatctggtcccccttctggaagctgaggtcttcgtggtgaatggcctcgtaatcatacagggcaaccacgatgatgtcctcagagcctgcctccctgattcctggtgtgttgctgttgtggctattaggccccggcttgatggtggatgtgggatccggcacgtacacaggacagtgtgggctggcgctggtttcagtttttgagaatgtattgcctccgacctggaggaacttggacttcatgcaccccatcctgggcgcccgctcctcgtctcgcgggcagcccggatcctcgcagcttgagcgcccccccagctcggcagcccctgaggttccggggtgccagtgccgggaaactgactttctagaactagaggcgggggcgacgctctgaggggctttggtgccgcgggcgtttctcgtcctgcactgtctgagtcccttcccactcgcctctaagcctctgatgtgctcccgagatcccgggaattccggaccg

SEQ ID NO: 151904 - DNA, 654 bp, Homo Sapiens
ccttgaggggcctcggggtcggggtggaaagcccttgagggcctcgggggtcggggtggaagcccttgagggccaagcaccgggaccgttttctccgattcagtttatagatgcgaatcctttccgtctctgcctccgggtcaggcaagtattccatcccaatcggcagactttcgttgatccgatttcgcaaggttctctatttcggcaaaggtcggggagtgctgacggtggaggagtcagaagggaggtgcttcttttccactttgctctgtctgtgctctggtttcgggccacgctctttgcaaggacttaagatgtcatgaaaggaggaagaaagcggctggctcttcaggctctgactctgatgtttatcgtcccccttgccagaccccttggtcttcttcttccatttttttcttcttcaccttccgtttggccagctcggaggcgccgcctgtgatggggggcagtctagacccccgcgggcccgcggcgccgccctcccgctcctcctcctcgccgtcgttgtccttgtaccccattgtccccgccccaccgcggcggtccagccgcccgctgggctgcaacccaacccgccccgggggcgcccgaggcccgatgccgactagtcggcgactctcagcgcggacc

SEQ ID NO: 151905 - DNA, 1181 bp, Homo Sapiens
gcggccgccaacacacctctcccactccaagatgcctccaggtggctgaggccaacgcccacacccaggccagtcgtgtgcttgtacagcaggctgtgcctggggacctagatgtgccatgggagggaggagggtacccactgacaggcctctgcctccctcctcaagccctctgttctccctgcccccactctggacactgcttagtccccagccaggcagggcccctgggtttccacttgcagcccccggactgccccagagccgggaagcaccagtgccaacagctctggacttgttggacccacaggcacagagctctgagtggtgcccaggagacccaggaaccttccctagtgccaaatgcctgcagggaccggtgcctggggagcctctggcagccggactgcaggagccaccccatcagcccaagtccacctctgttttgttcacctcggtcatgttttggaccttgcaccaggtgctgggacgtggcagaggacaggccctgggaaccaacagtgtcctaccatggacagccagggccagctaagctaagccatcccgcccaacacagaagacatggcagttatttctcagcagcaccacgctgggtgaggccagttgttccgcttactctgctccgaactgtaaccccaggctcagaagcagccggcaaaagggggatgctggccacgccccacctctaaggccatcaccctggaggtggaagtcactgggctggagggctctccatgtcccccagcagccgccctcagaacacagtggccagagcaccaggctgggtccaggcctccaatccaggccttccctgtccctagaactggggctggaggagtgggtgctcagcccttcctgccctccatccccagcctgcctttctcttcctttggatgctccatcctccttggtttcttgcactgctctcaatcctcccaccctagcctgggggtggtccttggtcctcaggggtatccggggagaaattctctccctgtgcatgacacctgtcatccatgtcgtaaccagcggctccatcttgtggggtggtgactgagggtgacaaatgagatttggctccgtcgtggctgtggactgtgggaggactgttgcgagtgacccgtgtggggttcttatccacagtggtccctgctttgccc

SEQ ID NO: 151906 - DNA, 1282 bp, Homo Sapiens
actgacgtttgtaaatagcaatagacctggcccagccaggtggagttgtcactagacacacccagatcatgagcctctcagcgtgcgcttggggtagccggtgtcccaggccgcatgacctcgagggtgtgcgggtcacccgctgaccacgatgttgcccgcgttctggttggtggtgtacacagcccagagcccgctctcgtccaccatgaagtccatgtcggagaagccgccccaggagtaggggaaggtgttgttgtaaccggcgcccgggaggctcctctgcaccagcacagagcgcgagcggaagtgggtatttgaccaccacgttgctctggtacttgttatagaacagggagccgttgtacaccacgtggcccgtgcccgcccacggctggggcagcaggtgctggataaagtttctggcctttgatgaagtctccccagggttacggaacttccaggaccccggcggcctttgtaatagccatccatgttcccagacccggctatccgcactgggggccatcgtgtcagtcatccaggagccgaagcgggaccccatggccccgaacggtgatggggttactgaccccggtcagcttcccacagcccagcttctgggcgcaggcgtggagccgggcctccagggccatcacccgttgctgcaggtcctcatacccgtaggcacccatctcctcctgaatggccgccagactgccggagagattcctcacctcctcccgcaagcgtacaatggtccgcgtgtctgccttgtactgctccaggaccgagctcaggggcaacagttccgtcatcctgtccttcagctcctggaagctcttggccgagagggacccatcagctgcccggagccgcgcatccaggctccgcatgagggtctccatgccgcgtacatactggaggtcgcgatacgtccgcaactcaaggacctccatggactgggagacgttctggaccttctccatcagttgccgcagctcccgactcctgccatctcgagagcaggtactctgcgctgggatcacggccgtgcagatgcatttcccgtcaggggcctgggctgaggtgtacagctgccagccctcttctgggttctggaagagagtctgtccggccaggcctgagcacagcagcagcagcagcggcggcgggaccgtgagcggccacatgacgcgcccctagcccggcgtcccgacccccgcccgccctagcggcgcctcggcgcggggacatcccaggaattccggaccggtccagc

SEQ ID NO: 151907 - DNA, 1081 bp, Homo Sapiens
cccagctttgtgcccattttgtggaagggggggccaaaccatgaaccttccctttaagggagccttccccttcttgtgcaggggtgagttcccgagggcaagctgccagtgagctttggctcctcctcatacagctgttctctcccagtagtgctacatctgcctgcttgatcttggccagggagtagtcacagcgagacacagcctgcacttctgcaatgttaagcaggtaactctgctcctctaccacttgactattgactttctcaacttcagccaaagagcctgtgaagaacttccgagagcgagccagctcatcctggaccctgcgctcctcatgcccatactcctggagaactgctttataccttgcctgaaggtccttggagacaccttccaaggctgccttccgccgctgcagctcccccataagttcccgcagacgagttaacttctctccaaagtcccgacgccgctcctcagctgcttctttgacagggagtgtacagtggccaggaggctgatggtctgcctcccggcagggctcacataacaccaaaccacagctccggcagaattgccggggcagacgccgcccacaggaccgacacatgagcagccccacagcctcgctgagcccagctgtatcaatgatctttagcactgtcagattgtctgtcagctgggtcaagctggttatgcgggtaatcttgctgcaaaagggacagcggacaccattgatgctactggccaatagcttctccaggcactggcggcagatggtatggccacagtgcagaagcttgggacgcagctgctcttctgtgaaggactccatgcagatggggcattctagcacttcccggagggcatccaggttcaggtgagaagctgctgctgcagccattgctcttcctttgaagggtattgctagcacagctcagaactgaacagcacagtattcatgccctagagggtcaaattcctgctcatacctcccgagatgctgcaaccgcaaatctcttcagagcccctcgctcccctcccccagctgcatggagtccttgtgggcgtacggatg

SEQ ID NO: 151908 - DNA, 1199 bp, Homo Sapiens
  misc_feature (91)..(100): n is a, c, g, or t
attcggcacaggcgggggggttatgtttattaaaaaattgcttggcccctcccacccaggggtttattgggaggaggggcgcgcccccaannnnnnnnnncccccctgcttctaaagaaaaaggcccaagcgttttcccgtttaagaaagagttgcaagaagctgtggccttacttttggcccccgaataccaagacacgcccaggctcccgggagggacatatctttggttgccatagcggtcatactgagcagggggtcagcctgccactttggcagggcctcttcgatggagaacttcttgccagactccctgtcgtgtatcactgaggactccccattgggacccttcactgagatctcctcccagtcgcactcctggcttctgagtttcacgaacatgttgcagtcaatgagcccggcacggtgggcttcctccggggacagctcgcggcctgtgtcagggtggatgactacgatggagcgccgcaggtggttctcccgctgctcccgcttgacggccacggagcccaggcgcttctgcagctcgtcgatctcgaggtctttgtccttggagagcctcttgaggtcatccagttccctctccagggaccacagtctggagtcatggttggtcccagagtccgccacggtcatgttccgcaggtctcgtgtttccgtcgctgccatgttgatttccgattggagccttcgggtctccagctgcaggttttccctctccagctgtaatttgtggttctcttccctcagaaagtctagttccttggatgacttggagttatggaattccagctccgaaagcctggcttccagccggctcacctcgacgtccagctcgcgcttgctgcggctctcctcctccaggctgctcttgagcctctggatctcttgctcggtgtcgcccttctccacctggacactctcggagagcaccaccttctccttgacctccgccttctccagtgcagccagtttcctccggagggtctcgagctccccctccaggagctgccgccggtgctgctcttcttccagctggagtcggagcagggcatgctctcgcgcctgctgcgggtcctgctgcagcaccaccttctgcgtatgggttaccttctcacgggcctcagcttcttcctgctccagcgctgccagccgctgctgcaaccgcatcacccgtt

SEQ ID NO: 151909 - DNA, 988 bp, Homo Sapiens
  misc_feature (430)..(449): n is a, c, g, or t
atgaaccgaatggagatgggagctgagtgatctcaaaggttagcctgagagtccctggagataaaggaaagcggggggtgtgggtgcctcaaaaccacaagagagagtaagaggtcgaactgtccattcaaataaagccctgaaaggagagatttgaaaccactgaggcagaacgggtggagagggaacctttaggggaatttgggtatccttgaaactgtcagtctgcagcttcactacccctgagaggcaattgggaaggaaagaggatttgacagcactgggaacaagggagagtgcttcttaggcctgaggcaggacagagaggagcagggttccttgacactgtcactcaggccagagatgagtggaatggaggtcctggaaactgccattcagtgggaggcacatggtcagtagtcccggacannnnnnnnnnnnnnnnnnnnctgaaatgtgctgtgtgtggccccataggagggcgggggtgcagggggtgcccccgggggctcagcctcatcctccatttcgctgtcgtcactgccagccagctggtcatggccaacgaagccacacttctcctcgctcatctcctcaggctctgcccacggctgcttctctccagaagcaaagaccccgtagaagatgacacctccatagtgcaccagggaggcaattaggaacacgtactgccactcctcccgagtcttgtgcttagtcatggcccccacgatgatggggcacaccatgcccgacagtgtgcccacgccgttggagatgcccatgaggatgctggcgtagcgcggggctatgtccaggtggttcacgttgaacccagagatggcgaagccgctgaagcccacggctaggaccaggaaggagatggccacgcccttggagtgcgagtagccgaccaccaacagcagcgtggcttccatgccgaagcctccgcagttcatcaacatcccgggaattccggaccggtcca

SEQ ID NO: 151910 - DNA, 883 bp, Homo Sapiens
tacacagctgcaagagcaacacagacacactgaagcttttgattcctctccttttttttccttcaagaccctccaggatggattcactttctgctttgggaaattaagtggcatacacgtgggggagggggagtaactgcttttattagctccagaaaatggtcagtgttcagtctgtaactagggatttatttatatataatcactcagtaaactttctacagagtttttctaattgctgagcctgatcatagttagcccgttggcgccaagtccagttacttttataattaacagctcaaagatttgagtcagaaagaaacaattgggggcctcttggattataaattagggatgagaacaatagctttttttcctttctttcttgtcatcccttttattttcaacaaaacatttccccttttctttccctgggagaaccagtggggagactgcatcaggtcttaaataggatgaggggggagacactttttaggaagtggggtgacagtaacctagaaaaccctggaggcaaaggtaggtttttaaaagtccagccacttgcaacgcgtgatgtctttgtttcttttgccctctttccccttctctctcctgtggcagaggcagcagacatttgtcagcctgggaaccctcaatctggctttgcctctggttgactcggccggcgggggccagtggcccgtccttgccctggcatggccttgggcactgtgccctcctttctcccctggagctaaaaagcagtcaccttgaaactcctcactcccagcaccagaggagttctgaggccaatgctcagacctgtaacagtaaatgacgttatccactcaggctgtaatcccgggaattccggaccggtcca

SEQ ID NO: 151911 - DNA, 1079 bp, Homo Sapiens
  misc_feature (831)..(831): n is a, c, g, or t
  misc_feature (843)..(843): n is a, c, g, or t
  misc_feature (874)..(874): n is a, c, g, or t
  misc_feature (892)..(892): n is a, c, g, or t
  misc_feature (924)..(924): n is a, c, g, or t
  misc_feature (931)..(931): n is a, c, g, or t
  misc_feature (955)..(955): n is a, c, g, or t
ctggggggctgatgccaccattccaggagcctcggtgaagagaggatatccatctgtgtagccgcttctctatacgggattccagctccatggcagcccgtctgctcctcctgggcatccttctcctgctgctgcccctgcccgtccctgccccgtgccacacagccgcacgctcagagtgcaagcgcagccacaagttcgtgcctggtgcatggctggccggggagggtgtggacgtgaccagcctccgccgctcgggctccttcccagtggacacacaaaggttcctgcggcccgacggcacctgcaccctctgtgaaaatgccctacaggagggcaccctccagcgcctgcctctggcgctcaccaactggcgggcccagggctctggctgccagcgccatgtaaccagggccaaagtcagctccactgaagctgtggccccgggatgcggctcgtagcatccgcaacgactggaaggtcgggctggacgtgactcctaagcccaccagcaatgtgcatgtgtctgtggccggctcacactcacaggcagccaactttgcagcccagaagacccaccaggaccagtacagcttcagcactgacacggtggagtgccgcttctacagtttccatgtggtacaacactcccccgctgcaccctgacttcaacgagggccctcggggacctgccccaccacttcaacgcctccacccagcccgcctacctcaggcttatctccaactacggcacccacttcatccgggctgtggagctgggtggccgcatatcggccctcactgccctgcgcacctgcgagctggccctgnaagggctcacgnacaaacgaagtggaggactgcctgactgtcnagggccaagtccacatangcatccacggcagcatctctgccgaaaccaanggcctgntggaggagaagaagaaagaagccncaagatggacgggcctccttttccaccaaaacctacccgggagcggccaatttccggaaggtgggttttggcgggccaattcacaacctttcattttaaacgacccctgccttggtttccgggg

SEQ ID NO: 151912 - DNA, 938 bp, Homo Sapiens
  misc_feature (804)..(804): n is a, c, g, or t
cggtccggaattcccgggatcgttaacttgccgtcagccttttctttgacctcttctttctgttcatgtgtatttgctgtctcttagcccagacttcccgtgtcctttccaccgggcctttgagaggtcacagggtcttgatgctgtggtcttcatctgcaggtgtctgacttccagcaactgctggcctgtgccagggtgcaagctgagcactggagtggagttttcctgtggagaggagccatgcctagagtgggatgggccattgttcatcttctggcccctgttgtctgcatgtaacttaataccacaaccaggcataggggaaagattggaggaaagatgagtgacagcatcaacttctctcacaacctaggccagtgtgtggtgatgccaggcatgcccttccccagcatcaggtctccagagctgcagaagacgacggccgacttggatcacactcttgtgagtgtccccagtgttgcagaggcagggccatcaggcaccaaagggattctgccagcatagtgctcctggaccagtgatacacccggcaccctgtcctggacatgctgttggcctggatctgagccctcgtggaggtcaaagccacctttggttctgccattgctgctgtgtggaagttcactcctgccttttcctttccctagagcctccaccaccccgagatcacatttctcactgccttttgtctgcccagtttcaccagaagtaagcctcttcctgacaggcagctgcacccactgccctggcgctgtgccctttctttgctctgcccgctgnaagacgggtgtttgtcatgggcccctggtctgcagggatccctgctacaaaggtgaaaccccaggaaaaagtgttggaatcccaaagtgtttgccaggaaccaaaggcaaccggcaattaatggccccctttgc

SEQ ID NO: 151913 - DNA, 1057 bp, Homo Sapiens
  misc_feature (166)..(166): n is a, c, g, or t
accacttttcatcccttggccagaaagggacaattatcccagaaaattcctgggtactttcctctttgggagtgtttatcctggctttacccccaggcctggagggatttctttcttttcccgggattatggtatccggtgtacggattccaccactcgggcttancttttggaagcggtagccctgagggctgagtttgaaaattatgtcactgtgatacaacaaactgtacaagcggtgaaatatgattttgctgagttcaaatatggcttttgcataaggatcatggggtgcctgtttgtctggcagttgttctccttgctgaaggcgcatttcaatgagttaatatcccagagacattcgagttgatgttgctcatagacctccaacgctttgtggtcctgagtgctgcaaatcttgctcccacttatccagcatcagttttcacagaatgagccatcacctcaatgtatgctttcaggatgttaaaatggaatccaggagttaagtaggcgacgatgctggaaccacttgggtccgtctagagccgctagtcctttttcccagaagtggaggtgagaatttctgcaggtactgggacttgggatctgttctgctcagaagtgtctttgcatagtctgggtcatagatacagaaaaatgcctgaaagggcccaatccagaaagggaaggcacgagggtatttttcaataatttcctcaagcttctccatgttatcatcctgaataaacttctggtgcccaaggaaccagtggttggggggcgctgggaaggggcgcaggtcccgcagcagccgctgcctccgcaggtacagcttaatggcctgcagcagccccagggccaggcagaacacgaacgccaggtaaaagggccgcgcccagcgcgtctccagccaggagaattccatggctctgcgcagcgccgaacgccggcggtttacctggggcgacgggagagggtgggctttctcccgcccggagctggcgtagggtcgcccaccccaccgcctctctgggccctcgatcccgggaattcc

SEQ ID NO: 151914 - DNA, 1511 bp, Homo Sapiens
  misc_feature (946)..(954): n is a, c, g, or t
  misc_feature (1231)..(1231): n is a, c, g, or t
  misc_feature (1437)..(1438): n is a, c, g, or t
  misc_feature (1466)..(1466): n is a, c, g, or t
ctacaccccccataaaacacaaatgctccctcaccgcccgcccccggcccggcaattccgggatgcccgtccgaagggagcggatcgcagcctggcctggggcccggtcgagcccgcgccatggcggccgaggcgacagctgtggccggaagcggggctgttggcggctgcctggccaaagacggcttgcagcagtctaagtgcccggacactaccccaaaacggcggcgcgcctcgtcgctgtcgcgtgacgccgagcgccgagcctaccaatggtgccgggagtacttgggcggggcctggcgccgagtgcagcccgaggagctgagggtttaccccgtgaggtgggaggtcaggggtcagcctctccggtgcgcggatcggggtcaggggtcagccgcggggccctcaggatgctccatgttttcgcccccctcttgcgcccgcgcctgaggggggaagcggccaggtctggccgggaaggggacggggccccggcaagcaaggaccgcctcaggctggacgacgccctgctgtgcgtctgccacgggaggcctccgccacctgcatacttcactgggtccacctccccgaaccacctggaccaatcattggcggaggaaaccccccggaaggggccttctgcgggcggtacgggagccatcctgggcgggggaaagaaggcgcggggagcagccgaaatggcgaagggcggactttaaacgcccggtacgactgaacccacaacgccggattgagaagggggtcccccgggacaccacaaaaggcacaggggatcagtggacgacccctgggggccgcccaagcaggcgccccttggaacgacccccccgggagcgcctggacaacacgggaggtgtagccccttgagcatctcgcgacagggctcaggtcggcgcccattcaaacaaacacgcatatgcannnnnnnnngagccctatccatatacccgtcgtcacgccaccaactgtcacacccacaacaccgccacaagagctgcccggagcagcggctggcgggcgtggacggccgcgattcgaccacccgtgtgccacgtcgctgtgcccacccacgccaaagcatcgctcctggcacaccacagcgggtgtgctatgacgtggcgcgcagacaccggtggagcgaccgccgtacgggcccccacaacagctctctcgggcgcgcaaggggtcgcgccccgagcacgaccanacaccacagatacgcataaaaacattgacttcgccacgccgataggtgattcggcgcatatagccaaacccgagcgcgccggaatgtgataacgtggtcggccgatgcctcctatcttccgccagcagttactaaggggcgggcgggctcggtctcctgggaattgtactcccctcctccccccgaccacgacattaaatggccgnnagccgcggtgcgggctaagacagacganagggcgccaggagttatcgtgtgcgctcgcagcacacctcctgcc

SEQ ID NO: 151915 - DNA, 1054 bp, Homo Sapiens
  misc_feature (1034)..(1034): n is a, c, g, or t
aattgacttgtggccattggtgaaatttcttttcgagccatttttttccccccccaatccccgaattcaatagctgccttcgaagccttcgggctccatcccagcgaattttaaggttcttcccccccgggaggggcggaaggatacttccaattccttgttgggggtatttgccggaaagatgtcccctgatggccaaccaattgctttttggccccccatatttcactttggtcgggattagatccaagcaatgtgcttacacagcggttctgcagattgctcccaccttgatggcacaccgtcccaatggcccgcccagcttttcgaacaaagtcaacatcccccctctgtagcatattctttcagttctgccagaacctgagcaatgttggcttgagatgccaaacgaatcatgatgtccaacttctctagtttaacatagatgggatcattgtacttcacaaagaagactttgatttcctgcttcaagatttcaggccttttctggacaattaagttgatgttcctcagggcgacatactgcacttctggctccccagacagcaaagtgacaagtggaggggctaacttcttcagcagcatattgtagtagtcagaatccttaggtaacaattctagaaacttcattaggacttttaccgctgaaagcaccactgctgagttggcatgggatagccggggagttacccgctcacagatgctctgagcctcccgatcatctttagggttgtaattagacaggcagtccaggatgaaaatctggccccattcagtgcattcattcagggctgtcagcagcttattaatgttctgtgggttcagatcaagtaagttgctgtttgggtgagactcactgatttcagataatgccgctacggcattagccaccaccattggatttgaatctgctatgagatcccgtagagaatccagaaatccctgatcttccaccatttgggcattgatatcatggagttttgccacgcagactgctgctgttttccgaacantagggatcctcatcccggga

SEQ ID NO: 151916 - DNA, 587 bp, Homo Sapiens
  misc_feature (245)..(287): n is a, c, g, or t
tggccggtaccgtcacgcccacaggactaacctcgctgcctactgggactgggtttatttgatctcatcatttggatgagagaacagaaatttctgtgtgaagccaattttagttcctctcccacctttctccaggaaatgtgattctcaggactgccaagagcaactgaaaggaaaagtacagagggaaagagacacagaaagacagagacatggaaagggagacagaaaaaggaacacaaatnnnnnnnnnnnnnnnnnnnnnnnnnnnnnnnnnnnnnnnnnnngcaaagggttagtgagagagacagaaacatgcagaggtcactgccttcctttacagcctgttgggctctgcgcttgtgggttcattcttgctgtagccagcatcacagagtggccctcggtgcctcgctgggtggggcagagccaggcccgagcaccacatccctcaccactgaggcccccaggcgtgcttttcaggtcggaagagtcgtcgtcaaataagtgcctcctgatcatgcagatcttcagggccaggaagccagcagatatggcgacacccacagcagtcttgtgggcgtgac

SEQ ID NO: 151917 - DNA, 1142 bp, Homo Sapiens
  misc_feature (932)..(946): n is a, c, g, or t
gagcggccgaggcgagtgatttcttctgacttgagcctgcagtgtgctgtgagagatctaccactagattatctcaactttggtctcctgggaccactcgttgctgacagtcagaaattgcagggcatctgatctcctggtgttaaaatctgtcgtgataccgaggaaggccccgagatcccaggcactgagtgactgcatactaagaaaaagaactctgaaatgaaattgaggatttgaacttcacacagctgtttgaactgaattcttgccgccaggatggggaaacagaacagcaagctgcgcccggaggtcatgcaggacttgctggaaagcacagactttacagagcatgagatccaggaatggtataaaggcttcttgagagactgccccagtggacatttgtcaatggaagagtttaagaaaatatatgggaactttttcccttatggggatgcttccaaatttgcagagcatgtcttccgcaccttcgatgcaaatggagatgggacaatagactttagagaattcatcatcgccttgagtgtaacttcgagggggaagctggagcagaagctgaaatgggccttcagcatgtacgacctggacggaaatggctatatcagcaaggcagagatgctagagatcgtgccaggcaatctataagatggtttcctctgtaatgaaaatgcctgaagatgagtcaaccccagagaaaagaacagaaaagatctttccggcagatggacaccaattagagacggaaaactctccctggaaggagttcatccgaggagccaaaagcgacccgtgcattgtgcgcctcctgcaggtgcgaccggagcagtgccggccagttctgagccctgcgcccaccaatcgaattgtagagctgcttgtgttcccttttgattcttctttttaaccannnnnnnnnnnnnnngccaaacaatatcaatggtgatgccgtccccctgtgcgggtctgatgcgccttcccccgtgacgccttcagcttctttttgtcgtggatgcttcctggggaatgccccgaagcccccgtggtgcttgggggagagcatggacagaactttcggggggtttcaattgtttgaagatttttaaccggttacaaataaa

SEQ ID NO: 151918 - DNA, 397 bp, Homo Sapiens
tgcagtaatcgatggcaccggggatggcagacagtgccagcacggagttgaggcacacgatgtggccattctgcagctccagcatacgtggcaggaaggccttggtggtccagaactggcccagggtgttgatgtgttgggacttgaggagggcatcatcatcactgtccattaggctcttcccatggaccacggcggcattgttcaccaggatggtgatgtcacccaccttctcccggacggccttggccgtctggtacacctcctcccggttgcccacatcacagatgaagtaatggcactcagtgcccatctgccggatctcctccgtcgtctccttcaggcatttctcagtccggccccagagaccaatctttctggcgccgtcgcctacgca

SEQ ID NO: 151919 - DNA, 1096 bp, Homo Sapiens
gacttgccttagtgtgatgacaggtctaacatgggcaagacaattagaatggggaccaatatgccaggcatgggcttttatctccctagtatatcccaagctagtaggcttggattctgccaaatggccagccctcctgtcttctccccgtaccttgtagttagaccgaggtgagaatcctgctgaccccagtcccatcccctctcattctcaggaaaacccttttgtgattcaggtagggggagaggaggagttaagggctccgtttactcccaagtcatggatttttaatcttccatttttatcactaatatacctctcttcctagaagctactggagtattgagtgttgtgggaaaaggctaactgtgaattaagttaatgtttttcttataagaaatggaagtttatttttttattgatattactatgtgatgaactgagtatgcatatactgaaatggaaggaaattttaaaactattattctagaagaaatgggcagttttgtaatttggtggtggctgagaccccatagaagttttactatgtaaataatttggagagtgaataaggagattgtgctatgaaatcctgacagcgctctttaggaggcagacttgacagtcctaggaaggttgacataaaaataccaaccttcagtaaagctctagtacaaaaaagggtaaatgtcatcattcttatttttaggcctctttcttgagagaggtgggagtgggaggtaatgttataactggcactttaatttgtttttggaactagaatttaggggccagttggatgaaattgcaaattagaaagggaataagaattttctagtgctatataaagaaatgatgatggagacaaaagcccttgctttcctccttttagcaattattttcgatttttagcatactgggggggctttttaaagctaatatgatctaaattccggaaaattaaatttctctacaaggccaggtgtggaattacttatggttggccaaagaatggttctttagacccacaactaaatttccttttgctttttcaagggacctcagcccaattgtggggaataaggcaggcaagctt

SEQ ID NO: 151920 - DNA, 1062 bp, Homo Sapiens
ggaattttcgggatgcaagaggaagatggccgtgccctgtttttcggtgtaaggcagcgacggcggctgcgacggcgagactgagatcctggtgtcgtgggcacctgagttctagcttcccccagcgagcgcgcgtcccttcgtgcctaggcgagagccggctcttccccgggagatgcgtttgtcccaggctcgggggctcagtgggagttcatgctgcgctggaggctcttggccaccgctctaatcgccttgtgccgccgcagcgccagctccgtcgccagcggtgagcctcccgattcccccccttgcccctggcggcggcgatgaccggggagaagatccgctcactgcggagggaccacaagcccagcaaagaagaaggggacctgctggagcccggggatgaggaagcggcggctgccctcggcggtacctttaccagaagcaggattggcaagggcggcaaagcttgtcataagatcttcagtaaccatcaccaccggctacagctgaaggcagctccggcctcctccaatccccccggcgccccggctctgccgctgcacaattcctccgtgactgccaactcccagtccccggcccttctggccggcaccaaccccgttgctgtcgtcgcggatggaggcagttgccccgcacactacccggtgcacgagtgcgtcttcaaggggggatgtgaggagactctcctctctcatgcgcacgcacaatatcgggcagaaagataatcaccgggaatactcctttacaccttgctgtgatggttaggaaataaagaatgtgcccctttacttttggctcacaatgctcccgtccaggtggaaaatgctccgggatggagccctctggggggaagcctccgcttatggagaaaggccagatgagcaagccaatatggaattaccgggtggtggagaatatcctctcaaaaatatgaactggaggaatcttgaaaaattcctccctccctgggaaccttgcccctaaaatgaaatttttgtcaattagtgtggtacattcacccggggcctaatttcg

SEQ ID NO: 151921 - DNA, 1206 bp, Homo Sapiens
acccacaacgcccaatcaacagacgacctgacaccggcccggaattcccgggatcacagttttggttttcagctcttcatgtctgtaagtgtgctttgggggaggctatgtctgtatggtcgattctcagttatcacatttgcctctcctcccactaccttcatgaacattcagtgctgtttcgcactgcagttagagagaagggacggacagttggtgacactcagccacattgctacttttatctgttctggtaagaagttagatagatggtagattgaagcaattgggtagaattagttgggggaatatttatgagttgctgtgtttgttgattagttccatctctttcccattttaactgagaattgattatatatagctctaagtatataggtatttaaacaaccccacaagcggctgtatcagtaacatttattaattccactatagtgagggaggatttccattctaaataccttattttgagggatttataaaacttagttgtaaaagagaaagcccacatagtgggaataaattgcttcagccatttttagtatttgagagcactagggaagatgtttagtagctgtgtggatgccttttttcacacccctgtctattgaatgctgcatccattcacgaagttaaaatgttacatgcagattagtccttaatgtggactggatctgtacctttttggctttggaataaaaacatttacagaattcttgcaaaggccactactccccccacgtgccattgcatcactccacacactccatcccgtggggagccccaaaacacacctgggctatccccaacactaatgcacctctacacatagtcccaacagaaccgcccacccgcataacacactctcccgcgcaatctggccgcacatacacaagaacccttgcaaccgagtctacttagaaaaccccagcctcttgccgcatacaccacacagtgaatatgatagtaccaacgcctctccccccaactatagacacagacaacatcgcaccgaccacaaccctcgcagacaccgacctctaaacacatcctcactcaagaacacacacacagaataccaacaatgcgcgcgccacaagacccaacacagacagaccgaacagtgtctgaccacggaacccccacaacctctgccctactcgccgctcgcaacccaccagacgacgg

SEQ ID NO: 151922 - DNA, 1063 bp, Homo Sapiens
  misc_feature (124)..(172): n is a, c, g, or t
gttgcgcggcgcggggcgcaattagcctgtttacacagactgcacaccgcctggggaataatgcagtaaaggaagtgagccggctcggcctgactgctccaacttcctgctctcacacacaccnnnnnnnnnnnnnnnnnnnnnnnnnnnnnnnnnnnnnnnnnnnnnnnnntcaggatctcattacaagagccacagaccgtctgcagacgcctgtcagcatggaaagtcgggggctttcgcccgggtcctcctagaaattccccccgaagaagactcccccacatctgggtatggagagtgcaatcacgctgtggcagttcctgttgcagttgctgctggatcagaaacatgagcatttgatctgctggacctcgaacgatggtgaattcaagctcctcaaagcagaagaagtggccaagctgtggggactccgaaaaaacaaaacaaatatgaactatgataagctgagcagagccctgcgatactattatgacaagaacatcatcaagaaggtgatcgggcagaagtttgtgtacaagtttgtctctttcccggagatcctgaagatggatcctcacgcggtggagatcagccgggagagccttctgctgcaggacagcgactgcaaggcgtctccggagggccgcgaggcccacaaacacggacctggccgccctcagaagcacgagccgcaacgaatacatccactcaggcctgtactcgtccttcaccattatttccctgcagaacccatcagacgcctttcaagcctatcaaaaacggagaagcttggaggaaccgcccctaaaacagccccccccgtgtaagaaatcaggaactgtgaatcaaggttttggacccaataaaaccgacaaatccacttcaccaaggtccggtgggtggtccctgcccttcaacgtcaaaaggctgggtgggggcggtccgcccttcctgtggcttcatccccgcctccggccaaaaaatacccctcttttaaaggtgtgcccaaaagcttgcccaaaaatattttaatttggccctcaaccccttttttccattt

SEQ ID NO: 151923 - DNA, 1234 bp, Homo Sapiens
aagggcgaagattttattaggcggtacaattccaaggtggtaagggtgaaaggaaaggcgaaggcaggcaaatacattattgagctgaaaacaactttacattcaaggacagcttccagacaagccatgtagaaccagcatgccttgggactgtgtggatggcagggagacgagtttctatgctgaccacttcatgctttctgccccctttggggaaagtatgcctcacggacctctaactctcccacttctctgggggcagcacctgacccctcccggcaactgctaggcaagagcattctgttccttcaaatttctcacctgagtctgagtcagagcatcccatcatcagagcctctgtcagggaggcagtgctgaagcatgaccttcacctgggggaggctgtcgggagatggcactggaggccaggcctctaccctaagcgagaaggtgcaggccggggtggaggtggacggtgggacagagtaaatccggggaagcacatcaaccgggtctggtagggcatagccttctgggacttgagccattcctactgctgatgtccactgcttctcaatcgagaaacagcacggattcagctctcagattttgtaagctgtgattttctcccttattcctcaacaaccacctagccacgaccttctttaactcttcccccaaccccgaaacttttgaggaaatgacttttcttataatttgaatgttaataaaccgtacccatttagaaactacagtttgatgatttggggcgactgtatacgtcatgttgccgccgctcctattaagatatgaaattgtcccaccactgccccaaagttcccccgctcctgtgcattccattctgtcctgttccactcctttcccaggcaactgctttgcatcgccactgttgcttcttctagaatgtcctataaatggacatcagaccgactatggctttttgggttcttccccccacagcatcgtgtttttcagctccacccacgtggttttgggtattaatcctatggtagaactagctagatgctggagaactcattatgcgccggtaggtaattttaacctgcatcgtctcatctctattctgtcacaatagaggaaactgaggcacgcccggcgtgtgggcgtgtgagggggcaccgggccgacttccgcccgtcagtaggcctggacctgctggcacccgctgtcaaatcccgggaattccggaccc

SEQ ID NO: 151924 - DNA, 1056 bp, Homo Sapiens
  misc_feature (116)..(116): n is a, c, g, or t
  misc_feature (276)..(276): n is a, c, g, or t
gaaggttccaagcttcgggtcggggccagaaaacccgaaagagctttgttccccggtcgttaagttgggccgttgttggccgcaaccaggcggtaacccgtcgggagcgacccgtnccgtggtgcaggcgggagtaggatttggccttggaaagatgaagggaaactgggcagggtttcccatcagccattgccatcctggggtgtagattctctcgctggggcagaagccaaaccggtcgtcggtgtcgtagttgcccgtggtactgcaccaggngcaagccgtcggagcgaccgtcggtggtgccaggcagagtaggagcggccctcgaagatgaaggggaagtggcaggccgcgccatctgcgtttccaaaccgagttggaaccacgacgcccttgcccagggaccacaactcgtcatcgtcgaaatgggcgtctccctgaatgccggggccaggaggaaaggcgtgtgccaggagcccgtccttcccgtcgaagggatacccgtctccgtgctccgcgacaccaaactggatgacgatgtctgcgtcccggctgtacacgcgagtgaaggtgagcggcgtcaccgcgctccacagtgcgaaggcgcgggcaaaggcgtcgtcaatcaccgcccgcggcaagtcttccgagtagttttggatccaataggtgatgttgtggtggtgccacttgaggtcgccctcaaaggtttggaatctgcccaggtctgggaccccgcaccgtggggttcgcatggccttcagcgtggcgctatccagctcaccggtctcgggcagggacagttgcttctggagaagcagcagcgcaggccccagagatttcgactctccacgcatctctgccacccgagtgtaaccatagcggtacaggtattcctctgccagctgcctgtcggtgagattggttctcaggtctccagggaagagcacaagggtggactggcgctgtctgggggcagcaaagcagcagcccagcaccaggagcaccaggaccaggggctgccagaggctcaatcccgggaattccggaccc

SEQ ID NO: 151925 - DNA, 1050 bp, Homo Sapiens
  misc_feature (325)..(325): n is a, c, g, or t
  misc_feature (899)..(899): n is a, c, g, or t
ttgtaattaaatcagagtccctgaaaacaattcggattttgtttcccaagagagggggaaggatcgcaattttcccggaaggaaagggctaacttgagggttcccacaccgggcctccagggcattgcaagcttcgtaccccagggggttccgcccttgtctttgagtgggaggagtttctcgtttgggggtgatcacagcgctagggcgacctctccccagacgtacgtttttcactgaggagacttggggggagtgtctgatctcggttgatacgattccccatgttcgaggacgagggccggccctctgccgaccgctctgnttcttgtgggggctgcaggtgtggacttgagggctgggggctcccggtatctctctgcgggctctgccagcttcttttcctcattcccacagccaacagtgtttggcttctgttctgtttggggttgcaatggggaagaaggaggctctctactcgttctctgagaatctctgcgtagctgggctttagcaattccgtggcggctccgttcacctgcaccgatttacacgcggtcgcagtgagggcggaaggaagtctgtccacactgtgggtttccctctgtttctccgccaccttgggatcatcgggtaaatgagctggggagggggatcgctcgtacgttgttgatacagcacaagaagccggcactgagggctctctggagaccactacaggaagggtgttcacgcttgcgtctgcactgagggtcctttctttggatggtcctattatcaagctagatagcctgttttcaaacaagtcctctgtcttcaaattgccggcagctccaggtaatggagggaagctggacagccccagctcgaagcttggcgtacggaggctattggtggcngttggagactgtgtctggctgcttgtaaacttctcctcccttttcttccggtagccaaaggaattcttccttcccctccctaaaccaggagagtattcgagactgcctggctccacacgcccagccccagcatcccgggaattccggaccg

SEQ ID NO: 151926 - DNA, 956 bp, Homo Sapiens
ggggggtgtaatcattttcccacacacaatctcaccagtcacatgctgtggagtcccatctcacaattacacttcaatagtagccgtatacatgtacatgcagcaagatgtgagagtggccccagagtgattaaaggtggcgcacaaatgtcaatgtggggaagtcattttagcatatagatgtacacaagccaatagggtcattaacttgcagattacatttttcactttccccaagataaataaatcaaatgaaaaacacacactgacatcttcctggtgtcatggacgcaactgcctggaaggtccactctttgcacttccactttgtctatgacaccttcactttgccctgaggggccttctcatataaggagggttgctcctcagcattccctggcaaaggcttcttctcagaagaccggtcttcgggcttgcgagcaatcagcaggcggcaagtgagcaggattccaaacaccagagcatgggcgtagcgtttgagaggatcaccgaccagctggtggaagaagagcacagccaacaccagcaacagtaggaagaagttggccacatctttgggacgcccaggcacaagggtcatgacgatgccacaggccacttcaagggcaccaatgctttttcggaggagaatggaattgatccccattttcttcagcagagggagggctcgaacatagctcttgtaagcacgtttcatctcactgtaggcatccttgctgagcctgggggtcagcttgatagtccccatgaaaacaaagaagagtcccagggccactgagagggccacaatagttacggttctgggggatgccatggggtcgccaaggcaggtcccaactaatccttctgatttgcgcacccgctctgtccaaggtgcaggcagttagcacagggagagctggggggacgctgcggatcccgggaattccggaccc

SEQ ID NO: 151927 - DNA, 1442 bp, Homo Sapiens
  misc_feature (63)..(72): n is a, c, g, or t
  misc_feature (120)..(133): n is a, c, g, or t
  misc_feature (259)..(351): n is a, c, g, or t
  misc_feature (376)..(409): n is a, c, g, or t
  misc_feature (665)..(689): n is a, c, g, or t
atatgtttgggagcaaatagtgtggggcaaccacctcaaatgtgcggaaaggtggaaaaggtnnnnnnnnnnaaggaggacaaaagaaggtggcgggaaattgttataaaggcggggaannnnnnnnnnnnnnagcaaaaatattgtgacagagttgtggagggtgtggaaagaagggcagcggagactttgtttttttgggcacacgtgcgggtgtgggtaaaaaaagaggcgggaaaagctccattattatcttttnnnnnnnnnnnnnnnnnnnnnnnnnnnnnnnnnnnnnnnnnnnnnnnnnnnnnnnnnnnnnnnnnnnnnnnnnnnnnnnnnnnnnnnnnnnnntcgggaacaaggtgttgtaatcgcnnnnnnnnnnnnnnnnnnnnnnnnnnnnnnnnnnaagaccgtggaatttgacccacaggggtgtaggccgcggggtgtttattagccggacgcccgtggggttttaagggctaaatgttgtgtgcggcgcacaaggtgcccattgcgtgcaagctgagtgagatttggtgtttacgaggtggtttaagggggtaaatggcgggggcaatatttcgattggtgggattaaagccggttctgacaggagaaattatgggcccaggggcaccgaaatggccagtgtgcagatnnnnnnnnnnnnnnnnnnnnnnnnncgccgaggcctaacagttggaagtggtatgggacatttaaaagcaggaggttgtgtggaaggattctttggacgagagggcgatgattgttgggttgtaaagttcacagtgtaaggggatgatggcaaacattccccgtggcatacgggggcgcggaacggcttgccacattcgcaattgtcgagtcgtgcacaggtgctgaggttgtaggtgtagcacacccagtgatggcagtcacgcaggggccgggagaacatgcccggctcagtcacgtggcagatgcagacgccgcagtcgcagcggaccccgtccgtggcacagcgcggcccccgggggctgcccaggtgcgcggcagcgtcgctctgactcggcccgggacagcctgcaggcggcgcctggccagctcctcagagatggcgagaagctttgaggaacagctgacaacccagcaaagagaagggaggacgccagcagcaggaagttcctgaagcctgggggacgcatgttgagctcgtgggctgctccgggcgagctgcacttctgcaaggtggggttcaccgagggaggcggcaggagggagaggtgccaccagcagatggctgggcagacggacccacggacacacaggcttgtcaggtccggggctccagccggagttgcaattgcgatcccgggaatgccggacgcggtgccaggcgggggtgagaaggggcaggggatggaaagggagggagcgggggagtaggcggcggg

SEQ ID NO: 151928 - DNA, 1265 bp, Homo Sapiens
  misc_feature (471)..(481): n is a, c, g, or t
  misc_feature (534)..(654): n is a, c, g, or t
  misc_feature (666)..(720): n is a, c, g, or t
  misc_feature (811)..(820): n is a, c, g, or t
  misc_feature (1151)..(1160): n is a, c, g, or t
atatttttattttaatatcttatgctattattctgtaaacattttaattttagtttcatgagtctttattttttgttacctgcaagttatgttcttcttcattgaatttcatatttgagagacatttgtcttcatgaagcagatttgcactggaaccattgctttactctggttggaaatgccattgttttggggacagacttttaaaatgcccttgtgtctcccagtgaggagccctaagcattgacttctctaccctaaaactgtttgagagagggagagtgggccctggctttctcaagcatgggtcgggggttcagcggggcctctgtcttttgtggtgacccctcaggggtttcattgtttccttctgacttaagcaatagagagagaatttgttttggtactcttcagaggaattgtgctttggctcataacttggccatgttctccatgaattagttctcctannnnnnnnnnnaactaccttaaacttaagggaaaagttctcctatcttgatttcactggaatannnnnnnnnnnnnnnnnnnnnnnnnnnnnnnnnnnnnnnnnnnnnnnnnnnnnnnnnnnnnnnnnnnnnnnnnnnnnnnnnnnnnnnnnnnnnnnnnnnnnnnnnnnnnnnnnnnnnnnnnaacccccctcannnnnnnnnnnnnnnnnnnnnnnnnnnnnnnnnnnnnnnnnnnnnnnnnnnnnnnaccatatctcctcccaccccatttaacctggggggggcccttcctaaaaattcccccccggggggcccacctttctttatgtccccccccnnnnnnnnnnccaacgaggggccccttccttttgggggcctttttttcttaactaaatttcggggcatcgcgcccccccctatatttataacattcgcctgggtgtcgcgcggaaaacccgcgccctcccgggtggcaaccttccgcggggggaacacaccctcttccttttcgcggggggggccaaaaatttcgctggcaaaacccttccccttcacatcaactttctatttccccttcccccgccgaacactcccactaccacttctccctccccgtataacacgcgtgcatatacaaccatatcccctctaatctttcttccccccctttcacaccannnnnnnnnnctcctcccccggaagatctttttttgcacattatatcctccctcttgcgccccgccgttgcgcccccttaatgtccgtcggttgactttacatcctcccctaccc

SEQ ID NO: 151929 - DNA, 1021 bp, Homo Sapiens
  misc_feature (30)..(30): n is a, c, g, or t
tgggaccatcaagatccttttgacccgtanctgatagcccaaccaggagtaggagtcccttttcagccatccattctgtgcttgttcttcagactgggaaaccatggctggagagatccagatgttcgtacttctcgtttgcttgacttataatgagtaacttcagaagggctgtgacaatctcaaagtgtttggtctttttaatggactctttcccttggttcatgcttggccaagggttgttgagtattcttctgggaggctggatgataattatacttattccaagattttccacttattatacctgttccttgctctgggcttaggtgagaacgtggagaactgcttccttcttgccagccaccactataaaaagaggaacgttctacaccattagaattggcatctttatctgagagactgaaatagcgatctttttctttctcactaatgtctaaggaagatttaataaaagtcttacatacacttatgacatcagtcatctgaaggaagctagcagccgacatcacttctatgacattctgaccagtaagagacagtttgccagaatatacgaagtccaagataactgtaaaagtgtcaggggagaaagcctgaaatgtagctgtggttggctgactcgtctcctttgaattctgagaaagaagcattttaaagtagccgctactagcgaataatacatttcgatgtgctttgaagaccttcccttcaactagaatactgcagtcacaaaatacatcttgcctgcgctgctcgttcagttgctgcaggaggtgagactgatgagaggagatctccattctggaaatttatgaatgctgctcttgaatggagtaaaaaagggaagattctaagtcaaacagtctgtgtttggaggattgtccgcgggccgcggcgcaccggccggtcgcgcgcgcgggccgagggaagattcctggttctcggctggggaaggaccccctttcgaggccgttcctatcccggaaattccggaccg

SEQ ID NO: 151930 - DNA, 1060 bp, Homo Sapiens
tgtggtgaacaacccgcgcctgtgaggactccaggcctgtgcagacggggcaggccgcaaggcggtggaaagcgacctgaggccccatgatgaaggccaccagcaagcagcaggcaggagggcattgaaagccagcagggtcttgagaaagaggaagtaggagagcacgctgagccgaactggcccccgatgcgtttccagggcgtagcgccacggcatcagggcttgcagggcggagagcagcgccaggcccaggctgtgcaaggccagcacgcaggcatatctgagccggccacagcaggagcagaccccgccgctgcccggctggcccctcccctttccccctcggggtcctgctcttctctcgcaggctgcgtttctcagccaggcttaagggcatcccgcgaagcatgtggtcccgctgtgccactgccaggctctggagctccgttcaccaggaggctctgcttctcctcctcctccagggccgtggggtccagctccaggtcgtacaggcggaggctgggccaggcggagcggacaaagttcccgagcaggggccggctgctcctgcaccgaagctgcaccgtgcggttgtagtactgggagatgatggcacctcggctgcggccaatggtgcggctgggcatgctggccaggatgcggagtgtggccgtgctctgggtgccctcgggccgccagagtgtctgctggctacttcctgtcacctcccgctctctctgctgcagctccagcccctcctgggccgtgcactggctctgctcctggatgagctgctggaaggagtcgtgcacttcgctttcatcataggggctggggccctggccctggtcccctggggtctcagggacatcgaggatgaaggccagtggctgggccatgtctctggccaatgcccgctagtctgcagacctagggtagctcagagcctgggcgccacctccggagcccccatctgggaggcgccggggaggaggggccgcgcgcgcagccagggctcacctgtccccgcaagagccgccgggatcccgggaattcc

SEQ ID NO: 151931 - DNA, 810 bp, Homo Sapiens
gctgtttccctcactgcccctgcctggcctcctcctgctttgcccctgtggctgtcaggcctgagggtcgggtggggcgtggggaaagtccctgactcggctggatctccctgtggcagggttgcttcacccacaccgtcatgtactacggccactacagtaacgccacgctgaaccagccgtgtggcagccccctggatggcagccagtgcacacccagggtgggtggcctgccctacaacatgcccctggcctacctctccactgtgggcgtgagcttctttatcacctgcatcaccctggtgtacagcatggctcactctttcggggagagctaccgggtgggcagcacctctggcatccacgccatcaccgtcttctgctcctgggactacaaggtgacgcagaagcgggcctcccgcctccagcaggacaatattcgcacccggctgaaggagctgctggccgagtggcagctgcggcacagccccaagagcgtgtgcgggaggctgcggcaggcggctgtgctggggcttgtgtggctgctgtgtctggggaccgctctgggctgcgccgtggccgtccacgtcttctcggagttcatgatccagagtccagaggctgctggccaggaggctgtgctgctggtcctgcccctggtggttggcctcctcaacctggtgggaccctctatcctgtgccgtgtcctggccgccctggagccgcatgactccccggtactggcaggtgtacgtggccatctgcaggaacctcatcctcagctggcatcctgggaacactgtgctacac

SEQ ID NO: 151932 - DNA, 1020 bp, Homo Sapiens
  misc_feature (60)..(60): n is a, c, g, or t
  misc_feature (87)..(89): n is a, c, g, or t
  misc_feature (144)..(144): n is a, c, g, or t
gggcccccgaaacccccttgtgggttgggaccccagtttagaggcccctttcagggtggnggccccagaacccttacccttggtttnnntttagcgtgatggagaaaataggaggaccactggggtccctgttcgaagggtganctgtgttccttgaccgtggtgcacatcccccatctaacgataaagacctcccggatgccgtgtttctgttgagcatagcgggctgccacagccacgtggttgaacatgcaatagccatccataagactgtgctgggcgtgatgtccaggaggcctaatgatggccatgccattccggatctcagcccccaggaccgcatccaccagcctgaggacagagcctgaggccaggcaggcacaggggtatgagttcggatgcagataaactgagtcgtaggtgtctgctaggacacggagttctccctcattcatgtactgggttgtttccatcagatcaatatattctaggctgtgaaccaacatcagctcttccttttcagcaaaccgggcctgaaaggacacgcagcgatctaggaggccctcctggatcagttgctccttgatggcatggagccgctcagggccttccgggaagctgtcatcccagaggcaatggaattcatttaactgctcatccaacaccaagccagtgccagccagtgcttcagcctcaaggttcagatccatcccttgcagtcccacgattaggtcttcttccattgcttggccgagcttcttcattttgcctttcttctttacctccgctagattggggatagagcggggaacggctccctttttaatatttcgcttcgaagtgacactggagtcctgagggggcgactgggggttctgcctacttcttcgctgcctggttgtggtggaatcctggccggttgaggtcatagttgaggaggcttggcccctgccgcggttcctttcactcagccggccccggccccgaccccggtttcgacatcccgggaattccggaccc

SEQ ID NO: 151933 - DNA, 1858 bp, Homo Sapiens
tgaagtgggggtaaaaggggtagtggtggtggcgattgtccgctcaatgtgactattaagcgggcgtgggtgtagctaacggaggagtatttgtgggtggggagtgcagatgtcttgggcttggcgtattggcggataaggtagtaagtagctatggcattgctgggcttgtgggcattatatacaggggccaggcggcgcgcggcgaccaaaacgcgggcccgcatggaggagaggacgcacgtcctggtggccaggggataagctggacttcccgggaagaacctgtttccagggagaactgccaaagtgggagacttggttctcccttctggagtcagcctgtcacatgtgaggtgggggatgcgcccagtacctgtcgggccagagggaagcgggagagcttctgcacagtggcgggcgggcgggggtgccggccggtggagcgcctgcccctcgatacagcctggccagcagcagggaagcacagccaaggccagggagcccgacgcgtacaggatgatgtccgtatacctggcctcgggcgctgctgcggtccatgtgggggtcctcctctggcagccccgtgagccaggcagactggtaggagaggccgatggaattgcctgcgaggcaggtgtactcgcctgcgtcctcggctgacacgttccgcaggtacaggacctccacctctgagctattgatgtctgcagtctttaggacttgcacataggggaaaccgtcggctccgaagctgctgccgttgatgacgatgtgcttcagccactggatgtggggctgggcatcgctgtacaccttgcacagcagctccacgtcgctgcccaccacggctgtggtgttggccgggagcccggcctgcaggatgggccggtgcggggaccgctccagcacatctagcaggtagttataacggatgctgcccacagcggttctctaccaggcaggtgtatgtgccgcggtccgagggcaccacgctctccatcacgagactccagtgctgatggcgcagccgaatgcctccaatgcggttctccgccatgaaaggcctgtccatccttaagccagcggatggtgggcgtggggttgcctgcagctggacagcggaacttgacggtgttccccgcaggtactgcatgcagtttcttctccatgcgctgggggtgtgtccagtagggtgcttgctgggggtaactgtgcctattcgagaggtccctatgggacttggggtcctcatcatcgttgctggaggtcaaggagtcacctgtaatcaaggtgagattctgcaggacgatcatggagcctcgtgccaggcagaggtagcggccagcatcctcaggtaggaagctggcaatctctaggcggcccctccagccccgtacacggccagcaggtgccaggcgactgccctccttgtaccagtggccaccacgctcagcccgcccacagcacagccgcacaggctgcccaagggctactgtcagctcctgctcttgctgctccaggctgggagccaggcagggctcaagctccacttcctcagaggcctccagggacaagactggaggcccaggcacactcagcaggacccccaacagggccagcagcagccgcatctccttctcacagctctcagggacccaagctggacttcccaccaactgccttcctcgagcactgcgtgactccgcgcccagcacagggtcctgctcacactggctcctcctcaccatggctcactccgcacgcactcactccacagctccagccaggccagcgacccctgcacgcggcagggtccgcagacagcccgagcgctcatcccgggaattccggaccc

SEQ ID NO: 151934 - DNA, 1376 bp, Homo Sapiens
  misc_feature (526)..(554): n is a, c, g, or t
  misc_feature (578)..(587): n is a, c, g, or t
  misc_feature (701)..(709): n is a, c, g, or t
  misc_feature (1063)..(1072): n is a, c, g, or t
agagaagaaaagaggaagtctgctagaaataaaaaggcgctgatccgcctgggcgtagtgggatcaagacggggggagaatacggtgggggagaatatataagagaggcggggaaaataataaaaaatagagggggggataataagggggcgtgatggattgtatatagtagggtgtaaagggtgcgcgcaagttggtagatattggggggaggagtattacgcggggcctaacagtataagttggcggatgtaatatatggggcgggggaaaggagatgcaagtgtgtgataagtcggacgaaatagagggaagggggcgggagaggataggaaacaataatcggggctacggagtggagaaacggaagcggggtggatatgtagttattaccgcgggaaaataatgtgcggggtaaaacaaaaataagagcgggggtagaggaaaagataagggaggtaagggtacgtgtgactggcggagataaacggggtacggggcggaacgagtgttacggaaaatggannnnnnnnnnnnnnnnnnnnnnnnnnnnnataaaaggagagagatggtgatannnnnnnnnnaatagagataaataagcgggtagcggaaatgttgaagggggggagtagggggatgggagtcgaggttctggagaactcctaaagcgtgcggaggttatcaagtgcaaattggcnnnnnnnnntaaaaagggagggaaggaaaaggggcgaataggccagaaggaaggggaggatgaatataatacggggagggaagtagggggagaaacaataaggacgggggggaagaggattaggatggcttagaatgaaaggataggggagttccgaagcggatagactcgcgtgtcgggagagagggtattaaacggagagagtaaaaggacgtggggataaaggaacgggagagggagggggaagggtggaaaagcatgaaacgattgtgggaggggtaggcgattgagcataacctctacgtggaaaggtcttgtgatggccattaggtgtggcgggtaaagagcggttgtgtggatttnnnnnnnnnntctgaggtgccgggtcgggaggggaagcaagcaggatcaaggtaccagtcggccaccaatcgtccagctcccgggtcccttatacctgcgtgtcgtggcgaggaaggtgcgccggaggcgactggcgcgggcgtgccctcgcctgggaaaatcgaggcgggcgctgtccggagtactgcggagggagaggggcgccgccgcgcggactctgcgcctgcgctctccgccctccgccgcccccaccccacaacctgactggtgccggagtttgagactgcgggatcccagaattccggaccgtacc

SEQ ID NO: 151935 - DNA, 1084 bp, Homo Sapiens
  misc_feature (227)..(227): n is a, c, g, or t
ttttttagggggaggcttgggaatcaggaggaagcctgggaatccggaaggcctggggaatgggggttccctgggatggaaagaaggcctgggattaggaaggcctggggattggggaggcctgggattggggaggcctgggatagagggaggctgggatttgaggggcacctgggtttccctctggtctctgccttctcccctggctgccctggttggtccccagncccacactcagattttgaaaggtgatctgtgtctcatccaggcgtccactgtggcttcacgtttctgtcagtcatatgcactaggctgcacctcaccgtctctgtggctgtggaaacatccggcacaatgagcacggggcgactgtgagacagggccttagaaagggcgcggtctctggacttggagtgaatgtctgcacccttgggtgtcagacgccccagtggctctcagtatcgactggaggctctacagagaagtgcagttgtgtctgctctgtggtactcgctggtgacgatgagttactgagctgtgaccatcgacaccgactcccactctcaacagggctgaacacctgcagcgactccgtggtcctgcgaaggtgcttatggccacgctggggcttggtcgactcctcctgggctctggcatcactgaaatagtgtcagggacctcgatctcgggcctccagcctccagaacggtggggaagcaatgtcagtcactcatccaggctgtggcattttgttacagcggcccaagcagaccaatgcaccccctcgccctgtgggtggtagtgacgggaatccatcactccagcgggtcgcctcatggccagaggcatggcaggctggagaggccgactgcggtcggagggacctgctgtgttctcctgctgagcgggtcaggatgtgacacgggcggtcactggaaggcagaggggccccccagccttgagcctccttcgcggtaagtggtgcaggggcagccatttctctttcacttctcactgtctccagaacaggagaaatatccggagctcaggcctgatgacaggaattccggaccggtaccagccg

SEQ ID NO: 151936 - DNA, 1101 bp, Homo Sapiens
  misc_feature (36)..(36): n is a, c, g, or t
  misc_feature (60)..(68): n is a, c, g, or t
tccggggtgtgtggttcctagtttaaggccctgaanctgaggcccactggtttttttggnnnnnnnnnccgaaccaatgggcagccactctccaaaaaacccccaaagaaccgccccccgccctttttgtaatcttcccccaatagtgcattaaaggaccatcttgggggtgtgccctggggctagtttttggggattagggtttagaaataaaagatttaataattttgtgcagtctttataaaaagggcacactgtttagtttttcaccataacgcataaccacgttgtagaatcaacatattatttcatagagttcttcatttccaggtgacccagggttaggggttagaataagcatcaaataaacatggattgagttctgccttttaaggaaagggttacattatttgtgttgttatctttctccaaacatgacattgtccactaatggcgtagaacacttctctggttcttgcattaaatggggctttgggtcctggaaagcagcctttagctatttcttgccatgggccacacactcatgctttcaggagtatatgtgcaagattcttttctggcagaaggaaaatattctggtcttagacccccaagattgaagtctgagttcctgctgtcaaggagggtacatgtgtgcctaaaatcaactttccctatcttgcttaagatgtttccaatgtagaccaccaaaacatagactccctgctattctccctatggccagaaaggtcttttcttgtttgaaatccagcagacttgaaacaattccagagagaatgggagggcaccaaagagggttccaaatgccactgagcccgtctgtctgtccaagccattgactgtcaccaccatgtcaccggtcccaggaaggtgaatctgcttcacacatagtatttcttccatgcacccgcaccctccaccttctctttatacctgtatttagaaaagaatcttcccaaggagttacacactcaccggtttcactgggttgggggaaaacagaccctgataaaataagaggaatgcccgtgtgactagatgtggggctatgatcccgggaattccggacccggtaccagc

SEQ ID NO: 151937 - DNA, 1203 bp, Homo Sapiens
  misc_feature (384)..(384): n is a, c, g, or t
aaagagtgcaggacccggggcgtggatccagttgtcgtggtgcaggaagtagtccacccagcagcggcagcgtgcagatgtacagcaggtcggcgatgctgaggttcatcaggtagacgcccagctcgttgcgctgttgcacctggcggtaggccgcccacagagccaggcagttggtgggcagccccacgccgatgacaaagatgtagagggatggcggaaagaggtggtccacgcgcgagtccacgtggcagccctcccacgtgtggttgcccatggtgggcacttcggcttctggggcgcttcccctggcccacgggggctgtggggccacagggagcgggaggccatggggccccctgagccccttccttggaggctcangggaacatggtgggatgtggtctacagggaagagatgaggttgggtaggctggggtgggctgggaaagggcagagcttgagagggaaaagttggaggagggatggaattatgccaggggggaagtctggaggatggtgagattaataaagaggtttttcaaggaggttatgtatggagtcagtgtgtcaacgagggagtatgggggtgacacaaaaattggtctccgggagtgtttatggaggagacgaaagcatcgctgggcaatggtgagaaggagatggtttccagggcaattaggaagtatgtgtagccatattgaagtaataatggcgggggaatgttctagaagccacaagaaatacatgagaaagtgttgagataggacacagcgcagttagggagtgttggaaagttcaggcaatgtgggtgggagtgctggcatttcctaggaccccagaaagcaacagagataagtaaggtcaccagtaaggagaaggttctggaaaaggaggtgtctggcacagggtggacaaagataaaaggctcggtctgtggacggcaggaaggagtcttaggaaacaggaaggaggtgagtaaggtctagatcagaggtaagtttggggacggaagggaaatttcaatgggggcaggggagggactccagactggtcctggtgggggctgagggattgggatgaagtcagttcaccgctgactgcagtgcctgcgcgcggcgactggacggggcgggcggcggcacctctctccgctgcgtccaggtccccggtcttgacaacggcgcggggacccagcggatc

SEQ ID NO: 151938 - DNA, 1111 bp, Homo Sapiens
  misc_feature (369)..(420): n is a, c, g, or t
  misc_feature (617)..(700): n is a, c, g, or t
tttattcatgtataagtaaagattaagtggacaaatcttaatagcctgaagactgtctacatgtgtttcccatgtaattcctagtaatgcaaagagagagaacattcccaatagcttctcaggcacaaatttgccctctcagttaatactgcataaatgtgaccattatcttgtcttttatcatcatgtatgatgtttggttatgaacttaacaacataattctacagtatttcctactgtgtatctggtatgccactgccactcaaggtttctttgagagggagactatatatttgttactattattaatgaatctatttccatgactgctgtgaaaaacccaggctgagttaacagtgatgagctcnnnnnnnnnnnnnnnnnnnnnnnnnnnnnnnnnnnnnnnnnnnnnnnnnnnnttctattagattcatacaccataatggacaaatctggactgacagatacatacagaacagcagatatcagttgccgaatgttttcttttagcacaactgagtatttaaaaaactgacaatatgtagtatcagaaaaaatctttaactttcatagaataaaagagagaatacaatcagtgtagagatcaacaaagatnnnnnnnnnnnnnnnnnnnnnnnnnnnnnnnnnnnnnnnnnnnnnnnnnnnnnnnnnnnnnnnnnnnnnnnnnnnnnnnnnnnntagatacctgatttctttttaattatgcttgaaattcaaattacaaaatactaagtaacccatgcatagaggaaacaaaattgaagattattttatttgtaaaataatgacataccaatttcataggactttttattagtagtatcataggcagtcttctgacaaattaggaaaagtagatagggtctgtccttagagtagtggcttgggctgattacctaacttctctgcacctcagcactgtcatcattacattgaaggggtccctatggtgccttaaagtgctcaagctctattattcaccacactattttgtcatttttaaattatcataggatattcaacctgaagttttactttacctgcccacgtcatctctacatattctcatgagatgcagttcatgaattc

SEQ ID NO: 151939 - DNA, 1090 bp, Homo Sapiens
aaatttttattattttgcccttaggagccttttaaattcttccgtaaggttaagttttgtcccaaattaatgtccccacccccacgaaggtgaagggttcctttccccaaaagattccccaagtttaggccatttttccccagttccgggaccgttgtaaaaacgaccggccccggtgcctaggtttataatacgccttccattattgggggccactttgtaccaagaaagctgggtacgcgtaagctttgggcccctcgagggattactctagagcgggccgcccggacaccacacggaaaaggaggcgaaggccggccggtcggcgaaggccgagccctgctggcaccagggcctggtggatggcgcgctcgccattcagcaccactatggggcagctgcccaggcggatctggaaaacgtcgccgtagcgccgcgccaggcgagcgaacgagaggtgagccgcctggccccaccgccgccgcgtttccgatcagtggccacgcaaacgggcccgggggcgcggaccggagctgccgcctccgttgcctcagcagccgctggcccacatgcacagtggccagcaccgacaggagtagcaggagcgtggtctgctggatggacagcgggtttagcggccaagggtcgttcgggctgaggctggtgcccatgctgcggggaggtgcggtttccagtggcgcgggacagccggctccgagaaggaactgggacctttgcctagggcaagacgtcaacaggaacccgcaggcccggcctggacacctgctgccctcactggaagctttaactcccactcgagtctcttggcgtcgtcagtgccaggagcgcttggattgggatggggacggagaagggtgcctcgctcgccgagccccgctgcccttggggacctggcaaagtcgaggtttcctcacagcgttgagattgagactgggggtcggtgagtggcgtcaattcccatgcccttgcggctctcacaactggagtcgcagaagcgctcgctcccactcccactccagagtcaaagcgcgccatcccgctatcccgggaattccggaccggtccagcc

SEQ ID NO: 151940 - DNA, 1079 bp, Homo Sapiens
gcctttgttaccccaggagggggccaaagggtttctttctgaaattaaaaagatccattgttccgtttccagggatgttgaggaccttttggagggttgggagccactcaggaaattcatccaattttataagggaaagttgaaccttgccttttcgggacagggccatgttgtaggctggaggccctggtgcttcttacttcggggcttttccccttggattttccatttggccttgcccccggccctagatccactcctggtggggttggcagcttccacccctgcctcctgggcagggtaaactcggtgcaagggtcctgttcccagagatggtacccaccctagcccctttgcctgcctttgcacttgcctgttccttcagcgtgttgaaaagggccttggccttggcctctaggccacctccgctgtgggatcctgaatgggccttctcttttacacccggacaatcctcgagtcccaaactcacctcaggcttgacctctgaatcaccctgaagtttggccccagaccctgccccagcgttagttttagctcctttcacagtctcaaccccaatctctgaggtgtccgtagactcctcgtcttcgtcccagattttctcgttctcgtctcttccccaagccagtctgtatacacagtagcaggcaccagccccgataaccacaccagcggccacgcagccagcttcccgagtgcggcccatggtacagctgggacaaatctcttaacccgagcacaaaacaggctcgctctggcccagagaagcgcgcacacgtcgcgggcggagtctgcagctactgcgggccggctctgaggcagctcgacttggttcttgacaactttgcgtttcttcctgctccaagggttggactggcctccggccccaagatctgcagggattccaggcagactattcctttgttcccaaatggcacagcgtcctgctgggatccaggcagaacctcgtcctccttcccccaggccacaggccctctcgccctctgggctataggaagagtgcaaccggaatcccgggaattccggaccggtaccac

SEQ ID NO: 151941 - DNA, 700 bp, Homo Sapiens
tacccgaacgggtgatgcggttgggggtggggaggggccgtgggtcagggtctcctggcccccattgctccaaggccggcaaggaggttgagcaggagggctgcgcccacagtttcggagctgccccgggggccgcctgcccccttgcctgttgggtcctggactcgggagctttgccagggtgggacattgcacaggctggactggcagcaggtcatggtcacctgggtcccctccaccgtcttggtgatgggctggcagctgtctgtgcaccacgtggagtgggtggtcaggaggcctgactcggtgttcccgtgggcaatgagggttgtgcaggtctggccatgtgagcagttctgcgtcaggttgcagcgctcgtccctgggcagggacttgcaggtgtagcaccgcagcagcactctgctcctgccaccagggagcctgttggtctcctcctcttccacctcatcctcatcttcctcgtcgtagtcatctggcccgtggtcctcgtcctcttcctcttcctcctgctgtgtctgccctctccctggccgcccgcacagcaagagggcaagcaggacagccccgagcgccttcatctcgccggacgctgctgtgtccctgactctgagtcctcccgcagggctctggagctgcggtaagtgggatgaaggatcccgggaattccggaccggtccac

SEQ ID NO: 151942 - DNA, 1058 bp, Homo Sapiens
  misc_feature (176)..(223): n is a, c, g, or t
  misc_feature (806)..(806): n is a, c, g, or t
  misc_feature (842)..(842): n is a, c, g, or t
  misc_feature (852)..(853): n is a, c, g, or t
  misc_feature (857)..(859): n is a, c, g, or t
gagccttcttcctggttgactgctttcttctcgatttcttcttgttctgccttctcggttgcagccctgaccccgctgtgtgtctggcccttggtgactgtccgtgtttctgttcctgtcattgtaactgtgacttttctctctgtctgcccccccttcctactggttcatgcttnnnnnnnnnnnnnnnnnnnnnnnnnnnnnnnnnnnnnnnnnnnnnnnntcctcatgcacccggcctcgtctctgtagtctctgcacttgtctcccattaaggtcccatccatgggggggcggaagcgggagcgcaaggctgccgtcgaggaggacacctccctgtcggagagtgaggggccccgccagcccgatggggatgaggaggagagcacagccctcagcatcaacgaggagatgcagcgcatgctcaaccagctgagggagtatgattttgacggacgactgtgacggcctgacttgggaggagactgaggagaccctgctgctttgggaggatttctcaggctatgccatggcagctgcagaggcccagggagagcagcaggaagatagcctggagaaggtgattaaagatacggagtccctgttcaaaacccgggagaaggagtatcaggagaccattgaccagatagagctggagttggccacggcccaagaacgacatgaaccggcacctgcacgagtaaaaatggagatgtgcagcatgaagcgccgggctggaaccgtgcagatggagaacctgccgccggctcattcacccagtctgggaagaaccgaaagtctcctgntttttcactggcggtccccggctttaacgaaaccgncgccggccgnnaaannnaaaaggctgaaagactccccaattcgcaatggtctcattctgaacagcttcccatgaaaatagaagaccttggcctccccccttggaaccccaagggcccctccccagcaggggaactccacccgagggggcaaaaagggtggggggccctcccccaaaaagggggaaaaatttaagtttgcaaggttcttggaaccaa

SEQ ID NO: 151943 - DNA, 1100 bp, Homo Sapiens
  misc_feature (41)..(71): n is a, c, g, or t
  misc_feature (84)..(86): n is a, c, g, or t
  misc_feature (88)..(88): n is a, c, g, or t
ggggggaagtaaaggcgcaggggcatggtgccaggtatgcnnnnnnnnnnnnnnnnnnnnnnnnnnnnnnnaaatgggcgggtnnnanggcgggcccttatagaaataaacttggggataaagggccaatcccccccgggcactggtacggttagggcttcccgtagggtttggggcttaggggtttccgtggacccgcaggaatgcacggagaaagtaggcgcggttctaggcgggtgtttccgggaagaatcctgggtcgtcattgtggccgaatcaggggccaagggactttccaagtagctggtgcgggctggacctctttaaagctgcccatcatcagaaagctgcctgggaaggtcccttgttttttggcacccaggccttgaccccgtcaacacggtcctccagctccgagtccacatcagagtctccctcactgttgatgaggtcctcattctcatcactctccatctcatcctcaatggcagcctgcaggtccccgatgcgcttgaatgccaactttaggtcagcctgcaggctctggttagcagcctccaggctttctagatccatctccagttcgtgcttcttgcggctcgcctcggcctccttcctggcaagctcgcccatctcctccttggtgtcccggagctgcctctgtagccgcttgttctgttccttctcccggttctcggctgcaatgcgctgatcccgctcctcagtcagcttctccatgttttccttgagacggctagccaggctctccagccgtttcacttgcgtcctttcaaactccaggcgtgtctccagctcccgtatcttagcttcctgcctgctcaccagggacttgtccaccatggactgctccaggaactccacctggctctggagggcttgtagcttctcctgcagctcctgcttctctttgttggcttcttctagctgagcttggagatcatttatctgagccaggtcccgggaagcctgagccacggcagccttgtgcttcctcatcccgactctccatctccttagaatgggtctgtctcatccgctccatctccatctccagacgcaatcccgggaattccggaccg

SEQ ID NO: 151944 - DNA, 343 bp, Homo Sapiens
cacccaggcgcacttctagctgagcttggagatcatttatctgagccaggtcccgggaagcctgagccacggcagccttggtgcttcttcatcaattcgttcatgtcttcctgatcttcctccagccggttctggatctcattcttctcacgctgaaggcggctcagctgctcctccagcgctgtcttggctttggcgatgtcatcaatctgcaggtgcaggtcttcgatctccacctccattgctttccgtgctttcacggctgccgcacaggtgtactctgactcctccatgcgtggttcttgagctgggcgatctctcgcttgctgggagcactgttctt

SEQ ID NO: 151945 - DNA, 1142 bp, Homo Sapiens
  misc_feature (156)..(156): n is a, c, g, or t
  misc_feature (224)..(224): n is a, c, g, or t
atccgtagttggggaaagggaatatatttggcatgttatgagatccaaagcatgttgtgattagcatgggagcgagaagttgttactgaagtgtcagttgtcggaggagatcatatcggtgagctgctgtgctcctacgggggtggtcagtctatntacgcgcgtgcgtagagatagcccagcatatgagtatgaacggtcgcgcggtggatagggtgagttgngatatgaggtaaggacgagcgaagggtggcggcttttagataagactagcgcggagggaagagcacgtgcaataggtataagcggtgattatgtataggagagtgcggaaagtcggcatgtagggaggtttgagggcggtggtacatggtgtaacaatgagagtaggggatgcagggtaaggtggctggagagtgttgacattaaggttgtgtcggttttgtcagggtagacggggaggtccattccacttgcctttgccttatgccttccctgatgcgggtgaagtaccaggggaggaaggtccgtcaccgtaaaccggcccctcgtatgttatatgcaccctttctggacacacacacctgtggtggcccagaaacaccgtgggtgtgtgtaaggcggatgacaagtggatgtgagtgcacacaggcacagtggtcactcctcgggaggtctttaaaaaccgcccagattctctcctctctggatggaaggatgcatggagagatagatatatttttagtccggaggcaggggaatacactgcctgacctttctggcacctgggcgtccatattgttagcagtgggcgtattcagcaagagtgtgacacatacacacacacccctggacacacagatgtggacacctacgggacagggacgcacacctcaccccaaccagagatagacgggtaccccaaggcacagcccctttgacctggagcgggacttgggcctccaagtccttcttccctaatccccaccctcgccgtccgtgggcccagcgtcccccggtccaccccacgcggaaagtgaaggggagggggctgtgagggtgactcacattgcctccgggccaggcgagcgctgcagcggaggccagggccgcaggccacgcatcccgggaattccggaccg

SEQ ID NO: 151946 - DNA, 1125 bp, Homo Sapiens
  misc_feature (448)..(479): n is a, c, g, or t
cattgcccccatgggggccccaagggtggggtaccggtttccccataaaatgaggactgccttgccctggggggttggccccaccctgagggactgccactgacccaaggcttgagagggccagcccctggcctgcctgtagagacttttggggttgtggggctgggttagggcagaacccagactgggggaagctgtatggttatgggggtaaccggctggtcagtggacagtttactggtatccagggggacgccctgagtgatggaagacaaggtgggtgacattgttggcgaaacctgtttgggcagctgctgttgggaccttctggcgtcggctgggcccgcgagcaaactcagggggtggaggggcacacggcggtggtggggggaggccccaggggtagaagcagggtaagagggggcgcccaaaacagggagatgaagtnnnnnnnnnnnnnnnnnnnnnnnnnnnnnnnnccggagcactgagtgaggggtggcccagggaggtggtgggcagtacatggcgggccaaggaggaggcaggcagagaggggtggctgtgggagccctgaagctggggctgaggactgctcagggaagcctggaggttgggattgcttagggaggactgcagggatgggtggctgagaggtgaatgaagtcctgcaggcacagacaaaaaaccagagatgccaacattactgatgggaactgagcccctttccacccagaatgggtggcagtgaccagactatgaaagcggcaacacaacgtcctccctactctatgcctgacagcactgcccatctggggactgcccttcctcttctcttttaggaaacaccacacctaccagttatcactggctgagtactgccgtgagggaatccttgggttcagaggtgacaggcggtgtgggtgatcacagcaggatctcaggtgctcatacctacctccccttcattccttcagtcaggcagcacccagtgggcacatggccaggacagtcactcacctggtgcatcatagcctgggcccaggcccatgcccctgctgatgcccaggtgagtcatggtgtgggtcaaatggaggtcttccaggaattccggccggtccagcc

SEQ ID NO: 151947 - DNA, 319 bp, Homo Sapiens
ccaaggaggaggcaggcagagaggggtggctgtgggagccctgaagctggggctgaggactgctcagggaagcctggaggttgggattgcttagggaggactgcagggattggtggctgagaggtgaatgaagtcctggtgcatcatatcctgtggccaggcccatgccccttttgatgcccaggtgagtcatggtgtgggtcaaattggaggtactgtttgcgcccactcaggctagggtaggctgtctcttcagggtccaggggggtgggcagtggtgggggaaagtgcaggttggtgaggtcaggtagggagtatg

SEQ ID NO: 151948 - DNA, 1202 bp, Homo Sapiens
  misc_feature (1044)..(1096): n is a, c, g, or t
gtcatctcaccgccgtgcgcacccactcgtaactcgcacccgggtcctggcttgcaccgcgtcccctcctgcaccccctggatggcccttcagccaacgggggcctgggcgatggtcgaccacggagctgcgcaaggaaaagtcccgggatgcggcccgcagccggcgcagccaggagaccgaggtgctgtaccagctggctcacacgctgcccttcgcccgcggcgtcagcgcccacctggacaaggcctctatcatgcgcctcaccatcagctacctgcgcatgcaccgcctctgcgccgcaggggagtggaaccaggtgggagcagggggagaaccactggatgcctgctacctgaaggccctggagggcttcgtcatggtgctcaccgccgagggagacatggcttacctgtcggagaatgtcagcaaacacctgggcctcagtcagctggagctcattggacacagcatctttgatttcatccacccctgtgaccaagaggagcttcaggacgccctgaccccccagcagaccctgtccaggaggaaggtggaggcccccacggagcggtgcttctccttgcgcatgaagagtacgctcaccagccgcgggcgcaccctcaacctcaaggcggccacctggaaggtgctgaactgctctggacatatgagggcctacaagccacctgtgcagacttctccagctgggagccctgactcagagcccccgctgcagtgcctggtgctcatctgcgaagccatcccccacccaggcagcctggagccccactgtgggccgagggccttccctcagccgccacagcctgggacatgaaagttccctactgtgacgacgggaattggcgaaggtggctgggctatagttcccgattaacctggaacggcctggttccgccctacgaagtacatccacggcgcctgggaatcccaaacccggtccagcaaagaacattcccccaccctgggatgggtttcccatttttcccccagggggcgaaagcccagttggcccccatgggnnnnnnnnnnnnnnnnnnnnnnnnnnnnnnnnnnnnnnnnnnnnnnnnnnnnngaaaagggcattgggcttcccccaacttttaaaaaccaaggtttccccggttttccccaaagcccccaaaggaaaggggggctccctttcctttggccccccctat

SEQ ID NO: 151949 - DNA, 1102 bp, Homo Sapiens
  misc_feature (136)..(144): n is a, c, g, or t
  misc_feature (200)..(252): n is a, c, g, or t
  misc_feature (254)..(254): n is a, c, g, or t
  misc_feature (256)..(257): n is a, c, g, or t
  misc_feature (259)..(261): n is a, c, g, or t
ggaggaaaaggttccttttccaaaaaattcccccagggtgggggttttttcccacgtcccagggggtttaaaaaaagggggcccaaggcccaagtttttaaatatcggtcccctttatggggcccccttttttacnnnnnnnnntggggtaccggaaaaactggggcccccttagggggatttttagggggggccccccnnnnnnnnnnnnnnnnnnnnnnnnnnnnnnnnnnnnnnnnnnnnnnnnnnnnntntnntnnnttttgccaatttcacacatattattttattactcatttgtttgctttccagggcaagtgaaaaaataatttaaaccaattgtatgtacagaggcttgattagttttcccaagaacttccagaaagtctcccagccctgtagacagcaaagcgtattacctttaacatctatacaaaagtccacctataaaagtctcatgtgtagaaaggttttctttattataagcatcacattttggggacaggaagggggtcagggtgggaggtggaggaaagtgcagggtgggggtccacacacacctgcccaggggtcatcctgggtggggaggctgtggctggtggggctcaggtgatctgcagcggggtctccaacatctccatgaggaaggtgtcaatgggggtgtccccgatgagcttgaagaagaagaggtgctccaggcatttcaagccaatggaacgcagagctgggaggcgcagcagcagcttggcaaacctgcctggctgttccggatacttctgcttggtgtaggcctcaagggtggcataaaccttctctcgcagagtctccacctcagaggggttggacaggcccttggcatctgggttaaagagtacaatggctcgcaggcatcccagttccgacttgtccatctgcatgtctttcattttggaaaccagctcagttaggactctgtcaaagatggagccgaccccagcactgtgggcactgctccggtggacatgtaaacccgtggccagaaggatgccatcctgcacggaaactgagcggtgggagaaagaggcaatcagcaatatcccgggaattccggaccggtccagcc

SEQ ID NO: 151950 - DNA, 983 bp, Homo Sapiens
gggcccccagcgggggcacagggtgatgcacgtccggtgttccatgtctgcccaggccacagtcacaggcagggctcacaggccccaagcccccagcccccagccactgggcaggtggcaggccggtgcacctccgctgctcgtaggctagccccgggcagggcttcccaggaggtttctgggagggctcaggtgcagaacacttgcggcttcgtgtctccttaggttcgtggggtccaccgtggcaggaggctgagcagggggtccaggggccccaggtggcccaggccccgtgtgtggggcagacctgctgggtgtcacaggcctctgattcctgtgcctgtcctgggcagtggcccccacacttgggagcagggtgattacaggctcgcctgcgggtccgggtccctttggagcaggtgacagagcaaggctcccagggcccccagccagaccagccgcccatctcaggacagcactgctggtcctcacaggcctggagctgccactccagggtcccaggtgccacctttccagagcactgcccattccagcccacacagcgccggtaccgcagctgggagccctcagagcacgtcaccgaacagggggcccatgtggaccacagggaccatcgtggggacctgcaaggctgacagagcccaccactacgtttctggtaggcaaaggcagtgttgagacagcagtcttccacgctgacaccaccccccaggaggcccttgcacttgccggaggattcttcatactgggtgaagcagagcacggggtctgagcctgtggctggcagggtgagcagcaggagcagcggcggcagcaacaatcgaggggcctgcgctccctctgtgatcatgttgagtactgcccctgcacctctaccagagaggaggtcccgctttatctgggttgataggctcctggaatcagcagggaaagaggaacctagaggcaggaggaactgggag

SEQ ID NO: 151951 - DNA, 1139 bp, Homo Sapiens
  misc_feature (101)..(101): n is a, c, g, or t
  misc_feature (1055)..(1086): n is a, c, g, or t
caagtagacgggcccggaaatccccgcgtcagaaggccaaattccctggagtaccttcgaagcgctgcagaggcaattgcaaatctgtgcagaaaaatagngtctggtcgatttccccccaagagtgggaaacgaaactcgtttaagccccggcaaaaagaacaaatccccaaggagagcgggtcggatattccaccgggccatccccaaggaagttgcaccggggccccgggttgttccccttccggaagggggaagggttgaggccagccaggacccagcgtggtaaacaacgacgtagtagaatggccccggaccaccgagggagttgaaagcactcccagcgccttgttgaatgtacctgaactggacgatgatgctgcagccggagcccggccaggagtaccaggcacaaggcagaggggctctctgactggacgggttgttatgcaagatgtcttgggccgccagcccgatgcccttggtggaaggcacggtgaaactgcccagcaaggagcagatgctgatgtagaccatgatgttggtgggcccatgggccggcgcgatccagaagatgagcagcagcagcatgagcagcacgatgcacaggtagcccacaaacactggattggtcagcttttcctccagctcagcctgagttgtcacactctcagactttggggagtggataatcagcacgacggagcctgcacagcttagcaggcaccccaacttgcccaagatgttgagcttttccttcaggagataggaagctaaaatggacccgaacggtactccaagggcgcccaggggggttaccaggaccgtggggaccgccgtgtaagccaggaagtttccaatctggccaacagccattgcgattgtgccagcccaccacacaatgtctgttaaataggaagtacctcgccgcttggcacgcacgatgcccttcttctgtagcacgaacgtggacccgttcaccaggctcgacacgacggccacgcccaggccgagcgacacggcggcgggggtcggactacgcgccccctccccgnnnnnnnnnnnnnnnnnnnnnnnnnnnnnnnngagcagcagtccccattccgcccgcgatcgcaggaattccggaccggtccagc

SEQ ID NO: 151952 - DNA, 1365 bp, Homo Sapiens
  misc_feature (166)..(166): n is a, c, g, or t
  misc_feature (416)..(416): n is a, c, g, or t
  misc_feature (1348)..(1348): n is a, c, g, or t
gggtagtaactgtcgtgcgtggggtctttttgtgtacggttgtctccagagttgttcaacgacgcgacccggtcgaggggagcgcgccgggtaaatagtccccccggttgttgcttcaatagcagtgtcttcgttaggttagccgtggtgggatttgtgtgctagngctcgcggcaagcggaggatattgtttataatttttctgctccctctccgtgacttcgagggcgaaggccactccgggtgtggcgggggtgatgtaatttaagatctctatgggtgacgctagtttatataacatttggtatggtatcaatctattgtgtggagagtaggggatgcacctgtatcggcttacctgaggataataactcggagcgccgcctaacctctggaaggggtgtggcgcgctactntagaggcgtgattaccggagagacggataaatgtgtgggtgagacgaatgcgtgggagcctgttcggtgtgtactcttttgtgcatggatgtattgttctttttaacagggagcctgtcatgcttaaattcggcccccggggaaccctagctcggccgctccgctttaacttaaccttgggggggtccaggaaaacaggttcttttattccacctagaagattttaatttagctggaatcccccaaaaccagtatgaggaggctttcagtatattactttccaggggtaggggataggggaaaatctatatttttgtacagtttattttttaataccataaagccttaggacaaaaggggtggttagctctgcttttagaattaactgagatgatttttaccagtgtgattttcatatctgtgttggattacttgttacatcagtcatgatgatatttggttggcaaagagttcgcttgatttttttctgtcaaagtatttttaatattttggtaaacactcttccatgaggcctcatcttgtgaagttgaaattacagcattatttttattagagaaaacaagtgaaaatgagaaaaagtccttcaagctttggagttacatgctcagcctgtaaaacgattactaacaaataatcccagaggaaactgggttctggtctgggccaattttaaaatatgccattttgggcaaatcttctcatttctgggtacctcaacgtaatccctgatgaaaataaaactctgagatcgagttcgccctccctgacagggagttgtaaataccaggtacttttgagagctttctaacttaacgtgatttttttccatcaataaaatgtccatctctgatcccgggaattccggaccggttccagcctgtccctgtgacctttttcatctatttccctanaaattaagttatatttt

SEQ ID NO: 151953 - DNA, 1037 bp, Homo Sapiens
tagtaactgcagggggtccagtgtccctaaagattttatatatggaatttccctttatgtgggcgccaattttgatccaaagaaaagcctgggtttgcgcgataacttttggcccccttggagggatatctttagaagcggccgcttttcccaaaagtcaaggccctgttttaaggaaagcttttgggatcccccttcgaagaaagccctttctttaccggtcccgcacacctacagctcactctcacaaagaccccaccttggagtaaacggacagacgcttcccaccagctgggctgggctggctgcagagagcatgcacttgaagttgtatcactccgcccctgcctcacaggcaccttttgacttttgggtggtggagtgagaataagaaggcaccttaccctacatcacggaacccccaaacactctctctgactagccacccgagactgccccgctctcccttcccacactctggggtgcggcagcgctagctcttagccctgtgggtgaacagcggccttgcaaccacattgaggcggcagggagatcatgactcagccgctggggtctgaaaattcttctcctccatcccaccctgccagatggagaagatgcggctcactgcttctccagaccctctcccctggggagggggtgggggagcaggctctcggctactctcggtgatccgaggaggacagggagggctggctctcctgggcaggaggtaaggcactggcagggggaggacgaggtcggcaggtgcttttctgcaaactggggacaattcagtgctgctacatggatccgtggaatgagggcttccacctcaaccaaccccttagacccagggcgaggaactgtgagcttggtgacagggacagctgtcatattcttctgtgaggctgtttttgtctgtttttcctccttgggtctctcagcaggtgggttcgtgcctggtgctccagtgatgggaagaaaacccacctcaccacagctactgcccgtgagatcccgggaattccggaccc

SEQ ID NO: 151954 - DNA, 1119 bp, Homo Sapiens
  misc_feature (940)..(1017): n is a, c, g, or t
tttgagagcagaaacaagtctattttttctctaggtcaccacagggaaccaatctaacctatttacaagtggtctcaggggaactatctttaaatagctatcttgtcaccatccttttcgtcatcttccacgattgctttgggtctctcatccctgagcaatgtcacacctgctgcaaagggggacatgtgcagggcaggtgtgtcttttctccttggctttttctgttccaggtcagtgttatgaagaacagggatcattttgccctttggatgtctctcttgaacatcgtatcttttaattaaatgttctgaaaacacacctggtatgaaaggtgggatgtgcagcgccggtgtatctttcctccttggttttttttggtctgactcaacattcagggttggcctgtacattttttcccttttctaggcttctttttgagatcacagtccttaatgaactggtctgaaagatcatctaagtggctgcaacgagggtctagcttgtccagtctgtcttctgagagttccagtggctgcatttgctcagtggacatcatcaaaggagggtgggtggatgtattcttctccagcacaatcagcgcagatgcagggaagcgaaggcgagagacagggagggcgtgtgtgctcaccgaggctgggcctggctcctctgcggcagtggctgctgctggccggctccagctcctcttatctagggaccagctgctgctgttgccatggggatgctctgtttcacaggcaccagggcaagggggatggagaaggaaagaggactaacatctccatcgctgctctccacggcaatcattgtacattacaaaagtacagtatagagtcgtgctttgagtttccggtgtgcacaccagagaaattcagacaaaccagctacatcattgaattcccatgcaatcgatttnnnnnnnnnnnnnnnnnnnnnnnnnnnnnnnnnnnnnnnnnnnnnnnnnnnnnnnnnnnnnnnnnnnnnnnnnnnnnnttcgactctcaaagctatttaagtttaaatccggagtactttcaatcactattgctgcttctcaaagtactatcatgaggaggaagagaagggtagctactg

SEQ ID NO: 151955 - DNA, 1004 bp, Homo Sapiens
  misc_feature (384)..(384): n is a, c, g, or t
  misc_feature (412)..(412): n is a, c, g, or t
  misc_feature (415)..(415): n is a, c, g, or t
  misc_feature (430)..(453): n is a, c, g, or t
  misc_feature (459)..(460): n is a, c, g, or t
gtcgcgataaaaagccgtttgtcccaggtaaaggcaagggagatggtgcaaggcggagacaaaccgcacgggcacgacgggagggtgaaaatggccgttttaacgagaatgaaaagaaagtgttatgcgtttgccctctagaaggcctttagaatttggaagaaagggagagccgcggcccaattggggtgtctccggacggcgggaaggtaatgggtaagggttccccggggttgtccacaaaagggggggcgcgttgtgacccaggtcagcggcccattggggaaaacgaaggaaccaggggcccgggggccaacgaggcggtatggggggataggaagcccgtttgcgccaagggagttggggttgcgcgtgggggtttgngccctgggagggtttttttagagggttnggnccttttgtgtttggnnnnnnnnnnnnnnnnnnnnnnnnggtttnntgattttgctttaatgattttaattagtatccaacatcaattcttaatctgtatacaacagttctggagtgacctggataacaatttgtttgctcatacaccttaagtactccccaaatagaatgtataaaagtactaatttagattggttttgtgtaatctgtgaataaataatattttacagcagttctctgggtaatgagagtcactctgtacagatagtaggtatgtacttaaatatttatacatttccctctgagctagtaagtcattgaccctgaagctggaatgaggctggtttgcaccttggaaaacttaatcgttcccatggtaacacagagactcttgcctaccacttcttcccacatctttgttatatttaaagcaagaaattgttatttacttcatatttgatatgttgatacaattttcagggcacaaattcctaacctcagccattcttgtgtataaaatattgccatagtaacaataaaaaaactgattataagtaataacttatatcccgggaattccggaccggtcc

SEQ ID NO: 151956 - DNA, 692 bp, Homo Sapiens
gttaaagtagccaagcatggtgatgcactcttgtagtcccagctactggggaggctgaagtgggaggattgcttgagcccaggagctaaaggctgcagtgagtttgagtactactgtattccagcctgggtgacaagagagggatcattcctggaatcctattgagtgtcacccagaaatgctcatcaggactgaaagtgtccttggaccactggagcaaatcaacagcccgtgggtcatgcagaacaaagttggcaaactctcttgatagagccacataggcagagccaaagtaaattgtgagattatgggggggaggcggtttcaacgctgttgttcttatcacataggaaagctctttgcccaggtgctcttggtggacatatttagtccgtccaattgcatgagctgggggcagcacccctggggtgatatttttacctttaaatcctttcagatactgaactatttccttgttggttttcagggggaagtcttgcccacaggtgttgataacgtacttccatgagacctcgaaggcagaaagatctctgatgcagttcaggtcagcctggagcctggagatccctccatagaccacgggttccatcttggaagccagaaaagcgtttgggaagcagcttaatagttgctctaccgcatctttaaattcagttgttgctttttcatcc

SEQ ID NO: 151957 - DNA, 822 bp, Homo Sapiens
ttctaaggcagccaaagagagaggccccttcagaggggtcccatggacccgggccgacggccttcaatgcccagtgtgccccgtggagtggaggcagcccatcgcctgccgaggggccgcctgcggccatgggaggagctctagggaggctggtggaagcggctggcccttacccaccctgcttctcatgggctggctgccaatgtgtctacacctctctgggccttggtgtcgtccatggaggcaactgtgatgaggctcagaaagggcaaatccctcaggcctcccatcagtgggcactggccaacttctggtgccaggaactttgtctctaatggcttttgccacaaccagagaggctgctctgcttggctggaagtgccaggggaataactctctggaagtagccctcaatgactgacagtgcaagtggatacatacctcggttccctcactgaccgatggacgagtctgggcaagcgtcctagcccagctcctggtggccccagtgggactgagatcacagtgtcaccaccggatgaacacccccttccttgctgccctcccttccctgcctcttgcctgtgtcccagcctgggttcttccacacaaaccacttgccctggaagccctgtctcacaaacatccatgcaaaggctgtggcagagcccctgggcaccaggcgtctggcctctggggcacagacctgtgagcagctgctgtttgtcgtgctcccactcagacaggcactgctcatcctcctccgcctgtcgccgccgtgccccctgctcctgtttcagcgcctgctccagcttgcccgcc

SEQ ID NO: 151958 - DNA, 850 bp, Homo Sapiens
aggtgtctcctcgtaatagtctcaagtcaaaggaatcttcacattcgaaccacggtgtcttcatcatggttgcaggtgttcttcccccaaggcccagaagggcaatcctgaagggttgcttctcgtcctgagcatgacatctggctcagccaagatgggttttcggccataggcatgcttgttgcagcgtttttgagtcagtacagccctcccacatcccagctgccggcacaccacctttgcggcccggaggctccagcctgtctggcacacggtataccactggttctggtgctttcacttccacgcgtcccttgcaatgcccagggccgtcagccagcctgacaccctctgggactggggagaaagagctctctgggttctcacacgatgccccagcatcttcatcatgtgaacaatcataaacttcttcttgctcacactgagccaatgtatcttctgttcctgtgcaactgactgattggatgaggaccttttgctctttttctgctggtggctcatacaaaataccactaggggttccgctggcagctccacagcccagctcccggcacaacacagccacgtccttaatgtcccagccgtcatcacacacggtgccccactggcctttctgttccacctccacccgcccttcacagcggtggaggccccccaccagccgcactccagatggagacgctaggaatccaggtctggtgcaaatggcaaggatcaaggagaatagcagagccatgaccaaggcaggtgaaggtgatgagctgaaatttaaggctagaaggaggtccccaagcagcaatatttagttttagctgcaagtatgttaaga

SEQ ID NO: 151959 - DNA, 813 bp, Homo Sapiens
ctttttgatcgtttcccatgtgttgtcagatagctccatagaattcagtttctgagaaccagccagaagcatgcagtgacattgcacaatctgcctctgaagctggagatactagctgcagagctcaggggagctgctccacatcaccgacatgaagggaacaggcatcatggactgtgcgcccaaggcactcctggccagggcactttatgacaactgccctgactgctctgacgagctggctttcagcagaggggacatcctgaccattctggagcaacacgtgccagaaagcgagggttggtggaagtgtttgctccatgggaggcaaggcctggcccctgccaaccgcctccaaatcctcacggaggtcgctgcagacaggccgtgccccccattcctgagaggcctggaagaagctcctgccagctcagaggagacctatcaggtgcccactctaccccgccctcccactccaggccccgtttatgagcagatgaggagttgggcggaggggccccaggcccctactgcccaagtctatgaattccccgaaccgtcccaccagtgccagaatcatctgtgaaaagactctcagctttgcaaaacaggccatcctcacgcttcccagaactgtccgggcctcactgccgactctgacttcccaggtgtatgacgtgcctaacccagcaccggggccccgtggtcctgaagggacgccagagaagcagcaggacatatgacactacacgccaggcccaagaaggcaggactcatacccccaaacggcaaggcagtgggcacggtgttccc

SEQ ID NO: 151960 - DNA, 648 bp, Homo Sapiens
ctctcggggacctggtccggcgggtgaggcctgaggcgcgagtcgtcggccttcgggtgcggtccccacacgctgctcccggctgtcccgggcatccccgggggacgcgcctgcctcctcgccgtcgccctcttcttccgcgtctttcgtccaccccgtcgtcatcttcgtcgtcctcgcagtccccgtccgccggcgtgcgggctgggcccggggggcgtggaccgcggcgcccacgcagacgtcctcttccagctccaggctctcgacatcgatctcccagtccccggccgcggagccagcctgcgggtcggccatggcgctcggggcttcgctggggcctgagcctggcggccctcactcaaaactttgaggcccgggctggtagcccagttaaaagatatccagctttaggatctggcgctagggctgctggctgtgcatgcaaacagaaatcggggtcgctaccctcaaacacgagatcgggagctgatagctggaggcccggaacgaagccacttgctgaggccgctttcggcttcctctgacccaggctgggcgggaaaggtcgggccgcccccgcctggctcagatcgctggctcacccggcgggcgcgcgcagttgcattcagcgcagcgccactggct

SEQ ID NO: 151961 - DNA, 500 bp, Homo Sapiens
ctcccactgccctttccctcgcacgccatgcactatgcctgtatccctggcgcacgtcctgtcaacttacgggctcgacaattcatggtgctgtggcgaatgaatggggcgctggcacagggcagcagggcacccggggagggcatcaaatagggcaagtagtggtggtgaaacaccaaaggccctttctcccgcacgtccatctcctcctcctcctcctcaggctcttcctgtggaacctccaggtagacctgagggcagggcgaggcaggccggggctgcagcgctccagccaccaggcgactcagcagcagctggtgcatctgcgcgttctgcagcatcatcagttccagcaggtcttccttcacgcggcctggctgcgggggcgcaggtgggacggcccacgagaggggctgcaggaaggtgacccagggcgtcgggactgcgctctgcggtggggagcgaccccagcttccgcccgccccagaggccatggctgg

SEQ ID NO: 151962 - DNA, 678 bp, Homo Sapiens
cacgtgtgtgaggatgaactccacgacgatggattgtacccgcacctccatgaaggccgctgtcccattgaagcctgaggcctctatgtccttagacctcagcaggttgggagcccacacgatggccaggttgcgagcatgcatgttggtctgggcactgaatgaggccatgtgtaccaagtgcctcatgaggaactccagggtcctgtagtttgggacagggagttcccgaagcacctctaggatcttgaccaagcgctcaggttccaattgcactcctacagcctcagcaaacttgtcatagagccggtaagtgagcaggggatccggcagttctctgaaataggccttgcacagggaggagacgcagtgaatgtcttggaggtaaacatcccgacgcaggtctggcttccgctctgactcaaattcctgccgaagcttctggatgttggaggagacccctgagaggcggtagatcccatccaccactccatactcctccacaaattctgcacagctctttagcacctggggcacctcctggcctgagtgctgcaggtgctcctgcaagtcgcacccaaaaacccgctcctttgcgctgcccttcttctttcctttctgccgagacttcatggccagagccccagggcactggcccggtcacctctatcccccaag

SEQ ID NO: 151963 - DNA, 686 bp, Homo Sapiens
cagctcctggaactcgcggcggatcacccagctgaagacatccgactcattgacgattcgggtccggttgttcaccagtttggcgatgagctcatccaccttcttctgctcctgcttcagctcagagaagagggctgcgagctcctccttcatgcggctgcagatggtggagacgggcgtgaccgggtggtgttggtgggagcccagcagaccgcagaggccacagatgagctcctggtccttctcgcagaaaaggctgagcgggttccggtggtgcacgcagaccttgggctccgggtccccagggagcctcagggcttcgatcacccaggccagggagacgttgggcaaggagctgctgccgtccaccacctgccagcacatggggcagcgcaccttggtgtccaggtggtaggacagggaaaccaggcagcccttgcagtaggagtggccgcactgtagcattagggactccttgaagacctccaggcagatgggacactgaagccggtcctccagctccagcaggctcacctgccaagccatccacactcactgcccgggctagcttctcaggatccactgggcctcccactatggcctcaagccagcatcactggcttttcttcttcccagcagggaacagcaggcacagagtcagaagtgggaagtgcagctggacgcct

SEQ ID NO: 151964 - DNA, 639 bp, Homo Sapiens
cactgcaagggatattgagtgacgcctcctcactgaggagcagtcgccggccgtgattgtccagctccatccaggtgagcacaggcccgcagttgaggttactgtccaccagtcctgacagtgtctccaggtactgcagcagcagtggcaccagcatctgggcagccctggcaccctcggggggcgggggaagctccggaaggcaggagaacctccggtcaaatatgcaccggtggaggtgggcatccagggaacgaaagtcatcgtaactccggagaaccggccaggaacggccctgacaggtcacctgcaccccgaacaccagctcattctctccagagaggctgggcccttcacggtctggagacagcaggagctgaatgtggccaaagtcaacgttctcgtagtggaaatgggcgcagtcagccagccgcgggaaggggcctcgaggagctgagagcctcttcccaggcttccccttcacactgggccccccagcagtgggtagaggctgcaccgagccctcccctgggccatccaggctgtgctgcgtgccaccatggtcgcgtagcctcctcaggccccggccgcgctcgacccctcgctcgccgttctcgtcgccgctgccgccgccatggc

SEQ ID NO: 151965 - DNA, 1041 bp, Homo Sapiens
  misc_feature (21)..(21): n is a, c, g, or t
  misc_feature (229)..(229): n is a, c, g, or t
ttccggcaagagcagggcccncgggggtcctcttctgggggggcccctggccagttcttggctattgccagactcttgggggtgggctttttctcttccaaagccctgaatgacgtcctcaggagctcgggggaacttctctcagctgtctcacacgctctcttttctttctcctaaaatgaatcccaggagttttctatggccgttagaaaaaggctgacttcctctnttcccacagggaactcgtttatgctgacccttcaaatcagtgagaattttttcaatccatgtcgtgacaacgactatgccttccgccgtctccgagcgcagaggtgatgctttgagggataattccttcatcacggacgccagcaccacgaatgttatgggttttctcggtttctctaattttcttcgcttacttggtggtgatggtactgtgacatcatcataaaaactccaagctaaggcccatctcattgtccgaccttgacagaattcagtgtacgttactttgggaaccccttgtatgcgaagctcctccttcagaggcgccaggctgcatttctttcccagcatgcagctataccatcttaatctttttttaagttgtagactgtcatggatgatccttttaacaaactctaattcacctccttctgccatgatctctgtgatgcctcctgtattaacagaactaggcggaggtcttcgaggatttcgtgagtttactcccttggcttccaattgattggcaaaaaagggagggttgcacatgcaaaagtcatagattatctcagattcttctttaagagcatccatcaggagtgtcttctgtggcactttcaccacttttatgagatcagataagttattctgttccacatttttctttgcatagttgaaacacatatcatccacttctgttgcgaggaaataccagccattcaaggttgctccaagtaaggggtagatgcaagatgcccccgtgcctatgtcaattcctcttcggagagtactttgtccagaatccttgatccc

SEQ ID NO: 151966 - DNA, 915 bp, Homo Sapiens
agcgcagaagaggcccaggaagggagcacccgggagaagctcatagtagatgccgcccagtgattgcccctagcagagagcagcaagggcccagtgaaggggcatgggtgctccctggtgaaagaccttggcaacctctccacaccccttcttccagatggtcagggacacccgactggaccccacacagggggcactttagcagctttgccattccagaaatgaacagtgatttctttttcctttgatgctctctggggatctctcatctccaagcccaaaagaacagtgccagggccatactgctgttggcctggctcccagagtgccagcaccttatccctggtctcagtgagtatcctacagatggtgagagaggaatgacatcctcttctaagaccactctctgctgctgggctggcagctttgggcctgcgacaagtggagcctcgaattccacaagcaggaccccctgtctctccagctcgggagtggcctttatttgggcccggtagtaaaaaccatctgcttcccttcttgctaggacccatgtgttggcagcatctccagctcttcccagccagccaggcccctgccatgctgggtcggcaacgtggagacatgggcaagaagaggcatgccttgcaaggggcttgtgcccggtgagccagggtgcttggagggcaaaggggtaggtgaaggagaggtcccaaggtggagcagcaccgtcccagccaggggccttcaggcttgtggccacgctgcagtatttgagcaaaggcatcctgggccccgtggaggattccatggccttcagaggatccacccacagccccaaactcccagcctccacctcagcctcaggctccttctgacagttggggctcagggtctcagcccaaccgactcctggtt

SEQ ID NO: 151967 - DNA, 818 bp, Homo Sapiens
ggagcccgcccggtccccccgactgaagggcgcgtaggagctggcaggctgctgaaggagtcggcgcggaaccgttgccaaatatgggtgtgcgcacgcatgtgcacggggaacagggcctcgcagggcccgcagcttctttgctgctgccgttgagctggaagaggttctgcagcacccccgggccccttgctggccgcatggtcaccgccttccgcttggtctgcgccaccgcggaccagctcagcaaggggctgccacggcggcccaggaagtggtcggaggcccccgtgggggatttggcaccagctttgtcttttgctaatggattttttcccaggtgtcttcaaagcttcggggccgtcctgtgctttgggggacaggctgggggtggcggcttcactaggcgggggtgcctcactggataccttcttggtcctccggcagctgctagacactagcagggctggagagggctctgtgcactggatcttgaagtcagggggcagcagcctgacgttggagacggcgatgtggcctgtatccccatcgtcaaattccaccactactgagtccaggtcctcatcttcgtcaccggaggccccccggaccacgttgcccgggtacagacatcgagacttctgactccagtaggcgcagacccgcgtgccgggcgggaggtaccggctggactgtggccgcacatcgagaacctgcaggaacgcgggcgacgacccatgagcaggtggggcctggcccagggctgcctgagagtctggtccctgggcctgggagtggctgcggcccaggccaaggcc

SEQ ID NO: 151968 - DNA, 796 bp, Homo Sapiens
tctcctttcactgcaaggaccttggctctcgcttcccgggtgcgctcagcctcgctgccatggatctctgcaactgcacgggaatccgaacatctttgattttccactcgggccacccggatcccccacagttcggtggcatcatcaagtaaagtctggatgctatgggcgatctcttctcgtccagctaagatctgggacaaggtctgtgtccctaagacatttctcagagtggtttgagccagcagaaatgttgcttgatggacatcgttgacattagccactgctgagacagcactatagattctgtaatagacaactccatctacctgagtagttacggagtctctggtgaggatctcttgtggaggaatgttgcaagtaactgttcggaggtcaactttgacaaacacatctatgcatggcaggaccaggatcaaacctggccccttggctttgtcagcttggatgcgtcccagacggaatacaacagcacgttcatactccttaatgatcttcaagcacatccatatggagatggggaaggtaatgatcaccaacaggaaagagagggaaaacaggatccagccacatacaccaagccgtttattgttgacacccacgaaattctctttatcttgcttctcaggtgaagacaccctagaatccatctcattcttgagaagcttttatacttggcaatttttcatgggtttggagctaagtgtgaagaacaggcagcaactcagatgtgcttgggagaggggagaggagaaagtatgagagagtgaaagac

SEQ ID NO: 151969 - DNA, 841 bp, Homo Sapiens
tgggttactctgctcatcacccggcctgcagcagctttgaactcacagcagcaactgatgtgcgccatacgtgtggtagctccgaggtctaggaggccaatgggagcgccctgacttgggcacatccctttgcacctctggcaaggcggaagacgtagtgcacgtaggaagccagcaggcagttcctcccatgctggtccttgctcaggtccttgctgttgtgcagactgttggcgatggccaccacggactcgaaggcaaactgggagaagttggctgtctggccagcgatgaccatgggctgcacggacagctggaagagcttgtccagcaccaggtgcaggaagagcacgagcggctccaggcgggaggagttgaggcagatgatgctgagcttcagctcatgctccagcgccatctcgctgattttctgatccagcacgcggatggggaaggtcacctggctctccagggagtggcagagggtgaagatcttctccaggtggttgtcctgggtgtgtacagaagaaacagcttgcacttcaatattaaatactcccttatgtccttcagcccacttaatgggaggattctgtaatgggactttctcagcagaatgcatggagtagttgggtggcaatttttccaaggcacctgggagacagtaggatccagtttgaagacgttcatttaagagaattggcagccattattatggtatgtaacagctgtgtacacttcctgcagaaattcaggcccgctggactttccaaagatgaccggcatcgcattgctagcatgttctccacacataaactggatctttattgtaatgttccgg

SEQ ID NO: 151970 - DNA, 702 bp, Homo Sapiens
agagtgaaactccatcctcagggatgccttgcaaggtcacggcgtccttgcctgcggggttggagatggggaatcccagcgggaactggcccaccttaatgctggccatctcactccaactctccagattctcctccaggggcacagtgtggatgctgttgtccttggcatcatcctgctgactgctcagcgtcaaggtggaggtgtcgctgaacaggaggctggagtccaggctcagagtctcattggaacccaggattagagtcatgcatgagggtggagagatggtggagttgggcccatgggtgctggagtgcaggctgataccatcgctggagccaggaatcagggtcacatacgaggcttgagtgatggtcacgctcaaatcagatctggagtggccgctggaagccacattcatggtttcctttgaacttgtgctccaggtggtactaaaggctccttttgaaacagactcagagatattatgtgaagccaaagtgatggtctcatttgtgtctgggattagggtcccatgagaatctggagctacacttcaggattcagcttggaggtgtttctttgagccccatgttgagcaatggatctggagtcaaggtccagagaagagctttcgaggttggaataaggagtgcttttgagcttggcctagagatgcagtggcgcagaaccagaccttct

SEQ ID NO: 151971 - DNA, 1129 bp, Homo Sapiens
  misc_feature (41)..(49): n is a, c, g, or t
ggggggtcccatggcccctcccaaggaaaaaattttccctnnnnnnnnntcttgttttctccaggaggatgcctcccacggtggaggaagcttccagatggacaggaaatccagggaagatttgattgcccatgggccccgatgtccacagggaccccggaaagtacttctcagccacggggcaggagaagaaataagcgctacccaggaagaagaggatctgaggggtgtggtaccaggctgcttgctcctggcagccagccaggtgacagagcgccaccacggtgtgccacagggctgatgtctaggataaaagccagacctgctggcaccacttgacagatcttcctcatgactggataaggcctccggtaacgatatttggcatagcaacagccagcacaagataaccagccacagaaggcagctgctggcaagaagaaaagccagaaccggtcataccaggcctggtcagagctgtagaagaaatgagccaaagcactgccatattggtaaacgctcacgccaacatagtccacaaagtagaaagtgtagtgggagagctctgacttggactgcagcaggtgggccagaaggctgcaggtgaggtaagtgattgacgacaggatgaagaggagcagaggcagggagtgggtagacgcccatggcaaggcctcagcctcggcaaaggcccagaatcgcaagaggacggccagggctgccagtaaatgggtccagacgttgaccacctcgttgtgtttctgaaagaggctgaagaagtagtagcgccactcgtgccccgtggggcggtagccggtgcggatgtaaggctcccggaagagctggggcacatccgtttctgggacagtgcaaggcatcttgggaagcccatcctccaggatcttgggcaggcggcgcagctgctgcccgctgaccgacagggtgctcaggcgctccaagatggcggtcgtcatggccgcggcccgcatgcactccgtgccgcgccctcaggacagggtatgcaaccggcaggggcggcggccgagcccgtgcgcgtggcccagcccggcccagcccgcgctcccgcctcggggtcccggccacgagctatcccgggaattccggaccc

SEQ ID NO: 151972 - DNA, 755 bp, Homo Sapiens
ctggtgtgcacatatgccagggtgtgataacttccactatctatctgcgaaactaggccatcaattctttccacaagttgtggacctctcttctcaggagtggggctgtatcccagctgtccagagcgattgtctccaaatgtgaacactttcccgtcctgggtaagcaccgcagtgtgtgcatcaccacagctgatataaaccacacctagattcttcagtgcaccgactgagagaggcttgttgctttgcactgggacattacgcccactgagggccagctgcccggcactgttacttccccagccaaacgaagtcccacagagagacagggcaaagctgtgagcccctccggcagccacctgagccagtgggatcccctccagggacctcaccctctgcgggctggcttgggaggggaactccttccccaagcccagctgcccatggctgttctttccccacgaaaacacttggctatcttttgataatgccagggagtggtagtgtccacaggaaacttgtattatttttatatcattcagagtcattattttcttaggtgtgaaacttatttccttgaattctccaatccccagctgcccttcagaaccagctccccatgcgaagacccttcctttgtggcacacagccagggagtgctccttcccgcagctcacgagatcaacaattagggtttccaatgcctgaattggttctggcagctccccgcgctgcgcgcccctgcggcccag

SEQ ID NO: 151973 - DNA, 972 bp, Homo Sapiens
tggccttttcaggggacaacggtgcccacaaggcgccaaacaagccggccggaccgcatcgggtaacctgggggcgggtccgcctctgggtctctctgaagatctggttctcagattcagggtgggtgctttagtagagacaactgctcagagcaccaatgcccatccatatgccccagtggcccctgcccaggtgctgcgagactggctggatgctgggcaaagggggccactgggttgggggcctgccaggcagcagagctcagacgtactctcgggcagcagcagaggtccagccgatagggctgtgggctgctgttgggtctctctggctccgggcatgtgcagcagaggaaggagccgcccagcacgccaggccagctgaggcccagcccacgaacagggctgggccaaattcatacctggcattgacaggtgtgcttgggttgaagaactcctgggtcaccagggtggcataccacgagacagcagtcaaagtgcagaggcctgccaggatgaagagggctcccccggcgatggcaacacggcccttggcaatggggttgctgtctcccacccgcgtacacttcatgccaactacgctgaggaccatggccacgaagcccaggagcacggccaccaccatcagggcccgcgctgattggatgtgaccgtccagggcgagcagcgagtcgtagagcttgcactgcacttgcccagtgctctgggaggcgcaggacatccagagcccttcatagaggcccacggcagtgatgatggcgtcgcctgcgtaggaagactgcttccactgtggcagggctgtgctagcaatgatgcccacccagccacccagggccaagaagtagcccaggagctggaggcctgagttggccatggcccaggagagaggaccgagggtcccaggactcagagctgggccagggtgccagcaggggctttggtcatggccag

SEQ ID NO: 151974 - DNA, 1026 bp, Homo Sapiens
gtttttgggaagccatccttcccaaggccgggtttttgccaaccaggattttgaaagccttcggttcgggggggacccttggcccaagcttttttgccaaaacacagactttttcccaggtactcctttaaaaaaagggggtgtcaaaggagattgttggacggaaagttcccccttcaaaatcccttaataagaccctgggaaataaagggggtgaattttttcacacctttttctggatgaagtaaagtagggggaggatttcttggaatcttaaagagtgttttcacaggatgcatgtcaaagaggggagggtctccatcccccagttcaatagctgtgtcccccaaggaccagacgtcacagcgagcgtcataggaagagtcatactgctgctcacaggcaatgacctcaggggccatccagaacggggtgccaacagatgtgtttctccgcagacgtgtactggtgagttgagctgaaacaccaaagtcaacgagcttaactcctccttctgttgtcagaagaatgttattccccttcacatcacggtggatgattcggttgttgtgcaaatgctgaaggcccaagagggccccgtacaagatgtatgagatcattgcttcatccaaccgctggccacatctgagtagacctttgacaagctcagtgactgagcccccattacacagctccaggaccagccacagctgtccccctacacagtgatccgctttgtaaaacatcccataaaactttacaacattgggatgattaggaaggaactgcaaaatgttgtattctgcctcaatttcttcatccatatcactgactggatccagaattttcactgcagccaggctcccatctctcttgttagttaccttgtagactttgccataggtgcctttaccaatggtctctataatttcccaggtgtctgtgggatctggaagcgattcaagtccaagcatcataggattatagtgaaataatccatacagagtttcatcccgggaattccgg

SEQ ID NO: 151975 - DNA, 826 bp, Homo Sapiens
  misc_feature (719)..(727): n is a, c, g, or t
cataggagtggcagtaacttctttaggcctgacttttttggaaaggaatgtccaagtatcatttttgttctggatatgggagggaaactagagggtagtttcacagacactcagcggagcagggccaaccagtgttctcctccggctgatgcacatcaaaatacatgtaaggacagagctcgctgtgatggggagtctcgtcggtccctttggcattcttagagttcagaagctaagtctgtacaaactgggatgactgaaaaagaccatgaagcttgtgccccatgggcacacaaggagggaaaaccgtggccgctttctcacggatgctttccctttcacttcccccacttctcactccctgcaccagaacccactgactttaagcaaacagacaggcctgcacaccaagccaggccaaagggtccgggcagctgatgggggaatcgttgcctgtgtagcaagcagaaaaggtgatgacttttgttcatttctgggaggacagattgtgtgacctcaggattatccacttcttcctaagtttctaaaaagaagtgaaataattaagacctaaaaagcaaattcatcatggtggaagtcgttctagccttgggaaaaagagatcttctatggagaaaatgtgaggaataccctgtgggcactatggaaacaggtattcagtccgacttgctccttttatgttttgtggttctctaagnnnnnnnnntccacatggattaaagcttgtgaaacaagtttatattttaaggtctgaaaacaatcagaccaagctaaggagttatttttcagaacgcagcacattttt

SEQ ID NO: 151976 - DNA, 632 bp, Homo Sapiens
  misc_feature (103)..(221): n is a, c, g, or t
tatcatggctcaccccagctttacctcccgggctcagtgatacttgcatctcatcctcacgagtggctgggactacaggtgtgtgccagcacacctggctaannnnnnnnnnnnnnnnnnnnnnnnnnnnnnnnnnnnnnnnnnnnnnnnnnnnnnnnnnnnnnnnnnnnnnnnnnnnnnnnnnnnnnnnnnnnnnnnnnnnnnnnnnnnnnnnnnnnnnnatgagccactgcgtctagcttaagctctggtcctcaccacaagatctgggacaagtgcctttcttgcctataacttagggctgatgtgaccaattgctccttcatgttattgaggattaaatgagaatgcgtgccgtaaaatatgaaggatcgcagcaacgctagagactcacatgtttatattcatttcttccaaagggctttaaggttagaaggtttcattatttcctgctaggatgagggatgttctatcctcaaggccttagatctctggatcagatcatcagtggaggttttgcaaccacagccacagcccctgaagtctagaatcaaaggaaacaccgtgccaaggtttccaacccagcgatttgctgtgttatgatcgctgctgagctcccagcacaagaagac

SEQ ID NO: 151977 - DNA, 114 bp, Homo Sapiens
cccgggccggggtggcgcgcccctcggcctcctcacgcgcggggcagccgggcggcccccatccttggcaccggcctcccggtcggccccagcccctgccccccgcaagtgctg

SEQ ID NO: 151978 - DNA, 1604 bp, Homo Sapiens
aaaatgttattttgttggataaatttgagttcagaaggcaatgacttgaccctggaagactcagtttattgctggggaaccaagttaatatttgtcaagccaccctgtgtaaaaaactgtaatgggtagaagttttctcttttgagaagcttattgaaatataatgacatctactgcaaaataggactactaaatacatatactttacatgcaaagtacatttcttaaagaattatttctggtaatttttgatgactttattacttgataataagtattagtttaaaattttccaaattattctttaaatagttgttaggtaagaatattcagtaagccagtaattcagaataactattgtagaaaataataataatctattaatttaatgaatcacctctaaattactaattaacttcttttacaacataaataacttgttatcaatagagcatttttgtaaaaaacaaaagaaagaataagtttaattattaaaatttgctctcttaccaaatgaatacaagggcttttgaataatctcattgcataagaggccctcatttcacagaaatggtaagaactaaatcaaaagattcaagggttttccctttataaagaatagatcagaaaatttgacaatccagacattcaaaaaaacattctgccagttgatttttttggactactatttgattagatgatcagttctgaaatttaagctgcatgtatgcccaaattaaattagcataggaaagtcaatgtgtgtggttttttaaaagtatattttagcatattaatggagcaatttaatttacattcagttacaaacctcattcttattaataggtttagggaatgttcttgctggtgtgctgattaccatattagagaaaaaataaactctccatattataattcacctgtttagtcacggtgagtttcttacttgtgatttgagtggattatgcctaaaaattacaagtatattttgcactaaagcgacaaaatatgtccctgcaaaaatcttagcgtacttgaatcatcaaatgtaatggattgtattgaattctaaatgttaagcaagtcaacgtggacttcagggttctgtctttcttttcttatgtcctctctcattcctttatacctttcttcctttctgaggcctatgttcatagcatgacttttaatgtgctgaaagattttccttctgttctcgtgtacagagttcgtccccgatgagtggtacgctcagaaggaactagttctgactacaaatcccactacttgaaatagcaaatatcgtacctaacagtagtcaaacagcattttgcctagcacatactaagcacacatctgaatacaaactgtcccagtatgctggcctcagcgtatctccccaccgtccactcaccacgacacctcagtcacatcactggtcaccccgccggtcatcttctctccgccctccgccgcttggacttccccccgcccaccctcttcagactcccctcccgccctcctgggcaccctcctcccttaccggcctccgttccccttacatttcccgcctttctctcgcgccctgctaccactttcgaggttcc

SEQ ID NO: 151979 - DNA, 644 bp, Homo Sapiens
tttttaacactattcaaaaatttttattcttttatattcaagtgacactcaaggaaagaaaaataactctagtctacttttccttcgcacaatacaacacttggtacttttcactgaaatcataccttaattttcaaatctttcaccatttacaaactctaaaaagtgtaaagatgagtgattcagagagtgagactatgtaaaccatttacacaaagacattgaaaccctctggacaagttgaatgagaacaaatcagcacttacttggcataaaccactgatgcacatatccaaagattctgtatagcaacgcgtaccatctaagaccttaggtgctagttcaacaaccagggttgttcctttggcttggcacttgagtgaacatgggttgtcagggtcattagacacaggaagccattcataaaactggccatggtgcttgacatcattatgagctgagcattgctgagctcggaaatcacctgcttctggtgggcagtccacattactgcatgttctgtatcggatatttcttccttcacagctcttgctgctcaggcagcgcctcagagagttggcggccccacccccgcaggtgcgtgagcattcactccatgggccccaggcatcccataggccgtc

SEQ ID NO: 151980 - DNA, 757 bp, Homo Sapiens
  misc_feature (484)..(524): n is a, c, g, or t
gcacgggttggagaaaacaacaaggggcgggaaccacaaagaacggtttcctttttgtaccctttggggggccagggttccctttcgggaagccccccccataggggacccgggaaaacgtttttttggaactggaatgccggaactgaattttcttgggtttcgaggtttaaggggattcagggattgcagaacccctcgttaatgggatctagagatgggaagaactggccggccgaggggctgcaggcttgagaggtgcaccccggcgggcccgcccaccggttagcagggaagtgagatctctcagcgtgttgccttctttgacttttgggtcaaattctgcagataaaatgcggtcaattccaaatttgaggtctttgctggaggggtccggggcagagccactgtgttgggggttcggaaccactcgcgtccccgaggccgggggctgcagggcgccagcccggggcggaggcggagnnnnnnnnnnnnnnnnnnnnnnnnnnnnnnnnnnnnnnnnngggtgatggtggtggtaggcggctgagagcggagacagccgctgcgggaagccagccgggacttcggagggcgccaccactggggtgggtcgaagcggggatctggccgccgcttggaaagaggcgtgcgggtgaaccgagcccaagtgcgcggtgagggcggcggccgaggcccctgccaggccctccggggccgcccccagatcccccacgccggcgtgcagaattcatcg

SEQ ID NO: 151981 - DNA, 853 bp, Homo Sapiens
ctaaacagatgcatttaatgggaaatcttaagcaggggtggcaggagctgcgggctcagttggcggccaggatcttctgcacccaggtatgagcttggtgacacgggcgtacacagcgggcgtgtggtagagcaggtgcggctgccccaggacacaatgcccaccagggtccaggctccgtccttctggcagaccagggggcctccagagtcacccatgcaggaggagacgccactggccccggcacagatcatcacgtcggtgatcctcctgccccaggacttcttgcattcggcattggacaggaggggcagggctgcctgctgcagcttgtcaggggtcttgttggcgttgtacttggtcttgccccagcctgtggtggcacacagtgtccccgcggggaagtcgtcgtcggcgctgggcaggcacacggcggacactgtctgggagaagcgggcaggtgtggccagcttcagcagggtgatgtcattgttcacggtcagaatgctgaacttggggttcttgaagaccttggcgatcttcaggacctggatgttctcctcgtcagagccctggtcaaactccccagccacgaccacgtcggaggtcctgaccccgcagtgggcagcggtgaccacccagtcctcgctgatgagggagcccccgcagaagtggaagccggttttgtcctgcagggacacctgccagggccaggagccggggacggcgtcctccccattcacgatcctggacaggccgctgagcacagggtggatggcggggaccccgcagccaaaggcggcccccacaagggagaagcaggagaggagccagagggaagccatgccgctgc

SEQ ID NO: 151982 - DNA, 1452 bp, Homo Sapiens
  misc_feature (507)..(552): n is a, c, g, or t
  misc_feature (668)..(729): n is a, c, g, or t
  misc_feature (782)..(791): n is a, c, g, or t
  misc_feature (934)..(934): n is a, c, g, or t
catctccactgcccctcggcctgtctgtgccctgcctctcagaggagggggctcagatggtgcggcctgagtgtgcggccggcggcatttgggatacacccgtagggtgggcggggtgtgtcccaggcctaattccatctttccaccatgacagagatgcccttgtgaggctggcctccttggcgcctgtccccacggcccccgcagcgtgagccacgatgctccccataccccacccattcccgatacaccttacttactgtgtgttggcccagccagagtgaggaaggagtttggccacattggagatggcggtagctgagcagacatgcccccacgagtagcctgactccctggtgtgctcctggaaggaagatcttggggacccccccaccggagcacacctagggatcatctttgcccgtctcctggggaccccccaagaaatgtggagtcctcgggggccgtgcactgatgcggggagtgtgggaagtctggcggttggannnnnnnnnnnnnnnnnnnnnnnnnnnnnnnnnnnnnnnnnnnnnntaggaagtggtcccgggagatttggatggaaaagtccggaggattgacagcagacttgcagaattacatagagaaattaggaacccccaaatttcatgtcaattgatctattcccnnnnnnnnnnnnnnnnnnnnnnnnnnnnnnnnnnnnnnnnnnnnnnnnnnnnnnnnnnnnnnataccccttcctttaggctgtattagtgcggctcagaaaaccaagacttaaannnnnnnnnngatggttaccgggggggcaggtgcacaaacagcaaaatacgcacgacagccagtcgtgggagacaccccaagttccttgcccccccgccaatttctatccgcccgtgaatcgggcatctcgggtctttcccactcttgctccncgtgtgtgctgtgggttggcagctgtgcagggttggaacgccctccgtggcggggccaacgtgcgccccttgaacccctccttgtggcagaaaatcccagagagcgggcagtggcgcacaagaggcccaaataggcccgggcactcgggctccctgcgggcggcaccagccgcgctggggcccccccagagaaattccccgcgaaggcgccgccaaggggcgcgcgtagttcagcgcaccgaggggcctcccctacgaggtgcgccacaggaagggtgtgcctccggaagcgccccacaagcgcaagggcgcgcctcccgtggacgtggcccctgcagcgctttcccccgcgaagggcgacagcgggctttacccgcgagttgctgtctacaccccagcaggggcgtccccactcagcgcttggcgcccacggtcttggcccgcccttccggcacccatctgcgcggcaccctctccccctctctcccctcggtggccatttcttcggcccgcccctt

SEQ ID NO: 151983 - DNA, 883 bp, Homo Sapiens
tctgagagatctttattctttattcaggatgtgggatcgatcaagcacttgccagctgggccttgtttctagtggcttgctatggtctcctcaatccagtcgatgaagcgggagactcggagtgaacaccgtgggcttcctgcgggtgttgcagccaaaggcagaaacaaagctggtcacgccatggacctgccagccaccatcctctgtggggcagttgaggggtcctccagagtcaccgttgcagccggagcggatgtcccctccagcacacaccatggtcttcttcacggaggaaccccaccagttccacctggagcagtgttcatagtccaccacgggcagcagggcctcctgcagcttgtctgggagtggcccgttggtatagagacggccccagccggtgatgtagcagggtgtctcgttgggaaggatgtcaccagcgggagggagtgaggcgagctggacggcgtctcccagctgggcgctgcgtgagagcttgatgagggcgatgtcgttgccacaggccacacacgagcggttccagagtggatgcacaaagaggtccccagagttgatggggatcacctgctcggggccctccttcacagcacggtcgtactcgcccaacaccacctggtaggtccaggagctcgagatgcagtggccggcagtcacaacccagtcgggggcgatgaggctaccgccacacgtgtggtagaagcttccacttttctcatactgcagggaaacctgccagggccagctgtaggggaccgcatcctcaccattgacaacgcggctggaagggcgagaggaaggtgggccatagcctgaggcaacggccacaaggaggagggaactgagcagccggagcatcatg

SEQ ID NO: 151984 - DNA, 770 bp, Homo Sapiens
ttggatggcctccagagggtccatgcggagagcctcatgcaaaggccagggcccttctttcctccctcgcctcctccgtgccatctatcctcctccggccacttcctatttgcgtcaccttctggcggctgctccttgtacctgccatctgctcgtccattacgtccttctccgccaggccttccttcaccaccacctcagcgctctccctctcagccacggctgctgagacggtggcgcactttcctgtcttcaccgtcctccgcctcagcctccgcccccgccgtcagctcagacgcggatctctgggcgccacagatttctagggccttctctccaccctgaacgccctttttcaggctgcggtcggctgccatcaccacagaagcggctgccaggccttcggcgggaggctggccctcttcctgcccggctttgatcgccacatgaccgcgacccccaacaactcggatctggggagtaccgccacggcccgcggcatcctggggtacgcccccctcctctgaaggcggtggaggcgggagcgcgacagtctccgagcctccctcacccggctccgccatcacctgtgtcgcctcgctttggtcgcggagccttatgtactggtgtgcgtcctggtcgctcgggacttggtcagaaataatgatgctgtgggtttggaggggagtggtcctcttgaccccatccagccgctcatgttgctaacagtcggaccaaccgcaggcgaacgcccgttttcctcagagccg

SEQ ID NO: 151985 - DNA, 563 bp, Homo Sapiens
tcacacctgcagatccgcactccaagaagcccttgccatggcagagctccggtctctgctctggtcccggcaccggcactcacactggggaaggacctgcacggtcactatgtccgtgaagcccagcgcccggatgacattcgctgctcctggatgcactctgtggccgtgaccttcacctggaaggtgatctgcagggcagtgctgggctcaggtggggaccctcggtggccagggtggcagcccagcatccccacccgtcacgctccgtggcctctgcaggggtcctggggggttcaagcgtggggaggaaggggtgaccaggagcaggaagagctgatgctcagatccgagagccaaagtcagccggcaacgaaggtgctctgcccgcactcccgcactggccggcaccaggatctccccggccacacatcacgcagagacatgtgacacggcagacaagcaaatcaggagaagctgagcacactcccactcagaccacccaacatgagggaaacagttctggtgagaatccatgggacagctgggcgacctcggcatca

SEQ ID NO: 151986 - DNA, 826 bp, Homo Sapiens
  misc_feature (85)..(85): n is a, c, g, or t
  misc_feature (106)..(106): n is a, c, g, or t
cttgttctgagagttccgttgcggtgttgatctgctcgtgcgcgctcgctccgtgtcgatcagctgacattctgccagaacgatntgatgatgtggacgactcccntagatgagagacttggtgtccaggaagccactgcagaatactctgtagtgatctgatcccctgagacgtacagcaatctctggtattctctgtaagaccctcactgagttctagaaggagcgaaaattcaggaatatgcttgctgcaaaagagaacatgattaacaggtaaaagagaaaagacaatataggccacagaggaatagtgttaggatcaaccctgctcagcaggggcctctggagccctccctgctgtacccaagccagagctgagacatggctccccagatggactggctgtggtcaggaaaggcctgtagagggagctgagggctcagaaaatacctgctccgggtgcctgggctcaagttctcattccatttctttgatgccactggccactgtatctgcttttgtaaaaacctccaaaaagttatacatcgggtatctctagtcagcttcctccgctgcccacctcttgccacagatgagtgatcactgtgaatggtggtgaccaggtgggcagggcaggggcttgtctaagtgccttagcccaggcctctggcccatcgacctcgaaaacagcaatatcgcctccttcttagatccagttaccaagtcagtctagctgggtgggtaagtgctcagacagaacaggctggatgggaagggaagtcaacatcctaaaagtccaaggaggggggccaggcgcagtggctca

SEQ ID NO: 151987 - DNA, 835 bp, Homo Sapiens
catgaggggcggacatcaccactgagcctggggattcaagacaggccctgaaccggggcacacaccagtttgtggcttcccccaccaggccaggcccacaccccagggacacagcgtggcagagcgtcccagcccagccctggcatgggggcatccagagaaggcaggttaggctcacggctcccgcagggctgcagatggacacccatgggccctgcagagcagctggccatcccctgggccagacagtggttcacctgctgtgggctcagccacctgtcccccgaggggttccgcgcgcctcccccatatccccggggccacagctgatgcacggatacgagctctacgatcaagaagtctgatactggaatccatgattgagcatctggactgagatgcgggatgctctgacacctatttctctcttggagtccccatcgcccggagtgggacagcacaggacaggatggggtatgtcaatcagctccaagagtgacagcacagatgcacgatcaacatgaagactcatcagccgacaggaatactgatgctctcggcaaatgcctgtgcttcggactctcgcgagccaattacctggagcagcactcacctctggcacagctgggtccacaagacgcccgtggcagccgtggaaccactcctgtgtggaacgcggcaaggcagactcgcgtccctagcatactccgtggaagagcgacacaggcagctcggaagcaatacctctgggatgagcagacagggttccgtccacctgcccaggcaagagccaacagggcagacgacagctccgtatagctttcctgaggactat

SEQ ID NO: 151988 - DNA, 515 bp, Homo Sapiens
gctagctgagttcatttcattcttcccagatcaagatgaagggagaaggccggacgatgagaggggagtgaaccctgggcgtaatggttccacaccaagagaagttctgaaggtcaaggtccagaagccaagattcagctggtgcaggctgcatctctacaaggcagcctcagatgttcattgtcaaatgtgatgaaggctcgcattctccagccggaccaggcagttgaggaagtcatcgaagtccagctggagctcctcatccgcatacctgagcacaatcagctgcaggaggtggctgctcagctgaaagcctgcagctttcagtgcagtccgtagttcataggtagacatggtgccggacttgtcagcatcaaaccgaaggaaaaggttaatccactgcttcagcttgtcccagaacactttgaattcatcaaactccagcttcccattgccgctggtgtccatcagggaaactgctgtttttacaggagatcaggcttagcttcttgaat

SEQ ID NO: 151989 - DNA, 747 bp, Homo Sapiens
tgggtgcacctgctgtgttagctcaagtgtgatgggctctggagtgccccacttctgatctcaggctgctatctctccacaccagctgtgtctccctgctaaccacgctaccagagctgtgattgtgcccgctgagtggactgcgttgtcagggagtgagtgctccatcatcgggagaatccaagcaggaccgccatggaggaaggtcaatattcagagatcgaggagcttcccaggaggcggtgttgcaggcgcgggactcagatcgtgctgctggggctggtgaccgccgctctgtgggctgggctgctgactctgcttctcctgtggcgtgaggacacccccagctccatgtggtccccccaactcatggggcccttctgtgttccctccttcactggcactgggacaccacacagagtctaaaacagctggaacgagagggctgcccggaacgtctctcaagtttccaagaacttggaaagccaccacggtgaccagatggcgcagaaatcccagtccacgcagatttcacaggaactggaggaacttcgagctgaacagcagagattgaaatctcaggaattgaacgagaggaacgaagcttcagatttgctgggaaaagactccgggaggaggtgacaaagctaaggatggagttgcaggtgtccagcggctttgtgtgcaacacgtgccctgaaaagtggatcactttccaacggaagtgctactacttcggcaagggcc

SEQ ID NO: 151990 - DNA, 750 bp, Homo Sapiens
cgggatcaagctcatttcatgagtaagcgtgagagccgctctagtttcgctccaggctctgctgaagccagcagagaagtagcccaaagctcttccctctgctgacagcaaattttaggcatgagtcttgagaaagaagaaattgggtccagaaagggaagtgaggagaatcagatcccagacctttggggagaaggagcaaccgcctctggcacagcccatcagggagaaagagcaggttgagaagagtcctaatgctaacagccccaaacaggtgggtgttgctcagtctccctgaggcatgtggttgtaaggcagaacccacatgaccttgcaggaagaaggctctcggggccatggcccaggtcagcatcaacaatgactacagcgagtgggactatgagcacggatgccggggagcgggctcggcgtgtctgcagatgtccctgtgtggacacagcccccaagagtgagtgggaagcctctacctgggggtctggacagaggcaccacgttccacacttggtggccatctatcatcgtcgtacaacgcgtgcctgggtgcagggttactcaacttcccagcagccttcagacactgcggggggcgtggcgagcaggcatcgcactgcgagatgggtattgctggttttcatcatcagtggccttgtcatcctggcctactgctcccaggccagcaatgacgaggacctaccaggaggtggtatgggctgtgtgtggcaagctgac

SEQ ID NO: 151991 - DNA, 1397 bp, Homo Sapiens
  misc_feature (1072)..(1072): n is a, c, g, or t
  misc_feature (1077)..(1077): n is a, c, g, or t
  misc_feature (1253)..(1253): n is a, c, g, or t
  misc_feature (1283)..(1283): n is a, c, g, or t
ttctcgggatatgaactctcccgccacccgggaacagtggctgccaccgtttgtgttttcccgagtttgaattcttgcaggtgaccaagatggagttttctggaagaaagtggaggaagctgaggttggcaggtgaccagaggaatgcttcctaccctcattgccttcagttttacttgcagccaccttctgaaaacatatctttaatagaatttgaaaacttggctattgatagagttaaattgttaaaatcagttgaaaatcttggagtgagctatgtgaaaggaactgaacaataccagagtaagttggagagtgagcttcggaagctcaagttttcctacagagaaaacttagaagatgaatatgaaccacgaagaagagatcatatttctcattttattttgcggcttgcttattgccagtctgaagaacttagacgctggttcattcaacaagaaatggatctccttcgatttagatttagtattttacccaaggataaaattcaggatttcttaaaggatagccaattgcagtttgaggctataagtgatgaagagaagactcttcgagaacaggagattgttgcctcatcaccaagtttaagtggagttaagctggcgttcagagccctcagcaacacacgcgggcgggaggccagcaacgagcaatgatgtgcacggagggcacgcctgatcgacgcggcggccgcgtccaacaaaacgaagaaggtgaggtccgaaagccccaaaacctaccgagaaagcgaactcccgcgccgccaccggtccgggagcagcgcgtgcttcaaagcccgagcaagtccgcctgaggcctcaaggcggcaccgagtactcatgcacggcgaagacctgcgcctcacgccgaatgacgaccacaatcggacggaatgcgcacgacgagcctcgtcgcggtgtggtgagcggtgatgatgcgcggccgcggtcctgtcagctcacacgcgacgagaggtgatgtgcggctgccgccaacaataccctgtacgccagctcacgcgcgccctgacgcgacgcgcgcgaatctgttntttgncaggagacgggtcgtgatcgcacgcgcgtcgcgtcaccgccgggtggagccccgacggccctctgccgatcgcgcgtgtcacgacccacgatcgcgtgacgctgcgcgtgccgcccgctgcccgctgtcgtcccgaccgaacgccaacaactcacaccaacgccctgaggaaaagnactaggtgagtagtcgacgatccagaatanaacgagacaagggaggcgttaggggaatacctagaacccaaatatggtggacacaacaccccatccctccgccagtatcccgaacttagacatagactggctgcaaccagaagc

SEQ ID NO: 151992 - DNA, 1257 bp, Homo Sapiens
  misc_feature (61)..(107): n is a, c, g, or t
gtgccaagctaaaattaaccctcaactaaagggaataagcttgcggccgcatacgcggtcnnnnnnnnnnnnnnnnnnnnnnnnnnnnnnnnnnnnnnnnnnnnnnnccagccgttaaaagtcttttattctttgtaaacagcctcatgaacatgcaaagtggcagaagcatatttggaatctgtgtaaatacttgccttctgctcttttcctagccagagagctcttgtcagagctattagctctgctttctaagcagaagtttctgcagacacagacagtacctctactgctgagtccaaagtcaccgcggcatacccagctcggcagactccccttagtatgaaactgcttccatcagtaaaatattcaatgtccaggtccccgaggggccaatctgttaaatctttccagcttgagaacactttatctaccacgtccacacagcaatgaaggggacttcctgtgtagggtccagccctacgggggcttagtgggtgttctccccgtgtgcggagacgagagattgtaataaataaagacacaagacaaagagataaagggaaaacagctgggcccaggggaccactaccatcaagacgcggagaccggtagtggccctgaacggctggggtcactgatatttattgcatacaagacaagggggcagggtaaggagggtgaatcttctaagtgattgacaaggtgaagcaagtcatgtgattacaggataggcggcccttcccttttaggtagccgaagcagagagggaaggcagcatatgtcagcgttttcttctctgcacttgtaagaaagatcgaagactttaagactttcactatttcttctaccgctatctactgcgctcttcaaagaggaaccaggagtacgggaggagcatgaaagtggacaaggagtgggaccattgaagcacagcaccacagggaagggtttaagcctccggatgactgcgcgcaggcctggataatatccagccttccacaagaagctggtggagcagagtgttccccaactcttccaaggaaaggagactccctttcgcggtctgctaattaacgggtgcattcccagacactggcgttaccacttgatcaaggagccctccagcggccccttatgtgggcgtgacagagggctcacctcttggcttctaggtcacttctcacaatgtcccttcagcacctgaccctgtgcccaccggttattccttggtaatatgagtaatacatcaaagag

SEQ ID NO: 151993 - DNA, 592 bp, Homo Sapiens
aggtgagccatctgccacgctggcataagggcagctagagggctctttggtctagcagtaacgccagtgtctgggaaggcacatgttactcagcagaccatgaaagggcgtctccctttccttggaggagtcagggaacactctgctccaccagcttcttgtgggaggctggatattatcccaggcctgcccgcagtcatccggaggcctaacccctttctgtggtgcttcagtggtcacacttcttgtccactttcatgctcttcttgtcctcctggttcctctttgaagtttgtagtagatagcagtagaagaaatagcgaaagtcttaaagtctttgatctttcttataagtgcagagaagaaaatgctgacgtatgctgccttctctctctctgcttcagctacctgaagccgctttcttgtctatgcctgctctctatctgctcaaactcctccgaggccagcaccatcccactgtctgtctggttgtccacagagcctttgtaggtcgttggggtcatggggaattcctcaaatgtcttcatcctggaggaaccacgggtctcagcccctctggccaggcacccgg

SEQ ID NO: 151994 - DNA, 942 bp, Homo Sapiens
ggtggaagcagcgtggattttactggtctgacagccagggtgtctgagcaggtagtgaatttgagtgtcacctgtcgtccggctgcattgtaaggcacttgtatagtatgcagtggtgcctgatattgtcacagcattctggttcacccgccgacgtctgtgccatggccctccggctactgctggccagatgtgcatagttgtcctgcaaggctgaagctgtctgggtttatcacatgcccaggaacaagcattccagtggctctaggaggggtcggcatgggttgtggacatggcaggcaggtgccacatgaacttggggatgccctgggccttgggcagcgacgtggtggaaaacctgttcctgaaggcaagccttggcttatcccatgtgccaaacttcttaggggaccagctggccctctgtttctggaattttaaaaggggtcagtgaccctggtggacaatgtccccaaagtctcatctcagggtaggaatgtggtcagacagctggctctgaaccagcaaggaagggtgggcaagtaggaccccaggcactccatcaccacgatggcctgggtgtgtttgtgtggcctcattctcttcaccaggtgggcatggggtatctggcagggactaggcaggaatcaagcccggtgtatactcacatgcactgaaccctatgtagaagggattaggtcctgggggccatagatggcggttgctgggcctgtgtgctcggggcagtctctccaaaggcacagatggggtttctgaacaggacctggttccatctgggggcttcatggacaggagtggtgcttttccaggcctcttttccatatgccagctacaggcccaggtttccaagtttctggagcccctcttccagccatggcaagcatggcgtgttgtaggggaagacgtgaagcctacaggcag

SEQ ID NO: 151995 - DNA, 994 bp, Homo Sapiens
  misc_feature (42)..(42): n is a, c, g, or t
  misc_feature (119)..(119): n is a, c, g, or t
  misc_feature (166)..(166): n is a, c, g, or t
  misc_feature (332)..(369): n is a, c, g, or t
aggggcaccaggatccatggatgtgcactgtgctgtgtgggncctgagggcaggggtgggggcagagatttgggagctgtctggggccttgtcctgagctgcctgtgccctgcctctgnagtccaggccgaagtagatggaattaggcatcatctccacagttatntagggctgaagactgctcagaggaggaagtggggagaggaggaggccttgggctgggctctgggctcctggacactcctggtcccccgagggctgggctcagcccaggtctctgagtggtggcagggccactgagtccaccaaacacggtcctgggcttcggcacnnnnnnnnnnnnnnnnnnnnnnnnnnnnnnnnnnnnnnatggttccatggcactatctgatttgggatccagggagccctcttcggtgcctgtctgtagcaggcgtagaatgcgtttccggtgccctgtggcgctgatgcccaactgcttcaactcctcgtggcccaggccccgggctgcacctgctgtagccaggccatgccgtcggaacgtgtctgcatactgctccaggtgcaccgtggccagccacacagcgatgtccaggtcctgaggggcagccatgggggctcaggccattgctggggggaggggcagggtgaagggagggctcaggctgagaatccccctctctgccccagagtctgaggcctggacagtgagcaccagcctccaatcttcctccaaagaaagatgctgaaaggcctgcgatctggaagcagagccatcccagaacgacacgctatggctctctatcttacggcgaatgggtactgtcatgttgaagttctaaggataactcgaggcccagacgatggtggaacggggcttgccccaggcttcacagtaagtcagtcgctagagttcgcccctcagttcctgcgcaactcatgggtctgggtcaaagctctggctcctgccatgacctgcacatgccaactcgag

SEQ ID NO: 151996 - DNA, 1309 bp, Homo Sapiens
ttggggaagtgcaaccttctgcctattcagcccctctgctccaacggaagctttttctcaggagttaatctctaataacaagcagagtgccctctggagcctcctcgctggtatctcagtgcctggacagagggggacacaccacagcacaaacacgtggcacagactcaatcccaacacacagccagtcaacgagcctctggccccttcctctgggtcctgatacagagctggcagcgagggcctctgaagaggttacagggagcccaagggagtgtcaggtagaggcagcaccaggtcccggagggacagatgagggatccctagtaaacagctcgtggacgcacttgactagcagttcgaaagcaaaaagagattcggattacaagagacttttcccttgcaaatggaagactgtatttaaatgcatattgctttagctgggcagtctccaggaaggagctgattgttagtagaggaattgttatgcaaataattttccctgcagtttctactcttatctattttctcccatggaggagaaatagaaatgattcctttcctgactgtagtcaagatttagggtcatgtttgtttcctcaaccaagaattcaatggtcttggttcatggattgggggcaggtacagtccaagttgctacgtgacagatgtgttaaaatatcttggattacctggataatgactgccccactgaagaactcaattatactggtatagtgagaggcttaatttcacaaaggttttgaaagagttctgtatctttataactagtaaagatcccgtcaggctctacttttgttcaactatgaacatacgctggattgaggagttcttaattctcttgtcttaagggacaattcctatgttgatagggtttgccttctgccatgaagctccaagtttgaaatactctatgaaaatacttaacacatgttactaattaccctacagagttacttaaactcaagaacagttacaattcaagattacatcactataatttacttcctacttcctacatgttacatagtctccttgcttcgacttccttgttttccactttcttcattaaaatttgttttaactggagtctttaatcaaagggcaaaagtattcgtaagactgaatgcaaagacaagaccacaacccacaagtgcttgcctttgtcaaaacgtgacatgtttaagtggcttaatacagctctatcgactgccctcagtggaaggggaacactccaaactagtcagcgacaggcttgacgttactcattcacatagcacattgttct

SEQ ID NO: 151997 - DNA, 792 bp, Homo Sapiens
  misc_feature (60)..(60): n is a, c, g, or t
  misc_feature (67)..(67): n is a, c, g, or t
aaacatctggttgcacagcttacactcgtggttgatgccttcctaaatcatgtggttggnaacgtgnatttggatctctctctcgttctcgaaggtcatctggcacttgatgcactggtatgtcttttttccggggcactggcgatgtctgggtgcctttccggggcccactggtctccggcgtgaggtcacggtggtccacctgcatgtggctctccaggtcttcggcactctcaaacttgacactgcactcggggcaacggaggccggcacagggccggtcggcgggctcgggcgggcacaggccacccacctgtccgttggcgctgcgggccatgcagccggcgcagaggccgtagggcagcccattgacgtcaagcttcaccaggtcctgcttgctgcggaactccttgaggcacagggcgcacttgtagagcttctgcagcccctggccattgggggaggacgccgctgagctgcccgccagcttctgcatgtggaaggtgccatggatcttgagctcaagcgtggaagtgactgtctgcatgcagaccacacagcggaagcccgtgagtgagttgcgcaggtcagggtgcatctggcagtgctcaataaactcctcctcgctctgcaggggcatcttgcagatgcgacaggtgcccgtgtccaggctcttgctgtgggtcaccttgtgttcggtgagcgtcagcagcgaagggaagcgctcaccacagatgggacacatgtagtgcttggcagggccccggtgcgtctgcaggtgctcccgtagcc

SEQ ID NO: 151998 - DNA, 895 bp, Homo Sapiens
cacccaaaccttcgggataaaaaccccaaaaccttagcctccttaattctctctttctagctggttttagttttggcagaagtctttcacagatgtattagaagggccttccaaaaaaattaatattcccatagtatgccctagtagtactagagggctcagtgggtggaaatccaaaggcattgacatgagacacttgatcttcaaccccaaccttctgctaagacaaagcatgcctctgtgtataaaccacctatggaactgagctttactaaggtctagttggactgttcccagtaggatcttccagaaaaaattttccctcttttaactgcgttatcagttccaagaacaatcgcatctccgattttggttgtactacccaataaggtttctattgttttaagctggaatttgcttccgctttcatcagggtgagaacctatcaccggaggagtaaataattcatgcctgtgggtcctctggtgcaaaatggtatatcgctcacgaaacatctctgctttatctcttggtgttccaaataaatttggtgcagggtggttggtcattaacagaggaagaaattttgtttctttctgaattgtacacaaagcgtggaatatcaaatgctcctatgatattgaaaacgtgctctatagtttcatcaacagactgactgcattcctggactgctgcttccaccacagatcgttcaatcatgtttgatgacaagggttgcttctcaactgcattaattatcttttccagtttatcttcaagctctaattcactgatagactgaagagcttctgtgaggtacttaatagcttcaccacggagcagcaagccccgcaacttgaaggcggagagcgcccggctccgcagccgctccggc

SEQ ID NO: 151999 - DNA, 615 bp, Homo Sapiens
tcatgcattgacctcgtggcccgctatctctgctcctgtcccccaggaacgctgggggtgctctgcgagattaatgaggatgactgcggcccaggcccaccgctggactcagggccccggtgcctacacaatggcacctgcgtggacctggtgggtggtttccgctgcacctgtccccccaggatacactggtttgcgctgcgaggcagacatcaatgagtgtcgctcaggtgcctgccacgcggcacacacccgggactgcctgcaggacccaggcggaggtttccgttgcctttgtcatgctggcttctcaggtcctcgctgtcagactgtccatgtctccctgcgagtcccagccatgccagcatggaggccagtgccgtcctagcccgggtcctgggggtgggctgaccttcacctgtcactgtgcccagccgttctggggtccgcgttgcgagcgggtggcgcgctcctgccgggagctgcagtgcccggtgggcgtcccatgccagcagacgccccgcgggccgcgctgcgcctgccccccagggttgtcgggaccctcctgccgcagcttcccggggtcgccgcacgggggccagcaacgccagctgc

SEQ ID NO: 152000 - DNA, 355 bp, Homo Sapiens
cggctggcccaagccgagtgtgtgctggaacagttcggaaatgaggaccaccatgagttcatctggttccactccatggcctccaggtaataaccttggagagagtcagccagggtctggtggctgcgggcacgggcatctcagctccactggttcctccattcagcttaaccagcgcctcccaagcagctgcctatagctggctctataactgagcctggggaagatagaggaaagtcacgtccctgccttcaagggtctcgcagacaggtggggaggcagatggtgaactgtgggtacctagaacagcagaagttcactcaagctacagaaatactagaggagggtagctcat

SEQ ID NO: 152001 - DNA, 858 bp, Homo Sapiens
gcagagacaacctcattgggatgcttttaattacaaaagatgtaaaatgatgcattataaaacttggaagcaactttatacaaattccaatttttacatatggttgaacaggttgccctgggggttaggacactggcaggaagtctgattagttgctgggatggtcccatccatgaagcactggacacatgctgggaaccatctgtgcataaatcagaagagccaagcacagagtgggaacaggaaaggtctgcaaatacgcatatggacttgaagatacaacaccagctcaggtaatatacagcaggcggaggagagatgacacaggagaaacaggacaaaggagaattcatgacatgatcaagaaaccccttctcctaaccccctatgtcctaaaacccacaaccatacagaaagaacaaatggaaatgcagacaggtttactagttctatgctgtttaactgctgtaagtgagagtagtacaatggtcgatttcttgtgacaaaactaacataatgaaaaatagtttactactgaagtatgcagctgcttcaagatgctgaggaccacagactggtttctgttacaaaggccgcagtgagtgcaggctcacgtgctgtgggccagggcgaccctggcccgtggtgagtcctccacacacttctaggcagagtgggtagtacgatgcccaaaaggctttcacaagataagatcggactcactcatagacctaaggacgaaattgaaattcagtgctaaaccatattgcccccagtgtacaaccacgccgataaatcactataccccagaggtctgtattcacaaagtcaactggagaacgccttggggcagtaagg

SEQ ID NO: 152002 - DNA, 1026 bp, Homo Sapiens
ttcccgccaagagcggggcccgccgagaaggaggagaaccgggctccgaggaggagctgggcccaaaatgtggaggcgccaggcgcgagacaagtgaaggacgagggagatggaggtcaaccttcagctaactggacggctcggggccaccggcgcacggtgcggggcgcgcaaagggcaaacacgggtgcagcagttcctgaagaaggcgctgcagggctgcgcaaggacttcctggagctgcgctccgccggcgtggagcagcctcatgtcatcaaggaggacctcatccttgccgcactaccacaccttcctacgacttcatcatcgccagggcgaggggcaagagcgggccgctcttcagcttcgatgtgcacgatgacgtgcgcctgctcagcgacgccaccatggagaaggacgagtcgcacgcgggcaaggtggtgctgcgcagctggtacgagaagaacaagcacatcttccccgccagccgctgggaggcctatgaccccgagaagaagtgggacaagtacaccatccgcgtaacacccgcctgccagagcggaaaccgggggtggggggagacactcatttctaggccccatcaccagtcacttgatttcgtgaccttgatttcttcccccaaatttaataaagatcagagggttctcatgattcacattggttgtgctattgctgatgttatgctttggttgcttggttggtcttttctgagtattttagtgttgccacctggatttgctgcattgctctgctgagctgtattgaaaccatgactgggcccactgttcagacaggaaattagaataggaggcacattttttacctggtggttatgagcatggacttgggggtccacagtgactgagtttgattcccgacacagcctcctccttgctgtgtagttttgggtaagcttattaaacccccatgcctcagtttggtcacctgtaaaaggaaataacaagagcacttactttataatactgactgggagtattaagtgaa

SEQ ID NO: 152003 - DNA, 972 bp, Homo Sapiens
acacagcccgtctcgcgcctgaggtctcgcccgcaggccggtggcgcggggtcaggtgctgtgcgtgcggctccaggacagggtcggttccggcgcgcagcgcccaggcccagctcgtccagatgtgtgcggacagcgcacgtcagatatcgcccatcttcggcgtctcagcagtgaccactgccgggattaacgactctccggtggagagactctcttttgaccaaaaaaaacgacaggttgtaattacgtgcttctgacgagcagcggcaggggtgcctctctttgctggtctcccctatacaaccaaaggaagcttcaatggtccgcgtgagaacacagagcatttttcccacagcaggtatggaggccgggacccacctctctacgagcttctcgtgcctcgtgcaagactgcgtgcgccttttggtaggaggggagcgaccaggagcatggagggaagccagtgctttttcgtggggcgctctggtgtgcgacgagagcgtgggcctcgtggcttgcagctttaatgtcgtcggcgttgcgacgccacaagactgttcctctcgttgggttctctcgtgagtgcccccagaatctccacggggaagacaaaagtaatattccgagccccgaggctctccacctaatttcacgtctcgcatctccctcgtgacaaccatgtgaggacgccctttcgtgattcctggatgaacccgccgcgccgtggcggggatgtaagcatatcgtgaccgcggttggggcgaccccttcttgccccagggcgtgtagcagtatttgtgcgaaaagacggatatcagggggcacgcaggcgatggccccaacatgtgtgggacgaccaagcctggtggcttctctccccccagttgaagaggtgcgcggccaataaatcacggagttgtgtcgagaaacaggttgttgcttctctggtgcgcagcgtgcgtaactcag

SEQ ID NO: 152004 - DNA, 844 bp, Homo Sapiens
ttcgagcttacttagaatcagaaaggaagaagactaaatggggtttttaaaacaatagcagcagtcataaaaagtctagcagaatgtaactctaaaccttgtagactgtcctgaagattcataatttctttccccagaagaattattcgttaatatgcacagtttaacactgaaatgtagctgtaattcaaggtaagcttaggaacttcaccctctaagcacagacttctatgcagcacatacttctataatcagtaaacttaattcacaaaattagcgcataagggtattaagtgcatgggaagtaaacacagttatgttacacttaaaattacttttgaatgattgataaaggatttcttcatgattgattatcttaagaaaatggaagtctgtgtaacttgaatttggcagggcatgaaataagtggtaaaaacagcaaactgataacttgagaatcattttcgttttactgagaatactttatttgctggtagaagttgctaaaaatgcacagaacaaataccaatagaaaatgcactgtatttgaatctccctagtctatataaaatgaacggtgtacagcatctgttggaaaaatggctgcatggacatttcttattttatgcccacttataaataaaaataaaccttttattcaagagtatataaaatctgggaattcatatccatatccacagagggtgtgtggtttttggcagagatgtactatgtcagaatttcatcttagcttgtcatgttctgctccttcattatttgtgttccacaaaggtcaaccaaatccagtgaactccaaacactcttcgcattaggatgagctgct

SEQ ID NO: 152005 - DNA, 2431 bp, Homo Sapiens
ctctcttaactcataactggggccaaaggcagggtgacatcactggggatgccagtgtgtggaggctatcccctgaccagtcctgtccacagtcaggagggcaggggctgcagtgcacagaccgcattgttgtggcatggaggggggtcccacaaaggccttgtcagctcatgggaccacattggcagccagcatagtgacagaagcctcagataggcagtgagccattgccaagactccatggtcccttggtgtctgtggccaccaaacagatgacagaaccagcccctcttgttcagccacctgggaggctgctcccaagcctgttgagcttgaggatccttaaccactcaccagctctcttcagttccccttcaaatgctgttttatctcagcggaacgtactacgccctgtatttcctcgccacgctcctgatgatcacgtataaaagtcaggtgttcagctatcctcaccgctacctggtcctcgatcttgctctgctgtttctgatggggattctagaagcagttcggttatacctgggcaccaggggcaacctgacagaggctgagaggccgctggccgccagcctggccctcacggctggcaccgccctcctctctgcccacttcctgctttggcaggccctagtgttgtgggcggactgggccctcagcgccacgctcctggcccttcacggcctggaggccgtcctgcaggtggttgccatcgcggccttcaccaggtagctacggacacccgggataccccacactggggccctcctcctgggcctgaccagtcccccagctgtcacctccccattcctggacaggaagggcacttttcctagtgactggccatagatggttctggatggttccatctgttctggcaggagtgggagcaggagccagggcagaacaaactgctggaggccctggtgtagggaacagctgcggggagggtagggaccagacagaactgccttcaagatgagtccaggagcgcacactcagccctgtcagtggggtctggctttagcagccaggcctccacagacccccatgggcccccaggccgagagggaggacagagcccttcagaacagaggcctcatctcactgcatcccccatcaccccctagttccccaatggtcctaatttgtgttctgagatcccagtttactccgtggccaggccccacctgtgtttccaagtcgggctggagacgcaggaatggggtaggcccttgtgctctgagcaaccccagctctgcctcacaggcagggcaggcccggtgcaagagtggactctgggttcctaaaagcaataaatgcaaacaagccaacagctctgctgcctagcaatttccatcttagccacacttctcccttcagtgggcttcggaggagaggtcagggctaagtgccggggatgagactgcaggagagagagcagctggaggggcacattcggagcctccgtccactccagttttatcagctttttgcctttttgcactggagtgctaaacaaattctagctctgtgtttttttcccattcccagatttactatcagttctccttaaaaagtatctaagctgttacagtagctttcccttcacttgattctattgtgtgttttctatgtttggaataattacacccaaatatctagatattttctcttcaccgcatttttgtaaataaagagatgtgtatgcctcaaaaaaagacacaagaaaaaccaacaacacataaaagaatcaaacaccgcatgaacatacaaccctactacacgctacaaacccgactgagacggaggacgagaaagagacacagaggacgagcagcagcgcgtagcgcgtagccgagagaagtaagcgcagcggacgcgagggcgcgcgggtgtcgggagttctgtagtgtgaatgactcgtgaggtgaagtagtgacgaatctaaaagaagagagagccaacaccccgcgggacaaatgcacgattagaggcacacagggacggtgccctcttggtagaagtggcaggctgaatcaactgatcgcagcagacctaaggactgagcgcgccatccgagagtacacacaggagggacggcgggagagcaggtgccagcacccaatcagtgctggagacggccagatgagcacgcgaggggcgagggaaacagcgagccaactagttaggaggagaggggaaagacagtacacgcgcggggcgagcagcccaactggacagtaagatagataggcacaggtagcagcgcagcagataagtaaaactaacagaaccgcgaggagggaagggtagtcagtggtaaggcaagcgcagacaagagaaaacagcgggactggagcagcgcgaaaatcaaccattgcaggacacggtagcgtaaacacagaaacat

SEQ ID NO: 152006 - DNA, 743 bp, Homo Sapiens
  misc_feature (21)..(21): n is a, c, g, or t
gtatataataaatattagctntcatggactctgtgaggaaccaactgtaccaaggggaaatatttactatttcactttcttacctgctgggggccaggccttgatgtagcctgtgcagtggaccaccacgaagtgaggttccccatcctttacagagccaagtccattcctgcatctgttcctcacaaagctcagcctattcacagaaactgggtccacagagctactgccacacctcattcggcaaataaacgatctccttgagcccatacacattctcatggaagactgctgaccttcctttttcactgttccagtctttagatccaggatacgccctgtcagggcattttctgaagtggaaagctgctcacgaagtttatccacatcatctgggtgcacctgatcatagagtgtgctgccaaaccattcagactgtggctggttcaaaacaggagtcacggagtcagagacatacaccaccctgcctgtctcacatgagacaataaacagaaagccatctgctgcctccaagatcaaatgtttcagttcctgatcagtgaggaaagacggcttataggagccatacagtggatgtgttgccagttccccgcaaggacttcatgtgagaaactgccatgcgtaagatggttagcttgtctggttttcgagaccagggcactaacaggtgggtaccatatctgacagttctgtgatgtaggctgtcatcttgttccgtcgcc

SEQ ID NO: 152007 - DNA, 1208 bp, Homo Sapiens
atccctacaaataaagttcaggaaggactctgaattctggactccaggaaaacccatggccatgaggttgatcctgtttttgggtgcccttttggggcatatctactgtctagaaacatttgtgggagaccaagttcttgagattgtaccaagcaatgaagaacaaattaaaaatctgctacaattggaggctcaagaacatctccagcttgatttttggaaatcacccaccaccccaggggagacagcccacgtccgagttcccttcgtcaacgtccaggcagtcaaagtgttcttggagtcccagggaattgcctattccatcatgattgaagacgtgcaggtcctgttggacaaagagaatgaagaaatgctttttaataggagaagagaacggagtggtaacttcaattttggggcctaccataccctggaagagatttcccaagaaatggataacctcgtggctgagcaccctggtctagtgagcaaagtgaatattggctcttcttttgagaaccggcctatgaacgtgctcaagttcagcaccggaggagacaagccagctatctggctggatgctgggatccatgctcgagagtgggttacacaagctacggcactttggacagcaaataagattgtttctgattatggaaaggacccatccatcacttccattctggacgccctggatatcttcctcctgccagtcacaaaccctgatggatacgtgttctctcaaaccaaaaatcgtatgtggcggaagacccggtccaaggtatctggaagcctctgtgttggtgtggatcctaaccggaactgggatgcaggttttggaggacctggagccagcagcaacccttgctctgattcataccacggacccagtgccaactctgaagttgaagtgaaatccatagtggacttcatcaagagtcatggaaaagtcaaggccttcattaccctccacagctattcccagctgctgatgttcccctatgggtacaaatgtaccaagttagatgactttgatgagctgagtgaagtggcccaaaaggctgcccaatctctgagaagcctgcatggcaccaagtacaaagtgggaccaatctgctctgtcatctaccaagccagtggaggaagcattgactggtcctatgattatggcatcaagtactcattttgcctttgaactgagagacaca

SEQ ID NO: 152008 - DNA, 1166 bp, Homo Sapiens
  misc_feature (164)..(164): n is a, c, g, or t
  misc_feature (276)..(276): n is a, c, g, or t
  misc_feature (292)..(292): n is a, c, g, or t
agggtcatccccttggtgggcccggggccgtttcaccaaaaagccctccggggaatttcccttgatttttttcccgccccaatggttccagttccaaagtttttgctcgttgatgaagttgaactcagcaaagttggcgctcctcgatcctccagaatactttntgcacacccaggtcagggtcactctcccccattcaagggggacagttattcagggcgtcctcgtagcaaaggcaccagcctctcctggggaggtcttccagacgccctcggnccaccttccccggccntgctttcacgcttctccaggacatcgggatccggctgccgggtcgttgttctgagctgaggggaagtggtgcagctgctccaggtgcaagatctgccgctgcaggacctgcgcctccatctcgctctgggcctcctctttctccgcgcgctcccgcagcaagcccatcttggccttcgcctcctccctgacggcgtaggcagaggtggaggagaggataagggtgctgaccaggtgatgcaggtggtggatctccttctgtcagcttgcggtccacgttcagatagcggttcctgtcgatccgcagcagatccagctcctcccgcagggccgcattccgtaccagtctggttgtcaaagtgacaggtgaccctgtccaactggttcttctaggatcctgatccttcgcctgatcttgaccttctgatccaggatgaatcccggggacctgacattcttactgtgggtaaagatccgcgtctcccactcctggatctgcttgtccagggccctggtctgctcctgcagctcctcgatctccgcctgcacctgggcccggcccttcagcaggcggtccatgttctccagccgctgactgtcccgaagccgcttgacctggttctgggctgcgctgatctgcacctggagatcgccccgtacctcctccaagcgccggatctcctcaagttgcttgttgatgcgctggtggacttccttagcatgtaggcccgcctctccccttccatcactttgcattgtcgctgcagcctactcagctcccaatccaccattccctccagaaatgcctcgcttccctcctcggagcgggcgctccctgccaagcgtcccaaaggcatcctggccaaagcagggtg

SEQ ID NO: 152009 - DNA, 915 bp, Homo Sapiens
tttaagggctaccgcagtgcagctgggtacagtggggagagggagaggagtgacccggaacacagaggtgaccaacaaggagagcaagaggaactggagaggggagggctgaatggagaaagatgatggggaagcaaggaccaggacaagggttgggggctgggggaggcctgcggccaggagctggtctgaggggcggtgcgaggcggaaggatgggaagagcaaaggcagaagggagcttggcaccacatacgttttgatcatggccttgagggcgaccttgcgctcccgatctgcaaacttgtccacgaggtagccagacatgcagggtgcatggcagtagagccggaaaaagcggtggtagttgcccagggcccaggctgtccttaatgccaaggcgtgggccacgcaaggatctgccttcagttctcgtgtgaggtatgccagctccgtggtgatgtctcccgagttcttggtgaagatgtagtagaggattcggtaggcagtaaactcgcccacattgccaggcaagttctcggcgtacagcgacttgagctgcagtctggcactggttaaactcttcatggtcacccttctccaaggcgatccgggcatgggtctcgtacacctccaccgtgaactcggtgcggatgccctgcaccgtcagatcctgccggatcgacttcatctgctcgcaggcaaacgcgtagtcctgcttctctttccagtggcacttgaccatgcacagcgactttttcaaaactgccacagggcgcaacggtggacgggtcgggggcacaggtgaggcgcaggtagtgcattggtgatgtcagggcaggtgcccacgatctgcagctcctgccagtcagggtcagccccactgctctccaggctgctcaaccgcatcacccgtt

SEQ ID NO: 152010 - DNA, 1083 bp, Homo Sapiens
ggggcctccattccgttgctctctcagtctcagacccgggctctcggtccgccgcttcaggtcttggcgcagcctcagagagttggcgcggctctgtgttgaccaaacctagtggatgcagttagcgccggagcccggccccgcccgtcaccagggttattcccgccttctaggtttgccaggactgccggccctgcagctgccttctgccccaggtttttggctactgatgttacgaacaataaaatattggagcatagagttgaagaacagactcaaaccaggtttttatttaattagttaaaaatatggatcctgagacaaggggacaagagattatcaaagtgacacctcttcaacaaatgcttgcctcatgtactggagctatactgacatcagtaatagtgacacccctggatgttgttaaaattagactccaagcccaaaacaacccactccccaaaggaaaatgttttgtatatagtaatggactcatggatcatctatgtgtctgtgaagagggaggcaacaaactatggtataagaagccagggaaatttccaggggaacattggatgcatttttttaaaatcattcgaaatgagggcattaaatctctatggagtggccttcctcctaccctagtgatggcagttcctgccacaagttatttattttacctgctatgatcaattaagtgctcttctgagatctaagttaggagaaaatgaaacctgcataccaattgttgctggaatggtagccagatttggtgcagtaactgtgataagtccactagaatggattagaaccaagatgcagtccaagaagttttcttacgtggaactgcatcgattcgtcagcaaagcaagtatctgaagatggctggatttccctttggaggggctggctcctactgttcttagagatgtacctttctcaagcaatgtactggtataactatgcaaattttcacagaagtggtactgtgagaaatctgggtctatatgcagcccacacattagaaccacttgtacctacaggggcatggctgggtcacttggctggctgttcacctttccc

SEQ ID NO: 152011 - DNA, 1548 bp, Homo Sapiens
  misc_feature (935)..(935): n is a, c, g, or t
tctttcaaaatgaaaatgtccgtgattttaggaatcattcatatgacttttggagtcattctgggaatatttaaccacttgcacttcaggaagaagttcaacatttacctggtttccatcccggaacttctcttcatgctctgtatctttggataccttatatttatgattttctacaagtggctggttttttcagcagaaacctccagagttgctcccagcattctgattgaatttattaacatgtttttattcccagccagtaaaacaagtggcctttacacagggcaggagtatgtccagagagtgctgctggttgtcacagcattgtctgtccctgtcctcttcttgggaaagccactgtttttgttgtggcttcacaatgggcgtagttgcttcggggtgaaccggagtggctacacacttataaggaaagatagtgaggaagaagtttcattgctgggaagccaagatatagaagagggaaatcaccaggtggaagatggatgtagagaaatggcgtgtgaagagtttaattttggagaaatattaatgacccaagtaatccattccatcgagtactgtctgggatgcatctccaacaccgcctcctacctgaggctctggggcgcttagcctggctcacgcacagttgtctgatgtccctgtgggccatgctgatgcgcgtgggcctccgcgttgacaccacctatggcgtcttgctactgctcccggttatcgcgctctttgcagttttgaccattttcatccttctgatcatggaagggctttctgcgtttcttcacgccatacgcctccactgggtagaatttcagaacaaattctacgttggtgcaggcaccaaatttgttcctttctcattcagtctactttcatcaaagttcaataacgacgacagtgtggcatgatcatantgctgtaaccaacaagctttcagatttatggagaatgaccatgttatagactttcacttatgtcagatttatgataggaaaaattccatcttcattactgccttatgacatagccaaataattctgtaagatatacctcttcctcatatgttaaatatttggtaaagtttaccaaatttgagatataaaaatttctttgggttttttatgatgagcaaatataagttaatgccaaacgttatgttaaagttattttttcaaatacaggattcggggagagaagccaatttcgcatggctagttgaaaatggtattagatacttatttcctttaaactttatttaaaacaaacaacagagttaatctgtcacctgaagttgccagataatattttccaacagctgaagtagggatagttccggaccaaatctcatgactcgggtaatcccaaaaattcacatgtattctggcggatctacaaactcatgtacctcacccacacccggacaacgcagccatgacagggcccgcaagccctggagccgcagagcccgaaccgggtctcacggcccctccgccccgggctccggctcaaccccgtccaaccccccga

SEQ ID NO: 152012 - DNA, 1352 bp, Homo Sapiens
  misc_feature (347)..(347): n is a, c, g, or t
tgtgcgtaagagtacgttaatagatagaaggggactagtacctcctcatggttcgatacgtctagcgcaagtagagagttaggttaggaagtactgtgacaaacgccgtgacaaagcagcataaatgtcggaagtggaaggtctctaccttatgcgtgtttgacgcccaagggcctaccgtgtctctccatggaactctggcggagatttacggtgaatgcgagagatgtttacatgttgaatatacaccacttcactggtcgttgagccacaaattcgcgtaggtgaggggcgtgcagcctcaaaagaagatagattggaatgacccctaaatcatgcgttaaagnttggtgaagaaattgtgtcccacatgactggattccactgaggggtttcgcctatttccaaatgcgggcccaaatgcaagatataggtatgggaggtgttcgcaacgcgcagttttgtcatttaagcgtgcccggttaccaggggtgacacgttcccctgtggtaggtcccgctaatgtgaattaggttgtggaacggccatttaatgtactacattatggggtccacagccagggatgctcttatgtgccagtggggggggttaacaggttacatttgtcggggaacccgccctggagagtattgggaaacagggaacctacgggggccttgtcattgatgtgttccgtgggcaatcttcactttcgcaacccgtgaagtcttcttggggcagggcaagcccatccagcagctaaaggctagagtcagaaggagagggaggagatggaacggctgccgttccacgcagtccctccacgcccttcagcacacagggcctccctgtcgatctcctgaggtgaagtgtgcagctccccagagcggttgtctagggtcacgttctggccactcagtccccgggagtccaggctgaaggagagaggggggttccactcagcaccggtgcagctctggcagctgcgattgcgggtccggccatccttgcagaccatgggcagcagccgcaggtcctcggccaggctgccgatgagcacccccgcgggtagtccctcgtttaggctgtacagaagctcggtggcccggctgtaactcccgaggcagctgaagggtcccacgaagaggaaaaacagaaacagatgcggcaggttcctgtagctggtgctgctcctgggacgatgtagacgccccttatccaggcgcgggtgccaggtctccgggcaccagctcactcccagggcctgtgagctgcgcgcatcccggaaattccggaccctttccttctccctctgaatctattaactacgtggtgagaagggagaaggttgg

SEQ ID NO: 152013 - DNA, 899 bp, Homo Sapiens
ggggatgaagggcccctggccccacggggaggtagcagaagacctgggtccggtaaggtctgaggaaggtgcccgggtccggggtggcgtctgaggccctggccgtgccgtcatccccgcctgagcgagcgacacagcaggtgcacccactcccagcaggttaagcaccagggagatgagtccaaccacctgcatgaagatgatgaagatggtcttctccgtggggcgagagacaaagcagtccacgaggtaggggcagggtgctcgctggcacacaaacacgggctccatggtccagccgtacaggcgccactggccatagaggaagccctgcgctctagcacacatcttgcagaggcaccctggccgacataggtgcccatcagtgctccgcggatgcgcaggcgaccatcttctgccaccgagatcttggccatctgacgctctacggccgccagcgcccgctccacctgtgggtccttggccggcagtgcccgcagctccccctccttctgccgcagccgctcttctcgccgagacaggtaaatgacatggcccaggtagaccagggtgggtgtgctgacgaagaggaactgcagcacccagtagcggatgtgggagatggggaaggcctggtcatagcagacgttggtgcagcctggctgggccgtgttacactcgaaatctgattgctcgtcaccccacactgactcgccggccaggcccaggatgaggatgcggaagatgaagagcaccgtcagccagatcttacccaccacggtcgagtgctcctggacctggtccagcaacttctccaggaagccccagtcacccatggctcccgggcctccgtcgcctgcctgccgggcggcccaggtggaggtggggacgatggccgg

SEQ ID NO: 152014 - DNA, 828 bp, Homo Sapiens
ccgcgggcgtactccggccatcgtccccacctccacctgggccgcccggcaggcagggggtagaacgggcgtggcagagctccctgcaggcttgttgctgggcgaacgagaaggatgccatgctgacacactgacgtgctctgtctccttgcagacggaggcccgggagccatgggtgactggggcttcctggagaagttgctggaccaggtccaggagcactcgaccgtggtgggtaagatctggctgacggtgctcttcatcttccgcatcctcatcctgggcctggccggcgagtcagtgtggggtgacgagcaatcagatttcgagtgtaacacggcccagccaggctgcaccaacgtctgctatgaccaggccttccccatctcccacatccgctactgggtgctgcagttcctcttcgtcagcacacccaccctggtctacctgggccatgtcatttacctgtctcggcgagaagagcggctgcggcagaaggagggggagctgcgggcactgccggccaaggacccacaggtggagcgggcgctggcggccgtagagcgtcagatggccaagatctcggtggcagaagatggtcgcctgcgcatccgcggagcactgatgggcacctatgtcgccagtgtgctctgcaagaagtgtgctaagaggcaggcttcctctatggccagtggcgcctgtacggctggaccatggagcccgtgttgtgtgccagcgagcaccctgccctacctcgtggactgctttgtctctcgccccacggagaagacatcttcatcatcttcatgtggggttggactcatctcc

SEQ ID NO: 152015 - DNA, 736 bp, Homo Sapiens
  misc_feature (455)..(455): n is a, c, g, or t
ggttttcttgctcgtgggctcggacgacgtacggacgcgcctgcagggacagcctggatacatggctcactgatggctcagttgggagcagttgtggctgtggcttccagtttcttttgtgcatctctcttctcagctgtgcacaagatacgaacgagggacatattggggtatattacagaggcggatgccctgctgacttcgaccagcggccctggtttccatctcatgctccctttcatcacatcatataagtctgtgcagaccacactccagacagatgaggtgaagaatgtaccttgtgggactagtggtggtgtgatgatctactttgacagaattgaagtggtgaacttcctggtcccgaacgcagtgtatgatatagtgaagaactatactgctgactatgacaaggcccgtcatcgttcgagacaagcatcgcacctagtgaactngaaccatgttctgctagtgtgctactacgcttcaagaggtctacgttgagctgtatggtaagaaagtctctcctgagcatgccgtgcttaagcagggttcctggaaccccgggtctctccactgcctaaagcctggctgcctgcagggtgtgatggtcacttatggacaggaaatgttaaagaatcttgtgctcaggagctggtcacaaaggagttcatggagaatgctgatagctatgcaacaagatccttagagggctggagctttgggcacagggaca

SEQ ID NO: 152016 - DNA, 1108 bp, Homo Sapiens
ccaaaaaaatgatattttgcgttctccatgggtccggaattcccaaaggctaggtaggtagttagtttccaactaaaggattacagggccgttctgatataggctgtccttctggtgatcagttgtttctggcaagactccaacaggcacctgccctgaaaaacagctcagcgggagaacgatcgagggcaatcacttcgttttataacctagccagataataagtcccaagattggaataatccctgacaggccaagcaccaggatacacatcttcttgcgagatttttttctgatagtaagcagctcgctgtaactgttcagtggctcttttcgacgtgcacctctgagctttccacattggcttctatgctatcaatcagatcaccctggtcatggatcatcatggcccaatctttaaatatctgattgacatcccaaaatgtcagcctccagctgccgaattgccgtttctctttctttaataagttccaaatcctgctcagtgatggccacctcatcctcctggctctgcatctggttccactcctcatggctgtcaaatgagaccagctgctcctctctttgcctctcttctgcagaaagacgagatccagctcttgctctggcaatactctcctttttccttttcagatacccttctctgcacagcctggaaattgtttaaggctgcagagaagtcattcatgaggcgttccttctgaagtctctgctggcgctgttctgaagtagataagggaaggggcaaggaccctaattctttcagcaattcatttgtttccttggcgagctgatttgtggagtgttgtaactgttgcagattttcctgtagcttgcttgagtcctgcttagttcctagctggctcatcaaattctttatctgagcagtggcttggctgatccgctggatgttgccgctgcacgtctggatgatgctgctgaagtcccggagctggggccccgagggccccgggttccggtacatgtctaagggaccgtatgacatgacgaggagctgagacctgctcgctctacaccgctctcctaccggaagcagccgccagccggatcccgggaattccggacc

SEQ ID NO: 152017 - DNA, 794 bp, Homo Sapiens
ctggatggggttttgggagctataggttgctaaggaggggagtcagattgtggtcaggtgcctcagtaaatcacagacccaggggccctgtggtccagtgtgagagtcacaccacattacacatgtgcttccatacagtggtttctgaagcttttgcagggagagaagatggcttagtgtttagactgttagtagaagccatctggaagcttttctctttgcctttttttgtgatcctgccattaaggctatgtgcagtctgccctcctgctccagtggccttgattttaggccaggaatcttctgctccatgtggcttaagccttccagctgagtgaagctaggcaaatggagtgggggcaggcatctattcctgcccccatcatgccccacacccatcagtcaacactcatttgacaaatagagtccagctgcctctgagccaatcctgggaccataataggctcagagtgagtcagctgtttgaacccaaagctgtgcagtcaggcaccctggctgagctagagaagccagtacctgcatcttggtttataaggcttacagctgggaaagctctagttctgggggtgaaagaacaaatattagtttacctgagcacttatttccatgacagggtctaacatatggaccatgatgtagacacagatttgtaaattttggaaaaaacctccagttactagtgacgaggatagaaagggacagtgcttctctttggcttttcttggttacactgcaagttcaaggattgggtgacgacagagacaaatgaaccc

SEQ ID NO: 152018 - DNA, 675 bp, Homo Sapiens
agctggcggcagcggcggtggcggtggctgagcagaggacccggcgggcggcctcgcgggtcaggacacaatgtttgcacgaggactgaagaggaaatgtgttggccacgaggaagacgtggagggagccctggccggcttgaagacagtgtcctcatacagcctgcagcggcagtcgctcctggacatgtctctggtgaagttgcagctttgccacatgcttgtggagcccaatctgtgccgctcagtcctcattgccaacacggtccggcagatccaagaggagatgacgcaggatgggacgtggcgcacagtggcaccccaggctgcagagcgggcgccgctcgaccgcttggtctccacggagatcctgtgccgtgcagcgtgggggcaagagggggcacatcctgctcctggcttgggggacggccacacacagggtccagtttctgacctttgcccagtcacctcagcacaggcaccaaggcacctgcagagcaggcgcctgggagatggatggccctcgagaaaacagaggaagctttcacaagtcacttgatcagatatttgaaacgctggagactaaaaaccccagctgcatggaagagctgttctcaggacgtggacagcccctactacgacctggacacagtactgacaggcatgatggggggt

SEQ ID NO: 152019 - DNA, 896 bp, Homo Sapiens
  misc_feature (196)..(196): n is a, c, g, or t
atcgcgccggaatctgaggtgttcctgtgcaggctcagtccatttattcctattttctctgacagctggatgaaagggtagtgtagaaacaaccattaaatgaacacacacatctaaaaggtttgaacaaactctctcagagaaaaacctcacagcattgagcacagaaggaaaacattagccctgtagttgcttntgttgtcagctgctgaactgttcaagatttaaattattttttttcactccagtctacctgctttaaatgccacagatattaagtaaatggacttacccttgaaatcgggttggccaagccatcacttctcaaagaaggtttaatgatggcatgaacccgtttttatattttattgtattgtactcaataacaataatttagctattctaatatgggaaattatcacagatattattctcacatttaaaataagataaaaactgacctagatgttctctcttcctctatagcagcactctatactatacccagcccttcttttctatgcttagtaaagaaaattgtattaggtttgcttataaaaattatgagctccattcttaaaagagcttgggaatatttatcttattactttaaagccataccatatataaatccaatgtctcacgaactcttaagctactaagggggattgaagggcaacatttctaatggcgccagccagcttcaactaccatttgccctctattctaactgttagagtgtggtccaagtctttctgggtcatttgtgtaatatccagaatagcacaaattaaatttaaataagtgttccttaagagcagtaccatcagctcagtcaacttaagctagaaacttggggtcatttctaacagcttctcccttgcacactaagactg

SEQ ID NO: 152020 - DNA, 686 bp, Homo Sapiens
  misc_feature (47)..(107): n is a, c, g, or t
  misc_feature (137)..(282): n is a, c, g, or t
  misc_feature (307)..(329): n is a, c, g, or t
tggatttttacaaagctccctcgtagggccaggtgaggtggctcatnnnnnnnnnnnnnnnnnnnnnnnnnnnnnnnnnnnnnnnnnnnnnnnnnnnnnnnnnnnnnactagcctgggcaacatggtgaaaccctannnnnnnnnnnnnnnnnnnnnnnnnnnnnnnnnnnnnnnnnnnnnnnnnnnnnnnnnnnnnnnnnnnnnnnnnnnnnnnnnnnnnnnnnnnnnnnnnnnnnnnnnnnnnnnnnnnnnnnnnnnnnnnnnnnnnnnnnnnnnnnnnnggtgacagagcaagactccgtttcnnnnnnnnnnnnnnnnnnnnnnnggtccctcatagccaggttgagctgctgctctgagcatgctccagttggagctggagaggggctgatcagcctttcctgtggcctctgggaagaggcataggacaggacatggaagtaaacagagggatgcaagatgccactcctcccagcccctgccagtccaggtggagacatcagaggtcaaggtccaagcttaggaagtcttcatctggggactcaggaggcgcctcccctgaagaccctcttaccaggttgataatgatcccccgggggccaggagctgcattaggccacagagagggcgacaagcaggaggatcaggatcttctccatggtgagtgggacagctggtgtgg

SEQ ID NO: 152021 - DNA, 986 bp, Homo Sapiens
  misc_feature (526)..(587): n is a, c, g, or t
ccacaccagctgtcccactcaccatggagaagatcctgatcctcctgcttgtcgccctctctgtggcctatgcagctcctggcccccgggggatcattatcaacctggagaacggtgagctctgcatgaatagtgcccagtgtaagagcaattgctgccagcattcaagtgcgctgggcctggcccgctgcacatccatggccagcgagaacagcgagtgctctgtcaagacgctctatgggatttactacaagtgtccctgtgagcgtggcctgacctgtgagggagacaagaccatcgtgggctccatcaccaacaccaactttggcatctgccatgacgctggacgctccaagcagtgagactgcccacccactcccacacctagcccagaatgctgtaggccactaggcgcaggggcatctctcccctgctccagcgcatctcccgggctggccacctccttgaccagcatatctgttttctgattgcgctcttcacaattaaaggcctcctgcaaaccttnnnnnnnnnnnnnnnnnnnnnnnnnnnnnnnnnnnnnnnnnnnnnnnnnnnnnnnnnnnnnngaaactaacaccagtagaattagaagcatgaaaaacaataaggggggcggcggcgccactacattaatcttctcctcttccgcagggagccgcccatctttactctccgttccccatccgtgcggttggtttgcaagggtggggcctccatagttgaggggggatgtttttcatagtaaatgtggcgaggggggtggcggtgttttgatacaagggtgactgtggtggtagaacatacattcggattgtgggaagattttttgtgtgggagaagcaaatactcttttgggggggaggagtaaacaactattggggggagatcagctgcactcaggtaggttatgcagcttctgtgggggaagattatattatacggtgtggggcgggttggtagtggac

SEQ ID NO: 152022 - DNA, 743 bp, Homo Sapiens
  misc_feature (709)..(709): n is a, c, g, or t
tttgcttttgtttcttctggtcccatcactgggacctaaaagaagctcacatgtggtctctggaaatgctgaagctgtggactgtagacattattttcagtccttgtcctggtggctgcataccagatgctgctccttccctgtgtgtggccagctgtacacagtgacatgctcccaaggccgcggcacaggcggtgatgggaactcctccccgggccagcctctcaggctgcagccccacggcaccctgaggccctcatctctgctcggcagctaaaacatctccttcttcgatgctctgcaactgcagcctctggctcacaagagttctgctgcctcggcggcccccgaagccgccccccgggacagtccgtgctgtaaccaagacccctggcaaagcctcctccccaaataagttgattttggcttcggcctcaatggctttggccaagcttgctgcgtaactgtccaaggacttgtgtacttcagctttcacatgaagaatcgagttcttggcagcttctttgatttgttccacttcatcctcaaatgtcaccgagctccttctctttggtgggcaagtgcagtgagaagggagggttgtcatcagacgtgtagtcctcaagcagcatcatatctgtccctgagtcctgggagcagctgaagccagtgtcccccgtgctgctgctgtgccccaggggctgtccgnctgccatgagcgcaatgagtgtgggacaggcccc

SEQ ID NO: 152023 - DNA, 705 bp, Homo Sapiens
catcgttccgtgacttcgtcggtaagatctttgataagctgctgcactaatgcactgttggtgcccttgtcagtgctgtgcacgatacagttagctatcctcgttaggtgtcccatgtaaccatgccgtcttcctccctcagcctgtttcttctcattcatttcccaggcttcaagtattcgttctattaattgacatttttggaaaagatgttttaataacaaattatcaccagtggagtcttgatcggtaattgtggcattttctgtgttttcaaaaggacttgcaagaatcagtgcaatacaaatttccacttgtgtatgcaaaaagttattccatgtatacttgaagaacatgttcaatatgactccaatgctattcagctccataaggtccccatttatactgctggtattggtttgaagcaggctggatatcaacctaatgacattcaaccgggtattccccacaggaggatccagcacaccccatgtggtcttcatcacacttttcttgggtggctccagcaggagttcatgaaaagatccaagtcttcctctgatggcttctagaacactcttgtttactgaacaagctgaatggctcatgcctggtgggcagatctctatatggccttcaaatgttggtcgtcgtgtctcaagtaaagtcagcatatctggattgcactgactatggctgactcat

SEQ ID NO: 152024 - DNA, 577 bp, Homo Sapiens
gaaaagcatttccatgctgaattttcccaccaaccataagtccattgtaaaatcacacacacttcacagtatttacatttattattattaaatcttcagtacctgaaaggtataaatatgggtcaatggaagaaaataggaactgaaactattacaggtgcagatgaagaggctcacttttttctggtctttaatctctctgaagggaatatcggggacggtagttctgatatgaaacggagatggggatatatttctttcctgggagaaattcctatggaggggagacaattatcagagtcttaatggacacaggaaggaatgcttataaggcattgagatttgagattctcatatcaagtgacatccctgttgggaaacggcatggacaaggcagatggggtctttactgatggattgggaagggactagtatgaactgaaacaaacaaaaagaattccttttgtatttgctggtacaatctgggaagtgactgccaatttctgatggactacttgactgtcagagaaaaggatgttacctcaatgtatttcctctacttcaaaaagtttcatcc

SEQ ID NO: 152025 - DNA, 967 bp, Homo Sapiens
cgttgagtaaactggtaagtgaaccgagtagcaatcgttagtgtcaccagctgccactggcaaaggggacttatgaggcagtgagtgtgaagtcgtccccctctgctgtcacaggtttgcgtccacaccctactttttgtagaacagtatctttgggtggatttacatcatcgaggttatcctttcaccattgcttttaagcgagttcacaccaaggcagcagctatgatgacacgagtttggttagtttagctcttagcagttgctgcatcatggtttactgatattttaagtgacacagtcgatgctcttctatggacaacagtggcacagaggtcacagctttgggactgactggttggctctagggctgattttggtctgctctttcctacactccatgacatggtgttttcactgaaagaaaggtcaaactggacagataatgcagcaaaagggacccttaaaagatcgtttttctctatgtaaaaccaaattttcagccaagatacccagaaaagaaatatcctgggcctccaggaaaagctgctccaattccttctcctttcaaaggggaaacacattttgactcaagcttcctgctgtggcagaattccaataagcatacattatatagttattttccagttggaaattgatctgctacccagaaccggctgctgggatgtgaaatctggaatctgagctctgataagatatctagcagctgctcaaattgaaaaggggcctcaaggctgttttgagatggaatagctggcatagccaccagttccaaaccctcaatcagccacgcccagtcccctaactgtgagttgatgctcccgtaaagagctcagggctgtgagccttatcaccacatgggttgcacacagcagaatatcctgtgtgaccaagccaaaggctaaacctggctgcttattggatggttgccaagtttactcatcga

SEQ ID NO: 152026 - DNA, 333 bp, Homo Sapiens
cgaatgagtaaatcttggcagtacttccagaaccggctgctgggatgtgaaatctggaatctgagctctgataagatatctagcagctgctcaaattgaaaaggggcctcaaggctgttttgagatggaatagctggcatagccaccagttccaaaccctcaatcagccacgcccagtcccctaactgtgagttgatgctcccgtaaagagctcagggctgtgagccttatcactacatgggttgcaacacagcagaatatcctgtgtgaccaaagccaaaggttaaaacctggctgcattttattggatgggtggccaagatttactcatcg

SEQ ID NO: 152027 - DNA, 529 bp, Homo Sapiens
gcgtgggacctgctactcggagagtctagggacccggacagctcctgcccgccttctccactcttcctttcccaggagcccagtccacgtgtcggtccgtgcggaggagcccgttcgctcctcgctggccgagggctggaggacctggacatcggggaccgcagcgtctcctcaccagactccctgtctgcacacgatgtccactcccctgcattctcagatagcccctattctcagatggcctcaatgaggacagaatgaggaagggtccaatgaagactagggtcctggcgtgagcgcaaatcgtcgtcctgagcgcttagaacgcctgggtttgggactggaaggttgcgtttggggagtacggacagctaggccaccccctgccgaatagaccctcccctacccctgcccgggggcggagtaggggagaggggcctgtagaggggctggccctttaagggggtgtggtcggggggcggaggaagagcgagacagagaaagcgcttcggcggctgcagctcgggcg

SEQ ID NO: 152028 - DNA, 819 bp, Homo Sapiens
tgttcctccaaggtgaggtcagagaattggggaatacgcttggcccattcaacgagggtgaaaagctgcttgtcagcagcatgacatatgttggtaacagggtcatttggtcgagttctccatattcatgtcaccataggattctgtctttggttcaacagcaagttcagcttctagaatcctctccacaggcatgtcttcatgaccactggtagcacattctgcctcactctcagctcgctctcggctcctctgtctttcttcttgcacagcttccctcttcatgcccatgacaaggcacttctgatagcgacagtactggcagcggttgcgctgacgcttgtcaatgaggcagtctttattatcccgacacgtgtagatgaggtccttccttatcgtcctcttgaagaaccctttgcagccttcacaactgtataccccgtagtgctttcctgaggatctgtctccacagatggcacagatgtgtttaaccagagatccggggctggtggatgggtagttcatgtttccaatcccgggaagccctggtaagggcttgatgtcctctgaactgctgacactgttgaccacatttaggcgagaaccaggtcacagaatgaacatgcttccatcatgaatccctctcagaccagtcctgggtgaggaaggcaggatgcataggaataatctgcccagacgatccagagtccagctcactgtagctaacaccaaggccttttttccagtgtcatcttgttaaccgagcaaagcattgctgcagtgtggttccggagcccaagcccagaacactgctcaggg

SEQ ID NO: 152029 - DNA, 809 bp, Homo Sapiens
tctctttgatcaaggttctggaggattcatccgggtattcacactgtgacctccaggtatttcctagttcgggctatcacacagctggatccagaagtgccttcagacagggacaaatcatcagctggagacaccaggtctgcctgagaagccagggctccactcagatgggttgtaatctgattcggtcaagataactgggatttgaatactcctcagccaaatacttcaaggaggatgcctctcttgccaagaacttgtttctttctttgagattgccttgaagttgtgcatcaaactcctcttctgaccacagaagcaacagagtcaagaatcacaagtttaattccttttgagataatttcttcttccaaagattcaatcctttgtagaacttcatcacaggtgagttcccgataaagatgaactttactacttgtcaaaagtaacttttcttcaatgttaaaatatctgggaaaacgggattctgctatttcaaccagtctttcagcactaaatgcagactctgtgtcaatgtacaccacagctccttctaatcctcccatgttggtgggtaatgtagccaaaatgctcatcattatacaaaactgagtttttccacaacctggtggacctgtaatctgggtgcctccacgggcccttcatggagtttgctcctggcagctcccagagtggctggccggatcccacactcgctagctcatgcctggtctggccgcggatcccacacagagcttgctcactgctggcactccgagctgtgactggccagatcccgcacttgctca

SEQ ID NO: 152030 - DNA, 798 bp, Homo Sapiens
ctgcaggtgtgatttgtgggaatccagctacgggcattccagcatgtgggcgatgtggccagagtcatatcctacaagttcatgtgagctcacttgttggaatggacgtgccagaatcaggatggggctcaaaccaggacgtcagctagtcaggggacagtcctgggtcggaggctcaccaggagcacgaagtccatatggcaggtggatgggagtacttgccagggaggatgcccggggccctgggcctgtctggtcgtgtgaagtggcgccaggtctaagacagggcactggaagggccacgctaagggtggtggaagggcaggtggatttggaaagcatagaagtagaaatgcctggcaccccactgtgggatacccaccactctcggccatctgccttagcacacgagagacagacactagcccaggtaccagagtagcagaaccgtatcagcaagaggggacagggacagccagggtgggcaggccatgagcaggggcccagaggaggcgtagagcgcatgggtccagagcacgcagggctcagcacgaaggagatttctaaaagcatcgaacagtcaatggtctgctgtgaggggcagataagatacaaactgaaaatatccacaaggtttaatttacttaaaaaagtgttcacacacaggcaatccatgttcactatgggaaaatgtgagcagaaaggtgagcagaagcagaaaagccccacctcccgatgcatagctgctgctgcggggccaccgctgcttcccgctcactctggtgtccatgagatttc

SEQ ID NO: 152031 - DNA, 522 bp, Homo Sapiens
  misc_feature (511)..(511): n is a, c, g, or t
cacagtccagtctttattagcattgggtcctggtcccaccattgtacttaaatatccggttccacttcccaggttaagaaaagacaatcctggttgaagtttcaatgcttccataacttcagaataaatgcaaggtgctgacaagtggatgtttccatgcttccaggctaagtctttgtaagcattgtctctgtagccttccaaatagtaatctccacgatcaatcgctctgaaggcttgctccactctttcagtacgaatatactgagcttcttttaaattatcaattaagtcatcattatcttccccagcactcacagctcctcccatgatagtattcaaatcaaatcataaatttaaaagtgaaataaaattagtagaaatggcttccaatattgcacttgatttccaaaaataaattaatcctgtggcgcgggcagcggcgcgcaggccaggcgctaggactcggcggggtccgcagcagccagacgccgctaccaccacaataacnacacggacgcc

SEQ ID NO: 152032 - DNA, 849 bp, Homo Sapiens
aggggcaggtgttgtctgcgaactctcagcccggcggcctgaggggaagccatccaggggaggtgtgtgtagaggaggcagttgtcgcgcagacttgctggcgcagagggactggtatgtgcgaggcctacagtcaccctgcagctgcaggagcgccgcctcgtagtatgcgctaggcagcagaaccacgtagtccaggagcaccccttcggcctccacacgcagggcccaggtgccagggttcagcacaaagggctctccgaagcccctctggggcacggtgatgaaggcaggctccgtgctgggtgggaaggccacgggctgactctgtgctgtgcagttggcacaggcggccgacctgccctcctctcgcacagagacccgcccgctcacactcatggccccccggttgacgtatcggaagacgagccagaaaaggtcgggggaggtcaggttcagcctggccacgatcctgggctggacaggtgccatctgcgcgtagcccctccagctgaagttctcgaactcgagggggttgaagccaaagcgcacggcgtgaccctcaggtgtggcagcctcctccagctccaggcgcaggtggcgcaggtccgggaggtagtggtccctcgcaggcccactcgctgcaggtggggcctgggtgttggggcggcaccggcagacgcccgtcctcggttcacagctctggcccagtgcaccgccaatgtcacaccggcagctgcggcagccaaaatagtcagcctgatccagtccaaagaagccatccttgcagacgcgcaggcctgccgcacacgtggggcttgcagaagcactgccagtgcccggctggca

SEQ ID NO: 152033 - DNA, 738 bp, Homo Sapiens
cttccttctcggtggcgtcttcttcctgacatggccatcttgagctgcgcatcgggtcacttttgggtgatcttgacccctccagtgaggtccatgcttccccggccttgtcaggggattccagagtccctggccaatcccgcagcagctccattgtgtcctcattgaccttccccagccggatggggtacacgtgggggcaggatgcggctgttgaaaccacatggatccgaccttgccgtccatgttggcaatgcctgcagttgcactcggtggcgccgtagtactccccgatttggcgtacgccgaagcgctccgtgaactcctcccagatggcaggacgcagcccgttccccaccgccaggcgcacgcggtgtcgcctctccgcctcgcgcaccggctgcttcagcaggtagcggcagatctccccgatgtactgaaccaccgtgcagttgtacttgatgcagtcgtcccagaagcggctggccgagaatttcttgcggaggacgactgtcagcccatagatgagacactgccccacgccgatgatgtcttcctgccgagtggtacaggggcaggcagtcatagagcacgtcagccgcctgcatgcggtaggcgtggtggccgaaggctgccatgcggtagtacctgcaggcgggagggggagccgggagggcacgaggctgggacctaaatcccccagggtacaggcatggggaagcatgctgcatgtggacc

SEQ ID NO: 152034 - DNA, 598 bp, Homo Sapiens
  misc_feature (195)..(203): n is a, c, g, or t
ctcgcgctctggttcttcccccctcttctgtgtcgtgcatgcccgcaaacttctcttgtcctttcttttacttctcgcgcgctcctcctatcttcgtgcctctcctcttttgtcacatcaacatattctttggctactgtcctgctctttcgtgtcggtctcctcgcccacgtggttactcttctttgtggactnnnnnnnnnttttttctttctcctcctctcttgtctctttttgccgcggaagaaagcctgaggctttggggagcacttactgaggcccagcaagtgctttaggatccccataacgtcggttggggcttgtggggacgctggctggtgtgtggcgcaggatggcatggtggataggggcacaggttgtaggtggactgcctgtggtctgaagctgtcacccatgaccatacgagtcctggtaataacagcagatgcttattgagtgtctaccccatgggggcattttctcagcttcccacttactcgctcaatctctgcagcttaatgcagggggcactattattagcccacattgcagttgtaatcctgtaaccctgcaaattcatcttaaagccctatgctct

SEQ ID NO: 152035 - DNA, 1029 bp, Homo Sapiens
accgcgtgttccggcattcccaggaggactcacgcaagacgcacgagcacattgacaagcagtttgggatgatgcagtcgcagattggctctgacatcctggccgaggacaccatcgctgccctgctgcgcaacaaccgcaagctcctggaaaagcacatctccaagacctaggtggagaccttcgtcagccttgtgcgcaagaaccgggagcccaggttcctggactacctctctgacctgtgtgtgtccaaccgcatcgccatccccgtcacccaagagctcatctgcaagtgtgtgctggaccccaagaacagtgacattctcatccggaccgagttgctggtggtctgcaggcttcggcccgtgaaggagatggcccaatcccacgagtacctgatcatggagtactcagaagaggaagtgtggctcacgtggactgacaagaataacgagcatcatgagaagagtgtgaggcagctggcccaggaggcgcgggccggcaacgcccatgacgagaatgtgctcagctactacaggtaccagctgaagctctttgcccgcatgtgcttggaccggcagtacttggccatcgacgagatctcccagcagctgggtgtggacctgattttcctgtgcatggcagacgagatgctgccctttgacctgcgcgcctccttctgcacctgatgctgcacgtgcacgtggaccgtgaccccaggagctggtcacgccggtcaagtttgcccgtctctggactgagatccccacaggcatcaccatcaaggactatgattccaaacctcaacgcgtccgagatggacagaagaacaagtttgcaaccaccatgggagtcgtggagggactacctcaacaatggtaggtcagcgaggccgtggccctgttgccaacgagcagaaagaacaagctcactttgaagggggtcaagcctggcggcacatctcatctacttcggttctacagttcagcgagctgtgcggtcactcgacacgtgggcatacgactgtgt

SEQ ID NO: 152036 - DNA, 716 bp, Homo Sapiens
ttttttttgactttgttcttggtaaattcttgatactggtaggctctatcactgtccatgtcctgatctctacaaccctcaggtggctgggtcattgtccgtttgttagagatgtcctgtgggagatctactgccatgcgttttacctttctcctcctgcgcagagttctattcccaacattgtccacagcaaaatcagactcatgccatagaggtcttttccctcgaacattattatttaagtttgatgacggcctgcgctttgctactaacatttggtcatcagagtcactgtgatcttttttattattattgtgattctctctatagtccttgcttggttcttctaaactagaatcagagccttcacttaagcagtgaccagtctcccacgggtgatgcacattatacgacctccgttttctccctctccttttccttgcctggcgtttcagagggcaagatatacttcgagaatggtctcctgtttcagcaaatccacctcgagcttgctctgagctctcttccaatgctgagacaaggtcatgaaccagctcctccatggttctactgaaatgccagctgttcccggctgctggagctccgatcggttggcgcccggcggccccgaacattaacgacacccgggagcctggcctcgaagctcaggcccgtgaacagactccaactacaacagcaccggcgacttccaaaga

SEQ ID NO: 152037 - DNA, 564 bp, Homo Sapiens
  misc_feature (36)..(36): n is a, c, g, or t
gattcgaattcggacgaggcgcttccccaccatggnaggccttcctctgcgaggtgacatcagctgtgcaggccccactggctgtgcgtgccctctacacaccttgtcatggccaccctgtcaccaacctggcagacttgaagaacagagggcagtatgtggccgctggatttgaacgattccacaagctccactatttaccccatagagggaaggacccaggtgggaagagctgcagactacaaggtcctcccgtgactcgccacttgtgtgatggggccattggacggcagctgcctgcaggtgctcccagctatatccatgtgttcaggaatggggacctggtaagtcccccatttagtctgaagctgtcccaggctgccagccaggactgggaaactgtgttgaagctcctgactgagaaggtcaagttgcagagtggggctgtgtgcaaactctgcaccctagaggggctcccactgtcagcagggaaggagctggtaactggccattactatgtggctgtcggagaggatgagttcaaggaccttccctatctggagc

SEQ ID NO: 152038 - DNA, 805 bp, Homo Sapiens
gggaacggagtcttcgaggtatgggagccagacggaaatggaccgggcccaaatcggtccccctggacgtccccaacaaccttctgggttcagcccccaggagcacctggagcacctggtagactctggaccagatatgagcagaatcaaggatgcaaaagaacttaaaggagctcagagaaagaagtagaaatttcctcctagttgggcagcagaagaataccatggacattgagtggtttctggaaagatgaggagatattcagaggatgagtggaagaaaggagggggaaaaagagcctctggctgcccctaagctgtctgttaggaaaattcgctgatctcagtgtatgtcaagagagcactcggaagacaccaaaatttcaggtgccattactcctttgttttgcacttgttttcctcatagtttgtgtattcctaaagcaggcagatgatataaaccactgggagagatggcccaaagcacaggtcatgggtcagagatggaagggattctggaagtaaccattactgtctagagagtgaattcataccctggggagtcaggattctataagtagattggtggggaattgatttagaggttttatttgacacgactttggggtttgagggtcactctggtggcagtataggaaatagcttgaaggatgagtagcactaaagagttcaaacagaaaacaggacccgtgtatttggcaggaccactgtcttggctcctgatcaaaatgagaggtgaagctggctgggcttctgggtcaggtgaggacttggagaacttttc

SEQ ID NO: 152039 - DNA, 938 bp, Homo Sapiens
  misc_feature (366)..(476): n is a, c, g, or t
cagtcttctctcctttgctctccccatcgttggattgccccccgccccttcggcctgcgctatgtgctgggtcctcgtctcctctctctcatcctagaagggtcgcccgctgtcgcggctgctagttggtttcggctcatgctgcggctcagcctcggagttgggcagaccttctcttgtccctgcccaccctctgtccgtggtgtgtcaatgcccacgctcgccagtctgggcggcgctcccccctcctgccgcttgtcatcagtattagtactgcctcgctcgcggtcgtcgacgggtattgattctgtgaccgctccacttggtggttgatagctatagataagagatagcgggccgcaggcnnnnnnnnnnnnnnnnnnnnnnnnnnnnnnnnnnnnnnnnnnnnnnnnnnnnnnnnnnnnnnnnnnnnnnnnnnnnnnnnnnnnnnnnnnnnnnnnnnnnnnnnnnnnnnnatttttgctggttcaagggctttattccatctctctcggtgcaggaggcggcgggtggggggctgcctgcgggctgcgtctagttgcagtagttctccagctggtagagggagcagatgctggtacagcattgttccacaatgccacgcttctgcagggacccctccagggccaagggctgcaggctgcctgcaccagggcccccgcccagctccacctgccccacctgcaggtcctctgcctcccggcgggtcttgggtgtgtagaagaagcctcgttccccgcacactaggtagagagcttccaccaggtgtgagccgcacaggtgttggttcacaaaggctgcggctgggtcaggtccccagagggccagcagcgccagcaggggcaggaggcgcatccacagggccatggcagaaggacagtgatctgcttgatggcctcttctgatgcagcctgtcc

SEQ ID NO: 152040 - DNA, 951 bp, Homo Sapiens
ctcttccgtgttcctcattgtgtcgagatgattcttgttgtgcctccacacgtgcttcacataccacaggaaccagagaggagagacctcatgggtctctgcagtgacacacaggttcacaaagagagtggcaagctgctttgccagattcagtccagcagagcttgtccagtagctccttcattgtcatgttgtcccactcttctgcaaggggagccttccatggggcatcactcggaatctctcgccccatgtcatccattgtcctccaaaagttgttatgatctaagtaggtaattggattccatacaggtgggaatggccccctgaaggggtatgatttgccctttacatggtggatcagacgctcaacctcattcactttgtaggtctccaatcctagctccttggctaatctcaagatacgattctgggttggtccaacataggatcctccaaggtccacatatttaaccttttggttcctaagagtgtaagtcctgcctcccacacggtcccgggcttccagaacaaccacattcagtccagagtcatgcagaagtttggctgctgccatacccattgtgatggttaattttaggtgtcaacttgactggatggtgggatacctagatggcaggtgaagcattgtttctgggtgtccctgtgagggtgtttccagaagaaactggcatgggagttggcagactgggagaggaaaaccggctctcaatgtagtgggcaccatccaatccaatcggctggggccctgagatgccgccccccaccacgaccacgtcgcatttgttgctcatggcgctcgccccgttccaggcctcctggtgcccgctgctccgttttctgggcctcgatcccagtcctgcctgccagccagcccgcccgccatgcccgccggcctgctgcgcgctgcccccgtgcaccagcgcctcg

SEQ ID NO: 152041 - DNA, 985 bp, Homo Sapiens
  misc_feature (262)..(262): n is a, c, g, or t
gaggggaggagtcaccgggcggggttgcgggggcgtggggggcgccgcgatggtaatgggggtgaggtacgtgtatgtggagggggatccaatgcggggcagataggaatctaatgtagctggggatagtttgccgaaaaagagggtcggacaaaggattaatccgtcaaggttcgaggcaagcccagaacctttcaccgccagcaaggccagtggcttcctgggcttaaggccagtctggagaaagggagcagagggtctnccggaggtagggacacgtgctaaggcccctgtgccaggctgtgcctcagcgtgggacagtcccaggcctcacttggacccagcacagaggccagaagagggtacagggagggacggggcgcccagcccttcgcagctccccctccagggtctccgcgagctgtcgtcctcatccgcctgctgcctctgctgcatggatcctggcataggagatcgcatcgccctttttgcccagagcagagagtccgtacagcacccccgtagcaaaggcgatggcgttgcccagcagcgtggtcagggtcaggctgatgacgatgggaacgaccgccatcccgcagtagaagacagccttctgccaggagcgcagccggtccaccttctccgccactgtgtttgcaaactcgatgaactggcagcagaagggcgcctcacacagcaacaagatgaaggcattcatgatcatccacacgccggccgcgatgttcagagggtggatggtgatgcagttgaagaggccagagatcgcgcaagagactgcccccagcaccccagacaggcgacacagccagcggtaccaccacgtcatgccctcttcctgcgcgggcggcgcagagctggcggacgccccgggcgccccacctgagctgctcatggtgccaccgtcaggcgcagcgtcacagctctcacaaagggctcgatccttggagttccggaccggtaccag

SEQ ID NO: 152042 - DNA, 1107 bp, Homo Sapiens
gcccaagcggcacaacccagcaggaaattggcaacatcatccgcatgtaccagagccgcccgggccccgtgcctgtgcccgtgcagccatccagctttcctgaggaaaatcgaccccaaggacgaggctctggccaagctgggtatcaacggtgcccactcgtccccgccgatgctgtcccccagcccaggaaagggccccccgccagctgtggctcctcgacccaaggccccgctacagcttgggccctctagctccatcaaggaaaagcaggggccccttctggacctgtttggccagaagctgcctattgcccacacacccccacctccaccagcgccaccactgcctctgcccgaggacccagggaccctttcagcagagcgtcgttgcttgacacagcccgtggaggaccagggggtctccacccagctactcgcgccctctggcagcgtgtgcttctcctacaccggcacgccctggaagttgttcctacgcaaggaggtgtactacccacgggagaacttcagccatccctactacctgaggctcctctgtgagcagatcctacgggacaccttctccgagtcctgtatccggatttcccagaatgagcggcggaaaatgaaagacctgctgggaggcttggaggtggacctggattctctcaccaccaccgaagacaggcgtcaagaatcgcatcgtggtggccgctcgtggacatctgggccaattaactttctcccgcttctttccttgtctcgggcgagagtggcagcacgtgcagctgtaagccgtgtccaccgtgggctgcgacttgctcaaggtgaccaaggacccggctcggcccgaacagctgaagattctcggtcatacagtttggcgagtgctgggtttgagtgcgaggccggtcccaccctggagctgtcccttgatagccgatactttgttactgccacaaggccgggcacaggccaaccaagacccgcgttacgcaaatcctaactagctttagaaggatcccgcatgttatcgccatgagacaaattctatgcagagtgaaacctctcgttcacatgtggacccacaactttctcaggtgacact

SEQ ID NO: 152043 - DNA, 686 bp, Homo Sapiens
cccatggtcactggtactgtttgggggaggacagcgtgttgcagcgggctgttcggacatgtccctcgtactaccacacatgccgccgaattcttatcccgccacgagcacagtttcgttatctgtgtcctcgccagcacacacgccacccccaggcccagcccgaggaggaaggagatcaccgccagggccgcagggagggcagaggctgctggcgggtcagggagggcagaggctgtctgcgggtcagggagggcggagcctgtcggtggggcagggagggcagaggcccttggtggggcgtccgagcatctgtgccatccttgggactgttcctctgtcaccaggaccagggtgccggagccgtagacattgacctccgtgatggcctggcaggtgtaggtgccagtgtccgacagctgcaggcggtgcatggtgatagtcaggttgtcctgggaccctgagaagtcgatgcggccccggaaccgtctgtccgtagtgggcaccaccccgtcctcgtagtaaatgatgtcttggggctgtggcccgagctgcctcaggtagatcccacgcaggcccccgctggtggagcaggtgatgttgacggaggctcccacggggacagtcgtgcagtggggagactgctgcacctcttgggcagcacagggccccaggcagtacgcgag

SEQ ID NO: 152044 - DNA, 990 bp, Homo Sapiens
gagaccgctcaccgctcctttcgacccagcaggttgttggcccatgtttaataacagttcatcttgtacgcgagcagaatcgagagtagggctggcggaaacgaagccagcctgcggaccctcacatttctccagcagcccccaggtatgcgacctggtggcgacagtggttctcatccagcttcccagctaccttgtcctcattgggcttgatgcagcggacgtagaagggctccttggaggcaaggttctccaccagggccaccatggagttcttgaagagtgtgccagccgtcagggggcgcttggtcacctctgtgatgtcctgctgcccgtccggccacatggcccgtagagtggggtccgtgctgttgtacagcagccgcttgaagtcctggaagaggaaatctctgttcttgtcgatgaagccttccacggagtacgtgacgtcccctgcatagtgcttgatccggaagtctcggccaaactccatggtcttgtctgtggggcagagctggcggctggtgtagtgtaggtgatggcggtggtgcgtgtccagggtctgcaggaagattcggtcagtgatggtgccagcagagctgcaggcctcgtccagcacggccaggatgccacggtggggccgctccaccagatccacaatggtggcgttgttgaaatactcaacgctctgccaggtgatgccctcgcgctcgtactcttcctgttcctgcttcaggatgagctggatgaatagctgctgcagcttctcgttgcagtagttgatgcagaactgctcgaaactgttgacgggaaacacctcgaagccatagatgtccagcacgccaatgactgtgtccttgccatcacgccgaggatcccggccccggggttccatcgacactgttgatcctgttcaccacccacctcaaacagtccgctggtacactgccttggcacaggcatcccgggcatagctggcctcagctgcag

SEQ ID NO: 152045 - DNA, 736 bp, Homo Sapiens
cctcctggaggccttctggggatgcttcaggaactgctgagcagctggaggtcccttttgagctcgcacatgtccaccgaggcattgtgagcggccgttggggaggactgtggaaggagaaggtgaagctggcggcacttgggcaggctgatgttctgagggctccaccaggaggtgacagaagtggctaacagcggggggccctgagccaggctctcctcctggtgctggaagcagaggaggctagaggctttgtcactcagcaagaagtcacgcttgccatagagaagatgtaatctcccagcatgtcggttccagtagaggcagaagtggtagaggcccctggggtcagggaaggatcgggaagcagggtgggctgcagggaaaggggcatggactgtgagggcctcttcggagttctcgatggagatgcgcaggtctggtgtgggtttgtagtggaggctgctcctgtgtgtctggttccgctggctgcagaagccgaaagtcattccctgtggcccttgccgtgggcaccttggaccaggaagagcagactcagcaggaacagtgtcgtctgcagcagcgactggggagtcattttcctccgacggagtcactcttggaagtcaccacctgtctctgcctctggagccgcagatccccagcgctacagggcctcagccatcaggcgctcagtaccaaccacaggccccacaggcaagggacctgcctctgc

SEQ ID NO: 152046 - DNA, 1138 bp, Homo Sapiens
aaaagaaaggtggccctgtatcttaaatagaagtaacccttcacagtgcattttattccgcgtggtaagatgggaagaagtccccgggattgaggggggtgcccgggtccctctagacccctttcatttgtgcctggccccgaaacccccgggacattggtccaggggggttgggacgggatcatccgcaaactggtagggggtttttctcaagcagtttcagggcgctttcttaaaatggtgggagttgtgaccaatttgtaagtggagaggggtggcccccttgggggcttcttgttgtccccgaggtgaacctggatgttgatggggtcatggcaggaccaggaactgctggttgtattggagctggtccagatgctgccgtgtgctgccagccgccaccacgttcatccaggagcagggtccccggcaaaggggcatccaccgagatgactgtggtcagatctgggagcctctgactcttcaaggcccctggctgggcattctccacttctggacagatctgcttcaggacgttgtagtattgctgggtcttgaattgcttggggaacacaagggccttgcagcccaccttcttgaggacgtactccagttccatagcctggtaggctgggttcacagacaccagaatgatgcccgcctgggcggtggccaactgcatgagcacccatgcataggagttaggtccccacatgcccagccggtcacctttgcagaggccaatgctcaggaggccagaagcagctttgtccacctcctccttgagttgggcaaaggtcaacctgacgtcttcatggaggacgaccaaggcctctcgttctgggaccctctgtgctgtggtctccaggcactggcccacagtcttgctgttaagatgctttttggtgcacccctgaacgtagctgaggcctccgatgggcgtggagaccatgcgatccacctctctggaactgaggaagcggacaccctgcaacctggcttcctgccaactccgagagagggcggcccgggcccccagcacccccgagctcccggcgcacagcctccccaggcgcagcatcccgacgtagacagccatggctcgctttgccctgcgtcatcccgggaattccggacc

SEQ ID NO: 152047 - DNA, 696 bp, Homo Sapiens
cccccctggtggaatggagataggatgttttgcttcccactgcaggagagctgccccctttcacggggttggggaagggtccccctggcctccagcaggagcacagctcagcagggtccctgctgcccacccctctgagccttttctccccagggtatggctcctgctgagtttcttgtccagcagggccttgacaggaatccagggagtagctcctggccagaaccagcctctgcggggcttgtgctctgcaaagactctgctgctggggattcagctctagaggtcacagtatcctcgtttgaaagataattaagatcccccgtggagaaagcagtgacacattcacacagctgttccctcgcatgttatttcatgaacatgacctgttttcgtgcactagacacacagagtggaacagccgtatgcttaaagtacatgggccagtgggactggaagtgacctggtacaagtgatgcagaaaggagggtttcaaagaaaaaggattttgtttaaaatactttaaaaatgttatttcctgcatcccttggctgtgatgcccctctcccgatttcccaggggctctgggagggacccttctaagaagattgggcagttgggtttctggcttgagatgaatccaagcagcagaatgagccaggagtagcaggagatggcattcctacagggggccgg

SEQ ID NO: 152048 - DNA, 882 bp, Homo Sapiens
  misc_feature (76)..(143): n is a, c, g, or t
tatagagtgcacagccaccatgcccagctaatttatgtattgtttgcatagacaggacttcctcatgtggtccacnnnnnnnnnnnnnnnnnnnnnnnnnnnnnnnnnnnnnnnnnnnnnnnnnnnnnnnnnnnnnnnnnnnngtgtgaaccaccatgtccccgcgtggcccttctttacttagctatatattatccttactaagagttaggttccctagcccatcagaaagattcccaggctggctacttcgggatgacccttgcgattttgtatttgaaactcatttctgaatcttttttccccagtagcttttaagacataggaactatatctgtgttgcagctttgcacttcgcaagttataagaagaatatgcctggcgtgtgttaggcactcagaaaatgtttgaacgtgaaccaatggtgtgtgtgtctctggacactctaagttagtgtaaatcagaacaggcttgttgttgcgtgcttgttttgatgccaagaccaagagagtgattggtaaatgtgctaagtattttctgtggtcttaaggtatgttgggtgtaacagtaagtgtggcatacacagcatagttaaatggcccttcattcttcagacaagaaatgcacaagggccaacgatgtcagggccgtttgaacttcactggggagaccatggacagttctgtcctcagggctagacggccccggggaacgggggtgccccttggtcaccgggtgataagctaggaacagaaggttcgtgcgataggaaatcagagcacggcgaacggtgccaggtggctcccgaacagaagggcttgcagcgacaggtcccggggaagctcccaaactgacgcggaaccaaatgtcacatccgctaga

SEQ ID NO: 152049 - DNA, 456 bp, Homo Sapiens
  misc_feature (456)..(456): n is a, c, g, or t
atggatatgacccccaaagtcaccagatcacgaggggtcccaagtctaagcccggacgaggggctcttttcttatacacactggcccgacgacctccactcaccagctgctgcagccccatcacgactgctgccaacgccaggagcagcctgctgctgtgggccagtcaggggtgaggagagcccccgacagtcctgtcctggaagcagtgtgggaccctccatttcactcagggcccccatgctgcttgggccttgtgccagttgaagaggtggacagtcctgactcctgccaagtgagtggaggagactggtgtccccagcaccccgtaggggcctacgtaggacaggaacctggaatgcagctctccccggggccactggtgcgtgtgtcttttgaaacaccacctctcacaatttaggcagaagctgatatcccagaaagactatatattgn

SEQ ID NO: 152050 - DNA, 988 bp, Homo Sapiens
cttgctgttttcttgggtctccctttatggtgtttgccttcgcattcatttgttctattgtgcgatctcctgggctggttcttctcgcgctcttcgtggtcattcttacttcctttgggccaggttgtgtgggctctttgcagctttttggtgagtgggccctgggtagagtgggtttgcttatttccttagctgcacagtggtaagggcttacatttataaggatggggctttgcatgggatggtgcgaggcttgtggtagcgatgcggtggcacttgtggcagtctggtactatggcaccataccactgggggtaggacttgtagtggtgggagcgtgacatactggttttgtgaggtgggacttgtgggggtatgggtggggcttgtggaagtatgagtggggcttgctgtggtatgggtagggcttggcatagatgtgggtggggcttgtggtagtctggactgggcctatgatattgagggtagggcctgtagtagtaagggtagagattatgggcttgtgggtggagcctgtagtagtgtgagtgagggggcttggagcactgtgggtagtggtaatggcactataggtagagcctgtagtggtgtgagtggggcctggcagttctgaagggccagagtctgtggacttatgaactgagtctaggtgtgcagatggggcagggtctgtaatgtggggacagagcctgttgtaccgagggtagagcttgtggcagagtggccaggtccaggcaggaggaacaggactggggtgctctccatgggtgggagctgggtgtgtaggtgggctaggtccccaggctaggctttctgggccaacggcctccactgaagcctcagccaaggcagcattctacactagcctcactgatgtggctcagagtccgactgtagggtgcatgcccatttgccaggactggggccacggtccctcctcatccaagggcccagagctgggggtctc

SEQ ID NO: 152051 - DNA, 1005 bp, Homo Sapiens
  misc_feature (510)..(548): n is a, c, g, or t
tgtgccatattttagtggaaaggcatcaggctgtttgacagtgtgcgtctttccaatcccatgttcctccattcgtgtgtctgttataaaactgagtgaaggctgctatgacctgtgttcactctggttacagggaggtgcaaaccattctgtctcccagcctttcttctctctttgtgtgctcccagcacttccttcttttctaacatggcctggagagagtctctctctccttgtctctgtctcttaataatagtttttaacgtggacatctcttccttggtacagtggtttttaaatcctgagaagaaccaagtcaggttttttaaagcagactaaaagcatgaaattgctttcagaagaatgtatatcatcgggaaaagtttgggggcagagtgggggaatcaggctttattcaaaagaaacagttgaaaacatggactttttctacccaatgcccatttcacgactcctctgagactaattgggaaacggggaaattcttggaannnnnnnnnnnnnnnnnnnnnnnnnnnnnnnnnnnnnnnaggtcacttattagtgaaacctcattttagatctgacattggtagatagatggatttaggccaatatgatgcgtttgtggggaatccacgtgggttgacgttagaacctcccttctgcagactgttgcctgtcatctaagcgaattggaaatgctgagcttccataagtcagctgagttttaaaggtaaacgttatggctgaagtagtaaagcacctgaccacaaaacctcttgtaaaaacagccctgagtaggtatttccagggctccacaaagttgcttatgggaatcctgagctgcttttcaccatctcaagaagcctaagaagttatatatttaatcaggtagacaaaacagttcaaagcataaggtccatggtggtggaaaatggatgcaagtgattctaagtttgtggatttgtggatagcagagggatcgggacctcttggaggagccct

SEQ ID NO: 152052 - DNA, 849 bp, Homo Sapiens
gggagaagtctgacttggtgacactctggcactggaggaggtcaggtccccagggagggccttgtgaggtcggttcggaagacaatggggcttctggtgggactgtttggtgaagccactcccctcctttgcgccgatcgatttcttctgcaagaaatctggctggtctagagggtccctgagatacttggaattgtactccgacgtcatgaagcgtgggccatgtcggaagttctcccgctccagcgggtcctggccctgctgctggtggagcagaggcacttccctgggctccagccccgtgatggcctgaggcccgtgctcctgggtgtcgaaatggaccttccggacctccttggtggggggacccgcactgggcttctcccgcccatagcctgagctggtctggcgcatgctccagggcaggggatgcttgccgtcaggcacctccagggggcggtagctctggctggccacagactggaaatggtcctgggcttgttcccccctggccgggttgtctaaggcctccagactggcttggcatgagaccacgggctggaaatttgatttgtagccggtgcctacgtgactgcccacacggggcttgaaatcctcccgaccgtaggctgtgcagtagctggtggcgtagaatttcagggggtccgtgtagccccccgaactcatcttcacataaggggagacgacccccagggggagtttccccatcatgatgctgtggggcagggccccagggggcctttcctctgcagaggctctgaggtcggggagaggctgcaggaagcagagctctgcagagaagccagccctcctggaggaggccagcag

SEQ ID NO: 152053 - DNA, 634 bp, Homo Sapiens
atccaagatacactcaaaatcttaaggaagcatagaaactggtagtatgaattaggtaaagtcttacagataaaagtttaagatatattttgaaatatatatgcatataatatttgtacacacacacactcacaaaagaatgacgaacctctcagattatccaagttatttttataagatctggtccaatggcacctctctttggaaatcaatcaataaaaaaatcaaccagaagaattacaaacatattaagtactaggctacatttagcgctgggctaggccaaatcacattaaagagtttcaatctctttaaggctcttgattacatttggagaaagctaaaccaactcatctgaaaattaataaagaaaaagatacaagcatttatcctgtcttttctacatgaattgtacataagagtaactaaacagttgatatgggaaagtcctttttagacaattccagctaataaatgtagaaggcatgatagatgtagaatatcgctactttaccacccctctgaatgatggatttaggcaatgagtgatcattaataactgctaaaatcagcaggtgaaaagctgacaggggaactttctgttgaatgaatcagctgacaacatacgacccac

SEQ ID NO: 152054 - DNA, 771 bp, Homo Sapiens
gtatttctattactttttatactgtactttaaaagcattaggctgaaagagtttattttggtggtcaaaaaaaatatgctgtccactcatgtaactattttaaatgttaagaagtaaaataatgaaagatatgttaattactttattcagtaaagttttttaagaatgtttatctcagccagtaggcaaatacttggtgtaaaacaagttggtcttaaattgttgcaactcattagctagtgaagatattcatgtaaatatattttaggattgtaattaattttgaaaatgtagaaagctctttattccatgtaagtatgcaggatgcctgcttttttatgcagttgtggaaagaatgtaaaatgttttaatatattctttgttaatctgagaacttgatactgaatcgttttctttatgtgggagaaggaaggagtaacataaaacatgtttttatcactcaaagtaagcacatggaggtaacaaatattgtgcattttaacagtaatatttgaagatttgtagaatattcacctttaaaactagttagtatgcatttataattttaccagaatatacaactaacaattcaacagtgatgttctttgcatttgtggggagatgtgtgatgttcttggtttttctggtttggaatggaacgtttatagccttgcctgtaaaaatgtgccccagcacttaatgagtgaccgtttgaatccatatgtagtcccattggtgctaatgagagtagctgctgtgaaacaggaataa

SEQ ID NO: 152055 - DNA, 785 bp, Homo Sapiens
ggtagaaccagatatatatgctattttcagtgatttgataacagaagttttccatttggaatttttaaggtctgttaataattcaggagatcttgtaaataaaacttctgttcccagctccacccaactttccccctcctcaagaggatgtgtttcaagcatgtcacaaaaatcatataagtgatttccatctccttctccattattccccctcccccctccgctttttaccgtatgggttccttttggtgggtgattgagggtgatgttatcagccatgacatcagcatgctggctgtgaccccggaaagactggcccccagcgacgttctcagccagcgctcgcagctgtccggggcttctctggcagaagccatgtctctcacatcatgtgccagcctccaccctcacgccatttccagggaacagactgcgggtatgtagcagtgtagtctttaagctgctctgatacatattcagagtatggattgttgtttaaaaagagttgcatgtttacagagttttgtactagcttttcattattgtgtatctagattatcaacaatggggctaccactttccttggttttatatccatttcctcttggaagttcttgtcgcttatgtgacctgttggttgttccccggactgggcacctgcaggagtcagggcagacggcagatgtggctggaggtcagggctcttctgcttagttgtgttagagtcttccagcatgggactgatgggagcagtgggcatactttattcccaaggctagccagga

SEQ ID NO: 152056 - DNA, 875 bp, Homo Sapiens
cctgggggcttttctagtgataaacagacccaggcgtgtgtggtagagttcgggttttttagcacgaagtgggtggctggagtttgcttgaaaacatcaattgactttgtgatcattacagaaatgctggtgtaaggtgttcagaagacaatggagaaaaaatggaaatactgtgctgtctattacatcatccagatacatttgtcaagggtaagacttccagttgtcccttcttgtcggatgggccgctttaggggcggatggggcctctgttcatttaaaatgccttgtgactgctgctgaaattgatcaccaaaggacaaatcattactaagggtttcagttatgtatttaagcggcaggtataagagagatgctagaatctagaaatgattactaatgaacactaaaaataagaagggaatgggtcatttgtgccactgctctgaggcattttcacccatttcctttctaacaggatctccggagtaattggcaaattgtgtttcttggaaatgaaatgctctccaaatggtagccaaaacaactgcggaaaaattaaaaattacaaagccatcaacgctcagagatccttgtttaacttttttctctctctagtactctctttcttttggatataacaagtatttctcatccaaatactaaggtctttgggagttgaaaacacgttgaattttaatgaggcatgtgtaggtatgaacctgggagacaaagtggaatccttatgacagtgggaacgagagcctaatgggctatttaaaaagagaaggaagcaagattagttctgtattccacagtatgagagtatcatagtaaggctgagtgtcttaagaattactgtggttttcagatat

SEQ ID NO: 152057 - DNA, 774 bp, Homo Sapiens
  misc_feature (673)..(673): n is a, c, g, or t
gtaaatatatagcatcgtgtttggtttgggatgtagagtctatacctggctgctgattgcgtcgtttactacagctttttttaaagtaagatttttgctttaccatttatcataagtgtagtaatgaagcaaaatggtcaaaactgggtgtgtgtgaacagagatacacccatattcgtgtatatacacatccacctacatgttttggtctgtggtttaagagactatttcaaggttccatttttataagctaaaacattctaagttaagatggaagaaagccctaaacacagtagattctgagttttttatggtgtattttaaccagagtttctgatagtacctgtatctggctacctatatttccagatctaaagcaagaactactctaagtactgcatttggaatcctcctccattaggaatggccaggacaagtggagctagccattttcattacacggccatcccaatggacactggatccctggtccaactgtctaaaaggccagttgttcctttctgtggatgtggatgtctggccttcacctgaggtagagcggggactataaacacacatcaactttctttctgtttgctttcttttccttcttttcaaactcttaaactcaggcctttatgctgtgagtgactagtccaagaagcacacattntgtagtagtcctgcaccagccctgctcttgaataaaaaggaaaattactgggctgcacccaaatcttctagtacttgagtaataagcatcaggcattggaa

SEQ ID NO: 152058 - DNA, 203 bp, Homo Sapiens
ccggcgcaggcagcggcggcagcagcaggcgagcctcggccccgcaaggccatgaaggtgaagaagggcggcggtggggccgggacggcgacggagtccgctccggggccctcgggccagagcgtggcccccataccacagccgcctgcggaatccgaatctgggtccgagtcggagccggacgcaggcccagggcccaggcc

SEQ ID NO: 152059 - DNA, 896 bp, Homo Sapiens
tctcttcacactgccagcctagtccagccagcgccgggaccttggccagggtaggctcagtgagtgcatgtttgaaccaaggcactgtgctaagcactagggaggaagagaaaggtaaccctcaggtcctgcctggagaagaccccagacacaggctgaggtttggcacagggctgtctgtcctctgtgtctgtcaatgtgtgtgcggtctggggctgggaggcttctgagaaagcttcactgaggagcagctgatctcattgcagagaagaggagaaaggcattctgtgcagtggaaattgtcagtgtagacgcctcggggcttaagagaacgtgacatggaagagacaggaaatatgtactcttgtacaggtatgcggcacacatgtggccccctccctcccagcctcctcactaaagattattaacctgcttattctcctggttcacctgaggctgttttgagagaatctcagtatctcagtcttcatttcatacgacattcttcgggctcctcttgttcatctttgcagactgaagtatttatgaaggaccttcagaaatctgattcctcagcagagtgtgcagcagccatcgacttcagcaggcatctggtggatgctgggcttctagaatctcaggccctctggaagtgcatctcaatccccctcagtatcttgtagcaggctaagtctttttggagagactcaacaagtttttaggtcgtgtgatggagttcctgattgcacactgctgtgctggaggcaattcagagacctcagagcagcgagcgagcccagcatctttttaatctggcgccatctgcccgcctacccctcccaaatgcacattttgatcctctgaagcttggcaaagctttcctcagctgatctcag

SEQ ID NO: 152060 - DNA, 1063 bp, Homo Sapiens
ttcgtgcgtcgtcgctgtgggtcccttgcctcctgcattcacgtgctgcgtgcttgggtcgtctgtttatactcgaatcgttcttgtaacggtgtgtgcatctatctctctctttgtgcttcgctgaatcagggtaccagcgcaagcttttcacgtgctctatttttttgaaccatctgccatagtcgcacccttgctgttgttagctggatgctctaggggtttcatctgggcgtgtgtcgatagtgcggccaatgtcttctgcctgataatcgtcttgtggcaagtcgactgccgagcagagtagagcgtccggacattgggacctggagatcaacatgcagtgcgagcgctgcccgttccttcgtgcacaagcctttcatttctgagatggcctgacagggctctatcggattgtgagccagtgctctcgagggtactgagacagggttgtacaatggttcgcaaactgtgcacgtataccctgagggacctgcctgtgtcgcagaaatgccaggtaatcaattagtgatcttgcacaggacgtcgtggctgtagaacagcttctcactgtcagaaaagcttgttatcgtgttgccaaggtcacacagcgagcggacagtattcgactccagtttaggtgagtcctggggcaccagagtctttcctcggcatcaacaaccacaggaacaaatcacccagcattagtccgtttataaaggcctaccgtccccaaagtgaaaagaggtggaaaggccgcggaaagagcccctggagcacacacgccagatcaacagcacttgttcctccagacctggccaggcagggtactgtgccctagagccaacatccgctcaaagtccccagccccaccactcggaggactgacgacccagttctcccgcaggccggaccgcaggccctaccggcctacccgcaggccgacctttattcgccggaggtccccgcacttggggtcggggccgcatactgccactgtctcagctacaatacataccgagttctgccagataccggtacagcagcaaacgcactaccgcca

SEQ ID NO: 152061 - DNA, 842 bp, Homo Sapiens
tgggcaatcacagagggctcagtctccctctggactctcgtctcaagccacttacacaaggctcttccgcacaagcccggtttcctcgttctgtgacagttgtggccctgaagagtagccgcagcggatggcaggatgagagggagaatacgcggcctcagcccctcctccaggaagcctgccctgccaaccccgacagaccccagggcttggccatgccacgagccaaggcctacgtgacctggtgtctgaatccccagcaccagtccaaggggctgcggtcaccatggtaactccacaagggcgcctgcaggccccaagaccacaatgctcaccacaggtgggcctcctctgcagcagatggggcaagtcgcggcgcctggggacagaggctgcccctcagccagtgagacctagtgcctgcgtggcactagtctgaaaagcagtgtagacgcactgtacccctggcgagattccccctcatgcccaccttcatggcattccctcgatcccacctgtccaggggagacattcaggctctgagaagtcaccgggaagcccttggggctggccacagcaggctgccatgatcagtgccccgctccaccccccgccaaacctctatctgcccaccttcatccacagatgtactgttcattgctgcaagggaaccgtgcccgacacccagtcacatgacctgtggacaggggcacagtgctgctggggggcaagtaagaaatggtacctggaacctggagatcaggtcaggtgatgtagttccccaagggctgtttctaccagctgattatgccaggtgaaccacggaggggcctatggccatg

SEQ ID NO: 152062 - DNA, 140 bp, Homo Sapiens
catataatgaatcaataagtcttcatcataaaggaatgcaccaaggtgaactgtgggttccggctgctgctgaccatacttacggttagttcgcatccactgtaacagcgcctggcggtcggcaggagccacagtgcgaa

SEQ ID NO: 152063 - DNA, 450 bp, Homo Sapiens
gagaattcaatctgtttctatacaatggcaaccaagaacagattggacaacaatgcaaaagagatttgactaagttacaaggtacctttattctgtcagtgagcaggtatttttttatgaccatttcctgcaattggtgaaaagtctcctttcaattctactccatagagttgcactgctgaactggaaagataaccctacagttgctgttctggtgtgagctgcacatcatacagtagtttctgctcatttttcctttctcatataatgaatcaataagtcttcatcataaaggaatgccccaaggtgaactgtgggttccggctgctgctgcatctgatctcttaattttctttctgtatgctccctgcagtgtggtctctggaatccctcctggtgtcggccagtcctggtggtagttttgcatagttgagctggtttctgcagtac

SEQ ID NO: 152064 - DNA, 949 bp, Homo Sapiens
agtcacattggaagtaaatgaggattgtaatccacaaatatctgaagttttaattttaattaaaatatatataatgcatcttagctgattcttacattaaaatcactatttttaataagcctcacattgaatacaaaatacataaatataaaacgcttgggggaaaatattacattttttgaaacaaaagggaaaacgtgtttgaaaaaaatgtgttttacattgtaatgtccaacttgcacaaccatgtttcaacttggaactcatgagttatttggggcccatgccctcaaaattctgtttagcctatttcttgatttgcctgttcaatgaaaaagacaagacaagaaagaaacaaaaaccaaaagccaccctactcaggaatctgggaatgccttgatgatggactcataggcaggtgggggcggtgttgaaaggcccactcgaagactgttactggaccagtagtcaggacggctcagactgtgggaagtgctgatggtgggagagatattggaagaagggagagtcaccagctgactctcagtttccacaggaagtggtggacattgcagaaagggatggaaagtagaagctctgaaacttgattttcttggaaaggaatttgcttgttccagggaagcttgtcgctggaaggtgagactggccaggctgaggttgcttcgacgttcacagccactgtggcggtaaaatccagttctgttgaggccgtgggtgtaagaagacctagatctcctgcttgaactccactgtgagatgggagcactggctcttcttcttcgagacagacaaatgacacagcccaaataaatcctccaagtaccagcccgattgccatggatacagtgaaggacatgataaggtcctcccaaaagttttctggccatggactccctaaacttgttgtgttattagccataatatccac

SEQ ID NO: 152065 - DNA, 881 bp, Homo Sapiens
gcccgaggagaaggaagtttattctgttccagggatcgctgccgccgctcccagcaacaagtcacagcgcattttctcgttgatccagtcgatgtaggcggacacccgggtgtagactaccggctttctttcgggtgtttccagccccgccgggagccaagctgacgatgccaaacacctccccaggaaccgttctccaactggcagttcagtgggccaccggagtccccattgcaggctgagatgacgccatcgccccagcgcacaccatggttttcttcaccctgaagccccaccagtcaatcctggagcacgtggcgtgatccaccacgggctgcaggccctgctgcagcttatcagcaatggggccgttggtccagaggcggccccagccggtgacatagcaggggtagtccttggggagcagggagtccttctctggcaggcaggccacctggatggtgtcactcagctccacatgctctgcaagcttgatgagggcaatatcattgcgcaacaggagggcattccatctcttgtggacgtggatggtgtccacacccacaaacagggatccttcttcgtcttccacctccaggttgttctttcccacggccacacggtaggtccgggtgttgctgatgcagtgggcggcagtgaggacgaagttgctagcaatcaaagtcccgccacacgtatgcctccacgtgtcgttcttgaggtactggagggagatctgccagggccagctgtggggccgggcatcctctcctcccaccactcgggcggataggttgggcgggaagctgggcaccccacagctggaggcacaggccaagagcgcagcgaggacagtgatgcccaacatggttaggtgcttc

SEQ ID NO: 152066 - DNA, 2057 bp, Homo Sapiens
  misc_feature (69)..(255): n is a, c, g, or t
  misc_feature (1050)..(1050): n is a, c, g, or t
  misc_feature (1864)..(1938): n is a, c, g, or t
acagagtccttgtgtctgtgtgtctacatgtctgcgcgtgtccctgtgtctttgtgtatatatatccannnnnnnnnnnnnnnnnnnnnnnnnnnnnnnnnnnnnnnnnnnnnnnnnnnnnnnnnnnnnnnnnnnnnnnnnnnnnnnnnnnnnnnnnnnnnnnnnnnnnnnnnnnnnnnnnnnnnnnnnnnnnnnnnnnnnnnnnnnnnnnnnnnnnnnnnnnnnnnnnnnnnnnnnnnnnnnnnnnnnnnnnnnatccgtgtgtgcatctgtgtatctgtccatgtatccgcgtgtgcctgtgtgtacctttgtgtgagcatcaagggacctcccaggcctggtgctcaccgtccgccccaacgcaccctgcattgcagcgactccagctcggacacagacagcttctacggcgcagttgagcggcctgtggatatcagcctttccccgtaccccacggacaatgaagactatgagcacgacgatgaggatgactcctacctggagcctgactccccggagcccggaaggcttgaggatgccctgatgcacccaccggcttacccaccacccccagtgcccacgcccaggaagccagccttctctgacatgccccgggcccactcctttacctccaagggccccggtcccctactgccacccccgccccctaagcacggcctccaaatgttggacctggacctgctagagtgactccaatagtggaaccaactgatagctcctgagagcagcgcgactgatgccattgcaccaggtgtaccatgctataccgcccggaaggactgagcagagtcacccacctctagaagcagccatgcccgtacctgaacccgtgctccgtgaaactccccattgctatccgggagaagtgccaagcacccatagctcctggagcacctgagaacacccatgaagccacggggccatgcatccagcattccacgtgcgtagacaatcagttggacacattgacacacatcacaagaaaacttgtgacacaactcaacgtccatatcacacaccatgtcncacgaacacggagggtacactaagccagcattcatgaagacacccccacaatgatgcacccaaacacacaaaccaaggcacacaacagtatccagtgcaaaacaatataccctagaacacaaaagatacacacaccacaaaaaagagacgaagcaagaccaacaatgcacaacagagaagattaccatcacagacaggcacaacaccccagaatagcaccaataccacaccggagacacccaccaacaatgacagacaaggagaaagacacacggaacagacacattagcccactagctaggagccgaacaacggaacagaaaagcagaaacaaaagacaaagcaaacacacacagccaaacacagagaacacgaactaacaaaaacgacacgagcagcacaacaaccacaccagcaaaaacacaaatcaaaagacaaggacccaacaagcacgacacagaacctcacagacagacatcgcccagcacggaaccgaaagtagcaagccgggagagcgcctgcagccgcgcccgaatagaagggacacgaaccggggtgccccgccggcacaccagagacccagctaccgaacaacaagagacaatatagacaaccagcaagacacagcgtaggcaacacgcagcgtacagaggagcagagcacaaagagagagtaagatagagccgaacacctacacaacacacctacagacacagtcccacacgacaccatacagacactaacacgccgcacagccacgactcacgccagtaaagagaagaacacgaccacaacgacgcaagcagactccaannnnnnnnnnnnnnnnnnnnnnnnnnnnnnnnnnnnnnnnnnnnnnnnnnnnnnnnnnnnnnnnnnnnnnnnnnncgcaccgaagcacaacaagaggacaccaacaacaaacaatgaactcacgcacacagagagcagacgcgacgcaaccttccacgaacccacacgacaacaacgtcaggcacacccgaccg

SEQ ID NO: 152067 - DNA, 1128 bp, Homo Sapiens
  misc_feature (661)..(661): n is a, c, g, or t
gtagagaatgtgggcaaggatttattcagaagtcaacccttggtgaaacatcagatcacacactcacgaggagaagccttttggtgtgcaaggactggtggacgaggctttatccaaaagtcaaccttcactttacaccagaggacacactcagaggagaagccttatggatgtcgggagtgtgggcgaaggtttcgggataagtcctcctataacaagcacctgagggcacacttgggtgagaaacgttttttctgcagggattgtgggcgaggctttaccttgaagccaaatctcaccatacatcagaggacacactcaggagagaagcccttcatgtgcaagcagtgtgagaaaagttttagtttgaaggcaaatcttcttagacatcagtggacacactcgggggaaaggccatttaattgcaaggattgcgggcgaggcttcatcctaaaatcaactctcctcttccaccagaagacacactcaggggagaagcctttcatctgtagtgaatgtgggcaaggatttatctggaagtcaaatcttgtgaaacaccagcttgcacattctggcaagcagccttttgtatgcaaggagtgtgggcgaggcttcaactggaagggaaatctcctcacacaccagaggacacactcagggngagaagcccttcgtgtgtaatgtgtgtgggcaaggcttcagctggaagagaagtctcaccagacaccactggcggatacactcaaaggagaagccttttgtttgccaggagtgtaagcgaggctataccagtaagtcagacctcactgtgcatgaaagaatacacacaggagagaggccttatgaatgccaagagtgtggacgaaagtttagcaataagtcatactacagtaagcacttaaagagacacttacgtgagaagcgttttgtacagggagtgtgggtgaggcttcatctttgaagttatattctcaccatccatcagaaggacacactcaggagagtaactttagctttgttacaagcttaagtttgaggttgcataacttgtgcgggaagatataccagagggcagacaagaatcccgaaaggcttacagagaacctgaatgcacccattgtgtcccag

SEQ ID NO: 152068 - DNA, 436 bp, Homo Sapiens
ttttcttcaatttaattgaagttagcttagaaaaataatcaggcttgaatggcttttcctggaggaaggttcatgaacattttcacgcttttgttggcaatgtggaattcagctttctttaacagtacagcaagatacagggagcgttttctacaacaggctctctactgcatacaaatatgtgaaaaaagaaaatcacactccacaaagatgtgacattacatgtccatatgccatactgagcatgctcataagaaagtagtatgggcagctccttctggacctaacaaagtgtagcagactgaaatttgcctgttatcagccaagggttaagcggattctagaaggccttgttgcctgtagggttctaactggttgtgatggaaaaaggttggaggaaatgctggtggtgggaactcgggggagtgatgtggtc

SEQ ID NO: 152069 - DNA, 1206 bp, Homo Sapiens
  misc_feature (139)..(195): n is a, c, g, or t
  misc_feature (270)..(386): n is a, c, g, or t
  misc_feature (521)..(603): n is a, c, g, or t
atttgagaatgaggaccccttcgccaggaaaacatgtatacactcaaaattttgcttgcagttctagggtgtttagacccttctcagatacctgtgcatcttatgggttttgtttttctctttgagacagtctcacccnnnnnnnnnnnnnnnnnnnnnnnnnnnnnnnnnnnnnnnnnnnnnnnnnnnnnnnnntgggttcgggtgattctgcctcggcccttgatcagctgggattgcatgcatgtaccaccacgcccggctggttcnnnnnnnnnnnnnnnnnnnnnnnnnnnnnnnnnnnnnnnnnnnnnnnnnnnnnnnnnnnnnnnnnnnnnnnnnnnnnnnnnnnnnnnnnnnnnnnnnnnnnnnnnnnnnnnnnnnnntgagcaactgcgcccagctcttgtgtaccttatgtgaggaagtcctgatccaacccacggatccgcacaacgccacggcccatgatcttgcgtacctcatggatcaccatgtccctatgcgcaggaccccaaagnnnnnnnnnnnnnnnnnnnnnnnnnnnnnnnnnnnnnnnnnnnnnnnnnnnnnnnnnnnnnnnnnnnnnnnnnnnnnnnnnnntcccacgaacagaaccaccaccaaaagcacgcccacacgcatcatcagttccaccgccctggggcactacacacacagtccacgcaactctcagcccacgccgcaaccatcagtcgcaatggcatcacagcacatgcgataccatctcaacaacaccccccacaagccagccacaggggatggcacacacaagacacagcgaaatacgcacacacatggaccacttagcaacgctcgcccgcaccctatgtcaatacagcctgctgatcaaacgggccaccacatagcgagcaaaacagcaacgcggcaacaggctacatcctgcactccagataacgtattagctgcgagtctgggctcatcttgccgaaagagcacacccaggccacgcaggagggcgagaacaccagtgggcatggcaagaagacgatggaacccacactaacatcaggccacaacaaaagccagcacgtacaacacatgccgtccccacacagggcagtcacgcaatcaagcagggacaacccactacagtgtagtacgccggggcgtacccccagacaaggcggggtctcacgccacgcgcaagtggcaccacacaga

SEQ ID NO: 152070 - DNA, 433 bp, Homo Sapiens
aaaaaataaatttcaagctaaaacacctgaaatataatccctccattcaaacgttatctggtccctcttaaagtcggtctgccccctgaggacacatacaaaggcttaagctacattcactaatcaataagaacttatcataagcggatgagacagatggaacttcagcaccctgtttatttgaaaattttccatactgactcagcttcatgatatgttcagcccctcaaagattaatgcctctcctagccattgattctagaatgtcaaggaaaccagttcctagtacatacagtgactgtgtagccaacttaatagtcaacattattacattaagaatattcaagatgtatgtaagcctcccaacaaaaagttctagttgtgctttgtacaactgagtgaactatttatctcacaactcttcacctacagc

SEQ ID NO: 152071 - DNA, 826 bp, Homo Sapiens
  misc_feature (513)..(628): n is a, c, g, or t
aggatatagaacacatttaatgagcagaaactaggtgctgagtgcttctacgtagacagaagtagagaaacgagcagattcatgagaggagaaagaagacacaaatatatagtgcatgtggacaggaactacatagaggaatttctaaaagctgcctccaagaccaattcaggtcctagagggaaaaatgtacaacattgagttctgagaaggctgggcagatacatcacagacaatgcatggtttggaggcatgaaactataacaaatgccttcccaatactctacatccacagggatacaaatgcagtgtcatctgtgggcagtcttcctgttaacttgacacaagatcagccctccatctgcaggtgtcaaagctccattaataattagttcctgagtcaaatataatactgacaaaaacattgtagatctttcatcttttgggggaatttttagtcataaatttaggattccactgtttctttaaagcaaggccactagtagctgaggnnnnnnnnnnnnnnnnnnnnnnnnnnnnnnnnnnnnnnnnnnnnnnnnnnnnnnnnnnnnnnnnnnnnnnnnnnnnnnnnnnnnnnnnnnnnnnnnnnnnnnnnnnnnnnnnnnnnatgacacggcgagaccacatctcttaaagagaaaaactttttaaaaagcaaaaagcaagccactaaaatatgttagcctaaagagggcatgcctgcttcattacagacggtatgacacatcttgagatcaaaactaggatggctttcttatctgggttcctgactgctccttagctttgagttcttctagcatcccta

SEQ ID NO: 152072 - DNA, 1406 bp, Homo Sapiens
tatcttatttattttattatacacctctcccacattcgctatctgagactctacgttactacaatcattctcgggatcggaggcgcgggatctcgagctgggatcgccctcctgggcttctgtgcgatcggcggcgggaggttccctgggaaccaggtggtcgaagggctgagctgtgtggccagacaagaggtccctgccctcccccagtgagccctgctgttcccgtgggagccatgaagctgaacgagaggagtgtagccctctatgcactcagcgactctccagcggaccacatgggtcttcctgcgcacctgggggggcccagggaccccaccgaccccctgtggcactggccgaagatgctggtttgtcctcatgggcaacctgctattctcctttgagagtctcgagggccgggtcccactgagcctggtggtgctggaaggctgcactgtggaactggccgaggctcccgtgcccgaggagtttgcctttgccactccgctttgactgccctggagtgtcgccccacctgatggctgccgaaaggtccccgccccatgaggcctggtcgaaggtgatgtccctggcctaacttctgcgacctgaaacctggcggccccccaaagtttggctagttccgtccgtggacgtaactgcggaaacgcggggctctgccaactcccagctctttcgcgggatgctcgactagcatgcacgatgcgaaccccccatgggttccctaccctctcccacacctgtttcgctttgagacaaattgggctactagcacttctttctcgtcggcctggcatctcaccgccatcacgctttgggtccgcctaccaacttgtcgagccgccggattctgtggcagggtagccacagagatctggttagcggttccctatatcctctctgtcggcattgcgccgcccacgtagttccgtcaccccatagtgggcgctgaagtgatccggtgtcggtcccctcagcgtacctcgttccgaccgcgtcttcgaactactgtgagatacatctggtcgtttgtctgttagaagcctagcttcgctgatattctggcccgagataattgcttccctgttcagatctctacggtccctcctcattggtgatccttcgattctggtctcagtggcgttatcgttgcatacatgcgctgacaagctcagatatgcggcatgcctccgagcagagatttctgtgtatatggtgcgcaccctcagcagcaatgaaatagacctcagtgaacacaacacaacttattactaacgcgcccactcctacgactaaacgtacaaaccgtattcatctcgcgcctgtcacacgaatgcacacggggtagccgcgtctcaactggcgatcctttgataacctgccct

SEQ ID NO: 152073 - DNA, 926 bp, Homo Sapiens
cgagtccgaaggaatttggtttcccagcctgcttagctttgtatcaagtaccaagagggtcccgggaggcgggttcctataactgggaggccaatttccaaggcacttcttcccgaattctcttgccacgttaataaagcaagtgaatgctgaagcccactgaggtgtaaaagggactttgttcaaggtcacatttggaagctaagctgcagctagaactttggtgtccagactcccaggccagatctcccttctactatgctatatcatactaccattaggagatttgaaaaagaaaagcaaagtctgaagggtgatttttccataaattaaatcagctttaaatctaggcatatttggagaatcacgaacttctaacactgttagagacaaagagagatttaaaagctggttaaatctaaacagtgcagaaaatccatatgtacaatattataaaaaaagagaaggaagaagatggcattcacaattactggggaggcagggcagggggcagttgcatgctgggggtgggctgcatgggctgccagctctcctgggtttgaaggatgcggtacagctgcttcagctgagcaacgatgttatccttgatgtctggggttgagatctgcaggcggacactgccactatcaaaggatcgtgtgaaatcaccagaaaacatctcgtagatcatccgagccactactggaatgacctgaaccaagatgagtttcctttccaatggtttcccatctggccattcttccccaaagcataagtagatctcaaacggtggctgcttctctatctgtcctttctggtgggcaatgagatcgctaaggaatgtttccagacaaaatagcttgaccttcttttgtctctcaatcaggcttgggagcaacaagtgatggggcacatgcccagaccag

SEQ ID NO: 152074 - DNA, 848 bp, Homo Sapiens
acagatggacaattccaacagtgattattttgaaacttagcacttgatagctgtgttgtgatgagttctggcctcagataaagtaagtcaaatgccctgctaagcaatataaaatggcagtattccattgatggcaaggcctctttcgtcggcctttaatttgcgtccaggaggcataacccaaagttccctttcccttgtgcgtggctgagggcgaatgaaacttgggccattcttctttcatcaattaatttcctctgccagtcccagcactccatttttcttctgttgtgtttcagcaatgcgaacacatcgatcatgaaaagtattaggcaatcttcacagattgcaccagagaaacttaacttaaacagcacgctgcaagtcagtccctagactcagcagagggaagcagggaggctttgcacagagacatgggggcctgcgttccgggctcatttcctgttgttctcattgtcattgccattctgatcagctgcttcggttttcagcagagctcccctcccccggcttgtttttattctgtgtttcctccagatactgctggacagccttgagcaccgcgttctccaccagcctcttactgagccttactagttcagcgtcatcgggctcccctccgttcttttcactgatttttccttcatctcttgagaaaggaaagcagcaaagctggcccatggcactggtcctgtctgtctttcctggtgttcttctccgtgaggaccccaaatagaaattgcagtttatagcacagtctgcgagcacaccctgcctttttcactccacggagcagcacaggcaagcttgaagagccaatgcacacg

SEQ ID NO: 152075 - DNA, 876 bp, Homo Sapiens
  misc_feature (138)..(138): n is a, c, g, or t
tgaaaaaggtcccccctctgttccagggttctaaggtaagaccaaagaggggccctatttggcagcagaggggcctggatatttgaaagtccgcagaaccagaatctaatctcggtgttcaacagcagcaactattanacccattgagatgcccaggtcaatggccaatagccagaataaagtggtcgtgaatgccccaagagccatgagaaaaaccaaccaagtggatatttttcaccaggcctcagaggggaattccagtttgcaggagttgtcattgaaccaaagagtaacctcaaaatgttgcccataagccagtgtgttccaagaaatttgctaagaccccgaaaatattctttatttgggatccaaagggtgtcaaggtgatcattatcttgggatggataatataaacgcaagaaggtgcccttattagtgtgatcaaacattaagtctgtacaaccaacggaataaggcccatttccccgggggattttagtttggccaaagcttgcagcagccatcagtacttgtatttttgttgacccatgctgatgatttcatatgggcaacaggatttatgtattgccagtcaaaaaggataaaccacagccaggcagccgcagaggcagaaaagcacatgcaatttgggtggcaccatcttgggagctgagcagcagtttcagcttagtctctcaggcgcggcgcggagctgctcgcgggaactggggtccctgggcgcgttccaccgcgcaccaacgcgacccaagcgctccaaacccgactgcttctcgccgacagcactgcgagcctccgaccagccgctgtcccctggctgcgggccgagcagctctggcagcggcgggcgggtgggct

SEQ ID NO: 152076 - DNA, 1265 bp, Homo Sapiens
ggtgttctgtgggccacaatggagtgagttttataaaagcgctatttttttctggaatgtgtgattggtttagcagccttcatattttttcactctagcctttgccttttctaaaattaaaatggtgtaggctaagtctttcgatctgtctctgacctgaggtagggcttttgcagttgtggaaggcagaaggcatgcccatggagaagggtttcagcaaagaggagactgttggcttctgctcttgggtgaatgaaggcttggtgtagacggcgtttcccgctacgttctcgggcccctgcactatgtgaggctattccagctcccttggggctggactcccgagccttttttctttggcagcattctccccaaatgcctgggcaccctgttccctcctgatactctgctttcccaccgctttgaagggccttttctggatgctccttgggcccatgaggactctgttcactctctgcaggtttttgcctacactttgaacctttgccaggctgttttcctgtggttggacagtttctaatttcttttcaaatatttggcatttaaatttgttacctagaaggctggactgcataagcatggcagttttttcttcccttttaacttcatcgatttttttcttgtatttctgcatctaacatcttttctagcaaatacacctttctcaatttattttcataagttgaattgttggatgcaggttgaaacaaggggctctttgtattgtttttcaaaacaggagcttatctccatcttgcacatttgaaaaaagcagtttaatgaatggtaacaacattgattccgcatctagatttcctgctgagaaataaggcaagatgtaatttagcgcagtgataacatcactcttatcataagtgtctagctgctcactccccaaagactgacaagttgatgccactgctgtcttgaggctgcctctggctcagtagtcagcctcaatgctcatgtgcttcttctggggcttgtaacaccttcatgaacactctttctggattctctacagatgcttcttcaaccgtccaaacaaaacgaggacgcttgatcctgacagaataatggggagcgggatggcatcaatgcacaagctggatgccccaggtgcacacacaggtacgcagcacggaaacattaagaaggggccaatccaacagagcgagaaagcacaccagcccaagcgctacatcatagaacacggcgcaaccaccaaaggtgggacaagagcc

SEQ ID NO: 152077 - DNA, 995 bp, Homo Sapiens
ggccggacactcctggcggctgctcagtcttgcacgtggctgtgccaagcgggccaggcagctgctatttccctcagagaagttgctggcggcgctcagggaaggaagcacccgaggaggcggagcggcatctcagccacagagcaatatgtcggacgccttggccaacgccgtgtgccagcgctgccaggcccgcttctcccccgccgagcgcattgtcaacagcaatggggagctgtaccatgagcactgcttcgtgtgtgcccagtgcttccggcccttccccgaggggctcttctatgagtttgaaggccggaagtactgcgaacacgacttccaaatgctgtttgctccgtgctgtggatcctgcggtgagttcatcattggccgcgtcatcaaggccatgaacaacaactggcacccgggctgcttccgctgcgagctgtgtgatgtggagctggctgacctgggctttgtgaagaatgccggcaggcatctctgccgggcttgccacaaccgtgagaaggccaagggcctggggcaaggtacatctgccagcggtgccaccttggtcatcgacgagcagcccctcatgttcaggagcgacgcctaccaccctgaccacttcaactggacccactgtgggaaggagctgacagccgaggcccgcgagctgaagggtgagctctactggctgccctgccatgacaagatgggcgtcccatctgcggtgctgactgcggcccatcgagggccgagtggtcaacgcgctgggcaagcagtggcacgttggagcaactttgtctgtgccaagtgtgagaagccattctggggcaccggcactatgagacgaagggcctggcctactgcgagactccattacacaggtcttccgggacgtctgcacaactggtgcctttattgaaggcaattggttcggactctaaagctggtttagctgttcccggtcacctgctcgaagtccctgagaaccg

SEQ ID NO: 152078 - DNA, 793 bp, Homo Sapiens
tcctagacacaagcctggcaacaacagggctggcgagtcctggcaggctgggcctcccttgcccccgaagctggctccccgcccacctactggtggactgcccctgcaccccggcgcccacgtgcctgctcccgcgtgaagttcttgtcgggccccaggagggagggcgtgatgaagctctccccgggcctctcctgcagccagaggggctgagatcgggggccccaccaagtggcaggtgcgcagagcacctgcacccatcgtccctctgatgatatccaaggcctggtggaatggcttaatttctggaatctactttttaatccgttaatgtacaacatgagagggcaggcagatgggatttaaacatttttgctctagagacttttcttattttgttattttaagggaaacgccacacataatgctcacccctataaataaccttggcggtggacagtggccctccactaagagcagagatgccatctggtcagtgggtggcagggagagggacggactggccaggagcagaaggcatttcatgaggggtcaaggagatggctccgccgctccagccccagccccgccaccgacagccggagccagggcaagaccctgtcctcgcctgctcccgcgtgaagttcattgtcgggccccaggaggtagggggtgatgaagctctccgctggccgtatctgcgccatgaagccgtagaagcaaaggtagcaacacgaggtgccgccaggaccggagctcggggtcaggcccaggttccacgggcacctgcttc

SEQ ID NO: 152079 - DNA, 909 bp, Homo Sapiens
ctagaagtcacatctggtttgatttctgatgacattatcaacatgagaaatgatctgtaccagacgccctgcacttggcagtgatcactaagcaggaagatgtggtggaggatttgctgagggctggggccgacctgagccttctggaccgcttgggtaactctgttttgcacctagctgccaaagaaggacatgataaagttctcagtatcttactcaagcacaaaaaggcagcactacttcttgaccaccccaacggggacggtctgaatgccattcatctagccatgatgagcaatagcctgccatgtttgctgctgctggtggccgctggggctgacgtcaatgctcaggagcagaagtccgggcgcacagcactgcacctggctgtggagcacgacaacatctcattggcaggctgcctgctcctggagggtgatgcccatgtggacagtactacctacgatggaaccacacccctgcatatagcagctgggagagggtccaccaggctggcagctcttctcaaagcagcaggagcagatcccctggtggagaactttgagcctctctatgacctggatgactcttggggaaatgcaggagaggatgaaggagttgtgcctggaaccacgccctcctagatatggccaccagctggcaggtattttgacatattaaatgggaaaccatatgaagccagagtttacatctggatgatttactagcacaaggagacatgaaaacagctggctgaaaaatgtgagctgccgctgtataagttactaaaaatttccggatccagaacaaaaactgggcttactctggcggcagaaaataaggccctggggatccttaaaaaatgcctttccggcttgagtcctggttccctctcaaaccccttatggt

SEQ ID NO: 152080 - DNA, 1137 bp, Homo Sapiens
ggctcgggtatgacatgtcctaagcccgatttgatgtgtctggcagccggcagattaccattcagaatagttttcccgtgtgattaccaagaaccttgcttgtgactgactctgtcccgcctgtgactgactctgtcccacctgtgaccgactctgtctgcctgtgactctgtccctgcctgtgactgactccatcctgcctgtgactctgtcccacctgcgactcactgagttcctgcctgtgactcactcggctcccgcctgcaacggacttggtccctgcctgcgactcactgtggccctgcctgtgactgagtctgtcccgtttgtgactgattccttcctgtgactgactctgtcccacctgcaactgacttcttcctgcctgtgacagactctgcccctgcctgcgactgagtctgtcccttcctgcaactgagtccatcccgcctgtgactctgtcctcgcctgtgactgactctgcccctgccctgtgactgtctcacctgtgactgactccgtcctgcctgtgactcagcctcttactgactctacccctgcctgtgactgactctgccctctcctgtgactgactctgtccccacctgtgactgactctgtccccacctgtgactgactgtcctcctgcaactgactctgtccccgcctatgaatgtctttcatgtgacctgcctcaggcccagagggcagtgagtgtttcgcgattgctgctggtacctggctgtgccggggtatgaatgagactcaggccccctcccttgtcccctctttgtggaactctgggcgagagggctggcgtgcttgcccactgcctgttcctaggtgccagcagaacgtccctgctgggtggctcttgtcctgcctggagaggttgcgtggccggggagagggcggcgggcgacggagccactctgtgcctgtggtcctggtgctggaggccggggtgagaaggcgcaggcttcttgtctccaccgaggcctcagtggggctgtttagctgtcgagtgcagcacttcctgtgcctcgaaagacagccccgtgtagtcagcatggcgcccacatagccagaagggcacgcagccagggcagagtggcacagggggctgggctcaccccg

SEQ ID NO: 152081 - DNA, 891 bp, Homo Sapiens
tttctgactgaattttatgaactcattctgaagaggctgacgattttactgtctcatttttttcctttctccaggaatgggttctgggtgggtcccctgggtggtggctctgctagtgaatctgacccgactggattcctccatgactcaaggcacagactctccagaagattttgtgattcaggcaaaggctgactgttacttcaccaacgggacagaaaaggtgcagtttgtggtcagattcatctttaacttggaggagtatgtacgtttcgacagtgatgtggggatgtttgtggcattgaccaagctggggcagccagatgctgagcagtggaacagccggctggatctcttggagaggagcagacaggccgtggatggggtctgtagacacaactacaggctgggcgcacccttcactgtggggagaaaagtgcaaccagaggtgacagtgtacccagagaggaccccactcctgcaccagcataatctgctgcactgctctgtgacaggcttctatccagggatatcaagatcaagtggttcctgaatgggcaggaggagagagctggggtcatgtccactggccctatcaggaatggagactggacctttcagactgtggtgatgctagaaatgactcctgaacttggacaatgtctacacctgccttgtcgatcactccagcctgctgagccctgtttctgtggagtggagagctcagtctgaatattcttggagaaagatgctgagtggcattgcagccttcctacttgggctaatcttccttctggtgggcaatcgtcatccagcttaagggctcagaaaggatatgtgaaggacgcagattgtctggtaatgaggtctcaagagctggtctgctcctca

SEQ ID NO: 152082 - DNA, 836 bp, Homo Sapiens
gggattctgaagaggctgacgattttactatctcatttttttcctttctccagaatgggttctgggtgggtcccctgggtggtggctctgctagtgaatctgacccgactggattcctccatgactcaaggcacagactctccagaagattttgtgattcaggcaaaggctgactgttacttcaccaacgggacagaaaaggtgcagttgtggtcagattcatctttaacttggaggagtatgtacgtttcgacagtgatgtggggatgtttgtggcattgaccaagctggggcagccagatgctgagcagtggaacagccggctggatctcttggagaggagcagacaggccgtggatggggtctgtagacacaactacaggctgggcgcacccttcactgtggggagaaaagtgcaaccagaggtgacagtgtacccagagaggaccccactcctgcaccagcataatctgctgcactgctctgtgacaggcttctatccaggggatatcaagatcaagtggttcctgaatgggcaggaggagagagctggggtcatgtccactggccctatcaggaatggagactggacctttcagactgtggtgatgctagaaatgactcctgaacttggacatgtctacacctgccttgtcgatcactccagcctgctgagccctgtttctgtggagtggagtgagaattagtttctagtactctctgggcctgactcaggactatactgactcaatacagagcctggggcacttctgcgtttatcttggtcacaaccatgaattattctttcccttgatctggacagtcccagaaaccaa

SEQ ID NO: 152083 - DNA, 794 bp, Homo Sapiens
gtctggatgtctgcaaatgggtccgtttaataggtggaagtctgtcttccttcttttgtagctcagttttccaagcctccgttaactctttgtgcaatgacatgttcctgcacagaagacagcccagatgatatttgtttgccgatacatgaagccacgcaatccaaggaaggctgaagttttatgatttccataaagacacatcacaatacgcaatatacagagtcaacaacatagatcctgcttctgtataatcaaggaagttatcatacaataaagtgttggaaatactgctagtgttaatgttgaccaagactctctggatacttgaggcagccttgtttctgggttgtaccttgcagaaaagcaaatatagtaaatagaagttgccaacactgaagagaagattaacaaatctgagcatcccaatggagcagacaacatgttcagaccatccaaagatccaaatggcaggtttgatcactccaattgacaccaggtacaagccaggtaatgtagtaatcatgggatcccactgggaaagggagaaatggccctcacagtagcgctgcgcctgaggcacggtggaagatctcgtccatgtagggctctcgcaacgcccggctgaagcgcggagaagaggaggcaggatactaaaaaggtacagctcaaggcggccgagaaatagtaaccttccagctgcgccattccagctcccacagccactgcccaagaacctactcctggaaaattctgagcctggaaacccgagctggaaacttgggctcgaaatg

SEQ ID NO: 152084 - DNA, 802 bp, Homo Sapiens
caggaggtcgtacaggttgtaggacagcagctcaaataccaggcacaggtggttccggaacatgaagtgccgcttcaggtgtactatatagtacttcatctccgtgtcatgctggttcatcagcgtccagcaagccgcagctcaatctgggccttggttcaggaaagcctttttgttcttgatgatcttgatggccacaagctcctgggtctgatgatcataggctttcaccaacctggccaaaggagcctttgccaatgagcgagtcaatttcgtagcgctccagccagcgctcgccaactgcgcacgatgtagtcatggttgtcgtcatcataaccatggttcaggaccttcttctccttcttgttgctcgaatcctggggtggcgcctgctgggcccgccgcttcttcttcgcatagtatacctcattgatgtgcttgtaggtcttgatgaggtccacagagagcttacgcagcggggctgaggttgcatcccggaaggccaggggcagcctccgaggcagtagccgcacatcaggcaatacctgcgtgtgctcctggggccctgggaagccagagaagggaccatggcccggtgggacggccatggtgggctcagagggccgcaggggagcgaggcctggagcgggagcccggccggggggcgccttcttgcatcctgcacctcggctgccaccgccgctgagacctgaaggagcgggcaaggggactctaactgctcggggagcccgagctcagacctgcccactggctgagggtatccggggacgcggcaagccag

SEQ ID NO: 152085 - DNA, 507 bp, Homo Sapiens
taggttaaaatcttcattgtagaaagtttttttaggaaagcaataaaatgtaaaataagattcgatgtggaaaacagcagtaaatactatgagaaggaagctctcctgatggaccctgtggacggccccatccttgcatctttgttggtggggccctgtgccctagagtacaccaagatgaagactgcagatcacttctggaccgatccctcggctgacgaacttgtccagaggcaccgcatccacagctcccacgtgcggcaggactcgcccaccaagcgtcctgccctctgtatccagaagaggcattccagtggcagcatggatgaccggccatccctctctgcccgcgactacgtggagtccctgcatcagaactcccgtgccacccttctctatggcaaaaacaacgttcttgttcagccgagggacgacatggaggctgtgccagggtacctgtccctgcaccagacggctgacgtcatgacctaaatgctgaacagagac

SEQ ID NO: 152086 - DNA, 1056 bp, Homo Sapiens
tcttaaaaattccttttgcttgataaatagaaataatatctctggttctactttgggaacataaatgtgccaagaatccagtcacttactggcaaaccaaagggtgggaacaattcatttacacgttctactcaaacacagtgcaacactgccgtgttcatatataattttctttatagttaccaaccacttttctggcaaagccaaagttttggaatggcaaaagccaacagaagttttagatctcaaagctccagaagggaattaatctgagtcttcatcatcgagatagtcctcggcattgcttaatgttcgaactgcatctgttccctgtttctttttcaggagagatgcacaggcagcattggtagccatgtcgaaggccagcttcttctcaatgtttcttaagtctgttctagcaccttttgccagaagcaactggacgatatctgcataacccttccaggcagcagcatgcaaagctgtatctcccaacttgttctgctggttcagttcaatatttggttgagtaaatagcatttccactatatctttgtggcccccgtggcaagcccagtataaggcagtgcttccagctttgtctaagccattaacacccactctgttgtccaaacactctctcaaccagctcaagttgcctctttttgctgcttcatgcaatggattgtcaatggattctgcctgctcagccacatagttgcttggaattagtccagtcctgcctttggaggtgcctttccaccaattggtatcgctcatgtcagtaatgtagataatatcaccttcctcaaagtataattcatctggagttctgggttcaaacgtatacagggctctgaagactttaacttgccctggtttgactggtttgggtggcacggcttcgacatactcgcttcctggagctgcaaatcctaaagagccccgccgaaaagcccaccgcttgcccgccacctggcactccgggcaccccagttctttttgtctggcttacaaccgtgcgcctctaggaccaggcgcccaccttggctgcgg

SEQ ID NO: 152087 - DNA, 846 bp, Homo Sapiens
gatcttcttccaaaagcttacctggctacctctttacacctccacccattcctggccctcaccagcattcctgtaccattgcacatactataattttcacaatgttcgtctctctcctcacttggaaccagaaattctgtgtttcttttttgttcactgctttcccctcagtgctcagaatttagtgcctggcacgcagggagctgagtgaaataataaatgagtgaggaagtgggcttgcacctgctttgggttttctgtctatttcactgattgtccattcatccgataacacagtgctctcattcttagtttttacaaaattttccaatatcagatagtataaatccttcctcagttttctcttttccaaaattttcttagctcttctcacctatttttctgatgaccttttaaatcaaaaggctgtattttcaagcaaaacccttacatttgaagaaagatggcctaaacacttccatatgtgtgtttatctgtattgtactgcaggttatctaagttcccagattctctactggactacaggctcctcgaggcccaggacaactcttgctcatcattgttcccctgggtcttggtgaattccaggagctcagctgactttaccaaagccacgagggcatgggaatgtgaggctggaggaaaggctgccttcccatctgttatcctccagaagccctgctccagacttctgaattccattccatttgagtgccatttatctgctggcgattttgtccaattgcaaggtcactggtggcttggaataggtggaaatggctacaagggtttggcaaagagtctggggggcctggaggagcagtg

SEQ ID NO: 152088 - DNA, 792 bp, Homo Sapiens
gctggagaaggcaaaggctgtgagcacacagcagcgagagagaagtacgtgtttacaatggccctgcactgtttgtctcacaggttcagcaatggccgagttaaagctgggccaaacatccacagaaagagagtcccaatcattgcaaacaagtctgagtagtatgcggactcttcattttcatgcccctttctcagtccagatcgatacaagatgcctgctacagccaagccaaagtaggccccaaaggcatggatcgtcattgatgctccaatgtcagaggccttaaatatttcactaaccaggtattcattgtgggcaaagaaaacatttctaaaattgtcatgatcagcatttgggtggggctcgtttttcccaggacagctccaaaagatatcagaactgtggctgcactgaagtctgcatttatcatgtttttgattccaatgttaaatttctgtcctggctttgcaggattccctgtacaatagtgccccactggaggcccgaagcagcaacgagtaggttgatacccacactgctgaagccatatttcttcaggaaggtcatgaggaagccaaacccaacaaatatcataacatgtacatcttggaacagaggatataactcaaagaatatgcccatgtctgttggcttggtgatgttgagctgctcgagaacagtctggtccgtttcatactcaacaaataatccaaataaaacaatcatggcaatttccaggactatagccatgagagggaatgtgaacctcatgtttgtggcaaaggacag

SEQ ID NO: 152089 - DNA, 1299 bp, Homo Sapiens
ggtgattcgcatgcagttccaagtttgagaagtgctgggctacgaggctgggaaagttctagaatatttaggttagcaagcttcttaaaataggtccaagagagaagagaggagcagaaataggctgggagggatgatggcagccaagatagaagcagggtctccccagaatgccaggtccccggggacctcctggccttcctgcttcacagcagtgcaaactgagccctgcaggggacgggaccagcacctgagctctccagccgggagggtggcccagaggccctcagtcgtcctcggccttgatgaggtggccgctgaaggtgatgtaggtgtcgaagtcgttgctgtagatggcgttctcgcgctggcgcttgaagagccgcacccagacgcggtcctcgtaggccaggtccagcatcacactttggctctgcatgatgctgcgctcgttgggctgcgcgtacaggatgacagcactctttctggttatgcataatgtgcacgtacgtctcccttgtaattccagctgtgcacattgaggctgaagaagtagatgccacgcaggggagcagcaaactggccggtcgccatgtcaaagcacccatcaaggttcacaaagaccctttcgaagagcagtgtctggaagtcctcgccgctgtgcagggccgtcttgcggcccactgagaaggcgaagaagcgcttctggcacggggcgccggggctgcccatctcccccttgtcacccttgctgccctgagggccaggctccccttggggaccctccctgcccatgtaccctggcaggcccattgggcctgggtcccctttgtcacccttcaggatggtgatattaatgtagggtctgatctcaggcagggcgtgggggcggccggaggaagaggctgaggatacatgggcaggatccagggggtcctcagacgtcacatgcaccgttggcatgccgctggccacagctctgtcaaaggtgagctccaccatagggatctcacacatcaggagaaagagcaggagcgctgcccagacgggacccagggcgcgctgtcaccatggtgaccggagcgtactttactcaattgttaaaagctgtaaatagctcaagaagggggggttacttgactcgataaagggaagacttagctttccaaaaaaaactgtctcttttcgttcctttcttttttctatagccaagtcagccattggggctgtagtctatttcctttgggttgagggtgttttctggtatcgtcccttcgtggttcaatccacgacagcgcc

SEQ ID NO: 152090 - DNA, 1098 bp, Homo Sapiens
  misc_feature (607)..(622): n is a, c, g, or t
  misc_feature (722)..(802): n is a, c, g, or t
  misc_feature (814)..(822): n is a, c, g, or t
caaatgcccccggtaattctatacctcttttcccaaccaggcttctttgaccggttccaacctttggtcttccggcccggcacaccggggcagaaaaacggcggaaaaacagcggcggggaacagttgtgtaacccaccctgtacattcgggcctcccacgagccaccattgaccaggacttaatcaagttgtgccaaccgtatggaaaaattgtatctaacaagggcatttcttgacaaaaccacaatccggtgcaagggttatggttttgtagattttgacagtcctgcagctgcacagaaagcggtagcatctctcaaggcaaatggcgtgcaggcacagatggctaagcaacaagagcaagacccaacaaacctatacatctcaaatctccccatttctatggatgagcaggagcttgagaatatgctgaaaccctttggacatgtcatttccacaagaatactaagagacgctaatggagtcagcagaggtgttggtttgccaggtaaaattctttctttgtatgtaatcgttctttcctcattgttccttttaaattccattccttttttagtactagagcccaaagcaatagaatatgcnnnnnnnnnnnnnnnnttaaaagtagcttatcaaatctgtcatccctctgtgtcttggctgggagctaaataatttcaagggtaattataaataaacggtgctggtccaattgtcnnnnnnnnnnnnnnnnnnnnnnnnnnnnnnnnnnnnnnnnnnnnnnnnnnnnnnnnnnnnnnnnnnnnnnnnnnnnnnnnncaaaacaacaannnnnnnnncgcgccacaaaagcaacacccacgggagggagcacacaaatgaagagagacacacgggttatcagaaaagagcgagccccacatagagagcggcatataatatacgacaacaagcgagagcccctaaaaacaacggacgaggaagggaaaacacccagcacgtgcaccagcggcagcaaagccgggggacaaaaaccacacaacagcggggggcaggacaccacaatacgcgaaaacaccacaccacagagagatatcaacccgcaccgcgcagag

SEQ ID NO: 152091 - DNA, 1003 bp, Homo Sapiens
  misc_feature (350)..(439): n is a, c, g, or t
agctggacttggatgctggcttcatgacctgtgctccccagcgttcccacctgtgtgatgtccctcccctggtaatctgccggaggccctaggactttctgacccacaggatgccccaggaatgacaccatatgacatctgaggccaggtcacacaaagcctggcagcttggcctggcctggtgaacgtgctctggagggagccagctgccacgggagaatccaagcataccccgagaaccaccatgctgcagggaagcccacgccagccacatgggaggccagccggccctagctgttccagcgcacccaactgagggcggggcgcgcaagatggccatcctggacggnnnnnnnnnnnnnnnnnnnnnnnnnnnnnnnnnnnnnnnnnnnnnnnnnnnnnnnnnnnnnnnnnnnnnnnnnnnnnnnnnnnnnnnnnnccctgggcaaccacaggccaggcgataacgcgggtgctttaaggcactaagctttggaggagtgtaggttacacggcaatagttaacagggaactgcgagtcgatctcaagctcacatggcccagtccaccctgagccatgtcccctgggccatagttcagaaagcaggtgcaggtcagggttcaggcccagtgtcgggcctcaatcatcgtacctgcccccgcggcaggccgtggtcggcatctggacgggggtccttggcaatccatgccccaatcgaagcactgaatcctgcctggcgaccctcgccaaacccaggacagggccgtccatcgacgcaatggtgcccagaaagctcctgggaccttcactgacacacggcacttgcaccagccgtgtagccggatcgtcttactacagactacttcctcagaagggagccctgctggttgggagatagcacctcccggaccacactgcggctatacccggcgctacacgtcagaaagcgccacgcacaccccagagatctccctatactgcgcatacaccacgcacagggca

SEQ ID NO: 152092 - DNA, 865 bp, Homo Sapiens
gggacagctccggacaggtgtggggtgcacactgaaaatgccacgctccttcctggtgaagagcaagaaggctcacacctaccaccagccccgtgtgcagtgaagatgaaccgctctggcctcctgcccttaccccggtgcccagagaccaggctccaagcaacagccctgtccttagcactctattcccaaaccagtgcctggactggaccaacctcaaacgagagccggagctggagcaggaccagaacttggccaggatggcccctggcaccagagggcccgcgattgtgcttgtccctgaccccatggatggggactctccacgtgtcctgacgtcaacccgccatttctaacaaggccctaagcttctcctgggacaccttggccacaacctatggccacagctaccggcaggccccctccaccatgcagtcagccttcctggagcactccgtcagcctgtacggcagtcctcttgtgcccagcactgagcccgccttggacttcagcctccgctactccccaggcatggatgcgtaccactgtgtgaagtgcaacaaggtcttctccacccctcacgggctcgaagtgcatgtgcgacgctcccatagtgggacccggcccttcgcctgtgacatctgcggcaaaaccttcggccacgctgtgagcctggagcagcacacgcacgtccactcccaggtagcgcagccttcgagtgccgcatgtgcggcaaggccttcaagcgctcgtccacgctgtccacccacctgctcatccactcagacacgcggcctaccctggccagttctgcggccagcgtttccaccagaagtccgacatgaagaaggcacacctaaattca

SEQ ID NO: 152093 - DNA, 1013 bp, Homo Sapiens
gggaaaaataactagaagagaggagtcccaagatctacaacacaggtttagacaaagtcacagagtcaccacgaccaactaactggggaggaggggaagcactgctcctgtaaatcaacgaacactgtgtggccacacaatggaggactcccagtaatggaaactataggccctgaataatttagaacagtagtgttgacaatagtatacacccattgtcgttcccctagcccatatgcctgtaatgttttaattatttatacaaaatcccaaaaccccatccttttaagttatagtgttttgttggttcccttttaaactctggctcatgtcccaaatgtataagaagttgtggtggttggttggttgtattttttaaaaagtcaagtgtgtaaaaatggcagtgatctccccagtgactgttttgtccaaaactcccctatgaaaaatttaaaacaattaaaaagaatatcaggttaaaaatcaacatggcaatcagcggcctgcaactggccctgcgactttggtgctcaggaggtgaaaagaaatgtccagagaacagacactgaagcctctgaaagttgtgttggtttgtcagtcagcattccccattcacagattttttttccttccatttttgagaaggtgaaggtggggagggggttgaagagaaagaaggaaggaggcagagggtttgaaataaaagtaatgcattcctggagttgggaagtgggagtagcagaggctaggcagggcagggcagagcgcaggccaggaagatgtttggtggcaggcgccatgccatccaggtggtggagagtgaagcttaagactgcaattgcagaaaaagtccatgaggagagaagaaggagaaaagggggaagagggcagacccagctgacgagcacagctccacacaaaccaccctcgacatccatgtggacagatggacactcgcacacccagcctgataggagcccaccctgaaggcttggaccacctcgtggcagcag

SEQ ID NO: 152094 - DNA, 661 bp, Homo Sapiens
cattttcattttcattttctctacctttggaagttctcagttgctctgagcagctactcacgggtatggggagcatggtctggctggctcaggggtgggtaggaggtgacgggtgggtaggcaggtggccagggggcaaccgtgtgaggccgtttgaactggatgccccttggatacaaactatctgaggatgtgctgtcgtaggagcctggcagtctgtggcagtgcacacacagtgccatcaacatggccaggatgggcagcagcaggagccccagcacgcaggggaccaggatggcctcctccatctgcaggggagctcggagcaggctggctgcacccctaggcccctcaagggcagagtcaaggccagatgaagatggggtgaggaccggacccggcagggagcagggggcaggtaggcaccaggtggcaggggagcccgggaggaggcagctgtgccctccccggggctcccgggatgggtcccctcttttactgggctgagtgtgcgtccagctgactgtggaaagtccctgctcccagggtggtcagaccagggcctgggctgaagtcgggggatccagttaccctgcgtcccagccctacctgcccctcctcggcgcccgcctctccgtgcccgccctcccgcccgcctgcg

SEQ ID NO: 152095 - DNA, 938 bp, Homo Sapiens
tgaggcgtcctcaaggcgtgcccctggttcctgcttcttggcaatggctgctctgtttcagaagggtactgaaggctgtgttaaaaatctttaagggtgcctccaaccaccccaaggatgttttcatcttcctcgtaacatatttttgaaacctcttcaccaagagattctttgataacctccactggaactcctgctgcaactgcttgctctgcaattggttttttcaaagtcttctctttccaaagatttccgtgctttcttttattttgtgctttgccaatgttctctgaagtgcaacattcagccgttcaaactctgggaaaatcagtttgcaaatactctctgccaaagtgtgaagatagactcggctccgactggtttttctttgaggaagactttcttgtatgttcttctcaggaatgtcttgacagatgggcacggttgctttgcagctctctgagcttcctgctgcctcctctgaagactcgttaggaacttgacctggtgccagtaaggagaaaggacactctcctgtgatcttgagatccttgagcttcgtgcagaacatggtgttggtgtctcttaccctgctgcgatctcctcctgatgagctgtagttcttatatgagactgacaaacagaagccactatcaattcaaggacactggtaactgggatgtttggtggcttcgcacacctcggggctgtgcttccggatctctagcagctccagggcgcgcctcgcaaatccgcactgttcaacaggctaggcgggacgcggcgtgcctcggaaactgtatcgcccgcgtggctcccagacagtcctccttgcctttgtctctctgtgtctgtgtctccctctttgatcaccccaaaggaacccttgcagttcctttccataaggcattcgattttttcagacctctgcccgcctc

SEQ ID NO: 152096 - DNA, 1242 bp, Homo Sapiens
ctcccagcagcaggcggtcgatgtagcctgcagctcctccagtgctatttggatacttgccaaaatctccaatgcccccaggaccaagataaccagtagggcacccagggactggcaggaggaatgtcaagcccagccacaggccttccagcacccggatgagcagccactggggccagctggacgtgatgtctcgaagagaaaggcagctcttctccgagtcactatgttcaggcacaggtttagcaaagaggagctccaacacagcaaccacaaagtatgtcactcccaatcgctgcagcacaccaggaatgcgcaccttgtcccaagacaatggaccaaggcaataattgggattcacaatgataattcctatgcagattaacaggaaactcctccatgcaatcttccccagcaatctgaattttgaacacccccgttgcagtatagaagtcatcgatagaaaaatggaagatcccataataaatacaaaccacgggaacacgaggtcagccactgtcagcccattccaacttgcatgtttgaagtaccaatattttcctcctccataattgacaaagaccatgagtataagagcaatccccctgaaggtgtccacgctgcggaggcggggcggcagggcagatagacgccacgttgctggctgaacatcaccatcgagagggtctgtcctgctgggagatcccagctcagaattgatgaggcgatcagtttctcgagaacttatggctttagaaatccaattgttaaagtcatccaaactcaacaagagcctcagaaaggatatcacaatgatgacagcaagaccaataaggaatgcaatgctcacaggaaggttactatcaactggatcctcgttcacagccaggtcacaggcaatttcactaactccattatggatgttctttaccaagagagaatagtttccaaattctccaaatctgtattccaacctacaaacttctttctcttccaaggtgtcgttcagctgcaggatagatccgtgctgggtgctgacagaggcagctgcagcactaggcttccctgcttttggactctgaggaacgtttaccagaacctgaaacaagcagtgataacagcattcagatttccagtagacggtcaagttggtccagagaagttcattatggatgagtagcaaagcctgatccatcttcagctctgcatgtctttttttgtctaagtctggtggcggccgca

SEQ ID NO: 152097 - DNA, 1097 bp, Homo Sapiens
tctttgtcccctgccatctttccaattaccaggatatgaattcctggatgttgagatatgccccagggatctacttgtgcatttaggaccgggaatcatccatgcccggtatgccaggaatttcttggggttcagtacaatcttgtgggttaaggataagcaatgcaagtactgtgtatttattgtcggatgcttgactcatcgggtgaggagacatgccactctttgttccccgtagagtccttcccagttcacaggagtcttttcgatcatcatttttcagcttgctctcctccattgattgagaaatcaggatgcttggcctctttgggctcctctgttaatgcttgttaacgatacaggaaggctgggcacaccactctctttattaggagttttcctcggactatcctcttgtaatttcttctctctatcaagttcttctgacttttgctgatccagatatttgggctggtatacataatgatgccatgttcttgaatctgggtcttgtttaaatctcgaggttgggtctacacctgtctgcttcatagagtccatgacagacttcatttctacagcctccttaataagctggtggttttccatctgcttagcttttgaagctgtcggcctgaagctgctgctggtgattggagagaagctgcgatttacctgtctcctcagttttattaggcactgatggccctagtttagaatggtttttgcttaggctccggagtagagggagcttttgagattgtggcctatggcatatttttctgtttatgtttcctccttgcccagctctttcaaggggagctcacttttcctttctcagtctcctctcccagtctgggccattttctgctctgccagtcctctggtcctcatagtacttctcatactgctgtctataggcagggctggtggccatcatagacttctggtccatatagagcccatatacatactggccataataaagtgactgagccaggacaggatgtctttgtgtgatcaccgactggtgctgaggctgtaaggatacagaattgtggtccactttcttagaatctaactgctctgccttgtct

SEQ ID NO: 152098 - DNA, 803 bp, Homo Sapiens
  misc_feature (322)..(322): n is a, c, g, or t
  misc_feature (434)..(434): n is a, c, g, or t
  misc_feature (566)..(590): n is a, c, g, or t
cacaccaaaaactatatgccctctctcccgcgtggagaataaaaaaataatgttgtgttctccacgcaaataattctatatatactgccccctgcggtgtatggcccccacacagctcttctcgttaacaccgtccgcgcacagcaaataatatttccgcgcgtcgtgattggtgtgtaccacacaccgtatattaacaccccgtctagaaaaatgttgataaaaagtattcccctcctctatgaggcgcgttttataaatcttctctctgtgatagggtgtgggttttttgtcgcgccacactatattggtgcgccccgcncccacacggagaggataaaggtggtccccttctcccacagagtcgccccgcggtgcgcccgtttttccccaggctcctcgaccggttgttgtaaacactgcgcggcgccgcntgccgtgtagctcgttattaatccaggcgctccctcatatatggggcgccccacagttgcccaggaaacccggggaacccgcttataacttgtggcgccccccgggggaacttttgagccccctttcccccnnnnnnnnnnnnnnnnnnnnnnnnngagagagagaatggcatggggctataagagactttaactggatcactgcctactcttcaaacatttcaggaagtgctgtgcccagcctagtaaccagccagtatgagggccacagagtccactagacattctgccacaagagccatcaagtacagtgttgggtcatgacctggggtggctgggaaagcagcacaccagagagctgcgccgtcc

SEQ ID NO: 152099 - DNA, 835 bp, Homo Sapiens
  misc_feature (620)..(620): n is a, c, g, or t
tttttatgtttcctcatttattataaacacaagttcgcaggtaaatagagggttctaaaaaatacacttaaaataaataattgggattctcaaagttcttagggcaaataagttatatacagacaggaaaagcagagcaggcccttctcactgggagggtcccgagggaatgagggtgcaagaactctggggagggaaagctggagaggacacagccagccaggatgccagcctcaggggagccatccagcctccagggctggctgaggcatgcgtgttcgtggctgcacggttgctcctggtttgtagcccagcagacaggacactcctcaggacgcagcctccagatgaatgtactccccatgcagttcttccagcagagctgtgggccagcagccagcactggaggctgctccgcagtctggaggccgagggcttccctgggcagtgcgaggacacagaactgccttggacgaggctccctcaccagggagcttgtgccaatcctggcaaatgggtccagctgtctgggaccaaggccccggtccaggaagcaggcagagagtccacaagccctggccacttctctcctcctctctccccgcgggcttccttcccantgttcctccagctcacgacactatctcttcctccacctggaatgtgtggaccgaggctcccgcatggcctcctgttgtcgcttggcaagaggctcttgactgtggaaatgtccctcagcctttggagaagctctcctgtagtggcacctgtcttgccagtctggaacacgtctgcaggggacttccggcttgggactgccccggcttcagtccag

SEQ ID NO: 152100 - DNA, 916 bp, Homo Sapiens
gacttcacgcccaagtcagcttccatcaggaagatcctggcgatcttctcacatggcccatgcaggattctggaaatcagcgggtactcgcagtcttttaattttgtccgctccccagactcgtgaacgatgtagagtgcgaactcactggggccatcttccaccctaaatttgttcagcagcagggtgagcacctgcagggttgtcatggtgctgttgaccctcacattggtcacggatccataggctggagtaaacacggaggtcttatgattgtagaagtggccgttgatagagaaccggtgtcgccggatgcgctgggcctcaccgggggcgcggcacttgggcctcctctggctcatgcaactggcgtcgctcttggtccgcatcagctggggggcctcctctgcctcctccaggggccccgagctgtctgtggaactctcagccttgtgcactggctgaatgcttggcccctgggctgtgatgttcccgttctggggcgatggctcctttagagggcagctaggccgtctgggcatccatgaggtggaggggaggtgcacctgctcccggtcatcctgcatctgcagccggatgggccgcctcagcccccaggcaatgttgaggagcccctcgatgatcagagtcccttcttcctcacggtgtctcagctggaagctcttgccctcatggtagcagcttgtaggttttcagcaggcctaagagctccgacttctgaatggacttgctgtcactgatgggcacgtgagaactcggcagacagtcttccttcatcttctcttcctcttgtctgcagacctagaagttacttgcgtccagtcatcgcgcagtccagaagccactgcatgtgtcgtgtcctcgcttgcaccggagctgcgcccgcagcgcctgc

SEQ ID NO: 152101 - DNA, 1362 bp, Homo Sapiens
  misc_feature (306)..(306): n is a, c, g, or t
  misc_feature (318)..(318): n is a, c, g, or t
  misc_feature (436)..(436): n is a, c, g, or t
  misc_feature (440)..(440): n is a, c, g, or t
  misc_feature (451)..(453): n is a, c, g, or t
  misc_feature (455)..(455): n is a, c, g, or t
  misc_feature (457)..(457): n is a, c, g, or t
  misc_feature (693)..(751): n is a, c, g, or t
gttgtttgttgtttcgtttgtgccgtactcggagtgttgaggggcttgtgggagtggtaggcgcgctatatccgtgcgtggtgttcatatcggtcggcctgtgggcggaggcacgaatggtgcggcgcttttgttgccctcttatttaaatctccgctgctcttggtcataccggtgtgttgccctcttgcttcgtgcgcggtgtggtgttaggttgccgtgtacgccttggtgggcggcggctacgcgtcgggcaaagcgtagggtggtgggaggatagggggcggcgggctcatcatctggttngtggcgaggcgngccatgtgatctgagctgtgctactgatcgatggtttctcgctgacgcttatactatgggtgtggatctgtgcgacattgcatcatttcttagcttatgtcttctgattgctttgatntcgntggtgtggtcnnngngngaaaaggaagggattctctgtcttgagcgggagatgtggtgtgcttgctgtaggtactcggggtcgcgctgtgtgggcggctggtatttatttactaccatgcgcgaagtgtcggatggaaatagccgacgacgcagtttgcgtcacatgttttacggtggtgtgagtgggacggcgggaagggaaggacaatctttcgcatttttgcgaatgacgggttgggcgaggccaaattnnnnnnnnnnnnnnnnnnnnnnnnnnnnnnnnnnnnnnnnnnnnnnnnnnnnnnnnnnnaatcggataggggctgcgatggaagattagtttggattcgcggaaagggttgtgtttgcgacggttggggggggcgcatggtctcaacgtggattcgagtgggggcagaaggaagcaaagccaaatctctgctcagagtggtcatagtgagaacactgagatttgcatatgtttttctactttcccatccatctagaccctgaaatctaaataaatatttcagttaaaactttttttccatttgcatgaagtctgggtcactatatctcctaccctgaatgggggaagatgggacagctatatctcatactgaagcggtggcagctaaaacctggcaactgctgccagtgtccccatgtgtcttgcttattattttttaaaatgtgacaaagacaaaagctacagctggaaactcacacatttagaaatatgttgaaaacttttattatagtccttaggatttccaagtaaatgctcccagatcaagtattacaagctgctaattaattagcactgaaaattagccattcatattatattggaaatatttgctgaattgtttttatgaaagcttcctcttggattctgtaaggatcagagtatctgaatcc

SEQ ID NO: 152102 - DNA, 775 bp, Homo Sapiens
  misc_feature (57)..(128): n is a, c, g, or t
tatgttgttatgcaatcatctcagccaatcatctgacaaatgatagatgtgttacannnnnnnnnnnnnnnnnnnnnnnnnnnnnnnnnnnnnnnnnnnnnnnnnnnnnnnnnnnnnnnnnnnnnnnnggcacaacgtgcctgatcaagtttgtcaggagcccatgttttgttcaaatgatggaatgagataacaatactgaccccaaaaagttttgtgcttgaaatctgaaatgccattttgctgatggtcaaagcgaaattcatgtaaatccagtacgatttccttatgtagttaaaatcaacatgttgcaatctgtgaggggcctttcttctttgctaacgcatggcaattatatctttgtacacctgcaactgcaaatctggtgttttagtttccccatttgttgtgccatacgcatacttttacagccaattgttaacggattaacaactttgggtgaaatccatcagtctgctctggtttgcctctatggctggaaagtctgttgacaagtacagagcacagaggagctggctctagcttgagcaggccacaactagagcacttagttccccttgagtaaatgtttactgtgcttctgctatgttccagaaactgtgctgtgcattcgtggacactgcgctcataagcagcaaggagtctttcgtgaatcgttctgggtcttgtagaatatggaaaatgacctcattaggaaatcagcacatctaaatagcaaagtgctttagtctcagaaatacattctacttttatg

SEQ ID NO: 152103 - DNA, 328 bp, Homo Sapiens
gcagcgtcagtggcagctgcagcccggaggctgcggcgggccattcgaaggtcgcccgcatggcggggcctcagccatcggccgctctcatcggagccccctgcagccaaggcctcggccgtgagggccgcctttctgaacttctttcgggaccgccatggccaccggctggtgccctccgcttccgtgcggccccgcggcgaccccagtttgctttttgtcaatgcgggcatgaaccagttcaagccaatctttctgggcaccgtggatccacgaagcgagatggcaggcttccgacgtgtggccaacagccagaaatgtgtgagag

SEQ ID NO: 152104 - DNA, 841 bp, Homo Sapiens
  misc_feature (153)..(153): n is a, c, g, or t
agattggaacccccctggtccaatccaaacaaaaaaaagctggccgatggaaagtttggtaaaatatccggtttttcctggctttgggaaagaaagtttttctagctttggctttggcaggtcccccacccactgggaattttgagggtccanccagcttaatagggcaccacatctgggggaccagtcaagggcttgtttgccagctcccttcttcccaggtggggtcccaaaggggcctctcttggtcttgactgactggaataatgctgggtcttcatcagctttgtagtctgctggttcaacttgacttctatctgcaatatctatatggacaatttcaacagttttccatgtgtttgggatctaaaccatgtacattttctaatgttcccaagtctggtttgtgccatgtttcgattttaatgaagaaatcatctttcatatattcattcgttacaattgttctacagtaggggtacgcattccaggctttctcatgaaacaccaaggagccctcgggagcaatcatcctcacgaatgcaggcactttgctctttaggtgataaattttgtgcgtatactgtcccttttctccatccttctcataaggttcattctttaagacttcaattccttctccaccaccagtctcattcttactagcttctgcaacagagtaaagctgcccaacctgatactcctgaacagaacatggcaaaaccacacggcacttctccatcaacaaatctcccatcactgccgtcccacggcctcgctcgcgcccacagacccactcacaattccttgatcagcaccatcttcccggaaccccctcccc

SEQ ID NO: 152105 - DNA, 913 bp, Homo Sapiens
cgggagacaagttcttctcaggtttttcaatagcagttctgaatagctttggtaaattctctgttatgtcttttctcctgatctctgacactaggggagactcaagtaaagctttgacctatcactcatcgtgttgtcctggcaagagatagtgttcatcaaagcactagcttggatagaaaccaatcctgagatcctaagctggctagaaagacacagaatcttccccaccgctcaaacaactggcctctttccgtacctttcgcaaagcaatgaacttaatgcactaggcattagcaaagggaatcgttcactagctgcttccatcactgggcctgccaatgtcccagcacttcacacctggaacacaagtgttattgccacaaagcacacccaggtgtgctatcacacacttgtgtggagatgagacaagttactaaaagattgtcagccttcaaggtcagaaataaaccggacacaaggttctacagtgccctcttgtgttcaactgaataatactcttttacatctacgttgcatcaaatcagtaccaagacgatggttagtcccttcaaggatacttaagtgacaggacaactcagatgggatgtcatattccccagaaaatgcttgatgcccactcacttcctagatgatgagaggacactctctaaggtccagaaagtcacacagaaaataaagaaaataagaatttccaacatacaataatggttaatgaaggctttaaacccaagaaatggataatgtagataaagtacccatcaattactcttttagtggacataacagatacacaatctgtagtgtctcagtgacctagggtcctagaatcatactaatgcaaacaaaccatgatcccaatgttctagcctgcagacaataggtggcatcg

SEQ ID NO: 152106 - DNA, 1487 bp, Homo Sapiens
tttttggaccccttctcacggggggggtgccaagtacccggccaaggggcggtttcaaataaggaagggtttcttgttgggttcccccgccacctttggggtttggcccccttaggaatgttaagaaaagttgcgggccgggccaagcgccagggccggaaagttgctttcccccgtggcgctgtggcgcccaaggtgggcccccaggaagggcccttgccgcaggggcgttggaagggtggaggcggaaagcgcttgggagtagaagcacgttaggagttggtgaaggtaggggtcggtgggtgttctgccccgaagaactcctcgtaccaacagggggctcttactgtttggaaggaatttgttggggatgactgaaaacatatgcaactcctgcttcttaaggtcttctaagtctgggagctgtctggtcgtgaactcaatcctagttgtgatgctgttgataattaatttaatgcttggatagtccttcatgtatgaaatattatttacagaggattggtggtgatgctcctttgtgtcacttgggttttcgctgtccatcaagctggggttgctggggaagcctccgtaatggaaaggtgatgagatcagaagctcttggtgggccccagaaaggatgtaagaagccattaccaaggtcattattatcagtccaaaaacgaggctacatcgcttcccctttttgaagcgcaaaaacccaccccagttttcgttcccttcagtcctcacttcgagaacagcaagcaagttcatctgcttactgttccacacgatacagaattttgttttctcctttgcacgtggggcacgcctggtgaccgtgatgggggcccccttggcagttgacctgctgcttgtgtgcgccgtcgggtaacagctgtatgcagcaattaatgcagtgcctcatggtagtgccagtgccctgggctgctggcttaccgagccatgggtgggccccccacgagtctggatgtccgcaagtcgtgctagaaaaccttaagaatgccttgtgatcacagaagatggatggaaagcacaaatacaaaaataagcagacaccacagcactagagaaagagggtgcacattctttggttcagctccgaaagaaaacaaaaggaagtgatgtcccagagtcatgttctacaagagccgctgcaacctcagagaaggtcacaagttcgggagcagctctgcctgcccttcaggtttttcccatggcacaaaaaaaggtggaagaattctcactggggaatgtggaaacacacagaaaattaaaagaaatcatggtcttctcattgatggatggattgccatgccatccacggaggcatctgtgaagatctccccttttacatcctgagtacctttggaatatttcctctttgtggggcgcaaactttaaaaaatgccagatttaccgcgcggctcagagctgcctcgctcggctcgccgcaccaggcc

SEQ ID NO: 152107 - DNA, 822 bp, Homo Sapiens
  misc_feature (97)..(381): n is a, c, g, or t
cagaaaggggaaggggaaacaggttgtcgcatgtgagagagggagccagagagaggggaggaggttccaggctctttttgtgtttgtttgttttctnnnnnnnnnnnnnnnnnnnnnnnnnnnnnnnnnnnnnnnnnnnnnnnnnnnnnnnnnnnnnnnnnnnnnnnnnnnnnnnnnnnnnnnnnnnnnnnnnnnnnnnnnnnnnnnnnnnnnnnnnnnnnnnnnnnnnnnnnnnnnnnnnnnnnnnnnnnnnnnnnnnnnnnnnnnnnnnnnnnnnnnnnnnnnnnnnnnnnnnnnnnnnnnnnnnnnnnnnnnnnnnnnnnnnnnnnnnnnnnnnnnnnnnnnnnnnnnnnnnnnnnnnnnnnnnnnnnnnnnnnnnnntgcccaggctctttttaacaaccagctctctccgtgggcctctccggactgtcatactcaggaggcgggtcttgggctcctcctgcacaggctcctgggggttgccaaggtgggatttttcggacaccatttccttggggacagcagttggtggctgtttctttcttggctgtcttcgaacctttgagttcttattctgtcttcccatgtctgcatcctcatcattttcaatgaactcctctgtaattatttttactttttcttccctgggattcattttggctgggatgggtcccttaagaaactttacaaaaggcactttgcagattctgcattctaggatggaagtggagagagacggtgctgttgaatcttttaaaagggtccggagggaaaggctgagtgttggagatgcacctgggctcctctctgggaagctgc

SEQ ID NO: 152108 - DNA, 733 bp, Homo Sapiens
cattttgtgtttaaaaagataatgtatatgaagtgtttaccatatttcttggcatctagttcagttctcagtaactgatgtggtggtggtggtggtcatagtagcagtaagatccgtagtaatagtagcagcagtgttttagaaattagtaactgaggcctggcaaagttaaaggctctttcattaacacccagaggggaagaaatgaagctggtcttcagaggcaggctattttcactctgtgtcccaaattttcccccctagaccgtttttatacttctggggcctcagaaaatattctcagctattctgttagcttgatctcctaccatctgagagtgggcttccttcaaacaaccaaatttccaggtatttctaaactgcccttcccctacaccattctttggttcagtatttcaagacccctaagagaaatggtacatttacatgtaagcacaggatagtgaagtatttacaacaagtgctttggagccagcaaatatgaatcagaatccagctttcctttcctacatacatgacattgggcagctaatttctaagattttacttctttatctatgaaagtggagtactagtacttgctctgtgcactgtgatggttgttacatgaggtagcatctagaagcagcttgcacattgccagacacccagtggaaggtcaatgaatgactatttgagggctaactattacagaaatgtttactcttctgag

SEQ ID NO: 152109 - DNA, 414 bp, Homo Sapiens
cgatatttgtggttctggccacagaccgtgcagagagttgtgagtttactgtcactggtctacagaaaggaggagttgagtacctattccgtgtgagtgcaagaaacagagttggcactggtgagccagtagaaactgacaatcctgtagaagcaaggagtgaatatgatgttccaggccctcctttgaatgtaaccatcactgatgtgaatcgatttggtgtctcactgacatgggaaccaccagagtatgatggaggtgctgagatcacaaactacgtcgttgaattaagagacaagacttctatcaggtgggatactgccatgactgtgagagctgaagacctgtctgcaactgttactgatgtggtagaaggacaggagtacagtttccgagccagaaccacaaatatcg

SEQ ID NO: 152110 - DNA, 811 bp, Homo Sapiens
  misc_feature (119)..(172): n is a, c, g, or t
cttttttgagctagtttccttcggttcctttccccgaatgttactcggggcataggaggatgtagagagtgaggacgaatggacggagggatggacgcacggatggacggatggacgcnnnnnnnnnnnnnnnnnnnnnnnnnnnnnnnnnnnnnnnnnnnnnnnnnnnnnnccacaactcaagatgcacaaccacacagagaaaacgcatgcaggagcgacacaaaaaaatctggaaggtggcggggaggatgttgaactgtaagcccgaaagccagaactctcactcccccggtatctcctaggtctctggaatgttatgtccgggagcaagcatgggtccaggaggcagggaggcccatgtctctctgtccacttagctttctgggctgacagtctagaagacgcatgcaggaatcaaggtctcagacaggtaagaggccacagaggtcaaagataaattaacaaaaataaaaccacaagccgagagggagtggaaggcaggaaaatgagaggggttaggggcatcagaagtttaagctcggggatcacaggtgttaagtcaaggagaggtatgagagtgtaagtgaagagggacccaaagtataaatcaaaggtataaaccaagggtgctaaggtatattaaaatccaaaaacccaagaaagcaagacatgcagggcggctcccagagtcccatcagcaggatggagagagaaactcggggagtccccagggatggtgtcaccagccctcaggccagccctgaattccaccagcaggttttctcccagcatccgaagcagttccggg

SEQ ID NO: 152111 - DNA, 516 bp, Homo Sapiens
  misc_feature (489)..(489): n is a, c, g, or t
aagcactcacttgtaattttagtttttaaacccaagtccctctaactttgcctttgataccaaacaattcaaaagttggatctgagtttggagaaagatatttccaacctaagtgggtattattttgaaaccagatttttaatttaatagcctatatttgtagtctgttggataggtgtttccaaagtgtgtcttctcaagtgaaaacgcaactctaggtttcaagtactccttttctccgatcctgtggtacttgaatatccaaaaaccctgcactttgaacaatcagctgttgctatctggaactaaacagaactatgagtaaaattgcctggatactttaaaaagatatttttcctccttcatctcctttgactccaggacagactggaatataagtagtgggtctgcatggatgtttcagggatcaaaggagccacctgggcgcctgagtgccaaccctcagggccacaggtgggtgtggtttgngcacgggtccaagtgactgtgacggga

SEQ ID NO: 152112 - DNA, 909 bp, Homo Sapiens
cggcttttctttccctaagggcccttcttaccctatccggcatcctttttttgggccccggtgggactctttcggtgggccgccctgttttgggtgctgtggggggttgggtggtggtgtgggctcgtgggcgtgtagtaccaccacggtttattatttgttcacgtacataaacctagacacaagttgaacacatcttcatgtttccacatgcaggggtatacacatgagtgcacaggtatgtcagcaatcacaagacgaatataaactctggcatatgaactcacacagaaccccactgagagactgatcaacttagattgcacaatcctgtctttatgagacagaaaaaggccccagcatccaaaagagtaagggacagaggtacaagaatatccaccctcagccaaggagttgccccatataataaaaagcttataaaacacctgaaggctttaaaaaaagacgttaagcgttttggacgttaaccattttgcacattcagaaactggataccaaataggcagtgctctattgaggcctcctcctctgggttcctagctcaagagggagatgcatcccagatgtccaataggcagcgagatggagctggctggcctggggcggagagaggggctgggaggctggaatcctttatcctccagcaggagctggtgggttgcaaggctggtgcagggagatcggagtcacggaggggcctgggcagagtttcttagagtcagcagagcctcagcggcctccagcttccgctgccactctgagtgggcagaaaccaaagcctggtcagagactttggggacctgtggctgcagtagaagagggtcaagggtggcacagggctggaggatcagagttgagcatatgcatgggcagggcaggggtcctgtg

SEQ ID NO: 152113 - DNA, 988 bp, Homo Sapiens
  misc_feature (83)..(83): n is a, c, g, or t
  misc_feature (201)..(201): n is a, c, g, or t
ggggccagagggaggcaaaactatggttccaaggggacccactgaaaaaaccgcagtaagtagggcctttggccactatggancaatttcccccccggtccttctgggaaggtgcgtctgagagtccgctggactttcccgcaccccttccagggcaccacgcgagctaaagtagttccacttggagtcactggcaaggtnggcccatggctggggagagaccatctcttctttcttcaaagacggagcgtcccgttgatcagcacagcagttctaacagacttccctgtctaggcctggccagcctctgcagggacgcagtcggagtctgattcagccagttccgacacaccttctgccgcagcctgactccagctatctgatctatctgagatggcatcctcctccccgaccgtcacctccacgtaatccacaacgctcgactcctcgttctcgtcgctaccctggccgtcccggctgctgccctctgaccggtctgaggtggcctctgagggctttgctggcaaacagtcttttgctggctcgctgcctacttttaccctggtcaccaacttctccaagtcctcttcgcagagctttttggggtccttgtaatattgtggaaccacatcacccccgttctttgggctctcggccatgggttttgttgctttccttgctacggcatcgtagccgtgatcatctgccatgggctggtgctggtactgctccatccacttcacggttcccgttttcagcaagcatctgttctccttgaaccaacgcacaatctcagttcggaccaggccagtcttggccgctaactggtcgtactcctggggagtaggccactgggttcttgcaaacgtgctcctcaggagatgaacctgttcttgactttttgcaattgctggcgaagggctgggcagagaacttgttaactgggcaccggagagctggtcgagtcgagacagagcaccattggggg

SEQ ID NO: 152114 - DNA, 919 bp, Homo Sapiens
gtacttttctcgtcctttccccagggtgcacgtaaccctcaagcactaggaccgtgcggaatccaggctgcgatggcaccttcatttaccgcccgcattcagttgttcctcttgcgggcgctaggctttctcataggcttagtaggccgagcagctttagtcttagggggtccaaagtttgcctcaaagacccctcggccggtgactgaaccattgcttctgctttcggggatgcagctggccaagctgatccgacagagaaaggtgaaatgtatagatgttgttcaggcttatatcaacagaatcaaggacgtgaacccaatgatcaatggaattgtcaagtacaggtttgaggaagcgatgaaggaggctcatgctgtagatcaaaagcttgcagagaagcaggaagatgaagccaccctggaaaataaatggcccttccttggggttcctttgacagtcaaggaagctttccagctacaaggaatgcccaattcttctggactcatgaaccgtcgtgatgccattgccaaaacagatgccactgtggtggcattactgaagggagctggtgccattcctcttggccataaccaactgtagtgagtcgtgtatgtggtatgaatccagtaacaagatctatggccgatcaaacaacccatatgatttacagcatattgtaggtggaagttctggtggtgagggctgcacacttggcagctgcctgctcagttaatggtgtgggctctgatatggtggtagcattcgaatgcctgctttcttcaatggtatattgggacacaagccttctccaggtgtgagtcccaaacaaaaggtcaggtatcccttggctgtgggagcccaggagttggttcctgtgcactggtcctatgtgccgtattgcggaagacctgggacc

SEQ ID NO: 152115 - DNA, 928 bp, Homo Sapiens
  misc_feature (163)..(400): n is a, c, g, or t
  misc_feature (731)..(823): n is a, c, g, or t
atgagccaccacacctggccccattttttatttattacaaaatcaaagacatgggtgatgcctggcacatgttgtctggagtctggcacactggttatcaatagcacattcagtgtattcagtgatgtcattctttatttatttttgagacagaatctgtcannnnnnnnnnnnnnnnnnnnnnnnnnnnnnnnnnnnnnnnnnnnnnnnnnnnnnnnnnnnnnnnnnnnnnnnnnnnnnnnnnnnnnnnnnnnnnnnnnnnnnnnnnnnnnnnnnnnnnnnnnnnnnnnnnnnnnnnnnnnnnnnnnnnnnnnnnnnnnnnnnnnnnnnnnnnnnnnnnnnnnnnnnnnnnnnnnnnnnnnnnnnnnnnnnnnnnnnnnnnnnnnnnnnnnnnnnnnnngtgtgagccactgcacctggcagtgatgtcattccttactaggcttccaaagccactgctgtggccacagcttccatggagacaggcaagctgagcctctatgtggcaccaattcctgcagctgtttgtgttggagggaaaaaaatccaaatggacatcaacagctttcatcaactaaataaccacagaaaatatttatgaagactataaagcaatgattacttttgaattggaaaggaatcactattatttgaaatgtttcttcaaaagtgagcatccggacaggaaccatcatggatgctgaggccatggatgaaggcctactcgggannnnnnnnnnnnnnnnnnnnnnnnnnnnnnnnnnnnnnnnnnnnnnnnnnnnnnnnnnnnnnnnnnnnnnnnnnnnnnnnnnnnnnnnnnnnnaatgcagcctcaacagaagtgacagaattgaacatcgccaataatgggacacacagacatcacatgcccccagtctgatgcaccacggagtcgtctctgatgtat

SEQ ID NO: 152116 - DNA, 661 bp, Homo Sapiens
accagtctttttaaagtaacttctgcccaatcttgggcagagtttctgagcaaatctgtgctggtgagtcgcgaaacagcagccctggctctcttggtggtccggtgtgtggtggggtcagtaattcacactccgcatggtggccacggtggtggccaggcgacggggcaggcctttgctgacctgtctatagtcctcaggcctggtcttcagtagcgtcacgatgtgctggagggtgcgggacggctgcaggcccagggcatccatcacgttgatcagatagtcgatgtcagtggccagctgcttggcagagtgtgggctcagctcagggatctgtaggatcgcatcacagtaggtctgcattgtggctctggcgatcgagcccagccagttgtcagccatgttgtccagctcgggcaattcatccccctgctcaggaggaaatggcagctttccagcgtgcaatgccaactctaaggcagagtcctcctgagtcacaaatggctcaagattcagggggagggacatgatgtactgcccgatgttgctgatgtactcgagaggggtgagactaaaggcgggcagttcatctgtgagggtttctccgatgccagccgtattccagctgtccatcttcgaaataagcaacagctgttgtttg

SEQ ID NO: 152117 - DNA, 830 bp, Homo Sapiens
  misc_feature (811)..(811): n is a, c, g, or t
gggaactctttaggccgccccccctttttgtgtgtggtgtctgttttgttgtattgtttctttgtggtctttttttccagggcccaagggtcttttatttgtgtgctggacgctgttgggagtgactggatgtgagccagccctatgggtggggatggcaccgccctaccgccgagagagttgaagctgcacccccgaaaggagccagctgtaccttcacccagtctgggggactggtgaggcacttgggggatggggagcaaggccagctcacgaaggaagacttgggcagggaggatcagggacgcctggcaaggatccaccctatggaatcgggcctcgtcagtggggtgacaatgtcagagttgtctataaatcgggggggaggccgcggcctcgaggtgggaaagcaggtgccggcgcacctgtggacaaattctggaacgcgtttggcgagggaggaataggcgcagctccggaaggcagtgacctcgaggcagcctcagcacggcactctcttgggtcctcttccaggctcacactgggcgacagcggagaggctcttggacggggcagagctggcgccgagacctgcatgtccgcgtcttgtgacgggtgtgtgggaagccgcccgcctgtgcatcttgcttccgggtattcgctggctgatttactggttttagagatggggatgggcacccagtgctggactgaagaccagagaaggtggagctccctgtggccttggtctcacctctcttcaggtaacaggctctgccctgacccaagctgagccaatgaaccccctccntgggaatccacacctggac

SEQ ID NO: 152118 - DNA, 1523 bp, Homo Sapiens
ggtgttttccatgtgtacctttatttaatgctcacagcatccctatgagataggacttcttatacctacttcacagagaagaaaatggagacatggaaggttaaggagcttgtgtgacatcatacacttagcaaatgaaagagcacagatttgattccacgactctctgcttgcaaagtctaagatgatgttaatatagcaggaaactcacataatgtctataaacccattgcctgtggggtgttaaatctccaagaatcagcctttggtccccgacctgtagaggatgtggatcttctagctgagcctgatgctcttgtgggttcctcactgggtcctgacctctgagtattcggtggaggtgtccttggaaggattcatcccatgaaagttgagggaagccataatgcagctccctcatccatttcccacagtagggggcggcaccttgaacagcttgagggtttcagtggggcccatgtaacttggacttcttcctggtgtttcggggaggctgaccctgtgggtagggtgggtgtcattcctgccccactgctgtcctggctgctttcctcctgtgggtcttcactatgaagaagatgaggcagagacaaagagcgagcagggctgtaacaccagcttctccaatggccccatgaaccactcctgctctggtctcttgtttccctggagccatctcctggaaagataccagttgttgggttctgtggaacataggtgacgttgagctggatggttctctccgtagtcacaccagctccagcgaacttcacctgacaggtcaggttggtgccgtggtcctggggccgtggggtgattatgagcaccgaggagtgagtagtcctggggcccagggaggtgggggcagctgacaaccaggagaagatcgggggtgttccctgctcacaggcccaggacacagagcaggtcaggtttttggagtggccgggttctagagtgccagggatgaggattttgggcctgtgggtcaagtctgtcacaatgcacagagagctggggagatttgtaactgtatttggtacttcctctctccatccgaaagaagtatgaaccattatccctcctcctggcgtctacgatgctcagggagcagttgttcctactgggatccccaaggaggcggaatctgccctgagtctcctcctgtacttcttgatctagcttgtttgtggccactggagagtcctggatataatggctccttcccggaaccagtaaccatgaactggggagttcttgtcgtagtagggtatgggatggaagaaagtgcagggcacgaggacgcacaaaccctcctgtaccgtcactgactcctgcacttgcagccagaaatttggatccatagccagggccctgtggggaaacgagggtcagctcggcccagcccgacaacccctctccccacagccactcacctgcccacagcaggggcagcagtagcagcagcggcatgtctgaggaagcagcttccagggcttcct

SEQ ID NO: 152119 - DNA, 416 bp, Homo Sapiens
aaggtataactaatctcttttcccattaaaaagctggcaatgccagaccatgagtctaattaattcagagttgttccagggcacaagatagccagtaatgtccaaatggggagccttgtggtggtggcagccaggattcctaaggccaggtgctccttcacctctctgggagagccaagctgtccatccgctggatccccaggatgctgggctcaagtgtcagctgggtttacctctttggaacagaagtaatggacgaccactccattcggggtatcttgcaaatgcactgttcccaatcttcttcttacacaccatgcacaccttctcctctgtgatgactgcacttcccctgctggctgtacaatccgctcttccgtgacacctcaaggaattctgcatcggagaacggttct

SEQ ID NO: 152120 - DNA, 638 bp, Homo Sapiens
  misc_feature (85)..(95): n is a, c, g, or t
  misc_feature (261)..(261): n is a, c, g, or t
cattactctagaaagttccttcatatgaaaatatggaatgcctcatgaatttatatgccgttcttgtgcagtaagtatttatagnnnnnnnnnnnggtttaacaaggcttgttttctctaaaaaattacctggtcacaatagctctcttttttagtgtgctgaaggaggcagctgaattatacataaagttgagatggtcatttataagattcactagaacagggttctgcaaactggcaaatatgtctgccatctgattntggtgaatgaagttttactgggaacacagatgaagaaaacctgcttgatatcacacagtcaggagtcaactgagttggggctttgaacttaggtttatctgatgccaaagttggtgatgctcttcaaccatttagggtaccgcagagtgtggattttgaatcacctgcatcagcatcattttaaaatatagattctgtggtcctgaccaggtctctgaagtcagaatatgaagtggagctaggaatctaacttcttaacaagttccctagatgcctaagggtatccctgaatgatacagtttgttttgaaagactgaaaagcccaaagctggcccttttgggaaatagcagtaaatcattgatatgtgaaggttccc

SEQ ID NO: 152121 - DNA, 886 bp, Homo Sapiens
  misc_feature (89)..(97): n is a, c, g, or t
tgtctgtaccccattacgaggtgaatctttacagcacaaattgccttctgaagctacttgaaacaaggacatggtgacttaagaggagnnnnnnnnnggaaatggaccatctcttctaacacctggaatgtgatccaagcctggagacaaattgatggtttgcagcgtagaagacagtaaagtctagcaatggagcccatatatgaggagtacctagcaaatcatggacacaagtagtaatagaccatattactggctagagcttctctctcgattgctctaattgtccttaccatattcgaacaggtgaagaagcaagagtttccctcacagaattttcgtcagattttgggattcccttatgggacaacatttcctcaaacaaaacacctcacattttatgaactaaaaagttcttctggtagcctggtgcaaaagggccatgctagcagttgcactgggaattatatccatccagaatcaatgctctttgaaatgaatggttatcttgactcagccatatacaataagtgacagcatcaggcatatcattctgtattccaacaattccccttgtaatgaagctaaccactgctgcatcagcacaatgtataatttggcctgattactgtatccaggcatcacgtcttagtatttatttttctcagctctatcatactgagatggactttcctgcctcacgcatggagccgcgaagctctccggagcctggccagcttattggccgcgggttgtttcgagtccaataagttggggggatctgagcattctgttctccacagctttataaggtggtgtctcaggatcacatgtttttaaggccattttaactgggagagcactggctgacagggacacgcatata

SEQ ID NO: 152122 - DNA, 895 bp, Homo Sapiens
tattctccccaccttacaccagccaggtccaccagaattcgtgcgcatgccttccgggaatgtcctgctgcttcgttcagtagtgttgcttttggttctggggccttatttcagctttccctaaggtactgataaatgttctttcagcatacttcagtcaacatttatcacatctgtgccaagactggatatatcttcagactgggagaggagagatgaatctaccagcataggggaaactgtgttgaaatccagcaggaagtgcaggtctgacttgagtgtgccggtgtctacttcatacacatccctcaaatgccatcccctctctgaccgagcagctgtctctgtccccctgctctagttcatccatgtagatgtcaaacccttgcttggggggctcttggaccccacagtcagggagtgctttctttccagctggagggaaggcattttctgatccagaataacacctgattcttgtgatcccctggccacaggtcctcctgtactgcccatttgcagttagcagccctagcactgtcctctgcgggggatcctggcccagcggggctctggtgagtatctgacaagcatcgggacctcgggccactgtagccagcacaactccactcttggggttgctgcagtgcattgcttcagactccacgggctgctgctggaagacgaaatctgggagccccggtccttcccagctgagatactcttctccccagcccccaataaaagatccagggtacatgattgcgggaaagccggtctccatcccaagtgacgagcagggtgctgcgctgcggcctcctcccaccagacaggaggccccaaaacctgcctggaccccaaagcgggccccgctcttcccgtcgttatctttcta

SEQ ID NO: 152123 - DNA, 689 bp, Homo Sapiens
aggaaggtctcggacggtgtagctctcacattcctcctcctgtcagtcagttccactgctaatatctccataggacaccagtccatcagagtggccagtactgggcacacttctcctggcctctctcctccagttctgttagcatcacgatagagcaggatttccactcccagatcattcgccagaagtcctcaacttgtagtggagaagagggccctggctggcgatataggagtccttctgccggtagccagtcaatcaaggagtgcgttcacatagtcatgtattctcgttcgccccgctgtaagctggaatgatcactctgttgtattcagtatggaatgatctgtaagacacggttcttcgttcatgttggctggaaggtcgttccagtgcacgcatacgttgtcattcctggaattgttgattgacggttaagcttgcgtgtaaactcctcctctaatccatcgttgctggtccgcatgggattttgttgtaaatgttctgccaggtgggtttctagagaggtcacttccagttctgtatctccatagagataatgctccagaagggctctaggtatatgcagacatacctgcatatcggtttgcaccatctggcagcgctgcgcccggatccggctcacaaagccatacacgtccaccttccgttctgtatgcatcatgtcc

SEQ ID NO: 152124 - DNA, 595 bp, Homo Sapiens
tttaattttaataatatgttttatttaatctactagatccaaaattactatcattttaacaggtactcaaaattattaatgagatcttttacattcttttagaagtgtttcataacgtctctgcagcagccacattccccatgctcagcagcggctcacagcctggatggcagtgcggtgtagacacttgagctgtgggcaggactcttcccagtcctcatggctgagcacacagtgccgggccaggtggtgcacgctgggggaccatgggccgggctggtcctggctctgcactgtccctgtgaccctcgggatgttcctcagcgtcttttggcgatggttcctttcctgtaggatgcgaggccgacagcatctgctgctaggagttgtgaggacacgtgagttcatttcagttgggtgcagcgccggcctagtaatctcactgacccttggtcgctcagccagtgactgtgcccacctgccaccatcagaagatggcggacttgggggtcaggagagcccttccaggactgcagaagctggtccttgggggtctcgcagcagatcctgggggcgttcacagtatgggtgcaat

SEQ ID NO: 152125 - DNA, 722 bp, Homo Sapiens
ggggagtacggaatgggccctgggacaggccagaagatgagtcagagtcattcttccacacttccagcgtctgtagatacctgggggacgtgctttcggttgtcctgggtcgatatccctagggtcgctgctgccatcatcattaaggctccgcccgtccaagctatccagatcggagggagactgtggccgagggagttcctgctcagttttggtcttttttggtgcattggtctcctcactttcactctctgagatctcctcactccgaccctgcttgttgacctttggggtggaggcttcctctactcgggccttcttggctgtctgcctggacttctcagctttgccatcactgctggacgtgctgacccctccaggggaggcccggccacctcgatctcagttcttcccggggcccaggggcctctttcttccgtccactcctcattgacatcgagtctttattctgtcgtgtcttcattcttcaggctgtggagaccccattctcctctgcctgggcagctgaatacagaaacttctctgctccaccccaagttccccacagctgtggtctgggaagcaggatctcacaagtttccagtgtgggcacctggaacttttgcaggatctgtattcaatgaaaccttcgcagaatgcagcgcgggaggcccgcaggggacagccttgaagttcctcccacttggcgtccagtatggcgt

SEQ ID NO: 152126 - DNA, 1060 bp, Homo Sapiens
  misc_feature (245)..(245): n is a, c, g, or t
  misc_feature (881)..(881): n is a, c, g, or t
aaaggcccagcttgagtcttctgggatttggggcgtggtcccgttttcagagagtagtaggttaactcacaaggagcttgtttttcccagcttgctagtctctgatttgctgaaggcattgagtatcacgtcatcctttgagatagtcagaagtgatgtcgggagagaccacactggagcagaatcagagacaactcccatgtggaaccctttgtagcaccaactccggagcagatctactcctntaagcttgttgccatggtatttctgttcccattgggttggtgtagaatgtttgaaatatcgtggctgctcattataatcggagatagcgagaggagatatgagaaggaaaaattcgttcaaactgaccacggcgagaatactcatcgtgtccatctcaaccagaatccgaacatcatctggtgtcaggacatccagcacagatgcatagaagtcctgatcaggaattttctgggtcagataataggctttcttcatcttctgtgcagtgacatgctctggagccattcgacatttgtccccaggggaggtgggcaggctggtggtggagctgctgcagctgctggggctggaaatgatatcctctgcattgggcaggactaaacctgccagattcagaaggtcacgaatcatctggcctttgatgctgatatccagtggagagctggagtggaggcttggggaaatgttgacttccaggacccagggcttgaggttttcgtctagcatgatgtcaaaaccaaagagttcatggcagctatagggccgtcgcacatacatcttgagcaggctggtcacatagggctctgacgagatgatagttttgacaacaacatcctttatcttctcccagatgngcgtcgctattgactcccttctggctcaggtagttccacaaagccttcagtgcccatttgtggcctggcaagccatttcatctgcattggcctggtactcggcattctttttattgacactgtagttggtcaggtgcatgaacttattgccaaggctcttcatggaaggcgaatacttg

SEQ ID NO: 152127 - DNA, 1253 bp, Homo Sapiens
atgaggaacagggctctgtcttctgcctctgaaagaaaagaagaaacaggtgcagacatcacaaaagaataccctcaggaagcgtagagtggtcatagttgacccagaaaccaataaagaaatgtctgttcaggaggcctacaagaagggcctaattgattatgaaaccttcaaagaactgtgtgagcaggaatgtgaatgggaagaaataaccatcacgggatcagatggctccaccagggtggtcctggtagatagaaagacaggcagtcagtatgatattcaagatgctattgacaagggccttgttgacaggaagttctttgatcagtaccgatccggcagcctcagcctcactcaatttgctgacatgatctccttgaaaaatggtgtcggcaccagcagcagcatgggcagtggtgtcagcgatgatgtttttagcagctcccgacatgaatcagtaagtaagatttccaccatatccagcgtcaggaatttaaccataaggagcagctctttttcagacaccctggaagaatcgagccccattgcagccatctttgacacagaaaacctggagaaaatctccattacagaaggtatagagcggggcatcgttgacagcatcacgggtcagaggcttctggaggctcaggcctgcacaggtggcatcatccacccaaccacgggccagaagctgtcacttcaggacgcagtctcccagggtgtgattgaccaagacatggccaccaggctgaagcctgctcagaaagccttcataggcttcgagggtgtgaagggaaagaagaagatgtcagcagcagaggcagtgaaagaaaaatggctcccgtatgaggctggccagcgcttcctggagttccagtacctcacgggaggtcttgttgacccggaagtgcatgggaggataagcaccgaagaagccatccggaaggggttcatagatggccgcgccgcacagaggctgcaagacaccagcagctatgccaaaatcctgacctgcccaaaagcaaattaaaaatatcctataaggatgccataaatcgctcccatggttagaagatatcactggggcttgcagccttcttggaaagcccgcttccgattgtcgtcccaaaggggcttacacacgcctttacaagcatgtccttcggctccggggctccccggtccgggctccggcggggaatatcggtaccggaatcttcgctccgggtcccggcatagggtcccgg

SEQ ID NO: 152128 - DNA, 771 bp, Homo Sapiens
cttttctattctactgttatcacatttgtaccacttaaagtggaatctaggcactttatcaccatttagatcctattaccttttctcatctaggatatagttatcttctacataatctttctgtatcttaaaacccatcaataaattattatatattttctaacttttaaatcactcagaagatttaaaaaactcatgagaagagtaatctgttatgtttttccagatatttaccatttctgttgctcttccttcattattttccaaatttcgttctgcaaatttccacttcttctgatagacgttttttagttcttttagagtggttctgataggtacagattctcttattttttggcttcctctgaggacatctttttctcaccttcattctcagtgatgttttttgcttgtagtatttttagttgacattgttttctgttcagcagtttccttttagcttccgtatttacctgatgagaaatctgcagtcattcaaattgttgtttccctgtatgtagtgtgtcatttttctgtcagatttcaaggtatttatctttagtttttcagccatttcattatgttggggatgagtttccttgtgtttattccctttggaatttgctccaattcataaatttgcagttttatgtcttttaccaaacttagaggttttcagcctaatttctaaaaatactttggtattagcctgattttcatctttataggacataggttaagtgatgacaaggtcgcatagcttatatgccc

SEQ ID NO: 152129 - DNA, 920 bp, Homo Sapiens
cctggccttgccgacccacagtggggcctccagctggggccacgtggccatgagaatgaccagctaggcttccctggaggccaggcctccctggactgggccaggtgcttcctgccagcaaagatgagtaatgtctcagggatcctggagacagccggcgtccccctggtgtcagtgaactggccgcagcccagccccccaccggctgtgccagctgggccgcagatggaccacatggggaacagctcccagggggccccctggctcttcctcacctccgcactggcccgaggcgtctcggggatcttcgtgtggactgccctggtgctcacctgccaccagatctatctgcacctgcgctcctacaccgtgccacaggagcaacgttacatcatccgcctgctcctcatcgtgcccatctacgccttcgactcctggctcagcctcctcctcctcggagaccaccagtactacgtctacttcgactctgtgcgggactgctacgaagcctttgtcatttacagcttcctgagcctgtgtttccagtacctgggaggcgagggcgccatcatggctgagattcgtggaaagcccatcaagtccagctgcttgtacggcacctgctgcctccggggcatgacctactccatcgggttcctgcgcttctgtaagcaggccactctgcagttctgcctggtgaagcccgtcatggccgtcaccaccatcatcctccaggcatttggcaaataccacgacgggggacttcaatgtccgcagcggctacctctatgtgaccctcatctacaaccgcctccggtcagccctcggcccttctacgcccctggttcctccttctaacttcacccacccaggggaagctccctggcgggccccttcccaggccccggtccctccaagtc

SEQ ID NO: 152130 - DNA, 919 bp, Homo Sapiens
tcatattacttaaaaaaccatactaaaatggaagggtggtatacttgcatgtgcagtgaggactgcaaattttttacaaataaacaccaaatgcagaaagcaccatcattttcaatattgccctcaagtctacacagttgatataatatttagatagatggccatgtcttgataatggaaaacattttgtccttattcaaatgattccaggctggaagatcactgaatagcttccacacagtatcttggatagttgcatgactactctgatgaggcagatgatcacttgaagcccactgagggttatgagaatggaaaataaaatgatgttccactccacaacatgtgcaggttccaggcactgaatccatatgctagaatctgtaaggaaacgtccagcagtgccttcaaaagcatactcccagccatcaagggtgcggcaatatggcccttggacaagacccaaggcagagatgaccaggcagtatccagaaaaagcaattccgagggaagaaaagataattgacagcagtgtcacatattttttgctgcagttttcactctggcaacatttatagttgttattattctccagtaccagaagaactgttgttactataagcatcatgatgcctgagaaacagattccttcaaaataccacacgtagttggtgagtttattgctggatgcataggaagtttgcccattcgggaaatacaataatatgttcacgattatactccaaagtgcaagcggaatcagcaaacaacttaggcagcctccacacttccgagaccccattttgccctgcttagaaccacttccagggtcagagcccttcacttcatattcatgaggagacggggaattggaatatacccgcagccgacaatctcagtgtgaaatactggtttactg

SEQ ID NO: 152131 - DNA, 1026 bp, Homo Sapiens
aattttctttcaagagatcatgggaaaatctactatgttcgtttaaaatatataacttctatttgttactatatttggatttgagctactactattctggatttgttcccatgtatctgtggaaccaggcagctaattaatctttactcagcatctctggtatttcttgaatgaaaatggaatggattggtggaattaatggctagatgtttagaagacactacttactttgttattttctctgtataatgatgaaagcctacaactatacagagacataaacgagccagggtgacaggttgggaaagatgaagagggaggaggaaaggataggcttgtagccctcatccggtcaaattcccaactttgagcttcactttattgtaaaattagaggctaaaactatttaacgcttccaaaactttttgattcaacaaatgccaattagttactaacataattaatcagtgtatcctgatttttaaaagatattttcctttgtgatttaaaggaaacatgggagttggagttgcagcgtcagtcctgaaggactgacctcgggaggccaggtaggaactgataaactggcaacaaaatcacatgttttcaactgaatatactgatattcaagcgtccagaaaaacaatttcgagcctacgttcacaagtttgccagaaagccctattattgacacagctgcggatctcagacatctgagttagtcagcaccattctgctggaggggattaagactggacgcttcgagcggagttgggaatgttatcatctgaggaaactaaaaggcgccagcagtaggactttctccaaggtctctgacaaatatgttgcgggaaaagtcaacccgccccaaattcccccgtgtggccctaactcgaggctctggctcctcgcgccggcaagctgaggaagagacggtcccctgcgatttagatacaaacgcgcgcgtgcagggaaggccatcccagggcagacactgccacctccgccgcttccgacgcccgcgct

SEQ ID NO: 152132 - DNA, 857 bp, Homo Sapiens
tagggggggcacaggatgttagccccccagaacccgttgaaatgtccctctttttcccacaaaggtggtggggaaaaggcaatggttttattgaaggccaggagcccatgtttgttcttaaggaggccaaagagggattccgggggggttccccgcccctatttcattcctgggccatcccccttgcatcaagcccactcatttaaacaagatcccttgtccattcaagccccactggttggctcgggtaatcccaaggggagggaatgaatgttcttgaggcagtgtggggtggctgacctaccaacaatcaatggtctcattttttcagtccccgaggcattgcaacaaaagagtgctgtcaaccgctgctttgctttcttgccccctctacagtggtctcctttagcagcaagtgtgtgctggggaagcaactggaaaaacactcctgtctcatcagcattaaagatatcatctgggctgtagtcagcaatcagttttataatttcccctgcatgccactcattaatcttatctattcctagaccattcattaacctgtcactatcttctctacagactgctttcaaagcaattccgtggcgatctctaaatctgttcagccagcccacacttgcttgaaaattgtcatagccaagcatgttggccaagtttagtgcttttttccgaatgacagaaccagtcacaagaatgtttttggcatggatttcttgaaaccaagcaaaaacagccttatcaatgtcatcataaagagcgctcctcatccttttccgctggggtcccacggatgcctcccgcaccttttcttcaaatttggtgcgatcctttaagaatcc

SEQ ID NO: 152133 - DNA, 882 bp, Homo Sapiens
tcttccatgaactcctccactggggtgctgatggatgtgctggttgctggctccagttgcgcatgacaggcaaatgcagccaagttaccgtccttgccgaaaggttacaggtttggatgcaagatgctctgggaagtgcacgcagatatggggggagaaaagctgctcagctgccccacagcctgctagcattctcatgtgcttttacatttccttttaaaaaacctttttatgctttattttggaacttggctcttgcagtagacgaaagaggggttggcagtgattgtctttatggatcagcgtctctagcagtgacctcagggtaaaattgatgtcagtgttcctttggggtcgactgggcaggccgtggagacagtctgggttttcaacaagcttccatctccagaagaggtcctggggtcgctgccttggctttgcacgttgggaatgagcttcgttttccaccatgtttcagatgtaggcagctgtcattcttggacctgtacctgatgcagattcctgtagtttctctctcttcctcttcgtttttcttaccataattgtctcttgcagaccagcctggataaagctgcatatgtagctgtctttctttccgtgctaattcataatatttagcctgctcttcacgggagagggcatgccactgtgtgcacacacaatctgtcagctgggagcctccctgctcctgctctcccccaactctcaggtgtggagcttcccattttgcttccttcccattgcaggctatgagattctttcccattcatggctgacctgcatattaattttgatctccctgttcatgttttttaaaatgatttttaaataagaagggtatgggtgggttggaggaaggat

SEQ ID NO: 152134 - DNA, 677 bp, Homo Sapiens
gtgtatactcatataactgaatttcatacagcatagaataaaattgtaaaaaagacttgttacatgcaacgacacggatgaattcaaatataatataaagggaaataaaccaaatactataaaatatttaccaagtaattcatttcatgtgaaatgtcagaatagacaaaactaacagggggatgaagaatgctactattagttaatttcttgagctgagttgtggttgcccggacatgtttgtgttaatctttgaaagtttactgaactgtatttgtaatttgtacacttttttgtatgctgtacttcaacacgttttattaaaaatatttctaaaaatccaaatgttcagtaagttgtcctacaatatgcattaaaaaagaattaaaaaatacacaagcatttcaaaagttattttttgtgggttagggttatggagaatttcttttctgctctatacgtctcagaattttccaaatgaccatagtagacatatattacatttatcactagaaaaaaatactattaaaatacaattgtctgagataatcttgtactacttttacactaaactaatttagttcaaatgtggggacttcagcttttgctcccagatgaaaagagcttgtcattttggagcaaaggagggcgtggcagttggtcggagtgtttcctgg

SEQ ID NO: 152135 - DNA, 737 bp, Homo Sapiens
gttttcgttcctctcaagtcagtgactcttagaagcacgaaacattgctggttgtgctcaaaaagctccatgtaaatccattcatgattggttatcatgaaatgaccttgaaaatttgtttgttcaaacgcccggtttaaaagattacattaatcgtttgcgtttagcatgtaattattaggtgtctacatccttaaatatacttatatattttgtaaatatacttgcagctcaatgtttttataccaatctttcaaagcaagtaatgctggtgtacatgtccaagtttcagattaactttggtagaataataaagttgaaattctcataataattgtagaaatgtagtctcaatattatcatacaataacctaaatatttagtttggtaaactttcttccttgctcttactagccccatgttgccccattgtgtgtaaactgtagttcaatttgttaattatcttactgtttaatagccagcaatacagaatacaggatagtaactgatcttatttcgctactaatagccatgagtcactcttaaaatatgctgccattatgctatgtaatgatctcaaagggcaatatcacctaaaatgtcaaaggatacaaactgttgatgattttaaagttctatcaattataattctaataaagtataacatctgcggggaataagaaaagcagagtaattccagtaacgattttatttatccccctaatttttatagccca

SEQ ID NO: 152136 - DNA, 795 bp, Homo Sapiens
aggcttttccagggcccctccgggaagacagcacggagctccgagccactgagagagaaccagccctcctgggcccgctgtaggctcaggccagctttgtagggtaggcgtcccagccgctcaaaatcccgggccagcagatcctcggctaggggaggcacgaatgccttagcaatacacttgacccactcatgagcctgctccgcactctccagcccaaacaggtacagccgttctccctccgtgtacacctcaaaggtgtgctcaaagccatgggtgtcaggagggggcactgccaggcacacaatctcgctggcccgaatctctccattgggggtcactgcccgctcattctcaaagtagctcaggaccccgtcaccaaggacacaccagcgccggctgaactcttcccgggcccggcggtcctgtagcagcttgccggcagaggcagtcttgtagaggaagccactgtggctcacggtcggcaggacaactgagtagtgcttttccaggggcttcatcgagtccagccgaggcacctctgtggtccggttgttccgaaggaattccatctgcagcgtctgccccgcctgctctgcaagagccaggggcgtgggggcctcagggtcccccgagaagcagttgatcccagccccacagcccaggagcgcctgggtctcagccaggtctgtggtggtgactgcagcacacagggcctcgataagtgtttctgtccacaccttcctgtccatcttcaggctccgcaccttggagacgccagcgcccaggccacgg

SEQ ID NO: 152137 - DNA, 341 bp, Homo Sapiens
gccttctctctctttgcacaaccctggcacctcacatatggcaccgttttgttttttgtagttttcattatttaggtagatgtcttagttctcccattgccttaaaaacaagggtagtgtttttctcacttatccacagcgatgcctaacacaaagccttggacctaagaggcctccaaatccttgtgggattcccaaagcttagagtaaccacctgctcttatcccacagcactgcaatcgcccattgagtatcaacggaaagaaaggagcacagctgtgatgaggtctcaacctgccaggcttccccaagccagccccaggccctactcctctgttcct

SEQ ID NO: 152138 - DNA, 727 bp, Homo Sapiens
aaggcaggtgttacccttctggttctgttttccccaggccagcatccttcagaaaaagcatccccgaggaggaagacgaatcgttaaacatctgaaagggtcaggccagcatccttcagaaaaagcatccccgaggaggaagacgaatcgttaaacatcttaggtcagctctagcctctcggaatttgtcttcttcagtggaaaccccgagaagactgatcagttcttcagttctaaaacaatggcccagggctttggtgacgttcgccgacgtagccatagacttttctcaggaggagtgggcctgtctgaactctgctcagagggacctgtactgggacgtgatgctggagaactacagtaacttggtctcactggactcttggagtcagcatatgaacaataagagtttacctacagaaaaaaacattcactgaaataagggcttccaaaaggaacttcagataggaagaagtaaatcccttggccgtaactggatatgtgaaggtacgcttgacacgaccacagcgctccagagggaggtatgtcaatcagatgatcatcaattatgtcaaaaggcctgctactagagaaggcacccctcctagaacacatcagagacatcatacaggagaattccttctgaatgtaacggactgtgggacggcctatcagtccgtggctatcaacctagtcaacatcagacaatccatacctggtgagacaa

SEQ ID NO: 152139 - DNA, 937 bp, Homo Sapiens
cttttagctggttggtgctgattgcgttggttggtagttagttttggtgcggtcttgaggatgtgtgtttggggtggtgctgcggttgtgtcttgctgcgttgtgtggttggtctttcggcgttcttgtatagtaggagtgtgcgtgtctctctctgccagcaggttcactgggaaagtttcagacttgtgttgtaagttgatatgttttcatcttttgtggaaattctgggagcctgtcataggatagcattgttttgtttcgcgatggcgcatgctagcttgttacaactgtgcattgtgccctcggcagcctgtgcttgagagctgtgctgtttataattcgagaagtgtattggaggtattgtcccgccatgaatcagttacatttcaaagtccttctgtgtcatggcacattagatagctcgtagatactggttgctcctgcattccaccctctaacatagtgacacaacatcctggcatgtggtaggatcgtcaacgtttcaagctggttggtcatatccacctatcacacaatgattttcctcctgatgttttgaagggagatttccacttcatattgctttgatgttgtgttaaaacaaactctcaaattttaggcctcatctccccatttccaggcattgactgaggggacagagggcaggatggcagagtggcacctaatggggcacctttcggggtggcatctgtctccctcttttgccaactgctttgcttcactttttcacttgagctttctccgacgctaaaagggaagcttggtgtggggggttctagaagaaactgcacattgagagaggagggataaagagagattgacgaagcattcagatatacagttagatagaagaaataaaacctggtgttcttcaatagatcaatagggtgattatagttaacatgtattgatt

SEQ ID NO: 152140 - DNA, 836 bp, Homo Sapiens
ttgtacagttttgaattctatagattgtcttggaaggatactgtgtgatgggtcaggcacacagtaattggagacttttaatgtatgtaatatttcatagattgcatgctattaatcatctgtgagggtagtattttttgttttattgtaagtttccctctttttttataaattaaaagatggttggtattaggaatttcaaatgaatgcagaaaatcttacatgctgtgtactattaatattataacagacgatccaagtccaaaatctgaccaataaagcaaccattttatcaagatagagggattctaatgggagaggggattcttccctcctgaagtttgtgtgtccagtccccttaaaaaaaatgaatagttgtcttttcttgtcatattaatactcgaaagtccatggtggtattaatgaaagtacactttattgttgcctttgaacttacggccaaggcaataaatcagaaacaaaaatagtgccaatgtgtcaaaatcgacatctgagagattcagcctcccatttggaataaatatgaatcttctaagctatcttgtttaatattttccatcatttagctacttcctatctccctcagaggcgcctgctgttcccattttagagttgacagtggcctgctaattttgctatgttcctaaaagttactgggtgtgagacattttcatcccctcctttttcctactgctggtgtttattatccagctagacaatattttatgcatatttaccgtgatgtctggaccgtacctgtgctccttggcagtttatgttgaagataactaaagatttttctatttgggaggcat

SEQ ID NO: 152141 - DNA, 1063 bp, Homo Sapiens
  misc_feature (82)..(82): n is a, c, g, or t
aatttaaccattctactatttcccctaatatatatggctgggcaccccagagaaaagcttctgcccccgaaaagagactttntacataggggtaagcttcattaaatgaggtgcacctttcatttttcagggcatctcttttcttgcaaggtctttagaggcagaagttccacttggattctaatacacatctctgtgagctcagtttcctgaaaatatacacctactgggttctaggtttctcccttaccagttgactgtattcattatgttcacagccaccagaatcggacatacactattaacatgatgataaatacagctactgctgcaagtttggcataagtggaacgcatgttcaagtacttcgcatcctggcggtatttcttggacagactggacaaattgttagcctttgaatccaatgctgagagtgcttctcctcgttgtaacacttcttcaatattggccaccatgatcctctgcacatcttgcaattcagtgttgatggagcctagatttcttcgagcacgactgtcaatgtagagcttcttggttttctgaatgaaagtatcaaattcaataaaggaatagggtcgggacacagtgggcaccttctttccatgctgttcatcaaattctgagtgcaaatcttctaggtaggcaaaagccaacttcttagggaaggcagcttcacataaaaccaaataacacaccccctgctcaataatgtagtgaaaagtcatggctcctgcttccaaggtacatctggtaggggactgttcattcaactttcgaaagagttgcttagcctgactctgatattgttgaaggtcccggccagactgttcgtcctcctgcatcgaggcggccagcgggagcccgtccgccactcgggcgatcattgttagcaacaccatcttcacaaactaacagggatccaacactggcccggaaggcccttggcgccgtcctcacttcctccgccgcgacaacagttataccctatgtctcagttaccggagatccagctgcttgcgtctccgcttcccgctgaggtccc

SEQ ID NO: 152142 - DNA, 920 bp, Homo Sapiens
  misc_feature (707)..(715): n is a, c, g, or t
tcggtacccgaacgggtgatgcggttggtggtgcttgagccaagcaagggcatggaggcaatgaccgaagcttacagccagaggctaagctgggagagatgaaagcagggcaaggctgattggaaaccctctggcctgatgtcacggtgtcttcccagctaggaattcatcctcaaggccccctgcctgtgactggaggccatttccaggtagttgccacactgacccctgactgctactccttggcagtgcagtgggggggccctgcctcagccacatatcccggggagcagtggcagcggtaggagccctctgtgttctcgcagtaaccatggacacagagcacagcaggcccgttcaagtcatcacactcattcacatctacgcaggccatgtgggccgcatccagctggaagccctcaaaacagtcacaggtgtagccctcccgcacgcgcacacagcggccattctcacagccgttcaggatgccgcactcctccgcctgaagcccttcgaagccggctgggggctctgggaggaggaaatcggagagaggaggaggctgagggctgtgtccagactctccctaatgctgggaccctcgcccttctggacaaagggtgcccctgtggaactgtgggggtgggggcagagaggatcataaaattcttgtggaaagatgctagaacaaaaggcagtactcttgnnnnnnnnngtatgtgtcattttagatggggagaggtgctctgggcttcaaatgagggctccagggaggctgagactcgctgcttccacaatgcccggctcctgctggggtttgggtggtcgaggagtgtgcttgctacatagtttttgggtttgggcgtggggaaggggtgaggtgttttgtttaaaccttcacatcgtgtttttgggaagtg

SEQ ID NO: 152143 - DNA, 799 bp, Homo Sapiens
ttttagtatgtaaataaagtcctttatttaatttcgtacacattatcttaagcattattttatttttcttgaaggaattcatctttcaaggtcaaaattagtatgtgtttacacacgagtatattttttaatgctattactacctgcaaatacattcttccataataatgcactttcagttttcactggaaagatagcacaagccttttaaaagtcctatgaataaaatttataaagggaggagaacacaagtatggtgaatccttcccaactcccacttccatcaaatctcaagaaatcctcctgcttcaaaacataaacaatctcacaagatttttatttgatcataatgtggaaaagaaaactgtattcctattctttttgatactaacagttttacggaatttgttttcactttctgtcaaaaaacacgtatgttgctgatatggattctcaaacccatttagatcgaatagggtcattagaataatatagccttctgattttaaaagcaactgattacttatagaaaaatgatatgcatcagacgtttaatcagaaaaagaaaaatgagaacatctctttcatgtttgatatcatttaacttacagaatgatgtgaaaatacgctggttataattttaaacataactaaaacccacttcactaatgaaaaaacaaaaatgaagaatcaaatatctaccaactttgctagtattactgtccaaataaatgtcttccattgcactgacattagaattagagattcactatatgttaagcatattatttaattatat

SEQ ID NO: 152144 - DNA, 763 bp, Homo Sapiens
  misc_feature (468)..(477): n is a, c, g, or t
  misc_feature (511)..(523): n is a, c, g, or t
ccagtagtattgttacctgcttgaaaacactgctgtgttaagctgttcatgcacgtgcctgacgcttccaggaagctgtagagagggacagaaggggcggttcagccaagacagatgtagacggagttggagctgggtatgttaaaaactgcattatgcaaaaatttgtacagtgttaaggcctaaaaactgtgtggttcagagactaattcctgtgtttaatagcatttatactttaagcacaactagaaaattgtaagaattgcactctacttatgtatcactacaaactttaaaaaactatgtctaatttatattaatacattttaaaaaggtgcccgcactaccatacatcagtatttttattattattattgttattcctttttaatttaatgtgctcgcactacaatgcatcagtattatgattcctctgtactttcctttcgctattcatcaatttcccannnnnnnnnncagcttaagtaaccacacaattttaggcctcaannnnnnnnnnnnnccggggaaggaccttgaagtgatgcttgtgtgaattttaagatacccgaagtctataaagtgacccgggacgtgacggaaacaggctaagatgagaacataaagaaagccttggtagggggtttcaaaaggccttatttgcaaacctttaaatcgggtgttctgcaagtgccatcctggtacagtgtccaagagggtaacaggggttaccttggcaccagcttcaggtgtaagctcaccg

SEQ ID NO: 152145 - DNA, 865 bp, Homo Sapiens
  misc_feature (614)..(626): n is a, c, g, or t
ggcactctggaggaggaatgccaatggggaccctgtctgcaatgcctgtgggctctactacaagcttcacaatattaacagacccctgactatgaagaaggaaggcatccagaccagaaaccgaaaaatgtctagcaaatccaaaaagtgcaaaaaagtgcatgactcactggaggacttccccaagaacagctcgtttaacccggccgccctctccagacacatgtcctccctgagccacatctcgcccttcagccactccagccacatgctgaccacgcccacgccgatgcacccgccatccagcctgtcctttggaccacaccacccctccagcatggtcaccgccatgggttagagccctgctcgatgctcacagggcccccagcgagagtccctgcagtccctttcgacttgcatttttgcaggagcagtatcatgaagcctaaacgcgatggatatatgtttttgaaggcagaaagcaaaattatgtttgccactttgcaaaggagctcactgtggtgtctgtgttccaaccactgaatctggaccccatctgtgaataagccattctgactcatatcccctatttaacagggtctctagtgctgtgnnnnnnnnnnnnnttgctgaacttggcttataacttattttggtaagaaatacgtgtacaagtgactttatggcattctgggtagctgtaaggcattgaaggatgccaagaaagttttaaggacatatgggagaaattagtgtggaaatttaagaagaaactaggtctgatatttcaaagtggacaaactgtgccagttttggttctccttttcacgtggccacagttgttgtgatgcatttaaaagaaatt

SEQ ID NO: 152146 - DNA, 907 bp, Homo Sapiens
aaataaaaaggttttggaattccatcctttaataaatccaagggagggagatcttatggctgctcaaccgagatttccgattttctttaggtttttgctccaagtccaaaaagggacaaagaatgtttaagagaaacacttcctaaaaccttttgcacagctgtgtttaatgacagtgatcatttctgtcaggccatctccaagtaggtgctgaatacttgataaatactgctgttggacatctgggggagcaagaattgtagtgccatttttgccaactgctgcattatccaggtaaatatatccaccaattatgtttaactggacccgcaaaagaacaaccagcatacaggtactgtatacagccacagtacttcttgtgaaacttattatcttcagatcctcccatatttctagcttgtttgaaggcctgttttttagcagagctgtgaggctctcggaattcagttgctgcattaaggcctctctcagtgttggaagcatggacagcactgtcatattgcaagtcctctggttactttcaaaatgatattgtcgtcgtgcttgggcaatgtattctgcagcctccctttcctgtatttctctgattttcttctgtccatatttccccagaatatatactcctccaaggaccgtgcccaggaagatgcatttctttttgtggcgtttcagaaaattccatacagacctcagcatctttaggccctaggggtgtgggctgactaggggtgagggactgcttcaccaggaaactgtttcttcgtcacctggcccagatgacccagcaagagcgccgtcgtcccgttctgtgctctcccgaaatcacaaacgtgactttccgcagagactgtcaccggagcggcaagggggcgtggactacagcaaa

SEQ ID NO: 152147 - DNA, 992 bp, Homo Sapiens
  misc_feature (103)..(416): n is a, c, g, or t
  misc_feature (431)..(431): n is a, c, g, or t
  misc_feature (436)..(438): n is a, c, g, or t
  misc_feature (440)..(440): n is a, c, g, or t
  misc_feature (445)..(446): n is a, c, g, or t
  misc_feature (451)..(451): n is a, c, g, or t
  misc_feature (453)..(453): n is a, c, g, or t
  misc_feature (460)..(460): n is a, c, g, or t
  misc_feature (462)..(462): n is a, c, g, or t
  misc_feature (464)..(464): n is a, c, g, or t
  misc_feature (469)..(472): n is a, c, g, or t
  misc_feature (476)..(476): n is a, c, g, or t
gacgcagccaaacaagggcgagcaaccggagggacagcgcgggacgcccgcacagggggacgaggaagaaaagacgcaaggcgccggagggcggaggagacannnnnnnnnnnnnnnnnnnnnnnnnnnnnnnnnnnnnnnnnnnnnnnnnnnnnnnnnnnnnnnnnnnnnnnnnnnnnnnnnnnnnnnnnnnnnnnnnnnnnnnnnnnnnnnnnnnnnnnnnnnnnnnnnnnnnnnnnnnnnnnnnnnnnnnnnnnnnnnnnnnnnnnnnnnnnnnnnnnnnnnnnnnnnnnnnnnnnnnnnnnnnnnnnnnnnnnnnnnnnnnnnnnnnnnnnnnnnnnnnnnnnnnnnnnnnnnnnnnnnnnnnnnnnnnnnnnnnnnnnnnnnnnnnnnnnnnnnnnnnnnnnnnnnnnnnncggcccccgcggggngagcnnncncctcnngcagncntcccagntngnagcgnnnngagncggccccgcccccacccagagcccatacttctccaccagccggaagcctggcgtggtcttcctcgtgcctgccacgtgcccagtccagccggcccccctggcggcctccactgcagcggcggcagcactggcaatgccactgcagcgggccagcgtgttgagggccacccgttcccccagcagcaggcagtgggcagggccccggacctcggccactctggccaccggcaccagcttcgatccctcggggaggaaccaggagacttggcagttgagttgggtaaatatggcatcgaagaaaggctgccctgccagtaccccaggggatttggcccacagcgccgcctgcgaggggcctgccccgctgaccaaggctgcgtagttgagccctgggcagtcctctcggagccagctgtccaccagggctgccagggtgacgggcggcagcagcagcgccaggccttcagcgtccatggtgacttgcagctgtctgggctggtgtgttggctgctcagg

SEQ ID NO: 152148 - DNA, 756 bp, Homo Sapiens
tctggcgttgaaccgatcacttctatattgcttcattgctgcttttaatagtttcttggttataatagatggaatatccaccttgtgaatccttcttattaagacagatgcaataaaacgtaatgttattctcagttcatcaacaaaggattcatcatctgtcacatgccctgtaccacggataaacaaagttttccaacactaattcaagaacctctgagagagatgcatcaaccttggaagaaattttcaggtctagccatggctggtagttttcaagtagcaaagaaggcctatgtcgtttacatttcactttaccacaaacagcacagctatgaccttgaggaaataattcctgaagtcctaactgcttgggtttgtattttattgtgaagaatatatttggtaagagagaatcaggtcctagtgagcagtagaatgtgacaactccagcaacaaatgaccagaagatcattaaaatatgaatatacctgttaagaagcagggaggcggcgctgagacagagcagcaggaagcagaacagcgggtactggcggcagatctcgcgtcccacgtccagtcgcagccgctgcttcagcttctgccccatcgtccgcacccagggcaccatctccgtaacggcgaggccgagactgcgctactggctgaggcagaggtcaaggcgaccccccatccacacctcgcgtccccgccccaccgacttggcggcgcacacagacgcctaccggcagatcc

SEQ ID NO: 152149 - DNA, 705 bp, Homo Sapiens
gttctgggaaccagctttatttttctcaggagcctctcactgggaaccagacaaccccagaagccatctttgcctgcccttggtgacagtgtactccaatctcgtcattcattaatgtgatggccagtcactgagcacctggcagatactggttttccatcttctcacactcagctctgcccaaggtgggatttttgtctttcaaggcaggagccatcgtcccacccaggatgagccatcctcttctgggctaggttagagttgcctgttatgccaaagaatggagctgggctggagggaggggcaggtggtgatgggggaagagaagcagggtctcagcccaacctcagtaccaggtcagctggggtgccctgtttcatcttgctgggccggctcactttggagctggcggatttgtcaggttggaaattgctttcttcatctccacccaggacacgcagcccacagctctgccccgcgatgtcacgaagagggactgaaggttcaacagcttaaagaggttttgtgcctcatgcagggaagtctctggggacagcttcagggtcactggttctgtggggcagcctgcagccaagatgtcctggagacactgctggtgtccaggagcccaggaaggaggctcagccttcagggcctgcaccagctgggcccttcgcactatgcccaccaggatctgggactctg

SEQ ID NO: 152150 - DNA, 884 bp, Homo Sapiens
  misc_feature (400)..(400): n is a, c, g, or t
ctggccttcgggctccttttgctgatgttcgtaccaaggtggttcagtgagtgctcttgtatctcagtcttgcgctgatattctagctttgctgcaatgtactctgcttcagccctgtctaaccgcttccgagcgtatgaatagtctaagctggcctggatcgatccggttcctgagaattccaatgtcagctgacaccatgtcatctaaagcctgcaactccttctggatccgctttagtttcatggtctctgcctgagttcttttggatctttctgcaatagctttagccaaaagagcttttttacgtttatttgttctcttccattagccgttgttcttgttggaggacttcccaacgagatttttcttgctaacaattccactttctttttctccnatttgcaatctggctttggaggtagaatctcaacattgttgtgaccatcatgggaattctcaagtcccagttcctttggctgactttcaatgccctgtggttgtccatccaccaacgggggaggtgagagtgaaatgactcggaagagtaggggaagaaaaaggtggtttttgaacgttaactctctgttttggtgctgaaagcagctgctctggaagtaatgaggttgatccatcttgaagcccaagtttttggctttgctctacaagggctttttctcgctgaagttgttgtcgacttttcttcgcggggagacgtcgctgtggttcaaatggatctttagtctgctttagtctcctcagttcctcctcagagaagcctgcccaaccttgcgccatcggcccgggccaccggcacccccaaaagtgccccaatctcgcagccgcgactgccaacacctgctgcccagctcatccgggttttt

SEQ ID NO: 152151 - DNA, 1665 bp, Homo Sapiens
  misc_feature (360)..(360): n is a, c, g, or t
  misc_feature (406)..(463): n is a, c, g, or t
  misc_feature (538)..(578): n is a, c, g, or t
actcgacgctagctagatgcgcacagcaacggagggcgcgtaccaatacactgggatgagcaaggatgtgagagtcttaaacgcgatcgcatagcaacctcccgcccgctactctctgatggctgtgggcggacaactgttgaggatagggaacggcataccaccccacgggaagggatagcacaagtagggtgtggcgcagggtataggttgcccagtctgggttatatgaggccggtggaggtgcaatcgaagccgtagagacgatccatacacgatgcgtgtgaagggagcagggctgtgtggtctgcgtgccttcctccagacgaacgggtctcccctgccgcccttactgatcantctggtatgtcgggctcccagcagggctgcgcgcccttcggctgtnnnnnnnnnnnnnnnnnnnnnnnnnnnnnnnnnnnnnnnnnnnnnnnnnnnnnnnnnngtgtaggccggcgaggtgggcgacgggatagagagggcggagtagcggcggtctagggaggtggggataacgacnnnnnnnnnnnnnnnnnnnnnnnnnnnnnnnnnnnnnnnnntcaggccgttcttcgttgcccaagttcaggggctggccccactcccaaggaactggcggactgcaaaaaggtggcgaggtgaggacagggtcctgcccctggtcaggtcctgtcaactgtgcttcggcccaggacccagggaaggacaaggaagacagtggtgccgatggcaggaggcacaccagagcccaggggtgggggcagaagcaccaggcatctgtctggcccaggccggtcacactcccagaagccctctgcctccacccacctgcaggcccttcatggtggtgctccagccctccgacccccagaacaggccgtgctcctgtgtgagagcagcactccaacaatcccacacctccctccagcccaggaagagctccctgcctggaggctaccacagctccttcggctcttccctgacaacctgccagccctgtgttcatgagctctcctgggtcctctgggacctgacctgaggctccccaccaccagagcacatccctgctctcactcccctccccatcaaagatcccaactcgggcccagctctcgcccaggtcaccagggttctccctgacggtgcctggggtgcagcaggagggctcccaccttcccacagctccctgtggaccatggcaccctccgcctcttccctctgcctccaggcctcccgggagggctcctgtccacatggaaagatgcaggccagacactgccggctcctctttactctctgctccggagggaggcaggaaggagtctcaagggccaccacagtgcctcttcccccaagactccagagcaccagaagtggaacccacacagctggggctgcaagcgtggggcacaggtgaggagaagagagtcacaagcagagcctagggcaggcactgagagggggccacctgcatagctctgtgcctgcccagggcctggctctctcacccacagaggtggctggtcccaccctatttcacggaggtggagaccagggctctcctgagcagcctaacaagaagcagcaatgactaccggccaccctgctcccgtggggccccgcactaggtttttctgcaggctcctg

SEQ ID NO: 152152 - DNA, 1061 bp, Homo Sapiens
tggtagtacccggctgcatcaaacgggtccttcaggtcgtagaagatgatgtcaccgagcaccaggtacaccttcacgtagtagagggtctcctcgtcaaactccagcggcgagttgcagagcgacagggccttgaggtagaagtgctctgccagctcgccatggcccagtcggtgttgcagggcggccagccggtggtaggcccacgcgctcgttcagccggttccccccagggtgatgctgagtgctagggccatgtgggcaaactccaagccctcctggggctcctccagcgtggccagcagtgccaccagcttgttgcacagccgcagctccgctttgcggttgcccgtagtcactgccaggggcagggcccggtcccggtagaaggacacagctttctcccgctcccaggccccgtcgaagaagatgtctccagccgcctcaaacagctccagccccaggttgggttcgcctgtgtacagggccacgttctgtgccacctggatgtagaggtccaccagctcgctctgccgcaagatgtaatagatcttccctgcttgcagccaggcatgcgcctccttctctttcttctggaggtcaatgaaaatccccagacttcgtttggtgtagtccagtgcggatttgtaggccctggtatcagacacaggtgtcagaacaagggctgtcatcctcctggaaccagtctgcctcctcccgtgggtctggtgacagatgaatctggaatgggactgggaacggccctcttgtgtgtgcagtgtcctgcccttcccgggctgctgagagggtggggttgaacacacacggcaaggaaaagatgaaggacatccttctgagggaactgggcatcatgctgccctgtggctgggggagcgtgctagtccatctcccccgcgtcccagacatggcctgtgtcttctctagacgcaccaggagccatcagtgttcagatgctatccaggccgatggttctcaaggtgcgcaggcatcacagtcatccagaggcctgtccatatagcttgctggcctgcccccagagc

SEQ ID NO: 152153 - DNA, 442 bp, Homo Sapiens
  misc_feature (33)..(33): n is a, c, g, or t
gcgcatgcctggctgcaagcagggaagatctantacatcttgcggcagagcgagctggtggaccttacatccagggtggcacagaacgtggccctgtacacaggcgaccccaacctggggctggagctgtttgaggcggctggagacatcttcttcgacggggcctgggaacgggagaaagctgtgtccttctaccgggggaccggctgaacgagcgcgtggcctaccaccggctggccgccctgcaacaccgactgggccatggcgagctggcagagcacttctacctcaaggccctgtcgctctgcaactcgccgctggagtttgacgaggagaccctctactacgtgaaggtgtacctggtgctcggtgacatcatcttctacgacctgaaggacccgtttgatgcagccgggtactaccagctggcgctggcggccgc

SEQ ID NO: 152154 - DNA, 873 bp, Homo Sapiens
tgccgtcagtgtacacgcagcgacagctggtacggaagaggccgcactttgctggagcttagatacagctttcctgaactctctcctcattacctagatggcatctgaagcctgaattagcttctaaaaatagcaagtcactccggccgtgcctcaggcaattagtcaaagcagcactgacaagaaggcggcagatcccaagcgcggccctgcctgcctgcagtgtggcacggaggtgccctccctggcctccgagtgggtggaaggatggcagagggctgtgtcccagggctggcacgtggacagcagccgtgagtggcacttgtcaggcaaagcctgtgacctcagccgttccccctgcacgatcgggatgatgcccccagcagacgccaccccctgcaaggacacagaggcgatcctgctgcatgggaaattccccgaggagtcaccatgggagcgagagccccaggctacagttcaaacatcaccacactttgctccatgggtgttaagaaatataaattggtggtgaaacgataaacggtggcgctttgcgtacagcattaacgtagaaagaaagccactgacttctctgtgagaaccaccttgctctgtgaatcctgcagggaggccacttttcccatgactggtatccctcacggcagccgagcctctgctgaagtcggtggccagacgggacagggggtgggggtcctgtccctgctacagcaaggaacccgcagcaaagcacagctgctggccagggtaggtttgcgtcgcgtacggggatcgagggtggaagtgtgcatggacatctacaaggtgtaaaggagagtgagccagcgatggccggaccataatggcatttcaccc

SEQ ID NO: 152155 - DNA, 711 bp, Homo Sapiens
cagatcagcagggagaggcttcttctagctcccggggtccacacaatgcccatgcccgtccctgtccccggggcaccttgtcaggctgggtggggcaggcacacacaatctccgcatcttccgccgagaagtagtcattcttcagcaagttgtccaccagacactgagtattgcggatgtgagtgaccagaagttcccgattgcttttcagtaattgaatgtgggggtgagactctgatgggattatttccatctcactgtggccctgctcttccatagttaaagtagcaagcggctacttttcccaaattcatcttcagctgcgtgtgtcctctcagcagaagggcaatcaggattcaggccgcgccctccagggcccctgctactctgcgcagcccctttttaagtttctggcatcattctttgaagttagaatattttaaaacaacattgtttaaatcttcaatttccaatttatttctggaattgcttctgtctcttccaagcctgcgattcccataaaaacagcaacttgtcttcccagacgttttctgtaatcgccgccacaatctccacctcttgccatcaaaggcagaaaccgaaggaaagtctcctgacttacaatcacttggccaccaggtttacagaccttcgcagccgctgagagctagagaagagcccggagagcgccatggtccggggacgccgggg

SEQ ID NO: 152156 - DNA, 767 bp, Homo Sapiens
tgtggatggcctatttacccaagttggagtgtaggggcctgtggcaaacatgaatgagggtaaacagctgtggtgaagagtgatgagcatgtcctggaggagcttggaaacagaatggggagaggcagctgaaaagcctccttcagcatcaacttgatacttctgtctccattgaggaatgtatgtctaagaaagagagctttgctcctggtactatgtgcgagccctttgggaaggaagcagctgggactatgactttgtcccaattccagacactgcatgagaaggaccaggaaactgcttctctcagggaattagggcttaatgaaacagaaatcttgatctggaagagccatgtttctggtgaaaagaacgacaaaactgagggcaactcctgaagcaatacagaaccgtcttcaacgatattgaacgaaaggatctcggagcgtcagcgcattctttgcctgcccacagagatttgccaagagcaaacagctgacccggcgagaaatggcaaatagaaaagtctttatttcagggagctgatcgtcactccttccttaaggctctttattaccaagcataccacaaaaagacaagtgcagacaagtacatgacctcaatgaagaggaagataacaattaggcacaaaagatgaaccccaaaagaagaacaaaggtgatcccatgaacaacctggaaagtttttaccaagagatgataatgaaaaaacgtcttgaagagtttcaacttatgagaggtgaaccc

SEQ ID NO: 152157 - DNA, 536 bp, Homo Sapiens
  misc_feature (117)..(127): n is a, c, g, or t
tcgggggctccaccaccgcgcgctcccaccctcaaggtctgcaggacacaccaaagaactcctccaagtcacacaagggagaaaattaacttcattggcttctatcaggaaagctannnnnnnnnnncctcttctttcctgcaagtttcccaaaccccatgactctgatttccaggtcagagactaaggtttatatttttcttactctgtatactttatatgtggagagtccctgaaggaacactgtgatgggctgattactgtgagccagttgtgggccagacctggcctcaggtgctgcaaagggaattcagtcaccccgtgtgcagtgatctgtgagccccaagtcagatccaactttttcctgatagacagcaccctcctcctccctaccaagaaatagcagggttggaggtagtgacccaatattcaagaggttggaaattctacatgagatatttctgagttaactcctaaatagcagtttccttaatcatgtggaaaataagaacacttactaaagagaccatgggttt

SEQ ID NO: 152158 - DNA, 1023 bp, Homo Sapiens
  misc_feature (110)..(186): n is a, c, g, or t
  misc_feature (205)..(269): n is a, c, g, or t
ttgttttttgttattctttgctttctgttctttgtctctgtcgtctcctcttctcttgaccttttgctcctcttttctctatctgtgtgtcgcctggtcttctggatcgnnnnnnnnnnnnnnnnnnnnnnnnnnnnnnnnnnnnnnnnnnnnnnnnnnnnnnnnnnnnnnnnnnnnnnnnnnnnnttgcatccttgccttgtcnnnnnnnnnnnnnnnnnnnnnnnnnnnnnnnnnnnnnnnnnnnnnnnnnnnnnnnnnnnnnnnnnattctccgtaccttcactcttggatttctatctcctctctttttttattattctcttcacttctatgtcttcccattcgtatgtctccattcttatttttctttccattaatgtgttccacccgtaatccattctctttttttaaattcttctcatgtctatgatctcatttgcatgttcctcatacctccatgtccttttcctgcttcttccttcgatgttcacgtgatagtatgttctctgtaggtttctgtacattatgatgtccagttctctctgctctgtgtcccagcatggtgctagtttttcccccacagcctttggggccataggcatatgacatgtggcattgtatgcctgtagatgacgccctcgatgaggctcttgttggtggcctgatacaccatctcctgggtggcggtgaagtcaaaggccacgtctgaacaggtacggacttctcccgggatcgatgcgcccgcaggatgtcgtcgggatcctccattgggtccatgagaaccaccatctgctcatccactttatgggcgatgagggtagctccttcctccagctctgccacgctgatgggccaggacctcagaagcgccatccatgagttgcatggtccttggagtccccgctgtccttcatgattgcagcaggtggaggggctcagaccgcagcacaccgggcatggctcagccgcacccaccaccgcctccggttcgcgtccagccagctgctagctgcccgccgc

SEQ ID NO: 152159 - DNA, 645 bp, Homo Sapiens
gacagcgccctgtccatgtatatgctagagacttttacgaggaccagtgccgaaggctggacagcatggccatcagggccctgccatacaaggactgcctctgccagatgctggacctggtcaagccgaggactgaagggaagatcacgctgcaggacctgaagcgctgcaagctggccaacgtcttcttcgacaccttcttcaacatcgagaagtacctcgaccacgagcagaaagagcagatctccctgctcagggacggtgacagcggcggccccgagctctcggactgggagaagtacgcggccgaggagtacgacattctggtggccttggagacggtgggagagccctgggaggacgggttcgaggccgagctcagccctgtggagcagaagctgagtgcgctgcgctccccgctggcccagaggcccttcttcgaggcgccctcaccgctgggcgccgtggacctgtacgagtacgcgtgcggggacgaggacctggagccgctgtgacgccgcccgcgagaacgccgccgcggggccgctccccacgtgccaccaccgggccgccgcggctcgtgtaaaaactgttgtggaaaatgagtgcgtttgtacggaatgataaacttttatttattcacag

SEQ ID NO: 152160 - DNA, 326 bp, Homo Sapiens
tggccaaaggggcatgagggcagtctgccgccagggacagtgtcaggaactgaccttctcagagcgggctcctcaggtggagacgagtacgtgcaccccatggcttctcactctcagctccaggacttaaggaaaaaggagggtcacagctctctcctggacaccagcaggggccagcagatggaaagttcggccctgtgcatcccctgttccgtactggtgaggaagttgcctgggcccgtggcctcaaagtgctcctggacaccccaaagtcctctcggaatttcctgagctcctgcctgcgtctgcccccatgagcccaagaa

SEQ ID NO: 152161 - DNA, 634 bp, Homo Sapiens
tcagctctttcagtgagtttttattaactggataacacatgtaacacatagtagaatacatttcagaggcagagttccttggattattttttattaatattagtgtttagcagtttatttaagggggtgccaaatatagcatccttctgttgtttattttaaatattttttaatgaaaagggacttaaaaagtaaccatgatcatctaaattacttaaagttttttaatcttagtaaaacttaattttaggaaagtgtcctagtttaaatttcatatgtttcaaaatttgtaggcatttaataaattatctttttttggaggggtggatgctacatttcattggaaatgtcatttttccaaagtttctagctgtgtactctctttccttcaaataacataagtctgaaagcaatgaaaacgtcaaaggaaaatgtgtatatacatccacatgtttactttaatatgttactcttaacaagctgaaagttgtggtaagaaggacaaaagcagtattcacttccaaaatcatacaacttaggaattcctgggtatctcatgtccagaaaatatggttatgcgcttgccttcttaagtgggtgctgtttgccccattagggcatgacgtgttacaga

SEQ ID NO: 152162 - DNA, 741 bp, Homo Sapiens
ctagtgtcgatgttttataatgctggcatttaattactggagagattggattcttggttgatgatttatgtatttgtgaattgtgaaagttcaggagctgtgtagaaaatgttagtcaatcaactttattattgtgctaaaaggggacattcttatactgtcctgtctaaactgttctccagtatagacttcctaggcactaaatatccaatatttaaaggaacacagcaggtaaggaatgaagcctctgaaatagtactcatggatttatacatggcagatcttactgtctctacacatttggaagtgttcgttggtttacagaaatgatagaggttttgaactactgacagtcttaacagtgaatttaaaaactgttcatacttttgatggtgtaaatttcctttgctcgactgtcagtgattcacgataactcttgaccttgagatgatggcttttcacaggtttcttatattcttatatctcttctgaacatgaattgtcattttacgatttcttgacatttgtatcaaacacgagaagttgaggacatcttcagaacactggtaacttttcagttttgctatagacttcagaagtgtttatttatactgtgtcggtaaatgctctcgcatatgcagtacctcttctgccagcaaagtccaagggaccatagcctttttatgagacaggtcacctctagaggacaccccaagaattattagacggaaatgtcaccat

SEQ ID NO: 152163 - DNA, 247 bp, Homo Sapiens
  misc_feature (52)..(62): n is a, c, g, or t
ggatgtcttttgtaatactaaccgcgtgataatgggttttcagacatgatgnnnnnnnnnnncttttacaaatgaatacttaccttagaaatattcaccttaggaaaaaagactttgctctgcccttttatattcctttatgctgcaagtggtgacatgttcagatttctaatttggttcattgtggcctatctggtttaagtctttcattaaaaatgtctcgttagagtatttgatgtcatgcacc

SEQ ID NO: 152164 - DNA, 1191 bp, Homo Sapiens
catttaggtctttaaacatgaatcaaagcaatgcagcatttttgctaacacttaattctgcttgttcaaatctctcccctatgaatcatctcccactgatatatcacagagctattataaaatggatttttactcatgagatctggctcccattgaaacacttccattgtgtttgaagtcacttaaaacttgaacactgacagcatcagctggtttagaatactttgcatttggtatgaattaacattagtggttaatgagaaatttgaacaaactccaatccagcaccttttggaagttattttaatcctgcagtctagctgtggggtatgcctgcaagagatatttatggaatgtgcatgctgaacaccaaagccaggcttgttggagtttatgcacatcacaggcttgaacttccccgagagcaagtgtggtcaggttagcgtaagggttctgatgaaaagccagctacattcttaaaaccagcactagtttctctttcttcccccgaggaagtatggaggcctactcacaaatttctacctgcatgggcaagatgctgacacatccttggagtgatgctgaatgtggatgtggttggaggggcagaaggggcagtaaagacagtggccatgggcaaagctaccctcttctatttctgttagaggatcaagcttctgattcttcttgctgagtatggctgttgaaggggcactaaattattgattattcttgagttctaaagacaactgaaaaagaagctggtccctctgaacaccatcatctcattctctccgcttccacattgcctctaaaatatatcccgtgtttttagacagtttcagttttttccactgaataagaaattcagctcattaccacttcctcatgtagccccaaccatggggtgtgattaaataaaacccatgaaatgtctgtaggtcgaggggcctaatttgggctgacatttactctcatgtctgcatccactcaggatctgagtgctttgtgtcccaagaaacacaggtacttgttccttccagtttataaacactcacagtggcataatactctatttgatctcccaaagagatttccacaaatagccagtgtatactggcttacaagaaggtagtgacgccactggaacctactttctgaatccatcatcccgttactccggagcgtacc

SEQ ID NO: 152165 - DNA, 902 bp, Homo Sapiens
tttttccttctggaaaaactttccccataattctggcaaattacaattttccccagaggccattggatttttcatgtcccgtttccaatttaaaagaagtcttccagtttcgtgcatagttaacataccactagatcgccctctggcattcccttgaggagagaaagcactgaaaaggtggtacaatatccgaaacattttcatatcctggaggaggtggttcaaataatgatgtgttgaaaatctcatttccatcttcattaattattgagatgtagttgggatgagtcttatttgggtaggacaacaggacatcataatgtgctagctcaacagaatccaggccaaattctttccactgggattgaatttgctttgcaagctgaaagttttgttctgttcctgctaaatgtggtatctgtgtaaaattatataagaacttcttgatgttctcagctttcaattcatccaaaaatgctttcatattatgctttggagtaatgttagtagcttcattggaggattttataaaccacccgaagaggaagccgaggagaaagaagccacccgccagcaccagcgccccagcgcacagccagcgcgggcggcgcgcggtggccacagccgagtcggtttcgtgaaggagattccacatctcggcgcgagcagagccggcctcccgggacccgcgcctgtgctgctgctctactgcgcgccctccaaccaccacggcggggtaaagtctctctcaatctcactaatgcctcgcttatcagccctgcaggctggaattcgctccagacctggggtccagtttctccaccacagcagtgtttctagagtgcactgaaccaatccgagcgagagagagaggcaacatctgcctccaggagaaggaaatc

SEQ ID NO: 152166 - DNA, 628 bp, Homo Sapiens
ttttttaagtgggcgtttcaaggcgtgcttgccccaggtggtgcagctctcagaccctcccacttgtttacttcgtggcgagagggcgaacactgcgcctgcgcactctccgtagccggatccaccttcagcgtctgcgccacgtgactccgatccaccctcgaggttccagtggaataacccccttctgaaaaatggtttcacccgctccttctctagaacgggtcgggccgctaccactgtccggcccggaggggaactgttttctccggaagtgacaacacgctgactaggaaaaggaggaggcggggcagatggggccttcggacggcgactatggaagtgagcctgcatacatgttttggtcgtttgagaagggcggagtgtacctgcaccaccagctgctacgaagtatcaggaccgagactactctcatcgctggtgtcactccgtgttcgagcgacacaagggacacagtgaacgatccttccatgccactgtggcatcatgttagagggagtgcagcacaattaccaaaccaaatccatctttcatccaagaacagtacatccatatgggcacgtgactcaatgtgcattcatgagcgaggaaccaacactatagagcc

SEQ ID NO: 152167 - DNA, 1069 bp, Homo Sapiens
aatagtttttcctttgggaaatggccttaaagtggctgaaccctagaatgatagggtttagaggcccttaaaaaaatcaggagggttccatgggaggaatttaattcagcaaatatggagtgtccactgcatgcaaggtaccctgccagaaatctccaaatgagtaagttgtccttagggatagaaggtgctaagcatcatgcaaaagatatgaactgaaggctggtcgggggctgcaggaaggagacaggatctagtctggaggaataggggagagaaagactaagggtcagctatcacagagaagtcttggataaacagagatgcggatgggtcaatgaggaaggaaaaggaaactgtgtgaacaaagaaaggttgggtaagagttagctggaatgtatggcaactgaggacgtgttccatgccaagtcactgggaaagccactgaggcatgtaaaagtggggatgaaactagattagagctatgttgttggacgactgctctggccgtgtttaaaatgggatcacacaacggcattggaattagaagttattgcaataatgggaacaagtaacaaggacttgaaccagggcctatgtaataacagcagggcaatgaggatggaaaggatacttgagtcattgcagagtcttgttgagagttagaggcagattctggagtctcaaatggtatctttctcttacagaagaaaataaacagatttgaatgggaaggaagttgagttttattcatgtcaagtctgagatgcttgaggactcatatagatagtcaataggtagttacagatgtagctttgcaggatagtggagaaagtaggtctaaggtccaggttataatgtggatattttcaggctgtgttggagttgtagatgacaagaatcctgttttcaattgaacaaatattttctctttaaagaccctcctaggaagccaggcctggtggtgcatgcccctgtagtcccagctactccagaggctgaggtgggaggattgcttaagcccaggcattgagttcagcatgggaaacatcccgggaattccggaccg

SEQ ID NO: 152168 - DNA, 1121 bp, Homo Sapiens
  misc_feature (86)..(86): n is a, c, g, or t
  misc_feature (142)..(142): n is a, c, g, or t
agagtccaggagaagatgtcattcttaggcataattccatcaggtttccccaatacccaagggccccgggacccatacagtccttncagcatggactcatccagaagggtcaggccccatactgttgggacacatcacacanattcctcgagggggacagatggcaccatccatggagtggacagtctcaaaggccacaattttggtatcttagggttagacttctctagaagtttctttaggtggtcagggtcattgtgcctgaagacaaacttggctgttcccctgttacggattcccttggatcatggaagcatggttgcttgcgtctgagtaaatctcgcaccctggcaggatcttggcccaaggtgaagagagtagagtcattggcaacaaagcaggaggagaagagcagggctgagtctttctggtgcagctcagccagctcttgctcaagctccacatgaaacttactggtgcctgagatgttgcgggtgccaccagctccagcaccatgacgctgcagggtctcctgtgtggcttgcaagacctgagggtgtcggctcatgcccaggtaatcattactacaccagacggacacatcctttgaggccacagatgcctcagagaaatgttgggcaaagggatatgcatcagcccagcggttcacagtcttgaacacacggtaggtgtgatcctgtttcttctccatgatcttgtccctgaaaaactggtcataactgaagacatagtttcctgtcttgaaagccttcacatcttcctggacttctggggctgccttctgcacaatcttgctcttcccatcctggagttccgacagcatgaagggacagtggcccttcgcccaagatggagaatctcctccagcctttgttgccttaaggtggatttgagaacagtttggtccttgggtagccaggatgggacagcgtccaataccaaacaggaactggtgagtcttaaccaccttgcctaggaggcttgtggggccccgggcaagcactgggcagcactgtagcagcatggctgcagtcaccatcttgaacctaaagtcctgttgccctgcactgaggacgaacgatcccgggaattccggaccc

SEQ ID NO: 152169 - DNA, 1118 bp, Homo Sapiens
  misc_feature (153)..(153): n is a, c, g, or t
cccttttgacaggcaaaggcaaaaggccaggccagcctgggtttctcggcactgtccagggggccgctcgttcagaactgactggcatgctggggtcgcactgcagcaggcggacgatgagggggtcgctctgggcacctctgatgaattctnccaaggacagtttgcctgcaggggaccagagacaatgggattagccagtgctcactgttctttatgcttccagagaggatggggacagctctcaggtcaggtatgctccctttgttgaaagtcctgagccttcttgaagctggacggtgtctagtctccattcactttacaggcatttctgaaaaaaaatcctttttcctttccctgctccctgcaatacatcaggtacctcaaagggcttacccagcaagctcagcaggacgtggctgatgagggccatttaaatccttttagaaatcaccccacacttcgcttattaaggaacgtgtacactgtgcagaaaaatgaagcatttgcctctaacccatacagaatccaggctgagaaggccatgctggttgggggcccccggaagcacggtccggatcctccctggcatcagcgtagacctgctgctcaggcttggggtaccaaactcatgctctgtactgttttggccccatgcggtgagaggaaaacctagaaaaagattggtcgtgctaaggaatcagctgccccctcatcctccgcatccaatgctggtgacaacatattccctctcccaggacacagactcggtgactccacactgggctgagtggcctctggaggctcgtggcctagggcggggctccgtaaggctgatcggctgagctgggtggggtgaggttttctgaccctccgctccccatcccataaccgctgtcaatgagctcacactgtggtcactatagccctggctctgctagtccacaagcaggataggctgtaaggattctgcccgttcagacatggcctcaagggcaggaggcggtccctctggctccagctggtggggaaggatgaggtttgaggttggctgcgtcctggcggcctggtcctgggcagcccctccatgtgtctgttgagctctgtgctgtcagctg

SEQ ID NO: 152170 - DNA, 1194 bp, Homo Sapiens
actctttttctccttccaccatcaaatgctagataaaaaacggtggtaccggtccggaattcccgggattggcttcatctctaactgaaagtctgcacaggagcggccgatcgaagggccccgaggtgggcagcacaggctcctcgacgacttcctaggtcgcaatctccaggaaaacgaccacagggtcagcggagctagccgccgagccccgctccccgggcccttccggcggctgcgccctttcaccccggacgtgggcgggagaggaagcggctggtgatgctggaacaaacatggccgctctggcgcccgtcggctcccccgcctcccgcggtcctaggctggccgcgggcctccggctgctcccaatgctgggtttgctgcagttgctggccgagcctggcctgggccgcgtccatcacctggcactcaaggatgatgtgaggcataaagttcatctgaacacctttggcttcttcaaggatgggtacatggtggtgaatgtcagtagcctctcactgaatgagcctgaagacaaggatgtgactattggatttagcctagaccggacaaagaatgatggctttcttcttaccctggatgaaagatgtgaattactgtattttaaagaaacagtctgtctctgtcacccttttaatcctagacatctccagaagtgaggtaagagtaaagtctccaccagaagctggtacccagttaccaaagatcatcttcagcagggatgagaaagtccttggtcagagccaggagcctaatgttaaccctgcttcagcaggcaaccagacccagaagacacaagatggtggaaagtctaaaagaagtacagtggattcaaaggccatgggagagaaatccttttctgttcataataatggtggggcagtgtcatttcagtttttctttaacatcagcactgatgaccaagaaggcctttacagtctttattttcataaatgccttggaaaagaattgccaagtgacaagtttacattcagccttgatattgagatcacagagaagaatcctgacagctacctctcagcaggagaaattcctctccccaaattatacatctcaatggcctttttcttctttctttctgggaccatctggattcatatccttcgaaaacgacggaatgatgtatttaaaatccactggctgatggcg

SEQ ID NO: 152171 - DNA, 1079 bp, Homo Sapiens
  misc_feature (104)..(116): n is a, c, g, or t
ggggggccccccttttcggggggcttaaaggtggggttcccgtccaggccgattccccccgtgttccggggctaatgggtggtccccctgtgtggcaaggtttnnnnnnnnnnnnnggggggcttcccctgtttccccagggtttttttcaaacttgggggtgaagggtccagggagggaggaacttggggtttttccagttctcccagggaatgccttggtgccgcacaaaagcccactgtctttgctgcccgtgcaggttccaaagtttttcagttttgggggccactttcaaaaaagccttcctcatcaagcggggtggatggtgtcttgggtctctggggagggacgctggctgatgaagatgaagggggctgggcttcttgaagagcaggacactgggtagcttctttcggcgccgcacatacagctggagggccaggcagtaggcgagggctccggagagcagcaggacaaaggcaaagaagatgatgacgttggtcacggtgaaatactgcctggtgagggagatgcactcctctttagaccacatccccttgttacttcgggaagcgacagatggtttcacctggacacagaactctcccacttctccagaggttaggaggctgaagttttcatgttttactttcttgtgtgtgaacgtgaagtttcccggcaccttgcgaatggcaatctcatactctcggaagtgactgaagatgctttcatatgtgtcatttgcgggggccatcttgggcctgggtagctgaatcttcccgaggatgaagccattgtggatctctaggttcacactgccaactgtcagagtcactcaggagtgccacttcatagcaggtactttcagactgatttgggatgggtgtccagtggaggatgtggtggaaaaattctgcttcaaaccacacagacggagggctgggcagctctgtcccatgagcgtctgagccaagacggaggctgaggagcgccgccagcagcactacgaggcacggcagcatcctgggcgcgccgcatcgtccggggccggagcggagccggcctgcgcgcctccagca

SEQ ID NO: 152172 - DNA, 953 bp, Homo Sapiens
cctttatcacgcatggggagtggggcagtgcttgtatgtgggagcatggagggaggctgacagatatgtggaggagcaagagaggctgtatgtgggctggttctataagacactcaaggggactcaaagggtcggctccagccatggacactatctaaggctgctcagaggagaatgctggaggagaggaagaggaagtgaaatggtgtgagaacattcttacccctataaataaactatttacacactttaagaaaaggagagccggctctcagtgaagaaccatgcccaccgcgccaccggcgccatcagggcttaatgctatcaagaccagaggcagttccggcgccaggagaatagctggtggacacagggggacagtggacaaggcactcccgtggcaccagtccacgcactggctcaggcttacttcacttgaacatggctgaggatcctgcaaacaacccctgatatgtgcatgtcccagcagactgcgctggcactcagaggcccagcggggccacgtccgcctcccgttgcgggcaggcccccatgctgctttgcttgatggagagagatgccctgtccacgcctgtgggtccctctacccacggcccacccacagatgtggatgacccaaagcagatgtctggatgccagtggagaggggaccagggtgtcctgcagacatgcttgagctgcagggggtctgagtcaagccctcctggcagccacaggagccctctctgtctttcagagtcaccactcccacataaagacacattctctgtctctgggtagactccagagggatgcagtcacaagtttgggcaggtaacaagggggacccttggtcttcagcaccagcaagcagaaacagagaggtcacgtcacgctgatgcttaagatggggcactggctctgggggtgtcggctcctctcccatcccggga

SEQ ID NO: 152173 - DNA, 1338 bp, Homo Sapiens
  misc_feature (204)..(204): n is a, c, g, or t
  misc_feature (419)..(419): n is a, c, g, or t
  misc_feature (619)..(619): n is a, c, g, or t
aatgtgcgcccaaatttgggccggcaaggaggttgaagttttatccggtggtaagcaccgtggctcagcatggtatctgtccttggaggtgttcccagtgagaggagtttcttgcgtgtgcttttggggaccttgagaagaggagcatagttcttctgagagtggcccttgtcactggggttacctttgtgaaacccatgcgtntgccttctcgttctccccaatcaagacacggagagccgcatctgctgtttcctgcttgccatgcctcttgctgtgtgcgcagacggctgggaaccagcgacccccaacttttgcttggtaaacgaacttgggctcgtgaggaggtccggactggtcgaccaacttgaattcagcagcaaagccatgggagcgggcgtactccaaaaggccacccnacagggttggtgttcaggtatctcacgagctcgccaatcttcctgaccttgttgggcatcatggattccaagttatcaagtgactctgagatcataccttcaggctgggttatcagaagcccatggagttggttcgcctcccccatgcaggggccttcatggctttcctctgcggccatcttgttttgccattttcttgnctgggagcactcacactggggaaagtttgggctcccactgcaacacagtattggaacttgggttcatgggcagggccttctttggacaggagacggaattcgcaggagttccccaatttgtgcatacactcaagcagtgtggtgacggggctcttcccagaaaagaaggatgtggctgaaggggtgggggtctgggactctgcagtcttctctgattctttctctgtggaatagtgggatgattcttctgattttccactgtccttggctttggcttcctctagcagaattgtcatggctttcatagctgcatcctgcttggccactttcttgcttccagcttcagctgggggaaactctcggccattgatgacaacctggaatttaaatcgaggttcatggggtggtccactctgctctatcatgttgaactcacaggtttgactagcgaactgggcatattctaacagcccgctgatggggttcttcagctggcactctgtcagtttcttgtagggtgaacaccgtggcaagccatgactgtagaaggagggcatctccatgatggctcgaaactcacctggtgctgcgcggatactattcaagtcatctgggatgtcatctgtggcccactggccattttcaaagtcaacataccctgcttttgaggggccattgtaatgaacaggtggtttcagtcttgcgggttcgggtcaggc

SEQ ID NO: 152174 - DNA, 1205 bp, Homo Sapiens
  misc_feature (214)..(214): n is a, c, g, or t
  misc_feature (233)..(233): n is a, c, g, or t
  misc_feature (346)..(346): n is a, c, g, or t
gggggcggccagcccttgcttttaggaaggcccctcccccgtcccgggtcccaggatcttcctcaggggaatgggccttctggcctatgatcgggatggaagcccccaagtgcagagaaggcccccagctgtggatgaagtgagttctggtttgggctccaggggctgaaaagaatgctggctctgaaaagaggggccccaacaggaggctaangatctgaggaggaactgcnaagaccaggaggcgctccaggtagctcgtcccttgcttccccggctctgctgcaatacaggcttcagggccacggccatgggaggcatagtccagaccctcctctcctccttntcgggctcctgaggcccggggctggagggtccagcaggaggagctggagggttgggcggcgggagagtggtgctgagcagctggttggcctcatcccagtgggcctgcagcatggcctgcagtctttccaccagctccacccgctgctcctccagctgctggttcccactctgcagttcgcacactcgcgcttgctcccgggccagtctgaagcaaagagagaagaagtgactcagggcctttaaggaagcagatacttgggagctaaaaagagccagaagggaaatgttggacatctgatattctgaaaggagctggggcccatgtagaggaggacagatcaatcaagggagcagctcttcaccgttcccagtttgggctctacccatgggaaaggggctggggcctgaaaggggcactctggggaccaggacctgagctcgtagtcctcagccacctgctgttgccgttcctctcgttctgccatttccaccttgaactgagctagctgactggccagctcctgctggtgctgtccactcaggtcctgcagctgcttcctgtgatgttccctgagggaggctgcttgccgtaggctgctctcctgagcctgcgccagccgctctgtcacccgctgctccagctgcacagccagctccgactccagctggatccgctggctttcataccgggccgtgcaccaagctcatttccagctgccagggcatctctctgtctccgagctgtatccagctctccttccagccgccgcacctcagactgcagcaatgccaactggtgctggtctcccacggctggctggattcctctgctcttctcattcccctcttccagaact

SEQ ID NO: 152175 - DNA, 1214 bp, Homo Sapiens
  misc_feature (85)..(94): n is a, c, g, or t
  misc_feature (169)..(187): n is a, c, g, or t
  misc_feature (228)..(228): n is a, c, g, or t
  misc_feature (643)..(643): n is a, c, g, or t
aaaaagggaagcgccccacatattcccacaacatatttccctggaaaaaaagcccaaagtgttccgcaaatatccagtttgggannnnnnnnnntcaacaaaaccccggaaatgtgtttcccccaagaattttttgtgaaagaaagggaaggcttttctttttccacannnnnnnnnnnnnnnnnnnttttcttgggtgggccaaccccccattttccccaaagtgtntttccaaaggaaagtttttctgtataaggggccctttttccacaagaaaaagtgttttttccctccccctcccctttgttctacaagggttttttggccaggctccatttggttgctcctttccccagttcccaaggaaatgtcttcttcagtttggctccacaaattctgcccaagaccggttgggttttggtccatacctgtatttggagtctttccagggaagcttttctttttctcctgatgtcagctttccaacttttccagcttccctgctgcttctgcctcagcatttccagagctgcctggagtttcacttggtactcccgggcaacctcctctgtgaggaacgtgtggtgaccacggtgctcctgaagaccgctcacaaagccagcaaatgaccttcccgtcctcntgacagaagagtagaagtttctctccatggcgtgcacaatgatcaactttctgcccctctgggctcaacttgacctccctgagcttctccactatgttggctacatgccgattaggccgtatgttctcaggctggtaactgatccggcacacagggcagctactctctcctttgtctagcatggacttcttgtggtttgcagtgaggcatgcttggcagaagctgtggccgcagtccaggctcaggggttgtgtcaggagttccaggcagatggggcaggtcacctcctcctttacattaaccaggattccagaagccatagtagctattccactgctcctgcctgtcctggctgctgaggttcctcttgttcacagatcccaaggtaaatacagttttgtcccaaagacttcctacttctgccctccacaaaatcactcaatacaccttcagacaccagtgcagaagtggtgattctggggagaagagtgaagacaggccagggaagacgtggttaggattcactcaccaatccacgggcctgaatcccgggaattccggaccggtccca

SEQ ID NO: 152176 - DNA, 1424 bp, Homo Sapiens
  misc_feature (484)..(484): n is a, c, g, or t
ggtgattatagaggtcccaccacgcccccaccaaaaagatttttacggtggggggggccctcacaccgcgacagtaggggctttctctgatgtaatgtgtctccccggaaacgttcgagaagtgtttccactgggggttggcatgtagccccagggttatgccccacgtgggtggaggggtgttatcgcaacacccgaagtggttcccaaaacgccacttcggggagctccggcgcgttagagggcggcggctcggggcccaggcggaatcggccgtggaggggagggccaagcacctcctgtggggccgccggtttttgttcaacggggggggccttcccaattccaggacgggacttatttcgaagtttttggtaagcttcagttaactaagtttcccacccggcttgggttccttatgcccaagaacccttccagggtgggaaggaagaccacttatgctaccaagacatcttccagtttnttcagagagacctggtaccgggtaggggccaccgaaagcccacctggggggcatggcagatgtctgttcacggtggctcatttcatctggctcagggtttatgaccaacctgacaggatgttccagggacaggagctgtggagccacttcaagaggctggtggtgggggtcccgtgggcatttatagggctcaagatagaggaaaaggcagccgagatcctgggaatcgagcagctttaacatccacgggccaggaacttgaggaggaggcataactgggaggccagtcagaagtttcagaaactgacagtaggaagaggggagcacagcccatggagacacatcggaacctgcaggcctcagtcttctgttccacaagaaagggaattatatacaaactgcgcactgtctcccagtccacttaaatggcccctcacccacagcaagtgagaaggtgaggctgtgtcttctccaagactaacacccttaatagtccccaaaaaattcaagtcttagtatcccaagaaggcagtgaggaactgaagagcagatgacgttggctggaaccaaacttagccagagaacaatatggctgacttgattagtgaaccagtccacctggtgtccacgggcagccgtccttggaaattagttccccaaaccaacacagccactccctccctgcctgactgacaactggcagggcagagggagctcagctcctttctgagctgtcagttgctaccccagtagcaggccttgggcaagaagtcaaggctgaatcctcattctccataaggcccggaggaatgtgggctaagaagcagagtcttctgggggtgccggtgctctcacagctctcctctcccctggggtcctcctcctgagctcctgggaccagatggtcaatgggaatgagtgtctggatcccgggaattcc

SEQ ID NO: 152177 - DNA, 1213 bp, Homo Sapiens
  misc_feature (81)..(136): n is a, c, g, or t
  misc_feature (705)..(759): n is a, c, g, or t
tacaaaaactagctgggcgtggtggtgcttgcctgtaatcctacctatgtgggaggctgagtcatgagaatcgcttgaatnnnnnnnnnnnnnnnnnnnnnnnnnnnnnnnnnnnnnnnnnnnnnnnnnnnnnnnnaaactccatctcaaaaaaataaaagccaggtggttgtctaactataggctttgcatattctggtccagggtttgctgaggaacaaggccatatgtgaggtacaacagcaacagtaagcccttagcaacacactgagaatgcagctccccttgataatactgagtccatggatatagaagctgcggccaacacacctcatttctgttgcagtcatactctgtataattgatctggaatcttgtcagggggtggggtaactgtgcaggaattttaataaactggacggatgcactgatagggagaaggtcggccttgtgctcacaggtaagcccacactggtactgccagttcactgaggagaaccttgtctctacaccgagtatctcctgctgagtaatcccttccaccgcgccagcatccgagatgaggatgcggatgctcaggtgagcaggaatatccaggcacatgccgttcacactgctagccagcgggtctgcacctggatcaggggcatctacacctgtggttccagctacttggaaggctgaggcgggaggatcccttgagcnnnnnnnnnnnnnnnnnnnnnnnnnnnnnnnnnnnnnnnnnnnnnnnnnnnnnnntgacagaatgaaaccgtattatttcgagccagccatcactaagatcagcgtaatcggagttgcctctcattgcaacgtgagtcgcttgtattaatgaatcaagtctttcaacagcattctccctgagctgagtacaattttcattaatcccgacttctaacaggcatccagagagtacattttctccaaataaaatgggtttgaaagttgctgatgtacacagaccccttccagctataaaagaaaaagattatcctcttgctactttttgctaaacaaaagtaaagattaacttcagttttccgtgaaaaacagaaaacagtaagtagaaataaagttgccagttttcaaaaaccgagatcactgttagtctaatcctttcaaagctgaacaaaggtgcctttatcagacttctcagatcctgagcggtggtttcttcagaagtatcccgaga

SEQ ID NO: 152178 - DNA, 761 bp, Homo Sapiens
aaaattatttcccccattgtttcccttggtttaaaaccctaaaaagttcttacccaaatggtggcaaaaaagaggttggttctttgttccgggggcttttccccaaaaagggcctaaaaaacctattagtgaatttttcctgctgtgtcctataaaacaaccttaaaatggcattctgggtcctcttccattcacagtaatcagagcacaaaaactatagtctaaaagaaccagaagtacactcagaaggagaagggagatgaaggaggcccacagagggctgagctcccaggtctgaggacatgagtaggaagaactgtgcacggaagtcttttccagaactaacaccatcctatacatatggcctggacacaggcacagatataggcattcccatattgaggcaggaagtggccagcctacactgagaatcaatgataaatggcagacggacagaaagacaaaaatcaacagtttggaaagtataatgtatgtaaattccactggaatgaaaataaataatttcaaagtgataaatgtaagaaatataaaaataatcctcatagaattgtaaaagaggaagacgagaactcatatttctccagcaatatccagcaatatccaaacaaaattcatagagaaactgtagaacagatcattggaagcaaatcaatagcatgaactcactagcagagatgacagaatttgttagggcttttctgtgattaacataggtctcaagatgatgatgatgattatta

SEQ ID NO: 152179 - DNA, 376 bp, Homo Sapiens
  misc_feature (241)..(287): n is a, c, g, or t
tctctattttacctctttccgtgcatccctgcacccgccacacccccttcagctatgcttttggagtcctggatgggaatctggggggagagaggaaggacaggtcaggtctcccccagccccttctgctcctgtctcctcgtgtccgcattgctggagctccacctccctcttggtttctccgcacccgcccattttccttctgtctttacctgcttcgtatcctttccctgctgatgtnnnnnnnnnnnnnnnnnnnnnnnnnnnnnnnnnnnnnnnnnnnnnnncaggtgccagccggagctgtaaatagagcgctgcgcttttgtgctggtttgtgcgtgtgctgtatttctgtgttttgatagaagtcaca

SEQ ID NO: 152180 - DNA, 1195 bp, Homo Sapiens
  misc_feature (1184)..(1184): n is a, c, g, or t
aacatcttgcgcctggggcagtgagaagcctttcgccgtgttaaaagttctccccaccagaaacggggggtcgtgctcaaccggagttcggtagaccccttcccgatggggaaggccccatgccccctcgtaggtccggcccggtcggggggggcccctttcttttattacagccgcacttgccaaaaagagagttgtgtcccgaaatgcggggcgacgcggggttgatatggaaggattcttgggttgcccaaaattcggaggcttttttaaaaggcaagctgtttcgtgggcaacgttccatggggcaaggccggcggggttgttggggcccattaatacttgctgccagggcgcctttttcggggaaaggcctctttcccgggcagaatttaagatcggttccagccttccagggcctccggtgttgccggcgggaatttgcaccgtccaggcagaggttgcagcgccaagttgggtcttccctgccgaagctggttccgggccagcttcagtgatgccgtccaggggcaggccaccggggagcagcgcgtccagcaccgggcagcccaggctcagggcgttgttgctgcgtggggaaccgctccttctggctggtgcagctgcagtgctgtaaggatgctgcttccccgcaagtgtaaggaggccgttctcagcaagtgccagacctcggggctggagaggttggtcagtctcttcaagtctggtccagaaaagtgtaaaacctcctttaccgatttcagtttggctttcttaattgcagcaataattctgggattcaggtccagtagatccaaatccattttgtcggtgggctggccaccaggatgaataacttcccaggaaagacagaacaatggatgcaaattctgaggcactcgccttcaattcaaagcctgtgggaggcccgaaccagggaagtgacagcagccgaggtgtccgtgtcatcggggctctgtcactctgtggggcttggggatgacccgcgtgtttttggctgacttgactgaggcatctcttgcactctgcagtttaatttcccttaagtgtctccctggggactctcccgcgggttccgcactcctgttcccgccgtcctgctcctctcggcatcccgggaatcccggaccgtaccagctggtgtgcctggcgcccgggtgtgnctgggggcctt

SEQ ID NO: 152181 - DNA, 662 bp, Homo Sapiens
actggatggagggagtataacttgggactgcttgaatctttggggtgctcaggagcctgtgtggctcaatccgggcaagacagtgctgtttcacagctatctggcagaagaggctccttcaaagcccttaaagaactggggctgcttccattcaaccatgcactgttttttccaagaccatgtaaagatcccatgcgtagcgagccatggctctggtcttttgtaagtggtacttgtggggattctgacatgctgtcatcgtgggctggtggaagaaccttctctaggggcaagctaccctgcagcaactgcatcacaagtgggttagtggcctccactgaggacccaggcatggacaggcacacggctcttggctggtactcagtactggccagcagtagggaatctgggatcttttggcggaccgcacatactcgagacacccagctctgaggagcaaccatcccatctgtccttgtaaccagacgcatgtcaccattcaccttggacagtggggcagattggttccaattgggtttctcatccttgtccaccgaagatccctttgtcactgcagcttctctagtgtcagcctcactgctgtcctccgtgaggtgaccttcaaagtcagaggctgtatccgtggactcaccgtgaggact

SEQ ID NO: 152182 - DNA, 1219 bp, Homo Sapiens
  misc_feature (18)..(18): n is a, c, g, or t
attttatataatataatnaaaaacaaaaaataaacaattataacaagctggtaccggtccggaattcccgggatgtggtcgtcagttccactggcaggcgacctgcctccctgttgccaccacaagagaggaaaagttggtcaaacaggtggggaggccagagctacaagcctcgggttccctccccaccacccgtgccaggcaggcacccgggccctggcacctgctgcctgcccagaggccacccagcctcctagacaggtggctgacatggaggagctgaccatctgggaacagcacacggccacactgtccaaggacccccgccggggctttggcattgcgatctctggaggctgagaccggcccggtggatccatggttgtatctgacgtggtacctggagggccggcggagggcaggctacagacaggcgaccacattgtcatggtgaacggggtttccatggagaatgccacctccgcgtttgccattcagatactcaagacctgcaccaagatggccaacatcacagtgaaacgtccccggaggatccacctgcccgccaccaaagccagcccctccagcccagggcgccaggactcggatgaagacgatgggcccccaccggtggaggaagtggaccagggcccggggctatgacggcgaatcatccagtggctcccgccgctcctgggacgaacgctccccccggcccgaggcctggttcgccggggccgggcccggcacccatggggcctaagaagcccaggcggcgggactcttgaagccaaacgggcctgggcccctgggagtcccgatttttaagcggcgtgtccaagggtaaggaaggtgctgaaggaaaggcctgttgaaatctacttgactagtctgaacagggaccgaacatggcctaactagtcttctccgacaaaaggtggggcgaaagaagagcattatctcacggtgccctctgccgaatattacgagagagagcggcgccctgacagcacctggatgtgcgctgccgacctaacaggtgtatctaccctatccccaaccaagcctcgccacagcacagagttcgttgtcaactacgccggcgcagccacaccaatcagatgtgtctacggctcgactgcctagtgcgccctcgagagagatggagactgagagctcgcagcgacgcgtgctgactgaactgataaggtggtcggtg

SEQ ID NO: 152183 - DNA, 1079 bp, Homo Sapiens
acggggaattcattaattctccccttttggaaggaaggaggcccagggagcttccgggggttttcaagctccctttttcggggtggcaaatccaatcctttctttgggaagggattttaggggcatgggggtctcttccctagggtgtttacgggggaaaatctttcacttcatgcaagggtaggaacacaccgggtttggttccggggggttccaatatttttggccaggcttgcccactcaaggaacaagccttcaggttccccttagctgtcctttcagggacaggattagctgcctttgatttagcctggagaatcctgctttcaaaggaattgccttttacaaattcaaatcagatctttcgatgcgtgcagtgaggtgatgtgaaactattagtaatgtttaaggctaaggcaacatccatggccatttgtgtatcttaatttgatgcaaatagttaacaataatctaaaatagattctatatgtatctcctctaactttagctgggtgtggaaggaatggaatcagatagatggaggaagaataatgacaatgtcctagaaaccctgtaaaaaggtaaaaataaggagatcagcacagattacccatttctttggtgaacagtaaaagaagttgtctccaattctcatagatcacactttacaaaggcggctgctgctcttatatataaaagcaccctgactctgcaataacttgtcttgttatcactccttgataaaaatttatctacaaacctgcggggattggggttttgtctaaagctggtagtaaaaatgtgacctgcaagccaatacagctaatggaaagtgatgatgctctcctccccttagcctggagatggggcctgcaatccctggtcccttctccaccccagggagcagcctggatgggcccaggagtccctggttctgcacctctgcataaagaaggggcagttgttgcctgctgcatgcacgcaaggtgcaggcccttagccctagggccctggttgacacagcatctgtgacagcccacagcctctgctttgtgcagaatcccgggaattccggaccc

SEQ ID NO: 152184 - DNA, 1028 bp, Homo Sapiens
  misc_feature (53)..(62): n is a, c, g, or t
  misc_feature (168)..(190): n is a, c, g, or t
agagagaatggtatagcggcgaagagggcgaaaaggggggtggcggtgatccnnnnnnnnnnaaatttcgaaggtggcattgaatccgcatttggaggaagggattgtcccagtggtaggacaaaaaatggcttgaaatgatattgccaaacccgggtattgggaatnnnnnnnnnnnnnnnnnnnnnnngttaaatttgagtatgtaaaaactcggttttggaattcccgggggggaataaatgccagatgaataagccccaaagaaattccctttggggaggtgttttcaaaaacggctgcggtttcgccgccccgggcgtttgttttatttggtggggaaatcccgagccacttagggcataacccagggatttccgtggggaaacaggttaggggcccatgttcgcctatccggggtgggcgccggcgtgccagagggaatggtttagaaagtttcttagagggccgaggcgggccgacaggtgggggttaagggaggggtgtttgggggtggtcaagaaaaaagcagaggaagaaatttatttttaatttcaaaatgttttgggatttcatcattttgatttttaaaagttagcatagaaaataataaaaaatgaaacagcttatctgaatataagctgacccacagtagtcacactgattacagcaggccttctggtcacatagggttgtctccttaaatagcagaggttgtctacagcttctgaattagcatggcagaagcacctcctcctccattgcaaatactggcaagaccgtattctccttgcttcaaggcatgagtcaaatgaccaacaatcctggctccagacatcccaattggatgtcccagagaaacagctcctccattgatattcactttttggggatcaatctccaacattttaatgtttgctagtacaaccagactaaaggcttcatttacttcccacattgcaatatcttctttttttccccggccgtaatggccgaattcccgggcatatgtccggtaccgtcgactg

SEQ ID NO: 152185 - DNA, 877 bp, Homo Sapiens
  misc_feature (227)..(239): n is a, c, g, or t
  misc_feature (272)..(280): n is a, c, g, or t
  misc_feature (371)..(492): n is a, c, g, or t
agtggggcgcggcgggcgcgacccccctcgctcgggggcatttacctaggagcgcgccgcggacggggtgcctcggggccgctggtttttttcgtcctcgggcggagagccccgcccgcgcgatgttgggtgtggcggagagatagtttccggtaggagccgccggtccgcgagcgacggcctggactgttcccccggtgttggggcccgcgccccgccacaagaannnnnnnnnnnnnaaggaatgcctctcaaggggggccgcgcgcggnnnnnnnnngcaacagcgcagccgccgggacgcggtggggggtgggccgccgcccgggccgcgccgggcccgacgcggggaagacggagggagtgttttnnnnnnnnnnnnnnnnnnnnnnnnnnnnnnnnnnnnnnnnnnnnnnnnnnnnnnnnnnnnnnnnnnnnnnnnnnnnnnnnnnnnnnnnnnnnnnnnnnnnnnnnnnnnnnnnnnnnnnnnnngggattatacatttatgaaaaaggatacatgtttcaatgttggccccaacgatatagccagttacatcaaagttgatccgaataaatttgccaaaacgagatgagttatcatttttcacagtcttcgcatttccaaatgattccagaattggatttgcttgcaaaagctgccgttcaagttccccaggaatattatggtcctttcttcctttatgtgaagaagcaacatgggcaaggtactgaataactttctttgtattttctgtcttcccagcacctgactcacccgtgcaaagaattgactggtcctcacgatcttgaagcatgcatctgtaagcagattcagatatagcatagatgtgtggaggcatctcatgacgcttcc

SEQ ID NO: 152186 - DNA, 557 bp, Homo Sapiens
  misc_feature (164)..(165): n is a, c, g, or t
  misc_feature (167)..(167): n is a, c, g, or t
attggggaggaagtcccaaacacgctaggtcatgggccagcaggttttcgttaggaaaaccagcttatgacccatggttcactttaccctactgggggcccgcgccgccaaaacgaatgggtctagaaaagcttcctcgagggcccgaggcggccggacaaggnntnttccacagggccagtgggttattattggggggcctttttgactgaaggcaagctcacagatgaagcagaggactgaagatctcgatctgaacccatttgccgatgtaaactcatgtctaaaatgcttgttagaattgagacagggtcagtgtttacacacagcccttcattatatttagagataaaacctatttcttgttcttgcattcacattaagtcatgatgtaagaatatcctacttggttccttcagagaattcttgaaaagttcgatttacagaagactgctatcatggatgttctttaactcctcagagcggcggcagcgcagggtggcgggcgagtaggcccatctcccagcagcggcgacagcagcctgaggaagcgcccc

SEQ ID NO: 152187 - DNA, 417 bp, Homo Sapiens
  misc_feature (114)..(129): n is a, c, g, or t
tttttttctaactgataccaccttttaacagcaacagataaccacctcagcttgttttctttgcagttgtcctggaaacataaacagttgttgaataaatatacaatagaggannnnnnnnnnnnnnnngctttccctaatatggctgtgttcagtaatggccagtgtgtgctccagcctagcagcacatcaagatcatgggacacctgaaatcccaaaggaagcctgaaatgcctaagagggacaagcgggatggctgctggtttaggttgacatcatcgaatgtggaaaccttcagacttcctggtgccataatcaatgagatggtgtcatcgttgactccacagtaaaaagaggaccggagcattatggggtgagagccagcaatagtccacgatgctgtactgcatgtagccc

SEQ ID NO: 152188 - DNA, 444 bp, Homo Sapiens; identical to SEQ ID NO: 3469

SEQ ID NO: 152189 - DNA, 1266 bp, Homo Sapiens
  misc_feature (203)..(213): n is a, c, g, or t
cgatacgcgtggcgggtcgggacgttgggaccgaatacgcgaagacggataagtgcggggggaatggcgggtctgggaaggacgacagtgcaagaatcggcggcaatgggcagcccgtacgcgcctctggcgggattccgaatagatggtggcgtgtggattgtggatgcggagcggtgtaaaatgggggggaaggaaacacnnnnnnnnnnntactaatacggccgcgcgggggaagtggcggtggatgcgtgcggtagcggtaagaataggggccccggggggaacgatagagtggagtagaaacagtggcggactgcggtggttagcgccttggggggaaagcggggaaatgttaggggcggatgggcggggggaataggcggcgatagcgcggaataatagcggtaaggggcggggcgtatagtgctagcggaagttacagggatggaagcgggagggggaaagaaactgttggggtacggggtcgggcaagagggcggagtgcaaaggaagggggcggagggtggctaggcgatgggaaaagggggcggcaggtggcgtgatcgcggggtgtgatctgtcgttactgcggttcgggtacgaggatcgttgaggagaagcggcacggttccgggagtattataactaaagaagtcgggaggcgagtcggaacggagcggagggtgtgctgcctcggcgtgtgccgatgaagcgtatcggaggagggctgtgtgagtgtcgtttttgttggttaaatagtgatacaaaccaccgtcaggaacactgttcctctcccagtatgatgccattagtcccaagttttttggatggctggataaacttgtcgttaaagatctccttttcatggtcagtccaaacattcataagctgcctatctttatacactttcatagggtcctccataagcccattcatgttaatgagcttgactcgtctttgttctgcatccaacatcataggtggaatcacagagagctgccgcatttgtttctcattattctcctgctcagagagcccatccataatttcagaaatctcatgctcactcctagccatggtggctgaaagaccagctcccctctgccccactcgctgaaatctttcttgctgttctcttcgttttcgaatttctggaaactgcttttcatagtattcccttgttttgctttctttagctttcctccgaggattattttctattctgtccacttttttctcccaatgcctccatgagctgatcat

SEQ ID NO: 152190 - DNA, 471 bp, Homo Sapiens
gggggcagaggagggttttattctggacatgggtggctgggtggtcagtcccccagcaagatagaggcctcacgcacatgctgccggaccactcgatctaagagggtgtgcacatctcgggcagcctgggcagcagcctccaacacccgctccaggtggtcctcgtgcagccgggcatccatctcaagcagcgcaatctgtcctgaggctggcagcagggccagggccagctgggggccaccagctgcttcctccacatggctgaggtccgccagggctgtgccgtccacgaagccagctgagcacgcacacacaaagtctctcatgggtatcccggcatccagcactgccagcgtggctgcattcacacaagctgcataggtcccaccatctgcctgtagcacctgcacatagatatcaatctgggagcgtgggtgcagctgtgtgaggatggctgcttcgaaagtctcc

SEQ ID NO: 152191 - DNA, 188 bp, Homo Sapiens
gcgggcagaggagggttttattctggacatgggtggctgggtggtcagtcccccagcaagatagaggcctcacgcacatgctgccggaccactcgatctaagagggtgtgcacatctcgggcagcctgggcagcagcctccaacacccccttctgtcgtcttctcgcagccgtatagtagtagtaggc

SEQ ID NO: 152192 - DNA, 637 bp, Homo Sapiens
  misc_feature (43)..(43): n is a, c, g, or t
  misc_feature (51)..(53): n is a, c, g, or t
  misc_feature (126)..(139): n is a, c, g, or t
  misc_feature (175)..(271): n is a, c, g, or t
  misc_feature (293)..(314): n is a, c, g, or t
cgacagggttttcttgtcttgttgttggtctgtttttccgttntttttttnnnttttgcagttgagaaagctttattaactaacacaaaggaagtctgggcaatgttgcgagaccccgtctctggnnnnnnnnnnnnnntcaaatttgccaggtgtggtgttgtgagcctatggnnnnnnnnnnnnnnnnnnnnnnnnnnnnnnnnnnnnnnnnnnnnnnnnnnnnnnnnnnnnnnnnnnnnnnnnnnnnnnnnnnnnnnnnnnnnnnnnntgacagagcgagagcttgtctnnnnnnnnnnnnnnnnnnnnnngcggatgaggcttccaaagctgggagggagtcctccaataccttggcccccttccccactgcttgcaggaccctgatcactgcaggaaactggagctgcatagtgcaagctcccagtgaaatgcaaacaggacaagaggacaaggcatagcttgggcatattccctgggcactcatgtccagacatgaccgctgagtgtcattgtgaacactggcagaaatgtatgtgggtggggaggtggctaacaaaggtgtcagttttggggggaagggaggaataatgcctcactggtaatctctgcacctgaacccctatcagccaac

SEQ ID NO: 152193 - DNA, 1162 bp, Homo Sapiens
  misc_feature (187)..(187): n is a, c, g, or t
gtgtactggcgcgtcacgagaggctgataccaagggggtcgattagagagagccgcggtcggcgccgaattttcaagggttttccaacccacatcacccctgtgtgggggaaagaagttggcacacatatcggggccagggagtcggctctcacatggaagctgtcccccgccgcgctacctgcgcnatgcaaattgtcccccgggcacaggagtaccggtgaattggaggaaaatccgcagggctgcggcgtatggaacctccctgggggggtggagaatccccgaggtaaaaggcgcctgcggggaacctcacaatcctggggggtttgtgtccagagacgggtgcgggttgcaccacaaggggcgcggtattttatatgggtggagaatgccaagcgccctagtcattgaaccagggggtttccttagggaaccaggctaggacccaggttcacgttaccttgcgggggccccgcacggccaaacgagatggtcctagaaaggcttctcggaggagccgagggcggccacacatgtttttatatttgggtcagagctccttttttggaagttttccaataatttaatcaatgcaaatatacacatatacacattctctacatcaatagtattcaacagtttttatcaaaaggagaaaattttgattttataaaggcagtggaaataaaaaacagtaattattaagttttgctcaaggaccatctagaaggaaaatttagtgacacatctgaaataagcaactgatggccagcctagccttattaagtaacacatattcaaattgtagatctccccctcctatcttccaccccatagctaagaaaggaaacccagggatagaactaattgaactctattagccaggggcaatcgaacccagtgccaatagagagatggactcccaattagtcttcaaatggaacaaagtcataacactggttttctttcgatgttggacgtatgggtgatacgtttctaaatttatagtttccaaattttctgtaatgagatatattactctcataatacaaagaaagctccaactaatcaaaaattatatatatgttagttcactgttttaaatgcccaaccaccatttaagaataacttttaagtgtctttgtaagttcttcctctct

SEQ ID NO: 152194 - DNA, 398 bp, Homo Sapiens
gagaaagtagggtggccctgaaaagggccttttattggtagaaagggacgctcaaccaccgaaaccgtagagggtgcggccctggcgcttgagcgcgtagaccacatccatggcggtgaccgtcttgcgcttggcgtgctctgtataggtcacggcgtcccggatcacgttctccaggaacaccttcagcaccccgcgagtctccttgtagatgaggccggagatgcgcttcacgccgccgcggcgagcaaggcgccggatggccggcttggtgatgccctggatattgtcgcgcagtactttacggtggcgcttagcgccgcctttgccaagacccttcccgcctttgccgcggccagacatgacgagcaagaggagtctcacccaacgctttgtcc

SEQ ID NO: 152195 - DNA, 368 bp, Homo Sapiens
aatttctaaaaaggctgttgaagtgttttcttgatctaaaagtgtctgtttcattaactcaatgcaatttccattttattcacatcacttgtatcctctactctcagcttgtcaacccaggatggcaatgacaccaggaaggtaactgtcccaagggagcaagctttcttattatgagtcatttcattcacttttctcccctgaatatactcaactctaagtgtttaacttaataacattcaaatatcacaaaatgtcagtaattaaataaaattcgtcgagaacattgttcaatgcttcaaagtcttgaacaacatacttacattaatttgaatgaaaaggagtcaaaccaaggcataatatcctat

SEQ ID NO: 152196 - DNA, 544 bp, Homo Sapiens
  misc_feature (30)..(30): n is a, c, g, or t
  misc_feature (38)..(38): n is a, c, g, or t
ctccgacaggttttgtatgttctctgtgtntggggggntcgggacagaccagcatttgtttattttggccaaatgcatgccttgtttgcatctattctcttaatcagcagcagcatctgctatgctgtaaacactggctatgttgtaaacactgcaaggaaggaggctagaaacaagggccagagtctatctcctgccgttaaggaaatctattagattactaagccagaaaaacaaatgcaacaagctgcttcaatgtattctttcagatgtcaaacacagaggtaggcatttactgctgtgagcataatggaacacactagcttgagacatgcttgtaaactggctggtcctgaaggacagccttatgcccacctgccgttagaaggcaaccaagatttgcttcaggccgtttttttcccctttttaggaaatcatgctgtccaaccagtcttccagctcttcctcggtaacatttttggaggtacttggttgctcaggttccatgtttttttcttcagtcacagatggttttgcacaaact

SEQ ID NO: 152197 - DNA, 684 bp, Homo Sapiens
ttggtctttttggctggtggctgatagtctgggtctttttgccaactaggatcttcctggggtggaagttcccccttgttctagtgtctccacctctccattggcccccactttaaccacctgaaccccttcaggcaaaggtagggtgtggcatatcatgggttcactttccgcaaggccctctttagacacttcattttcataagccccctgaagttcttctactgaagtggtagcaacaggtacagtcacaggaacaggtacttgaacaagctgaagttctcctatgtttatgggctgttcctccatatttacaacctgtaaagttataatctgggtatcgtccacagcagcctctgcttctggagccactgtgccctccattacttcagtcttcatctgaagaagggtggggtccagctgttccatcatcaccatctgtacactgctgttgacatcctggaccacctcacccccatccgtctggttctggggtaagtggcaggcatcttcttcctggcccccttcccggcgtctctggtaagtctttctctcctttcctttaataaaagtttcggactcctccacaatggcttcgactgcatcaccttccatttcccctgcctctccgtggctgcaaagtcagtttgaggagggaaaatagaacccagctctcaagccccc

SEQ ID NO: 152198 - DNA, 240 bp, Homo Sapiens
tctcgcccagtagatgtttcaaagtagatgttttcttattagagagaaaagcactcttggaggtagtaagatgggccggtccttgatctgagaaatgggcgcacaacatcgctgttctctctgcaaaggtggggaccagaatccagcttgcctgaccttgcaagcaggcatcggcctaaaggtttcagcctcccagtggcgctctgtttgcacgccttaggctaggagaggaaggacccc

SEQ ID NO: 152199 - DNA, 870 bp, Homo Sapiens
tttagaataatttttggttttattttaaagtctcaatcaacccttaccttccagtaattattagaaaaatcaggtcactattttaagtagattcatttcaattagccttatagttcttactcctccagccagtagacaaaccctgggtttattagctgatccaaatggacactcaaaaatatgccaggccttcagcttaaggaatggccagatgcggaatcccagatttggtgagctgagaattcccgtgtgatggaagaactctaagatgaccccaaattatccccaccgctggtactccagccctgtgtaatcccctccacttgagtgtggcaggacttgggactcatttataatgaatagaatagaaaaggtgaccaaggtgacaggatgtcacttcagtgattgcattagataagactgcaatgtcctcttgctagtggactctctctctcgcaggctttgatgaagcaggtgagcatgttggggaggccctcagttcaacgggctgcaaggactgaattcattcaactctgtggtcttggaagtgggtccttctctagtcaaggcttgagataagattttgtggatgacactttgattgtagctttcagaggggatccatgtttagcttcagatgtcctgtcttatctcccaagccctgcccagtacatgctgctgttttgcttcagggctgttgtcaccaagttcttagtgctgtgtctgcaaatgccccggatgactttcactcttccctatgctttgcaaaatattggctgctttatgtagtgctctagggagggctgttctagctcctgcccaatgccctgtgtctataggtctttccctgctcagccagcaaaaggcccc

SEQ ID NO: 152200 - DNA, 835 bp, Homo Sapiens
gcggtttctcttctcaattgggcggttggtggagattcccctaacgtagggaaggcccttcaaacgtttgctctttctttcctaaaccatttccggggcgtggccattcagggatcaggaccagccatgggcaagatttctatcctcgggttcttggaccccctatctgcaagtgacagagtccatcttttttatgtgtggcactgtccgtagagtgaggtctgaaggtgagtttcgttttaaagactgcttgtccctgtagaccagtaccttgtcttataaaaagatgattgtggtcgccctgcagtggggctttgtacacatcaaacacttcattgcctaaatgcagggacatgcttccatctgaccacttgactatccgagcattgctttctttaatttcatttccttcttcatctcggcgtatcctccatcttatagtattttctacctttaattttaacctggttctaccttcttcatccagcatttcttcatcttcaaattcatcttcataatactgaggatcaaaaggtctgggctctacactgagaaagttgggcagtttaacaaaatataagtcgtttcctaaatcagtgtttactttgggtatttctacttctattctggtctcaggaattggctcctcttcctgttgatcctgaggcaatccattttcatcaacaggctgtcctggagtaggtggtttgtcttctccatcactccctgaagagatatcatctgcacctccaaataaatccatggttccactattatcttttggcacctcagtgtcactatccgcttctgaatcagatgcaatcgcattcttgcc

SEQ ID NO: 152201 - DNA, 496 bp, Homo Sapiens
caaagcatgccttcagagcagataagaaaccagctgacagccatgtcctcagtacttgcaaaagcacttgaagtcattaaaccagctcatatactgcaagagaaagaagaacagcatcagttggctgtcactgcataccttaaaaattcacgaaaagagcaccagcggatcctggctcgccgccagacaattgaggagagaaaagagcgccttgagagtctgaatattcagcgtgagaaagaagaattggaacagagggaagctgaactccagaaagtgcggaaggctgaggaagagaggctgcgccaggaagcaaaggagagagagaaggagcgtatcttacaggaacatgaacaaatcaaaaagaaaactgtccgagagcgtttggagcagatcaagaagacagaactgggtgccaaagcattgaaagatattgatattgaagacgtggaggaattggatccagatggtatcatggctaaacaggttgggcaac

SEQ ID NO: 152202 - DNA, 1182 bp, Homo Sapiens
  misc_feature (394)..(404): n is a, c, g, or t
  misc_feature (461)..(517): n is a, c, g, or t
  misc_feature (669)..(692): n is a, c, g, or t
  misc_feature (1066)..(1066): n is a, c, g, or t
  misc_feature (1142)..(1142): n is a, c, g, or t
tatgtatttatttatttatttatttggttcccttcctattccaagcttccatagctgctgccctagttttctttcctcctttcctcctctgacttggggaccttttgggggagggctgcgacgcttgctctgtttgtggggtgacgggactcaggtgggacagtgctgcagctccctggcttctgtggggcccctcacctacttacccaggtgggtcccggctctgtgggtgatggggaggggcattgctgactgtgtatataggataattatgaaaagcagttctggatggtgtgccttccagatcctctctggggctgtgttttgagcagcaggtagcctgctgggttttatctgagtgaaatactgtacaggggaataaaagagatcttannnnnnnnnnnatacttggcgttttttgatgaaaaaccttttgtcttaacaaagaaaacaaaaccccnnnnnnnnnnnnnnnnnnnnnnnnnnnnnnnnnnnnnnnnnnnnnnnnnnnnnnnnncatggtcggccgcctccggcccttctgaaaactttttctaaaccctttctttttggccccccgggccccacgtagggaacgggaacacatggcccttaccttggtttcccaaggaagaaccctggcccagtgactaaggcgtttggaatctnnnnnnnnnnnnnnnnnnnnnnnngcggcgggcaacccgaaggggttttctgaaacaaatttcccaaatgggacgttctccggaggggcctcttcacgtgggatacttattcaaaacggggagttctccaaggccgaggcttcccaatatatcaaattttagcgccccccggcccggtggccactctttaatcgcacacagaactgggctggcgtaactcccctttagacgcccattccttgcgccgaaaatggggaaaacccccttccacaaaacccgccaagtggattgacacccttgaactccgcccgcgcggagcattccagcccaccccttgtttgccctctctggccatacataaatattctttccgccctaggtgggggaaaaacacgggngggtcgtcaacaaaacactgctggcttccattcatggaggccccacgcgtttataaaaatccacacacttgtgggngagaacaactctcctcccaagcgattgtctggttttgaaa

SEQ ID NO: 152203 - DNA, 727 bp, Homo Sapiens
  misc_feature (155)..(216): n is a, c, g, or t
attgggggggaaattccaagccctttgtgttctggtcccggggttttcctttgggaaaccaggtatgggccaggttctcctttcccttagggggccccgggcgcccaagggaaagggtttaaaaagtttttggaggggcggaggggggccaacannnnnnnnnnnnnnnnnnnnnnnnnnnnnnnnnnnnnnnnnnnnnnnnnnnnnnnnnnnnnntgttggggacaatcgattcaagtttattttattccaggaacacaaaaatacaaatttcatttgcaattcaagaaaaacataaatcgatacatatgattgatgtatatacacatttaatgtatttttaaatatacatttttaaaaaatagaaatttttctaggacaactacttaaaatatcactgaaaatagtgttattagataataccttcctaataactctggtattacataagaaaagaaaattaaaatttcagataagcttagaaactaaaaattttaaaaatattattctgttctccatatgttcatatttaatattatttcttgttttctttcttcttcagtgttgctctactaaaatatagcatacaatagttacttttgatttctgttcttattactcaaaattgtatactttttctcatgctcttaatttagttatgatacttttcttcactcttggaattttcacatttgtgttcactctctttttgagttcccatagtatc

SEQ ID NO: 152204 - DNA, 743 bp, Homo Sapiens
tttttagttggaaatcatttaaaatttattgacaacagaaatattttatagcccaacctggtatgcaaaaatgctggctatgtcccactgagttgatttcatggctcactaatgaaatgtgagccacagagggacaattacattgcagggtattaaatggcctggagaatcaccagaaaagaacactcttgcctgtgcttccacaaactgggtggtcaagtgggctgatagttccagaagcactccatgtgtataacccacatcctcaaaacgatgcctggtgtctcacagaatctgatggacaaaacctaagtgacacccaaaaccctgatacaaaggaatctgagaaacatagtaaagaaaggaaagcacactagcaaaacttccaaaagatgttaatcaaggtaagccacagaatcagtcccatatctgcaatgaaatgctgcttatgtatgtgagacagaaaaacctggtggctgaagtattatttcatttatcttatctctataaatggcatattttcttgattacagcctattgctacttcactgagggaaaactcgtaactacaactagtacaatttccctgatgagatgaaattcaagggaacaaacctaaagtaacaaatccccaagttacatgtctttcacaaacatacctctacccagtcaatagaggatttatcaaaagaaagattaatagtggaaaaataaactgaggattctttttcacaccctcatca

SEQ ID NO: 152205 - DNA, 483 bp, Homo Sapiens
  misc_feature (61)..(74): n is a, c, g, or t
tttggtgcgcctctactgcaccgcagggtcctgggacactgtgcgagacaggggaggtacnnnnnnnnnnnnnngtagaggtggtccctgtcctccaggagcttacaatctagctggggagacacaactaatgcacacttaaacaatcagtacaattagcgattaccacaatattgaccacaactgcatgagaccagggaaaagcaagatcagtgaggggcaaggggggttcagagaaagtgttttagtaaaggtgggattcatttacttttactgcttgaatagttccaaatcaagtgacacattattttggagtagggtgggcttgggaggcagtgaggtggaaaggggaatcgagagagcaaatgcagcgaggctggaatgcaagtgccctgggcaagggacagcgagagggccccactgtatttcttaaccaccctccttcctcaactgtgccctccagtcccgccacacaggcacgcg

SEQ ID NO: 152206 - DNA, 376 bp, Homo Sapiens
cgtttttggtcggtggttatctatattaagtttctctggtccaaatgtgtagtcccacaggtgtttcatgtcatcccaatttcgtactatgccattttccatagggtagtttaacttctaacattgatcgtaattcacttgcctcatcaccaaccataagatccttgatttcaatgtttccccactttggtggttgatctgataataggtcttccaaccaaagctgggaagatgtgttctggaaagttagagcctgcatatccacacttcacaaacccggtgccgttgtcgcacaccaccaccttcctgccctggctgtccatcgtccgcccagggaagagccgctgcagccgcacaacctacagccaccgccgcc

SEQ ID NO: 152207 - DNA, 539 bp, Homo Sapiens
tttattattatttaggtccaaaaaaaagtttttaaaaatcacaacagaaataagagaaaataaaatgttcttccaatttcaatattctatatagcacctcactttctcctaatttttccttaaactaaaaggaaaccaggtaacattagtgtggcagagagttcactgtagattcagtgtgattttccttatcctgcttttcttcatgtggtgaatctagttcatttctgctatattcctcctcactggaatcactgtccgatccaccttcctccatcctgacagactgattgtcatgagaagcactttcacaggctttgtctgtgggaacagctcctttccgttggggcaagatagtaaaaaatgcttcttgccagtctcttgtttccaggtattccagaataatttcaaacacatgattaactgccaaaacttttcgactattcatcttcacaaaatttccaagtgggagctgtgcatgattgattccataatctgacgcttgtttatatgtgagtcccttgtgatggttgtgatcc

SEQ ID NO: 152208 - DNA, 771 bp, Homo Sapiens
ggaagaatcatctttcttcattcaacacatttattgggaaccaatcattgtccaaggcaatatgctaggcattgtgtaatagaaagcgattaagcttttacccctgtcctctttggcctgcaaagagcaggtaagattcatgcacagacaaatgtagtaccaggtaaatagtgaggccacacacaagaggcaggtcaaagggctttggattcagaggatggagaagctctttctaggctggtgaaatatttgcagaatgagtaggctcataagtggaggtgaggtacaggctaagctgctgtaagaaagagtccaacatgcaaaggatttaccacaatgcagttaatttttctcacaacggtcgaggtaggcaggtggtccaagtccagttaatcagccctcctcaacacaagggcttccccttgtaagctcaggatgacccgctccaggttctcatcatccccccgggcagaaaaacggggagaacagagaaactaagacggtacccaccccaagtcatttttaaaggaacatagccccaggcgccaggggggccaaggggacttcagccatccttgttaaattcccaaagccacctttttgggggaaggctccccaagggccttggaagggaataaacctttggaaagcccaagggaaatttttgagaaaccctagctttggggataaagaaaaagccacagtaccccttggggcctcccacccaaaaaaatttttccccctgtctcccttaaccacccaggaatacac

SEQ ID NO: 152209 - DNA, 436 bp, Homo Sapiens
ccataacgaaagagagatttcctattgctctgccctacagagctctttcttggattaagtcaattatcatggttaggtgtcacatgtttttgccaagagacatttgtgaactaattctgtcaaacaggggatctggatttgtcctctcccacaattagaccttgggtgaaacatgaaaccggctttgagctctcctccctgcctttcctgggctgccaaaccccaagccaaggttgccactcctctgcttttctggagtaaaacctcaggccccgtgatgatcctggctctcacaccattgacagcctcaaaaatgaggggaaacacacttgttttggagggaacgggagagacacatgaagaagggtcaagtacaaacccaaaggaagtgaaccttgaacttcagctccaacatgaagctctcagggcagccccc

SEQ ID NO: 152210 - DNA, 360 bp, Homo Sapiens
cttggtgtgttatgcttcgaattttttatttcttctaatacttcctcaccatattccatgatgatctcggggggtaagcacttctggacaagccgagctacgatgcctcgagagagaagcgttgtagccgaggggcgatgtgagggattccttttaaacatctgcttgactaggaactgaagttcataggagtaatgagacggcagtggactgatgcacccttgacatactttgaggataagatttttccaactatttgcctgaaatggatgcttaagggtacagagttcatacaggatgcaacccaaggaccagatgtcacttttattgttataaggcaggttttcccaaatttctgcc

SEQ ID NO: 152211 - DNA, 949 bp, Homo Sapiens
  misc_feature (129)..(211): n is a, c, g, or t
  misc_feature (413)..(413): n is a, c, g, or t
cggcacctaattgacttcttcggggaatggtatatgtaatccatgttgaggcaccattcttctaatgtcaaaccattttcagttagttctcccacagccaatctcttatgttttctttctttgggcttnnnnnnnnnnnnnnnnnnnnnnnnnnnnnnnnnnnnnnnnnnnnnnnnnnnnnnnnnnnnnnnnnnnnnnnnnnnnnnnnnnncagattcttcttcttcatctgaactgctttctgctttcttggttttattcttaggaactttctttggcgggtgcagattaattcctgcatctgctgtccagtcagagtaatcactggagtagtcactagaactgccatcactgtgccatgctctctcttcttcttcggatgttccaccactgacagcaactacttcgcttcnatctgaagaactactgccattttctatctcttctgagggtctaggagtctcttccaatgcagatcttgtacgataattgtgttgatttgtctgttgctttttggattctccaagatccaggaaatgctcatgagcatgattctttgagacagtgggtatttttttctcttttggaacagttaagtgttttcttttctcttctgacctgtaagtctttatttcttcttctccctttgcagttctccattcttcttgcctactggctacaccagctgatagctcgggtactaccacccttcgactccaagctactcagatcccgctctgtggctatttcacttcttggtgcgttgctgtgcatttgccgtacaccttcaatttgtccactacgtcttagtcctacgtttggtggtgaatgaacctctgaggtagaacttatggagcctctacttaaacggctggtattactgatacctgcttcaccagaacgtctcaggtcttgctcctgttgtagtctttgaatcatgctgtccacc

SEQ ID NO: 152212 - DNA, 453 bp, Homo Sapiens
ttgttctgtttcccaacctctatgtcagataaagaatgacccaggccagacacaatggctcatgctgggattacaggcaggagccaccgcgcctgggcctttttttaagttttaagtacctataaagaacactgaaaggtgatgtgtgtggatgagctaggaagacctgaaataggctctctctaaattaatcaaattaatcctgaagccattctgcaatactgtctttaatgtatactcacttgttatagaagccagggttttttcccctaatttgtatcattgctatatgtgttattgtaccaaactacactgttttaattgctgtaaattttaatatgtcttagtatctgggtgtgggaatcttgaaagcatggagtttgtgttattcaccactgtattctcaaatatcagaagagtatctggcctactaagtgcacaataaacatagtt

SEQ ID NO: 152213 - DNA, 389 bp, Homo Sapiens
ctgttcctctaattgttgctgttccattttcgtcaataaaaatttggagtatatattgcttttttcaagcaaatgttgaagtctacggtaccgaatttctgtcgactctctatcccaagacatgcgagccttttccagcatcttccgctctctctctagtccagcagccttcaagctgttcttcctcttctagcatggccggggtaatcacagcagtgtccagttgttcaaccattgctggagcctccgagccgccgctgcccgcgggccgttccgctggcatgcctggacactcacccgggaaccgggtcccctcctctcagagcctgcaatgccgcgagctaactcctcacaaccgctgccggcccagccttctagccaaatccccc

SEQ ID NO: 152214 - DNA, 449 bp, Homo Sapiens
ataattaattttttccccaacgaaaaactgagcaggtttatttaggcctcaaaacatttaacgagttatttcagaaaatatcatcttctacacatcttccatataaattccgatagcctaatacagcatctatgtgcctacaaataatatcacactcagcacttgaggctgcgaaatcttccacaaatacttcttttaatgcggcctcctacttcctggatgaaaatgtctgaagttttgcgaatctttacttcaggaaagaagagggtttctgcccctgccccatcttctccccttctgcgacccggcggtcttcagttttcgggagttccaaatttctcagagtcggttcagcagttcttctaagggaagaagggcaatatatcggagtccacaagcgagaaaaagagggagtcggagaaccgagactacagaaccagggtgacccc

SEQ ID NO: 152215 - DNA, 502 bp, Homo Sapiens
ttttttttaaattgacaaatactacaatactaaatccagaaaaataacataacttgtggcaacttcctgacatatttctaataccttggtcccctacatggtctggcttcttactctgaaggcctctacagaggacaaggattttgtgatttttgggggagatattttccatacagagaaaagatacttcagtcttcctcctaacatggttgaaatttgtgttttaattattggtagtttaggaaagttaaacttcctaatctgttgttgacggtgccatacaaatgttctggattgttgtaaaatttgagaaactgtcatcagccttctttcatataggaactatgaaatttggaagaattttccacagacgaggttctggctccacgcatttcaaaccttgttttccttccatggctcacagttttcccagcactgggtgccgtggggcatgtccttaaggcaataggactttgcacttctgtccttacccagcaggatt

SEQ ID NO: 152216 - DNA, 750 bp, Homo Sapiens
ggttagggtaaaaaaagccaagcttctaaatttggcaagggtggctttgaaccagccaccaggtatttgattattctatcagggttccgggcctgtattttaggaaggatggccattaaataattttcccatctcttccagcagggtagggaaattttcacaccggaatttcccagcataacccttcttgttgcctgctgcgtccagagtagcaatcttctcttttgcagacatatcctctgactctccagtaacatggatatcagatatctgaaagtgcaaaattattgtccaggattaatcccaaagtcaatttgggatttccatctgttatgtcatcatttctaatattcactaatttcacctggcgtcttttcaaatagtcaagtgcaatttgtacattctgtagtctgtgaaaacgcatccgacctttttctctgggcaaggtatctcctgaaagaacctctaaaagagaaatcaaattgtgtccatcccttaagtcttcatagagatcattcacatgttttcgaaccttcatgagatgctgatttatccattttgtaaatgttttcttctgaactttgtcccgttcatctttgtacctctccaggacatcctcgtaggcctggagatactcctgctcctccacgtacaggtaagcagcaggggagaggtaacccgccatgccgaagtttatctacccggccgtaatggccgaattcccgggcatatgtccggtaccgtcgactg

SEQ ID NO: 152217 - DNA, 619 bp, Homo Sapiens
taactacctttttgctacttttttttcagattgtaaaaagatatggcctcagtgatttcctcttagcataacgctgatctcgcagatgtgggttaaatcccatttagagggaaggttgggaatcctacataaaagtataacatgcattaaaacagaaaattcttaaatacaaaaaattcaagtgaccatatcttaactaatattaatgtaacaaaaataaaattacaataaacaactgagcacaaaatgcaattcaatttttgttactacaatgaaatggctgatactcaaattctaactgctacaacatggacttctgaatgaggtccatgtatgtacatgtgcttctaagtagagtgttgctttggcaaatggtttttattctaacccacagtatttatgactctcaatttcagttgttttcggtaaggaattatgacaaaagctaaatttatgagacttggatcaattaggaaataacaaggaattattcttttgcatattcagtaagaagctattctaaagctgctgttttaattacccgtttctctaaataaaagcctttggaccccggccgtaatggccgaattcccgggcatatgtccggtaccgtcgactg

SEQ ID NO: 152218 - DNA, 1792 bp, Homo Sapiens
  misc_feature (1645)..(1679): n is a, c, g, or t
  misc_feature (1683)..(1734): n is a, c, g, or t
  misc_feature (1764)..(1764): n is a, c, g, or t
attgttgacactattacagatagaatgaccacaaccatattaacaaaccaaaaacctgtgcacagaaacaagatgaagaaaatatatcaagatgttaaccacactctttggatggtgaaaacatgggtgagtttctcttctacatttctgtaacttcaaagtttctataatgaacacatttcatatataatggaaatatatgtagtaaaggtggactaccaaaacactagaatgatgacttttcaagggaaaccgaaaccaaaataaccataatccccacaacaaccacacaactatttcttgtttttcatctttcttcccatctttgacatttatgcatacttatcactaacaccctaataatcacagactagtgcacagatcaagatgttaacagttaattgttgttgggtgttgggaatatgtgtgaattttctttactgaatttccaaagttttgtatgagtatgtattatatttgtaatggaaaatacatacataaaatttattaccaaaacaccaaagattatttaaggaatttgagacaaaatattataaccaatttcccaccatggacaacactattttaggttattttccacatcttttcatttaagactttatgcacacatatttaaacactgttatcacaagcgtgtgcactgaaacaagatagaggaaacagatcaagatgttagcagtagttgttaggtgttgggaatataggtaattttttaaaataatttactttattttctaatttttcctctgggtatgtattatgcacaccaatggagacacacataatacactgttatcaggacattattataggggacatttgaaaaaattaaagtgaaagtatttaaccataattccacaaaggtaatgtaacagctattttgaatatacattttgacacagttataatcataaacctgtgcacagaaacaagaatgaacaagataagaggagagtatatgtctttggatggtggggatatgattttttttcctccacttttctgtattttccaagtgtgtgataatgagttcaaattatgttcacaatgaaaatgtggtcataaactttttagtaacagtaccataaagggcattcaagaaattttaagaaaataatgctcaactataagcgtacaacaacaacgccacaacagcttttgattataagcatatatatttttaagcagttataatgagctgtttaaatgaactgttaaatgaacagcatataaatgaactgttgagttataactgtagtataaatatactttcgtgtcctgctttctccacttaatgttctgtaaagatatttccacgttgctacataactcgtgattatcatttttaaacagttgcattaagtgtccacagataggtttaaacaatcattctcttgtttaccatttgttactaccttttcactagctgaaggttggaacggacaccctgacttacagcaagttgctttctgaaaaggggctaccactgccaacaatgttaacgccaagtaatgtacccacaaagttcaccctgacatcaacactgattctcgtttcaagagtccttttcccacccggccgtaatggccgaattcccgggcatatgtccggtaccgtcgactgnnnnnnnnnnnnnnnnnnnnnnnnnnnnnnnnnnncggnnnnnnnnnnnnnnnnnnnnnnnnnnnnnnnnnnnnnnnnnnnnnnnnnnnntagcgccctatagtagtaggttgattaggnccgttctcagggggaaggtagaggtata

SEQ ID NO: 152219 - DNA, 1014 bp, Homo Sapiens
  misc_feature (51)..(60): n is a, c, g, or t
  misc_feature (70)..(70): n is a, c, g, or t
  misc_feature (116)..(116): n is a, c, g, or t
  misc_feature (278)..(278): n is a, c, g, or t
tgcccccaccttttccatttggcccaaaagggggaaacccacttttaaggnnnnnnnnnnggaagggggnaaggccccagggtttccaccaggcagggtccactttcccaataggnttaaaattgccaagccttgcttgtctctgggagaaaggtaggctttttctttggtaccacccaccccctggtgccccttaagccagggaaagtagattttcaaacttcttagttcacgtcaacttagaaaaaaaactcctctggatgggtgaccagtctcanctcaaaagacagacgtgcatctaattcccatcatcctgaaagggaagatgtcacacccaaagtcaaacggatgtgactataatggccaaaatgaaatggaacgtgtgggaggccaagttgggagggaaaagagaagttaggtcggtaagataaaaagaacattcaaaaattgtgagatattttcagaattagacttcatcttggggctttgtttgaaaatctagatatgaatttatttggaagtactagagctatggtcaaagtatttttccagttagtcctgttagagttccaaggagaaattgaactgcagggaaagcaaataattactaaggacaagacactggctgaactagagaaactgaaattttgctaacctacaagcttcttaattgagtgctagagaattacataattaccctgtagtgtgtgacgttaagagcaaagtttttatatttacttttctcctgattaattgccctcgatggtgttagtgtcaagtggctacaggtgtaacccttttaattgagaatgacattatttctagcagcacaatgtaaccatttggtttttacttgttcctcctaagagatacagaaagttccaaatcccaaacttcatttatatattagcttctgcttctaaaatttttaatcccattctgagttagattgtacttggcttaccccggccgtaatggccgaattcccgggcatatgtccggtaccgtcgactg

SEQ ID NO: 152220 - DNA, 963 bp, Homo Sapiens
cagtcgacggtaccggacatatgcccgggaattcggccattacggccgggcagtattcagtttactgatggatatgaagtaaaagaagatattggagttggctcctactctgtttgcaagagatgtatacataaagctacaaacatggagtttgcagtgaagattattgataaaagcaagagagacccaacagaagaaattgaaattcttcttcgttatggacagcatccaaacattatcactctaaaggatgtatatgatgatggaaagtatgtgtatgtagtaacagaacttatgaaaggaggtgaattgctggataaaattcttagacaaaaatttttctctgaacgagaggccagtgctgtcctgttcactataactaaaaccgttgaatatcttcacgcacaaggggtggttcatagagacttgaaacctagcaacattctttatgtggatgaatctggtaatccggaatctattcgaatttgtgattttggctttgcaaaacagctgagagcggaaaatggtcttctcatgactccttgttacactgcaaattttgttgcaccagaggttttaaaaagacaaggctatgatgctgcttgtgatatatggagtcttggtgtcctactctatacaatgcttaccggttacactccatttgccaatggtcctgatgatacaccagagggaatattggcacgaataggtagcggaaaattctcactcagtggtggttactggaattctgtttcagacacagcaaaaggacctggtgtcaaagatgcttcatggtagaccctcatcagagactgactggctgctccttgtgctcagacatccttgggatccgtccactgggaaccaactgccaccaatacccaactaaaaccgaaccgggatgcccccccttcttagttaaaaggtggcccatgggccagcctaacataatcctggggcttc

SEQ ID NO: 152221 - DNA, 736 bp, Homo Sapiens
  misc_feature (653)..(692): n is a, c, g, or t
cattttaaaaaggcaaaaaccaataaaatttcccattatctttcatacttaaaagtccttgaaatgtcatttatataatttgaaatgtttcccagtttggaacttaggcaggaggggataatttccttgaattatcaagggatattccatacagacttttaaaatgtcagtctcattaggagatggcactgagactttagcaaatagtgtagtatggatgcaggacaaactacacaacttattataaatgcattacagatatttacatagtggaatcctgcttgaatgccagaagttgctactgggtaggactcataactattttacaaagttttcttacgcacatctactacttttaaaattttatgtttaacaatttattctattttaaaatatgtactgtattttgaacataactgcagaataaaaatagataatggcacattagaaaactaagtatcccacagatgattggataatgagaaaaatgtacctacaatcatctcatcagaaacaagctacatcatggaatgttagttatccaagcctgcacaataatgacattttaaactgcaatcatctattggccagcatcacactgaaggcatcgttaaacattcaagcaaagattgctggcataaactattaaaagnnnnnnnnnnnnnnnnnnnnnnnnnnnnnnnnnnnnnnnntctctctcattcatgcacacttcccacattataattacattgcc

SEQ ID NO: 152222 - DNA, 784 bp, Homo Sapiens
acttctttcattagctctagggaaatatgcatcattcacacatcctcccacagtttccagcaagcttaagagtggctgattttatatcacccatcacctcttttatcactaccaaagcatcggcaatattgtactgttgccatgcttctttcagagtaaggtgagggttttttcaatacagtcagcaaagtggtcaaacatatgcttgattatgttcaaatgcttcagttataccctgacccaagggctgaagaaagctagggccttcctgagggagaaacacagtatcaacattagaatgaacaaagaataatgaatctgggtgattgggacctctgtccacagttagcaacattctgatttccagattttttttgttaaatgacttcggatttgatggataaaaaaattgtaaaactaatccaaaaagtggcagtggtgattctgggtgtgattacaagaaaacaggaaggcgtttatctctaaaagacaagtggggtgttagagtctttgtaaagcagcagtggttttatcattttgtcacctgaggcactgccacaaaaaaatgagggaaatcctgtccttagcttcctctaagctttccagatttttgtcttttgccccaaaagtaggaaggcatgcactgcaaaagatgggtcatctccttggcgttgaagacctgttgaggcacaaagcctctctccagttgcttggaatactcgatacccactcaggatttaagggtccttcctccccatcaacttcgtatgttgcaaaacagccc

SEQ ID NO: 152223 - DNA, 905 bp, Homo Sapiens
  misc_feature (159)..(159): n is a, c, g, or t
agggtcccagttcctttgcagaggggaggttccaacgaggacattcctggtagacaggtcggtgggacaaagggccaggcccatctgcaggatgctttccccgtggctcctcacagagcccactttccaggactactctctgactagacacttcctctnccagggcactagggagccatggaggaccatcggcagggttggcatggtcggttcggtgatcagaatgacccacgagcaggtgcttttgccccctgtccagggtccagcacacagcatgaacttggtcaccttctgagggtgaacttgcgcacacacgtcattggaaataacatggaggtccacacactgaagtttctttggggtcaagaactcctctggttcaatgctgccccagcctgaggcgtagcaggtggtccccagtgctggctcctgggtgggcaggtccatgaccttcatagcatccgtgagctcggcaggctctgacaggcggagcagcatgaggtcgtggctggagtcatcacctggcctgaggaatcgattcttcaggaggctcatatcgtagagcgggtgtgtgaagctgtggctgacctgaaatacctggcctgtgtcttcaggatgaaacaggctgtgccgacccagcaagatcacgcttttgttcctgatgcagtgggcagctgtgaggacccactgggggtgcaccagaacaccgccgcagactgccctgccacgagaggccacaagcacctgccagggttgggaatgcttctcgcactcccagcctcccacaatccgagacaggatgaggggtgcagcaccaatccacgtcacggacagggtgaggaagacaaccgggacccacatggtgacacagctctccgggtgcaggtggtaagcttggggctccc

SEQ ID NO: 152224 - DNA, 943 bp, Homo Sapiens
caaagggttcagtaggaacctgggggagggccctgagtccttgggcctgggtcatttccaaggtttccaagtttacttacaattaggggaggttgatagggggtgctcagggggttggccacgatggtgttccttgatccacttccggtaatgcaccaccttggtgtacagggaaggcctttcgggcagggcacatggttcactgccccatgacgtgataccttgaagcacaccattacagacaagtgggcccccagaatcacccgagcaggtgcttttgccccctgtccagcgtccagcacacagcatgaacttggtcaccttctgagggtgaacttgcgcacacacgtcattggaaataacatggaggtccacacactgaagtttctttggggtcaagaactcctctggttcaatgctgccccagcctgaggcgtagcaggtggtccccagtgctggctcctgggtgggcaggtccatgaccttcatagcatccgtgagctcggcaggctctgacaggcggagcagcatgaggtcgtggctggagtcatcacctggcctgaggaatcgattcttcaggaggctcatatcgtagagcgggtgtgtgaagctgtggctgacctgaaatacctggcctgtgtcttcaggatgaaacaggctgtgccgacccagcaagatcacgcttttgttcctgatgcagtgggcagctgtgaggacccactgggggtgcaccagaacaccgccgcagactgccctgccacgagaggccacaagcacctgccagggttgggaatgcttctcgcactcccagcctcccacaatccgagacaggatgaggggtgcagcaccaatccacgtcacggacagggtgaggaagacaaccgggacccacatggtgacacagctctccgggtgatcccgggaatccggaccggtccagcct

SEQ ID NO: 152225 - DNA, 1187 bp, Homo Sapiens
  misc_feature (94)..(94): n is a, c, g, or t
  misc_feature (96)..(96): n is a, c, g, or t
  misc_feature (101)..(102): n is a, c, g, or t
  misc_feature (110)..(118): n is a, c, g, or t
  misc_feature (353)..(353): n is a, c, g, or t
tgctggtgaagtgtctggtggcgttggtccctccagctttctgcttcagtgctttcatggaccagtgtcccagccacatgtcacttctccactntntcagnntgtggatnnnnnnnnnttttttcatctctgtaccccacaaaataacacagacaccccattcctaatctgttcctcagagaaattgagtgatatgtctccaggcatggccagtattccccaggacacagagaggacaaaattacaccatttaagaaacactctggttctaccacctgtgtctgctgatttcttttcctagcaacccttgaccttcacacctaaggacaaaggtcagtagaactggggaggcnctgagtcttggcctggtcattttccaaggttccaagtttactacaatagggagttgataggggtgctcaggggttggccacgatggtgtccttgatccacttccggtaatgcaccaccttggtgtacagggaaggcctttcgggcagggcacatggttcactgccccatgacgtgataccttgaagcacaccattacagacaagtgggcccccagaatcacccgagcaggtgcttttgccccctgtccagcgtccagcacacagcatgaacttggtcaccttctgagggtgaacttgcgcacacacgtcattggaaataacatggaggtccacacactgaagtttctttggggtcaagaactcctctggttcaatgctgccccagcctgaggcgtagcaggtggtccccagtgctggctcctgggtgggcaggtccatgaccttcatagcatccgtgagctcggcaggctctgacaggcggagcagcatgaggtcgtggctggagtcatcacctggcctgaggaatcgattcttcaggaggctcatatcgtagagcgggtgtgtgaagctgtggctgacctgaaatacctggcctgtgtcttcaggatgaaacaggctgtgccgacccagcaagatcacgcttttgttcctgatgcagtgggcagctgtgaggacccactgggggtgcaccagaacaccgccgcagactgccctgccacgagaggccacaagcacctgccagggttgggaatgcttctcgcactcccagcctcccacaatccgagacaggatgaggggtgcagcaccaatccacgtcacggacagggtgaggaa

SEQ ID NO: 152226 - DNA, 913 bp, Homo Sapiens
tcaaaaggtccagtagaaactgggggaggccttgagttttggccttgtccattttccaagggttcccaagtttactaccaatagggaggttgataggggtggtcagggggttggccacgatggtgtccttgatccatttccggtaatggcaccaccttggtgtacagggaaggcctttcgggcagggcacatggttcactgccccatgacgtgataccttgaagcacaccattacagacaagtgggcccccagaatcacccgagcaggtgcttttgccccctgtccagcgtccagcacacagcatgaacttggtcaccttctgagggtgaacttgcgcacacacgtcattggaaataacatggaggtccacacactgaagtttctttggggtcaagaactcctctggttcaatgctgccccagcctgaggcgtagcaggtggtccccagtgctggctcctgggtgggcaggtccatgaccttcatagcatccgtgagctcggcaggctctgacaggcggagcagcatgaggtcgtggctggagtcatcacctggcctgaggaatcgattcttcaggaggctcatatcgtagagcgggtgtgtgaagctgtggctgacctgaaatacctggcctgtgtcttcaggatgaaacaggctgtgccgacccagcaagatcacgcttttgttcctgatgcagtgggcagctgtgaggacccactgggggtgcaccagaacaccgccgcagactgccctgccacgagaggccacaagcacctgccagggttgggaatgcttctcgcactcccagcctcccacaatccgagacaggatgaggggtgcagcaccaatccacgtcacggacagggtgaggaagacaaccgggacccacatggtgacacagctctccgggtgca

SEQ ID NO: 152227 - DNA, 948 bp, Homo Sapiens
tctttttcttaagcaaaccctgggcctttccccccttaaagggacaaaggtcaagtaggaacttggggagggcctgagtctttggccctggtcatttttccaaggtttccaagttttactaccaataggggagtttgatagggggtgcttcagggggtgggcccacgatggtgtcccttgatccactttccggtaaatgcaccactttggtgtacagggaaggcttttcgggcaggggcacatggttcactgcccccatgaacgtgataccttgaagcacaccattacagacaagtgggcccccagaatcacccgagcaggtgcttttgccccctgtccagcgtccagcacacagcatgaacttggtcaccttctgagggtgaacttgcgcacacacgtcattggaaataacatggaggtccacacactgaagtttctttggggtcaagaactcctctggttcaatgctgccccagcctgaggcgtagcaggtggtccccagtgctggctcctgggtgggcaggtccatgaccttcatagcatccgtgagctcggcaggctctgacaggcggagcagcatgaggtcgtggctggagtcatcacctggcctgaggaatcgattcttcaggaggctcatatcgtagagcgggtgtgtgaagctgtggctgacctgaaatacctggcctgtgtcttcaggatgaaacaggctgtgccgacccagcaagatcacgcttttgttcctgatgcagtgggcagctgtgaggacccactgggggtgcaccagaacaccgccgcagactgccctgccacgagaggccacaagcacctgccagggttgggaatgcttctcgcactcccagcctcccacaatccgagacaggatgaggggtgcagcaccaatccacgtcacggacagggtgaggaagacaaccgggacccacatggtga

SEQ ID NO: 152228 - DNA, 905 bp, Homo Sapiens
agggccctgaagtttttggaaacggggtcccatttcacaaggtttcccaaagttttaattcccaattaggggagtttgattagggggtggtccaaggggttgggcccaggatgggtgtccctggatccctttccgtaaaatgccccaccttgggtgtacagggaaaggccttttcgggccagggcacatggttcactgcccccagacgtgataccttgaagcccaccattacagacaagtgggcccccagaatcccccgagcaggtgcttttgccccctgtccagcgtccagcacacagcatgaacttggtcaccttctgagggtgaacttgcgcacacacgtcattggaaataacatggaggtccacacactgaagtttctttggggtcaagaactcctctggttcaatgctgccccagcctgaggcgtagcaggtggtccccagtgctggctcctgggtgggcaggtccatgaccttcatagcatccgtgagctcggcaggctctgacaggcggagcagcatgaggtcgtggctggagtcatcacctggcctgaggaatcgattcttcaggaggctcatatcgtagagcgggtgtgtgaagctgtggctgacctgaaatacctggcctgtgtcttcaggatgaaacaggcctgtgcggacccagcaagatcacgtttttgttcctgatgcagtgggcagctgtgaggacccactgggggtgcaccagaacaccgccgcagactgccctgccacgagaggccacaagcacctgccagggttgggaatgcttctcgcactcccagcctcccacaatccgagacaggatgaggggtgcagcaccaatccacgtcacggacagggtgaggaagacaaccgggacccacatggtgacacagctctccg

SEQ ID NO: 152229 - DNA, 865 bp, Homo Sapiens
agctttaaattttcctagaggggtaggggctggggaccagggggcacttcagggggttgggcttgggatggttgtccttgattccactttcccgggtaattgcacccaccttgggtgtacacaggcaggctttttcaggcaggggcacatgggttcagggcccccatgatgtgatacctggaagcacaccattacagacaagtggacccccagaatcacccccacaagtgtctttaccacctgtccagagcccagcacacaacatgaactctgtcaccttctcagagtaagctctagcacacatgtcattggacaggagatggaggctcacacactgaagactcctggggcgcaagaactcctctggttcgatgctgccccagcctgaggcgtagcaggtggtccccagtgctggctcctgggtgggcaggcccaggaccttcacaacatctgtgatcttggcaggctctgacaggcggagcagcatgaggtcatggctggagtcttcatctggtctaaggctttgatgcttcagaaggctcatattgtagagcgggtgtgggaagctgtggctgacagggaccctctggcctgtgtcttcaggctcaaacaggttgtgccgacccagccagacctggctattcttctttaggcaatgggcagctgtgagcacccactgggggtgcaccaggacacccccacagtgtgcccatccatgactgtacacagccacctgccagggttgggaatgcttctcacactcccagcctcccacaatccgagactggatgaggggcacggcaccagtgcaccccacagacaaggcgatggagagaaccaggtcccacatgctgacacaggtgtc

SEQ ID NO: 152230 - DNA, 716 bp, Homo Sapiens
ttcttggatttcggttgccccttctattccccaagtgtaagtgcccccaaacttctcaagttttttagcaacaatagatgcaattctttttcttcctgccagttcagatatcagaaagccatactcaggagccagtaccttggtttgatctatgagtacgtccgacctgttgaattgctctatcagcgctccaaggtaattctaaagtcatatgaactcttcgcctttgatttttagctctcctatctgcctgtaatgaaatacccgagctggcagcttctgagatgatagcaatattcttatctccatccataaatcgttgtttttctgtgatgtttagtatttccacaggcacatcaagttcagatcttgactcataagatatgcttccatcatcattgctcacaacccgtcccttgcggccagtcatctcagcaacgttctcagggccaccaagttcatcgataagttcatccagggtattaggggggaggtcttcagctaatttttctagcttatcaagcaggtctttcttcatctgctgagccctttccacagcatcctgacttgttataaggctactgttactgttggtgttactgttagctggtgtactgttaggagcaggtgagataactggtgtagatgaaaaactaggtcgttttgatccaagacctgatgctaataaggcactttgaatagaatctggatctata

SEQ ID NO: 152231 - DNA, 843 bp, Homo Sapiens
caaccagatatatattttattgcattttgcctgtttataacctatattgcaaaacaatagattcatttttgccttcccaaatataaaactattttaatattgaatatgctttttcaaactctacagcccccttctctccctcattccttatgagattttgataccacttcttaatgggcaggagatctttttcttgaggaatcactgacccaaaacccaatttttgaattattattcagggataaagtggcaataaccatgactgaagaaacagtattcaattaaaatacagaaattgtcaactgaaaaatagtgcatgacagaatatccaacactgtattgaatattttctgattattaaacccaaattacttaaaccttatacttgaaaactaatgcacattggtttttaaaatgacctactgaaaccaccataaaatgtatcttttatacaggttaattatagtaacaaatcatattgctttacattgttaaaataatattttcttcaatcatatgacctacaaaattatacccttattttccactgattctcatatttaaaaccagaatttttagatttttctaaataaattttcatcagttttgacttcgcttgcaacttagagttgaatctataaagtactggataaaaattgcctactatgtaacaaatatttccctgatgccacaagattaagatttaataggaatataaactatttctataagtaatattgtacttcagatgcctttatttttccaaatgatgggatgaaacttctgtatactctgaaactagaatgataatataaatacccagccaggcacggtggctcatcc

SEQ ID NO: 152232 - DNA, 1109 bp, Homo Sapiens
agggggttaagccaaaacccttaaaaatttcggggccaattttctttttcccgggtaaagggtttcttccgatatcccttacctacccagggttttatttttggatgggtaaatccaggaggaaatttctttagccaggcaaagggccctttcaagttcaagttccattcccacccttagggactgggggaaattacccattcaaggttcagtatctggggtagtaaaagataaatcaacttcatatttataaactaaactgagagtagatgctgtggtaaattcaatacccttactagttcctgttgcatcaggttccagagcaaaaggcccagtagaagatagagtttctcctggcatcagtttcactaccaccagggtaggtatccaatactgtgcgctgtttagtctcactggtgggcaaaattttctcttcaccaattttccccaacaggactagtaccagcagcacacactgtattatgttccatctctttagcaattaaatgattatttatattaaggtctatatttataccatgttcactttcgtaaaagtcacctttcaggtgttcctcagcatgtggttcttcacctgaatgcaatgcaatctcctgcatgccaatctctggagcaagattttgatcaccagaggatagattaattcctttcataacatgtgatgacatgatactagattccagtatcattggtgtggactctatagccacctcagttggtattacttgagtctgctctgagactgtgacagcaggctcggaaactgtcacagtcgattcctggacagaaacagatggttctgaaacaatcatagaaggttgaaggactgacaccgctggttccagaacaggcacagaaggctccagcgcagaaacaactggcacaggaatggtaacatagtctggctcagccacaacaggaggctccgggacagtcacaaccgaaggctctaggacagttacagtcgaagactccaggacagtcacagtcgaagactccaggacggtcacagccgaagactccaggacagccatagctgaagactctggggcagccatggctggcggctccagaatgctctctgcccc

SEQ ID NO: 152233 - DNA, 762 bp, Homo Sapiens
  misc_feature (49)..(49): n is a, c, g, or t
  misc_feature (51)..(51): n is a, c, g, or t
  misc_feature (152)..(152): n is a, c, g, or t
tgccttgattcaaatgctctttgatggcctgctcaatttgttcctcttncntgcaggtcatcttcagatgagccttgaccaggaactcgcttcaattggtttgaattaatgatctcagggtatttaactagcatcctggccaagtactcacntaattcttgatccttgtcgttcaggttttcatatgccatctgtctgttttcaacatgtggaatccaggcagctttgggaagctggttcgatctagatcttccagcaccataagggagccttggcagaactttctcctggttatatggattgggaaaatacgacgttttctgatttgctgccctctccatccctaaaagatttaaaatgtcctcaacactgagcccgtctggtagggcctcagtcccagcacgaccaggtgttttagggtagccactcttggagagcatcctattttggaacagttctttttggtctaagtcagcctttgtggtgtcatctaggtcaacaggaaggtcaagctcccgctccggttccactgatccattcggcttctccccagttttgagcatctcaattaagtcttctgggggtatctgtaaattccttgagatttcaatcagctggtaaatagactgagaatcaagaggtttctcaaaaagcctggtggccctttccccattttgcccattctgtaacctcccacttcctgcagcatttactaaccttttcaaataggcaattactttggagacatcatctgagagttcc

SEQ ID NO: 152234 - DNA, 836 bp, Homo Sapiens
  misc_feature (56)..(56): n is a, c, g, or t
ttgtagatcctagacttcttatttagactaagtatggtgcgagtgaaaaccatccntccatcaagggcattttttatttaaaaaattccagaaagaccaaagaactaaagaattttaataaaatgagcaagtttacatttgtacattttgtgtatcggggacccaatcgggacaaaggataaagttgcaaggacaaaggtttctgtggggagagcaagcaaaaagcaagggctgccccagttgcatcatgggcatccattcagagctgtgaccccgcagccacctgcctgtgctccggaagtgagaagcacatgtaagcacgcgtcagtgagagcgtcgcagttgaactcagcccagtgcaacgcagcctgagtgacatccctacattaatacttgatagggaacagcagataaacagttccaaaaaccaaatggtattgcccatagaatatgaatgtaaactgagttcagttcatgctgttttaaccagaatggttccactgaacctaatgaggggaaaaaggtctgatggatctaattgctctattcgatggcacagttacaaatcagcaggcctgtgagaaagaaccatacatttctctcagaaatatgatttgagaaaagggccttgtaggagtgagagaaaggttagagaaaagtacagttttaacatatgagacaattcttcatactgtaatagaatgctgcttgtggtgaaggatttggtagagatggaaaactgctcaactttaattcccattattctaaaggatgacaaacattttagagtattgatcaatgttcagtgaaaaaataaaaatgactagtgttggctg

SEQ ID NO: 152235 - DNA, 1127 bp, Homo Sapiens
taacttcacaaactcttgttgtcatcaggccatctggggtgatctaaatgactaggaacaggaccatagggtaggacatgatatggagggacaggaccacccaaccctggcccccagcccaaactactctggcgtggaaatgctttattcctaggatgagagtagagggaaaagacggaggggttcccaggtggtgtaagtgcttcctaaggactgccctctggggtcttggggtattgcaggcttctcacaccccaccacccatggggccaaccgctcggccagccacactgtcctcagagtgttcccagcaaggtcagcagagacccagcaggtggaggaaataatgggagaaaagagttgaaggtgggagtggggaaatgggttcacaatgcatttgttccagggatctttactcattctgtgatgaagagaaggtgacagttcactggctccctgggggtctaggagacttgggcttggctgaagagggacagacactcagggcagggctccatgccatcagcttatcagacagccacctttctccttgaagggattcttgtcctcagggatgcctttgagaaaaggatcgtttcctgcttgggcctccacgtactccttgatttcctttcccgctttggaaatcggaattcttgtgtttttcacttctttcttcagctgctccacctccatcttcaacaggtccttctcgctgagatcctgggccatcctgccctagacagacctgatcctgccacagaagagcacactctccaagtcacttgtcctggactcaggtaagatagtgtttgagcctcctagttcttcatcagctgaaaatcttcagataaagcagatggcctggaaaccaaaatctctgatgcctaagctgatcataggctcaaagttctaagcccatcacccgcttgagccttcaagccctcactacagcagagcagagagacagacattctccccacaaaaacaaacgcgaaaacagaagccaccttttcaccaccttgccttgcgttagcctcacacttttggtgacctcactagcttagagcccgcagcgcttctatttctccacctccaccctgcagccccacttaccccgcttcccc

SEQ ID NO: 152236 - DNA, 503 bp, Homo Sapiens
  misc_feature (158)..(158): n is a, c, g, or t
  misc_feature (319)..(319): n is a, c, g, or t
ctccaaaacaaaatttttttaaaaagtagaagcttgaggttaagatgaaatctggctttgtcattagagtctcagcagagcaagaaaagcatagatgtggggtgtgagagcgtgggtgctggagcctgtctcctcttcgcaggcctttggcctgcccncagcctcccgctaccttgcccaaaccccatttgaatgatttgtggacaagcaaagaagtttcccccgcattttctccttgacttttactaaaagttaaataaaccgtgccacttcgcccccggcccttcgtttatttaccacccccccacatttacatatnttaaaatggccggccccgcctctggcccctcgaaaaaagcttttccaaaaatatctctgtttgtggcgcgccggggttcccctcacggataagggaaaaatggggcctatagtttggttttcccaaaggaaaatccctgggacaatgaacataagggcttgggaatctccccactacaaaaaaa

SEQ ID NO: 152237 - DNA, 706 bp, Homo Sapiens
aaaaagagggggaggaacaaatgattaatgtttgccaaagttctgaggaagtcccatttactgttccaaactttgggattgaagtcccttattttgttttttcctttacttagaggacaggtatatacagtgctgctgtaataatgaaacaaaggtgaaatttactgtaaagttgcccaataccagaaaactgttgctccatcttctactacataaacgtgtgactccacaggttaggtaatgttgttgtcattgtttttgttaagttgggaattaattccatcacgtttaagacctctctttaactccagatcctccaattttttccacaattcttcccgctccttttctttctttttctcacgctgacgatctgacttgtatgtggctgtcagctcgtcaaacatggtgctgttcatttccataaatgccttcaacacattgtacaccaacgccacaatagccggattccaatgttcttttgaaatcctataaaggctggaaaacatgatgggaaggatgacgttagagttttcttctatcaaactcatgatgtattcattattccaataatagagtgctctttctgccacctgaaaatgggggctagatacacacttggcgatttgtttaaacaaaggttcttggattttaacaaattgtgaaggttcaatcacatccaatatttcttccagttccccaagcc

SEQ ID NO: 152238 - DNA, 828 bp, Homo Sapiens
cggagggggcgcgaacaagtttgaagatagtttggttatcttgataattcccccgtatggggcgcgttgagctccccaagaaaaattctgttgtgctgcccataaatccccagcccatgttggtaggccggaaggaggtctcgcggtctttcttctggtttgggtgctctgccagcagacgggccttggcatcctcggtggaaatgatatttttattttagcatggatgcccaggtccacttcaggaatgccactcagcatctggtggaaaggcatctcctcggtcttctttgctgaggaaacacggatgttttctggaagttcataaagacagtcctctgcattctttggcttaactttctgttcctcatgttccacgatccctttcctcttctttagctctgtctcaatgtacttcatcatgtctgcatcctcatcccttcggttggtttctgcagaaaacgatgtccccaggtgcaggtcctcctcctcactgatcttatctttgcccctttccttcagtttcttcatatccaccataccacctgtcttcatctgaaagggatcatccactagagtggtctcctcttgtaccttctctcccaccagcaaggccacagcactcaccccgttgggcctcttcctcaagttctgtacttctctggtctcttccagttttaatcgaacctcctctgagtcctgctcatcttcctctgactccgagtcgccccggcggcgacggaaaatcttccggacgaccggcatggtgacaacggccgagttgtacagccgccgcgcctctgcgcagcggcccaggctgcttccccc

SEQ ID NO: 152239 - DNA, 738 bp, Homo Sapiens
  misc_feature (562)..(570): n is a, c, g, or t
tgttccccgctcagcccactagacttgcggctttcgttttgctggtgacatgcataggtgggtctggtaagcaggaagctctctgatgtcgagcatctactgggactacaggtgcactgtcgtccccactactgggggtggcattgatgacactctgtctgttgggccctagaatttaatgtggatttcctccttccttccaagttctgaaattcttaaatgagagctggctgtcttctagaggtgagacctggaatggagtccagttggtactttatcactccctcttggaatctcttatgaaaaaatgatcagagagaaaagtggggttttgtttccccacctaatgatatatcctacaaccagccgaatgcacttttgtgaaaatggggtgtgatgagtggttctgcagcttgagtcctctggttttaagtagtttgtttctacttgtttaaagaatcttctggtctgaccacttaaagtaaaaactacatgatttattttcgggcaattatgtttagctttcatcattatactccaacagacccgtctgaaggggtannnnnnnnnaacaataatgtttgtaacattttgttgtgtcaattagagggtcacttgtttgtattgcaataaacactgggaccagttccggggttaagaattaatttttgtttttaatatttcacatgaaaagaatcaaagtaattgtaatggctagaagagacctgccagaagatt

SEQ ID NO: 152240 - DNA, 497 bp, Homo Sapiens
tatttttttctcatcagcaatttcaattttatgttttctacttatttttatataagaatacaatgcaacaaaatattcatatattgcacaaacagtgatgtgcatacaaagatgctaacaacattggctggtaataggctttaccatgttatgatctaaatgcttgttcatcagagaatgtacaaaattctaagtttggcatccaaaagggggcttacagttattgaatatttttcccagccctattttaaatcaaattcaagtttgcctatgacaaagactgtctataagtaacagggcaagcataccaacatcaaaattattcttcttcttatctcacgtgcccctatttctcccaaataagtgacaaggagagtaaaaggatcactgagggaacatttgaagaatgctactaagtgccaggtcctgtacaaggtaattaattactacaaacactctcgtgatggacatggccaatagtgtattttgtcaaaaaa

SEQ ID NO: 152241 - DNA, 807 bp, Homo Sapiens
  misc_feature (106)..(115): n is a, c, g, or t
  misc_feature (208)..(208): n is a, c, g, or t
  misc_feature (363)..(363): n is a, c, g, or t
  misc_feature (515)..(515): n is a, c, g, or t
  misc_feature (807)..(807): n is a, c, g, or t
acccccaggggagaaggagaccctttccaatatttctggggggttaaggaaaatgggaagatcccacaaattcccaatgaatgtggaaaaggaaaggccccttttnnnnnnnnnngggagggggaaagagcattccccctgatgttccccctttcagggacccggggacccccaagtgcaccatctcagccagaagagacgggagggnataagaaaccctggagcaggggatactggagggaccccaggagggacttctgccaaccccagatgtacatttcctggaaatcccgggctgctgctggcagcctgtcagttggagaacataagttcaaagcttccgtgcaaactcccagtatggtncctgccagcccctgcaccttcctttcacaactttcctgctttcctctctctcttccctgttccaagttgcccataagtctcagaggctgggattgtaacatccccatgagcagctggacatgacccccttgacctggaggtgggttcctggngaatggatgagcccaaagactcgttttttaaaatgctgggtctgcaatttggaggctggtttctgtccctgtaccacagttgccccattggaacgagaataagactactgatctccccaaaccatcataggaattccagcctggcacgtagtaagtgctctgtgaatgagggctgttcagggtggattgttactctgcctcctagacatcctgggccacctgactcaatgggtcgcttcatacgtcacagatattaaacctggcaaactggctcagcacaatggcttagccn

SEQ ID NO: 152242 - DNA, 515 bp, Homo Sapiens
atccccattttcccctccaggaaatgaaaacatattgaaactttcttttgtatttagcagtaatccagcaaaatataagctttaatatagcgactgaggagtggtagtttgagccatgaggtacgggggagccagaatccacttagtgaggacagtgatgaccagcaggtggcagaagtaaattccaagcagccaaaaaaccaaaaacattcggagaattttccccccgttcctgagggacaggatggagtttggacaggaagaactgtaagaagccaagatctgcgacagtcccaacaaatacagtctggtcacatggatacaggaaggacgatctggggaggcataccaacaagaaacgaagccagggacctgaatgcaaaactagcctcaggtgacatgttctcctgcacttagaagcaccggcaaaaccatgcccacatagagggggcagacacatgtctgggtttcagtttctgcagaccttcatcatttgttttcctttttgttttctc

SEQ ID NO: 152243 - DNA, 802 bp, Homo Sapiens
  misc_feature (125)..(135): n is a, c, g, or t
  misc_feature (772)..(773): n is a, c, g, or t
ggtcattttagaaatccttttgcccagtgctgatagcattgtaggaaatttggcttcagaaaagagcctttgtgtgtagcctgtgcccagcatgcatcatcaggtatttttagatccccaggaannnnnnnnnnnctttgttacttcatttgttcctttacctattacaggcccattctgtctactcaaagctggttgtttccttcttaaatcaaataggcttttttaaattgggtcctttgtatgggctataaatcagcttttctctggagcctgttcaaattgtccttgatcaattaattatctgaggtattttgttaaaagtattgttgtccctaagcccagtcacctgcttcagagattactcctgccctgcttggagtaagctgaaaatcggtctaaagatggagattttcagtgttctgagtatatttttgtctaagctaatcttcaatttcaaattcagttttttattttagagcctttttaagtgttgatctgctttaagttcttgctcaaagtcactttagtagccaggtgttgtgtcctgagatgtatgagaaaaggaaatgcatgtagtcatccctatctaggagatgttccatattttcctctaaaaggagagttttcctcctcatgaaacaaacctttatctctagcattggagttgttgggttatattctttccaccccttccactttttaactttcctggataaaagaaatggtttatttggcccgggcacgatgggctcacgccctgttatcccanncactttggggagccaaaggcaggcgattc

SEQ ID NO: 152244 - DNA, 1017 bp, Homo Sapiens
  misc_feature (296)..(296): n is a, c, g, or t
  misc_feature (945)..(973): n is a, c, g, or t
gggttgcagccctcattatcattggcatcatcatctactgctgctgctgccgagggaaggacgacaacactttccatctctgcctgtcaatatcctacctgtccctccaggcccatctcaaatcacaaggatttctctaaccctatcctaattgtccacatacgtggaaacaatcctgttactctgtcccacgtccaatcatgggccacaaggcacagtcttctgagcgagtgctctcactgtattagagcgccagctccttggggcagggcttgggcctcatggcttttgctttnccctgaagccctagtagctggcgcccatcctagtgggcacttaagcttaattggggaaactgctttgattgtttgtgccttcccttctctggtctccttgagatgatcgtagacacagggatgattcccacccaaacccacgtattcattcagtgagttaaacacgaattgatttaaagtgaacacacacaagggagcttgcttgcagatggtctgagttcttgtgtcctggtaattcctctccaggccagaataattggcgtgtctcctcaacccacatggggttcctggttgttcctgcatcccgatacctcagccctggccctgcccagcccattcgggctctggttttctggtggggctgtcctgctgccctcccacagcctccttctgtttgtcgagcatttcttctactcttgagagctcaggcagcgtttagggctgcttaggtctcatggccccagtggctggtctcacccaactgcagtttactattgctatcttttctggatgatcagaaaaataattccataaatctattgtctacttgcgattttttaaaaaatgtatatttttatatatattgttaaatcctttgcttcattccaaatgctttcagtaataataaaattgtgggtggaaattcttnnnnnnnnnnnnnnnnnnnnnnnnnnnnngaccgcgtatgcggccgcaagcttattccctttagttgagggtt

SEQ ID NO: 152245 - DNA, 775 bp, Homo Sapiens
ggacccccaggagggggtttgccatttgggtaggaaatccaggggtgctttaaaaaaggggggtggactgaggggcttgcagtttccagagggtggctgggggactgtgccttctgtgggggggcggccgtgtctcaagtgggaaagatactctggggagccagggacgatgtcgtacgtgggtaggctgtgtggacaattggttggggggtgtgtggacatcggtggtcacaggctgggagagtggtgtagccaagagagggatcatgagttggggccatagacagcgacagtctctgggtggcatgaccccggaggggggcatgctgttccctgtgccaggcaccagggacagggacactgagaagttcgatgaatggagagggcgtgtgagctgtgaacatgtgtggccgtttctgtggcttgtgaaggtgacagccagactcccacgtgtgggctgcagatccaggggagttggtgggttacctggctatgtgcttgtgattgcagatggactatatttatgtctgtggaaagctaacccagcagttgctttgtggcccttgtagttgtgtatgggtgtgcggttgtgcatcttagcagcatgagtcaagtgagcgtgtgggccgtgggacagactccggaaaacaactgcaggcgtgtaaatgtggctgcctgcagtgtacactctggagacattaaccctgtccatgcccactgttgaggctggaggcaccgtcctgggcacccaccacttccaagttgccttccttcc

SEQ ID NO: 152246 - DNA, 793 bp, Homo Sapiens; identical to SEQ ID NO: 62687

SEQ ID NO: 152247 - DNA, 504 bp, Homo Sapiens
  misc_feature (65)..(110): n is a, c, g, or t
ttttgatttatgattatttattagttttttttacattcagaaatgtcttagaacaagcatttaannnnnnnnnnnnnnnnnnnnnnnnnnnnnnnnnnnnnnnnnnnnnntacagtacatcatcgctcctagaaaattcaccatacaagacgatcctttcaaaggttcataaataaaagtcttcttgactcgaaatcgtttcctgcatcgtgatgaaaagtatgcagaaaactaagaagaatcgcaagttttcagtagggtgatgtccaaactacttgatctggtgcggggcggagagactgttttgcttttgatccaagtgaagacaatagaaatgtgctcgtcccacttcctcaagtcctcaaaaccttgtcttgcccgggagctgcccctttcaggcagagttggaggtgctgcggagaagccggtgcccgtgcggctgcgagtgcggctgtgggtgtgggtgcggtatttggtgcggatgcgggtgcgggtgagggtgtg

SEQ ID NO: 152248 - DNA, 313 bp, Homo Sapiens
gagggcccttgaagtgaaggcccctgagccctgattccaacctctgctcccagcacactgctgctgtccacatgctgctgcctgaacttagctcaaggctctccatcacttcctttggggacactgggcaccaaactgagaatcactggtccacatttctctcaaccattaacaaaagggggtagagatgggggcaacagggacaagaatgccacctcccaattgagtgaggatgaattatggtaatatacgaccactcctcacccagtgcttggcacacagaggtggtcaacacatgtgtttcttgaaatcc

SEQ ID NO: 152249 - DNA, 1416 bp, Homo Sapiens
  misc_feature (1330)..(1345): n is a, c, g, or t
  misc_feature (1363)..(1371): n is a, c, g, or t
ggaccatacaacactgtacattgtaatggaatattgtgaaggaggggatctggctagtgtaattacaaagggaaccaaggaaaggcaatacttagatgaagagtttgttcttcgagtgatgactcagttgactctggccctgaaggaatgccacagacgaagtgatggtggtcataccgtattgcatcgggatctgaaaccagccaatgttttcctggatggcaagcaaaacgtcaagcttggagactttgggctagctagaatattaaaccatgacacgagttttgcaaaaacatttgttggcacaccttattacatgtctcctgaacaaatgaatcgcatgtcctacaatgagaaatcagatatctggtcattgggctgcttgctgtatgagttatgtgcattaatgcctccatttacagcttttagccagaaagaactcgctgggaaaatcagagaaggcaaattcaggcgaattccataccgttactctgatgaattgaatgaaattattacgaggatgttaaacttaaaggattaccatcgaccttctgttgaagaaattcttgagaaccctttaatagcagatttggttgcagacgagcaaagaagaaatcttgagagaagagggcgacaattaggagagccagaaaaatcgcaggattccagccctgtattgagtgagctgaaactgaaggaaattcagttacaggagcgagagcgagctctcaaagcaagagaagaaagattggagcagaaagaacaggagctttgtgttcgtgagagactagcagaggacaaactggctagagcagaaaatctgttgaagaactacagcttgctaaaggaacggaagttcctgtctctggcaagtaatccagaacttcttaatcttccatcctcagtaattaagaagaaagttcatttcagtgggggaaagtaaagagaacatcatgaggagtgagaattctgagagtcagctcacatctaagtcccagtgcaaggacctgaagaaaaggctttccgctgcccagctgcggggttcagccctgtcagatattgaggaaaattaccccactgaaaagcaggcagatccttggcatgcgctagcaggtagagagacccagagctgggtacacgatgtaatattaccaactttaaagactgaaattccaatggcgtaaggggtgaaaacctggggttccattgaacccaggccctttttggataaggacccctggaatattttccgaaattggggttttacggggtcctttcccccaaccttttttgggacaaaaagagggggcccccacttaaaaaaattttnnnnnnnnnnnnnnnnttttaaagaaaaacctcnnnnnnnnnaaaaaaaggagaatacaccctctcttcctcggtgggtttgggggg

SEQ ID NO: 152250 - DNA, 401 bp, Homo Sapiens
atgaaatcctgctaagatcacgctgtgtagctgacaggggcttgctgtcgttttgagcatgtcgagcagtttactgtggcttccttgtatatggataagactgctgtccttccccttcacaactgaccccgcagttacaaactagtatagcatttgtgctgattgatgatagactcatggacttcaggagcccttacttggttttgatcagtgtagcaaattagggatgaagagttcaaaccttttggccctttctttcttttctaggcttctccctcgcagggtgttccgtagtttcttctcgagccaatgcatgtattatagcagcaggtgtctttgtgctttctcatcatagtaacgtactacttgtaaatacatttttctattttctatttgtttgt

SEQ ID NO: 152251 - DNA, 919 bp, Homo Sapiens
ttttcaggaaaaaaaagagtttaatcatgaaaccaaggaagtttctaccattaagctcccggcagtagcctagagaaatatatctaacataaagagtttccacagttagaggacaaaaagctgtatcggcaactgaaaaatacagtcatcctaaagagatctgacacatcatctattctgacaaaagatttttaaagtggcactgctcgagtcgaaatggttaattacctagcagaaattgatttctctatctccgtagcactcaaagcagctggcaggctcttgcaatagtcattcgttttcgtggtgacaagaatggttgcgccttcctccatagctgggagtggaaagcaatggtcagagtcgaccttcggtttgctcttgatgcagtcttcacaggtgcattcttccaccgtgtactcgaggcctctcggaagaataatttcatcaccagtcctgctcttttccaggtcaatgttagccatgcccaggagacctgatcctgtgtttttaaactcgtcctttaatggttcagagcttatcttccttagcaaaaacattagcccgaaaactgcccaagaaattatttagctcagtcccaaacaggtcccgagaatcgcattcgttcctttcactgaattggtcacacttgcattacaataacgctgacatgttagaggaggagtattagaagaacatcgaagttgacaaggtatgcaagcatgcaacaaactgtcaaaatattcattttgggagcactgcccagccatctgcaacatgatcacaaaaagaaaacaagggagctacagaaagaacagcctggaaggacaagtaatatctctacaagaattccggagcaaatgcagcaagagcagctagaatgttgagaacaatgaacttcgcctgcttcgtgggtccc

SEQ ID NO: 152252 - DNA, 421 bp, Homo Sapiens
gcagaaataaaggatcagaaggctataaacccaagtatcattagcatttatatctaggtgcagcattaagcctgaattcccctttacactttattttacactgaacgtgtatcctatgtacaatagagttaagcaataaagctgtcttcatttggaaatcaaggcaccattatcatccacatcttcaccaggactgtggttggggaccaaggggagtagggatgaagatgtccctctcagaaaccaggaagagccaagccgcgactccccgctccccaacccatcctcatttctccttctactgcctgtggccatcaaccgtggggcctgtgttagagacagttggggaaaagagcccaagagccgtctgcctgcacagagggcatcataaatgagaggggaggccgggcgcagtggctca

SEQ ID NO: 152253 - DNA, 502 bp, Homo Sapiens
agatgcgagcacccagaacgtcttttgaggctgggcgggtgtgattgtttactgcctactggatttttttctattaacattgaaaggtaaaatctgattatttagcatgagaaacaaaaatccaactctgcttttggtcttgcttctataaatatatagtgtatacttggtgtagactttgcatatatacaaatttgtagtattttcttgttttgatgtctaatctgtatctataatgtaccctagtagtcgaacatacttttgattgtacaattgtacatttgtatacctgtaatgtaaatgtggagaagtttgaatcaacataaacacgttttttggtaagaaaagagaattagccagccctgtgcattcagtgtatattctcaccttttatggtcgtagcatatagtgttgtatattgtaaattgtaatttcaaccagaagtaaatttttttcttttgaaggaataaatgttctttatacagcctagttaatgtttaaa

SEQ ID NO: 152254 - DNA, 451 bp, Homo Sapiens
cagcccaactctgcttttacaggtattggctctcattccctagccattggttctccccttcctgtaattcaggcctgcaatataatttcttagtcccccaaggaaaacagaactaaagacttctaacagaagatctcagtctactaacatagctaatagctattaaagctactcaggcatcggcttaataaaaaactaaagggctgcagcaagtgatcagattttcaccactcatctttgtgagatgggtctcagagggccccgtccctgctgacaccaaccattcttaccggtagcctgccaacacacaagcagttcacagtagaacactgcagactgcagggcattttcaggctacatagcctcaagttcctagaacaggaactgaggcttggaagaaggtcagtgcagcgcactcagcgaatggataaactgaatcatcatttcaccc

SEQ ID NO: 152255 - DNA, 794 bp, Homo Sapiens
  misc_feature (218)..(218): n is a, c, g, or t
ttttagaaagccgcacaatttattacatttatgagttcataataaaatggatacttaggaactttaaaaatgagttagaagtaacaattagatgtaaaattctcaaatcttggaaactgaaatattaaattcttagaattttctttaaaaactctttcttatgaaagagaaatttgcatagtttgaaaattattatgtcctttcaagggaaaaagganggaattaaaaaacagacacattgatgaaggcaatgagttcttctcagctggtttattctccactgaagctcaatataggattatattttctttacttacaggaagtggtcactgctctgttttccaataaccctcaaaacagaacaacaatgcttacgcgaaataacacaagccttaactattatactttgcaggctttaccatttcaatacacttctagtccaactgctttcccaactctaaagttctgtgagtgaactatgaatatttttaaatattttccagattcatcagggaggctgcttttcttctctgcactgtaatcacactgagctgctgggaagctgaagcagctctctcttctgcctgacttagacgcctttgaagtctgttggctttttcttgatgctctagaattagcttttcattctcagctaccttttcatttgccatttccagctgagaaagcagctcttgggtatgaagtttctgtcgactcagctcactctttagattattgattctaatttctgcactttcagtaagtttcttcgtttcttctttccacctattgcc

SEQ ID NO: 152256 - DNA, 592 bp, Homo Sapiens
gggcttacattttttcttacagcaatcttttgagaaaagaatagagaatgtttaccaggtagaaaaaacctgattccttaacaagacttctcagtcacttgtttctctttccctttcacttttcctttgtgcttttgaaaacaaaggctaaagcaggtgttataaatttattcattcctgtgctagagagcatggaacacatctctgaagtcaactcttcttttggtgtatcacgagttgaatccttaataaatgactgccacaaagaaaatttctaacagcaaatctttttaggaactgctcaggttttgcctttgtcttgacacttcattttaaaatcttggtttctactgatgtgttttcaaaaaagctgacaagctcggtctgaaatgtagaaactgaaaaaagtgaaaggaagagaacatgcaatataagttaatcattatcattttaagtgccaccagttctgtttatattaatgcacttgtgaattgctgaatctcatttgatcaacccaattaaacattaaataattgcagccaattatgcaaatatcagcaacaatattaatttgttgatctttttgagcacc

SEQ ID NO: 152257 - DNA, 279 bp, Homo Sapiens
ataccatagttaaaatgtcttgtgtgcatacattgttcgtatttgtctataaaggtattgatatgcttcccaaataatcctatatactaacattggaaatggtttataaagaggctttacagtcgcatgtcattcagcaggagggaatatactggtctttatgattacatgaaatatgctgtgaagctacagactccattataagtaaacccatggttcaaagtgtaagttataaattgaaacaaaatcaaaatctgctagaagggagggtgggtagac

SEQ ID NO: 152258 - DNA, 1158 bp, Homo Sapiens
  misc_feature (667)..(939): n is a, c, g, or t
aatatgccctataaacatttttatattttttgaaattggttcttagtgttcacaacttccataagatactgctaatgcaccagtattaaaacacatcgacgtaagtagctcatttagctttttctgctgttcttggcccaagttctttccaaaaccaactcttaggcctgctctttactagggatcttatgtcgtattgctttacagccacaacacttggattcctgttgattaacttctccattctcttaagcacctttagaagatttagaagtttcctagttttaagtgtttcaccagcaagtattccatacctacttgatgttgctggtctggtgtcttatttcctaaagtgaagcatctttttttaaaaaagaatttgattgacaatatatccagtccaatataagtatgaaggattctctctcctgagattgtagcaggcagccaaacattttcaaatgatgcccaaggttttagctgtcttgtgtgcatccacagtctgcgaagaagacatgataaggacatcagggagccaacaagactcctaatagcctcactacattcatccagtgcctattctgcatgcctaagcttagagttcttttatatacctctacggccagcaaaatgctcaggtctgctcttggtagggtaaacataaagnnnnnnnnnnnnnnnnnnnnnnnnnnnnnnnnnnnnnnnnnnnnnnnnnnnnnnnnnnnnnnnnnnnnnnnnnnnnnnnnnnnnnnnnnnnnnnnnnnnnnnnnnnnnnnnnnnnnnnnnnnnnnnnnnnnnnnnnnnnnnnnnnnnnnnnnnnnnnnnnnnnnnnnnnnnnnnnnnnnnnnnnnnnnnnnnnnnnnnnnnnnnnnnnnnnnnnnnnnnnnnnnnnnnnnnnnnnnnnnnnnnnnnnnnnnnnnnnnnnnnnnnnnnnnnnnncagggtaggttactcacctattattatcatttctgatgctgagtatgctaattataagtgataattttttcccttttattataaaacttgggcttgatcctgtgattaagccagaaattttacttttattggaaggttcctccaccatattaaagccttcacctggaaaaaaagaatttggtggtttcctcaattaaataatccctttataatggaaaa

SEQ ID NO: 152259 - DNA, 564 bp, Homo Sapiens
  misc_feature (64)..(76): n is a, c, g, or t
ccccccccttatcccaaataaggggggaaggaatttaattttccaagaatcccccttatttttnnnnnnnnnnnnnccaattccttttattaacccccaacgccattttttaaaagattttggggccaaagttctggcccgggaaaattcccttaaggaaaaggcccctgccaaatgtggaattaacccccttagggagtttttttacttttcaagaggaaggccatccaggaaccaaagctaatgcatttttcagagtagggaatggacacccaggttaaaaacctctggactaaaaatatttcatagcacaaaaggccagagttttgtttttctttaacccttttttaatgttatatagtcagtgagaaaaacagaatagtcatgtgtgcatcaacacatctaatttgaaaaggaacatttaagattcttacagaaaatctatcataaaaaacaagtcctttatactttcattcatttactcactaattcagccactggctgtttctaaaccagcaaactaatcaaaggtctggcaactcactcctcatcccaccccattcc

SEQ ID NO: 152260 - DNA, 747 bp, Homo Sapiens
  misc_feature (123)..(123): n is a, c, g, or t
  misc_feature (436)..(436): n is a, c, g, or t
tttaccttatttctaaaaaaaagtaatcctttgggggtcctttcaccagttagggttgccggtaattttggttttggaagggaatttttattaggttttaaagggacataatttcctcccttntagggagctttccagaggaactagaggatgaggttacctgcagaacccctcacttctatggaacctccccggcgggtgtcttgcaccctaggattacacacatgtagtaacacaatttatttccacattctgtagccaaagcctaatgggtcagggttcatcagtttaccacacggcggtcatctcatgttgatcagggtcggggttcatcagtttaccacacggcggtcatctcatgttgatcagggtcggggttcatcagtttaccacacggcggtcatctcatgttcatcagggtcggggttcatcagtntaccacacggcggtcatctcatgttgatcagggtcggggttcatcagtttaccacacggcggtcatctcatgttcatgagggtcggggttcatcagtttaccacacggcggtcatctcacgttcatcagggtcggggttcatcagtttaccacacggcggtcatctcatgttgatcagggtcagggttcatcagtttaccacacggcggtcatctcatgttgatcagcgtcggggttcatcagtttaccacacggcggtcatctcatgttgatcagaagccttgacagcaagcctagatgtctttggtccc

SEQ ID NO: 152261 - DNA, 758 bp, Homo Sapiens
  misc_feature (107)..(107): n is a, c, g, or t
  misc_feature (140)..(140): n is a, c, g, or t
gcaccaggtggggccacggatctggcatgatcactgactttatggagtaggcactgctccagccctgtttgtgagaggttccatgcagatggcccctccgcccagancataccctccagagaggactggagacacaaccntgacaaatggtgggtcaaggggaaagttatcttaagggaaaagttaagtagaatgaagtcggttctttctttctctttgaggatctggagatcgttgtgcaaagcgctgtcctggtcaactttgaggagtttgacattccaatcatacagactgtcattcacgagttcgactgcatagtttccgcctttgaaactctgtgatcggtatatatccctgagctccttcatcagccggtcagtggcctgcaccgagccagacactgcaccatttaagtaatcttgcctctggttctttttaattttctctagggcatggccgaagttttcttttccaatgccatcatcttcagatttcttgccctcagctggctcttcctctttcatttcatagtgatctaagtcttctgtgtcctcaggcatctcctcatcttcatcttctgaagacacgtcttcctgtgtgcactgctctgctggcaagggttgatccagcatctccacatctggatgctgagggaggttatagagtttacacaggtcggagatgatcctcttcagatgctgcaatagcagagtattccctttctttatgtccaccagcctctccaagacagcagcccc

SEQ ID NO: 152262 - DNA, 536 bp, Homo Sapiens
  misc_feature (143)..(156): n is a, c, g, or t
gctcttggaaaagggggagagacaggctcacctgttgtggtgagaagttccatgcagatggcccctccgcccagaacataccctccagagaggactggagacacaaccctgacaaatggtgggtcaaagggaaagttatcctnnnnnnnnnnnnnncgacaatcaggggagggaggccagcatcctccacaggactgtcaggcagactgggcagcctaggccagagggagagactggaaaagaaaagtcttactttaaaggaaaagttaagtagaatgaagtcggctccttctttctctttgaggatctggagatcgttgtgcaaagcgctgtcctggtcaactctaagaagcaacaagcctgggctcagatgcctggttccacctcaggagcttcataagggctcccctgccctggctggcagcagaccacgaaagcactgtccacacccgctccgggaccctgaatgaaaatgctggatggggctgccctggagatcccaccacagtagccccactcacactcctcctcaactt

SEQ ID NO: 152263 - DNA, 895 bp, Homo Sapiens
cacagcctctttctttcgtctccctttcctttcctcatctcttgctctaattggagaatttgacaactctgaacctctgactgtggataaccccaactccagcaagcctgggcaagagtgggacagttgcagcccaaggtagccaaacatctgagttttgcctagtaacagatcatggagaggtcagaccaagaagtggaaggaagtggccggcctgaggcctttgtttgggccactcagggtttaatgaaatgataaaggtagccacgttgtctggatgcgcttcaggtaataattattctctaaggaaagcagtcatatttatatccataaaatcagtttattaaattacatagcaatatacatcccaaaccttttctcaaaattgtcattagctttttaaattcgttaaatattttcatctcattaaaaatggtttcttcctttaaaatttcccagaaagtgtggcctctgttttctgctactcagtttaaacacatcatcaaggacagataattaatgtcaggtgagcataaaaggagattataaaccagaaatgtgttttctgggaaccaagtttcaagtgactcagataagttttattaatttcatgggtgaagcccctggataaagcagtgcctaaatcaggcttgtttacccttggcattatgtcaccaaacactgtttcaggatactggaagtacatacagcttgggaggtctttggcctgagcctgttttggccaagcccatccagaatgaaaagtacaaaagaaggctagtgtgtgtgcaaagcagcatggcttattttgaggtcctattagttgtgggccaacaaaacagtggcaggatttgaaggaagaaatgtattgcaatagtccatatccttcgaacca

SEQ ID NO: 152264 - DNA, 475 bp, Homo Sapiens
ctaaaccaatcgctcttttagggcatgactgaagcctgctggcttcttgcagtcttcccaactattgtagcctaaactagtcaggaaggcctacctcctccccaccttgcccacaatcttagcacttcattataccaggtctcaaatggtttccccaaatgttctattcgaacatatctcaccttctaacaaggcagcaagctcctccagagtggggacaaggctttctatttattttgtaaactaaaggcctggccagctctagatacatatgcactagatggataactgctagccaggagaattctagttctgcttctcagaagatgaaccagagatctactttggtatcttcttaaccacctatttacactgcaaaacagtgtaaggaaatatgtggaatgtgaagtcagacatatctaatcattggcctcatgtttatcagtgtatgacctcgggcatgcaactaaacctt

SEQ ID NO: 152265 - DNA, 477 bp, Homo Sapiens
aaaggtgagtcctgcctggactgggtttgctcggtttccttgcagccccacatgggagttcactctgtgggtgatgagttttccccaacctctgcctctccaaaagaacttctaatttccctttcccaaagatctgcaggatagtggttggctagtatttgtgagtggctcagaagggagttcatcatagtctttgtgttcaaagaatgttctaagaactagtacattaactagctttggggcctcagttgaacctcagcttccttaactgtaaaatggagctattttacctattgtgagagtctacaattatttggtgttacaccgtcttcactgcgtaactttactccacaaacaaaaaggaattggtgccaaaatagcactcagaacaggttctgcagcctgttaagcagttccttcaaatattagagcttcctgagttaagcaaagggtttgctttgaatcccaatcaacttg

SEQ ID NO: 152266 - DNA, 442 bp, Homo Sapiens
tttacttatattcttaagagacagagaacacacaaaatatttaaaggggttttgtcatggaatcatagaactatagatgagaagttatcttaaagatcattttagcaaacctcttcattttacagagggagaactgtggattacggttaaatgacctgcccaaggtcacactcagtggcatagatccttttctgcttggttaagtgtcactacctacaactgaatactaataatatatcagaagcctaaactttaccaaaaacataaagatggtcctaactcttgccaagtacccatcattagcttagctaatgataaatctgaaatacaagaatgccatttgacaacagaaagaagaccatgtgtctatggaaaatttttaaggagagacaatacttggaaattgggatcccttctactagcttggcttagaaaactgcaa

SEQ ID NO: 152267 - DNA, 665 bp, Homo Sapiens
tgtgttttgaagtaattacaaaagattcattgaattcatcccgccctatctccaaaccagcggaaaccccgactcaaatacaggaaatgtttgatgaagtttcctataacaagggagcttgtattttgaatatgctcaaggattttctgggtgaggagaaattccagaaaggaataattcagtacttaaagaagttcagctatagaaatgctaagaatgatgacttgtggagcagtctgtcaaatagttgtttagaaagtgattttacatctggtggagtttgtcattcggatcccaagatgacaagtaacatgctcgcctttctgggggaaaatgcagaggtcaaagagatgatgactacatggactctccagaaaggaatccccctgctggtggttaaacaagacgggtgttcactccgactgcaacaggagcgcttcctccagggtgctgtgcacgaagaccctggatcgagggccctggatgaaaggtacctgtgacatatcacattgacctactacacgagttatcgtaatgtgatccgcacgcacatactcgaatcatggacacaaacgtatggactaactggacagtacgtgatggatgatatctatagtagactccgttggtactgacaggtagcgtatgagggtcatggatgggaa

SEQ ID NO: 152268 - DNA, 560 bp, Homo Sapiens
  misc_feature (503)..(503): n is a, c, g, or t
gcctaaatagacttggttgtcctaaaattttagaaatgtaaatctctaaaatcttacaggactagctctgagctaagtcgatcataattaacatgactttgtgttacaagagtcagtgtacttttgaacagttttccttgattatttccaaggaccacacaaagaaattataaatatatagattgaaataagtataagtaatttgaaataattattctattttcctaaactttcccacttgctatttgacaactaaatatatccttcaaaaactaagtatatctcagattgagaatgctgcagttggcttcagtgttctaacacttgctttgatactttttaaaatgttttagacttccagaaatgttgaaaaaatagcctagagttccttttgtatacttcagtcaatttcttctaatgttaactaacgtctaatacaaacataggacagtaattcaaactaagtaacatgagaacaatacgattaactgaattacaggctntatttggatttcatcagtttttccatgaagctctggttctttggagtctggcatgca

SEQ ID NO: 152269 - DNA, 516 bp, Homo Sapiens
agtcagcaataattcagggataattggttgaattattaatattatattatcacctagggcgataagcacatcagaagacttcgttttaagggaaaaagagacccaagttaggagtcagaagacttgggcttcaagagtggctgtgggtgggtataagatttctccttggtgacacccaagggttgacgtagatgacctctttgataaccagaaggcaagatcagcttcgccgctctgcgaaagccagccgtggagctgcacctccctcaccgcctaagtctcccgggaacgtcccgggcgagggaaggggtccaaaggtcgtacacaagaatactgatagcaaagccccttcctacgctggtgacggcggcgtggcgcaagatttgtgcaagactccctcggattgggagcaagggtcccgcaccttcgtggctcccatgacaaagtctgcaactcagcccgctgggggagctgcaaggaacctgcaagcgtcccagcccctgcagagacccccaa

SEQ ID NO: 152270 - DNA, 413 bp, Homo Sapiens
ttgagcattttctcatatgagtcaggccttttatcacatttaaccctcacaattctgaagaacacattttaatttcacaaatgagaaaactgagacccagaacaattaaatattaaataacctaatcaaagtcatacaattagtaagagagagaaaggggattcaaactcagattacccaagaaattatctcctgtttattcatggtcaaaccaatttctggtaatccaagaagaataatgtgaaaacagactaacatttggtaagtgcttaatatttataaagtactttacataaggaatctcatttatcccttatgacattttcaaataaacagactgcaaatccaaggaggtagtttaggcaaggtcacacagctagtaagtagctttgaatttccctacctccaccctt

SEQ ID NO: 152271 - DNA, 619 bp, Homo Sapiens
cctgatcactattatttttacttcttaatatatgattcaagacataatttcattcttcattttcatttaaaatttgtcttcacattgatgtgaacaactttcaggagtctaaaaaatagtagtttcagacaacctaaaataaatatattcctagaaaacacttggatgacctgcaaacagatcaaagatatagtcagatattaaagtcagagcagctgtttttagcttcttgtttccttttctaaaacttgaagtagatggcgattaaccttatcatgtttaaacaaccttgacagtataaggtacatgtaccctcaattttcttcatccagtaagacaagtatgcatcttaaagggaaagcttttagttcataacaatatgtttggttgcttttctctgctttcggaacatttactgtttttcctttattggctttagtgtttgctgccaaccagataacatgttaacatataatttacaactctctctaggtaggtgattacatagaaaactaatgccagctaagatgtatggattcaaaagataactgacacaagttcttgtcctctacacttgagagaactagctgtttaacgcataaatatattgatagtaact

SEQ ID NO: 152272 - DNA, 506 bp, Homo Sapiens
tttataaagtattattttcctgaaagctttttaattctgatcttcataatctacccctgtagggagtttaactgtttaggccacaaagccaggtaccatgggtctcagcagctcctcaagtaacaggcagaggacccagggaaaagaaactgagcaggctcccaagcttccagggttacagattcagagctaagcctgttcctaaatctctacacacagctgcggctctcgccctgccctgtccatgccccatccaattctctacacagtgccatcctctctgctgctgatggactcagcctggtggtacccaggccagagccaccctgatagagtctcccaaggccatgtcttccgcaggcccatagtgcccagtctcaatgaggcatctgccttgagttgcctgatcagccctctgactccccacaggagctgcagaacctccctgaagcagacaccctgcctgggccctgacagctgctaaccgcttgagaacaccttcccct

SEQ ID NO: 152273 - DNA, 534 bp, Homo Sapiens
gattgatgtattggtttattctttgatgcctttattgattcaacacatgcttattatatgcctgctgtgtgccgggccccggaccaggcgctggggacacagcagtgaaaatactaacattgtttctgccctcacggagctcacagtgtaacagggagacaaatagacctgtcagtagataacatgaaaataattggactatgtgctgcagacacaatatcccaggtctatgagaatgtcaatacagacttcacgtgggaaatggtgaggcaataaggatcgtttcccttgatgaaatggagcttgcagaagaaggcagggtcagttgtggggagctctggttggaggtggagggagtgcattccaagctggaggagctgtccagggttctggagacgaaacggagcccgctgggaactgtcctgagccccggtgctgaaacagatcgcggttctcttctcggacctcccgagaggcgctgtccggatatttggtgctcccaagcagtcagccctgctggtctctgctttccag

SEQ ID NO: 152274 - DNA, 500 bp, Homo Sapiens
tttgctgaggccattcattcatttattgattgatgtattggtttattctttgatgcctttattgattcaacacatgcttattatatgcctgctgtgtgccgggccccagaccaggcgctggagacacagcagtgaaaatactaacattgtttctgccctcacggagctcacagtgtaacagggagacaaatagacctgtcagtagataacatgaaaataattggactatgtgctgcagacacaatatcccaggtctatgagaatgtcaatacagacttcacgtgggaaatggtgaggcaataaggatcgtttcccttgatgaaatggagcttgcagaagaaggcagggtcagttgtggggagctctggttggaggtggagggagtgcattccaagagcttcacttgtgggctgagagtccctgcgtgggttatttttctgcctttctcagggccttgggttccccaaatgtcacatgggcacagtaacacccatgtcctg

SEQ ID NO: 152275 - DNA, 615 bp, Homo Sapiens
tttggatggatgtattggtttattctttgatgcctttattgattcaacacatgcttattatatgcctgctgtgtgccgggccccggaccaggcgctggggacacagcagtgaaaatactaacattgtttctgccctcacggagctcacagtgtaacagggagacaaatagacctgtcagtagataacatgaaaataattggactatgtgctgcagacacaatatcccaggtctatgagaatgtcaatacagacttcacgtgggaaatggtgaggcaataaggatcgtttcccttgatgaaatggagcttgcagaagaaggcagggtcagttgtggggagctctggttggaggtggagggagtgcattccaagctgagccaagctatgacacctgagtttcctgcctctgtgctgcctccctgttttccattcccggttctcagcttcacttgtgggctgagagtccctgcgtgggttatttttctgcctttctcagggccttgggttccccaaatgtcacatgggcacagtaacacccatgtcctgttgaaaattccggacttgggccaggcgcagtgactcacgcctgtaatcctagcactttggaggcggagg

SEQ ID NO: 152276 - DNA, 392 bp, Homo Sapiens
aagattgctgtgaaagtttaatgtaattatctatttaaagctgaatataacaagtgctaaataaatattagatatttgttaacacaacttgggaaagcaggtggtgagggttgtattagcttcctagggcttctgtaacaaatgtccacaaactgagtggcttaaaacaatagaaatttattcttcacaatctggggcccagaagtctgaaatttatgtgttggcaggaattcactccctctgcattccaggtgcctatatccctccaatctctgcctccattttcacatggcgttctctgtgtgtcttctcttctgtctctttaaggacacttatcattgggtgtagtccaggatgatctcatcttaagatccttcacttacttacatctg

SEQ ID NO: 152277 - DNA, 474 bp, Homo Sapiens
  misc_feature (122)..(150): n is a, c, g, or t
  misc_feature (399)..(413): n is a, c, g, or t
tttatttacttttgctatttgttttgtattgtctaaactttgcttcaactgaagacagtgtaaggagttgaaaatacaatcaacatagcaatggaaagcaatgcaaagagggtaaatcttgnnnnnnnnnnnnnnnnnnnnnnnnnnnnnaaataaatagtactgtgatactttaggtgtgacctctattccacatgatagttagaaccagaaaaacacttttgctttctagttatactattggttcattgtaaatgcattaccaaaagacaatatgaaaaagagcaagattaagtttttctaacattgtccacttcaggggcaagcatgcttggtatagagctctagcttgtgtataccttaaactgtaacttgcaggtgtttttcagttgctgcacnnnnnnnnnnnnnnngctcagtcccagtaactatctcaaaggtaattgctggaatatgcattttgaaatacggttt

SEQ ID NO: 152278 - DNA, 485 bp, Homo Sapiens
  misc_feature (384)..(384): n is a, c, g, or t
catttgagaagttttatatatttttgttaaataaaattgaattgtaaatgtttaattgcagtaaagcatagtgaagaaaattaaaaatcacttataatctcatcactccaagatacaatcaccattcctactttgtgactttatacagtgatagtcgtgtacgctgaaagtttttgcaaaattagaattgcacaatttcgtattttgctttttttcacattatatcatgccgggaactactcttcagaactcctttttatggttgcataatgtttcatttctggttacaccatgatttaacactagccccctataatgttttctaatttttcactattttaagaaacattgcaataaatatttgattatcatatacatttttgnaatggcgtttttggagagcttaattaacgggtatttaatgggctaaccagcatgaattctttctactttacactttaaatcatctgctaactcttcactca

SEQ ID NO: 152279 - DNA, 704 bp, Homo Sapiens
tttttcagaggcaaagtttactctttaatgaaaaactataacaaacagtgctatttggcaatataatcacattcaatatgcacagtacacgacctcttgaacaattcttatccaatcttcacatcagcccaggatagaaggaaggctgggcagagattatgatgctggttgacaaagaagctgagtccagagagaggaaaaggaattgccaaaactcacacatctggccaggacagtactggaaatgcggataactgctgtccctgaaagaggctggtaagtgatggagtttaataggaattgggtttgaaggacctctgttgccagaaagcatgagtatctctaaaggcgaagctgagtcagaggttactagaacagaggcatcagcaaaggatgggagaggtgacgagggcgatctctaagtgtacttggcccaggcctgaggagggcagctgattcccccagcaacagaatgctgtgcctgaggctaactagtcattcaagtctgtacataatctccaatgtcaaaactcaacaagcaaccttaagagagaccactaagtctactgcatgtctgcagggtttggcttccctggactgtgaggtcttccagggaagcgaccatattcatagatttatccccagtttctagcaaggcctggaatatagtaatattgtaactctaatatttttgttcagagcaa

SEQ ID NO: 152280 - DNA, 382 bp, Homo Sapiens
tcttgtcattctgggtgcacagaatgtgtggcgtggggactcgccccttcagacgaagcatgtgccatccagtcgaccagtgtcccctcctctcagctgtccactgcagccccgctcattttccctgcgggctggccctcccagacacttgattttacaacccgggtcctcgagacaggtgtctggggagaggaagggaaggagcccagtggccacagggtggctggtctgggggaggtgggttggccaacatgatggtcctgcccagtgggagagggggcagatgactggacggggtcagggctgcaaggacgccgagaaaaaaaggaagtgcggcaagcccagagccgcaaacgcaccctttccacctactttctcaatg

SEQ ID NO: 152281 - DNA, 305 bp, Homo Sapiens
attgataaaataaattggtagcttccccgcaaagtataaaattaactatagaattctcatcagatgcttgttttaaactctctctttgccgtcaccagatcagctggttcaggtgatggggtatagtggtagaggtgacaagcagtagtgaaaatgaacctgttacctttatctcaaattggctaagagaatttctgtatccactgactgtgtgtaactagaacatgctagtgtagtggcccttgttaaaaaagctccctgaagccttgagctgatttgaggtggagggtagaggagtgtgaggg

SEQ ID NO: 152282 - DNA, 515 bp, Homo Sapiens
aatctcattcagtcttctagtaataaatgcttttttaagtaccttctacagtcttcctacctgaggggttcagaggctgctgactcacactgctaactctgttactgacaaaagcaaatcaataactctaaattctgggctgatataaagaaaaaaacaatattggatttggatttaatctgggtaaaatcagccttctgagaagggctaagaaacagttcaattaactgtataggtctttcattagaccgagacatcactagaaattctgggcactgctgtttgtggtatttgtctcagagtagcttatgactgttttggttctagctttagattttggattttcaccagtcatgtgttaatttacattagatagtaaagaatggctacactaagactgaattatcttattagtctggcaagcatataaagtatacttgtatgtaatgattgccaaggtaacagaattgctgacatctgtctaaaaagttgtgactatccaatttagatgtgta

SEQ ID NO: 152283 - DNA, 547 bp, Homo Sapiens
  misc_feature (526)..(526): n is a, c, g, or t
ttgtataaaataacaaattttatttctagaaaatattttacactaactgtgcacatgcacacacccacacagagcttaaccacacatggatttcctttaataataaatctaccacatactattatattacaatttataatagcgtttttgaagacacaatggggaaagctttgtcattcatttataaaccgtccataaattacaaaagaaaggcagtctgaaaagtatgtataaagagtaaaaacaatttacaagtggacaagaattacaaaagagtaaccatcaaatacatctgccagcaactttgtaagtaagtcttttgttcaaatgccaatgatgaagatgggtatggactcatttggagcagatttaaattgagtctggttttggtgtggcttatgcattatgtggattacttgtgtgccattcattgctgtgtatttgggtatggcattttgacaacgaaagtaacagaaaaccatatgccacagaatagaacattaaaagcaatgaagataatcggctntctggaagggtggagtactgg

SEQ ID NO: 152284 - DNA, 473 bp, Homo Sapiens
  misc_feature (459)..(459): n is a, c, g, or t
ttttcatggtgtaattttttttaatggtgaagctataggaattgactctagagataccatatcaggatgtgggtgacctgcctgtctgcatctttgcaggtcctggaacaacctgtactgtgtgctcaggaacagtgagctaaccttctacaaggatgccaagaacctggccctggggatgccctaccatggggaggaacccctggccctgagacatgccatctgtgagattgctgccaactacaagaagaagaagcacgtctttaagctgaggtgaggccttcctggcctttgaaagctcgggttgatggcttgatttggcattagtggcagggcagaggccctctgtaggggaccagtgccaggcctgagctgctcctacaggggtttttcaaatcaaagaggctgatggtccagactttgacctctcagaaagtgctgggctgcctgagaggggtnctgatgttcggctc

SEQ ID NO: 152285 - DNA, 481 bp, Homo Sapiens
  misc_feature (40)..(40): n is a, c, g, or t
actttgaacctacaattttatgttctgaaaatagttattncaatgcgacgcgcacccataagcatatgccccatcaaagcttcagaagattttccatccaagctccgaatcacttttggagaaagtacctaaataaaaagagaaacaaatccaggagatactgtacggtttgaaagaaaggtaatcaaatactcagaaaaagtttgttgatgacttaaaaaggataaataaaaagtaagactaaagaaaattagtatacccattaataataaatctttagtaatctataaggggaagaatgcttttcaaccttatacactagaagcatgctctttaaaattaatgcaacaggatgacgacttgatgtagaaactatatgtggaattatagattaaaatgtgattgaaacatatttagaaaatgtgattatcttcctgatcctactccctttaggaagaacttcttaaactggaagcaggaa

SEQ ID NO: 152286 - DNA, 448 bp, Homo Sapiens
ctaagtcacaggatgtttatagtgaagggaacaggttaacaaggtttaccaaacagacccaggaaacaacagacccaggaaatgtcccgatgtcccaatatattaggaacaaaagcatttttagtttaagaagaagtttccctttaaagataataatagagatttttgtggcagacagtagttacacgacggttagtcccttgccgtgatggccgcttgcgggtggtccggagcagccgctgtcgtcacgctggctgcagcaaggaggcgtgggtggtggcggcacgagctgctgcgggagcggcagtggcggtggtgggtcccctatgtcctgtgtccccaaggcggctgactgtgccacccctatccttccgcagccggcagaacccgctcccaggcacggagcctccattgctctggaccctggtcccatcgccgctgcacgagg

SEQ ID NO: 152287 - DNA, 635 bp, Homo Sapiens
tttatttatttgttttaattgaagagaaaaccagaaaatgtagccagacagtagctgtgtcttttggcagtagaaataatctaataaaagcatcacgtttcaaagggggagagggagacccatctcagacattagtaacgtcattttagccccaaatatatttcattctgggtttatattttttggactcacacagcttatgatgattttatccaaagttcatgccaccagagttggaatttttaatacaaacatttagaccaggcagtgattggcagttctgactgttaataccccgtagtaggtcttctaccgtggtcagaagttaagatttattttgacaagctttctcttggttttgtagactagaagctttataatgggggttaccccatgactatatatctggcataggttattagaattcatagcaaaatggtagacagccttctcccatacaaccagagcccgcagatactggaacatgatattaatgaagttatttccagttattaccttctttaatgggtagaatctggacattggatttgaattacaaccagacaataagtggccatgaatgtcagcatctcaacttaggaagactcctgattaaaaacaacaacaacaacaaa

SEQ ID NO: 152288 - DNA, 694 bp, Homo Sapiens
gaacttatgcagcccaaagccatagtagtagtcatcacaggtcacgcggatctgatactcaaagtgggcaacgcccgtgttctgcttcagcgtctgccactgccggctggggttgatcatgcccgagtgagaagccttttcaataatactgtcaggttgaacggtgtcattactggaatcccacgcctccacaagcaacgtataggacctcggccaggcgaaactgaaaggcagcacgatgcggttgcggtcgttgccgcggctggccttgaggttgaaggtgttgcccccgatgacaggcgtggaccctgagccgaagctgcagggccccccggccgtgacgcgggactgatactccttgaggcacactttgaagtatgtgtcacactcgtcgcgggtgcacttgcggtctcccgggttccgggcgccgccgcagcagttcccgttctgcagctccccgttcacgttctgcatggacaggatctccaactcgaactgacccgaggccccacacaccttggctcgcagggcacagagcagggcgagcaggaggcttagggggcgcccggaccggccgcgcgtccgtggggaacgcatcgctgcgccgcgcgccgcgggcactcgggacgccgccgctgctgttcgcgctggtgctgccgccggtgctgccgtcgccgctgcccctgcggccgca

SEQ ID NO: 152289 - DNA, 542 bp, Homo Sapiens
  misc_feature (162)..(176): n is a, c, g, or t
taaagtacacaaacatttagtttggtcacaagttagatttaatcctgtgcgttttaatttttagatgtaaacaatggcaaataataatgaccaacatataagccagaaacagagcctcacacacagaaaacttggcaccaaaactcaagatttaaaataagnnnnnnnnnnnnnnngtccattaacatactcacgtgtggtgctagaaaatttaatacgatgcacagcagctgaaatgcgttatcttacagatgcaacctacattaacaagtaagttatataacaaaccattctagccacagacacttagtgtacttgcccttattattatgtacctgatgtccaaaaaagcacaacaatttaagactttgggcactttatgtagcagatatataaaaagcaaagcaggaattaagagcaaatgaatttaataatactgatataaggcagcttttaatctattcacaggaaaaggaaaaatttatattatctcctaaatattatagcatgtaatatgaagagttaataatctcgtccattct

SEQ ID NO: 152290 - DNA, 483 bp, Homo Sapiens
ttttaataggagaaaagacatacaaaattttattttaacgtgcatagcacggggcggggaggcgagggggtgggaagggaagggtcacaggagaatgattacccaataacccaatggggtacagaagcgtatacactctttttcataggggaaggggagagatggagaatatagacaattcttctgagggcagcaagtgattcttagggcgaaaaaatggacagaaattaacttgtaaatgattctctttagaatttgaatgagcccgagaaacaggcatcatcttgtgaaaaatccatccaggcgtagttgccttcctcagtcttcttttctgagctagatgagatttcggagaggggaggaaggcaattttgtttcttttggaaagacgttttctcgatcagattaggaaattctagagagagtgcctccctattcttgggagagaaggttagagggaccttgattctgaggcagcttcga

SEQ ID NO: 152291 - DNA, 516 bp, Homo Sapiens
  misc_feature (328)..(368): n is a, c, g, or t
tttatttccttggctgaggacgctctgaaatccagtgttcactaattcacttggtgttggccaattctccatatcactgaaatcactagccttgttggatttctttgtcttgagctttcctgcttttataattttgagggaaccgaattctgcctccagggtttccagcgggggcggtggcggacctgtcgtgtctggggacaggtgctggggaggctttttggtccagggatttcccttaggcggcagcagcggcggctgccgcttttccgcagggccagctgccacctcttcccgggcgtcttcggccggcggatcccgcagcaannnnnnnnnnnnnnnnnnnnnnnnnnnnnnnnnnnnnnnnnccccgccgaaagggcccccgggcccacgcgccttgtgcgccaggtgcagcgccaggggcctcacggggacagccgcctggggcacgctgcgtcccagcaccagcgccggcgacggctctccccgcgccccagcgctagtggcggccgc

SEQ ID NO: 152292 - DNA, 485 bp, Homo Sapiens
atgtatatcagattttaaacttcttaagaacatagtgctaaaataaaatcaaagtacttattttttcccctcaatagtagttggagaattgtaggtataagattggggtctcacctacctcagtggaggcaagtcattagttacaaaaaagctacaagccaaagttagccttggggctgcctgtcccaccaactaccaaaaaagactttggggagatgttcaaagaaggaaagaggagaatccagcctggaaccaaaaggcattgaaacacattttcttgtacttttcaagtctgtgcatatagattctgttactgatttaggatcttaaacagtttgtttattttttaaatgcctttcagctcacctttaataacatgtttctttgacttggctgaactgtgcctcagaagaattacaagcgggaataaggctgggataaggctgggtaaaaggttcagtgaactaatccacacgtggtccatg

SEQ ID NO: 152293 - DNA, 583 bp, Homo Sapiens
  misc_feature (194)..(194): n is a, c, g, or t
  misc_feature (197)..(224): n is a, c, g, or t
tttttcaggtttggatccaacaaacgtttactgagtccctacaaagttccaagccttttactttatactttgacacatttttatatcattttatctttaacaataaccctttaaggtaggaattatctgcattttacagatgataaaacaatcgcaaagaggttcattgatttgctcaagtatatcatacagcntannnnnnnnnnnnnnnnnnnnnnnnnnnnaacacacacacactatactcttagctgaggcctgtctgcgttggttgcttatcttacagcatttcttgtcttctctacttttggagcgacggctccccttttacaagcccccttatttcctctcctttcactagcccaggtgggcttttcttgttttaatactgcatttaatagcacaaaaaatcacgaatacaaagaaactggcaaaggtgtttgtcaatgatatccctgcctcctccacttttctgctttcatacccatatatgtaatgggctacattttttagaaacttttctttttccccccaaacatataactgttatgtgattggtcaattgaagctgaaacacccatggaga

SEQ ID NO: 152294 - DNA, 406 bp, Homo Sapiens
taatacatcttagttatttttattagtttattcatacggatgaaaaagtttaggattttgacacattttaccagatctcatggaattttctttggtactgcacttgttcagttccccaatcctcaatcatggtagagctgtagttttccttatatgggtcctgctcaaattgttagaaattcttatttctaagaaatgtattatgactatcataaggcgattttcccatcaccacccctgctcaggttactaccaattattgttggaataacagaaagtgtttttttccctattcatcatacacatagctacttgctgcgattatggattctgagaacgtcttaggtgactatttgggttttccacgtgggccatcatatctgcaaatagtagtatttctgccttt

SEQ ID NO: 152295 - DNA, 926 bp, Homo Sapiens
  misc_feature (174)..(208): n is a, c, g, or t
tacacagtatttcttacaatttttaaaaaacaactacagaatccaaagacatacgatatgctgttaaagcactgataaatgactgctcagattcattagttcttacatagtaaatacttcaaaatgccaacttttcccttcactgcacaattactaacattgacaatttacttnnnnnnnnnnnnnnnnnnnnnnnnnnnnnnnnnnntctctctctccatctttactgttaacatcttttccagttaatgtgcaaaattcttgcattctaataaaaatataaagatagatttgctcctattcctccctcttctccaagatgtatcatttatttgatatgtaatacaagtttagtaacaattatgccatgtataaccattaaatagtgtactactgtatgcattggatcatttgcatatttcattttcataactgcactctctatgcataaatatatttggagatgctgaggggggagcagtggcaggtggaaaaagattcacacatcagtctccacagcctttgcattagaacagttgtttttatctgtctcactgtcatccccctttccctgacacttctcctcctttgcacacagagattccttaactccttcttccatctctagatactctgacttgtcccccagggaagaagaagtagagctccgaaatttcttgagcaaattagaggggaggtatggacaactgactgcattctgcgttagctgtgtctgttcctcattttcagtctctctgtggtagaaatagttaaagttagagacaatcactggcactggcaaagcaatggttaagacacccgcaatggcacacagggaccccgacaatcttgccccctacagtgatgggcttcatggtcccatagcccacagttgtcatggtcaccacagcccaccaaaatgcatc

SEQ ID NO: 152296 - DNA, 426 bp, Homo Sapiens
  misc_feature (137)..(154): n is a, c, g, or t
ggaaaaagccagggttttgtaagcattgagacccccaccatttttcccgaacaccttcaaaattgatgcatgctttctagatgcaaaaaaagaaagaagaaaatccaaacagatataatcagacgcactgcagtgcnnnnnnnnnnnnnnnnnntcatacctgtcaaaggaaccgtatgtaatccgtgcacacacacacatttcacatttacgttcagaatgcaatacatatcattaggatctgtctataaatagactcgagcgtgtgtgcatcgggacttagtcccaaactgggttttcaaacgtgggtgatgagttctttgctctgatcagttactcagaaggtgcctgaatgtgtgggggtgggagcgtgggagggggctgcctcctctttctcctccttccctttggctctccccctcctaa

SEQ ID NO: 152297 - DNA, 411 bp, Homo Sapiens
gtgtgagccaccacacccggcctatattgttttgaaagcatactctatatatagttattggcagaggcacaggcatcctcagcagctgattcaggagatgatggtaaagctagctaactatgaattaaacattcacatatccagtctacctggtccagtaataatacaaggaaatcttgtatttcaggaacaaatcaaggttctcttaattttttggcttatatacaatgaagtaaaaacttgataaacatggtttcaaattgaggaggagagtcttggatgtatgttttaatatgtataccttataattctgcctctagccaaatgctatgtttgcaaaatgtggcatctgttagtttttattgtctgtgtcttctttgtttactataccttgggtaattttgtgttacc

SEQ ID NO: 152298 - DNA, 485 bp, Homo Sapiens
tttgagctaaaactcatttttcttttggcattttcttttcaatgttcttataagcaaagttcatccatgttgtagcatgtgttcaactttattttttcatcgggtaatattccattgtatggaatggtagtactacattttatttatcatgcatcgattggtggacatttggatcgtttctacttcttgactattatacataatgctgctaggaacttttgtgtatgagtttttgtgtggacatatgttttcatttctctttggtatatgcctgggagcagatttgctggatcatatgaaactctatttaacccttgagggactcccaaactgttttccaatgtggtgacacaattttatatcccatcaacagggcatgagggttctgatgactccacatccctcagtgctttttattatctatcttttaacttagccatcctagtaggggtaatgtggcatctcattgtgattttggtttgcat

SEQ ID NO: 152299 - DNA, 446 bp, Homo Sapiens
gcaatttagaaaactgtgtttttatttcattagtgtgtgacggtaaatctaacaacacatgatagaatattgtcatacacataaaaggaatgcatctaaattggtattaaatatagctagaaacttatgattttaacccatagttactgaataagcattcacatattttcttcctactgtggaatatggggagaggacagtggaactatggcatttgaacgagtaaataaaggattatcagaaagtcctggtcagatgccttgctactccatcagggcttttagcagtcagaagggactcatctgcccacttcctgcaaatcctatatccattttcagagaaacacaatgtaggcatggctaaggtgtgttggaagtataaggatcagaaagatacactgtttatgcagcagctataattctgtacccctgggtaataaagcacat

SEQ ID NO: 152300 - DNA, 516 bp, Homo Sapiens
  misc_feature (396)..(436): n is a, c, g, or t
  misc_feature (505)..(505): n is a, c, g, or t
tttaattgcacgaatatattttttggatcaatagatagcaaaaaacctaacttggtataatttcatcttcaaagtaagaagcaaccactctttgatctcttctaggaaacaaaagtgattctatttaagagtttggtctaggatcactgcctatgagggggcttcagggaatgcccggtaaggctcttgggcacaatagtgctggatgggcctttagccagactgccactcggtctgcgtatccagggcattcagaagcatttgtgtagctgttttggaaagaagggcactggaggcgggccttttctacattaggtggtacaggttcaaaatggccagagaggatagcaagggggtagaaatccagagctgtgtgtcctctggagagagggcatnnnnnnnnnnnnnnnnnnnnnnnnnnnnnnnnnnnnnnnnngctccccaaggcaggtcaaccacagccgctggctccatttgagccacctccccaacgaccaaagctcanggcagctcatg

SEQ ID NO: 152301 - DNA, 558 bp, Homo Sapiens
tttttacttttcacaacagcctttattgcctgcagacttacatgtatagtcctttaaacaattaactgtttagaaaatggttgtttctctcaacccttgagccagttattccacgctggtaagaccctttcacagaaatgtaacaaggtgcattttatagaaaacatctaattaaatcaccagtttcatgcttttaagttgtatctacaagtgcaaaactgcaacacccaaatgtttttagtatctaagtcagatatccaaaagttagctccataatcagaaatgcgcacaccactgttctgataataaaggcacattttccaataaccaattataacaagaagtgcagcattacctaaattgggtgtgtcatcttcccctcctgggtcacaggatgacacctggggatgcgatgccgtgcctgcacttggcgatcccaggagcacagaaatgcaccagacagatcatgaagggctaatgcttggaaaccacaccatttcctgacagagtgaagggatccctgtggatttatcaaaagggaggagggaatttaagcta

SEQ ID NO: 152302 - DNA, 462 bp, Homo Sapiens
  misc_feature (61)..(61): n is a, c, g, or t
  misc_feature (290)..(320): n is a, c, g, or t
attttaactgttaagtatttctgtggtagtacctgaatgatgaaattattagctacttctntcctcttcaccatagatactgataagtttctgtcttttgtcagtctgtaatgccagcatagtcaggtgtctttgatgcttttcatccaggtaaattttgtgaagcatgtctagcaaaatctggtagcaaattatttcccttgctagaagagtaaacagaaattaacatgactcaattgaactcctttccaaataaattctgtaacaatttagagctgaccatgagactnnnnnnnnnnnnnnnnnnnnnnnnnnnnnnntatcgttttaaaagtaacaacttagtttagggctaagagaagataatgttgcttctcttgggcttctgttaattttcaagttctaatactagagctccagtacttcttcaaatactaccttcacacactcaattttacatga

SEQ ID NO: 152303 - DNA, 575 bp, Homo Sapiens
  misc_feature (36)..(36): n is a, c, g, or t
atggctgcagtggaaccctctgactgccagggtganatagtgctccagcaggctgcggtagactcgctgccagagtgggtcaggactggcccagaggacagggtcgtctcttgagagtcctcccagctccagggcttgattttaaagcagtaacacgaggatataggttatatacaggctcctggaaggcaggtgccgcagctcctgtgacaccccatatgcctgagcaagcttctccagcacaagagatgatgcaagtatgaatgggtacggggggagcttaaaacctgccaacactgagacttgatgccaggggccgtgcacccgctctgccacctgctaggtctgtgcaatggtcagagcagaggtgtgtgatgagttcagctcccaagcacatccacacttaggaagtgttctgtgtgtttttaaataatccttaccatgtaaagattgtattacatttgtatacaaaatttttttgcattttacttttgtaatatttggggttttatagatttttattttatggccaagtatacttttgtaaggaaatgttgaagtcttgagtattttta

SEQ ID NO: 152304 - DNA, 382 bp, Homo Sapiens
tttatctctgagccctttatttacataaatccatattaataccattctcagtttggaaaacaattttttaaaaaattgagaaaatatttttgtgcaaagtaccaacagaataacatacacagcaactatttacatggggcagacgaaggctacaatttaagcaattgccagattctcaggattgagtcctgatttgagatcacagggagtaagctgtgacatcttggctactactgatcaataacaaggacattattgagggcttaccctgtgtgaggcactgtgctgacagcacatattatgtcaaataaccctcaaaatgatccttcctgccatgtgtcattatcacaatgatttggctcttcttaaggcagtttacttt

SEQ ID NO: 152305 - DNA, 558 bp, Homo Sapiens
  misc_feature (521)..(521): n is a, c, g, or t
tttttttcattgaaataaaaaccaaacagctttgatagaagaaaaattaataaacaaataatggataagagggagatgaagagaaacagaatgagagacagagaaacgaaggggatttattggctcatgtaacagcaatgtccagaggttcaggctggacaagatccaaggactccaacagtgatcccagaatttggtctgtctccatctctcagctctgctagtcacttctctgagggtctgcattctcagccaggctctttccaaacagaccacatggaaagtagatcaccagaattggttccaattccttcctttcaacgaacgcagtgaaagatggtgcctcttccacaacagttctttaaaaaaatcaaaggaattggacctaaggagctggtctggcttgagtcctaggcccagagggataaatggtctgattcacttagactgggtcatctctgacactgtgcgctgcaggttcccaggagctgatgatgtgcctctcttcccaactccatgtntagtgatttcaccttggtagcttaaagttggccatgg

SEQ ID NO: 152306 - DNA, 634 bp, Homo Sapiens
  misc_feature (382)..(391): n is a, c, g, or t
ttttagtggggtatttttttattgtggcaaaatacacggaacacaaaatttaccacgttaaccatttttaagtatacagttcagtggtaccgaatacattcatattgtgtaaccatcaccaccacccgtttccaaaactccttccattgtgtaaaacaaattctgtatccattaaactctgactccccattgctcccttcccttcgcctctggaagctttgtctctataatttcgaccactccaagcatctcatataatcatacagcacttatttgtctttttgagattgccttatttcacttagcataatgtcctcaaggttcacccatgtagcattatgtcagaatttccttcatttttaagcctaagtaatacttctgnnnnnnnnnnaatatgctctgatagtatcttctggtaagttaaaactacccaaccacccacttgcattctttgtacttttttcctgtaatctttaactgaagttttgttactgttttttctcattcttttctattttgggagattgactaagttaaaaacttttttctctaagattttctccaaaagtttgtagcattatgaatagtctaatcacctattctagttccattctcctaaacctcagaatggtaa

SEQ ID NO: 152307 - DNA, 444 bp, Homo Sapiens
cctgtttcagaagccaacaacccatttgttactgccttaggcagaggttaaaaatgccctcaaccatggtgaacatgacagtagagggcacctagtgagcatgacacatcctcaaatgtcacaaaaggacacaaatatccttgttgcagtattgcttcctaaagaatatggggacagtatgcacacaagcaagaaataacttattccgtatttggtgggggcaggggaatgctatagtcttgacgatctagaattctactatgtaactctaggagttctctcattctatagtcactccactacagccaaacagtttcttgtgaaattcaaacccagcacaatcatcatttttagaaatcaaaactgtatcaagccaagggtccatcaaaccgtgcaccttttaagaaaaatttagaaaaattctactgcagttggcaagcatgg

SEQ ID NO: 152308 - DNA, 448 bp, Homo Sapiens
tattcttcttaaacacaggagagaagatttattttacatcatcaacattgcaagatttcagaatgcacagtattaaacttggccttggggtgagagggaggaggacggggagggataaaattgcagctttcaagggatcacaggttgagattaaacctgcacacaggaaacaaccagaaaacaactccaaaccatgaatcaagccatgtgcaacgtaggacatctagttccacaaagtgatggggggatgagcacagggttcaagtctgatcattggcagaagcctagtcataatagggttgcctgccattcactgagtttcacccagctggtactaagcccttgcatagatgagaccatcattattcaacagcccaatgaaataggtacttagccgtcccattttacagataagaaactgaggctaatagaggtgtagcaacttact

SEQ ID NO: 152309 - DNA, 439 bp, Homo Sapiens
tttgtttttaaaacatgacctttattctcgaagctcaaacttgatttccaggtacagcaggcctctgtaacttttcttggcagtgaagtcatgaagtctcctgtcctctaaagctacagaaatttaacctggaagcaagcagtaggcactacgcacagcacagagggaatcctggggtgtacgctgtggctcccacctgtccgccaggtcattgtgacgcaaacgctatggccacgtggaacaccttcccccggtcaccctgggaggggtcgctccggcgggcgtctgctggagggtagaagcggggaagggaggcagcggcggcgcccaggcggcggtaggtagccgggcggcgagggcgcccgcaccccccggccgctgcgctgcgctgcggtgcgcacgggctccgccggttgctattccggctggtggcggccgc

SEQ ID NO: 152310 - DNA, 542 bp, Homo Sapiens
caaagacaaagtcttcaatgacaattttaatgccttcccactccaataaacagaaaacattaacgtgaaaacaagcaaaccaagtacgttggaatatcaaaattattgggagtgcaattatcaaaaaagcaagcacttcactgactttccttactgactttttttcatatcaacttttggctcaataaaaccacaactctagaaattaagtgttattagtcatttgacgcaatatttgatactgctttctatgcatatcataactaaaagtacagttttagagaaagttttaagtcacacaaatttcatgtgtagagaccaacatacgctgaaatcaaagaaaatgccagtcatgtcacagctcacatgtaaaaacctggtaaaataattttaaggtcttaataaccctgataatttaaaatcaagtgggaaaagtaaaagtagtgtgttatgtactttaagtgctgaaagaattctgtctcccagacagcattcaattattttcttcaaaggcttttttttcaaagttacataaacattta

SEQ ID NO: 152311 - DNA, 205 bp, Homo Sapiens
ccaatggctggcattaaatgtattcaaccacactgtttatatattcgcctctacttgacagaaatgcaaagctggaacagcacctcaacaagatgcaggagcaaagcacacagctctgagtccatagatgagtgggcacatcaggcctgtcttcctttgcccctgtgttttactgcaactacttacatgttgagatcactttgcc

SEQ ID NO: 152312 - DNA, 447 bp, Homo Sapiens
tttacttacgtgagtttattgagacatagccccataagtagaggagcatctgtacttgaaagtgagatactgttttaaatagttatgagcgactgagggtaaaacaaaacaaaacatgggttattcccaagataataacctggaacagaaaaggaatcaacataatacattcacagccctttcaataagctggttacaagtggctgagctcgttagggaaggaaacaccaagggaagttccctagaagttctgagagggcaaagcagtctgaattctgtgtaactctatcctcattcataccacattttgggtggcttcggggaatttgagatagcatgtttaaagatgaacttagtggctgacttcaaccaaagagaagccctgtttgtaaaaagccagtcagagctcaccagagaatggtaactgcaactagtctttccttcctc

SEQ ID NO: 152313 - DNA, 654 bp, Homo Sapiens
  misc_feature (384)..(393): n is a, c, g, or t
ttttaaatacaaaaacaaaagcgaaacctttattcttttggcttgattgtaatgtggtttaccgttctttatggtaacagcattttcctgcatgcatttcaccaacacactacaagtcaatagcttcagtataaagaatctacatttattgttgcttgtgaaacacaaagtattttgctgtaactggtaatataacttcactacctggttttgtgggagaggaaaaaaagctgggatcccatattatatctgatacagttctagtgccatatgggtcaataagatctatctgtgtaaacaaacattggaaaagactgatgattactgaataaaaagactaggtggaaacattggattcaagcaatgccaagagtatcagctgannnnnnnnnnctttaagcctctttcaatgataaggcattactattgaaagcaaataaacattgaactcagtttgagatttgtttcacattgaaatgtgtgcaagtttacagtactaataaaaaagcagaaacctatactgcatcctagtccttgcttcttattttgtgaagtgcttcaatttaaaagtgctaggaacagaaactaacaatagtgactgtgacatccacctgcagatacttttaatttctcattttacgtacaaaaggctga

SEQ ID NO: 152314 - DNA, 474 bp, Homo Sapiens
aaaactgatcaagtgcaatttaacaattttttaatttcgtttttcccctttttatgttgtatgtgactgtatgactgtactcaaagagcttttaaagcagtataaattgttttcttgtctttccagttgagacatttgggaaatgatgaagtgcacattgtttggtcagagcatactagagactacaggagaggaattattcccacagaatttggtgatgtccttattgtgatatatccaatgaaaaatcacatgttcagtattcagataatgaaaaaaccagaggttcccttctttggtcccctttttgatggtgctattgtgaatggaaaggttctacccattgtggttagagcaacagctataagtgcaagccgtgctctgaaatctctgattccattgtatcaaaacttctatgaggagagagcacgatacctgcaaacaattgtccagcaccactgagaaccaacatct

SEQ ID NO: 152315 - DNA, 345 bp, Homo Sapiens
gcaagacctataactttatttaactattccaataatttgtactagagtttccaaatattaatatttgttaataaaaatctctcgtttctttttttaaattaactgatttacctcaagagtgccttctaggaatgtttggacatttgttcaaaaacatgactaccataatccaaatttctgatttctataccaatttaaatcaccaatttacaaattgttcagttttttccttaagaaacaaaaaagccagtttttttgaagctactaaaaaatttgactgttaagacatgtaaatcctttttgtggccctagtgcaagtcactttatgactgctgacctaagtgc

SEQ ID NO: 152316 - DNA, 437 bp, Homo Sapiens
tttttggcactttttgtttatttacaaagcaattcaatttcttggtgttcaggagctccctgagaaacgggcccaggcccacctttggcacaggcagagggcacagcattagcaaaggcccaagggagggaccccacagagcagcctccgagaagagccaggagtccctcgggctggggaagtgagagggcattgaggcctgaaggaagactgggctgatcttcagacttcagtctattggggggcagggtgagtcctggagagacggtgccccacgcagccaaggcagggtgagggaggtcacacctcagcacattctcttctgtgtgacgttggagatcattaacctgtggaccctaacagctgccaccaccaccttcaggaattcaggtcctccctgcctggcacgttggccagcactcccacggcccagccca

SEQ ID NO: 152317 - DNA, 522 bp, Homo Sapiens
tttgagacttacatgacttcttttaaaactatacaaagtaggagtcaaaataatgcagatgtttcaaatatgagaaactcatgggaatacaagtgctgttatatttcagattggagctcatctgttctcagaagctaagcaggatcaggcctggttagtacttggataggagaaagctcctggaaaagttagcaagacaactaactagaaatcagactaaaaactaaatggaaatcagataaagccacctaatgcatagatacttatacaaataatttttgtcttaatttttaaagacttataaatgttcccaatatgaagctgtcggcttagttttgtccgtttgattgggcaacatttttgttctggccccaagtcaaggacagatcttcgtgatgaaactcattatacaatcctataaggtctaaccatgttttttggatttcagagacattcctaaataggtatctgtaattctgtctacctctacgaaaatcatacggtcagacaaaatctgaaact

SEQ ID NO: 152318 - DNA, 587 bp, Homo Sapiens
  misc_feature (139)..(153): n is a, c, g, or t
tttaaaaaaaaggcaggcgcagcagcagctataacagataacaaaaactttctaccgcataatcctcgccctcagaatgacaaagaaatgatattgacttacccccgaacggatgatgtgtttgataagggagggaaannnnnnnnnnnnnnngaagatttctgttgaggagctgcacagacagctgcaattcatgggcgacgctgattgccagaaacgctatggattggcatggggtctgcagctcacagatccctgatcaatacccctacactaacacgccagatggtttggggaaggacaaaaataaaatagtccaaatcaacccaccattatgtttttttgtgtgtgtattgctctgataacctagttgtagcataaatgtgttctaccctgacacaaaacctgacaagatttcgagcattggggtagaaattagcagctctcctctaccctagatttgggtcgtggttactgttgtatagtaaaaacaaagatattgggccccttatgcagattgggtttacttgtggtctgtttatctttttccgtgaataatttataaaatatctcttttaattgaaaaa

SEQ ID NO: 152319 - DNA, 565 bp, Homo Sapiens
cttccttgcttgctgcttaggttatcacctggagcggaattacaggatgttttgttgtattgcttcctgcacttctgcaggcctttcactcttctgagcctgatagtgcctgctagagttggtggtaggaggaagagtggatttcttcctgagggcacctgctttctcctccaaggcaggaggactgaggggagggctgtgagactgtgaatgtgtgaatgaggggcccaccggctatcaggctgcagtgagctaatggtgacagttttctaggagaggggccagaggagaattgtttgctttaccctgtttttcactactggattttgacattttcttctaatgctgacccctcatccagctctttggcatgctgggttagtagctgccttttcctcagtgagtccctggggaaggagagggcttcttgtggctatctggaacccagcaggttcccgcacattctgagccctcgcccccagggagcccacttagtggctctgtgacccatgaagagcccaggagcccccagatgtggcttgctcaggacgggagtggcggccgc

SEQ ID NO: 152320 - DNA, 393 bp, Homo Sapiens
tcactttattctaaaatttacatgggaaagacaaatgagttagaatatctaaaaacaattgtgaaaataaaggataaagtaggaggaatgagtctgcccaatttcagacttaaacagctacagcttaagacagtgggactgacagaggaacatacatatagatcacatacagctcaatctaacacaatggggaacttagaaatagactcacacaaatatgctcaactgatttttaagaaaggtgcaaaagcaattcaatgagaaaagataggtgccagaacacccgaacatactatccaccccacaaaaaggaacctcaagttaaatctcacacttgacataaaaattcaaaatgcatcacagacttaaatgtaatatgtaggccaggtgctg

SEQ ID NO: 152321 - DNA, 633 bp, Homo Sapiens
atagctaagatttccctcttgcatttgcttttattgtctcatattaacaattttttttacacggacacaaccctctgacagtctttccaaatattaaaatcatttgaatatgtatgctgtgatctgaacactgctcaagccatcaagcagtcttcatacagtttgcattataaaatctcattaaattctccaagaaaaaataagttgaagaattttatttcctgaccatgcatcccctggatttctgagtttcagttcagattgtagatgacaatataagctgccttccgaaattgtcaacatctgaatgttaagtccattttccccatggaagaagcccgtagttccatgaagtatggattaccatttgtatttttcactaacagtaaatgtatttttcttattaattgtttgccttaggaatgatgaattacattttttgttccttcttaccataaacatctgcattcctcagctcagccttccttgtatgttgtttctttataaatggttgagctgctgatgcaggtattgccaagctaacagtacaaatcattttaaagaggaagctggcgcgtatggcagccgaggagcacactctgcaggacactggacaagacagtaaatattcaa

SEQ ID NO: 152322 - DNA, 375 bp, Homo Sapiens
cagttctagactcctattctttagcattccgttacgtccagaccatgtgacaacctccattctacaaatatgtaaccacaaagaaggtgagtggggaggcaataagaacccagactaacagaacatcagaaaagctggcatacgcacacataaagaagggggagaatataggactatatgggagggaggaaggtcacagaaaatgattacggttttgatgttgtatttgtgaaggtgaggaatactaactatatttctttagtctttgaagatcaccatatttagccattatctatcaactgttaagccttgggtaaacttcatgtccttgcaccactcaagttacacattggctctgtgaaatatttgcaagtg

SEQ ID NO: 152323 - DNA, 699 bp, Homo Sapiens
  misc_feature (354)..(368): n is a, c, g, or t
tttaagcatttttctgtaaaaactgtccaagcttatgttttgctggtgattggtttaaaactgatttttatgtatccaaatgctagcataaattagattgactatcctggtgactgtagtagttaatgtaacacattttgtataaagtacagtttatatagtatttaaactaattcagatgaagttttatttcttgaaaacagttatttcctttttgtttattagcatgtgtataaacacaaatcacatgttcataaataaagttaacattcttttagccttgtgtgttccggcatgtctgtattacatttataagaagcagtttatttaagcttatttaggtttctcttgtcnnnnnnnnnnnnnnnaatactttaaaattggctttaatttttaggtagaattatctgaaatagagatattagataaccttgttgtccccatcatttatttgcttggggtacatttgctggcatttaagatgagaatatattcatcaagcataagtagtgcccatcttaggagatttagagtcacgtggattgtacacattcacaaaagcaaagtaaatagaggcgcttaaccaaatttttcttatcctggatagtaaagtaaaatgtatagttgttggtattggaagcgaactctaattcagaatggatggctggttccatatttgcgcgtcgtgggttttagtat

SEQ ID NO: 152324 - DNA, 554 bp, Homo Sapiens
tgtagccattttgatgatttttggttatttccaattgcaaatgtttgatttaaattgaactcacaattgcctactaacagtaagatttttaaatacaagatctttattatttcactttacttgacaacatggaatcagagggctttttggtcccatcaaacctttggataagttacaatttgaggggattttctaactataaaacaagggctttcaacaatcccttccaaagttgagcaaaattaaccttactcttcaaatgactaggcatttaatgctctcaaattttagaaaggattactatcaaagactggaaatgtcccttttctaccagactttcaaggctcttagagtcgctgttcattcagtccagtctccttaaccatccaggtctatttcttaagttcctgtaatcatgtgatgcctgagaccagatcctgaatttcaaaaataagaaaacagaattgtttatgaaaggtattcaaccaaggttttctggctgtactttagctaattagaatacctcatgtatgaatattcccctcgtgccgaat

SEQ ID NO: 152325 - DNA, 421 bp, Homo Sapiens
tttgatttttaaaaattctgctttataaatattcaaagcttcacaagtaattgtgggataattgattttctgttagaataggaaattgacatttgattagaggaaacatttcttccttgttgggtgattgatgagtatctttttctacccgaaatcattccttcaacatctgggttgggtcagtgtgtcagatacatgaagtatgtgccctatgatttcttttctctgtcagctttttcttcaccatagcagtttttaagtagctctgtggaatggaaatatacatatttagagggtgggacataggctaaaagaaagcttgtcacaagttgacactaggtcttcctaattgtcaaccagaggcacttactgatataactgaagcagtttttgtcctgtacttactcccttttgtggtctt

SEQ ID NO: 152326 - DNA, 370 bp, Homo Sapiens
ctgcagcccccagcccccctgcaggccacagccccagtaagtttggagaggggaacaaatgctgagcctaggtagggaccaccttggggaggaagccaaaatcacactgctcacccgagagcccctgccccgcgttggcacgcccccgcctggagtgcactcgtggccccgggcgctgtcaggtacccgaattggggtaagcgagttggtaactggacctccaaagccttcccctggggttgactttggaattgttcctacagcccggggactggtggttggggtgggaagaggaccaccaccaccaagggtgactttgagggagactagagcgcggccccccgacagctgtgggggagcgggggtgtgg

SEQ ID NO: 152327 - DNA, 728 bp, Homo Sapiens
  misc_feature (60)..(92): n is a, c, g, or t
gttgctttacatacacacagagttcattcttggaagcagctagtgtaagggtttctctcnnnnnnnnnnnnnnnnnnnnnnnnnnnnnnnnnccagtttctgtatagaagccccgaaatccaggctggtgaagcagggtctcagcttatgttttctgaatgcacaggttcaggctgaatagtcattgcttgtccataaaatttgctctgttgttctgacagcaaacaaactgcagtgctctctgttgttttaaattaaaaatataaactatacagtgcacctttcacagatgctgaataagttaaataaataagttacaatatgaaggctccgagggccacaataattaagaggtgaagttcgcctggtaccaggtggggctgcgaacttaagttaaataatttaaaaattgttacttagactattttaaaagttaatttaagagggaagaatatcccaaattctctttttgtaacctgtatttcttccctgtctgtaacagaatttcactgctttataaagcaaactaaacttcaagagtattccaagtagaattttgcatctctgatgcaccattggtctaggttttgataaataagtacaaggagtagaatcaaactaaggaaggatgattaaataattacccaaatcctatacatttatgtactaggaactaatttaaataagttaattacattaatggtacttagcttgttgggtcataaccc

SEQ ID NO: 152328 - DNA, 372 bp, Homo Sapiens
ccataaacaagaacagaaacaaccttagtttaaaacagaacaaaaaaccttcccccagttctgatctattaatgatatttgccaacttccattgtgtataatcttccattgtgtatccaaacacttacctgtgcctactctgtgctacagcttctgctgaatgactgcaattcagtgacttgtgggacacaggctctgcccttgaaaagctccccgtcttgtggaaaggacagatttcaaccactagaatatatatgataagctctattctagagatacgtttttaaacaaaagagtgttaggatatcctagagcaaagccaagttcattcttcctgtggacttaacaggatgtaacacccagatcgagcct

SEQ ID NO: 152329 - DNA, 549 bp, Homo Sapiens
tgatgaggggttctaattctatagagggcagagcagaatgggtgacatggggtctctttgattcctgctcttagtattgtctctatgttatgcttgactaaagagaaccaaaatagatctgggttatttgtccagcccaaggctgagtagctgtcaaactacctcaagacaataacccaaaggagcatcaaacctgagctttgtcagcacctgtacctgccaacaaccaagacaaaagacaccatcaatgcatattaacagagggcagggtaaggccatcaaatcactggattccctggggcctatacaaatgtacaatacaaatcagtaacaaaaaacaggctgatgtgagaatgtagtgaacgtggcagaggcatcaccaaggttccctctcagaggacctctttaacatacacaagttttcaaagacattttttaaagttttaagtaccatatttagttagaagatatatctaattttgcttcccagagttttttcccctaagggatcaatacacatgggataagaatctgctatgtactgtggca

SEQ ID NO: 152330 - DNA, 173 bp, Homo Sapiens
gatatctggacttagcagaatcttttcaaaagagtatgtaggtgggatataggaggtaaactaaagtgtaaaggccaggaaggtgatagaaagtcttgaattggctaaataactgtatttgatttatttaaaccagtctgttctgctagtaccaaagttcttgaacttcattt

SEQ ID NO: 152331 - DNA, 444 bp, Homo Sapiens
tttgagttccagcttctatttattgagctctccctatgcccctcgctgggcccaaagtgatgtatgttatctcagggatcctcttcaggatgctggtattagttccattttacagatgagagaactgaagttcagagacgtcaagggctttgcccagggccacacagctggtaaattgctatgattggagtccagccccaaggttgaggtctttccaggtcttcctgctacaccaagcttcttcccgtcccctcatccctcccacctttttttcccaattgctttatttgaacccctttgcatgagggaggacataaatagcggggtacaaagtccattttagctgagtagagacaagaccattgaagcaaaaatatacaatccacaagggcagggggttgtccatttggtttcctactgggcgctcggtgccttagaccagtg

SEQ ID NO: 152332 - DNA, 537 bp, Homo Sapiens
tttttaaaagcacagaattcatttattaataattaataatactccttgggcagtctagggctgaaacattgatcaagtgatggagagacttgatttgggaggctggggagagattgttgtgaaaatgcccacatgtgttatttcacctattctcctattacctggccactttggtcctggaggagacagtcctgaattctggtgactagggtcacagttctaatggagcctatggaaactccggggccctctttttaaaatggagccatatgcttggcggaattggcggttcatggctgcatagagcacagggttgatgcaaccattgagccaggtgaggttggcagcaagcatgtggaccacccggggagcctggactctggcatccagaatgttgagcagcaagaaggggatgtagctcagggcaaagcagaggaacacagcaaaacacattcgagtcaccttcccaaattccgatgaagaatccggagctcttctggctcctttaattggctgggctgttgcagatgcttctgg

SEQ ID NO: 152333 - DNA, 551 bp, Homo Sapiens
tttaaattttttaatttatttaaagttagatacagttgaattaactctttatcatatgcaattttgatatggtttgagagttgtatataattatatacccacaaccactgtgaagacactgaagagtgtcattaaccaaacgttccttcctcctgtctctgggtagtcaaccctccctccacacttagtccatgaaaaaatgctgatatgttttccatccctactgtattgccttttcacagaatgtcgtataaatggaatcatacaaaatgttgcctccaaagtctggcttcatttacttggtgcagtgcctctgaggttcaatcatgtggttgagtgtatgaatctatagtttgttccctttaattgctgactcgtaactcactgtttttatggaccccccattttgtatgcatttaccatttgaggagcattcagattgttttcaggtttgggtgactatgaaataatgttgttataaatattggcatgcaggtttctgtgtgtaactgtaagtttttattgctcttgggtaaatacttaggagtcag

SEQ ID NO: 152334 - DNA, 562 bp, Homo Sapiens
ttttaacaattagctagaaattagttttaatgatttgttttagatgatagaatagaagcataatgtaattatttttaaaccttctacatcatttagaatacaactaccaccacctttcaattattgagaggcaatcatctaaagcatttggcaagtgatccacttacggagccaagctaagggagctgaagagaagaggccgccgccccaacccaggtgttgttagttatctagccttttgcaaagcctcttccatttctactctgctctttaagctatttcatgccttgaagatgtctctaccagggaaaataaagagattcagctcttcccccacctcctgcctgtctccaagacagagtggggctgatgactggaggtgggaaggactagaggaagatgccacaaaatttagcaactgggcctgaaattcaccattcacaccatcaaactggactaacaggaaagaagattatgtaaggaatggataaaatgagttaacaggaattaactccagactgtaaagatagatctatgccattctttccttgttcagtgttct

SEQ ID NO: 152335 - DNA, 234 bp, Homo Sapiens; identical to SEQ ID NO: 119778
  misc_feature (110)..(118): n is a, c, g, or t

SEQ ID NO: 152336 - DNA, 185 bp, Homo Sapiens
ataagctggcggccgccaacttccctagtgccctccaggacactcaggagtccagcaccactgccactgaggctgcaggaccgagatctcactcagcagacagcagcagcccgggagcctgagctcaggaggaactcttacctggaaattgggaactgtatggagactccaaactgacttctttc

SEQ ID NO: 152337 - DNA, 395 bp, Homo Sapiens
ttttagcatcactggtttattccgtttcatccagggcagctgttttaaaaacccgcacacaggacagtggctgtctctgccgcacgtgatctacataacgccatgcatagatcatcagcacgaggcaggtaagggctgcagctgagtcaggatccactcaggcttacgtggtctggtcctcagcagacccttcctagaagacacgaaaacacattccgccttccaagtttctaaaccagaaacacctgcgttttgaaacaggtggtcaggtactaaacggagagggtgtaccacgtgggaggggccttggcatgtctaggcaccgggaagactgtgctccaaattaggatgggccctggctggctcccgggcaaactgaggcagaggcccctgtt

SEQ ID NO: 152338 - DNA, 507 bp, Homo Sapiens
tttttttgcaatgtccatcactgacatgttttaataagagatgaacgcacaaattggcttccttgcaatgtttacttcaagcagtaggtctgtctgctctggcctttgatgggatctgccagcttcctccctccttgtctatgtcccctgccttcaccatgggaaaaaaggctccagtaaaccaaatcccagaagtgatgttgcctgcggagaccaactcaaaaccaactggcctcccactgcttcctttgaaaacatatacatttcacacacctgagtcctcccacccctctccactccacggcaggctccatgaatggaactccaggggctgcctttgtgtaatgatcaagacgtccctggacagaggagcagcttcgcatcagggaatcctggtcccctgatccccatgggatgagatggtgggtgtagcatccttctggtttctctgcccattcagctgtctacccatgcacaaaacccaaagccctggattttggattttgt

SEQ ID NO: 152339 - DNA, 508 bp, Homo Sapiens
gccggcgggctaagcccagggccgggcagacaaaagaggccgcccgcgtaggaaggcacggccggcggcggcggagcgcagcgatggccgggcgagggggcagcgcgctgctggctctgtgcggggcactggctgcctgcgggtggctcctgggcgccgaagcccaggagcccggggcgcccgcggcgggcatgaggcggcgccggcggctgcagcaagaggacggcatctccttcgagtaccaccgctaccccgagctgcgcgaggcgctcgtgtccgtgtggctgcagtgcaccgccatcagcaggatttacacggtggggcgcagcttcgagggccgggagctcctggtcatcgagctgtccgacaaccctggcgtccatgagcctggtgagcctgaatttaaatacattgggaatatgcatgggaatgaggctgttggacgagaactgctcattttcttggcccagtacctatgcgacgaatgccagaatggtaacctcgtgcc

SEQ ID NO: 152340 - DNA, 529 bp, Homo Sapiens
  misc_feature (53)..(111): n is a, c, g, or t
agttgggtattcatatggggggaaagttgagttcataccacattctatatacnnnnnnnnnnnnnnnnnnnnnnnnnnnnnnnnnnnnnnnnnnnnnnnnnnnnnnnnnnngcaaaaggacagtgttttataatgatagggtggtgagggaattcccaagtaagccacaaaacccaaaaaccataaaggaaaggagttagacatcttcctgtgtcaaaactctgagtgtgtctagtgaaagctgccataaacaaagttaaaagacatgtcatagataggttccacaacctctataacagacaacagattaaaatctagacaactgaaatctttcaaatcagtacaggaaagaccaacaacctattagaaaaatagacaaaagattaaaacatgcggctcacacaagaaatgtaagtagtcagatcacttgagctcaggagttggaggctgcagtgaactgtgatcacttttgtgaatagccactgtacttcagtctgggcaacacagtgagaccctcatctctttaaaa

SEQ ID NO: 152341 - DNA, 157 bp, Homo Sapiens
ttttgggggtaaaaagctctttatttgaagctccagggtggggcagggcactggcctcaataccagctaccagtcccagctcatcaaacccagccgcatgcgcaagtaccccaaccggcccagcaagacgcccccccacgaacgcccttacgcttgc

SEQ ID NO: 152342 - DNA, 1253 bp, Homo Sapiens
  misc_feature (962)..(962): n is a, c, g, or t
agattgtactctcaggcggacacgggcgagcagccctacgagcacctgaccgcagagtcttttcctgacatctctctgaacaacgagaaggtgctggtggagaccagttaccccagccaaaccactcgactgccccccatcacctatactggccgcttttccctggagcctgcacccaacagtggcaacaccttgtggcccgagcccctcttcagcttggtcagtggcctagtgagcatgaccaacccaccggcctcctcgtcctcagcaccatctccagcggcctcctccgcctccgcctcccagagcccacccctgggctgcgcagtgccatccaacgacagcagtcccatttactcagcggcacccaccttccccacgccgaacactgacattttccctgagccacaaagccaggccttcccgggctcggcagggacagcgctccagtacccgcctcctgcctaccctgccgccaagggtggcttccaggttcccatgatccccgactacctgtttccacagcagcagggggatctgggcctgggcaccccagaccagaagcccttccagggcctggagagccgcacccagcagccttcgctaacccctctgtctactattaaggcctttgccactcagtcgggctcccaggacctgaaggccctcaataccagctaccagtcccagctcatcaaacccagccgcatgcgcaagtaccccaaccggcccagcaagacgcccccccacgaacgcccttacgcttgcccagtggagtcctgtgatcgccgcttctcccgctccgacgagctcacccgccacatccgcatccacacaggccagaagcccttccagtgccgcatctgcatgcgcaacttcaagccgcaagcgaccacctcaaccaccacacatccgcaccaacacaggcagaaaagcccgttcgcctgcagacatcatgtggnaagaaagtttcgcacaggagcagatgaacagcaacgaggcatacccaacgatccacttgcaggcaagaaggaccaagaaagcaagacaaaacgtgttgtgccctcttcagcccacctcactctctctctttcctacaccgtccccaggttgctaccatcttaccacgtccccaggttactacactctgtatccatcacccagcacaccacactcatacccatcacctgtgcccacctccttctcctctcacggctcctccaccacctgcttcagctgctggaacggtcccc

SEQ ID NO: 152343 - DNA, 735 bp, Homo Sapiens
ttttgaaaaaatgatatatttattattttttaaaagccaggcaatataataaagtacaaagaagattttaaaaaaattatccaggatcccaccacccagaaataaacatcataatatgtggtcaacatcattccagacatatttctgcagatgttcagaggaaaagatagaagaatgaaagaacagaagggcaggagggagggcaggtaaatggatacatataaatggaatcataccatacatgttattgtagtgaaaaagcattaagtataaactttgcttgaacttaacaaagaaacagaaattgaggtgaaactgaaggaattgtagaacttcagatgaatgggtcttcacaaagagagaatagtttctaaaagatctctctaaagttaagaaaaaagtaatgaaaaacattaggatgctgaaatcattattttttcaactatatatttcaatttcagactttagctactgacaaatctattccccattatgaaagtaaagaaatcagtactcacacttcctcccaagtactggttttggttatttatattactaccacattgtcaaggtttctgttccataagcagagttgtttagttttaatccaatacgaaaacaaaatcattactgtactcaccatgaatgcttttaccatagcttcttcatttctaggttttgaattttgactcatcattttgttgtctacaggttttctggaaagtgcatgagtag

SEQ ID NO: 152344 - DNA, 532 bp, Homo Sapiens
cattattcattccatttattttttattcttctaatttttctttctcccaagtccatattttacatccatccatctaatcatatttattgagtcattattaagcacaaagttctatggatggcacgggaaaacccagtgatcaatgcgatggagtccttcccacaggagcctacaatctcaagcaaagttcagaattaattagtggttaatctttactgacttcataaaacgtatcaagcacagtgcagagcacttgacactcattatcacatttaattttaagctacctatgaggtggacgttcttttacagaagaggaatctgtagctcaataaagctgagtactttatctaggctggatccaaacccaggcagcctgactcccaaaccctgcatgcatgtctacatcacaccccaggcccctcagctctgtgagccctcctgacttcgattcctcctctgcttgcactcttttaacattagtcatcttaacaagaactctaatctatacaattcaagacgttacactgtc

SEQ ID NO: 152345 - DNA, 890 bp, Homo Sapiens
  misc_feature (177)..(177): n is a, c, g, or t
ttaccattctgattcttccctttccagtacttattacaaacaccgaaagcccaattccaagagtcccccacatggacctcccagtaatacttgccagaggtgaaagtctgagcaccccatgcaagaaaacttgtaggtgttgcagtgatatggggcgcattttgacggtcacatccnatacaaatgcttctcaaatctccacatcagaagatatgactgttggcttcattataatgcagagtaatatccactcagaattagatgagcctgtccctcagtccagtgatgggccctgaactgagctctagattcagaggctggggcatgtgcagcagcacggactcacttctgtgtaatatgtctccaaaaccctgaaggaagcgaccttggcattttcttctgtcttcccataggatgctgttctttgagatctcaataaagatggcatctggttccctgcccagaagcagaaattctcccactagacccaggcgcctcatggccatcagcagacctctcaccgtcatgccctcacagaagtaggccaccacccgggccttgggcaagtgacttgtgagcttcttcagcagcttatcaaagctctgctcccctgcattactgtagattttgtaagagtgggcgatgcaaatcccttccttcgctgacatatctttgaaggcttccatcccactttctccatagttgccttctgtgtgtacggctgatacataggtccagttgtacctcttcactatgtccaccatggaccttgcctgctgagcatctgaaggcacaaccctcatgaaatatttgaacagagtcttgtcactcagatccatgatggttgctgagtaagcaatctgaggtatgttgaaaagctggcggccgca

SEQ ID NO: 152346 - DNA, 1021 bp, Homo Sapiens
tttggaataaaattatttctttaattgaatacaaaaatactctgcatgtaaaaatattaagaaagtttattttaaaatattttacactcttttgcccacagctctttattcttccctcatggtgaactgcactactgcacttgtgtggcccacatgactttatatctttgtacagagcatttccagcatcatatcatccatgctgactgtgccgatgatgggcctgaagaacagttcagcaatgacattggcattgatgaatctcagcaggaaaagggtactattaagttcgatgaatctgtcatggggcccttggtgcgtcatcctggtgtgttcactgagtatttgctgagttccccactggagtccctgaatgtacttcacgcactgcaggcccggcacgtctggagggagaaaaatctctttgttataaaacagctcaccacagagtcctttgctagctttttaaaaatagccatttctgtttcatcccaattaaacaagacccaaagcttcccggttaaaagggtaaaaggccaaaccagtctacgttttcagaagcaacgtgtccaagaatgaaacatcatgtgatcttacttaatatttactatgtttctatgcacacgtttgcaaatacactggccatgagccaacaaacgcacacaatttaatatgacagtagaatacggtttaatgaatcatcactccagttcactttctatgcaaatatgaagaagttcatgatatttcaagaggtgggcactttacctatgagaaacaagccatgataaacaagaagtgttgccatgagacaaatgtttttaccattcttctttgaactttccatcattacactgatcgttcagccaatggtggtaaacttcacagccacaaactttgacgcacagtttcattttacctatttgcctgcaggccaatattagtctagaggcccgaataatttgaaagctaacactggccacttagctcattgcaccatgatttcctgtattggggaaga

SEQ ID NO: 152347 - DNA, 541 bp, Homo Sapiens
tttttttggaataaaattatttctttaattgaatacaaaaatactctgcatgtaaaaatattaagaaagtttattttaaaatattttacactcttttgcccacagctctttattcttccctcatggtgaactgcactactgcacttgtgtggcccacatgactttatatctttgtacagagcatttccagcatcatatcatccatgctgactgtgccgatgatgggcctgaagaacagttcagcaatgacattggcattgatgaatctcagcaggaaaagggtactattaagttcgatgaatctgtcatggggcccttggtgcgtcatcctggtgtgttcactgagtatttgctgagttccccactggagtccctgaatgtacttcacgcactgcaggcccggcacgtccggtttaaagagcacggtccccttgaggtaggcgtactccttggtactgatgttcagactccagcatttggaaagaaagcaacttgatggctggaccttggatgccgaaggcaccttccggccttcgaccgc

SEQ ID NO: 152348 - DNA, 495 bp, Homo Sapiens
  misc_feature (411)..(424): n is a, c, g, or t
agttggtggcatcagagtacagaaagtcacaaaccagacaaggaggggttacttttagtccagacaagtgactccaagctgagtctttagatacagaaactggaactacgttggcagtattcagtttgacattaagggctgtttgtgaacagctggactagtcggcccttcccataccctcagtaaccatcagcaatggtatggaggaggggaatagcagtatctgcaccaacgttaacagacagacaggtgcttttaaaaggaatttgacaatattacgtgcctgaaaatggagtcaggttccaaacatgggagttggcccttggattatgccctcttcattacttgtccagggaagacttcctggagtccttgacctaacctacaagatgaaaagcagccagctaagtnnnnnnnnnnnnnngtcaagtcattccaggcaaaaggcataacttgaccttgagcaaacttgagaaggcaagggaaatattttat

SEQ ID NO: 152349 - DNA, 479 bp, Homo Sapiens
  misc_feature (396)..(437): n is a, c, g, or t
ttttataaagggcagattcatttagacatttaagtatctaattcctccaaaaaggctaaaagatacagtgatgcagtgccatttaatgagttttttaaggtttcaaaatcaagctcaaatgctgtatattattgacattcaccattattcaagaaaacctttaataatattctttatattataatgtgatcaaagaataaaaaaattttcatgaagggctggtttacaaaatagaactctgtctagggtctgagccatttttctcatacccgtcccattctctctctgtaacagcagtgggaggagtgacagagctcgcaggttaagacagacacgcaggtgttggtatctaatgcactgaactgtggaagttatgggaagttgttttctcttttnnnnnnnnnnnnnnnnnnnnnnnnnnnnnnnnnnnnnnnnnngtaatggcagcacttgaacaggccatggagaatcacttcacc

SEQ ID NO: 152350 - DNA, 587 bp, Homo Sapiens
  misc_feature (425)..(444): n is a, c, g, or t
tctaatgcccaatcacaaagcggcacattataggcataatgatgtggaataaatacaagaaatctggcaaaatatttaaaacaaacgagttacatgggaacaaactgaacaaccacataagcataaatcaatcatatactgttataaatagtatgttttgctcacaagtctcttaagtacttatagatattacagtggcaggggtgaatgaagaggatagcaggagaatgaggcaaatgttcccaatgccagttaattcctgaggtggcattatttcttaactgatgcattgatcaacactgtaaagatgagtttgtgctgtgaaacagtcccaatattattatattcccgcaattaaattgcggtattctgaaggcagcaaacctacgtgacagtttatgttataatagccagataaagtatgnnnnnnnnnnnnnnnnnnnngttgctacagttagcagtgggtcagaaaacacttcaaagttcaaaagaaacttgatgtagatttaacttttttcccggtacttcctagttagctcaaggcaatgctattactgaatttcatgtacttgaatttaaaaaaagtt

SEQ ID NO: 152351 - DNA, 602 bp, Homo Sapiens
  misc_feature (134)..(453): n is a, c, g, or t
tttacatttaaatccttaatccatatataatttatctttgcatatgatatgaggctagagaatctaatcttgtttgaaatagctggttctgacattatttatgaataattcatccattttaccagattatacannnnnnnnnnnnnnnnnnnnnnnnnnnnnnnnnnnnnnnnnnnnnnnnnnnnnnnnnnnnnnnnnnnnnnnnnnnnnnnnnnnnnnnnnnnnnnnnnnnnnnnnnnnnnnnnnnnnnnnnnnnnnnnnnnnnnnnnnnnnnnnnnnnnnnnnnnnnnnnnnnnnnnnnnnnnnnnnnnnnnnnnnnnnnnnnnnnnnnnnnnnnnnnnnnnnnnnnnnnnnnnnnnnnnnnnnnnnnnnnnnnnnnnnnnnnnnnnnnnnnnnnnnnnnnnnnnnnnnnnnnnnnnnnnnnnnnnnnnnnnnnnnnnnnnnnnnnnnnnntgacaataacaactgtacttgaaattacatcttcatattctcctgcctggaaccgtctatgatagcttaaagtctcctgtataccttcatgcatccatttaatccatttattatcattattccatgcctactgtgcaccacacactatg

SEQ ID NO: 152352 - DNA, 518 bp, Homo Sapiens
  misc_feature (372)..(418): n is a, c, g, or t
ttttaatttacaaaaaagtttatttggctcacaattctggaggttggatggtagcccatttggtgatggtctcatgctgcttcaaatcacagcagaaagaggaagggaaagcaagtgcatgcaaagaggccaaacatcagaggaagccttgttttataacaacttgatctcacgagaaccaacccagtccaaaagaactaacccagtctgcataagccattcgagagggcagagatgccacaaccaaacacctcttaaaggccccaccacctttcaataccgttaaactggcaattaaatttcaccatgagttgtggtggggacaaaccacatacaactcactgcaccatatatatttattctactattttnnnnnnnnnnnnnnnnnnnnnnnnnnnnnnnnnnnnnnnnnnnnnnnttcaaaaataagtatgaggaagcccactaacgaaaatgccagcagactgaaatggtcacaagaaccctgcagcagaaaataataagactggataaatata

SEQ ID NO: 152353 - DNA, 1115 bp, Homo Sapiens
  misc_feature (208)..(220): n is a, c, g, or t
aaccccccagagtttccagcagcctcaaccccacggtggggcttcctctccatgggccccccgcttggaggggcctgagtttagggtgaattaaaggagccccagtgaccctgcaggcagttcccaggtccacagcccccagtgactgcatattcagaaggctcgcacctcttgaggctgcagagggcatttccagtccagtgcccgnnnnnnnnnnnnnataccaggatggccacgacgacgtcgccccgcaggatctcgatggagccccgggagatgaagtacagggcggtgagcaggtccccagcatgcaccagtgtgtcccctggcggtgcatgtgtggtcttgaacttcatggccagggcccgaaggcagcccttggtggcccctcggaagggtttgcagtgctgcagcagtgagcggttcaggtgcaggcagatgtcagcctgcaggcactcagggaagcccttcagcaccgcgttcatgtcgatgccgttggtgtaggaccaggcgtgctggaagtactcctcgaggcgctggcgcaggggattggggatctggtggaagcggatgaactcccgcacccgcagcatctgtgtgtggtagcgggctgtgcccgagtacagccgctggatgatggccgacacgttgccgaagatgctagcatacatgagggagccaatgagcatgacgcagatggagaagatcttctctgagttggtgttgggagagacgttgccgaagcccacactggtgaggctgctgaaggtgaagtagagcgccgtcacatacttgtccttgatggaggggccgcccaggccgctgctgttgtagggtttgcctatctggtcgcccaggttgtgcagccagccgatgcgtgagtccatgtgtggctgctccatgttgccgatggcgtaccagatgcaggctagccagtgcgcgatgagcgcaaaggtgcacatgagcaagaacagcacggccgcgccgtactctgagtagcgatccagcttccgcgccacgcgcaccagccgcagcagccgcgcagtcttcagcagcccgatcagctcctcagagccagagccgaagatgagcaggtcgaaggggttggcggccgc

SEQ ID NO: 152354 - DNA, 495 bp, Homo Sapiens
gcaaatgcaaaatttatttcaactgtacataacaggttttttttaatataaaacaaacacttcattgccatatgcaaccacaaacaataatatgcatactgtacaatacaatgcaacattcagatatacatccaattgagtttttcaaatggtagtcacctactaaaaatggcttttcccattcacagataaagagcacaattatagagatttttttcaagatcttataccactatatacacattactgtgttttggcaattttatgcaaaacacaattaatatagcttattatatacttgtggcaagcgttatttcaaagggaacaccatttaggccatttgcaaaggcctggtgatggcttaaacctaccttctagttcagactcttcatcctttcattagaatactaactgtacaaataaatattacagaattgtatgaacagaagattctattatcagcatgactgaagtcccacaaaagtagaaacaatg

SEQ ID NO: 152355 - DNA, 404 bp, Homo Sapiens
cgccccacccgctgctgtccctggctctcatcaggtgaattcagcattcctgccaccctgccagtgcctctgtgatcctgggcatgagttgaccactatgtacctcagtttacccatccacaaaaaatgcaaaaggccaggattaagcatgggggcgtgacgtgaactcccgctcttcctctggtcaagggcttcatgcttagaggaaaccagataagccctattgcaaccccacctggagtggagtgggggaggatgaggaggagggggagaccctaccttccacaggcccagggactcgaggggtggggctccattaggagatcagtcggggcatggtgaaggggaggagaggttgtcaaggctcagctgcctggacagagaggatggaaatactccctgtg

SEQ ID NO: 152356 - DNA, 843 bp, Homo Sapiens
acttgtataatttactctttctggatcatggaatgatctccttctttaacctcctgtgtttttggaccctattttcagaatagtttcacactatataaacagcactaggctaagagttcagagacctgagtttcttcctggcttcctctccatctcagcttccctgggtacttagttttttcatgattgaatttgaggatcaaatgagatgaaatgggaaaaagactgagcaaatgcaagggctcagagcacagtcttccttttctgaaaggcattatttaagtagtacttttaaataaaatacatatgatttgattgatggatattaaagtatatattgtttttctgaaaccctaacataattataagaacacgaggatctgtattatactctttgttccacgctcaaaatacatatttaacatcagatggaagagccacattttccaggataagcaaaattgtcttctattttctgttgttccttctcaggaagtcttctgcaatttccttggaggagtctcatcttgctggaaggacctgctactgaaggtgaggatacacctatccttttcttcttcaggaaggtaagctgatagcttggagtgtccaaggtagagctcatttcaaataacacattgttttccccataaatacatttacttgtggagagtcttctgccctgatttttgggtcaaggatgaaggccattataatgttctgaattctgcagacataatatattatagcaagttcaaaggcaattgcatgtccaggaaaactggcagagtatattctcagttcatgcgtcttctgtgcattcactccctgccttggggagat

SEQ ID NO: 152357 - DNA, 454 bp, Homo Sapiens
gagtaagcatcctttacttttatggcaaaaaataaagagttataaaacacaagaacacatcatcacagcaaaagtgatactagaggaaatgacagtagcaaattaaaggcacttctttttctggatggtatcttcaaaaggcaaagatagcaggatccacagatgacttcaggaaagtaatagcagctttcacaaccgaagtcatggtggagcctgcatgggcacgcatccaggccacggcgttcctttccagaagctcccattcacacttcaagtccttaccattgctatgcagccagatcacggccaggatggtggcccagcctgaggaatccacaagctcggcaggctgtgcagccattatttcttccaaactcatacctaggatcttggctagatcttcattcagatcccaggaaccatttgcattttggtggtaaatcagctgcacaag

SEQ ID NO: 152358 - DNA, 461 bp, Homo Sapiens
tgaaaataaaatactctgagccgaacgtttcgaagaaggaaagtccgcccttaagagagagacagagtcttgtgtttaaaatgaagaagtttaatttccgaaaagttttggatggcttaactgcctcctcccctggcagtggtagcagcagtggcagtaacagtggtggtggggctggaagtggttccgtacatccggcggggactgcaggggttctcagagaggaaattcaggaaactttgacttcggagtatttccagatttgcaagacagttcggcatggttttcctcatcagcccacagcattagcctttgatccagttcagaaaatcttggctattgggacgagaacaggtgctatacgaatactcgggagacctggtgttgattgctattgccaacatgaaagtggtgcagctgtcctacagctccaatttttgatcaatgagggtgccttggtc

SEQ ID NO: 152359 - DNA, 509 bp, Homo Sapiens
gtttttctctcataaatacctttattagaacttcttttggatgcttccaactaccataaaaaataactctcccaaagattccgttttatcctagagccagcgttttccaattgagcaaacaagtaaattagcttggtgttccaatggtacccggctttggtcactgaaatgttttttctcaagttacgtgagaccatttttctaaatataacgagaggtggcaccataagcactgcacaggaaaccagctggagtttccaaagatgggtcctccctgaaggagaaagacttgttttggatggacgattgcctatgagttctcttaagtgacaaaagactgtaagggaaaatctggttactcaagaagaaagtttagacatgtcaaattgaactcagctccagagcctggccagttttaaggattacaaattttgcttaagccacgattcgctgcttcttttcaaagagaaactgctttccccttctccaaatctgaaggacaaaaaagg

SEQ ID NO: 152360 - DNA, 534 bp, Homo Sapiens
gctgctataaaaataactttttttcaaatggcagtttctgactaatcatgcaactaaatcagtgcaaacattaaaagcaatcattcgcttaaaaaagaagcaaaggatttcatttcaagtataaaaaatataaaaagagtcgtacgagtccagtttcgtctagtgtgggtcaaccctttaaattgcatagttcacgtggcacttggacatctagagggcgagcgagttcggcgctcggccaagggcaccttctggacacacgcagatcggcaagtgctatgtcatgtgcgttcaggcaggtctgcaagtgctatgcgggcgggcgggcaggcgggcaggtgagtgggcaggggcacgtccacggccagccctgatggctggggcccacatggggaacttctgcaaatcagctgaaagcttccccatttctccagaccaactggctggtcccttccttgggcttcggtgagggaccacccccattcttagaattcaaggatgcttcttcccgcattttctcctggggctaatccc

SEQ ID NO: 152361 - DNA, 1216 bp, Homo Sapiens
  misc_feature (715)..(725): n is a, c, g, or t
tgcggccgcggcgcagagccggctgcactcgctgccgcagcactaccagggcgcgggcgcgggcgtgggcgtgaacggcacggtgcccctgacgcacatctagcgccttcgggacgccggggactctgcggcggcgacccacgagctcgcggcccgcgcccggctcccgccccgccccggcgcggcctggcttttgtacagacgttcccacattcttgtcaaaaggaaaatactggagacgaacgccgggtgacgcgtgtcccccactcaccttccccggagaccctggcgaccgccgggcgctgacaccagacttgggttttagactgaacttcggtgttttcttgagactttttgtacagtatttatcacctacggaggaagcggaaagcgttttctttgctcgaggggacaaaaaagtcaaaacgaggcgagaggcgaagcccacttttgtataccggccggcgcgctcactttcctccgcgttgcttccggacggcgccgaccgccggagcccaagtgacgcggagctcgtcgcatttgttataaatgtagtaaggcaggtccaagcacttacaagttttttgtagttgttaccgctcttttgggttggtttgttaatttatacaaagagattaccaccaccaccccctccttcagacggcggagttatattctgggttttgtaaaactttatgtatctgagcatttccannnnnnnnnnngggttttgtattatttcttgtaaatgcattgtgaaaaattttattttcggcgttgcaatgcggggaggagaagtcagattatgtacatagttttctaaaaagcctttcttctaaaaacgaaaaaagaccccccacccaaaatgtttcgagtcaacaaatttaagagacagagcccattttctccataaatttgtaacatgctatttttatgtgcatgttttatgagttcaaaatgcaatgaggaaatctgacagggaaattatctgtatgaactaaaagtaagggaaccccggggaatgggaggacaggatttttcaaggaacctttttcaatgaaagagaaggaagttaaaacctataggttattttgtagagctgagtgttaatacgggccgagaaataaaagtatcttctgctccggctgtttcactgcggacggctggggctgctgcgcgttaccttgctgcaagcggggcgccttccacctggctg

SEQ ID NO: 152362 - DNA, 538 bp, Homo Sapiens
tttctttcttgtgaaccacgtggaggtgggggcctttgcacaccccccagaggtgctgtcttttcagaacttttgttaaaccagcctttgctttcaaaagcccccagtgaagccccattccaccgtgcccaccacggggcaagtgtttcatggagttttaaacttctgctccgaatgaatcatacgaatacaaagtggtcaaatcgtctttccgaccactcgctcctttgtaaaccaaaccgaggcttccatgaggttgcgggtgatgcagatgctttgaaaatcacgtttctgtagcaactgctggctgcctgcgttttcttttcccttttggtttcaaatacgtttgtagccagggatgctcacaccttttctgctgtcttggccacatttctgcagcacttttgaaaaaacagccatgtgcatgaagaaaaagcaacatttccaacaagggtgagtgctgaaatcacagcagcgcgactgggccttctacccaaggccacgagtccgtgacctgatggagctggctccaggctta

SEQ ID NO: 152363 - DNA, 570 bp, Homo Sapiens
gtctgaggaaggtggggctggttgggagagactgccccaggtgtctcagcttcctggaagttatttagggtctcttctgaggagctgcgttcgggctcccctaagtcagtagccctggaaagtgacacatcaaggatctcggaagaagagagatcttccgtgtgagattcatccagatcatcatagctctcagtgtcctctgctatactgttgttagagctgatactagcggagatctgagcaggagtaacgctagttatctggaagccacttttctttttcatttgagttccgcctggcgcaagaggctgtgcctgcagctgagcctgcgaaaggaggttcaggctttgtggaggcggaggctgtggtcccgacgtagaagatgctgcagggggcggcggctgaagcagcgacggaggcggaaaatcctcggaagatgtggcattactaccgacgccggtacctgctgcattgagagcagaggcgctgccactaccgctgccccttcgagggaacattgccgggtgcgccatcttcctagcgctaatgtctgcagcggcggcggccgca

SEQ ID NO: 152364 - DNA, 532 bp, Homo Sapiens
tttgccaattaataaatttatttaattaataattcaatgcaatgccaatcagattttgctttttgaacctggaaagaagacatatttctgtagtgtactacaactcctctgaaagctgtaaagcttacctgcaagataaaacagtcataaaaacatgataaaaatgtgagacacacacatcacccagatctgccaagagaactttgttcctggtcttctcagagtgacttgtttcaataaatgttaatgttatctttttgtttttataaagcgatctttaaaaagatatgtaccaaactggttttagaaaggtggaaacttgtttctacactgtcccattggtagctatcaacccacacaaagaatctatgtccataattagcaccttggaaacattctcaccacttgtacattgtaaaagctccctcccaggcagattctgatggaagtgaggattattactgaaaccactgctgcactgtttctttaaagcctactccgctgcacaacagactcttaaagactgaagttt

SEQ ID NO: 152365 - DNA, 594 bp, Homo Sapiens
agcaaaggagtaaaacgtagaggccactgctgctttgatgattttaggttcagtggaattagtttcttaaaataactatttatccatcgaccataccttcaggcctcataatctggtaagtaattaaatactcaggataagcctgttctcctctgtaaataacatattcagctaatgctaggccatttacactgggcctaccagtgactgagtgatgacctggaggagaatgtgccattttcattgcactgaactgcaggaaagactttcccaaggttacccggcaaaagagcagctgcctgtggcaaatgtaacaagatctgtctttgtgaactggacacccagtacctcctccaattccatatacatattgattgcttttggaagagttttcagcaaaataaatgccagctccaaacataccacctatgtacgcatgcctttcatcaaagcctttgtggataattgcattcacaaaaggagacccatgaaatagcattcgttcattggcatggttgtggttttcttcagaaacttcttttcttccggtgagtgtatctttcccatagttttcttgttacaaaccttctgaat

SEQ ID NO: 152366 - DNA, 466 bp, Homo Sapiens
gcccccgtaaccccgtctaactgcagctctgtatgaatgcctcaatatcacaaaaaacacagggtcacctcttaaatatgctggattctcaatgagtaaaccagttaatgtgtttctagccaaagcaagggcataaatgttttagagaaaagattcccctggagctacagagaaaagatgctgataaagcaatattgagagttaagcaggtgatgcttttagtctgtgtcagagctggtctcttcgatgacagagtactggttgagtgcttcctccaaaggcgttattgtcccatcaggttttagtcccattggtttaagcaactcctctcttcaatgctacacacaggccttaacacaagttaagactgccctcgtatcaaaaagtacagtggtgtctactggataaagagcccattctacgcactgtgacagtatcatggcgggcttctcatctgatcaggcat

SEQ ID NO: 152367 - DNA, 371 bp, Homo Sapiens
cacccgtgtttgctttctttgcttttcaattggcagatttagaaataaaatgtgcttgttgcccctgagcccatggcagctcaaagaagccaatggcaggtccccgggttatgtgggaccaacagttgtctctggcacaggaagctttccatgagcttgttcgggagagggagactcaccctctcctgctggcgcttcaccctgtactgtttgagctgctcttccagccacttccgagcctgaagtcggacctgctcctccttctccaggggcaggggagaatctgtagagcacagttgcgtttcttgcataggaagactgagtctgagagactgcgagcatgatgttcttacatctggctcagcactaga

SEQ ID NO: 152368 - DNA, 467 bp, Homo Sapiens
  misc_feature (294)..(357): n is a, c, g, or t
tttttcacatttatattgacttttaattacatgcaaattaaagagtgggctattcagaaatttccagaaaaggggtggtaacttccaggttgttatggaaaaaggcagtaacgtctgggtgtcgccatggcaatggtaaactgtcgtgctggtgggcgtgtcttacggagaagttctttctgtgcctcttccctgtttcagccagtcttgaatctggtccaaagtcgaggtcctgtttcctgcccacaatcattgtgcactacagcctcaaactcctgggctcaagccatcgannnnnnnnnnnnnnnnnnnnnnnnnnnnnnnnnnnnnnnnnnnnnnnnnnnnnnnnnnnnnnnnaactgttccctattgatggatattaactttttttaaaaaattgtccatattacaaataacgctgtttaaatccccatagatatatctttgctcttctgcatgagtactct

SEQ ID NO: 152369 - DNA, 628 bp, Homo Sapiens
ttcgcgtgtttatcacttatctgctttcttttacactgcttgagttttaaaaaatcatatacatctattacaaagggcatagttacatcacggagacccctcttctgcccccacacacctcacccaggtttggggtgctggaagatgcagacaggtcagtgttccaggggtgggtttggcatggcgctgctgtttccgggtctcaagacatttgctgtgtgagtcgagggagagctacggtgtctctggtcttctctgggtttcagtcaacatcccatccatgcagagaggaggctgtatccagtcctgccctcactggcctctggctttcagacctcagttaggggcctccagggcacagctgagcaggccaagtatctaaggacagcagcttggctgggcacagtaccctcagcagggctgggtgagctacctctgcatttcaggtgggcagcagccctcgggcggctgctttaatgaggagcggggacagccagagccatctggtgcagcctctgccagtgcctgctcccggcaagctggccgctcctgccctctgagcacgccccagctcctgccaccctcacctgcccccatcccctacatcagaggctgtgctggaagtgag

SEQ ID NO: 152370 - DNA, 526 bp, Homo Sapiens
tatgctgataaaaatgttaaactttatgaaaaaaaatcatttgcagttcacatcaaaataatttaacattctctattattttaatagtacaagctgccacaacagagaaagaacagatacacgcacacaattttaaaaccaaatcagttataagtgcagaaaaaagtaagtacaagcacttttagcccacacaaatcttttaggattggcaccatctttctaaaacatctataatctatatagatttctaattacaacaccatcagcagctgccattgatttctagaaatacacacaatatacatagtatatttgttcacattgggaagatcagtgaaattcaaccaactattttatacatgcctcattcttcaatagacagtagagactctcccaggcctcagaccctcttcaaagtgaattctgacttgtctttatgctttcactgatctgtattgtttcacagtataaaattgtaaatggtaactatagagattctgacagcttgagggttattaataagctg

SEQ ID NO: 152371 - DNA, 579 bp, Homo Sapiens
  misc_feature (79)..(79): n is a, c, g, or t
ctggagcaaagcagtttatttctataggggtacatgcatttctgctttttatattatgcattaacttgaaaacacattntaagtacctcactttccattccttatacatactgtaatttattttagttaaaatgttagtaagaagcccaggcacctgctgattaagcatacatggcacataataccatagctctcatgatcacagccccaaaaaagtaaatctcaagaaacaactgcattagcagccatgccaaagatttagaaaggttattatcctgtgaacaattatggttcttgtttgattgaaaaattcataataaaaacataacacttttggggatacaatgttcattatacaccattgtagtcagtggctactttagttttcatttttgttaagattccaaataataaaactatttgcaaactgttgatttccttgtaaattcccctttctttggctaaatcaatatatgtaaatatctttgttcatatattagttaagctttaaaatgaggttgtttatgttcttgcattcttataaataacccacaaatatgtaatccctctaattctctt

SEQ ID NO: 152372 - DNA, 586 bp, Homo Sapiens
cagctgtcctcatcagtgctgtgactttcttcccctccttgcattgcggtcgtgaaggtcatgtcggggatgacttgcatgaggctgggtggcaggggccgggaactgcacatacctagtgcatgtcagagtttaccttgtcctggaagatgtacaggttgttggtggcggcgatggcaatgatgttctcagccgggtgccaggccgtgtgcaggatcttcttggtgaagtccaagctgtccacactgatgtcatcacgccggcgcttgccccccacgcacacgcgccgtggcttgagcacagcccggggcttgctgctttccctcgaggcctccagggtcacgtcccgcttggtgttccgatcgaacatgcggaagaagttgttgtaggccccggtcatgatgacgctgtcgctcccgttccaggcacattcaaacttgtcgaaaatgcagtcgttctcgtacagggaacagagcttgctccgaaggtagtcatggacctggtaggtctctatgggtcttgcctccatgttcaggtcccagaccttgactgtaaggtagtcccgggtgagcatgtagcggccgca

SEQ ID NO: 152373 - DNA, 427 bp, Homo Sapiens
ttgatcccacttcatttattaccaaaatatcacagaattccagtcatagttaacatacagcgtttaacacgaacctgatacctgtagaaagaactgagtatcgggacaattgagtcgttggaactgtaagccacgccccaaaccgcatcactccgtacttcaaaaatacgattttttgagagctttggaaactgaattaaaatgtctacacagctatgaacaattgtttaataaaactttttcatgtttccattacatgtaaatatatcaatttggcatctctataaaaactctgaaaatggtgcaaaagtttcattctctttgagaaagccattgacaaaaaatattcacacttcactaaaattttgaaaaatggtcttctttcaaagcttctttattaatctgaagtcttctgggttatcaaaat

SEQ ID NO: 152374 - DNA, 884 bp, Homo Sapiens
  misc_feature (626)..(665): n is a, c, g, or t
agaagaaagcaccataaacgttgcttggtgcaggttcatctactcgcagattcagacctaggaaacttgcagagatgatcctaaacacaaggtgtccatgccaggggaggggaaagacggaggggaaaaacttcaagatgaaagggccctttgcagatgaagccccgcttttgaaaaagctccaagatgaggatctccaaacagcctggtggaattctttttagtctgtttcctgacacctggtacctaagtgcaaattacaacatctgagcctaccgcataaatgtttgtactgaacgtctgccttgaaggggagggaggatcccttggttcaatgtattttttccatcatgatgaggataccagggtctaactgggagcccgatggcctccatgaccaaaaaggtccctgggagtgagaccgccctgccttccacctgagagggagtcagccctgctcacactgcttctgtattcctcatgcgaatgggctcccaagcagaaactgtacggttgtgaggtattatgaaaacaaaagcgtgaatcattgccttttgtagttattgattttgtccagtaaacctgaggtaaagaatactccgtctttgaagaatgtgatcagaggnnnnnnnnnnnnnnnnnnnnnnnnnnnnnnnnnnnnnnnncaaccatgaatatgctaccagaagaaaacaaactacggaagggcttttccagtacgaagaactcatatctcaaccatctacttcaggacttggaatttaagcagtaaaataatatattataaaaatgtttataaaatagcagcacactctgtgaaacattacagctaggtactgtcaacgtgaataaggatggatgactttagcttcttagcagcgcaa

SEQ ID NO: 152375 - DNA, 402 bp, Homo Sapiens
gtatgtatgtgcttttaacagtttgttgaaccagggtccaaataaagtctatatgttatattatgttttgttaagtcttttaaaacctttatgtactccaacactcttttatccttgtgttttatttgttgaataagctgacagtttattctgtgaagtttcccccattctggagtttgccaattcttttcctgtggtatatagtttaacatgttattttctcttcatatcctgtaattgtgtagttaaatctagagatttcaacagatatttggtggggggatgtcaggaagagcaaggcgactttacgggtggtgatgtgttctagtatgatgtgtttcattatatttgattgtctctcttagcagcagttgtttgccaataccaattatttgctggtaa

SEQ ID NO: 152376 - DNA, 607 bp, Homo Sapiens
cagttacaaatgctctttatttccaactcgagggtggggatgttggggagagggaggtgatgggcaggccctccctgacaactccagggttgggagggcatggtctgctccctggttttggagccaacgagctgctgctgttttggtgaggccagggttcctggggcaggggagggctcagaagagaaggaaggccagccagtgtcctgggcaacggaaggaaacaattactggggaggtgggggcaggccagggttcccaacacctctaggctgcccaacttgggggagaacatcaaaggggaccccactgagaagagctcagccaggccagctgacccagccctgcagccaggtgtagcttgggcttttggaaagtgggttttcctggggaaggaggttgtgatggagcagggcatctggtcatcaggccaaggtcgaaagggcggggcagtggggagcagtgggctcccaggggaaacctccgcctcacacgtagtccctcttgtccagtccagacgcacccgagcgggaggggatggagtagcccagccgaggtccgcggggccgctcgacctggggcggggggcacgtgcagcagaggagcc

SEQ ID NO: 152377 - DNA, 471 bp, Homo Sapiens
agttctcaaggtaagctgagcttgctcctttcttggagggatgaggatcacagagttttgcattaatcttataaagctcgagggctttaatagctgctgcattattatccatacgaagaaaagttggacaggaagcacaaaactcattcgtgcaggcttcatttccacagccctcagttaactggtggtagtagcgttctattagatgctttgcagctgctcgcttcattcggctagcttcaatgtcgtcagactgaggttctcctgatcttttacaagctgtggccattcggtgacatcagggtgatcacagctttgagtcactgattaaaaacaggttgtcacaccagtctagctgctaccttgatctgagcgtaggcttaataactcatatttcgccaaacttctgaggagctggtgaattctaaaatcaggctcttacagatttttaacctgtcgtcgcccccgcgc

SEQ ID NO: 152378 - DNA, 521 bp, Homo Sapiens
  misc_feature (19)..(19): n is a, c, g, or t
cagatagtgagggtacganagtccttggtaaggttttccttttaataaaaagcaacccccaaatcattttcttttctgacaaaaagcagcctgtaaaatcgagcctcagacatagacaagcaaactggaagcttgtacaggcgaatgccagcagttgtgccgataggaatatactacctgggactaggtatgttcaaaatggtggctcaatcttctcttttttgccagccgcgtgcacagtaaggcacagacaagatggtgctggccaagtggaaagcccacttgtataataagtttaggatcgggtgaccagccttcccagtacattctataaatgtcacaactggtcggaccaacctgtgggccctatgtaaatcagacacagcctcccgaagcctgccaataaaatctgctgcggtctgccacatttcccttttcagacgcctctcttgtgcacccgtgagagagctgctctcctctctcctttcttttacagattaaactttccgctccttaactca

SEQ ID NO: 152379 - DNA, 561 bp, Homo Sapiens
agacagggtttctagttccaaggagcacagaatctggtggagacagcagatatgccagtgaaggattatgacagaaggtgactgagcgtcctgtaaatatgagcagcactctgttttctcctgacctcatattgcgttcccacagcagctccgaggctgttctcagtgtatgctgatcttcacttttattgagtgttttctctggaaaaaggccaataaaaacatttcatttctcttttggacaatatatatttctaagagccaggtttttctgcaccaaaaccttacaaccaatggtctgcactggttttccagccatgcttaagcccgtattaccaacatttctggtcccagtcgcctctgcaggggagtctcttccactagcgtgtttctgtttccagccctcaatggatacctcttcggaaacttcccggagcctgatatgtgtgttggagaatctgtgtcctggcacctatttggaatggggaatgaaatagacatccattctatctatttctatggtaacaccttcatcagcagagggcatcggactgatgtcgt

SEQ ID NO: 152380 - DNA, 496 bp, Homo Sapiens
ttcattgtcataattaagaacattataaactataaggtctttctgtttgacaacacagctgttatttgaaaaatagtttaatgaaaagaattgtacctattggcccctctccttcctctaatgacctctgatccatgatgtgtctaaacatgggcaacagaaaagcaatggtctttccacttcctgttttggcaatgccaatcaaatctcgtccagacattatagcaggaatagcttgggtttggatgggcgtgggcttttcatagccatgcttcttgagggaatttaagatcttcatggaaattccacactggacccaggatttaattggtttggggcaaccttttcctttaactgtaatgccctccatttccaatcgaaacacatttacctctccatggcatcctggtcattctccatcagctcacctttcttcttatcagaatccacaactgcttttttggttgtcacaacagtgacaacttttgtgaccgtt

SEQ ID NO: 152381 - DNA, 301 bp, Homo Sapiens
gttaaaaaaattagtattcacttctgtgtcttgagcccacagatataagcagtatataatcagaaagttataaataaactcagattatatagggaaaggtgtgctcctaaaaacgacacatacattaattaaaaggatgcatctaaaattatgaccaaactatctttagaaggcagaaatgtaaaattatacctttaaaaatgaagacatcatttatatacttcaaaaataaaatgtgatatagcagagatgaatgatcgctataggattgtattggtttaagagaacacgatttgctaaa

SEQ ID NO: 152382 - DNA, 550 bp, Homo Sapiens
tttagagcaggagtgaaagtttattaaaaagttttagagcaggaacaaatggaagtaaatacacttggaagggggccaagcaggtgacttgagagatccaagtgtgccattcagcccttgacttggggttttatatgctagcacagttccagggcttctgtttctcctcccttgattcttccctaggggcgggctgtccagggctgtccacttgtgtggtggcctgcgggcacttgggaggggccacatgcacagcatgtttactgaagttgtgcacatgctcatttgaggcatttctccccttaccagtagagtgttcctacttactgtcagtcttcctccactagaatatgcacacgtgatagagggaacatcgtgctgtgctcctcatggccatattcctggcctcccagcagccttggcctgtattagctggtcagtgacctgttttctggctcttcctggcagcctctgccgctccagcctgggtggtggggagtcagagggtccatctaggcagtgcattttctgtttcctgcagctcttcctt

SEQ ID NO: 152383 - DNA, 544 bp, Homo Sapiens
aaatgagttactgtcttagtgttgctcctttaaaaataatgaatttttttctcacggctttaatcatttttctccttggcttttgttttcaacagttttactacattgtacccagctgtggttttctctgtgtatatcctggttggggcaagccagggcttcttaaatcacattttgaagtagaattttaggtgttagaggctgagaaaggtaggaaggagaggtggatggggagaggttcattaatggataccaaactatagaccaaattatagctatgtaggaggaaggagttctggcatcctgcagcactctcaggtgaatatggttaatgatgatttattgtatgttttcaaaaagctagaagaaaagattttcaatgtccacaacacaaagacatgataaatgtttgagttgatagatatgctgattaccatgatttgatcagtacacattgtacacctataccaaaatcatcactttgtatcctataaatatgtacctacaaatatgtacaattattatgtgtcaactaaaaagaaaa

SEQ ID NO: 152384 - DNA, 515 bp, Homo Sapiens
tacggtttgacagaaatttattgtaattcaactcaatctcattttgtaattgagaatgctgaggctcagggctatgttcatgctttatatactattcacggaatagacaggaaagcggtgggtgattcaataccagcatccctctgtcatcatcggtggaaaatgtctcagtgaggatttccaaaagtatccagggacaaacgtccaggattctagaggaccctctaccttgctacctgtggaactggatcactcattatggttttcatgaattcattctctgcaattgaccggagctgtcaaggacaaacaccccaggctgagccttggtctcatctaggagtggccaagctggggtgggcagggcggtccagggtagacactctgggacagtgggacattgtgacatcatcattggtggtcttggacagtttctcattgctgggtctccactcctagctgttactgcaagtccatgcctctaccatgagggtggaggagttaagatcaacaga

SEQ ID NO: 152385 - DNA, 531 bp, Homo Sapiens
ccatcaggtttttaatgagtcacagtatttgaaggctatgaactgagaaatatcattcatttatggtcttgtcctgcagctgttgtgttttatataagacagtgtgatacaaacaaaacagagctctttaataagcttcactattaagtgcaactgagccatttcaggaaataatggcatttcacagaagaggaatgaaaaacacgaagttgtaattttcctcaaataacaaagaggtaaatggatttaaaaaaagcataaatgttaacatagtgaccaataagtactttttggcatctaaaaatctcactgtagcacaactctttgcaccttagtttttgcttcaaatatgccagtcatgagtcaattatggtatatatttgtcaacaagtccttgtctgttttttcctaaattagggtcaagcaataaagctgccaaaaaaatttatgctttttttaaaggtaacactagaactcaaattcaggctagaatccattgtccaggtaaatccctgattatcaactgatcaa

SEQ ID NO: 152386 - DNA, 531 bp, Homo Sapiens
  misc_feature (396)..(406): n is a, c, g, or t
catacacagaggatagctctgaagagagatacctgtgtagtgcagcttctaaatttcataataaaggtaaaaatgggaaatgttttcagttcagataaggttgactgtgcagctcacatctgtatgtgaagcatagtacggatattcataaggatttttagttatcaaaataggttaaattatattctgtatacttaagatgccagaaatacttctatggaaagagttaaaatctcctatctaaactgttaatattaggtgtttaaagaactcacatagtatgactagtttctctcttaagagttaataaataaggaatctgcactgagaaccattgcaaaggaagctggagacgggtggctttcatagagactgggaatgtgagtgctctctttnnnnnnnnnnntaccctccttaaaatattataggtgttcctgcatactcatacagtatttcagtatgattttgtccatagactcaaagagactgttttaaagtatagttctgatcatgtcagacctcttttaaaaa

SEQ ID NO: 152387 - DNA, 564 bp, Homo Sapiens
ttttttttgcttgtgcttattaaatagcaagggtgtttactcaggatttggggatcagttgtagccatgttgaatttggcaaactgagctgtgtgccctgaaagccctctttttatttcttcatttccatattgtctgacttacttcacctaggaatacctgagttatccagtccagtgttccctgatgagagtggaagattttcctggagaggcagctgtgcatggccaggtcatctgtcaggatgttgtggtggtgtgtgatcagagcagagggcctttcttttcctgtactgtgctctacttccttatgcatgcttggtttcaaagatgaccgccactttaaaagaaagatttcctcacagctctccagagaactatcatactaaggtgataggaaaggcttctcggatacaagccaacaagtcagttttctgattacagaaactcctctcacaggttatgtttggaaaggctgttctccattccacttataaattgaaagtgataagcctctgtcttgtgatctatcgtggccaatggttgacttatcacctcgtgccgg

SEQ ID NO: 152388 - DNA, 554 bp, Homo Sapiens
  misc_feature (257)..(297): n is a, c, g, or t
ggataattaaaactactttgaattttttatttatcaatctggtttctaatataattttagttaaatgaaagacattcacaaagaatattaggcatacgtacataatttccttctttcattctagtttacatgctgttgcttttagagagtgaaattttgtgttatttcacaggggatggaatcctgtttgactttacagaaagaatatttagcccagcttttcacagcactaacctctgcagtcaccacgctcactnnnnnnnnnnnnnnnnnnnnnnnnnnnnnnnnnnnnnnnnntctagaactgtttcttggcctacttgagaggaacttccatattttcacagccatctccgaaagcagcagttgctgtaaattaactgagacttggaaatggtgcagactgtcttggtagagctgttcttatagcacaattttatctgaaaaataaacttgtaaatgcgtgctgtatattaatacatgtgtgcccatatttatttttattatctcctgccagtctttgctcaatgggagatgacagaccaacttctcaa

SEQ ID NO: 152389 - DNA, 454 bp, Homo Sapiens
ttttatttttctaacttgtctaacctgattttaaaatgactgcaattccagactaaaaacatgcttcagccctgtttcaagacattatgcttcttttaacagtccaaattagtagttttatttttcttctaaatctttgtttcacacttgtaaaatcttgggaaggaggttcttaaaactttgccaggaattgttacccatttccaaaaacagtttattatgttcaaaaaccaccatatctttgagggactgtttgaaaggggagagggcaacgcgggaaataattcactctgcgcaccggaactattgtagttcaggacttccagctactgtatttagatgttgggtttgaatatacagatttcttttcaatacctgtaaatatggctatattcttgtatttgtacgggagtgtacaaaatgaccctgaaaagtaataaatatgttttgacta

SEQ ID NO: 152390 - DNA, 144 bp, Homo Sapiens
ttttggatgaaggccagtaacattacttgccattcattataactcacaattgctgaacaactacatgttctagacactgtgccaaattttctacatttaaaagaaatttagttctatccataaccattgcttggcgtttaaatt

SEQ ID NO: 152391 - DNA, 528 bp, Homo Sapiens
  misc_feature (391)..(451): n is a, c, g, or t
tttgtttttacaacttttttaatatatatttttataaacaggtcacgtgataaaatagcacaagaaacacttaccaaatataaggttatatcttccgcatatacaggagaatgaggtcgttatgtacaataagaaaatgattttaggggttggttggttttgttttcctctctccccttaatttttcctcctacagtcgttggaaatatcacagcttcagttgcattaatactttgggcaaatggacagctgcccctccccactaggggttgtggggaggaggggctggagaaactggctcctgaccactcagccctggagcttcctggggctggcactccagggacaggaaaatctttgggctgttgatctgtttctgattcaacagcannnnnnnnnnnnnnnnnnnnnnnnnnnnnnnnnnnnnnnnnnnnnnnnnnnnnnnnnnnnnggaaactggttactctcttccaaccagatagggagtgtcccaagattgggtgtgggcgcggtatctcctggggctca

SEQ ID NO: 152392 - DNA, 544 bp, Homo Sapiens
aaaactcaaattacatttcaggaacttgtgctggcgagagatagggataacacagataaaagtgtaatttgtagatattctaaaatcccttatcttagccaatagtttcagccgtggcttaaaacaatatatctatctgtactttagcaaaatgggtggatttgcatttcacatgctcctcctttggttgaaaacaactgattacataggaaagggaagatgatactataaactaggtcttcgttctcctacaatgtgacattggacaaggcatttcgtctctctggtttctaacctgcaagtaaaaggatgatttaatattggtttagataatttttaaagttcctttagaacctgaagggtctttatttctacaacaaaaaaatcacccatgaggtagaattggctatacattctcaaatgtaaaaaattaagcaaaatgctgatctagtaggttcacataacttttaagtaaagcatcttgaaggtgtccctctatcaactgaagaacaaatgtctgagtttaatatatgactgcatcaaa

SEQ ID NO: 152393 - DNA, 498 bp, Homo Sapiens
ttttttcaatgtaagcactttataaaatagattaatttctgattcaatgaagcatttcttgatcattgtgtacaaggcactacatgcatcatggaaaattcattaggatgcattgccagcactttgcagaactgatattattcagcctcaagctttccagtggccaaagggaaatgctgactgcttttcatatatttgagtcaaagattttttatatggtcaatgaagactaatataagggcagtgggattttcacagatgcatgccatgttgtcgagagcctcttagattttctcaactgtgagaaagaaaaacgaaaatgttgaagacgttgagtctggagaggggatactaatcactgtccagttgggcactggtgggaatggggaaatggcacaggaatgcaatcctctccaccctaccacccgaactccagccatacactcatcgtttcacaaaatataaatgagttagcattaaatgtttcagagtaaataa

SEQ ID NO: 152394 - DNA, 459 bp, Homo Sapiens
tttgctcattgcttttattaatcttattacagaatataaaatttttcacaggtgtgttcttcatcataaaaacagctgccatttattgaagactattatatgcagttcctactctaagtgtttttcttggattattccatttaatcttcacaataaccctctgagtcaggtctagttcatgccccattttcagaggaggaaaaaagggacaaagtggtcaagtaacctgtccaagggtgacatacctagaaagtagcagtttggacaatacaagcctgtctctcaaaagcctcttgatataaagacattgatttctaatttaaaattatctttgaattaaatcaaagagaatacatgttgatgtttctgagataaaggtgacaaaaaaatatagtttacacattgctaaccgcagatcctaatcttgactaagttacacaggacccactctttataaac

SEQ ID NO: 152395 - DNA, 634 bp, Homo Sapiens
ggggtataggaactgtagtatttttgaagaccattgatactgttcacaagtaattgggaactgtgtaatccattacttagacaactccagatatatcattgaggcagtcagaaaatagttttgctttctgctttaactaggtttgaatgtatagagtaagtgatgcaggttaaaatattttggggggatacagaagaaggtactgatggttcttgttatgagggtgtcaggaccacataatttgatgattgttggtactctggaaagaaaaaattgtgggacttggatcactgaataatctctgaatttctttcagtgcttaaagtagattattcagtgatggggcagcacagttgtatgtggtaggtatttctagccccactgctggcctttcaaacccagtcgtgtcaaaccctgccttattaattagcattttccaaaggttcagtttgcttatataattgcagtggtatagtaagcagagaaattgacccaataaatttagccatctaacaattagtgtgggaaaaatagtggagaagatatgtctattgtgataatatgagatatgaatatgaatatatgttttccacatatatgtgtatatatatacacacacctcatcccccctgta

SEQ ID NO: 152396 - DNA, 725 bp, Homo Sapiens
  misc_feature (24)..(24): n is a, c, g, or t
  misc_feature (48)..(232): n is a, c, g, or t
actggtgtggttcatatcttctanacagttgtcccttgctatccacannnnnnnnnnnnnnnnnnnnnnnnnnnnnnnnnnnnnnnnnnnnnnnnnnnnnnnnnnnnnnnnnnnnnnnnnnnnnnnnnnnnnnnnnnnnnnnnnnnnnnnnnnnnnnnnnnnnnnnnnnnnnnnnnnnnnnnnnnnnnnnnnnnnnnnnnnnnnnnnnnnnnnnnnnnnnnnnnnnnnnnnnttaaaatttgtatttttttactgtcattgtgttttttctgaatatttgtgcattgctattggttgaatctgcatatatgaagagctgattacatatactactaaatttcttgcctacaagtgctatcaattactgagatataattgtggatttccaattatgcttgtggatctatttcttttgttctgttagtttttgcttcataaaatttaacactctcattataggttcatactagcatacatattcctgatgaacacagtcatgtgtcatgtaataacattttactcaatgatggacacatatacaatggtggtcccataagattacaatggagctgaaaaattcctatcacttgtggacgttgtcatgcaacatatcactcaggtgtttgtggtacgctgctgtaaataaacctactgtgcttccagttgtataaaagtatagcacatgcaattatgtatagtacgtaataggtgataataataagtga

SEQ ID NO: 152397 - DNA, 482 bp, Homo Sapiens
atgctgggcggggtatggcttagttttttaaaatagtgaaatatattacttttaaattatattattactgaaaaatttaaaacacagtatatggcaaaaaatcagtaaagcttgtctaaaatgatgacagcaaatatttgcaaactattaatatatgtagctaattcttatgatataggaaaccttcccagtagccaatataaagagatggacaaatgaggtaagcagcctctaagacggtgatctcaatgagccatgcctcctagtgttcatgcacttgcataatccctatccttgagtgtgggctggtagttaggagaggcttaaataatgaaaactgaaattactctaaagcttttctgtttgaagcctccagggctctgaatgctctgatttccctgggtgctggcacttgatgctctccatggtattgctcaatttctgttataatgaactgttttatttatttatttgtacaatat

SEQ ID NO: 152398 - DNA, 698 bp, Homo Sapiens
ttttgtgtccttttattgaaaactccatgggtctaatgaatagacaatgtgcccttacctggtttctctgccttttctctctggtgcttgagggcagaaactaagttgaccaagcacgtctcttcctattgggctgcggcacctggttgtggggaggtatctctcacttgatttcacggtttttccatgccccaatcccacctccctcatcacagccacccagtgtgatgcattcagcatgtgtccttggagagagaggtactcaacagatgtgtggtgttgtgtgtgagttttaaatttatgtcaatgagttttcactctaaatctttcttactatttttgttttgtatattgtgagcttatgtcatgaagtgcatacagatttagaaatgttttatcatcttggtaaatttacctttcatcactaagaggcattactctttgtccctagtagtgcttttacctcaacctttgggtcataaagtctactttgtctggcattaatatagctacactggcttctttttagtatttgcatggtaacttttttatctatgccaattattaatctgctgcctcttagcttctaaccacccttcacagtcagctctgtgatgctgggacagggacttgacaaactgcatttctgctttgtcacccactgcctctttctgttgagaagccagctgccagtctta

SEQ ID NO: 152399 - DNA, 414 bp, Homo Sapiens
  misc_feature (164)..(176): n is a, c, g, or t
tccttagtaatagtattttgcagagtctcacagagctgcagatcttttgttcatcttgcagagttaacaagtctgatcctgttagtccagatttcttaaatttggccaagttataataggagcagtagcttgagacccgaagtcaggaaactttgacaatggannnnnnnnnnnnnaatccagagacttgtactggaatttgccttaccctgtcagctcatggacttaaggtttcatcccgctttatgagtgcttctgaatccaagtcattgttacctgaatttgcaaattaagttgtgatattcgtgactgttaaattcctgtaattagattaacctctttgcttgcttgtttgttttctctcctattttagcttaaagtatcagtggttgagaagagcttttcggacctgtt

SEQ ID NO: 152400 - DNA, 523 bp, Homo Sapiens
tttaaagaaaacaacttttggtagggttatgaatatacttaggaggttaaagtgtgaaatgaggcaggacttggttaggtgaaaagtagcatcttattttgggtaatattataatttatgttttttagacttcccttagaaatttttttaaaatatacatatggcatccttgaactcccttaaactcttttatttgtataaatttatagggtaccagtacaattttatttcatgcataaattgtgtagatgaacccaagttctatgtaaattctgtgtacgtagatttttctggggagagggtctagtttcttcatgacccataaaaatttaataaatactatcttagggtataaagattatgaattaaaagtttaccaattgttatgttataagcaaggttaaggtcagtgtggtacagaactttcaagacagaataggatcatctgttttaaattttttacagaaaattgccacctttaataatgtaaaaacagtgattaatcaggaatgataaagcaaga

SEQ ID NO: 152401 - DNA, 495 bp, Homo Sapiens
gctgaccttctttcactgttttcaaggtcaataactgtgtgttcatacttctgcattttataaatgttactgtgattttcttgtaatgaagaattaaatgttgggagtcaatggcatcagaaccttgcaaaagaggtttttttagcccaggtatgtggaagacacttctttaattttcaataatgggtgtgataaagaccaacccttcccattagcccttccaggcccacatgtaagaattcagacacatcttttcactcatctcagaccttctcagggtaactcggtgaaaatgtcttcactctgagcctcagtgagcctccctgcaacttgcagatgaggggctacaccggaaaagctcaacctgagtgaccctggcccctgaaatgattggcaaaatagagtgggtgtctggatgtggctttttttctgtgagaggggactgtccagttgtaattagaattttaaatgggatgcagtaccctaaaaatgaaa

SEQ ID NO: 152402 - DNA, 662 bp, Homo Sapiens
atctgcactgagacctgcttttgtgagaaaaggaggctggagaacaaactggaaccagtgtcacaggctccacgcagcaccctgccctgaaattgccatcacagtcaattcatagaccctcttgttggaagggaacttaacaattcaatgtatctgcttcatcccatcccttacctattgtcttgtgtgccctgagatgatgaacacacattttgttgccattcctattattaatatattatagctctgtggagggcaggagctggcacccagccttcacacggcaggagcaggttgacattctatctggactgacaccgactccataactagtgctcccgagttccatgtgtcatccacttgttatccaagcaactgcactgtctcctagcgaatgatctcacagtattctgtgtctgctcaccggtctgtcttgagaggacccattttatgttttactgatgcatattactattaaaagcaagaattttacgtgatctatattttattttagattggtatattactaaatattatatgttaaaattcattttaaaataataacagatttaaagattttgtattgataagcactgtatacttttaaatacatttcaaagcctgatttataaacatcaattaaaaaaaagtataccatgaaa

SEQ ID NO: 152403 - DNA, 616 bp, Homo Sapiens
ttttgcaaaacattcctttattattagaaataaattatttgtataaaaaattgcatgcatcaatcattgcatttatttttagcacaacccagggcttcaatctggtcagccattacaagaaacagactcattgtcttatacaagttaaacaatgtgggacaggaacgggagttctcacaatcacagaaaaatacaagaataacatcagacattatttatttcaacagcatttttttcacgagctaacattagttttccttttgtgatttgttttaactgctcatgaataagcaatactttagcttgacactcattggttttattgtataaaacgggtttcttcactccccgtttattgatacttttggctcatggctaatttttgttccttacaagactgactattgatttgattgattgtagtctacggagatctccaggagtgaatttttgcggtctcatgttcatcatttaagatcatataccacgtctcttcagattgtgccatttccctgtttcagattgaatgattgctgtaactgatatatgttgtcttggtagaggaagtgttggtttgaagactttcacagagttcactttgtaccgtcgcatctgg

SEQ ID NO: 152404 - DNA, 411 bp, Homo Sapiens
catcttggaagaaggaaatttagaaataagacaggaaaagaatggcccagaaattcagcacaaagagaggtgttcacattgacgccatctgtgggtcacatacgaacgcctctgggacagagctctaaaacgagtcacgtgtcgtagggagtgggcctgtggccaaggcagtcctcgcagtgtgcagggacgcaggcccccttaccatggaagccccacccagaaggaagtgggtgccccatgcaggccgaggtggatgaggggacagtggtgtgctcacagctgtcagctccccactgaagccccaaaccagcagatgtgggcaggggctcaagtggtgtctgactacccaggtcacacgtgccttaagcgtgaaagctgtcagctcccggcacggggctctggtggggc

SEQ ID NO: 152405 - DNA, 529 bp, Homo Sapiens
ccgagtctcagataggcagcctgcagttccttcaccacaacaggcacatggggctgggtgccagtgagtgctggggcttctccgagcactatctcacacccaggagcgtgggcacgcatggcattcgcatgtgccgtcagtggacattaaacacagccatgaagaagccacgaagaagtgctgcctgccggccgtgcgcggtcacgcagcgccaactccctcctggggccttctggggccttctggggcatgggagctggggccgcctgagacaaacatccgtgacgctgggctgaccccacagaacggtgcgggcctcgctcttggagtcagccctgctgccagccagtgccgggtgctggggactcagggaggcccgccgggaccactgcgggacagtgagccgagcagaagctggaacgcaggagaggaaggagagggggcggtcagggctctcaggagccgggtcctgggcaaggcgcagccgttttcaaattttcaggaaagcggtcggctcacactcgagcag

SEQ ID NO: 152406 - DNA, 683 bp, Homo Sapiens
agagctattgcttttgcagcggttttatttgtaaaagctgttgatttcgagttgtaagagctcagcatcccaggggcatcttcttgactgtggcatttcctgtccaccgccggtttatatgatcttcatacctttccctggaccacaggcgtttctcggcttttagtctgaaccatagctgggctgcagtaccctacgctgccagcaggtggccatgactacccgtggtaccaatctcagtcttaaagctcaggcttttcgttcattaacattctctgatagaattctggtcatcagatgtactgcaatggaacaaaactcatctggctgcatcccaggtgtgtagcaaagtccacatgtaaatttatagcttagaatattcttaagtcactgtcccttgtctctctttgaagttataaacaacaaacttaaagcttagcttatgtccaaggtaagtattttagcatggctgtcaaggaaattcagagtaaagtcagtgtgattcacttaatgatatacattaattagaattatggggtcagaggtatttgcttaagtgatcataattgtaaagtatatgtcacattgtcacattaatgtcacactgtttcaaaagttactttttcttttccactgttatgttgctagactctggaactcactatattcagtgggttttttgg

SEQ ID NO: 152407 - DNA, 629 bp, Homo Sapiens
ttttgatgtagggctttggcctctttattttctttttacagtttattccacaagtaaaagacttcacaaagcactatggctctgactattccccgaatgagctgctgaggatggagctggctattctggacagactgcactgggacctctatattgggacgccgctggacttcttgactatagtgagtaaggaggtgtttacagagtctaccctaaactcgtttgtgcctttggaacagctgtttacaacatgggatggcaaagcacaggcgtgcacacgcccttgcacatgcaccacagtgaggtgacccacaaggctcatgacatacggaagagtgaaaaggtatcttaaatccaacacagttccaccagactcccacttctaaaggacattaaattaactttacaaagatttttagacggcactattatggtgagtttctcttttaaatacacactgcaaaaatatttaactttccattctatgaatactgtacataaatatctgtctgcttttgctacactttacacacattcacttagctgtctttattcacctacacacaatccttattgaagctttagaccatattgatctggcacttaaaaaaatatcatacattagtttg

SEQ ID NO: 152408 - DNA, 440 bp, Homo Sapiens
ttcccaatttgttctttatgagactctatcccatgtatattagccctctttatattgtaccacaggtcactaaagtttcattcatttttttggtcaatcttttattccactctgtacttcattttggataactattaagtgtttggattttgttgtcttcctttaaaaaatgttgaagttgaaaaaactggaacatttgtacactgttgatgggaatgtaaaatggcacaccattgtggaaaacagtaggacaatccatcaaaaaattaaaaatggaattaccatataatcgaggaattccacttctgggtatataccagaaagaactgaaagcagggtctggaagaggtatctgttcacccattgctcatagcagtattattcacaaatggccaaggttggtagcaacccaagtaaccatttataaacaaataaaaaaa

SEQ ID NO: 152409 - DNA, 929 bp, Homo Sapiens
  misc_feature (130)..(149): n is a, c, g, or t
  misc_feature (665)..(675): n is a, c, g, or t
ggagaaaggatcattatttataatgctctgtacatactaccagagctgcttggaaaattaaaggccacttgtggctttttcctaccaactgatacgtttaaatttgccctaggattcagctaacagcagnnnnnnnnnnnnnnnnnnnngagagagaaagaaaggaggaaacagtggtaataaaaaaatccatctgtcttcttgctatgttaatattaataaatcataatatgacaagaccctcactgaataagagtattttcagtcatcagaagccagctgttggtaggcattaatgagtttaaaattgttctcaattgaaaaaacatcacactattttgccaaaaccaaagtaattataatactgtgtcctcctgtaattttttgagaagtggttataaagggcatatttacataaattctactttattcctcaacttctttgatgaatgtaacccaattttacttctttaaaaagtctcaattcaagctggattagccagctcagcataatcaactagacagtggtttgttaaatttagcagcatacttcgttcccattctaattaaagtcatgagttcttgaatcccagagaaataatgcttaggaacttctctcaatctgcttggcttggcctagagaagtggccattttatcaacaggnnnnnnnnnnnttttctctactacaaccccgttgccttctgaaaaacagcaagttatttctttatataattatcattttattattttatggaaaattaatttattaattaatagcctattatgtgttctcacttgcttctctaagtaatattttgagataaaatgttgaataaaaccatggattatagagaaaagtcaaaatatatgtgtaatatttaattattttataagttttataataaagtattccatttctttatctttg

SEQ ID NO: 152410 - DNA, 554 bp, Homo Sapiens
ccaaagaaaaatatttgctaacttatttgtggtgatgagtataaatgtacactacatagtagttctagctgcagaggaccatggatcatcagttgtatatacaatatggccaattggtttggctgaaaagcttgtttagaactgttttcttgctgaaaaagatcttgtcttaaacagtaacaacgcttactgaatgttttttgctaaaactgaatgtttcaaataaaccaaatttttgcctctaagtgccatcccattttgaaggcttctcgaacagagcaatactaatttctgccttcttaaccaaatcaaacagaatatagggtagatttcattgatgatacaaggtcattttttaaaaccacaattactattcacagttagtcctcagagcctgtgtgtcccactctaaatgataccagattaaactctgtttttaagtttttcttctttgataccaagttgttcattattgcttgttatggtaaaccatgcttgcttttaccagttttcctcttctctttcgtctgttatttttaatctgttggtgaaag

SEQ ID NO: 152411 - DNA, 538 bp, Homo Sapiens
aatatatgctacctttatcagattaaggtataagggctacataagcagccacctgtgaagtctcacatatttttctaacacctggtccaatttagataacataattacttgatacttcaaggtgtgataaccagccacctgaaatgcaatttaaaccaggtatttcttgagggctcctagacattttcattattgcagggtctattcagattttgtctctcctcaaagcatttacaatgatatattcactgaaaattgcccacttctcactgaaatttccaaaatgattagcacagacctgaatataatttttaacatcacctccacactttagttttatctcctttctcatacttaatgtctcacttttagtttccctcttttcttttatccttgactggcttttaaaaatatgtattgattttattggcattttcatgcaatcagtatttagattagttcaaatggtttactgtttcctaattcattaacatttttgcctttataaatctctagttattaatctttagttctaaat

SEQ ID NO: 152412 - DNA, 917 bp, Homo Sapiens
  misc_feature (753)..(764): n is a, c, g, or t
cattataaacacgttgctttttattttactaagttatttacatatgctgtctcactgaataaaacaacaatcctgctaattagatggtattatcatcattctacagagaagactatagagaggtttaagtggtctgcccatgtttacactagacactgtcagaacaaagcctcaaatgcagattttctaacaccaggtccagtcttacccataatacaccaaactgcagaccaaccaagttttcttaaggtccatggagcaattgaaaatatgtctaaaacatctgggggtatgtgcaatggggaataatggtgttggattattttactagactttcaaaggaattcataattaaaaagcaagctaagaaccactgacctatactgtaagttacctgaaataaggaacttattttgttttattcttgtttataccccagcattactatagtgcctagcactactataatgcctagtaccaatataatgaaaggtggtaaggacttataaatttgtggatgaatcaatagaatatgccatataatttaagatatttttctgatgttatttgtataacatgaaattgttctgataatttgcttccccctgaattatataataatctatatagatattttatacattattccaaataacccaaataaagttcttaaaatttgggggagataaacattttaattaaatcatcagtgtatttggctgcaggagccaaacagcacctgaggtaaggttnnnnnnnnnnnnttagaattcaatttaattgatatccaagggacaaaaagagttattcacactgataaaaggtccaacctctaaagaaggcatggtttaaataataactcacaatcacattttataaaataactatgatttaaaatatgaaacattgacagaaaa

SEQ ID NO: 152413 - DNA, 551 bp, Homo Sapiens
tatggaaggaagagaggaatggatgaggcatgctggccttaactgccttgacctggaggtaacacatgtcatttttgtcacagtctctgagagaggagaaagaaaccggacaggcaggcagttagagtgggtcctcagttgaattctttcaaacaaaagaacagcctgaaaaatcaagctgcaggcacaaataagggaacttgcacaggggggcttgcctgagacatgcgcacagctccacagataaaaaagcctacacaggtgacttgcctagacatgcccacaatggaaaagtacatctcctgacaaatgtgcagtaaggggaacaaagcaatatagagaactcaagctaaggggctgcatgtgcattaggagaatggggtggggagctaccagaagtttgtgcctttatgcaaatgagatacccagccctcatcagtttcttataaaagcctttgcattcaactgtaaaaacagcaacccatttgggctccctctctgctgcagagagctttctttcacttattaaactttcactcctacctcaaaaa

SEQ ID NO: 152414 - DNA, 599 bp, Homo Sapiens
tactttggaatggagcctttttctggtgtactgtatgccatttaagtttcacatacaagctgctttcggcaaaggcttgaatatttataaatttcagatggttatcctcactttatagtacacttaagtggctaccatatattttttatatgacaattggctgaatagctgatgtgtatgacacttttacacagatttgcactttggaactattttatagttgtaatgcatcaatcaaatacatttcaagcacatttcttgatcaatttaccagcaaccctctgaaggaatgaaggagagttgtgattgctatgtcaatgagtgaaatatacttaaaaatggcagagttatatagtacattattgtagcaaccttatatctgatttgagatactgtgttgccaaatgtccatgttatgtttatttctctattggttgtatttattaatttttagaagcctttaaactgtgttagaatctttttgaaaaatgttgattttgcatcataaagtttcaatttatcaaggatatcttttcagttacacttttagaaagagtgaataaaaagggcagtgagttatgctcttggaaatggaaaaa

SEQ ID NO: 152415 - DNA, 598 bp, Homo Sapiens
ggtctattgttaaaatcaatcttaactttttactttttctcacgtgacgacaaggcagtgtgaaagttctcgtgcagctcacacaggccgcgctgctgtgtcgcttctcttaacgctctgaattcaggagcgagggcggcaagagcagtgttgggatgaggagcagtctgcacactggctgccctcctgggccctcaccccagcccctgtgctcctcccccttcccctgatgccagccctgctcctggatgcttcctcagcacttgctgcttccctctggggggtgaggagctgcacagcctcttcctgagctcttccatgtctgtggacgcctctcccagcctgaccagaggttggacctcaaggctcagacccctgtcctctatttccagctcaccgtgcagtgctaagcgcctgcatgtccaggggactgacctgaggagcaggtgctgtggcatcattcacaccaccagcagagtcccttccaagaggggtctggcccactcttccggttcagtgctcccattctgccaccacctgcctcccaaggctcctgtctgtcaggctcggtgctgggcgccagaggggcgcggccgca

SEQ ID NO: 152416 - DNA, 582 bp, Homo Sapiens
tttgagttattattaataactttataaaacttttataaagattcttgtttattttcttaaagtgtattttaatattaatatggctatattgattttctttaggttagtttttgcatcatacatcttttttcattcttttatctttaagagtttggtgtccttgtatgttagatgtgtttcttgtaaacaacatatagttggattttgtttttttaatccattctgacaaccttttaaacttgcatactttaacctattaaaggtttcataattattgatatatttaaggttaaatctaccatgttactatgctttttctatttctatgacccatttttcttcctttctttgccgtcttttatatttatctggagtcaggtctggactacatagaaataatttctgactttgagaaacttaggacattttcttccagataatatttctctaaatgaagaagacaaacatctagagatctgactggtacatttttctttttaataattctttttgtacaacacatagcatgacttgaaagtgccttttactgcacatgttctgacagtcattcttgctgtggag

SEQ ID NO: 152417 - DNA, 470 bp, Homo Sapiens
  misc_feature (128)..(137): n is a, c, g, or t
ctgcaccaatgaacttttcagggaatttttatgagcctttctttcagtgcctccatgagaagaaaactttatttcctgtaaataaatcttccttaggagcaataggatgtaaaaatcaatctttaaannnnnnnnnncttattttaacttcccacactacattcatgcatttaaacattttttttacttactttagaaattcagctattatagtgtgcctgtttgtgcatgccgattcacacatgcagatccagcatcttgttccttccattcaaagccttccctgacaccatgactaacttcgtctccatttgcgctgtttagactttattaatctcagtgactggcagggcttttgtttcataatagaaccacagaatctgacagaacttcagagatcatctattccaaacactttcacattagagtggacaactgagatacagtaagatgtgctgaaggccacacag

SEQ ID NO: 152418 - DNA, 503 bp, Homo Sapiens
gaccttttttctgaaacttctgatctgtcatgaggaggtgtaattgtccccaaacatgaagtgaaaagccgacgttggggctggcggggatggtggacagtcaggtgtagctctccctcttctctgctttccgtctggtccaagtcagtgcggtaaattctcaaatacccatccgagctggtagctgtgcaccgcgcacgcagcgttccacagctgaggagctggagcttgtgcttcctctcacctgcaggtcccgcaggccctgcaccgagtcgccttgtccatggcgctgccctgccccatgcttcctgcgtcctgagtaggaggtatctccgagacaggaaaagtggccgctctctctcactttttctggaactcatgatggtctcctgggcttggtcactgtctctcaccagcatgtttctttgtgcggtcaggaattatttccaaatgctcctgaagcctagtgttttagtgaacattagtgattgttagcagtggtt

SEQ ID NO: 152419 - DNA, 728 bp, Homo Sapiens
  misc_feature (37)..(37): n is a, c, g, or t
  misc_feature (473)..(529): n is a, c, g, or t
tttgttgataagttcctaaaatgtggaggtggattanaaccttaggagaatagcagaaatcaaacttcatgaaaagttattttggggctttcctgtgaaatgtatgaacaaagaggctcagagaaggacatggaagacaataatgtatactctctcctcctccctgaataatgaaaaccatgtgtatttgttccctccgtatgttaaagatttccttttagtggtacattctgcactcattttgtatagtctaccaaggcgggtatccctaggaacaatattatataggaagcaggtatactctgatcacattcaggataagtgtacagaagaaaatacggtgtttactctttagggaactggaaacactccctgcattgatgtacattttaagaatggcacttttgatacatgttatcataaaggtgcttaatagagctgaattaaagtttttcaaatctgtaaacaaagcnnnnnnnnnnnnnnnnnnnnnnnnnnnnnnnnnnnnnnnnnnnnnnnnnnnnnnnnnctcactcagagtaaaagctgcaatttattgttcaccagctttgatgtattcattactcagtaatgcaatacctctattgttgaattccctttggaaataagtgaaaattctaacggccactgaaagctgctcgctaggttttgcttggtggagaaacataatctgcccctatccatattaattgggttgtatccccatt

SEQ ID NO: 152420 - DNA, 444 bp, Homo Sapiens
tattacatgtgctcgtttattttcaagacatgatgcacagctacgttctggctgtaattctgccttctgggtccaactcacttgtaactttaacgtgaagcctgcagttcagcctcgagcctccgtgactagcctccccgcccggccgcctcgagccctttataaccgaattttgcctctctgttctctgcgtctggccgacctcatcagctaggctataaaccccttcggggaaggagcatatcctaatcctttgaatcccgtaaaataagttttcccctcaccttgttccccactgacgggacgcgaggctgcgcggtaccgcgggggcggctcctctcggtgcgctcttcagcccgcgcagcctcattttcccgcgctcgtgcgctgcggtcactcagggctgctgctagagggcgcgcccagccgcgtggccctgactac

SEQ ID NO: 152421 - DNA, 528 bp, Homo Sapiens
ttttttcagttactccttttttaataaatttgaattcattcatcaacaagtttcatattgtatctatcactcaattttgctgttttttcatgtcaaataataccaaaaaattacatcaatgtgcttaagcaaaactgggtttaaatttatctttacaataaaatgaaatcaacatgagaattgattatgacagcaatcgcctattcctactagaataatcctgtacttaccttaaacacactcactgacttgtgaagtagaaacatgagacaaacgtgacaaaacatgttcatggggttggtcctagggagaggcatacgggagccactctctggaaggtcattgtttacccaggtgttgggaatttagtatttcaggaaaacatggcgcctttcaatgcagtagaagaggtaatcaatccaaggcacactagctagtgtcctggaaaaatttaattcacctgggcagctctttgccccaagattcgatgttactctaatggctcacactgacagccagagtcaattc

SEQ ID NO: 152422 - DNA, 546 bp, Homo Sapiens
  misc_feature (214)..(261): n is a, c, g, or t
  misc_feature (490)..(490): n is a, c, g, or t
aattctaataacatttatttaacataacatacaaaaagtattattttaacatgtatttttagccacaagccaaatgcttaatagttatcccatacaggatggaacaaaatcctattttggagtaatcgtcccctcctaatccccactacacatacagataaatacatacatacaccaaagcacagaatattgaatcttgtactttcaaggcatnnnnnnnnnnnnnnnnnnnnnnnnnnnnnnnnnnnnnnnnnnnnnnnntgaacttcaattatccctgtgcaaattgtaaagccagctatttgtaaagccagccagtctgagctctggagatgtaacaagttgtaagagtgtgtatgaatatcaaaccttctgagcatctcttttcatagattacacagtgatatatgaccttcggtcctatttcagaaaattctgccaatgtgaagacatgctggatcctggatattccctggtcagagggtatgtnttctaatccaaagtttcctgtttccacttcacttacaggtttagagaacttcataa

SEQ ID NO: 152423 - DNA, 473 bp, Homo Sapiens
caggtaatgttatgtattttacagacctggaaactgaggcacttaggggcttggcaacttgcctaatatcacccgagagctgattaaggcttggggccaggactgggaccccaggatgaagcccagctgagcagaaaacctctgtgcacaggatgcagcaatcaagataataaaaatcaactccgactgagaaagtatctgcctacacattcatcaggctgggaggacagacccagatggtatcagttggaaaattaacagaaaacagtatttttgccaagaacacctttttctgagccatcaatgtcttctagctcgctaaatgccttccttgcccattacaatcatacacagtgattgacattttatcagtaagaataaacttcccttttccggccggagggtctgattttcttggacacagagaatccgtctccatttccaacccaggtgcagggctctgataagcggtt

SEQ ID NO: 152424 - DNA, 531 bp, Homo Sapiens
tggcatcttacttcctcttcctcagcccctttgtgccctgtctgggctgggcctcgaccacggacatggttgggggcatgggctctgcactgaggctgctccaggtagagtccagctcacactctctggctacgggagttcatgcctctgcgccttcatctcttcaactgtcaaagggaataataatacctacgtcatggggtcctttgacatctacagagcttaaaacagtgtctgacaagcacttcataaacgttaggtattggtacgtgacccaagtcagcctgcccaacctttctctgtctccttttcccctcagaaacacagggatgagaaactctatttccttcctaagggagtttctgggggatcagagctgagaggcaggccccagccctaccttccctgccccgtctcacctactctttgcccatgggggcacttgtctctggccccaccttctgtccccccaactgcctgtgagtcctcttcggagctctggcccagcctgagctggacatgggcggccgc

SEQ ID NO: 152425 - DNA, 489 bp, Homo Sapiens
tgcggccgcggcatgaaaggcggcgaggagaggcagcactgctgctcttgacttctgagcagggcttagagagcctgccccggcttaagccgagctgctggtgctgaccctgagcgccgagtccgcgagctctgagtccggagcctcccagccgtggagccgtgggatgaggggggcgttgggggacagggcaaagtcgatcttggttgtacagccgcccgatcctagcgcggagctgcgagcctgaccggccgcgtctggcatggtcagagaaagaattttcttttcccaactccggcttttggttttgtgtgtccaccttgcgcaactcctgagccagccgaccccacatggattctcaacaggtggccggtgtcaacgcgctagagaggccgtctcacctccaaaggtatcttcactcccagagggcccgggctcccagccgcagtcccgcactgggcccgcgcgccggatacgaggtgctccgac

SEQ ID NO: 152426 - DNA, 637 bp, Homo Sapiens
  misc_feature (598)..(598): n is a, c, g, or t
  misc_feature (606)..(606): n is a, c, g, or t
tttgcttattctccaccctgttccacatctggcattttttgtgcatcttccaacttaagtacacagcagcaagtgctctacatctttgggtagctacacagaaccccactgtggctcactgtggacacaccattgaaaaccttgtatgtaggtcacttagtacaaggaggaacacaactgttgaagaagtacctaaaaattgaattacttgaacaaagtgtgggacatttgctgttttgatggattttaccacactgtcttcccatttatgcttaccagcaatacataggaacacttgggtccctgcagtcagggtgtggaaatggcagatgagttcagccctaaggtgcatttttcttactaggaggagatggagtgtattttatgggatataagcattagctacatttcctgtcctgttcacatcctttgcccatgtgtctatgaggttattgatctttcttactgatttattgtagctctttacttaggaggttaattagccttttgcctgtggagagttttttggtttgccatttgtcctttttttattttttttggttattggcccatttgtcttttggactctgatgtggtnttgctganttcctttgatgtattctagttatctgacttt

SEQ ID NO: 152427 - DNA, 481 bp, Homo Sapiens
tttgaaaggcaaattatttattaggtcttcagacaaactttataatgggcacagttcccaaaatgttctcagtccacagttgaaaactactgccataaattctaacagaaaattgtagaattgtaggcaatccagctactacacatttaaggataaagaacaatttagagaggcagggctaaactctgattccatattggctcaatcctcactaaagataatcacattaccaaattttatcataaaatcatacaagttttatgaacagagctctacaacattatattatgaattcattcaatcaaatggcttaccctaacatttagtttaaagtagatgactgccagacttggtggtgtgtgcctgtagaccagctgctcaggaaactgaggtgggaggattacttgagcccaaggcccgagtaattacttgaggctagcctgggcaacagagcaagacacatctctttcaaaaagaaaaa

SEQ ID NO: 152428 - DNA, 501 bp, Homo Sapiens
acagagttccaggtttgtgattataacccaacatgtgtacactataaatagaaaccacgagccaggctttttacgacagctcagaatcttgtgacgcagtagtcaggcatcttcacaccgacttgaatattgaagtgcagttgtgtggaacttggatcatcttagttgattttgtttaaattatgattccacatatgacaaaaatccagatccactaattaaaatgagggtttatgtctatgaataatctcctgtgggtttaatctcataacattctagtctaaacagttggcttcacttcatgatgtctgctcaaatcctttttcctttaaaggatgtttatttaataagaaaaaaatgtaaaatgatagataataaaagccttactaggttcttaaaagatgaactatccatatttcagtaaatgaataattagtccttcctctttgggcaccttggaacagattcattcagatagtgggtggaaatgtacatgtatgg

SEQ ID NO: 152429 - DNA, 497 bp, Homo Sapiens
ttttgaagaagtcactgccggctctgagggcctagggtatgtgtcttaggatctcctgtgtgcacaaagtgtcactgacagaacacagcaggatggagagcagcctcctcagaagcctcacaagtctttcctcagatgaagacagagcaacgagtcagaagacagatttcaacagcgacttcaccatgcgaccttggacaagttatctcacctcatcagtagaataggaatgatccctacccctcaaaggtgctgatgacactagtgaccaagatactcatgtgggttggactgcccaggacacagcagatgcttagtaaacacagatggaattcagagggaaaatgtaggcattgaagaaagttgtcttactgaccatccggaaccaggctaaggatcccctagaaatcatagacctctgaaattatatgcagaattctttatgtgttttcataattaataatagtctaacatattaaattcttagctgtgtgaaa

SEQ ID NO: 152430 - DNA, 474 bp, Homo Sapiens
tcttttttatgaggctttctacctttgagctgaggtgcctctgtcagtgtgtcctctgcagagccctcaaaccaagtagaattagcagctctgagcctcagcttgttcccctcactgggaaaagggagattctttgtcatggaaataacaatgtaggactgcagcatgcctatcctgtttagtttgagaatctagctgatcacttcgctaacccaattagggggtgcagggaaggcattcattacaagggctttgctctaagggactgcattcctccccaggcactcttgacctaagtccacttgaaggccgcagcagcgcagtgcaggaagccagcccctctgctgagtggcctggattccagaaacaaaagagcagcctgccctagggcggcttctaaagctctccccagattaggcaggagcttggcaggcattcagcaatcaggcaggcgctgggcgggcaggaacctgg

SEQ ID NO: 152431 - DNA, 500 bp, Homo Sapiens
tttctttctaccagccctgcaagtttcctcatggacgctcgcgaggagcaggctgcaggtttcctgcctatggtgagatcagatgtggccaagggaaggagctctggttccagagaatttgcacaaagttccctctgtacagagacaaaacggcctccggctctcagagcataatccttggcagggctcagcaggcgcacgttggtttcttggtcgtcctttgagtgacaacttctccgtgaacctgctgaagaggcagaaaggctgtggaaagctgtatttccattcttgggtttctgcgccgtcggtgggcacttgttattttccaggaaccttctcctggtgtctacatgtttgcttagaggcggctccaagagcccccagagctgcctgcatagcacaccttagatgtggtatttattttcttagttctgtgaacacctgggagggagagcggagaaactgggatttatttttcaaattggtgtcataatattgtg

SEQ ID NO: 152432 - DNA, 515 bp, Homo Sapiens
acacaaaggttttgaagttctcctcggcatatttctcgctatctttgcgtgggtccacatagaccacgtggaagcggggctggtatctgtgcatggaattcagaataatgtggccgttgtcgtccagtaggttgttggtcagcttgagcttgtcgaaggacacgatttgcttcatccactgcgcgcccttggcaggcgagtccgggtggtagtgcacgcggcctggcgtggcagggtcggccttccccgccaccagccaggaggagctgtggaaggcgtaccggtagcgcttatcgtccaccggcacgaagtccatgagcagcatatagtcggccatgggatccatgccgaagagcttcacttggaaggtgggaaacatccgcctgccggccttggtgacgatcatctcggtgcccagctggttgaactcgtcccacagcgccttcatctctagctgcacgctcacaccggccaccttcgcgttcttcttcaccggcgccttggctgcggccgca

SEQ ID NO: 152433 - DNA, 569 bp, Homo Sapiens
tttttaccaatatacaagtaacgttttattttatatgtgtatcttccatttggcataagcctttcgatgtttgttttttaaaccagtgaaatatacaaatcacgcaagacagaaatatgtacattaaaagtacagaataaaggctagaagatatacataatatctgaatgacatgtagaatattttacattaaatagtttcttttaaaagctaggattgttaaactcaactctcttcataaacatgagtcactaaaaaggaacaatctgatttagcaaataaaaaaagtacttcatggtttttgtataataaaaaccaaaaaagtgacattttaaactaattagtgctttttgctttcaagatcttttgctcacaattcactgcaactgaggggatgtgaatatcattatgcaataaattaagagccacagttggctgaggtgatatgaaagccaacctgcctaaggggggtatgaaagatgtgtatctttccaaacttttaaaacaacgtaagtctgagataagaacatatttgatggcactgtttggaaagaggtgtccttattaaa

SEQ ID NO: 152434 - DNA, 925 bp, Homo Sapiens
cccaggtctgtgcttaaaaccacgaagttcaagatggaaactgaagggaagagtgtcaaggggatgggagagaggacttgtccatgactttggcagcataaggaaaaaatacccagggacaagtggcgactttggaaactccattcctctgcaaaatgacatcacgaggagagtggtggggcctgcggatgaaaagatctggcttctcctcccaactctgctatgaggaagcgctggatggccctgtcggccgcggtcatcgccgcctcggcccgggagctcagcattgcagccgcaccggaggcctgaaaccgtctcctccgctaccgccgccgccgccgccggaccgagggatacgacggttcccgagacagcggaacctgcggccgcagtcccagcacctcgggggaacgtagaccgcaggacagctcccagggggaccggaagtagctgcccccggagagcaatagctgacggaccacgtcctttctttcttttcccttagcaacaggccccggcgtcggttgctacgctgggctcagttgcctggggctgcttggttttcagatttgcttaggctccattcataaatacagatggcacacttctaggatggaccctgggtcatgatttgaatttttcgatgtggggaagggaggccaacagccgaaagtcgggtcaggcctctgctataattagttattattgtggccagagtggaaataggtcgcagaggaaggaactttaatgagcatgaggcccatctctgacgatatcagtagagaaatcaacgtctttaatagccaacaaacttattgtttacttgggtgccaggtatagagctaagtatgttacattcattatttacatttaatattcacaccaactctaacattacccacattttacatcccagggaacccag

SEQ ID NO: 152435 - DNA, 544 bp, Homo Sapiens
ttttgcaaaaaaaggaattggaattttaatgagaaccatctggagtgttttccaagggtgtaatgtttggtacaagaaagtaattccttagctcaaacaaggagaagagaaatgaaggaaacttatattgtgcttactcaccgccccccaactcaaaaaacgacgctgagcagaaccacctaaacgcatgaatcacacgcgaatgagggtgtagtgggggctttggagcaggagaacccgagattctggctctgacttgccgcagcaaggagaaatgcttttcctctgccaaagagactttgagggatgcgttgtggtgggcctggggccagtgcctggaatttgggtaaccatggaaacagacctttacatctatgacaaaaccattgttgaaagtgcaagtcgctcaggcttctctgcataagatccatgtgagacatttccttttagaatgaagctctgaggctgtgtcctggtgacaccaacacttctgtggctgctgaagcggcagctgctgctgctgcagttgttttggaaagctcag

SEQ ID NO: 152436 - DNA, 484 bp, Homo Sapiens
tttttgcatgcaggaaaagctttattaagtcaataagctgttacacttttacaaactgctatgcagaatactcaaacatttttaaatgacatgagaaactactaacatctttagtgagagtcactttcacaattttctctgctcccacacccctaatgatcaacatattcatttttttatttagtatatgtcacgcagcaatttatcaaaagcttttgttgtgaaaacacttttcttaaatacacaattaaaagatatgattaagcacttacaggatgtgaaatatttaaaggtaatacacaataatcgggttaccaaaaggacgccttccaatttttctttctattcattttgatgttttgttcttttcaaaacattttctctcattacattcattactaaaggccttactttaaatacatcatgctacattttgttctcctcttcaaatgccaatgttttaacaatttgaattctctggcct

SEQ ID NO: 152437 - DNA, 556 bp, Homo Sapiens
ctggggttcccgggaggcggaagggagatcagccccagctcagccggcggcccttagagacgcgggtccctccgtttggcatcttgcctgctgtccctcacaggctgtggcatcaacaaccttgtcgtcacatcgccgcgcattcgcaggctctgctggtccgtggctagtttcttaaacacccataccgcttaccgctgctgactctttctgttcttcccatactttgatggctggaataggataattactcaatgttttcttcagaagtaaattgtagagtaaataaagaggcggtagctctgtttgagatttcaaggagtcaaagaatttgactattgagatttgtagtgtgccaggtactttcataggtggcgatttaattcatttatttcattgataaaatgttttagtattttagaaattggacgatatgcagatacacgacatacattccagtgaaattagcctcggtcaaataaattcagggttttgaaaaattaattattttaattgattgtgccctatagcattgggagatttacaaacagtgaaa

SEQ ID NO: 152438 - DNA, 498 bp, Homo Sapiens
aattaagtttatattttgtaagttttccatctgagggtgtattaccagcaatgaagtacaaagcaaaagcagcagaggcatgtcagtccagataaaatattgtcacaagccataaaatcattagaaaccaatgatgttgcatgctttcttgatggcaacactatctgagagttaagttgacactgaacactgagtcagcttggaaaatgtccatcagtgtcaaggctacaaaagaaaatattaaaacaggacaccaatttttccccttcccactgtttattttatagcttttgcatcaggtagtcaactgaaacacttcaacatcagaaagctggcagaatgttaaggaaaaggagtgattatctctccaacagatgtgacaaaatggtttcaagttggaaacagaatttgcataaatgaatcaactgaatggagtgggggagggcagggagagagaagagagaaagtagtgagcatcttccaacaggactatgaggg

SEQ ID NO: 152439 - DNA, 550 bp, Homo Sapiens
tttaacaaaaataatttttattataattttcattgaaaaaatacagaaaatcaataaaaatgagcagaggtaaatagtcaatattaaaacacttcaagcaaaagtaaatatacagaaaacagtaaaagtgaatgtaagtccatagtcaatattaaacagttcaataaaaaaattaaactattgatccaacctaggcatttaggccacatacggaaaggaggtgcaactagacattcttgaagcagtcttttctttctcaaaggtgctgcttagatccaaggtgctgttttagactaacatctgaaggaaggagagggcagaggagggagagaaaagggaacaggagagaaaatagaaagaggggaaggaagaaaaactaatatttcatgagcttttaaaaaatatgatgttaaatactttgttaggcactgtatgcattacttcatttaatcctcacaacagccctacaaggtaggtattacttctcttcattttaaagataaggaaagaggctcatagagtttatatcatttgccccaggtcacatagt

SEQ ID NO: 152440 - DNA, 488 bp, Homo Sapiens
  misc_feature (469)..(469): n is a, c, g, or t
tttgctcagacctggaaaaaataaaaccaatgttttcaacaagtgatgattactccctttctctgtatagaaatctttatcatccctcagacagttccttctggaacaaatcttcctcttctcccccagccagtcccagtgggttcacctttacaggctctgggactaggacagagagtaagacatgtgaaagtttcttcattgggaatttttagcatagtccaccttacatttaggtttactcacctgtaacttcagcctggagtgaacacagacacctagttttcctgcaaaatcaagaaagaaaaatgtagtcttgagagactttcattctatgtcacattttacaatctctcaattgtatctattgcttggcagaaagaagtttcagggcacattttataggaaacactacttagcccaagaacttcctattggctgtaaaacctcctcaaataacttgcaattnttagaacatgtcactggaa

SEQ ID NO: 152441 - DNA, 368 bp, Homo Sapiens
gtacctaacttgatcataagggttatttgagcaagtaacattaactcagtggaaggcattgtcctgtgaaatattcttaggcagatctgcccacatctttattgaacttgaaatctaatatttctagtatttgaacaaagcagaaggttaagtcagggaagagcagtgctgtccatgatgtaatggaagctaccaggggaggcagtgtctggatgatgctgtgctacctacccctgcacaagccatgctggctcagtctgagctgtgggccacatcagctagtggctcttctcatgcatcagttaggtgggtctgggtgagagttatagtgaggggatggtcactaaagtatcctgacaagttcctag

SEQ ID NO: 152442 - DNA, 509 bp, Homo Sapiens
tttaattttgcatcagagccccagtttgccgaggtttagaatgacctctttggttggcagcgttcctttctccctggaacttctctggtgggtagagtggccagggatcggcatccacaggccggggctcggccctgagcgtctgtggggcctggagcagtcgccatggctgtggagctgtcacctaggtaaccgacattccgccagcgaaacagtctgtccacagcaggaggaaataaaaaatgaaactgcagcgtcaattctttatgcactacggttttttgagtgctactttgattttggaaaaaaggctgtttcacttctccattggattttggcctccgtgcccctgtgtgaccctcacatttcctgaaccccatgtatctgtttttacagtgtcttttaatgaaagatataatacggacacagttcagtttgtattcctgaatgactctgaggaggactgcgtttcatataagtttttgtgaataactggtaaggcagacata

SEQ ID NO: 152443 - DNA, 462 bp, Homo Sapiens
tttctcaaaataattttattcttactacataagatccactccatcacagctctttgtgttctgctttcttgtttattggatacctcttcaggccctggacggctcatggaggagacagggactctccccaggtcgaaggcccaaggcctggatgatggggtggggcccaggatgggtgccaggggtctggcggacatgagtggatgaaggccctgggcttcagcttcctcttggtggaatgtgggtgatgaggtccgaccatgcagcgctgctgtgaggaccggatgagaggatccctgggaggtggccggtgacttggtaccgtcacctcagtgactgttcttcatcctcatggatgttcagagaagactggttcattccctctggtggccgtctgtccaccagacaggaccgatacatcctctgaaaatttcatcactttaggcaatagcactttcattc

SEQ ID NO: 152444 - DNA, 604 bp, Homo Sapiens
  misc_feature (66)..(163): n is a, c, g, or t
  misc_feature (355)..(393): n is a, c, g, or t
  misc_feature (432)..(544): n is a, c, g, or t
gagtacggaatggatggaggtgtccttcaccagctatgggaaaggccagggaaaggtttaaagggnnnnnnnnnnnnnnnnnnnnnnnnnnnnnnnnnnnnnnnnnnnnnnnnnnnnnnnnnnnnnnnnnnnnnnnnnnnnnnnnnnnnnnnnnnnnnnnnnnactctttagaaaaattaaagtagagaaaaagaaaggtttaaagggaagagactgagggttcagaattgtacctcatcagtttctgagattcctgtgagctctcccagtgcataaataaatgtgggaatcattaacaaataaatggtatgaaaaagcaaaggaatggatgagaccacccaggaaaagtgtacnnnnnnnnnnnnnnnnnnnnnnnnnnnnnnnnnnnnnnnccagaataggccaggcatggtggctaatgcctgtaattnnnnnnnnnnnnnnnnnnnnnnnnnnnnnnnnnnnnnnnnnnnnnnnnnnnnnnnnnnnnnnnnnnnnnnnnnnnnnnnnnnnnnnnnnnnnnnnnnnnnnnnnnnnnnnnnntgtggtggcacatgcctataattccaactactcgcgaggctgatgcaagagaattgcctg

SEQ ID NO: 152445 - DNA, 533 bp, Homo Sapiens
tttatttttaagggaaaattgaaacactggttttgttaaaagtacatatttcaatttggttccaagaatttgggcacgggactggctgagcacagactgactcccagcctcagttaacgagctggtaggagtcctcgctccatcccctgggccctgctgctctgctctcccgcttcctctctgaacgctgaccagccagtgaccccatccagtccagttacccctgaccagtccagtgaccacatccagctaggagcagcatctggagtggccctaagccctccctccacacccccactttccaaggggacctctctcttccactgcagctcatccactctgccaggctcctcctgcttctcagcactgcgtgtcatttacacctggggcaaatggcctttccagaccttcctggaggtgcaagctgtgtgggagtgagcatggcaatgtgagagagacttccttctttagtttaaaatggccacaaattatgcaggtaaggacttcctgagttcacagattctgcaagtggg

SEQ ID NO: 152446 - DNA, 649 bp, Homo Sapiens
tttcttcttatcctttgctcctggagaaacttgtagcattaaaaagtggtagtgataaaattatatttttccattaataaattgctatttttggggacaccgaaaaatattttttactggacggtaggataagcattcaattttttgtgtctaatcatacaaaatttctcatagattagctgctgatcctacctctatccagtatttctatggcatacacattctagatagcaaaggggcacattatctcagaatccaagaaaccccactgagatcataagcacagaagaaagattatgtgaatgaaagaaacctgagatattttgattaatttagaactctgaggctatccactgttgccagttttttcaggacatctttctcctattccattatgaaagagatgtagagtacatatagcatttaaaaatataatctggcttttctcatacatatctgaaacttttgatctacccttatattatcaaagtaaaagtgatattctcccattactgaaataaacagacatttattaaatgatgtagtaaatcatatgctgtatattcacattttgaggtctctgatactacagaccttaataatggttttacacataagagttttgttggccctcgtgccgaattcttgg

SEQ ID NO: 152447 - DNA, 321 bp, Homo Sapiens
  misc_feature (98)..(98): n is a, c, g, or t
gcacttttgtttagtctcgctaaagttatatttgtctgttatgaccacagagttatatgtgtgtgtatcaaaagtggtctcaaaatatttttttaagnaaaaaaagcaaaaacaatgtattgctgataatcagtttggaccagtttcttaaggtcattaaaacagaagcaaattaagacaggtttgactgcagtggtgtctggtatccatgttttatttctgggcacaagctagtttttatgttgatacgttcctgaacatattatcttgttggacatcttttctcttgtgttttgtttgaatgtgcaatagtttataggc

SEQ ID NO: 152448 - DNA, 525 bp, Homo Sapiens
tgatcacagcatgaaaatgactgtgctgctttttagtgtctggctgcataatgtacaagtcacaatttgctgtttttttcaggaggagaaagggaacctcctttactattctatatcctaaaatctacttctaatcagctttatactgttgcctgtacagctcagtgaatgtactttcatctttaagagttcagatatatgccagtgaatatttttgctgtagaggagaaagtaaaaactccacagcggggatctttttctttgcttttgaaaccaccattgaatcactatcgttttgcagactttgcacaactgtacaggagagtggcctttctacagcacattttcagtaatcctatatttagtcaaaatggatgagaaatcatgtattaatgtttgtatggaattttgggtccagtgtaatatttttatcatttaaaaagaactctatttgtaaaaacatttatttactgcatggatattgacgcacattaaatttgtgggattttgtatatgtaaaaaaaa

SEQ ID NO: 152449 - DNA, 494 bp, Homo Sapiens
atatggattggattaaataatctctaaagccctttcttgctctaagaactctgaatctttaggatataaaactaaattctttattctacaaatgtataccctttccagctttgagaaccctgactcttaaaaatccaaaactaaattttatgttctgtaaatttttggaattcttacagggacggaagaagtctatagtggctgtggagcccaggagtcttattcaaggagcctttcaaggctgctcagtgtccgggatgacactgaaatacatgtatggggtaaatgcttggaagaactgggttcagtggaaaaatgccaaggaagagcagggggatctaaaatgtggaggggttgaacaggcctcatctagcccacgttctgaccccttaggaagtactcaagaccatgcactctctcaagaatcctcagagccaggctgtagagtccgctctatcaagctgaaggaagacattctgtcctgcacttttggc

SEQ ID NO: 152450 - DNA, 541 bp, Homo Sapiens
tttcaaggtcaaactgatactgttattttgaatatgagggggtgaataaaattgcacactgtaagaatcctgagactatgttacacacaactagacaattttttggattctcccagcgtcttaaatattttcttgcttaccaacaacttcttaacctgtaggtgaaacacaatgaaggcactaaatccgaaaccacgaaatttggaagcagacctaggcttgtactctggcattactacttactactttcgtaccttgtggtagatactttaacttctctgaatctgctttctcaagtataaacaatgaataacaatacctgtctggagtcatgaatgaagatggaatgagattacactgcctggagcattctgagtgctgaataaatggtggtttcattctcagctctccttcagcaatcctgatctgacgctcctgtgacagacatttgtccacgtaaatacggtatgttttctgattcttcctagcaacttcctttataagtaatccacccatacatttacatgttaattctaacaga

SEQ ID NO: 152451 - DNA, 894 bp, Homo Sapiens
tatgcagttattttgtttgttggagggcaaaacatgtccttcttacatgtcagaattcctaagtgaaattggtggtctgtctagttcaataagatcatagttttgccaccctgcagtgcttatcataccctttgttacgtagaatcatgtcaagtttgggggtacctgataatgtatataatggctttcgtcccccgttaaacatggtaatgggaacaaacccgaccagaaaacctggctatgggtcaaacagtgaagctggggaagggaagtggagtctcttcaaaagctctaggattttgagtagctctcattcatcagaatatcagaaagaggcagttggtgtgtttttagcatttgttgaatggataatgttgttttcagtgaacataggcttcaaaggtaaaatcaccaactagtgatcttagactctggattccatgttgctgccccacgaaggcctgtcctcctaggtttccagacttccccagttggtggtagagatcgccatcttcccatagctgtttgggagcatggacgtgtgtgtgctcctgtgcaaatatcaatgtgaaagacacatgcagagttaacaattcacattccaggcaccactgtggcaatgaaatgctccacataaccgtattttccaaaaattcaaagtctgtatctttaatttgttgtgttctttaggcccttggtttcttaaacagagcataataaacatccctttttatgatgagaactttttctgttatgaagcttcagcttaaagttgataaagttgttacagttattgatatttgaccactgtgtgtatgagagagtgtgtgtatataagtataaacaaaatgtgacttactgagtaactcctagtggtaacataattagtggaaa

SEQ ID NO: 152452 - DNA, 550 bp, Homo Sapiens
  misc_feature (321)..(336): n is a, c, g, or t
cttagtctacggcaacaaaataatagtacaggacccactgcagattggtgtagtaatacaagagatgtgaccagagatgagaagaaagagacccaaaaaaatgatcagaagcagaaatgggagcccagaagtgcagctgaccagaagcatttcagtgtcagatcacacgcagcctcctctgtaatgagatcacagcacgtctcatcagttactggttttcattatggtgacactgaacactcatgaaaagttagcattgaaatatgttggtatctccaatttagaaaggtagtgatgatgggtacagtgtttttacggggnnnnnnnnnnnnnnnntgcattcatgtttgtctactcttaaaacccagctgtccaagaacgattccccaaggccctgtccatcatttctctttctatccttgaagcgcagtgtctgacacataggatgtgctcattgatgccagatgatgaaacttgaatggctggtttcctagggttctggataactctgttttaccgtggatcctggatgtattccaggatgacttta

SEQ ID NO: 152453 - DNA, 464 bp, Homo Sapiens
cttaaaacatttttacttctttcaacccagaaacatcaccatttatgaggacaagagggaaaggaggaggggggcaatgtggcatgggggttaagggacttccatctgagcttgggagcaggtgtgtggggaggagtgccatcaggggcactttcgctccacgccctgcttcccgccctcctcattttcctgcttggagatccacatctgctggaaagtgcccagtgaggccaggatggaacccccgatccaggggctgaacttgcgctccatggtgctgttgctggcaatgagtttcagtcgcatgctcggtggggtcttctgggaaagctctcgattgagcctgtcagtgaagccctgcagcagtgtgttcccgccggtgacaatgacactcccgtacaggcccgggcgaatatcaatgtcacacatgccgatgctggtggttaccacgtggcccacaccca

SEQ ID NO: 152454 - DNA, 561 bp, Homo Sapiens
  misc_feature (16)..(16): n is a, c, g, or t
  misc_feature (115)..(131): n is a, c, g, or t
caaataaatacgctanagagtattttccagtattcgctgttacaaaatcataacatcctatgatacaaacaacgagattgtataacgtccccacatcgttttttcagaactaacnnnnnnnnnnnnnnnnngtggagaaactcagcaaaaaaaagtggcgagaaaagtcgggggaggggcggtagaagagaaggggcggagaaacacgacactgaggcggtgatatcacccacagccaacggcatggaattcagaaagttaagtgtcacccagcaatctcggtgcggactcgcggcgcgcctgcacagcgtggcggctgcatcccagccaagcaggaagggggagggggaggcctgactgagttcgctcgggggcagctgaggggagggctgcccgcctcccggacggcgcacgttcgagtcccgggtcgggagacttgtccgtcgcccgacaatgatttcatcttttcggaagagctgccgcctgggccgcggctgccacgtgcctggtctggccccgtgcgctgcgccgggggacctacccggacggggccgcggccgc

SEQ ID NO: 152455 - DNA, 440 bp, Homo Sapiens
tactgccaacgttttctctttatttcaggataatctatttctttataaacacacatatttaataatacaaaattaacaaatgcttaaatatatcttgtcaaatgtcctgaaaggtatataatgttacacaataaaaaagcgggttctttaagcaagccagggaccagcctccccattgccactggagtagaattttctggtgttcgacaggatcacgtgcagatgttgcaatgcataattccagggagcaccattcgtgtcaggcaggttgcgaatggcacccccttaaagttgtgcaacctagcaaccctggtgctcagtaccgtgaccatagcgacagtggtacatacgcaggggagatagacaggagggaggatgcaacagcacagcagatgcatcaaggagtttgcaactacccaccaaccttcaaaacaatggat

SEQ ID NO: 152456 - DNA, 419 bp, Homo Sapiens
tttttaacaggctatgtggatgacatgcctggtcaaaccaatcccgagccctatgcaaatcaaacactggcaccttcagcctcttcatatacctgactggtatccgtggcaggtggggttccctctcttggttttggagctcccctccctctgtctctgtacaggggagcttatttctttcttcccccttctttcttgcctactaaactccctgctccttaaaactactccatgtgtgtccatgtcatttttttctaattcgacccaagaggaagaacctggggttctccactcatcggagtcgtatcagtattttggttagcagtccaaatagggaaagaaactgaaagatacttactattagtaaccgtataatacagtgtcctcaatctgtctgctgacattagcattagcccagt

SEQ ID NO: 152457 - DNA, 381 bp, Homo Sapiens
cacatttcggaatcttctgcggcttgtccatagtgtgaataaaaactaaatcacatctataattctactgaactggtcatacagacgctgccatatatgtcacagtacactgaaaaggagccatcagcaatggtccacgaatctgttattgctgtctggcccaaacctgcaggagggtatcatacaatttcaggctggagatatggaagaatacatgcttatgtcagttttaaaccatgtatgaccagacattaaagaagcttttgtcgggctggtgatgactatgtagtgttggaactagatgatgttccaaaggaaaattcctcaggttccagtcctttggatcaagttgattcttctttacccagtgaacctatattt

SEQ ID NO: 152458 - DNA, 248 bp, Homo Sapiens
gagttccaggagtcaactgaagagagatttttggtatgaaaattacatatgcaaaaagactgattccagtacatgaaattaaattcaacatttacattaaatgccttcaaatatggtaaaatggtttcttttggcagtttacctcattatgttttgaatgatttgtctatcatatgaaataacttttataaatatagtaactcaggcctgggcacagcgggctcagtgggaggactgcttaagcaacc

SEQ ID NO: 152459 - DNA, 490 bp, Homo Sapiens
tttctattgggtacatctctggaatataaaaataccaatatttagagaggggctcataaactactatacaatattaaggactgagaatacctttctctaagctgttctgtttacaataatttaggaaaagtgtttaataatccaggcttaactacattagcaaacttgtatatctggacaacgacctggggtactgtacatgattctaattagtggaattttcctgagccatcgagtttaagttatacacatctaaaaagaggggcacatgggggaggagcgagaagggtttgtgctctattaacttgggactttaatagtgcacgtctgcaacccggacaagatacaacagcagatacaaaatggtctccattttgtcatgccaaattctcatgttacacaggttttccctttactttgtaaataaacattaattgttaattgttaattgtgtgccttactgatccagtagataaagtaaccgtgtctc

SEQ ID NO: 152460 - DNA, 481 bp, Homo Sapiens
tttgcattaaataaatataaattttattaaaaacactcacatagcattatcaggaatgatataataataaacagctttcaaataacctgcattcataacattacaatacttacagtatttataaccatcctcagatcttataaaccaaacatctcatgaaaatgaaatgaaactagtttttaaaaaagcatagaaaaatgcacacagaagttatcttagtgtcaaactgcaaaagtttcctacacaagttaaccactagcttcagaagtgaactgtacatcactgtgcgtcaatcaagatgaaaaattcattcaagtaaagttgacaccactcagaagcattttcaagtatggctatatagtcaacctgatattcctatattagcaaattgtagatctgctttccattcattctaactgaggcaggttttatatttacaattatagatctgatatttacaatatgccactcaatttcttct

SEQ ID NO: 152461 - DNA, 409 bp, Homo Sapiens
gcaacaaagagtttaatggacacaaggccagccatgctgtatgggagacagagttattacccaaatcaattccccgaaaattcaaagtccagggagcctgcttctgactggggcctcaggacttgtggggtggagggagagcaggtccaggtggagccatcagtcgtcagaaatgcaaaaacctgaaaagacatctcaaccaccaatcttaggctctacaatagtgatgttatttgcaggagcagctggggagttgcaaatcttgtgatctctggaataatggctggtaatcttttatgtctacaccttagcagaattcaggctcctcacatcctcctaacctggtggcctttcattagcttcgcaaaggtgatttagtttgggggaagactgttatcatctaagctat

SEQ ID NO: 152462 - DNA, 359 bp, Homo Sapiens
acattaaaaaaatgaagagttttcaaataacattaacccataaacaactgaagggggtatgaagaacaaaacaaggcctgcaattttcacctttactgctatacattcacgtgttatcaggtagagaaggactttgcaaaattacttggtcaaaccaagaagttattttcttctgacaacacttaaaataacggattagcagcaaacaaatctagtacactcacactgtctgtaacgaaagtcatgtaatgagatcagccaagcaaggagaagagtgatatagaaggagcaattaaaaggttccattgataaaatatgaaaaggtaaataaaggatttaattagtataaaatttccagt

SEQ ID NO: 152463 - DNA, 565 bp, Homo Sapiens
  misc_feature (545)..(545): n is a, c, g, or t
tttccagttgaaaactatgcagatgtttttagacagagcaaaacacaacacagtacccaaaaacggaggcagcctgcatgctccaggtctacacgagcacctcacagcctgacaaggggcagacagcaactcacacgggacgagcttcagcacacagacagcaaagcaaatacgagacttagactgaactgcaaagagggaaagggccatttcaccaatggagtaactgagagaataatgacttagagcccaatctgcctgccatctccctgagccgtcacccgtcactgaagatagcgcgagggtgatgcttcaactcaccatcctaagggtttgtgtacaaacacactcgagggcatctctttcacagaaagaacaaatgtcatttgtaccaaatggcaatggattttcagcacaaacttaatactttcctaacactacagcaatagtaatcatctactttcagcaagagggactcctttaaacaaggaaaaagactcacattaattagcctatgtacccactggatcaatctgcagcaacanagtctaattaatcctcgttc

SEQ ID NO: 152464 - DNA, 675 bp, Homo Sapiens
tttagttgtatctaaactgctgttaaggtcacacgttgatttttaatttcagttaatgttttttagttctagagttcctactggcttttttttgttgttgttctctaaattctttgccaaacattcccaatcttttctttgatttcccttgagcatcttattcatagtgcattgtctgtaacacctgtaaatctctttctagttttctgttgtttctcttggttttccaaaacactcgttgtctcctcacctgactggttaaattgtattgtgtgactgagacactatgtgaaagcttatagaggtactttgaggctagaatgaagttttatttctctaatggggatttatgtttgattcttgcaagtactaggggcactagcaatcctgcacaccatcttaatccaatcataagttaagataatttaaagctgagcacaaatccctaaagaggacaatctatttacagcttagtctgtattctgcaattttaacatcagttcccaacccagatccctaagcaaccttaagagcccattagtcaggctgacagaccagccaccactctcttccttatcatgccataaactccaatttttgtttttgtaagatcagaagtaagtttaaagtaagtttcagcttgtcagtatcccagccatttcttctggaaattgg

SEQ ID NO: 152465 - DNA, 662 bp, Homo Sapiens
  misc_feature (588)..(621): n is a, c, g, or t
tttggtcccatggactaatcatttatttgcactcataaaaactggcttgctttgaaaagcttcctccaaaagctgtattgtggtacttttgactctgggacaagaggaagaagttggggaattcgggcagttggtggctgggccctcagagactgtatgtggtgaccactgtttaagacaccattcatcacttggggacggagggagcacatagatggaccccaggctcatggatgttcctccttccgcagtcatttactaaaatacctgtttaaggaatatagttccagtctcagcctagttgagacaaccacaggcacttaaataagtaccaaggaagcctctgcagagatagtgctattggaactgagtcctgagggccagatcagccttgaccaggccaaaaaatgtggaagagtattccaagcggtaggaataacacatgcaaacacctgaaagcaaagaggagcaggtcacatccagcaactggtgacttgtttactaaggctggagatgaaccttggaaggaagaagggaagtcaagaggccagataatttggcagaggctagaggctctgttctactgannnnnnnnnnnnnnnnnnnnnnnnnnnnnnnnnngacagagttttgctcttgtcacccaggctggaatgcaatag

SEQ ID NO: 152466 - DNA, 717 bp, Homo Sapiens
ttttttattgttaccaggatagtacttttattaaattcctgatacgttgtcaatattgaaaaaactcaacaacttaaatgtacacgcacagtttgaaaagctggaaaatagtgaaagaatatccccatacccacctttcgtaccagtccccaaacatcacggtaaagtttactgtctcttcccagcccatggacgggaatggtaacgcctacggaatatgttgtgacatacagttgatcctaggttctccagaacaaaatgctgcacgaccacctcatcctggccctttattaaatatagcttaattctggacacaaacagttcccaccatgaagagagagtaggtgaccggaaaggagtgcgtcttaagcgcgttcgctgaatttgcaccacccaatccagccccgccgcccggcgccgctccttagacctggaccccggcaccctcccgccggggccgcacttagcagtggaaagtctgtcctcctgaagaagttgcgctccgacctccaagcatcaggtcaaaagtctaactcattctctgacctgccgccaattagaaaacaactgttgccaataaacgtggtcgcgccgcctgtgacctcagccgggacggacccgcgggcgggagcctgcggggcgtgaggcggggtggggccctggctcccctcccccgcccagccgcggcgtctgacgtcccgcgcgtcggcggccgca

SEQ ID NO: 152467 - DNA, 479 bp, Homo Sapiens
ttttttacaaaagattttcagtataattcattaaaatacattttaattgacaaatacttcatttgtaaacatttagacaccttctatgtaaactcaggctggcacactgacagctggtactaacttccctctgaggaaagaggtggctgttaaaaagaaaaagcaaatagtcagtccacccttagtcccagctccactgcttttaaaggttccatgtcagtgtgtcaacagagtaggtatgccatgaggcatgcagaattacttatcattatttttaatgtgaaaacacagtgacagccagggccaagcaggcattgtcatacagtgctgacagaaacataaattcagaattgctctgcaaagcaatttggcaatgttatcaaccttaataattctggaacccaataattctgctcctagagccctatcttcaggaaatcatcacacagataccaccaaagatttacaaagttgttcat

SEQ ID NO: 152468 - DNA, 415 bp, Homo Sapiens
tttttatcattaccttttatttcttatatattaataaggacaaaaaaaccattggatgatttttaattagatgtaaaggctggcatattagccataaatttcatttcaggagcataaagggagcaacagcaagcattatgaaaaggcagctttgggtctgaggggtggagaatgatggcctagagttgccccatggaaagcggtggggagcatgggctctgcagtccagtccaggccactacttgcagccatgtgactccacaggcactgcttaacctcgctgagcctcacttccttcttggcaaatgtgagccacgctacaaactgcacagggttcctgggaagactgaagggcggagtgtgcatagcatttggcagagtgccaggtgccagaaagggtactcaatgtccctat

SEQ ID NO: 152469 - DNA, 559 bp, Homo Sapiens
tggtaactgctgtttttaagcatgtttttagagaatgtcattgttctgattcagatccattttgctcatgtgtagaaatctaagtacttctgctgcaaataccttttatcaccacagaaagacaactattatttctagaattgcaatgagtgtttcaaagacaaggctttttaaagaattcaatccagttcattttgtgattgcaaagagtaaaacctttttttgaataacttttaaaatcctcaagcaggtgagttttaaactgcttctatcaagggtcagatcaggtagggctttgtaaaaagcttgggtcttttttgggtaatgagaggccacagaaggttacagaaggacagtggcattgtcagatcggatcactctggccactgtgtggggaacggtccaggagcagagtgtttgacttccccagcagtgccttcttgtgcaggggacagtactcttaggtaaatttgagtagtgggtctccgacactatgatctgtgatcccgtttcaacctgtcctgatagcctagaatggacaatctttatagatgattaa

SEQ ID NO: 152470 - DNA, 480 bp, Homo Sapiens
tgcggccgctccacatcagaatgtaacaccaaactaaatgtttgtgtactttaaaggacctaaatctctgtgtatggagttttcagcaagcacgtgaagttgtcaccatccttaatcttgcttatatggtagttccatttttccactgcccccaatatttgagtgctgcttgcttggtactcaggtattgactggaagaagaggatatactattacaaaaagattgtcatctcatttttcttttgaacgatggaacaaataacagcataacattaagtcttaatgtgattttggaaaaagacttgaaaacttgctgtctgctgataattaagaagaccttttcactactagcattgtaaatagaattcgggccttggaatagctgtactttcagtaatttggtaccaattacttttggctgatttgtgtttattttcttgagagataagtggaggatgtttccatatcaaccagctagta

SEQ ID NO: 152471 - DNA, 599 bp, Homo Sapiens
atttgaattagcttttttagcactacatatttatatttatatttatagacagcatcatttttgtgctctccttggaccttcagcacgacccggcgccagagacaattcagttttctggaggtcaaagaacttgacggataacatcatggcacaatgtagcaaaaacaagcctcctttgctgccatcactgtatcctctccatcactgcctgaggaccagggagtggaatgaagtttgtgaatgtgggagaagggtcggaagtcctcctttagcagctgggttaaacctaagcaagctaagcagatgaagcagaggatgttccttagcttgatataatgttactttccttagattgatacaatgttaggagccccgcgaaataagcaaggaaagaatgatgttagatttcagcaatgtaaacataatattgatgctcaatatatgctaagtaataggccttcattattgatttataaccaggccactagttggtaaatatgtatctactgatgaccaagaacaaggctggtatcagcaaattacaagaaggaacaaatttcccaatgaaggctgagaggtggtaatataacctccattca

SEQ ID NO: 152472 - DNA, 719 bp, Homo Sapiens
  misc_feature (281)..(310): n is a, c, g, or t
gtatttaaattatatatttgaattaattgaatataatttgagttacatataattctatataaaggttacatattgaattatggttctaatctgtttaggaaagaaatgaattttctaagcatttaatacatttggaataattttagtttctaaaaagtactaatgtaagttaagtttatatcaaatgcaaattaccttgtataactaacaagcacagttattgtttaacattatggattttaattgtgttgacacccttctttgaatttgttgctttacannnnnnnnnnnnnnnnnnnnnnnnnnnnnncacgcatgtacttgtatgcaatgtaaaagtaacagcagaatcattgcatttggtttacttaaaattttggagttagcaagtaaacaaaaagctgatagttttatgaagtctcggttaaaataaaatttctttgctatctcactcctaggaagttatggagttcatattttcaaaagatatgttaaaaatggttacacactctgctggccacattaaaaattagaagactcatggtaaattatctcctccaagggactttgtaattccagcttgtcttttcctggactctaccctgctggttcagggacctgagaatcatttagtggaaccattgctagtaataattgtttataagggttctgttgtagagatacctggtggaagtgggcggctgtgtctgtgtgtgcag

SEQ ID NO: 152473 - DNA, 987 bp, Homo Sapiens
  misc_feature (115)..(115): n is a, c, g, or t
  misc_feature (165)..(165): n is a, c, g, or t
gatgttctgtgatcttaagcagactactccaacatccttgctgaggatacaagtcctttctgggggcggtgctattgggcagagtgaaagatgggactcatgtccctcacaatgnaattcttcagcccagatctgtccatttccttctccaaagtgagctccccncaggatagagacaactgtgccacactgtaattccctgcatagaacgctggcagcttccagagagaagtccgaatcacagatggagccccacgtgtcaccatgcttcacttcaacacgtccagaacagggaatgtcccctccaaccagtctgggttccctgtgggctgagcaggtaattttggcttcttcatagtgatcacaggtaagtccaccccattgccagttcttgcagtcccaaagagaagtttcatttccgttacagctacttagaaacagccatgtgtttgttgcctggattttggagtacacttgataagatgttttgagtgcagatccacatcccagctgcctgcaaaccacatcagcttctttcagtccccagcctctgtcacacaccttccctaacagtctctgaatctccacctcaactgtcccagcacagcggctgcctccacctctaagtcttagctccagatctgatccatcagaacatgtcacgccagcatcttcattgtgattgcaataatgctttccccattcatggtgtttacattgccagacagcaggttcatgtccctggcaagaaacgctgtcaagccagatgtgtccaaatcccttactggcgttaactcgaccaatggctgtgacggcagttggacatcccagttgcttgcatgccacagcagcatcgtaactgtcccagccgtcatcacatattgtcccccattccccttggaatctcacttctaatcttcctgaacattcagtgactccatctaccagtctcaggctcagatctgctccctttgaggaaatcacccc

SEQ ID NO: 152474 - DNA, 487 bp, Homo Sapiens
  misc_feature (370)..(370): n is a, c, g, or t
aagtttctacagataggtttattggaaatataatttgcaccccatttaaaagtgtccaattcgatggttctttagcatatttcacagagctgcacacccctcactacaatcaatgttagaccattttcatcaccctagaagaaagcaggtccctgttaacagtcactctctattttcccccaaaagtccctgtccctggcaaccaccgacctatttcctgactctggatttgcctaccttgggcatttcatgtaagcagatcatacaatatgtgagcagatcatacatgagcagaccacacaatacatgatccttcctgtccggctcctctcacttagccctgtgttttcaaggtccttctatgctgtangaaacacccctgcatccttccatgcatgggtccatacttcatttctttctattgctgaataatattccattgtagggatacttaatctgtatttctctattcaccagttgggtcaac

SEQ ID NO: 152475 - DNA, 560 bp, Homo Sapiens
agtcctaacttagaatgattattttttcttgccactgaatcaacttcttttcttatttgggagattacaagatttgaaaaatacttctgtcataacaatttatattttgcaaaataactttgatggtgatttaagttgtttacccaattttattcattctaaatatctgtttatataaaagtattttgaaataaatgtttaggaagaaaaagatgaatttatacattatgaatactgtaaatagaagattcagtcatttttatatatgaaatgggcctatacaaaaatgaaatggagttggtctagctccaaaaatgtaatgaaaatgacagctgggcccagatgacgctaccatgatgtaaaccagtaagtagacatggttccctagtgctttctttgtcatggaagtcatccagagtaccaagagcatactccataccctgcgtggtggagaaaatctgcttggtcagaggagctccaaattgtagatggtttaaaaatattttagcctggatgagccccatcagcagcactcacacacctaccctgttaccacataa

SEQ ID NO: 152476 - DNA, 409 bp, Homo Sapiens
cccagggctttcacttattttattgaagcaaacaaacaaaaacagccactgggtttgtcttttcccctactcctgcctgagcgccgccgggtttctgagctgctccgggcgcggacctagctcacccgcagccggatgtcggagccggagctgctccccacccggcctcgcccgcgggcgacaaaaccgtccctctggccacgggagagcatcgccttgccaaaatcaactcgcattttcatgtattcaaatgagaaagactgagaagggcgatttcccctgctgggcagtcgacagcgttggaaggaagaagtgccccctagggcctcgcggaaacgggaacaaacctccctcgaggcccccggaaccgatatggcgaccccgcccagacctgggtccccgcggccgc

SEQ ID NO: 152477 - DNA, 517 bp, Homo Sapiens
  misc_feature (19)..(19): n is a, c, g, or t
  misc_feature (47)..(47): n is a, c, g, or t
agtgccgatctgtgatggnaaaaataacttcagaataaagcaaaagnttgatgtggacaccagtacccagtaaattactgtgaaaaaaaggcaacttctcttggtccagtttacctttagataaatgttttaagggtaaaaatatgtgtatttcaagatatgtcttatgtaaacttttttaagttatgaaaatcatccatattgaaaaatagaatgttttctattttgaaactgttttgcattgtcagttacttaagcagccattttacattttggtttttgagaacataatagggacctgtatactccttgtggggccgcattttaagactcctgacagctcatcctgcaaaattaaaatccaaaatctaagtcgcaaaattctcttttctccttcctcagttatttacttagagtgtagaacagacatcctcttagagttttttgtaactatcagttatcgttaacatcatatttttattctaaatccttccatagaaacactgcttgttggaaa

SEQ ID NO: 152478 - DNA, 555 bp, Homo Sapiens
ttctctctctctttggaaatgacagaagtttatgaatagaaagtaaaataattctagaagaagggaattcagaactgaaatgagggtccatgaagttgaaaagaaccaaagtgctatcatgccaccacttcagagataccaaagcatatactcctattcagggtccccactatttagtcagtctgccctggcgtttacagataattatttcactcacttcccataactttgtcgcgttgattctgatttctgtgaaatgtttctccttgttcatgatactcttgaagtctactttgactggtagaaatgtagctacaccagctttcttatgcttattttttccatgatttctccccctattcttgaacttacaacctctttagtctttatatttttcagctcaccttttttagacagtatatgctcggccatgctttgttttttccatctgacaatgtctaccttttaaatggagtgtttgtgttctaaggcttcctaacatatttcattaaatactgagtagataaaaattgatatatacaaaccatttcttca

SEQ ID NO: 152479 - DNA, 466 bp, Homo Sapiens
tttacatttttaaatcatcgaaaatggatcatttctaaaggaagaacaacatttcttgacacatgaaaatgacagaaaattcacatttcagtgtccctaaacaaagttttactggaacccacacccctctgttcatgcactgtttgggactgctttctcactaccccagcagagtcaagtagttgcaacagagactgtgtggcccgtaaagctggaaatattgaccatttgggctctttacaaaaaaccatttgccaacctctgacctagttcacaaaatctgtaccttttgttgtttgcagattcctttgagaactggacaaggacaccagctcctctccttgcagaaatgtgagcctgagtgtgcacacaaatgcacgcagacttttgcacagtttcagggattcaaggactcctcaaagcccatccattcacaccaaggttaggtgagagggcttgtcatagt

SEQ ID NO: 152480 - DNA, 1072 bp, Homo Sapiens
  misc_feature (322)..(395): n is a, c, g, or t
tagtagattacaacaacaacaataatttattttgcccacaaacctgcaatttgggcagggcttggcagggaaggttcatctttgtatcacattgaatcagttggaggggttctactgaaggctggagggtctacttccaagagggcccatgcatacaggtgggccagctggtgctggctgtcagctgagttcctgggttcctgtccatgtggacttttccaggcgacctgggcttcctcacaacatagttgctgggttacaagggagagcttacagggctgctgctggtaaccttgctacatcctggctttggaggtcccannnnnnnnnnnnnnnnnnnnnnnnnnnnnnnnnnnnnnnnnnnnnnnnnnnnnnnnnnnnnnnnnnnnnnnnnnttccttaaccatttattctccatgctagtttcagacttctgtctaagaaaatttccttagactttgctgcctatatccatggtccttcctagtcctgtggccatcacaactgcgttatcatcgtggtcttggcaaggagagaacagagccccattggattgcttcttgtggcggccattttgacagccgtgcaggttcgggtagaaggtggtctgagaattggtgtgggaaggttgtcacaaggacccaggagtctgctgtatcttcaaaaatgcgtcctgtcagtatttgggttccttaatttcccttgtctaatctgccattgttcttatggttattttgttttcatggcagtgattaaggggagaatcagctgtcacaccaagcacatgccatgtttcccgaggggacaatctgggttgattcgctttcccagacagtgcttttgcactgactcctttgacccttttgtccctctcttttcactgggttgctatcatttctgccaccagagccttgttgttgaggccaaaacccccaccaccatggaagacccagatgtcctacaggcctctttggaaaacactgtaagcagaattcacccagctgttgggcgccagcagcaagttctccaaagcagctccgcgctgagcaggagctgggcggaggtggaaagg

SEQ ID NO: 152481 - DNA, 534 bp, Homo Sapiens
gcccatgagatagagaccaaggaactttctgggttttgggactctgtgttcaattcatagaaaatgtctttctgcaagttattcttagtgtcttcatgtggcttttatggtttcacatacgatcctgggtcttctctgctctcactgtggtcctcagctggggaagctcccggttccagacaggcaaatatgtatagaggcctggtaggtgctgggtgttgtggtgagcacttatgtttcagcctctcgacaaccctcggccgacagtcgggggttcccaagcggccactcccggccggcgccgtcccctggcggagccgccgcgctccctgccgtccgcgcagtctggcctcgctcggggccactcctcgtagcgctggagctttacaaaatattaataataaagaaggcagaggagaaaaaaagaaagccttcgctccccaactcccaaatcaatttttcaagggggtggagcagagggatttgtttcgaagacgatcaaaacttctgcgaggggcccgcggggcggccgca

SEQ ID NO: 152482 - DNA, 361 bp, Homo Sapiens
tgagcagttctcaatagtgggattaaaatattcagtaaaccatgctattaacagatgtgctgtcacccagacagtgatgttccatttctagagcacagaaagaatagattttgcataattcttaagggccctgagattttcagagtggtcaatgagcactggctgtaacttaaagtcaccagctgcagtgctcctcaaagagagtcagcccatcctttgaagttttgaagccaagcgttgacttctctctagctatgaaaattctgcatcttcactaagcttaatcatttctagctctggacttaaagtgagagacttgcaagtcttcctttcatttgagttctttgaggcccactgggtt

SEQ ID NO: 152483 - DNA, 318 bp, Homo Sapiens
tttacaaaatgttttgaaaactgtcacaaataattcttccaaatgaaacaaactgaattttctcaactcccttgtatattaccatctcagtgtaggaaaattttaacaccttaaaaatgaaacctgacaatgacaaattaatacatataaccattagagtgctgtgacttaacctctgtagctactgtggtccatttttgatgtctggttatattatgacattataactatcaccaaaaaactttttgattactcgctttagaaaagtgtcctgagcagtgcactattcatctttctaataacatgaaagtgaaatag

SEQ ID NO: 152484 - DNA, 283 bp, Homo Sapiens
gtctgctgggctttatagaagcctagtaggcaacagatgattccagccaacggtcagagccacctgggtaatagagaatgcacaccccattcccactcgcttgattgacaggatgaatgacgctgtgggaacccagctttattgacaggatgaatgaggctgtgagaatccagcctcattcactcagcatgtagccattcactcagcatgtagccacacaacagccatgccaacatagccctttgaagttcattcactaatcaataactttattttacttaaa

SEQ ID NO: 152485 - DNA, 508 bp, Homo Sapiens
agatacagctacacttatttctattaacctaatacaactgaacagcctcagttgaggttaatcattacatgtaaagggcctgagagtcagaagtctgtgttaattctggctccatggtgattgtcacttaaaagcagtttctcttgaattttcaagtatacaacagagaaaaacactacttggtaaactgtttataatttctaacaattttattttgaccaaaccatttcagaaaccatttaaacattcataactgttaactcagtaatcctacttctgggaattcagccaagggaaataatctgaaagtaagcaggggagaggcaaacgaatatgtttatttcagagttttaatagaggaaaatctaacaactggagaatgcttaactcaattataatacagccaactggccactgccaccatgtaaaattatgagggctgttcaaagcagagaaaatgctttgttttattaaaataaatgtaactattttattataatactaattt

SEQ ID NO: 152486 - DNA, 769 bp, Homo Sapiens
  misc_feature (601)..(601): n is a, c, g, or t
  misc_feature (626)..(626): n is a, c, g, or t
  misc_feature (657)..(657): n is a, c, g, or t
aacatattatttaatggaatctgtgctcaaataatatgttacaacaaaaatatacagaatgtacacaatacaaaaatacttagaaacaaacattgcagtctgtgttttgttttttccacttactcaagtcctcggaggggcagttcactgttgggcactgtttttaaggcagaggagaaccgtgctttccagccagcacggggagcaacatgaatgatgccaggaaaggctttcacggcacccagggaatctgcattacgtatttgcaaattaaattggacgctgggggaagatcctggtgtggtgagcaacagctcccctaatcctctgggcaagaatggttctcatggaaatcgagagtcctattagctggcaaaagagcctcattagggagcttttcctaattaaaaaacgaatgatgaatggtgtcattaaagcgaaatttctcctttgaaggtttgttttcccttccccagtttctgtgattcctctcccgtttaatgagagccagtgagtctatggctgctgtttgggattccccaagcttcagtttctgtatcctgtggataaaagccaacctacctttcaccagcctgagatntacacaccaccccctgggctgcagncacctagacaaggaagaagacagagacacgncagcttgccatattgggatgtgtgtagaaagtgtgactgctgagagaagcaatgcacaagagaactgtgcgaatcttgctgagggcaatccctattaggaggatccatccat

SEQ ID NO: 152487 - DNA, 502 bp, Homo Sapiens
ttttaaggacacgagagagccatatttatttcacatggacaagcatgattccattgcatgctgaacatgaaagctcgtatgagcaaagtacccgtaacagcagaattatgtgcttttgtccacagggagcagggagaatcacaaagttgttttcagagacagtgtttttcaagcacagttgagaccataggctctgaagtcactggtttatttcatcaccaaagggtctgtctcccaggagtggccggaggtgctttcagctttgcaatctctcaatgaattgataaggtctgaggagggctgaggatggtctcccatcccaccacccagagcatcttgaagaaatgaagctcagagggaagatacatgccacttggaattaacaaggccactcctgggtggacaatgacagggaccgactgctgtgttcatagcaacagaaccatcgtcgcttataatatctatcatcattggaacattcactcttcttaaagcaattctc

SEQ ID NO: 152488 - DNA, 230 bp, Homo Sapiens
actctataagcatgcttatatcatgcttttaatttgactgaatttcttccgaatatattttacacagttgagttaggtgtgtgtgatctctggatgcagaaataaacatgactacgcatatcccaggttcagctaatgttgcaaaaatagcatctcattgcctctttttctccatacaaagtttagggagaaaaaggaaatgctaaagatcaagtgtgaggaggaaggtt

SEQ ID NO: 152489 - DNA, 414 bp, Homo Sapiens
tctgaggctgggacaggctaagcctgcagcaatgtgtagtatctgaaaatgaggtgcttacactaaaaaccccccatgagcacagacactgaggttatctcagagggacatgggccagctgaaggagttgccagacgccaaagctggaacagtttaacaaactcatagtgacagccttggattacaatccaaagcataaagtgcgtgagtccatatgacacagataaattatcatcaacgaacagaaaagagagccaccacgcccagccgttgctggtgaattccaactacaaagtcagcctctaaaatgaatgacacctaaacaattctacttctacccactggcttcttttttagaccagaacagtgcttcctcgctctagaatgcatattaaagtcatctggtatgccttt

SEQ ID NO: 152490 - DNA, 864 bp, Homo Sapiens
  misc_feature (106)..(121): n is a, c, g, or t
  misc_feature (384)..(392): n is a, c, g, or t
acctcaaaaactcccagagatgactttattcctggcccctgcagagctcccctccccacccccaccttgtagactgtaacagattgcaccacatggtgtctgtttnnnnnnnnnnnnnnnnttcccatagggacctggatatcccattaatgggctttatgttcctcatggcaaattagctttacacaggaatttccaaacattgttttctgttaagaagggaggaataccatatataatgtatattttttctacaattagtaggaatcagacaaggaaaaggaaatgtcatctattcatacctttctctccaaattcagtgttctttccatatgctccattgtactccaccactcttctccatgaaaactatgaatttatggnnnnnnnnnagaaaaatggagttttcaaaatgaaagtcaaataattttttccaaagccgtttgtggactgttgcaaatgcataaatattcaaagctcattttctgcagaaacacttctggtatatgaaattattaaactgtagaatgctaaagatcagaagaagctacagtttttctttaaacttgaaaaaaaattaagaagtattaaggaaaaagcttaatactctggaaaccagacatctggtctttctcatgcgtagggagcagtgtgaatgaaagtgaagtcaaacggacagtttttttctgcattatgcacaaggtgttttaaattgtcagcttaaggtttagatgaagataatctttaactttgtttacaatttttgctattttgcattatccccctttttccataaaaaataaagtgaatatgtgtgcatatttattttgaatcaaaattaaacttattttgagattaaaaaaa

SEQ ID NO: 152491 - DNA, 533 bp, Homo Sapiens
aatttattgtatatttcacaataaaggagtggatttggaatgttctcaacacaaatgataaatgtttgaggtgatggataccccaattaccctgatttgatcattatacgttgtatgtttgtatcaaaatatcatatgtaccccataaatatgtacaactattatgtatccataaaaattggaaataaactaccaccatctttcttcagcctattttcctatctcctctcgcaccatactaggcacacaatctctgtacctgtgctgtcttccaagccattgctcatgttttaagaaatatacttattgtttaatatatcctgtaccactgtaggatgactgtagttaacaataatgtgtagtttcaaatagctaatagctggaaggaagttgttgaatgtttccaacataaagaaatgataagtgtttgagatgatggatatgctaattaccctgatctgatcactacacattatatgtatggaaatatcattgtgtaccccatgaatatgggcaattattatttgttaatt

SEQ ID NO: 152492 - DNA, 456 bp, Homo Sapiens
tttgtttatctatttgtctttgaatctaacatgtttcctttgtaggcagcatgactggatcttatttttatttatcttatcaagaaatctctgtctttaaatggggtgttttagaccatttatattttctgtgatcatcaatgtttataaaagcttttgcagtgtacttttcagaaatagtacatatatggatcttccaatagtatatactttacttctttttcatagcctttttaggctgtgtttgtcatgtattttcaatatatgttataaaccccacaatacatttgatgttatttttgtataaagtcaatatcctttttagagatttacatgaagaaaaatatcttgtatacatatccaagtagtcaatatttcctgttcttcatccccctgggtagatccagattttcatcagacatcagaacatgtcttgtgatgcaggtctgctggaga

SEQ ID NO: 152493 - DNA, 460 bp, Homo Sapiens
gatgaattatgggtaatatttcatcttttaaagtttatattttctgaagtttctacagtgaacatgtattgttttatactaagaaaaaagtaattattttaataacatccttcttttgtaattattgcctaaaatagtcattctgttacatataagtacctaggcagaaagtgttatttctacccccgccaagaacaccaaaaaaatgttgtttaaaaactcttatatccagaaacttgaagataatctatactgatccactaaataactgctatctgaaatcactattactttgttctccactgaactgctaagggtgtggtggtggttggaaaagtcaccattgggccttgtgactttctagtgaggtgctgggccccaaaccctctctccaacccaaagctactctacaacagtacagctgccatggaaagcctcttctcttgtcattgaacgactc

SEQ ID NO: 152494 - DNA, 543 bp, Homo Sapiens
tttagaattcagacatttattcttcttgagaacaagtgcattattagaaagagagaatgtaagtgcaattttgagaccaaagaatagaaaaaatctagattcagaaataaaagtataatacaggatggggaaaattaaacaatttcattttcataactacatccttgcaaatgtcttcatagaacccagtgagtttatgctatactctgagccattgatgatatggcaagagccctgggttcggcccttaacctgctgctggggaagcacctatcatttttgtcgcagtcatatgtcaaatgaagagattgagctggatagtttttgagggctgatcatttctagaagcctctgataatgctcattttaagaagatttattcacgtagatatttgaatatatctcctactcagcttcccaaagcataactgcttctcttgtcttaccagtgcgatcaatgacttgttgaaagttttcatttgcagagacaaagaatccagagtccagccactgctgaatactttcttgcttggaatcttctaa

SEQ ID NO: 152495 - DNA, 650 bp, Homo Sapiens
tttctgcattttgaagacattgctccattgtggtctattttccagtcttgctgtaaagtgttactgattctgactctttccacatttctttctttattttgttatgtttgtctctctctttctggaaactaatagcgtcttctctttttcattattgttctgaaatatcatgtccatgtgcctttgggtaagtttatttttaccaattttcctgatcacttggtatggggtattggctttctttatgcaagcttgagcccttcatttttagatgttttatttcaattatttgacagttttatttcttgcatttctggaattattttagaataataatacttctaatattttggccattttaccagtcctctgaatttcttacattcctttgttctcaggtttttgcctcattgtttaattttctaaaagtacagttaagtgttttattttttcacttcaatcatatatatttaattttcaaaggcccttttcttgtactcttccatttttatggccatctcatgacttcaaagctgagtagggattttcttttttcctgttctcttgccctttgtaatgttgaatgtgtttgttttaaaaatattcttggcaattctgtagttcagtgaacaaaggccatgcgtggtaga

SEQ ID NO: 152496 - DNA, 480 bp, Homo Sapiens
ctgagtcatttaatcagaaagaaactcaatccaaaataacaatcttttaaaaaacagcaccttttcatagtgtgagcagaaatcctttggcgttttaaagaaatgctctactgagggccgctgctaagaccagcagtccacttatgttatcgagaagtaggagacggtgatttcattctttaaatgacacaatgagttcagggaatgagctgcagcaggctcagggctgtgtggggagaaaagtcagagaaagcactgcagacgcctgtaaagaaaatgttttatttaaagtgttaaataccatcaccagaatgaatttgatttacattagttggtgttcattacaggactaatctgcccttttttcccaactggaattccctttacttttcaaacatactatgtacagggcaacaacggtcactggcatagtgctagttacatgactaaaccacaagtcgaggtgcagatgtgaaaatt

SEQ ID NO: 152497 - DNA, 725 bp, Homo Sapiens
  misc_feature (17)..(17): n is a, c, g, or t
  misc_feature (42)..(42): n is a, c, g, or t
caggttatgatagtgcnggtctagggtctccaggttatctangtccatcaaaacagtgttgactcaggcttctaattttattgttatgaagatgcagaactacagggcttgaaaggttggtaaatgcaaagtcagggatgcttgagatcttgttgagagccagggtcagcgcctgtagggtgggcagattgctgagggggtgcacaggcacctccgtcaagctgttgtcatccagccacagatgccgtaactgaacaagtccttcaaaactgtcctcggggactgaggtaatatggttggcatctaaacgcaaagactgcaaagcactcagccctcgaatggcttcactgggtactgttttcaactgattattctggagcgttagaactttgagttctttcaacccagacaaggcctttgggtggataaaagaaaggtcgttgcccgccaattgtagctcttctagaaaaggaaagttcttaaatgcatcttctggcaactgagtaatgttgttcatactgatatccagcgcttgggtgaaggcgctgagcccctcgggcacggccgtcagccccttcccggagcagtccacccgacggtcgccgtcgcagctgcagggcgccgcgcagagaggcggcgccgcgccgctgggcccggccgagccgagcagccccagggcgaggaagcagagcagccctagcgggcccggcattgctgcggccgca

SEQ ID NO: 152498 - DNA, 511 bp, Homo Sapiens
ttctaattttattgttatgaagatgcagaactaccaggcttgaaaggttggtaaatgcaaagtcagggatgcttgagatcttgttgagagccagggtcagcgcctgtagggtgggcagattgctgagggggtgcacaggcacctccgtcaagctgttgtcatccagccacagatgccgtaactgaacaagtccttcaaaactgtcctcggggactgaggtaatatggttggcatctaaacgcagctcttctagaaaaggaaagttcttaaatgcatcttctggcaactgagtaatgttgttcatactgatatccagcgcttgggtgaaggcgctgagcccctcgggcacggccgtcagccccttcccggagcagtccacccgacggtcgccgtcgcagctgcagggcgccgcgcagagaggcggcgccgcgccgctgggcccggccgagccgagcagccccagggcgaggaagcagagcagccctagcgggcccggcattgctgcggccgc

SEQ ID NO: 152499 - DNA, 556 bp, Homo Sapiens
aataagagggaaggacaaaagtccactgggaagcagactggacagaaaggaactctgagcagctaaactctgactaatcccagggtatacctgcgttttctcttcaccagacaaactgcggcctggaccagctggtgaaacataattctgaatcctgcccacagccttcggtggttttggatgaaaggccagcgccttgggagccctgcgtttgatttcaagttttaaggccggcactggtggagcaatgaatggtgaaagctctccccttaaaggagcacagttgcctttaggtgactgctaactcaggcttttgctgaggacagtgtttactttgtgagcttaatgacagggctggctttctgggagtgttgcaatgaaacagactcagacacaggccatcatgggcctcctccctagcaaggccgccacggctggcatctcaagagcagtccgttgaacttgggatttgggtgtgagacacagtttcatcagaagaatttaaaccaaagtctacatttgccctctagataaatgtgtgtgttcagcagcaaaa

SEQ ID NO: 152500 - DNA, 356 bp, Homo Sapiens
tttaataaggctggtaaaatactcagcaagtgatcaaactggcctaatttaaagagactatgacgtcttttatgaagttacctttcactcctaaatctcattcttcccaactatagagtaaaataaataagaggacttgcccgatgtagtcttttctttctccatggctagccaagtgagcatcctctgggccttcatttcacatattgcaccaccctctcagctcgtctccctgccaccagcctttcccccagtttactctgtgccacacaggatagccctttgcttcatgccactggcctgatcacagctgcaacaggagagaaacgcacacagtcatatgcactcagaagacc

SEQ ID NO: 152501 - DNA, 692 bp, Homo Sapiens
  misc_feature (606)..(606): n is a, c, g, or t
ttttttttgtgggtcatgctttgttttattcttgaacctttagtcccatgtatgaatcctgagtgttaccctcctgaatgctgtgcactacagaatgaactttagttcacagtaaatgagggatgctttttcttaagaaataaatttaattcaaggtggttagtgaatgtgaggcaatgtaatgccttcacgaaagttaaagtaatccagttacaaaagaagcactgtgtatagtctcaaatagctgaaggtacaatgggctccatattttacaaagtacaaaaaattatttcatatacaaagaaaaatacaaataatgtgcaaaaaccattttcacaggtggcaatttataaaatggaaatgatagaaaagtccttcattcttaattatccccagatttcttatatattaacacagttctatttcctagtgtgtggacaattttaaatttgaaattctgatttatttttaatctacaaagtatttttattttttaaaagggaaccatttcattattgaaatcttatgaatgcatcagttaatttatattaaattataagcaggctatctgaaaaacaaggatatagaaatcatatatacacattnttgaaatattagtttagtatttaacatattaacatttcaaaacaaatgcaatgatctagctacctatgacgccagctggtgtcagt

SEQ ID NO: 152502 - DNA, 546 bp, Homo Sapiens
  misc_feature (496)..(496): n is a, c, g, or t
tttttaatttccccaaccttgctagactgctggtcttacaggattttggggaattaggaagttccatggttggcaaactttcaaagacaggagcaggttaatgttagctatagaagcactgtcactcaagtgaagacagttgttgattggttggctttgggatgtgtctgtttaacaggccatttttgattgcctgagtttcagaagtaaggaaccctcattagttggttagtttgtagaagcatatcctctgaggcaaattgttattagttgattaaaatcatttaaatcagttatagtagctttgttaaccatgacccaaaaaactgtcatttcttgatcagaagttttaaaatctgttctggttgctacctttgtaccactttactgactctttagtttttttctaggaatgtaggagccttttattctcatgtaatgcccccaccctggaatccttgaagaccttctgtctattgttcatatactgaaattntataatgataagccttggtatggattgtttctttctggatatattttttt

SEQ ID NO: 152503 - DNA, 796 bp, Homo Sapiens
ggatacagctgtatgaacacttttctattttatactgaaatcacacaggtttgtgatctaagtgccagaaccatggaggagactctggccttatctgtagggacctaaattttttaagtgctatgaacactgatcaagtagttgtggagagatgagaagaatatatgcagcaaaggtgctgtgagcccagttccaacggctgtgttctggtaatcgtgcagaacagcatgtgggctctgggccttggcaggtgcacagacgggcgggcgtcacgtgtgttcagagcttgtctccacctcacggctctgtgctcttctgtgtgctgcgttgtggccgtgaagtgggagctctcctttccaaaggcagagcttactgtcatggctcagatgttcactcgcatcttcaccccaaacttccctgaattgcagtgatttctgttataaggcacatagcaagcctgtaccactctacagtaaaatctctacactaacagtttaaagcccgaaagctgaagcattcagcctctgcaagtgtagactactggactgtagtagaggcatttggaatacttacaaagtcaagtgctgtggcttcagttcccccggctccccacccctgacatccatacttatgttgtctggaagagccatggacacatcattattttcagcaaccagctgcagtgaaactccatttacagcaaccccatagtataaaaccacaatgcctcattgtaatgggatattgaagttcattgaagaattactaggttgccatgtggctcacttatttaaaa

SEQ ID NO: 152504 - DNA, 529 bp, Homo Sapiens
  misc_feature (398)..(410): n is a, c, g, or t
tttgaaatcatagcttgggagttgtttatgcttcagagatttttaaaccaaggctaccttttaatgtaaatgcacttaaattgaccccacttatttaaatgatgtgaaatagctcagcaatgttcccatgacctgtttttataccttttgatattttatgtgacctccaataagctggacagataataacagaacccttggcattgggctaccactgccactgtgatgctgagtctggtgtcagcagtgaagatgagggtgggaagccaccgaggaagctggaggttgacacaagtggcagtaagggcacatcattacctaggaagaaccttcagaaatcctctgcaaaagacggcctgtttccacccttcctattcttgtttcttccttctgccacnnnnnnnnnnnnnctttcaactaaggaatagaatggccagaagtagttgacaggccctaaggagagcttcacagctaacatcaggtataaatttattattattttttgaatatattgatgtctaggattaaa

SEQ ID NO: 152505 - DNA, 574 bp, Homo Sapiens
ttttgctttgtttctcagcttcttgctctgcatataggcagcttaggaatggcaaatgccatgacaggaatatcatgtagaatattgagctcactttacagttcattttctctaacctcttgtgagttgactgccttggtagtcctgaactcaattttagtcttcatatcctactgacactgccactgttctaggcagccacagtctgtttagcccatgtacctcaccactagaattgacaaatacgctaagggaaaagagtggccatggctcaccttattatatttctgttctacctgggatcttggccctctagtcctgattgcctttgttgctcttcattgctttaaaacatctgagaggttttgcttgttttgggttctattttattcagctttcatatttgttttcagcaggagagttgagtcgtctttacagatagaagtgtaaattcccatctgctgagtttttaagtcattttttcaagtatattatgttaattgccgtatgctttacattcttcaggatgcagtgtcagccttacttgcaagaacatcagctgagttgttagctg

SEQ ID NO: 152506 - DNA, 618 bp, Homo Sapiens
ttttgaagggagggggttttaactgttcccattgtgattatatatgcccgtataaacatttacatgaagaaagcatttcttgagtgtaacaggggatgccatgttttgactcgacctgataaactcatttctttgccaagttattatttcaggctctgcttagccaccatttccctgttcacatttttttatggatcccaggagatgaagactacatttcaaatgctgatgttaaatcactccttgaattactttgagacgatgaccctgggcagtaactcaaaccctggctgaaaagtgtgcagtcctttcacacgttcaaaactaaagaccaccttatcctatagcagtgttttgcaaacattcaattcagctatggtctaagacataaatcccttggaacagaggtacctgataaaaatgctttatggttccaaatgacaagattaaaggtcattattataacaaatggaaattacagactataactttctttttaaaaaattcaaccttaaatcctgtaatatttacatacatatgcattataagacattagttacctagactctttccacccccccgcatttttcactgcttcttgacaagttggcggccgca

SEQ ID NO: 152507 - DNA, 258 bp, Homo Sapiens
cgacctgtcgctggagaggttgggactctggatgcgtgcggggctctggcctaccggtgacccggctagccggccgtgctcctgcttgagccgcctgctggggcccgcgggcctgctgatctctcgcgcgtccgagcgtcccgactcccggtgccggcccgggtccgggtctctgacccacccgggggcggcggggaaggcggcgagggctaccctgcccccgtgcgctctccgctgcgggcgcccggggcggccgca

SEQ ID NO: 152508 - DNA, 580 bp, Homo Sapiens
  misc_feature (22)..(22): n is a, c, g, or t
agctcaatcacattcacactanaatttaacaggagaccctgctgtctttgttgctagcatgagcaaaagtatagaggcctttgcacatggaggatacctagtaaagagcaagtagtctagtttcaagtgtagtatcttgtagggaaatgggagtagctaagcctggaaaggttgaatggggcataatcattaagactaggctaaaaattcgagactttattttttaggcattagggagccccttcccaagtgactatcttccttgaaactttgttttctttcaatgacatcacacgatactggttttattctggactatctatcctactcatgggtccaagggaaacttagtagagatgcgacttgcatggggctgtactcagacatgtggtcctaggtattataatgggattgtccccagattaacaggaagcattgttatcaaaggaagagttcaaactgagatagataagagaagcacaaagtaaaagatagaaaaaacagtgctgagtactttatttctaaggtataaggtgaggccataaacagaaaggtatgcaatgagagtagaggctgcaaa

SEQ ID NO: 152509 - DNA, 805 bp, Homo Sapiens
cgtggaatcagctgtctggtggatgcattcttaggtatttctagaccccgatcagacagtgctcccccaacacccgtgaatagattaagtatgcctcaaagtgctgctgtcagtaccacccccccacataaccggaggcaccgggctgttactgtgaataaggccaccatgaagacaagcacagttagtactgctcatgcctctaaagttcagcaccagacgtcctccacctctcctctgtcaagtccaaatcagactagttcagaaccccggccactgcctgcccctcggagaccaaaggttaacagcatcttgaatctctttggatcatggttatttgatgcagcatttgttcactgtaaacttcataatgggataaacagagacagcagcatgactgccattacaacacaagctagcatggagtttcgacggaaagggtcacaaatgtccacagacaccatggtttccaatcctatgtttgatgcaagtgaatttcctgataactatgaagcaggaagagctgaggcttgtgggacactgtgtaggattttttgtagcaagaagactggagaagagattctgccagcttatttatccagattttacatgcttttaattcaaggtttgcagataaatgattatgtgtgccatcctgtcttggccagcgttattctaaactctcctcctttgttctgctgtgacttgaaagggattgatgttgtggttccttactttatttcagctcttgaaaccattttgcctgacagagaactctcaaaattcaaaagctatgtaaatccaa

SEQ ID NO: 152510 - DNA, 493 bp, Homo Sapiens
tttttgatcagaagtagtatatatatatttttaaagcaaagaaacagaccagcaagataaaacttctaaagcatgtgcacatgctcacatttgtagaggggctgtatctgtgagactgcccctgggggaggccattaatatgaacgccatgccccagctgtccctcgcttggagcctcttaaggcaggattgggaggctgctcccaggattagcatcccatccattctcacctttctggcagcttttcaagatatctggttcctcagctcccagaagattcaggacccaaagttccttcccctgctccagctgggagatcaactccggcttagggacagggaatcccagagaggccacgttcccatagttctccagcatcacattccggtagagcgcccgctgctgggggcccagctgccgcccctccgcctgagagaagtacacggccacatcctggaaggtcagcggcatctcctggtgccctggaagctg

SEQ ID NO: 152511 - DNA, 507 bp, Homo Sapiens
  misc_feature (211)..(245): n is a, c, g, or t
agccgtggtggggtcctgcaggcctcggactcatcctgggatcacgcgaccgacgtgacagccgacactgttccatgaagcacggaggagcctcagtgggtgatggcagccagtgctggacttgatctcagacaactttgcaggctaagctcccacacaccatgctccttgtcccgcagttcagaaagcagaagataggcaactagatgannnnnnnnnnnnnnnnnnnnnnnnnnnnnnnnnnnaagaaatggcaaatttgcggtcgcctagcaaattactgggaagactagaaatagtgtttcttttcctgaacacacacgcaatcactggctaattgcttggtgctgcagatgcaaagttaaataaatcacaataggaacccccaggactccctatctccagttagtaaaaagaataggggctttggaaacggaaagacccgaatacaaattctgtatcagctgcttcctggctacatcactcagaggacatcgcttaactttt

SEQ ID NO: 152512 - DNA, 416 bp, Homo Sapiens
ttttgtattcacactcattttattgatttacatactatttaattacattatatttacacagtaaatatagctaccataaatggatttggggacaaacacagctaaccactcctccctttgtgaacacagaactcatatgggaatgaagaagtgatcatgagctagagactaaagcatgaggggagtgctcttcactatgctggggtacgaaggctgtgagttttatgagtctccaagtaaggcagctgagtaaaaggtggttaagagaacttctgtgtctaataagaagagggaaagcaaacagctaaaccattagaccttgagccatacgcccatctgggaatgttctgagtggcttcaaatgcaaagctgcagaaaaatactggctccccctacctccacccattcaaccatta

SEQ ID NO: 152513 - DNA, 535 bp, Homo Sapiens
ttttttctgtttgcatatgttagcttatatctgtcacctcttcttgctgccagcatacttgagccagtaagagttaccagtgttgattgatagtgcaaagggtggcttaaggccacttggaattagactgagccagaggacagggatctttatacagaacactttagaaaacaaattgacatgaggttgatctcattataagtgactgaagatgcactatgtgaattgattcctgccatggaaccatagacctagaagagattcttttaagtcatctagtccaacccctatcagatactttaatctctcttaaaaatctcctgagtaatgggcatctagcttctatctgaacatctctgtagacttggaagtcacttccagttaagtagcccatttcatttcaaacacctctgaactctactcccataacttcagttaccacatagttttagtcgaagtgctagaagtcaaagattgcctgcaattagcactttattctttatagaaagctgcattaaccagcagtggttaaact

SEQ ID NO: 152514 - DNA, 485 bp, Homo Sapiens
acttctgtgtaactggattttctggaaatatccagtgtagctccagggacatcacttttattcttctacactttccagcacccaccagacaccatgcatagatttcctttcttaaaaatctcatttttctaccttgccatggggctgatttgtatccaaaagtaatgctgcgtgtctaggactgaatgatggttaacaggatgatctacttgggatggtgagatggtcaaaagcataaacttgggggttgggtagacctggctggctgaccttgggaaaaacctctccacgcctcggtctccccctttgcaaaactgagctaagatctactgtgtggtgtctgggcagatgaaagtacactgcttagtgtgatgcttagcatggggcagatgcttggtaaattgtaatcacttttgttgtcagttaaatggatatttcactgttgcctcttaaacgcttacgataatatatactaattatacaaa

SEQ ID NO: 152515 - DNA, 559 bp, Homo Sapiens
ctcttcccattctgacctcagcctcctccattaagttttctgcatccgtgcgacaagtctggggccatggctgctccttgaggctgctgcctttgaggtgctcttgtcatcaatttggatgtataaactactaatgttgactcatggcctagggaaagctaattcaaaggcaaggacagatgattccacagagtagtcacttgaggctcacaaatcatcagacacctgaaatggttttctcctatgatcactttcttcacttttcatatccattttaagtttttccctttgcagctcagtagtaaaatgctctctgatgaatttttatggatgtcctagatgtcttctggcttttctgcagatcaaaaagtttcctccctaagcacacagatattctttcacaaaccataaaggcccttttatgaatccagcactgtaacaggctaccttccacaccacgttgagagcccagtgtacaagctctcaagataaaatacgttgctaatacacaattagtgggagaggttgtctactggagaatttatcttaacgacaggag

SEQ ID NO: 152516 - DNA, 485 bp, Homo Sapiens
  misc_feature (445)..(445): n is a, c, g, or t
tgcaaattcaaattctttattttttaaaattggtggagtttagtttttaggtttgacaggtcaggatcacctgtcatcttagtctagacttcactggttcccattaggttctacactatttctctttaatactttgcaaagtcatttgttccatttttcatataattctcaaagggtaccctgataaagacagtaagcactgttactgttttgttggtgaggaaatagaggcttaggcagttgcccagtgggcctagcatctaggaagactctagctgagtctaggaagactctaggaagatgctaccagaaggaaaaggggtggaattaatgaaactggaaggttgtggtgctggtttgaggagtaaagtatgggggccaaagttggctatatgctggatatgaagagggggttaattccttgcaggtcttcttgagatagaantccaggccctgaggtggcaggcagcctgatagtgaacaga

SEQ ID NO: 152517 - DNA, 483 bp, Homo Sapiens
tgttaacacccactaatattcccagtagttttatatttgctagtatatttcaggtaatgtttaactgacttctctatgtttaacaaattcttgagggtatgaggatggaaataaatgcattgcatgtcttattttgcttatgtactaagtgaatggaagctgaagaaaacaaagaaaacatgaaaaagaaaggcagaaggacggcatgattagggccagggccacagacctgcctctgtcactgatttgctgggcacattctatttcccaacctcagttccttcatttgtaaaatgtggaggctggattaaaccataaagtgaagtcactgttgtggactgaattgtgcccaactccaccaccaaattcatatgttgaagccctaatcttcaatgtgcctgtaattggaaatagggtctttagagagtccattaaggtaaaatgaggtcacagtggtagagtcctaatccagtaggactggta

SEQ ID NO: 152518 - DNA, 390 bp, Homo Sapiens
agctgatgctggttacaagctgaattcatattatgtattttctatataagtcaatacatttttgttttttaaaacacagcctagacagcaaagtgttacacaaaaccgctctttgctgcctcagtatctgtacatgaagataaaaagaagaaaaggaagaaaggaatacccacataaagtgaacgtgtgcccatccaccacccccctcaaagaaagaatactgagctacaaacctcggaaaagcttctgggcaatgtgcagagggtttccaaagcggaagttctccccactgaacaaggctaagatgagttcattctgctgctcagcactgtcttcaggaaactggggcagaaactgctggaggtgttcacgttgagaatcacttaacac

SEQ ID NO: 152519 - DNA, 566 bp, Homo Sapiens
aagcatgtgttctcttattatataaactaaaaaggaaaacaaaagaagactagaattaattgattttataacaatccaaagtaagataaaattgaatgtgcctaaactctaatgttagggaagtgaaatgagactcaggagatcaaagtgaaaggtggcatactgagaattggggggcaaagggtaaagagtctcaggtgactggcttttactttttctaatagtaactgtagcatattctacaactcctcagttttcctcctcaataagaatgctttggagcatacacaatttatctgcttgattaggggtgataagaatttctttcttcctggtcttgctagtggtggctgtctttggaagcatgattgttctgtacagaacaatctggtagaaggtaggagttggagaaaccaatttacctgctgtgtcatctcatgaaattatggcattctggatgactttaggtataattatttttagtaacaatttaggagaagcaagttatcataaagttaaactaatctgatgcatatgtacttgttaaatacagtcccatagttcta

SEQ ID NO: 152520 - DNA, 496 bp, Homo Sapiens
caacaccaggtgcttggggatttcttagagatcaccaaccgactccctcactgtgaaattaaaccaagtactggaaacgtaactaaacagcgaaccatgtagcttcacctgactcagtgctgggggcctctaccatctactgtgcttgtgtcatgatgctttttctctgaagtggtgtgggaagtaccaggggactggcagaagcccaggccctctctacttttaccagcaactgatcatgtctttcagaatccatgtacatataggctgttctagccacagtggtagatttatgattcacatccgaaagtgtgccttagttatcaatttaacatttctctagtattcatatcccttttcttaccatatacctcagtgtatccttcctgtgtcaagccttataaatcatgtaatttagtgccactcatgtaaatcagtaaaatcacaaaggtctatttaatgaaaacgatttaccaatgttgttttttttaacaag

SEQ ID NO: 152521 - DNA, 589 bp, Homo Sapiens
ttttttgaacgccattttttcaaatattttattaatctgtttggccaaacaggtaatggaaactgagaataataatttgctaaaaagttcaggtcatgaatgcccctttcccccaggaaacagaagactccatggttacagaatgcaccattgggttatgacaacgtttcaaaataatgtttccatttcatatgtaacaatgtaaacttcaaaaatagtaaactctaacccctgaccctctttacagatctatcacagatagaattttctggcagacctaaattgtgtaagtaaacagcctggtgcttaaaagtttcataaaaaggtttacagatttcagtaaataatttttcagtcttggtcaggaagtaaaagcagccagcaattcccctcctgcacaatgtaccttatatgggtattgtacaccgcgggccacgctctgtatacactggccatcagctctgtcatttttttgtacacagacatacacatatatagagagttttatttgtttctaaagatttttacatctaaattataagacggcgccagtgacgtatcacgtcacctcgcttcacataggtaaaga

SEQ ID NO: 152522 - DNA, 258 bp, Homo Sapiens
tttttgtaagtgttacttaaaaagtaaaatctgaagaatttacaaaaagctttctctgaaaagagattataaaacactaaagaactaccagagcccataaaggaaaatagcacaaaaagcataaaggcctctcatcaaggtaaccttctcatctggaccttccattctgaggatgtttattctggagacctcaacatagtacggcttcgcaattccttcactatctgatagactcttcaaagtcccggcataatacca

SEQ ID NO: 152523 - DNA, 470 bp, Homo Sapiens
gaggatttactgttttattattacggttattaatgttgtgcatgtgaaaggagaaaacatttggttaaaggcaagtcgaagatgtcatgtaaagggcattttgttgaccttggctcaccctgtcatacctttgcccctgcaaacaaaccttctgaatcaagaaacattttgtacagttgtagcagtttagggactactaacattttgctccaatccggtggatgtctaggaaagacagctccaaaacctgtggcaggcaatccggtgaccctttcgataatcccggagctcactgtttcctcattcaataaagccttgctcttcatttcaacccattctgtgtttaaacacatttgtgacaacttttcatgtgtttctgatgtccaaattggggattcatcggttcccagtcgccgatatgttgaattacacagttttttaactttctcaggaccctctatatcataacc

SEQ ID NO: 152524 - DNA, 496 bp, Homo Sapiens
tttgttttttaattttcaatgctggcgtgccattcattgaactttgacctaattaatcatctggaaacctgttacaatctttaattgatagcactgtggtaagttaatgtataagtttctaaatcaatcacaaaccaaacagcagcggttccttaaaccatgtttaaccagaagggaggggacataatctgattatgcatgacaagaaaacaaaccccatttgtagaataaaatactttaaatggtttaatattgtaaaccagcccccctcccacacacactttttaataatgggttaaacttttccctttctgtaaggccatagctggttttctgactagttgcctaaacatgtttctcatataagcgaaactgaacatgctgctgctattaatcatcataaactgtaaaatgtggttttctggaaaactggtactttgggagttttataatccttttggagtctaagccagcacatctctgtgagttcattcta

SEQ ID NO: 152525 - DNA, 517 bp, Homo Sapiens
tcttggatgctcctactttatttttggctacatcatcacaaagaaagatgctgggtggttgtgcatgcaccggaggacgtgtgtgtattctaggcagggaggtggttacatttgtcggggacagcgggcacccagactaggggcactgtgagcttgctgcatgctgattccagcgcctacaccagcatcaggcttgggcgacacagccagcatgctgtctcctaaggggaaactgtggtgagggaggtgggctgagagtaggtgccaccagggactaatggggaaagataaggtcaaaaggaaagatggcagccaggaagctgttggccaccttggggaaggtgaagagctcgatgtttagaaaatggttattcaaggcaagaaatgagtcctcccatgaattgtgcagggagctgagggtggagggcgttgaaaagttaagagatgtgatttggggaaagtgagagtttgagtatctgtctgatgcttctgtagagaatgtcaggggtttgggatg

SEQ ID NO: 152526 - DNA, 179 bp, Homo Sapiens
ttttctttctttacaattttatttacaaaatgtattaaaactttgtacaatacctcatggcaatgaggctctgtagtttatgcccacacatgcaaattacgcttttatagccattagtttgcttggcaatttttctgttcactgaagtacagctttaacaacaaaaagaaaagaattgg

SEQ ID NO: 152527 - DNA, 464 bp, Homo Sapiens
ttttttaattacaatgatttattctttgtcttatgtctgttttgtcatttccaatgacatctgagaagtagggaaaagtaaatgggtatgttaagtctgccattttataataaaaaccattgttttcattacgccattactgttttcactacaccacaattttaattggtagaaatatgttttagagaagatgtaggacctagtgaagaggaatctagtgacagaaaatgggccctatgaaactgtctacaatctgaaccaagagaggtgatataaagaattccaaaatatcaggcttcaaagtggctatttcaaaagtatagataagttaaaaacaaacaaacaagcaaaaccacacaacctattgaagcattaaacaatagcattttcatgttctcaacaattcattagttcactgtcaccaataccagagagaagttgagaacataataaaatgttactcc

SEQ ID NO: 152528 - DNA, 692 bp, Homo Sapiens
tttttttaaagcttcttgtataaaattttattcactaatagaaaagaaagagaaatagtggaaaactgttaacatttaacacagcgtaaaatacattgcccattctaaatggtttgaggtcttaaagagtctcttccaggggtttttgaatgttcaattctagtaaatatcacagccaaagagttccaggcgaagtgcaatactttgattccatgttttaggaatgacacggataaacctggaaatgattggggggttgaaaaagttcttcacatgtcctttggtattagtatttccttcaaaaatcttgtccaccatggaggatttcagcctgtatggtttccattccactccctgctcactgtagtggatggtatagctctttacatacatttcagaggacagagacttgcagccctgtgttataattgccgttatcttcttgatcttgagtagatcaatttctagccactgcttattgttgtttgccttggcttgccaggcattcacacgtccctgggcattcagacgggcacggaagggttcccagtaatctcccccccaagatttcttaaacgaagaagctgtgatttgcttgttttctatctttccattttccatacccaggggtgtgggacatccatttacctcacaacctttgcagttcaatccgagggtaggtctgttatagg

SEQ ID NO: 152529 - DNA, 443 bp, Homo Sapiens
  misc_feature (146)..(146): n is a, c, g, or t
actggaatgaagcatgagaatgagccatgcaggttgcccagagagagcatccaggcagagggagcggaaagttccattcctcacccagctctgccggcccaggtacttttctcctctgccttctactccccagtctcactccagtngcaacacacttcaggttttctgggaactcctgatggaaagtggctgtatttgttcatccttatagccttggggcacagccagcagcccctggaggaagccccgcaggtgggtaaagagacacagggctcccagccggccctgcctcacctctgcgccggtggcccatccatgatgatgttgatccataggatctgcatggcgttgagggggctgggcaggttgaacacggtggacagagtgatgagactcagggcggagatgctcctgcggggcacacgcagccagtcagcggccgc

SEQ ID NO: 152530 - DNA, 299 bp, Homo Sapiens
tccctcccaggttcccacaggggcttggaagtcaggggagccgggaggggcggcgggggccggggcaagaagccggacggcttttattttgcgccataaagggctgcacagtgtctgctggaatctcagcagttaaagagacccctctgcacaaaggggcgctccggccgtaatcgggaaataaatttgattttctgaattctttggcagctggtgacaaagggccaggtagcgccgcggcgggggtgatccttgcagaaggcggcgcgcggcggggcgtgcgcgccggagggacaaag

SEQ ID NO: 152531 - DNA, 550 bp, Homo Sapiens
ttgagatctcattgaaaatattttcctagttagaaatttatgatgtattcatatttgtcttaaagtgcttaaatattacctacagttgtaaattccatttattctttagcacagtagatgctactgatccctttacttcattatcagaacagagcacaggagagaagaattacaactctctgacttagtaggcaccattagactgcttaatagccagagattctgatacataattttaaaggcttaatgtcaatgttattcaaccaaatatattttacaagttattttctttgaacatgtatacattttagttgtagaagtcagttgtctcttaaacgaagtatcttcacaggaaaaatcatcattttgtgaactctgaaatgaatgaaaattttaaatacaatatcagggtagcctgtaaatgatactagaaataaactgacccaaacacacttaaccagcctgttttccacttagttgtttccgtacttgtttttctcttttaaaacttggcaaattgcattttgaatcttcataatttatggtagct

SEQ ID NO: 152532 - DNA, 635 bp, Homo Sapiens
cggcttttgacttgggaaggacagcgggtagcgcagtgtctcgaacgcggggacaatcattgctttcttggtgttggcaagatcgagctggatgacagacttcctgaggtactcatagagcccatacatgggcaggaagtcaatgtcagacaggaacatgtagggagtgctgatgtgcttcatggccacgttgcgcagcaggttcacggggtagaactggccctccttgtacacgatgtggtagcccacgttgtggcggctcataagcacctcagagccctgtgcgtagcggaggaactgctgggcctcggcgtctgacaggtagagggccaggctgatgggcccctcccagtgcttgcagatggcctccagcatctggagcctgtccatggacagctgagcgaccagggtgacgtccgtgctgtctgctgcaggctcatactcgtagtgcaggaagtacaggtgggtgcggtggacagtgaagcgctctcgccggaactcatagcacaggtcgtcctcgtccagctcagacagctgcttctggaggttttcactgttgacatcagcctcactggggcagccaaacagttcccgcctcagaagattgccgtcatactccaggaaggtcaggtaga

SEQ ID NO: 152533 - DNA, 498 bp, Homo Sapiens
ttttataggcagacaaccttttcttttttatttcgcttagacaaaatgcaaagagtgtctcattaaattaaaaaagaaacaagagagaaaaccaaattgattccccccaccccttcactgacggcactcatcctaattaacaacaaaagaagaccaaattgagaacccggtttctaatgggaaagaaaggtgtgcaaacgtgactgaagttttcccctgcccgcaaatcggtgttccttttaaattcacaaataggctgatttcccacccaccctgttttctttcttgcctcttgtgtgatagaacttccagtcagaaggtttaattaatcccccccatgcacttttgtagaaaatcagtaaaaatgcaatagcctgtgaagatcataaaactggacttctttcccaaaaaatcagatgcccaggcggatggagctcacactcagacagaaaaaaagcaggagagtctttgcactgtctgtggtttcagtattttctc

SEQ ID NO: 152534 - DNA, 537 bp, Homo Sapiens
tagaaggagacaaatttatggtagaaattagccttgccattgtctaagttaatttatgtgacctgattgaacagttttagttgtaactttagagtagcttctttgttagaggatctctttcctttctcttttggttttctcccaatatttttatctgtcttgggattatcttaaaaggtatttattaatgagtatttggaagaaaattgacctagaaaatgtctcttttaaatttatctaggtacttgtatcaccagagaccttcatcaagtcctactgccacactggataaggccactacccccgacccttcttgtcagggacatggcttcctaataatggttttgctgttgtctctacataggggacctatggaaaaggagtttgaaatttctacctttgtagtacattgtatccaattttgttttgctcctccttttcatgtggtcaccaagcttttttccttagccattaaaaaagccacccctctttaaaacaaatttaaagatctatatacatttttgcaactttatttaa

SEQ ID NO: 152535 - DNA, 572 bp, Homo Sapiens
ttacaagactaaagtttattttgcaaacaactcagtcctatcatgatttatttttaacaaaaatgagaactggagagaaattatgtttcaagacttatatatttgtcattagattttagactcattcgttgtttttaagttttggcccacattttaaactaacactgcttattcctgtgaaccaaccagcaatctctggctgcagctcagaagcagcaaaagggatgagtaatgtaaaaatctggatcaatattctagttctgggcaattaccctgcaaatcctgccagatgattagactaaataaggtgcccataacctggaggtttcttttttgggaaaataagaccaagggagctaacgaaagccaagccccaaacaccccaatcttagcaggcataactatagctaccagttatctgggtgtgtcagcagccttaggattttttttagctgtccttaccatccccgctttgtttcattttgattgtcttctaataacctggtttgtctcttctcaccttcaggccattgaactctgaatgttcatgcaattggaacctcaaatgatgg

SEQ ID NO: 152536 - DNA, 565 bp, Homo Sapiens
  misc_feature (408)..(430): n is a, c, g, or t
  misc_feature (502)..(524): n is a, c, g, or t
tttgattttttaggtcaactttattttgtttgcatctctaaatagttctctgtctacatctcgtaaaagaagtatgtgctcatatgtttcactctttaattttgacttaattattagatacacaaacaagtctcttgatcctgcccataaaacagttcctatagcttctcagtacttgtttttatatcaaccctgcccggctcttatttttttgttgagtaagctcagacacatagaatggtctaagcgttctggaggatgagctctctgaaattaattttaaaataaacttctttagaatttgtgattttttgggtccatgtctatacttcccaaatcttctttctttatagtgatcaatttagataaatagaaaaacctctcctgtagtagaacagttcatgttgnnnnnnnnnnnnnnnnnnnnnnnccatctttgtggaggcagaagtaatgagggggaaatgctttttgtgtgtatatcctgtggttttctcattcnnnnnnnnnnnnnnnnnnnnnnnggaggcggaggtggagagggcccggttaccggtaccggatc

SEQ ID NO: 152537 - DNA, 517 bp, Homo Sapiens
atcagttgtcagatttattttgaaattggttgtaagacaatacatgtgtttgggattcaagaaaatgtgataaacaacagtaactatatagtggctgacttaacaaggctttaatttgcaaacttgtctacatgctctttgaaggtacgaacaactttgtttcacccattatgaactataaatacataattgttgggtaattgcatggatgaataacattttccagaaacaattttatcacataaatcaaatcactttgaatagaatttaacatgaacagaaattgaaactcatttcacaatagcactgatctgattccagttgctccataaccttactaactttgaaaattgccagacattgtttattttagccattctagtgggtatggaatgttatcttgtggttttcaattgcattttcttgagtactatgatgttgaatccatttttatgtgtttaattgttatcattcagttattttctttttgaagttcttgttcaaatcttttgcccat

SEQ ID NO: 152538 - DNA, 385 bp, Homo Sapiens
  misc_feature (158)..(158): n is a, c, g, or t
  misc_feature (258)..(258): n is a, c, g, or t
  misc_feature (263)..(264): n is a, c, g, or t
  misc_feature (270)..(271): n is a, c, g, or t
  misc_feature (274)..(274): n is a, c, g, or t
  misc_feature (276)..(276): n is a, c, g, or t
tcaagggattaaaaaaaagaacacaattgcaacacacagtcattcatgcccagcaaattcctaaatcaatatttcatgccccatgggacctcctgggcagaagacaataaataatttgccttgattgagtaacactagatgatgccaagcccgggttnccattttcttgttttgcctgctcggtagataaatatgcctgtgatgtgatatttttccatttgttatccaacagcttagcaagtactggagtagccagtnaaagnnaagtgnnttnantacagagaaagaacaataatcctgaccaatattattaaaccaccctgcctaactaaaatgtcaggtactatcaggtatacattgaatgaagattgataatatttaatct

SEQ ID NO: 152539 - DNA, 502 bp, Homo Sapiens
aaagttaacgtatctggcaaagatgggattctgaagcagcccctgaattccttttcctgtgtcacccaggacaccaggtacagccaaggtccctttgaaaaagtccagttgttcctgactatgctgggaaaggatctgggtaagtgctatcaaaatccaagatctcccacttttaggttgcagacttgatttcttcttttaggcctcctccatctgtggaactccggaggagaccctcctgctggccttgggtttgggagggcattcctagttcttctcagtcctttctgttctcctccctggaccccggagggaacatctctcctagccttgggtttggaggaggccttcctgattccctccatccaagggccctggagaaaatgcatttgtgggctccgggcttatggagaggcattcaggttggattcaactggttcataaggtttgtggggatgctcacactaagggcactggaagagatatcttcataaagtcagtg

SEQ ID NO: 152540 - DNA, 471 bp, Homo Sapiens
tttaatcagaaaaagactgtattgcagatacactggttctctcaagatctttcctggctttcctggcagctaagactctcagaattcaacttcgccaggacagcaaacaatgttgttggtcagactatctgctatttcctccatctggctttctataacagagttagtgtttagacccttctcatcataggtcctctgaacaccttgctggatacagagtatgaattactaggtacatacatacatacatagattaaatatcaaaacagatcctggttaagagtcaagataagagcggctgagaacttaactcttggtcagcttatttatttgtgctaattcctacctgtgcatttagaatgttttcagatcccttttacgctactaaatctatctatggtatttctggaaattttttctctccatgttcttttccatgcaatcaagcagattatgaacatgtcacttaat

SEQ ID NO: 152541 - DNA, 531 bp, Homo Sapiens
caggaactaccacttatgcggcaattttgtcccttgcttgagcctcattttccatgtctataaaaatgggaattaataccattttcttttccctgccccacaaaattcttatggggatcaaaagtgataatgcatatgaaaatggtttgcataattctacactgtctgcaaatatgagccatcagcactattaaaagtgaggcaatagaggattggcagtgcactgacagtctgggaaagtggcgcacctgccttcaggcaggaactctgttattcattcatcaataaagaacaaaggcttgacaaaataatcatgagataagaaataagatcgtttcagccacccactggctggagctgaaggagaactgtgataaattgtgccttttgttatgcaggtgccatcccacctgtgtctgtgtgccttaaatgaaggaaagtaataaaagtaataacaagagcaggtactgttgattggatgcttatctatgccatgtaccagcaccttaatttaccatctcttcctttaaa

SEQ ID NO: 152542 - DNA, 610 bp, Homo Sapiens
ttgagtgactgttgaactttgtcagttactttattgagatgatatttttttctcctttattctcttaatatggtgagttaaataaatggatttcccatgttaaaccaaccttgagttaatgggataaatccatcactcggtcataacatcatttttgtatattgctgaattttatttgttaatattttgttaaagatcttcacatctacgtttgtgagagttattggtctatagttttcttgtggtttcttaaattttttctagctttggttatcagagtaataataccagcctcataaaaggggttcacaagtctttccacctcctcttctctgaaacagtttgtgtagattgataatctttcttgaatgtttgacacactagtgagactatttgtgctaggacttttgtttttagaaacgttttaaattacgaattcatttttaaagttgatgtagagatgttttaagttttctgtttctttagacagttttgctaatttgtgttatacaaggactttgttcatctaagttatcaaattgttagacatgttattcataatattcccttgtacttttgtctgacatgttagagctggtgtcctcgtgcc

SEQ ID NO: 152543 - DNA, 416 bp, Homo Sapiens
ctgtctagagaggtcaagggctgcttcagacccagaactgcgtccgcaaacacagagtcaggtgacaacagacaaatatagctggaaatatcaggaattaaaattacatggaggagaaaggaaacaagggagatacaaaggctagtccttttcctgactcaaattgctgattgccatcaatatgccttgatgttagtcagttatccaaaagtctttgtttcacttgcacaactgatccctcccacaaggccctccaagaatggtttgttacaaggcctgccaacagcaatggcaaagaccaagggcctcctgaagctataatgtgtcctgtaaagaaatgatgccagattttctcttatcgaatccctgttctatatccaggaatccctcatgggtttttgtatctggtacttcct

SEQ ID NO: 152544 - DNA, 509 bp, Homo Sapiens
tggtttttgttttgtttttcctcttttaagggatagtagcaggtcttacttgaatgaaagtctgatatttgctgatggcagaatgattattctgtaccctggttgatgtgtagagtagattgtctggtgctctcagttgtttttatttacatttgtcacgttgttgtaagagaatgttaacatggtataaaactctgtgacaagataagcctcctgctttatataacttcttgaatccagctaagagatttataaactaatggcataaatgtctggagccaaccttggcagttatagcaggagaacactgtcttaatatttctttacattctttcaaaaggcaaaataggattgccctgtattgatgtagaaatgtctgtaaacagagcttgtatggtttgctgggtcaaacaatgtttccaacttaaaatcaatctcattgccactttaactacttttagtcatatttattaagtaatgcagtttgtactttttttattttgtaacat

SEQ ID NO: 152545 - DNA, 363 bp, Homo Sapiens
cgtttgttaccccacttgtggggtgttgctgtctgatcaccatcttccttccaagggtaggggaaagggccctggctggttcaagtcacagctctgtcctcagcgccaggcacagtgcccagctcactggcacagcctcagattccctggacacctggctccccggctgcattttttaccattgggataagttattagtaccattgaaaattaatacctggggattctcttaatattgttcatattcatgttcttctcagcagttttaccatgaggaatctgtcttaaacaatgtcagttgtcaatagcgttatttaaaatagcaacaacaataaaaaaaggtggtcagacctggcagcttgt

SEQ ID NO: 152546 - DNA, 574 bp, Homo Sapiens
  misc_feature (76)..(76): n is a, c, g, or t
  misc_feature (133)..(186): n is a, c, g, or t
taggaaatatgatattgcattcttatagccaaagctctatggaaaatataaggaaattttaatgtatcttcttaanagttgcttataatatggtttgaaaattgataatgtacataactatacattcacatgnnnnnnnnnnnnnnnnnnnnnnnnnnnnnnnnnnnnnnnnnnnnnnnnnnnnnnaaaagagatgcttcaaattcgtaagtaagtatggaatgagtggttgaaacagacaataaatgctgtagaaatcccaaggagagagagattgtcagggcccaagagtgtcaggaagagatgagaaatatggggctctgtctaggccttcagaggtgtggggatacctttcagatacctggttaggtacaaggacccaaattaccagcagaggcacatatcctgatgttagaatttaatttgaaatagccaagtcacatacatatatgtttgtatatttcatttaaattatccagagcagtgcctcttttgtcatgtcttgatgaaattatctggaatttataaagaggaattttatgagctgctactaaggatcaaatgggaagggaaa

SEQ ID NO: 152547 - DNA, 462 bp, Homo Sapiens
aaatgaagaaaacaatttcatttacaataccatcaaaaagactaaaatacttagcaataaacttaaccaagtaagtgaatgacttgttccctgaaaactacaaaacattgctggaaaatgcgaaagaaggcacatataattgggaagataccctatgttcagtctacccaaagaaatctacagattcagtgcaatccctattaaaattccagtgacaagttttgcattaatagaaaaactaattctaaaactcgtatggaacgtaaagggatctcaattagccagaacaatcctgagaagcaataaagttggaggtctcacactgctgatttcaaaacttactatagccaggcatggtgatgcgtacctatagtccaagctactcaggaggctgaggtaggaggatcccttgagcctggaagtttgagaacagcctggtcaacagagtgagacccagtcttt

SEQ ID NO: 152548 - DNA, 295 bp, Homo Sapiens
agactcttttcctagtaagtcatccaattcgttcagtcccagtaaccgggcctggggcacctccagctccagccgataggacaggttcctcagggtgcacacgcagttctccaccgtcttgctgtcgtaatcggatgtgttcacacacgtgtggatcacatacaacagtgagtctaccagcccctcgcaggaccgcatttgcttccgagcttcttcccccgcggagctgaggttccttaggcaacctgtcgtgttacgcagaactagtgaagtctgaaatttaattttatgatca

SEQ ID NO: 152549 - DNA, 372 bp, Homo Sapiens
ctccaattatgatgcaatgataggttttacaggattgtaagacagatgattcataatatgaaatcttgtatcaaaccaaagaaaaagcaatatagaaatggcactaacctaatttcttatcacatacaaatggtatggcaaaatgttcatgttttacagtttttcgctatgtggcactagattaccgagagtgaaaagggaagaattatggggaagctgtgacatgtactataataacattcctatgctaaaagcgacagattttagaaaactgccaaaggttttattttaaatggcattattaataatgcatattcaaagaaacaccagatataattgtgaccaatacataatatttcaagaccctgactt

SEQ ID NO: 152550 - DNA, 503 bp, Homo Sapiens
ttttttcgaggtttgcacaaacatatatttaaggaacttaaataatgatacaagacaaattctatcctttgcaaatatttaaacttaaaaatgtgtgctgcatatacccttaaacaatatttaaaggatagctgagctgaaaagtatgcagctctctttaaggaatcctggctcccgggaatgacttcgggtgcctcccagggccctttggttactgctagagaatgttgcttcctggcagggtttccaccaaaacatttgcccgggtggaaaaagatggtttttggagagagatgtccttgtagccttgtggaagggacagcttcattttcttttcctcacagagatgcctaattttgggagggctccagcctgcttctctggccccaggtcaccagaccctagcagcaagtacagcctggcccctgtcaaccagaatgctcgccctggcatgtggcactgctgtggctctatttttcctgaaggtaaggtctccttcttcc

SEQ ID NO: 152551 - DNA, 450 bp, Homo Sapiens
ggctgctaggttgttttattggctgggcataaaaagcctcatttcccaccatgtctctgaggggatgatgaaatttgttcctgattattagatcagtatgaatcagtttgttacactggaactaatggaatagaatctaagacaggtgagtttgggaaggaaggctagaggatgatatctgggctctttgcatttgtctacttgagctttcataacacaatattagagactgggtggcttaaacaatagttctggagaccggaagtccacgattagggagtcagcaggatcagatcccagtatgggcactcttctttacagatggctgccttctcattgtgctttcccatggtgcgtacctggggagagagacaaccatctctggtgtctcttcttataaagacattaatcctatggggtcaggaccccacccttacgacctcatttaac

SEQ ID NO: 152552 - DNA, 655 bp, Homo Sapiens
ttagcccgatcattttaatgcaaaaatcaacagttttgtcaactgcttgagagtagcgtctgctttacaacaattaccaacaacaaaaggaaaaacaacccaaagcaaaacgttacatccaatggctgctggataagacactgctgtacaaagtcccgcgcgagaccgccttggcgctgccccagcctgtctctgggggttatagaggaaggcgtggggcgtgtgccagttacaaaagactgtcttgaatcccagggtagtgcctattcactgggtggtctcagaagacttcccccaaagcgcggctgacaagggtgacagcgcctggaccgcgggaactgtccgcggagctggtgctgaatagggcgtgtgcggcgggcgcttcaaggaaactggaagcgggaccggaggccggccctcgggcgtgcgaggaggagttggaagaagagcggggaggggaacggcccggaactcgtgcgcgccgaacggcggcgccccaacccataaacccatctcttgctcagagagaagcgaaggagaggcccagcgagtaaaagccgaggcccttgagccgctcctcggcgcgcgccttctgcttgaggtgcaccttgctgtgccgtttcttctcatcgctgcgcgcgaagcggcggccgca

SEQ ID NO: 152553 - DNA, 653 bp, Homo Sapiens
  misc_feature (536)..(536): n is a, c, g, or t
  misc_feature (614)..(614): n is a, c, g, or t
  misc_feature (637)..(637): n is a, c, g, or t
ttctctgaggttgacttgaatattatagatttgaagattattaacattattcaacttctgctccttctccaaaaggaagcaatgttatggaagatcaggatttgttggaaattggaatccttaattctgggcacagacaaagaattctacaggcaatccagctccttccaaagatgagacccattgggcatgatggctaccatcccacctctgtagctgagtggctggattccattgaactgggcgactacaccaaagcctttctaattaatggctacacttcgatggacctgttgaaaaaaatctgggaggttgaacttattaatgttttaaaaatcaatttgattggccacaggaaacgtattttggcatctctgggagacaggctgcacgacgatcccccacagaagccccctcggtccatcaccctcagggaacccagtggtaatcacactcctcctcagttgtctccatcacttagccaaagcacttacaccactggtggctccctagacgttcctcacattatcatgcanggcgatgcaaggaggagaagaaatgaaaactactttgatgatattccccgatcaaaactggagaggcagatggctcanacaggagactggggagaaccttncattaccttgcgacct

SEQ ID NO: 152554 - DNA, 543 bp, Homo Sapiens
ggaggaaaaagacatttaattttatatttgctctagcccttaatcaatgcataacaacaaaaacatttttaagcacatggaaatgagcctactaacctgatttttggagcccaaattctccactctattttgatctatgtgcaaaaagtattggtacttttcaatttatacatttgttagtatcttgtggctggcttcatagtataagactcactcttaagcctactatagagcctacagcactatcagaagttttcaattaatagctatggatcagaaaatcctgcgatcagtttctcataccataaaatcctaggcttctttaccattgatttcacctttcgagcacagtcactgcatggcaaatgtatgaaacagacgtttacagcaaataagtaccagtatgtacaggaagctgccagttaagacagacccggaaaacaaactcacctagctgctatagaaacctttgcatagttgttactccgttttaataggagttatgttcttgtaaaatgtgcctcacttttactccacttttta

SEQ ID NO: 152555 - DNA, 588 bp, Homo Sapiens
aaagcagctacaaacatttccaggactatactgaataattaagttcccattttcttgaagaataaagataagtgaaaagtttacatttgtgtttcaaccacataagcaatgaataattactcatggcttacagaaaaacatagtccattgatgtaaaacattctcagtaagtattatttgacacatgccttactttacaatctgtttcctaaacacagaatgttcgggtctgggagtgggtgggaagaactccttaagaaagcctgagggatacttgcagatatgctactttgggcttaacttcccgttgaacatgcccaccacacttctcatttcccagctgtgctgcgtgactgctatgacatggctgccttgctgatcaactatggagcagatgtcaatctgcgttgtgccaacgagaggacagctctccacgaagcagccaaactgggcagagaggacatggtgaagcttatgctggtttctggggcacaccctgacccacagagcacgtatggattcactcctcttgctcttgctggcccaagtggacacacttgaatcatggaattgttactgcggagagca

SEQ ID NO: 152556 - DNA, 518 bp, Homo Sapiens
tgccaaggttatcatgtgcatctgttatttttccaatacatgtaaacagttgcagcatgatgctttgtttacatgtattggaaaaataacagatgcacataataaccttggcaggactaggcaacaatttaaaatcgattttaaaaaggatcctattggggaattcatccttacggtctacagggagaagtttgaaaaactggattaaaaaagtattaaacttctgtaccctgacaataagcaggcgatgttggaccagtatagctgtcaccttaaaataaattcttctcattattttgcatgttattaactatggaaagtgaaaacaaagatcaattctaatctggatccaagccatagggaaacccactgccaatgcccaaggttaccttcctggatgagaaactgaaactgaaggccaccaggggcctctgccgaagtcatgagagacgaacatgcccgggtggaaacgggccgtggacagggcaggctccagctgctccgtggtttgacagcag

SEQ ID NO: 152557 - DNA, 310 bp, Homo Sapiens
ctagcaatactcctttattaaaacaagttgagttttgaatagtaggaagcacattctatagtactgaaaataatatttaaattgagaaatcatattacaaaggtatgtacaaataaattgaaattatcctaattcttaagttatttatggaaacccaattcctttccttgtaatagaaagagcagccaagacttagaggtattttctttctctttactggaaaaatatactatgtgaaaaactagtatcactcaggtgaaaatagtaaatcagcaaatccccaaatctcaactgttttagaaagtgactt

SEQ ID NO: 152558 - DNA, 412 bp, Homo Sapiens
gacttgccctgttattatttatttttacttaatttactgttattttgactattactatcgtggctgtcttagtttcggcaaacccagattgccacgaaattcaaattacagcgtgtcgccctaatgagcctgggtgtgtttcggtgtcttgttaaggagtcagagttgaatccgcttttctgccgttggctagaggcaaacagaacgttccagttactctcagaggcgtgtcgtcttcaaaagataaaaggaaatgtttttatccgttttctgatgccgtacgacgatcataaacaaagccgttatttgacgtgcactctcttcccggtggtgctcatggccttggctcctcagggagactacttagaagcgggacttacgaaaaatcagccattaaagtttacaacttttg

SEQ ID NO: 152559 - DNA, 529 bp, Homo Sapiens
tttaactttttaaaaaattaatttaattgacaaaaattatatttatggtatacaacatgatgtttatatactgtggaatagcaaaatcaagctaactgacatgcattacttcacatacttatttttgtactgagaacacttaaaatctacactcttagcaattttcaagtatgtaatacattgtatttactatagtctccatgttgtacaatgtatctctggaacttattcctcctgtctgattgaaattttgtttcctttgactcatatctcttgaatctcccgcctcaaccctcacccctccagcccctggtaactgacattctattcactacttgcgtgagttcaatgttaaaaatctaaaacattaacatttatgtgagatcatgtggtatttgtctttctgggcctggtttatttcacttatttcacttaccatgtcctccaagttcacccaaattgctacaaatgataggctttccttctttttaaaaggctgaatagtattccactgtatatatataccaca

SEQ ID NO: 152560 - DNA, 554 bp, Homo Sapiens
tcatccaccaagtactattattttattaactttaagaacatgttttacataaaaacaggcaacatcaaaaaagctcagttgataaatgaacataatatatcacagatgatttcattccacattaacctacatgtatcagcttaaactgaaggattagggggaaaaattggatctcattccacctttaattaaggacacaaattgtttgaaagttatttcattaggattctgaaaatcaaagattaacctatgccatctgatccatgcagcaagtgataaattcagtattttcaaaagaaatattgaatttttttcttgagtcaaattgaaacctttcagaaacttgtttaaatgcgccaagtccctacgcacctttttagtatgtatgagcaaaatactgttgaatttcacactcaactaatcctttaataattttctttcagccagaatgaaaaaggctagtattaatttcctaataaaattttttttcaaaagttatcgaggatatgactataaccttggaccagtttcaatttctttttattttttctgag

SEQ ID NO: 152561 - DNA, 849 bp, Homo Sapiens
tttgtggtttagatttttatttaaaataacaacaataaaatatgtccctaaaattgcaatgctcaaaattggtttttatgacaaaagtttgaaacctagaaatgcctgatttatggcaaattattgtttttataatgcaaaccatcatacattttctccctaagtgtaatcttttatcagttcaactgaagagctttttctatctcctttcacatttgttatttgactagaagcagcttagactgagcaacctgtaaaaccaaccacctttgtgcagaaatatcatccaactggctctagattgttgaaggagcaaagtcaagtccaagttgcccagtctaacaggcttgcttaccttctagttcagctccttttctctgaattgagtctgccatctgaatttgacctccagatgaccatgactttttcaaatcaaatgtgcagtttgctataaataagaccacatagctgcacaggctataaataactagaaattatatgtttttttccttgtctgtttgtactagcactgcaaaacccttcacttgctgtgattgaatagtctctgtaggcagacaagaaaatatagctgcccaaagcacttcatcctcctagaatggaaaggtgtcaggatcccaaatacactgcaagtagatggagaaaattactgggaaggagaaaattacaaaagagactttcagtatctgtttggaacagtggatgatgaaagtggtagttacgtgtacagcatgaaaataaatttatcagacaatgatgcttgtttccatcagttattaaaaatggaaaaatagaattcttataaatgctaaaatgaaacaagagaaaaat

SEQ ID NO: 152562 - DNA, 526 bp, Homo Sapiens
gggggcttagacttttatttttggtttacagatatcacatggactatagagacacatttctgtaacagagtagaaatgcaacatgagaagaacaaagtgctttaggcgacaagcggaggagggagacatcaatcccagatgggaaaaatcaattcactttctttttgtgtgtggtgttacttatttatttattttttgcagggaagggatcgattcattcaacgtacaccttgaatgaataactatagttctccctacgtcctatgcactgtcctaagtgttttacgtggttaaggacactaagattttacagatggggaaaacaatgcacacgacagtcaagtgacccgctcaacgtcacacagctactaagtggtagaaaaggcagttgaacccaggctgcttggctccagagtctaatatcacggggaaaacctcacgggagacgtggcaacgaagttgtgcttcattgaagtatctgtccaggtggaaaaccgcagggcctctctagcaaaatccagaacca

SEQ ID NO: 152563 - DNA, 539 bp, Homo Sapiens
tttgtatgtttgcactttaattctctatttttaatacactattttagaagttttgtatttgcagaaaattgagacgatagtaccgagagctctcacacgcccacaccaatgtcctcccagcatgaataccttcctctccttggcgcccttgtgacggatcaggaaccggcactgacccgttaccgggagcgtggcccacacttcattcactgccccagtgctccgcagctcatcctgcccagggatcccgtcgagggtcccactggccgtttcgtcctgtcgcctcctcaggttcctctgggccctgagcttctccgactctccttgtctctgaggaccatgatagctgtgtggatggctcaggagttttatagagtgcccctctactgggactgtctgctgtctttctcattagactgggtttatgaatcattaggacgatccccggggtgaagtgcccatctcatcacatcccatcaagggtccacaccatcaacaggactcatcacagtggatgctgacatcgaccgcctggctga

SEQ ID NO: 152564 - DNA, 270 bp, Homo Sapiens
aaggttaataatgaaaatcactaccagaacaccgggttggaagtttaggatggcctaacaggaaaaacatatttttaggagctctctctccagtaactgcttaattcactcagtttaccagaaagctgatttgatgcagctgccgactgaagagtaaattattctaccgtggtgaaaatgtggaggccattctcacatcctcaaattcagaatgctcataattatgattcctgagtagtggaatgataaagatgttgttgtttctttaaa

SEQ ID NO: 152565 - DNA, 483 bp, Homo Sapiens
tttaattgtgaaaagtatggcttttgcctagctgaactggctacaatccaaaaagtaatttaaagcatcacctctcttcaagaaaataatggaaacttcaagccagccattccaatttgctgatgcagttagctgtttgttcacctgagaattaagggctgactctcttgggtagacaggaactcagtgtacgtatatggcagacaggtggccaaggtcattttggggtgggtattttatccctatcccactccgcattgctgtacgtggttcctttcaataaaaatccactgtgtctcagtgataagaacacttatagcccacacagttctaatgtctttttagttgtgcaattattcacttgtttaaagccctcttgtcaataatgcctgaatgggctttacctttgattccttcccatgttccctcaggattatagctgagttgtaatcaataaggaaacatatcctacatgtagagaac

SEQ ID NO: 152566 - DNA, 467 bp, Homo Sapiens
gacagcaaaccttttcagcacttctctcagagcaaatggaaacacacagtaagtagctttctgactacattattttctggtcacttttaaagaaagtttacaacctgttctgaaactatttgtcttttcactggttgtaagtgtaccccaatctcagggagtatatctgtagtgccacaggcaaaagatccactccttcccacactcatttgcctgaacttactcgaagggctgcatttctctgagtttacgaaattgtgtcattatggtccccatacagtggtatttaacttttaaagcaacttttaagaaaactcgacttgttttttgttcattttaagtgtgtggtactaaaaagacatgttagactttttttaaaaaagcacttatgttttgaaaatagaataaataataagaatttccaattaaatcatgtctggtgccaatgtgcaaaacttcaaaaaaaa

SEQ ID NO: 152567 - DNA, 651 bp, Homo Sapiens
  misc_feature (210)..(210): n is a, c, g, or t
tttgactcaaaagcttgctttatttgaggacaatttcatcctgaaaaccaggagcggggtgttgcggggtgggagggcggccaagacgtctgagcagtatcccaggcaccccttccagcccagggtgacctcgaaagcagcagagagaacggggactggaggcgggtgggccctggaaatcctctcatggtgcgggtggggggggtatgngggggtggactgtcacaggtggaggcagcaaggcagctcctggcagcaggaagaggcccaggtgcagcaggaaaccccgtccctggtgctcactggtgaccgtgggcagaggagaggacaagtctctccacacagcagcctggggccatggggtacagtccatcttttgccaattgtcttcttttatttattctggcaaaatgcccattcccaaaggcttctgcatcctgtccatcagacaggacagtcgtgccttttcaaagtccaaggctgagcgtcagatgggattacgtcaccagatcatccggccagaggccttcccgaagcccatccttgaggatctccaaacccaggaagaacagggccacagagcagggcagtaagaagaaacgcaggccacaaaatcggaacaaaatctaaattcagtaaggaggatgcttg

SEQ ID NO: 152568 - DNA, 495 bp, Homo Sapiens
atttattttttttaaggaaaaggtatagacaaccagctaaactgcctttttggtgtgcacacacatttcatgtgcagacgtgcctctgtgtaaatgtacacatgaacttcatgtgggcttaattttctgtgctataaacaaaagtgtttattttttattaacctcatggatatttagatggaaagtgatggcattcacaggcttgatgtattccactgttattactgttacctgcacaaatgaaaaacaatactcaacagtaattccactcccatgaaactttggtcattgttatgcattaagtggggcttatctttggtttggagttcatttgaactcttgaaccttagtttagtgaagatgaactgtctgttcttaggtagaaacggtgtttatttaaaaatcagttttaaaaaatgagctaccatatgtgctgtctattataaatgggacaccaaacaaaattttctattacagttgtgtacttgcaaacat

SEQ ID NO: 152569 - DNA, 598 bp, Homo Sapiens
  misc_feature (54)..(54): n is a, c, g, or t
tatgttccaatcatatctgcccctgtccaagtccataaagttgaatacttcttnttttgttcaaatatatatatatgcatctatcattacattttaccaaatggtactgcaaatatttaaatttgtcgcttataatacactgagagttctatgaggatagaaaatcatgttttccatgccttggatgtggcctccactctgtaaacactcaatgtattttatagatgagtgaatgagggaatgcatgaataaatgaatgaatcaataaagtaacatttagaggctaaaagcataaagaatttgatgggcatgggggcaaactactgaaagtaaagcaaaaaaatgtagaaagaagccttgaaatcccaattaacatttcctgattgcttcagaatagaatgctgtaaaatgagaggctttcagcctgtttgcatttcagttctgtgcagcttacaaaggaacctgggaaaaagctgacattgccactgtagctttgaggctttcaagataagcatcagtttgggttcagaagaaatgagcagtgatgaatattgtcttcagcttcacaatggtccttttaattcctgtcattctcaaa

SEQ ID NO: 152570 - DNA, 589 bp, Homo Sapiens
tttttaatttaacccttgaaagagtttattcatatcctaccatgttccaaagtcaatgaggtaagttactaaataaatctacacactgatctacttacaattttatagaagagattcactaatgtttaccaataaaaacaaatacccaataaaatattttattcaagaacaaaattaaatgtgccctttgcaaggaagatgacaaaaaatttatatgttccaagagtgatgaaggaaaaggtatggcttaattctaccacctccatagataactgtcattctagccacagagtcaaagaatcagactattacgtaagattctacacacagtcttcctttaattataataactaaaaccttctgaattttactttaaattaaagaaatgtaatttcacatacctaattacctaagcctaaaatcatgtactagaacaagggctcatttcacttattatgatcaatgactgccacctagtggatataactttcctcaaatctctatattgagatttcctagtgcttacacttcagcttttacggatgacaacttccattcaaagtggcttttttagaaattaaaaaggaga

SEQ ID NO: 152571 - DNA, 588 bp, Homo Sapiens
  misc_feature (576)..(576): n is a, c, g, or t
ttttttcgatttttatcagtttactaaatcaacatcttatatttctatactaaacactagccactacttgaggtttattactgttgtgattatgtttataaaacagggacatcttgcatacccctaatggtgtgaataaaatcaactgtgtcagtacctttgagcacttcataacttaaaattctaaaaaattgagatttggacctacagtttgctatttaacagaccaggtctggtcttgacagtaaagccaccatcaaaagctgcattaagaacctcatccaggcagcttgctgtgacaaaacttaaatcctgtcgtacgttgcctgggattccctcaaggtctttttcatttctccgaggaataatgacttgcttcagtcccgctctgtgtgccgccagcactttgtctttaattccacccactggaagaacaagacctctcagtgtaatttctccagtcatggctacattctgacgtaccagccgcccactaaaaagtgaggcgagaaaggttactatggtaactccatcagatggtccatctttttgacagctccagcttgggaagtgcgnattgatgtctgt

SEQ ID NO: 152572 - DNA, 462 bp, Homo Sapiens
tttaaagttatgcgaactttattattatcacggataaattctatagttccaatctgcctactaacttggaaagaataagcaggaatacaatctcgcacagtgttctttttcagatctcatcgatccatcaggctccacgaccctctgctcgctgagtccggcggctctcccgcggctcctcccgcgcggcatctctgggcgcccgacacccggtcagggccagctgggcctgtccccaacccccgtctacaccgcaggccccgggctaggagccgcgggacccagggttggggtcccaactgacacccgcccgtgccgcggagcgggcttctcggtaaacatcgctcagagaacaacgcgcctctatcccagccggtccccgcccgcgggccgccggcgctgtcacctcgcggctgctcggtcacccgatcgccaagccagaaaccggagttttccctcgtg

SEQ ID NO: 152573 - DNA, 441 bp, Homo Sapiens
aatggtacagatgaaataggcttttcattatgaaattccatgatagaatcattgtgctgtcagatttttgagtaagaatttgtacctttaacctatactcctagaagagcctcaggactgcctggaggaagagccttgtttgcaataaagcagcttgcttaagaactgtcagcttttcccagatgagtctgaagctctgtcactaagctatcatctggctcttgtttctcccctgctgggaaatgaagcattgtaccaccagggatccatttaagagagagtagtacatgttgttcttataccaataatgttctcactgaggcacaatttctaaaaagcttaatgtctctttgtcattctgtaaatattagaaaatatttggtgagtttctgtagggctgtgagagagagagatgaacattttggtataaattgagtttaa

SEQ ID NO: 152574 - DNA, 480 bp, Homo Sapiens
ttggatagatgtagctttatttccggcaagctcttgtatcttttccatctttgtgagaacagaaagacagaagggattaaacagttggaaccagcatacatacagagctaccaaattatcactcttagttgtgacaatttgcgtatctacttttcctccttctaaaaatagttctcacctctctcctgtctattgcctggtggatgaggcctgtatgccttcccctgggcatccacagattgcaggctggggcaaggacaatatacagacctctgctcactagctaacaccacactctcccctctcatccaagaaagtgtaatagagtctaaataagtgagaatgctaaaaataacagaatggctttcattgaccttaatttttttacagtaaattcatcacaaacattgatattttatctaccattgataatgactcacttgtgacacaactcacaaatgttgggacagcatgtttaag

SEQ ID NO: 152575 - DNA, 491 bp, Homo Sapiens
tatgtcatgatttgtatctcatttgttaatttagcataggttagactgccatgacaaatacacatggtcacgaatggccaacagcggaatggtggtttacaggttggcaggcaattttctttattcagggacccagggtccttcactcttgtggctctataatctccccaggggcttttcctgcatatgtgtccagccagccaaagggtcaagggcatgggaagtgagtacaggagggtttgcgggtcgagcctgcaaatggtgcacttgccttgcactcaccactcctggtcagtcctcagtctcgtggccacgcccaaccgtgaaggaggctgggaagtgtagtccttgtgctcaggaacaaaaggaaaaggaaagttgggagcagctgatggtgtctgccacaggctcacgtgcgggtgtagcacaaaccagtggccttcctgcaggaggtgcacactattttctattctgtttgatttcatctttta

SEQ ID NO: 152576 - DNA, 256 bp, Homo Sapiens
tcttccaacccagggtcttcttttttcccttgactaatctggctgctggccctggagaagctccatcttctctatccagcagttgttgcttctatgggccaccctggcctcctcctaaaggaagggaatttaggactggaaagataggcataggagacaacatgttctaagtaagacacgtctgcctcctctgtgtgaacttgctaacatctattagatatatacctgctagtttcaaagcagaaacattttttca

SEQ ID NO: 152577 - DNA, 699 bp, Homo Sapiens
  misc_feature (340)..(394): n is a, c, g, or t
tttttaaagacttaaagtttaatttttattattaaaagggtatgattatttttactaaaattaataaaaagattaactgttactaaattaaagctccttcaaaaacataaatgtattctttagagagttaaaaaaagtagcaataaaatacatttttaatttagttaagcttacttaactaatgatcaaatagattaagttgtataaaattttacaaactttatatttttgcatacacttatcttcctggcatttttgaaataaaaaaaatacaagtgcatagggcagaggaggcgattcagttacttctgctatgttattaaatctctggtaaccactnnnnnnnnnnnnnnnnnnnnnnnnnnnnnnnnnnnnnnnnnnnnnnnnnnnnnnntgtagactcagcatccaaactttattttaccttcaagttctacctgataaagtggtggaataaagatggtattttccataactgtttaataataatcacatgttttatacccattgctttgaagaagaaaccttaagcaactagaaatgtcaatctaaaaggcagaaaagctggaaaaatctcatgaagactagaagatttacactcataagatcatgtaaatttatttggatatgctgaaaaaagagggggtataaaatctaaagtttggtaaatctttgctttacagggcttcaagttataga

SEQ ID NO: 152578 - DNA, 367 bp, Homo Sapiens
ttttctcgtattagcagtgtgatggcaggggctccattagcattctcattgcccttagtgttggcaatctgtttcaagaactccacttttttcttgctggccataaagatgattttgtcatcacaaaagaccatgatagtatcagttagttcataaccaaagagccatgtctgtaaggcagttgatttggcataaacaatttcttcatcaacacccactgatacaacaatggcatcaacgttggcatactcatcttctcctttccgccaattgctgtacagtctcttcactcgccgataataagcgtctttgtccagagtcacagccatagccccggacgccgcttctcctcgggttccgagaatca

SEQ ID NO: 152579 - DNA, 536 bp, Homo Sapiens
caggctttttttggtcaagggccatatagtctctgttgcaactactcaactctgtagttgtaacatgacagcagccatagacaatacatgaaagaatggacacaggtgtgttccaataaaactttacgtacaaaaccagacagcatgggccataatttatcagccctgtctcatggtatgtagtattgtgaaatctcttttagcttttgatgcctactgccattagatgtattagttgttgatactattatatatctgaagtcccttcagggctagcaacaattctgaagaagtgaattaaacacacacacagttccaagttttgcgagatacataattctactgtatcctaaatgttatgcgttaacaatgaagaataaattgtatatcaaaagttaggtactgtttctctggacttaaattatataaatgtttatattatccaaattaagactcaatgaaagtaatgtatatttttacagataactctgcattctatttatacaacaggtgacgacttaaccaggacctaaaaa

SEQ ID NO: 152580 - DNA, 424 bp, Homo Sapiens
ggcacgagggaaaagaaggaagttcagtgatttattgggcgtcatggtgacagcagttaacaacagcctattgtgttcttgaaaatcgctgagagtagattttagttctcaccacacacaaaagaaatgctaagtatgtgaggccgtgcctgtgttgaatagtttgaccgagccactccacagtgtacacacacatatcaaatcctcatgctgtgtaccgtaaatacatacaatttttacttgtcaattaaacagcagcacacacaaaaacaagatgaaacaaaacaacaggtggacagacaatggctaggttaacaccactggttggtttagtggaccagaggttttgaaaaatgggacctggcacgtggctggctgccttaaaggctgtctgtatccctgtgtatttgaaatgttcctttaa

SEQ ID NO: 152581 - DNA, 511 bp, Homo Sapiens
tttttcagggataataaatctattttaataacgttacttttgacaacgatttgtacatgtatttaaagataacaactttcaacccccacccttaccccagactcccattacaaattgaggcatgacctgcccttgccaggaagtgagcaaagctgcaacatcaaaactctgcacatcccactctcagaggagggtgactttacactgtgttgggaaaaataactaagcatttaaatttttcattgtacacctgtacattggtttagattgaatggctcaaattaaacaaatatagagagatttcatatatacaaatattatatcatgtataggtatattatatcatctatttgaaaaggataaaattttaaactttgactttgcatgcatggcccaaatcttttctcactcccctaatccccaagtgtgaaaaggctacccggtgccctcccggccctcgtccccatgaccagatgggacttcatgagaaggaaatgagcggctgacgctg

SEQ ID NO: 152582 - DNA, 1028 bp, Homo Sapiens
ttttaacagtggcccgggagttacagaccctgtcaggcaaatttgcctaggcatgtcaaaccctctatcacagaagaagagttctgcctgaaagatatcacataagctgccaatccaagataactcccatctccccctatttgaatgtgatctttttaaatgacaataataataataataatttgccagcaagcctgcctggaagacttgcagtttaaaatctggtcatctggcgtttactgtgcctaaatataaatgatgtgggacaagcccaggtactgagtttcctcttagaatttggccaacgcaatttgaccacgatatccgtggaaaaaaacgttgtgcatccgttaatctaacctatttagtgtttactctgcaagctaaagtatcaggggtatggacatacctgccctcggtctcggtgagccagcaatgttcagcggtgtgttcatgcccaggcaagcgtagacgcactctacgcttaccagtgtgaacggtgttgcagtctagaatactcccccagcttggggccggccctcgcctttctaccgtgcctgcgccgtcgcctaccactttcttcctgtggtttctaccccattttgcagattgctgcgtatcccagtgtcggcgatggataaacaggtctcgtctcttcccagttgcagcccgtgagctggtggcacaacggattaatgaggcaacagggctctagatggtgagtgggatcaatgagacccaattgagctgttagcggtcttaggcggagagcatctctcaggaggaaaggaaggcacagcgagaagacctaaggccgaaagtcgctgtgcagcacccacccaaggctggactcgggggaggtagacgggacggtgtctgtgactaaacggttcccacaccttacacgccgcaccgggattatgttttgaaaggtgtcttataaaatcaagaccggttcctaacaacctgcaagtgccagtgaatcccgaaatgtttgtttgaggagagggagtgtgagggaaggagca

SEQ ID NO: 152583 - DNA, 694 bp, Homo Sapiens
tttttctcagtgatagtttctttattccacataaaagtccccccaaagctcatggagacgacgtcttaacatcacgaccgtcgtcaatcgtagtgatcatttctgttctgaaaaaccgcaaaactcatcgttggaaggatgggctgctgaccaggactttgggggagggtttatgacgcatcccatgtgtcaccagagggaaacccaacatccttttacgaggaggggtcggggtccattgcattttggccaaaccacaccccccaccctgatacaaatccatctcaaagcccatctgtggacggtgcaggtcgtggcccagctgggaacggtggccccggctgtttgacctcggcatgcctgccgacaggtggcctcgccgggggcctcttttgctctggagggtccgctggggctgagttggggtcttcagtttcgcctgcctgttgtctgtgactgctggtgatccaaaggggcgtgggtgggccacggcataacgggcggaccccctggagtttctggtgggggcagaatgtttagccggcaggcaccttctgggtcaggtagggcctcacttgtcacttgattgctgctgtagacactcaattattaggtgtccgattgggtggaatgagttctttcctgtccccgtctcctgtctgtgacttggaagcggccccagtcttccatgacg

SEQ ID NO: 152584 - DNA, 496 bp, Homo Sapiens
tgaaactattaaggcctaaaatcattagcactgttttctccctctaagacatatgtggcttttcactttattttcaactgaatgctttcgctgttttgggtttagcaagcttttggtcttaaaaatatccaacaatgcagttaagaggccagatgactttatgcatgaaacattgttaagatgaggaattttcccatagaaaggtgaccagatttgaggaaattatttagtcagtataaacatttctctggatgtaaacagtacagattttactttcaggctttcctaataaagtttctaacagacctggaaaggagaaggaagagtaacatctgttgcaaaaccccagttacgtgtaggacaaataagaatctgggagagaggtgacttgcccaagtgacacaccgatttgggatatattagggagaaccattaattcttgtccataaggcttgatttagaattgttttttattttaatggaagttctgtagaaa

SEQ ID NO: 152585 - DNA, 425 bp, Homo Sapiens
aacacaacagtacttttttaatacaaacttggtgtggtcttgagttgtcttccattggagagcgtacgtgtgccacagattggtgcacctgccggcatctctaggattgcaccaactccctctagctcttcttggtggcctgcaggggcctagggcgcattcacttccctctgcttgactttacgtggtgttctagcgtcagacatcaggcgatgccgtgcattacccaagacactggacagctccggatcttcccgtctaaccactgtgcggagagcggacttcaagagagggcgtgccggtgctccggacaaaacctggggaatactgaaagccaccaccaccaccgtcattccagcatgcagatctcagtcctgggttggtgttgtagggcatttatttatttgacttgacggcgcctttca

SEQ ID NO: 152586 - DNA, 446 bp, Homo Sapiens
cagaatttttatggaagcttcattatgtaggcatgactgattaaatcactggccattggtgatgaacttaatcttcagcctgtctcccctctccggaggttgagaggtgaggctgaaagtcccaaccctcttatgcctgccttggcctttcctgtcaccagcccccatcctgaagctacctaggggctgctggccagcatacaaaaaggcatcactctggaaagtccaaagattttagaagttgtatgccaagaaatgagacaagaccaaatatatatttcacaatatcacagtactgaatactataggcaactgtaacacaatggaatttgtgtatctaaacacagacaaggtacagtaaaaatatgggaccaccatccttcatgtggtctggtctgtcattgacggaaacatcactgtgtggcacatgattatatatctttaaa

SEQ ID NO: 152587 - DNA, 422 bp, Homo Sapiens
tttccaacaaattcaatggaaatttaatttctatgttgtaaaagtccagaagctgatggcccagggtggccgtggtgactgcttcacagaacgctctggattgaggctcttttcatcttggcctatactcccagggtctcctggcccacaatgtcagcttccactccaaccatcacatccatgcagcctctgtagctctccttcccctccaagcttgtttctctcggcgctgccaccgtcggattcctgtgctggttcttgctggttttcttcacctcctgaccaccagaacactggcgccgggagggcagggtccgtgtgtttccacggttgatttcctagaggctgcagcagcgcctggcaccgaggaggtgctccatcaatatttgttgaaaagaaagaaaaggaaagcagaatggtaa

SEQ ID NO: 152588 - DNA, 333 bp, Homo Sapiens
cggtggtttccatattgttgttgttattgttcttattcaacacgagtaaaaagaaactcatgaccttctccttggactcgctcctctccccaatctcgataccgactgcactgttgttcgggtcgccccctcccccaccatcccacaggggctatggcgtgggctcagcacctctgaaggaaaagcagatgaaagaacttgtgcctcccaggcgagaatgcacagtgcaggggcaaccctggcagggcccatcccttcctggtcccgctgtgctcgggcacagaccgggcaccaggctcggtgtggagtgtgatggggagtggtgtccccggt

SEQ ID NO: 152589 - DNA, 362 bp, Homo Sapiens
ctagtgcaaggtgcaacattaagccccttataattcatgctcaacagttctatagggaggtattattttttgccacattttacatatgagaaaatagaggcttggagaggttaatgtggcccaagttcacacagccacgacattcctctcctgagtcaccctttctgtagttcacgggactcaccaggcccaacgccaaggtactgaccacactgccagtaagtccaattgtgggtactgagcgccccctgcggggagggaggaaatagtgcagagtgaagagggcaggcctcatttttagactcaggtaaggggccccaggttagaatgtcccaccatctcggccaggatccttctcttca

SEQ ID NO: 152590 - DNA, 558 bp, Homo Sapiens
tttgacaacagagatttattgattaatttgcaatgttaggtacaacatagataacttcatcacatggttacaatccagtatttgagctttgtaagataagtaaacatttatttgagcacaacaaaagtctacacacagtattctgggattgtttaaaaaataagtgtattctattccatttgatagcacaaagaagcacatttcagcgtgaattgatggatatattttaaaactgggcatttagttaatgtgtcaaattaagcataataacctaaatttggactatctgaataagaaatgcctaatgagcactgggcaagtatcctaggatgggagtggggaaggaagtatggcttacaagggagctttctttgcatttcaaaatgtggatgatagagaaggtgaggccagcattcatggtatgggaacctgttcacatttaaaattactttgtgatctttaaaaatagagtaaaagtatagttatccagaagtccttaataaacacctctttgatcaagaaaataaaagtccgtgtaggtcatttagttggaaggaa

SEQ ID NO: 152591 - DNA, 413 bp, Homo Sapiens
tttaaattagcccaataatttgtagattttatttattcatagtacattctctttgggggaaattatcaaaatatttttataacctgttacaataaaattcttactttatctctactgttcaccagtaccttaattcttatttgatatataaataaagcagaatgacctaatccaactatgtaagagcagatgctttcccttcataggtggaagcccatttttaaaaaagccttccagtttgcaagtgagcttgggagaagctatattacctgtaataagggctcctcaactaccaaactcatcatacaccatacctaatccctctgtctaaatctttcacatcatcagtaacatttctaccaatccttcacactcactggggcttgcttacttatagctgtctcatctcatcc

SEQ ID NO: 152592 - DNA, 582 bp, Homo Sapiens
  misc_feature (542)..(542): n is a, c, g, or t
aagttaatgttttttccctttatttttcaaaaggctcatttttctccatttctctactatcaaagtcaagaactgcccaatggctctgtcaaggaggctccagctcctactcccacttctctggaagtctcaagtccaccagatactacagaggaagaagatcataagcctaaactctgcaggctggctaaaggtgaaaatggctatggctttcacttaaatgcgattcggggtctgccaggctcattcatcaaagaggtatggtaatctggttccagcagcccaacaaacacagccacaattaggatagtctcagcttttcccacccattgatggcttagtagagaggttccattgaaggcacacactgaggggtctcacttgggttcagataaatgttgtcatggtcccacaccctttaggttagctaccagtacatcataagctcacgtttgtttgtttcccaaacatctgttccaaacagtgtgagttgactgaactctagttgacagtcactatcaaccctgattggcagtcatatntgtttgcttctgtgcatttggcataatgccccttaccctg

SEQ ID NO: 152593 - DNA, 530 bp, Homo Sapiens
atgctcagtgaagatttgccgatttgccgaatgaatgctttcacccctgcaactgtttactgcctgctaggagctcagagcctctgggatacaggctgggaatgacagtgcctgctcgcttggaaggcctctcttctggagtcaataaaacagcacttctttgcttcttcctggctggtccacatctttcactgaggagtggatagtggagggagagttcatttctagggcaccacagctatgagaaaagcaagaccagtgcccttggaggcccactaaaaaggcccccactggattattccagcaggctcggctggcctgttttcttcctcccctggtagaattgtgcctgcattggctataaagtccatttgcacacagaaggggtgtgtgtggaaggactctgcagaagtgaatccgctgagtaatgcctgcttcctcagagggtgaatgccaagatgcctccaaaggacatgaagggctctgaaggggaagatgactgagggcaccatttttgatcactgccaatt

SEQ ID NO: 152594 - DNA, 296 bp, Homo Sapiens
cccgctgggccgccccgcccgacgcccgcgatgcgcccccgcggcctggagctggggcggggctcgaagttgccggggtcctgcgaggttcagggagcccaggaggccgagggggcggcgcgcacccgcgtgccaagacgcttccctgccctccaggacacacctggcccggggagggagaggacagcgacagtccccagcaacaagtgccagtacagggacggttcacgggagggctgtccagaatgaactaccaaccgcagctcttcgtgggctcttactgttgccaccatttc

SEQ ID NO: 152595 - DNA, 260 bp, Homo Sapiens
gcaagacttttcataacctttattaagctaagatgccttgcgaagctccatgagtcggtgatattgacagcattttcccaaattcatttgaccaatgaaccattttttccacgaggcataccatgggacacgttttgaaaagaattgtcgttacatccctctttctctcttggcccccggaaacttctatttccatctgatgctcaccccgagtaaccaaatcagcggggatctgggtatatttataccccacctacact

SEQ ID NO: 152596 - DNA, 556 bp, Homo Sapiens
acaaagtataaatgtatatatcaactgaaggtaactacttttttcatatttggagttttaaacttttggtgtttacctcagactgatgttacctcttttatatttttatgtcttaattggctcggatgatgaacttgtgcaatcttctaccaacaaagttcaagtggcatcattttatatacatgtatctttttcaggtattttctatacaaattcttaatagatggaaaattagactctactttggtcactaatagtctttcatttgtatattgaagttaccttgccccttggagttattgaagtgacatgtcaaggtatcacctaaatattcttcagtcacactcactggtatttctgaggctttgtgtgttaacaggccttgtaattacattattttggttaatgtaaccccaaaattgctttagtaattgctctttggcatagtcaaactataaatgaaaatggcagctttacaaatagtatatttaagtgaactctggaactatggacatgaaaaaaatgatggctgggatttatgatttttgtctggcag

SEQ ID NO: 152597 - DNA, 398 bp, Homo Sapiens
tcctcaaacctcccttctaaattctggtatcccttgtgttctcacttcaatccaggagcattccattcttccagatgcaggatacccatgctccctcctctacctgcagaactccaattctataggaacaaattcccttatatcttcttcctttccaaggcattccactgttcagctggaagcctgtttcgctttttttgaaactcctcacctaagcagactactctgattctttactaagaatacagatgctattagctacaaggtcttttcaagtcttgtcagagagcttctctatatctttaccaatgcttgacttccttcctccattggtgaaggtcatgcctcctgtcactcattcatgtcatacccggagggcacctgccccgagctgggtt

SEQ ID NO: 152598 - DNA, 517 bp, Homo Sapiens
ttttactttaacaaaagatttatttgaaacaggtttgcgcagacatacaccagtcaacaggattgatcaaagccacaaatcactaaattctcccaaaacttctaaaaatacaagtagatgccctccgtttgtattcactccaggagggaacccagtgcactgtaatgtgctgctgtaatttaacaaccagaggacattaataggacgtgaaaacggtaacacttctagagggaggcaacaaaaaaccccacacaccatagaagcactccccacgctgctgggagccaattaaacgtgcccccacagccctgcttccctctgcatcaccagattaaaacctccccatcacaaacaatatttaagcaatccaggcacagatgtgacagcagacaggagagcacgtggctttgctcgcatgagaaagacgccacaaagatgatgcatttgaacgacaattcagtgaccggcagccccatcctgcagctggccctgctgcagctgcctgcgtggcccttga

SEQ ID NO: 152599 - DNA, 571 bp, Homo Sapiens
tgcctaagcacctatcattgaagaatgggaaacttttaaggagccaaagtaaataaaaacacagcatatgtgttgcttttgagaaaagagactgaacataaggagactatttaagacactattgcaacggtcccggtgagataaaactaagaatatgaattagtgttgtaattgtaggactagaaatgagagaagaatgtaactacatatgtaaattccacaggtcttggctgtttgtattcccctgaaaagggaaggttgagaaatatgaggcagagacaccaagcaaataggaaggagaaatcccatcattgctagcattctcagcaatgcttgtttttctttcttcagttggaaaacaagacatttgttaaattatgtctctcctctttccttttcctttccccgttctttctctcttcctacctgcacagaactacacagacataggcatgcacacatacacacgtaagcaattacaatcaatataatagcagtcatcatcctcactgccaccatcaccaccaccatctttaaaccctgccatcctgtttcagattaataatgttaa

SEQ ID NO: 152600 - DNA, 177 bp, Homo Sapiens
ctcaaatcaccgctaacccacctagacattttaacatccgaaaccgagtgatgacgtccttatctatatcatcttactgcctgtgtgtgtggactttaaattctgaacccaaatgagggggagaaaaccaagttgactttcatgactgagctctcagggacgtccaaggaatctgtg

SEQ ID NO: 152601 - DNA, 732 bp, Homo Sapiens
tttctaattccaagatgtttattctctaagatgaaaatgaatgcatgaaacaataaataacaggttaaataatgggagacaatagtacgggaggtggcatcagatggcaaagggcaaagtgttaagtaagtagcatgaatgatgtgtgacttgatttcagagagagggaggataactgaaacagacatagacagggccgtgcatttcagcctaactagagtagaaagttgctacctagaatggctaagaaggtgccttctcatttcttaatgcttcagaggttaagactttgatgtttcctctggtctgagatctttgtcactttgggccactataacaaaaataccataaacaggatggcttaaacaacaaacatttattttttacagtactagaggctggaagtctgagactaggatgccaacacggtatcagattcttggtaagggccctcttcctggtccacagaagactgccttctgtgtcctcacaaggcagtaagaaagcatctctctcctgtctcttctaataagagtgctaatcctatcatgagggctccactgtcttgaccttattacctcctaaagttccccacctcctaataccatcacactggggattacgggtttaacatgaattccagggggacagagttaatagcatctgagttattctaaatcaatgctatcagcactgaagatcaggctatagggtgggcacaaagtgtcctgg

SEQ ID NO: 152602 - DNA, 458 bp, Homo Sapiens
aatgtgagtgactggatcactttattgaatggtaagaaatttaaagagcaaagagctgttgtaaatgctacttgtattttttttcctccaaaactccagtcttgaatttatttttctttcacacaggggcatttctacagccacagggtgcatggctgtgcttaactgtgttttccatcctagtctgttcctgtggacgtctacagaataagaattaaccatccttgtccactgctgggatggctcaggctgccaagtcatttcccaagaccagtatgagagagtcctttctcgggctagctgcttcagtaggaatcagtgatctggtacgtggggtttgctcttggtttctgcatttcttggtaaaaggaaaaccttttaaaatgctaagtcataaaacctttggtagtgaagccaagcggcattccctccagactcctctccccttgaataaggtc

SEQ ID NO: 152603 - DNA, 614 bp, Homo Sapiens
ttttcctgtaaacttgtttaagttccttgtagattctggatattagccctttgtcagatggatagattgcaaaatttttctcccattataatctattttcaacagatatttataggcttcatttttgccactcttgctgtgatctggtctggccacctggaaacacctgtgtctccatcaccctctgccctttcatgtttctgtgcctttgtctctgctggcctttctctctggaatggctgttaggcaccttcaccgtccagtgaagcagtagccacatcacaagcagtgttcctggccttccttctatagcaagtgtctgctcttctggtacagcctgtgcctacttctattctagtccatcactcacaacagaggggaattcctggagaactagaatatccctattagtttcttggagcctcactgcaagcacaatgcttggtgcatagtaggcactaagtgagcatctctgaatgaatgccccacctatcgagtgagccacgtgctgtctgtccttgcctctggaagtctgtgcagataggtgagtctaaatctaacgatagtgccatcaggacttctggaatgaacagtctcttttgtcattcgatgcc

SEQ ID NO: 152604 - DNA, 500 bp, Homo Sapiens
atggacactgggactctccaaatacagggtcaagtaaacagcatttctcaaacttatttcatataaaaccctctttgctctgaggatctgatgaggttaatattctgagacatatgcttctggcttctccagagattccagacctaagagaggccagagctccctgagcctcagtagctacccaattctttctatgaaatgcaccaaactttgcaattagggaggaacaactaccaggaccaggtacgtagtttgcagagttcaatccaatatgaaaatgtagggccccatgttccaaacgtattaacaatttctagacagcaacaggagaacattaaaccaagcatggcacccttctaggcatgaggccccaggcaactgcctacaggcccatgaggctggtcaggcatgaggccccaggcaactgcctgcaggcccgtgaggctggtcctgcctgctgtcatcccatgctgaaatctgatctctagatctgatctcta

SEQ ID NO: 152605 - DNA, 226 bp, Homo Sapiens
tttcttctttcctctagtataaaggctgcaaagccaaaaactcttttgcagcaggcaagactttgtggaacaatgagacctaagtagaagtctactgaggatttctggaaaagtcttgttttctaaatatagttactgcccttcccttttccagcccttgtttctttctgtttggacactgcacttgatggctagagcttcaacagccattgtgagcctgtgaggg

SEQ ID NO: 152606 - DNA, 780 bp, Homo Sapiens
  misc_feature (338)..(347): n is a, c, g, or t
cggctagcagcgtgagaaggccgctggctcctgagaaatccccctcctccaggttgttcttccgagtgtggtttaaagttcaggagcgggcgggagggtgcggatgacgtagagagggccggccgctggggagcttttgggggcgcgcggggccgactctcccggcctgggagggcgacggccggggttttcgagaggtggttccccctcttcccgacttcgcacatgcaaatctccacccccgcgccagcggcgggacgttgcgccctgtagggggaagtggtgctgcggcgggggtcctgtcttcttctgtaattcctgtatttgcatacggggannnnnnnnnngacttgatttttttcctccatctaaattgcgagggtactgtgaactttacgtattttacctactgaaacccgtttaaactcaaaaggtccgcacttggagttcgttgtctcattaggcagtgcactgaagtttagtggacactatatcctgagatttcacacagatgccaagaaaggcggaaatggagcacacatttagtgcattaaaggacctaggataacttcgtttccttcatttgaatagtacctgctatgcatcagataatgtccatacttaatctatgacgtatttattattcctaactttatagatgaagtattcggggttcagagaagttacttcaacatacagtacttcagaatgctgataaaaggcacagtttaaagccagggttgtctgactccaaagctccatgcccttgcccctgtgaaa

SEQ ID NO: 152607 - DNA, 460 bp, Homo Sapiens
cagtctttgagtactatgttcaatttactaaaaatatctagaaaactaaagtgttcccaagggcaaatctttggtgtgacagatgtggaatgatatccacaagctgaagggtctgtcttggaaaagcattctgcagctgcttcaacaagagtactgggtgtcatttataattcatgcaagtatattgaagctttctgctgtcgtccaagaaagatggttttcaaagctacagagtgcaataatccaatattccttgtagagagtcccatatatctcatatagattttacactggagatcatttccatgctgatgacctcaagaatacaatgtgatattttcagaaaacacagatttatgctatgtgctatttctgtgggcttgggggacaaccattagatcattaagttgaaggtatatttctagtcagacttaatccacattgcagtggtacacaacaa

SEQ ID NO: 152608 - DNA, 775 bp, Homo Sapiens
  misc_feature (44)..(114): n is a, c, g, or t
  misc_feature (388)..(396): n is a, c, g, or t
tttttaaggtaataaagaccagttttattattgcaattatcgannnnnnnnnnnnnnnnnnnnnnnnnnnnnnnnnnnnnnnnnnnnnnnnnnnnnnnnnnnnnnnnnnnnnnnaccacaaaaaataattgttttttgttgttgctcacagaattattttttgtgagctaattattatttaattcatcaacaagtctcttgagaaatagaaagccatttgtctactactgtgctaacagaggcacagaaaatatagcaagacaacaatctagtgagagacaaaatcaatgcatataaaacagggaaagacatgaccaagcttataattaaaatacaagacatttgtttatactgaaaacagtttaaagttaacacaactctacaggtnnnnnnnnntatatcaaaatgtgtgatattaaattataataagttttcttacttgagcctttaggctttgtagttgtccttcataattctgagtcattgctaaattacatttttccagactgtccaatttctgtcgaagtaaccctacctcttgacctttctgatccaaacaagtttgtgcatttgccaattcttgatcccgaagatctaatcgtgtctccaaagcccgcatctttctttcccaatccattttcttgttgcttaccatgatgtcaatttgttccattaattcctgaagctcagcctcacaaggagaagttcccatcgtattatgggcttggttctccatgtcaagaaactgctacatactggtttatatttcttgatt

SEQ ID NO: 152609 - DNA, 531 bp, Homo Sapiens
  misc_feature (321)..(321): n is a, c, g, or t
tttacattttatactttctgaaatgaaggtatatgttccaattaatggcatcttagattcaaagaaatataataaatgttattttccaactaggaaacagtagaagctggaattcagacacaagtcagtctgattccagatctcacactttggcacatctgccatactgccattctatcgtgaaaaaggaggttaagaaatgcaaaactctgccaagctctcccaaaggtaatctaaaagggtggcctgcgaaggacttggggtccaaaaccctagtttccaattctgactcagccatttactaggtacaatcatgaatanagttgtactcacacagaaaatagtttctgaaagagacttcaacatgcaaaataagccttcttttaacctcacagggttttacaaaaaacatttttaaagcatttcttttggaatactatgcaaatgttaggtaaagcagcataggacttcatagaaaccgagaatagactctgactgatacaatgttggtcaagggtctctgggccttca

SEQ ID NO: 152610 - DNA, 278 bp, Homo Sapiens
gccgaaaagtgaggtaactctagacttcctccaacaaggtttagaaagcagcctcaaaaagaggaagttcatccgctacttccgtaactgccagccaaaacaaattttaccatttttaaaacaacaaaatacagacatttaacaacattaaattcagaatgttaaaaatactagatatgcaaataagtaggcaaatagaacccaaaatcaggagaaaaatcatttaatagaaacaaaccccaaaatgacagagataataacgttagcagacatggact

SEQ ID NO: 152611 - DNA, 195 bp, Homo Sapiens
gttagagttctagccattttatttctccgcagggtcctttctcagacattactgcatgctgtatatggcgttagctgtgtgttgattttctaaaagatgatagagtttactggtaattgtgtaatcagctcctgcctttttattttcttgggttatttacatgtcagagacatttataaaaagtgaaaggataaa

SEQ ID NO: 152612 - DNA, 471 bp, Homo Sapiens
tttttccatgcactttagggttgacatttattactttaaacaggttgggttccattccttgtatgcctttctttgctccattaatttgcaatggtgctaaaagtagtaaagctctctccccattagccatgccatgggtcctccttaattccctttttttggaatgtgtcactgaatctgcgtgaatctgtgtgccctggtgggcagatggtggggcattgttgagggtgctgtggctgtttgtgtgccctgttgtgttcagggctcttcgaggaaagtacacccactctgccctcccagggtgggctcaccttggttgctgttcactttcctgtaagggaggggttcatttccaacgttgtatagatagcaaagagaggcccacaaggtatgggaccatcttttaccccaaacaatcactctgagtttgtgaatattttccggtcatagaaagagatttccaaaaattag

SEQ ID NO: 152613 - DNA, 579 bp, Homo Sapiens
tcagtgaagaagcaaaatcatttctaacaatgattcttgttatgggttgaactgcatccctccaaaaagatgttgaagtcctaccccccagtctctgtaaatgtgtacttaaaaatagggtccttgtagttaatcaagttaagatgagatcattagggtgggtcctaatctgactggtgtcctgaaaaggaaaaattggggcatggggacagataagtagaaagggaagacaatgtgatgacacaagcagcagcccatttacaagctaaggaatgccccgagttctaccagaagccaggagagaggcttggcacagattctcatcacagtccagaatcgacccggaagccttcagatctgtaagacgttacatttttgttgtttcagccacccttgaattgtgctgttcggaatgatgtccagggcatgctgcgcgcggagagccgggagtcacaggcccaggcactcgcagcctccaccagaacaaacggcggcagcggccgtgcgcgcccacggcctgcgcggggacgcgcttcgggggttcgggggcgcccgcggtaaagctccaccgcggccgca

SEQ ID NO: 152614 - DNA, 456 bp, Homo Sapiens
  misc_feature (53)..(61): n is a, c, g, or t
tttggcttaggtatacttgttttgttctttcagctcgttacgtaaagatacannnnnnnnnctttctcatgacatgaagataagctttcttcttaccaaaacctaaactgtgaaggcagcacccaagccaaaagcctcgaggctctggtttctgtggtgggatggggagagaagtaggttgcacagatgtaggatgccagctgacttcagaacttccggtctcagagctaaccaggctcggcaagccacaagagagaaggagcttgcataggtggaagagcaaagaaagccagtgctgcagaacttccggtgctcctccgccgatgtcgggctggcgctgctcccgagccctgtgtccattccatccgtctctacctgtttaaatcctccccagtcttcaatattcatttcagaggctgcgtctttcaggaggccaggtacaatttctctcccttc

SEQ ID NO: 152615 - DNA, 437 bp, Homo Sapiens
acatgattttttaaaagtgtagtaaaaaacacataacaaatcaaccctcctaaccattctaaagtgcaaagtgctaactaggtgcacgtctttgccctcatccttcactgggtcttcaagtgaaattcctgaattagaggagttacacatttttattaaagcctaatcttatgtaaatatttgtttacataagatcttagctgactctatacatttccttctgagtgctgattttctgtccagaagcctagagcttttgatttagttgttcttgggtgaggtctggacatctgtatgttcaaaatcttcacaaatgtttaggaaccatttctctaaacatttaattaacataaagtactcgtggaagatgtttgcttggatagtctgtatagaagatatttggaatatagatcattttaacctaatatacttcaacc

SEQ ID NO: 152616 - DNA, 428 bp, Homo Sapiens
aggaagagagcgtgtaggggctgcaaccagagacacagtcagaagctccgaggctaccgcgatggtccaggtgccacaggacacagcctaacagaggcccaggttggagccatggaccatggagtcatgagaatggaagggaagctgacgccatgtgggatggggtagaactgtccgcaaattcgtcccgcctctggagtcttcagaccagtcaaggccgaaattcaaccaagcctctcctctctctagctgttatttgtttgcagcacgcggtctggtggcaccctgcaggatttaccagctttttgccaacattctggcctatgcaatcaatacgtcccttcagcgttgcacttggatggattggacctatagttgttatatatggatattgtctaatttatttattacagtattaactgactcct

SEQ ID NO: 152617 - DNA, 467 bp, Homo Sapiens
gggagatatggttttatactcataacaatttcctgtgccattctctgtacacagaggtgattcatttactctcccattagtagaacttgcactttgggctgtctgttctagtatttgggaagtgtttatgcttccttccagggaccatcttatgatcagaggcaggatgtctgtgagatggttagctagagttagcagtgtccggggagagtggctttagaccagtcagtaccttgctctttgtgcatggtgcatgtcaagtcaggaagccaagaaaccgttggcattaaaatctagatgcatagagatccttgctatgagttgtggataggagtggctccatctatccttgtggtgaaagagtccaggagctcctttagagattgtcaagtcctgagcgatgagctgcccttaatcctcagaagccttacaaaaattgagatgtaccatttctaccctttgagaaa

SEQ ID NO: 152618 - DNA, 569 bp, Homo Sapiens
  misc_feature (124)..(300): n is a, c, g, or t
atggttggttgcatcggttctcacgcccgcccgcagaaggtgacggttctttgcactacgtcctccctagcacctgacgctgccagacgtttcaactttggacttttcgactcaacttatggtnnnnnnnnnnnnnnnnnnnnnnnnnnnnnnnnnnnnnnnnnnnnnnnnnnnnnnnnnnnnnnnnnnnnnnnnnnnnnnnnnnnnnnnnnnnnnnnnnnnnnnnnnnnnnnnnnnnnnnnnnnnnnnnnnnnnnnnnnnnnnnnnnnnnnnnnnnnnnnnnnnnnnnnnnnnnnnnnntcctcgcgtattttagtagttttatttgtggcaaagatctcctcccccgggtggcctctgccctccggcgctgggaagtcggggcggcgaggcagcctctcccggggcgttcgggctcctccggctctgccccgatgtcgttattacggccgtttgcagcctccgtgccagggccgggggtgcggttcgggacgcgggatcctaggtcgggtcctgccccgcccatgtggcgccggcgtctgtgttgtctgcggtctccagggcagcgc

SEQ ID NO: 152619 - DNA, 555 bp, Homo Sapiens
ttgttgatccaatgtagcacacagacgttggtgtgagcagatgcatgtggaaaggaggaggagaaatttgggtcaggaaggaacctgagctatttttttctctcagtggtgggtgagtagctgttttaaggaaaaagaaagtggaaaaaaggaaataagagagtgaatgcctaatatataaatactcagaacttctgcaccctctgataagtaggaaccccaagaaacaagaagctttgggggtgaacggggtgtcgttcattcaataaacatctgagcacctattctgtgccaggcactgttgcagggtctgggaaccgagcaatgaacaaaccaaagtcttttaccatatggaaccaccactcctaatttctgggcatgatcagagaatgggatgaaatggagagtgaaggggaggccgcctcaacttcagtggtcagagagggccactctaagaaggtaacatttgagcagagacccacttggcaaagagaagacagttacataggtatctaaggaaggcattctcctttcatcaaagtgttcactgatgct

SEQ ID NO: 152620 - DNA, 834 bp, Homo Sapiens
  misc_feature (152)..(164): n is a, c, g, or t
gaacattcttgcatagtttattacagccggtatcatttgtcccattttgcagtgagaaaactaaggctaaaagaggtaatttgatcaaggtcataggttagaattcagctctgaatggcttcaaatttggtccaggcaagctcttttcagannnnnnnnnnnnnaacactatgtaggcacctggaattgtaatttactcaggggcacaaccacttctcttcaactccagaagcttctccgtgcatctctagagctaaaccacccatgaaatcttcctggaaggatgtgaagctagaaaggggttgggctcggggaactgtccctttgagagctgacttttccatttagtaattttttttaactcttgaagtatttatctgcttgatgggtttgtagatcctttggacggagatcacctatcatctatcaccttttgttttgtctgtgtgtgtgtgagagagagagtctgagttcctcaaagcttttttctaggtaatttttgatacttcagattacaatggatatctatattcacaaaaaatattagtgggatagaaagagtatctttaggtaggaagaggggcgcagaagttacagccaacacagagaatccttcaatgtttgtaaatatctgttaatttcccttgcctctggagcagttttcccggtttcagagcctctgctcctaggtgcacgtgcagtgtggtagcaatggataggttttgacttgccaggtttatgcgtgccattcagggcaggggattagggttaggccagtgagtgacctaggacactcaatttaaggaagcactcgcacaaacctgagagttggcg

SEQ ID NO: 152621 - DNA, 505 bp, Homo Sapiens
attttctttttaacaaactttattttttagaacagttttagatttacagaaacaactgaggagacagtacagaaagttcccagataccttccattcagtttccccatcgttgacactttacattagtatgatacatgtgttatgattaataagccaatattgacacatcattatttttaaaatggcatagtttatttagagattcttagcttttattcaatgccctttctctgttccaagattccatctcagataccactttacattaagttgtcatgtctttttaaatgtggcaatttctcacactttatttttgatgaccttgttagttttgaggagtacaggccaagtattttataggttgcctagtattggaatttgtctgacgtctttcctcatagaaaatactcgggttatgagttattgggaggaagaccacagaggtgaagtgccattttcttcccatcatatcaagagtaactgctatccccatgacttactactg

SEQ ID NO: 152622 - DNA, 583 bp, Homo Sapiens
ttttgccaggatcagctatggtttattggcagcatatgaaaagacgttttgggtgcctactatgtcactcactgttccaggcgctgcggatacagtagtgaagaaaatgaactctctgccccattgagtttacattcaagtcaaggagacaatgataaataaatatgtagaacgtagcagtaaggggagagagggagtaaggggagagagggagatagtggtgggactattttacagatgacagggagggcagagacaggaagtgggcaattgaagcatgtggctatctggggaaagagtattcccatagtgggccattaggagcaaaattctttaatcaggagtggggtggagaggtgcacatttaggatcttgtagactatgataagggctttggatttgctctgcattacagctggagggcttggggacagaggaacgacatgatctaactttttttcccttaccacatattcaaagctttgttagctatgagacatgaaagaagccaagaagcctgttactataaatctgtgaagtcttggctgctgtcttagccatgctagcatacccttgcatgatt

SEQ ID NO: 152623 - DNA, 495 bp, Homo Sapiens
  misc_feature (179)..(188): n is a, c, g, or t
taactaagacaaagtgaataattcactgtgagccaaattctttcttgattcctctttttggagcagtccatctttatgggaaaaccagcctagaatggtgatttcagtttcaggtgatttcgatagaattgtatttggctcagaaatgataagactggggccaagaaaaattttaaacnnnnnnnnnngtaatcatattactagtttgatttcatatgaacttcctttgttgactttctttgccattaatttaaaagttccagtatcctcaatatttgatgtcttatatgtacagaatcctttccagctgtaagtcatcagcaagtaaaaaatttagtatggcaatagttttcataagaggttttttaaaacagaaaaatgttgacattgccagcctctgggttgcattttgggatatgctacattttaaaggtatcttttaaatctgaaggcaaagactttttcaacatctgaatattctgatttacagaaatt

SEQ ID NO: 152624 - DNA, 775 bp, Homo Sapiens
tgtgtcgggtttttgtttgtttatttcatcctatagcaagtccctaagataaaaacatctgagcagcaaatattccccacaagagaatgaccactatgccagagggctgtctttttgtttggatctgtagggagaggggagatgtaattgtcaagctcaaggtcccctacccgccttccttacaggaccctataccctaaagctattagacgttcacagtaaaatataaatgactagaaataatgtaaaccttattctatgctcctcaatagcacaaagtcttaacccaagaaagaataccataacagcagattttaggcatctcttggtatatgggggaatttatgttttggatagtcggatttctcagcccattactcccttgccaaaagcataccacaaggaggatcacctacctggctctcacatacgtgaagacctatacaaccccattgtaaaatggcctctgtttaaaagataaactttgaagaactagtgtttcctggtgtttgttctggataaatgatagaaagaaacattcccacagatgtaggctctggggaaaaatctaaatgtcagagggcaatgagagcagctgattgactctagtgctcacagctcaggggaatcaggtgtgacacagcatttaatcttcatttaccacacttttcatcaaattgttcaaattatttccatagagaagggaaatctacattattttacatattgataaatacataggaacatgctgatctgatttcagagaaagaggatt

SEQ ID NO: 152625 - DNA, 706 bp, Homo Sapiens
tttgtgtatataattcactttattaaagtgagtttcaaataaaacaaatgctgtttgggtaagtttggtggaggttgatctatatagcagatatattatataaataactgtttttaagtgatacaccagattagaaccctctcctttaccccatgccctgacatcagttgccattgggccatccgtctgcctggtatctgggctgtgtggtctatgtgatggcagttttctggtccatagaaaatgctggtatttcgagtataaatgcagatgtccagtgatatcttcccatttattttgctttccgatgttctttttctcttaagaaaccatgtgagtatttctcattctaatgagttacaagtagtcccaaattatgtatttccttgaagtgtttatgcagaagaaatcattctctacccaagttcctcagtgaagatatcacatcactgagaaagcacttctctttgaacaaggacatgctccaagaagaagaaacatgaagtggtgattatataaaatagggaacatttaaacacaaattttctagcctagttacctctatgacacaacagacaaaatgcatgtgtgtactcttatcttcaaagtttccctaccagggaaaatttcaccaaaatcagaagcaattgcgccaatctaaagagcttttcttgtgaaggggtaaagcctgtgaaccacagcatat

SEQ ID NO: 152626 - DNA, 501 bp, Homo Sapiens
cacagagtcccttttttattggggtgcaatgcacataacataaaattgaccaccgtaaccatctttgagtgtacagtcaggggtattagtacattcacattatcatacaaccgtcactaccatccatctccagaacttttcattttcccaaacatgaaacactgactccccattccttcttccccagcccctggcaacccccattccactttctgtctccatgagtttgaccgctccagggacctcatctaaggacaatcacacagtatttattcttttgtgactggcttatttcacttaaagtaatgccctcaaggttcatccatgttgaatttccttcctttttaaggctgactataaggatgggtgcaccacattctgtttattcctccatcgatggtcacttgggttgcttccacactgtagctgttgtgagtaatgctgctattcatgtggatgtacaaagatctttttgagacccaacttttatttctttcctgt

SEQ ID NO: 152627 - DNA, 319 bp, Homo Sapiens
cacacattatctagtttggtaaaactgtcaccaatttacaatccggaatcaccatgtgagtcgaattaacaaatgtattaggcaacttgtagtcaaccagattgcagttccagctccctaactcaatgcaattttaataatttctcttctctgagtctatctcagtttctcatctgtaaaatgagtaaaagcaaaccacttgcagttcagatgttgagattcggtggtaaggaccttgagaaacagcggacaatttcaggatttaggactttaggtcttgatgggtggatggtactgtggaagctgtttacttgtttgt

SEQ ID NO: 152628 - DNA, 585 bp, Homo Sapiens
attttgtatttttagaaaaggaatggggatcacaccaaggcagaagtgcttgctgggggacagacactggcttggctgggatcaagtagcctctttctgctctccagcccagcggactggaagcagcagatcagcactcttcttcctggacaggggtaatgagaatgagtattttcctttaaagctcacttgtttccgtattctaagcggacgcgaacattgttcttttctcgtgctttcccactttcaagacccaccaacacctgcctgcccacatttcgagttatcttcgtcggctcctgcaagcccgcactcttctccgcggtggctactctccgctcatccagactcccgccctcactgcgccttcttcctgcgatgaccgaggaggtggtgggagaccaccacttgcgagcttccaaaggactttcaaacctgaaccgcagagtcagagccctcgcgccgtagaaaagtcaggagcgccccggggcccccatcggaagcttcgtgccttcccgtggaaaggtcgcgagcagggaaggccttcgtggccactgagtcccctactccaggggcggcggtcgc

SEQ ID NO: 152629 - DNA, 503 bp, Homo Sapiens
aggtggacctggctgctggtggaatatttgacatgaccggtgcccacgcccctctcccattcctctttcttgaaatggagagcaggcaagatgggggcagtggtggaagatgctcctcctccatgcacccagcagccctggggagcggcagggtcgcaacccaagagatgaacccccagtggccccgtcacgagctcccaacggaagggatgtcctagtgcagaggcagccaccacgctcgccccctgtactgggaaggccgccacgctcgccccgcgatggggaaggccgccacgctcgccccctgtatggggaaggccgccacgctcgccccctgatggggaaggccgccacgctcgccccctgtagggggaaggccgccacgctcgccccctgtactgggaaggccgccacgctcgccccgcgatggggaaggccgccacgctcgccccctgtatggggaaggccgccacgctcgccccctgatggggaaggccgccacg

SEQ ID NO: 152630 - DNA, 522 bp, Homo Sapiens
tttcatgggtaattgtttttattgcattgtagagaatgccattgtccacagattacatgcagctaggtttaccgtacaaggccctggcagcctccacggagggctgggaggggcagattacaaaacacatcagtgctacttttttaaacagtatctggtggggagactctgagaccaagctgagctccccagcccctctcgaggtaccatgggggacagggaattcaccccaggccctacacaagcgtccagaggattagggctgtggtggagcaggcctgcagagtggatgaaggtgagacagagaaagcggggcgagtgagcgacagacagaaatagatggacgaaaaggacaaaagacatgcctgagagtagagagaggtcagcaaagactcaccctccaggtccttctcccagcatttggctggagagttccagcagtttggtgatttgtgggaagggtgattgactccagttcagctttctcaacaccctcccctcccctgctccccaaatacactc

SEQ ID NO: 152631 - DNA, 460 bp, Homo Sapiens
aaaaattcgaaatgccctttttcttaactccatttgaaccagctcacatcgatgggcacaagcgtcgccaggaaattcagtgtggtaagcttggcacctactcatggccaccgtgtcctgaactccctttcctgtgctcaggccccagcccacgcagcaggaggacacactgccgaagggaccagttggacggccttctggctttagcgcctgtgcctttcaggaccttaaatacagaaaggaaccgagtgctctgtgcagcccctccaagacggtcgctacagcgccagcaccacctgcgccgggccatcatgccgtgaccggacttggtttacgaatacagtgtacgaggttaagatatgataaagtgtaaaaatatatgttatagccacggtggttagtttaacatgttttgtatatatgatttttataaatctattaaaatgtgccttaaattaaa

SEQ ID NO: 152632 - DNA, 849 bp, Homo Sapiens
ttttttttaagaaacacactttattcagtaatacaaacgaaaagttttctgttgccaagattcacaagaagggagctgagttagtggtcactcactgcccaacaccctaatttcacaagtgaagtgaagttccaacaaagtaggcctcttggaagaaatgtagacgttgctgtcctttaaccaggaaaattgcgttctcgggacttcacgcctatgtatcgcttcacaccaacgctgcgcagtaccacagggcagaaatgggtgcttgtggtattccagcacataggacttcctccccaggatgcagttacccacactgctcacatatttgcatttctgtggccccctgtcagcctgagtctgcactacgtggtaagcacttgacattcgccgtctcatttccccaactccactcgcacttcccctttctgtgcaggctaaggacagattcaggttaccggagggaaacaacatttcaatgaatttgttagtcgcctttatcgctatcaaagccaatcgtgacaagtttgtcttttaatgcagcaaccagtactcgcgcataagcctcatagatttacagaggccattttagaaacacgaccgaaacttaggttaagtcagctttgcctaagatcacgccactcgcaaaacagctgaggttcgaacccgcactgggaaggctcggaagaccccaatctcctatctcaaattcccactgccgaagccccacggttctctgcctatgcgaaccatgcaaatacagcggtcgtcgcgccacaggccgtgctagccgccagcccagccccatctagccaccgcctccgggagagtggcgtgccgcgagttgcg

SEQ ID NO: 152633 - DNA, 731 bp, Homo Sapiens
  misc_feature (417)..(433): n is a, c, g, or t
gcaaagtaaatagaaattaacatcctacatgccaaatccagtccactgtgggcagactgtgacaaatcctcaaggaacagatcattcccattcagtagaaactattctagaacaaagttaaagcatctcacttcatttatcaggcatacctgaccctgaaatcatacctaaccaggagagtacagctgacatttcatctcacttccaaatttggttcgaaagcacagtacctaaaaaagttcacaagtatgctttctcccaggataaacaataacagtgaaaatctattaatgtaatttgttgccataatagaaaaataagtggtaattttagcaggcgttgaaatacgtttcttaaaatttatacctgttcctgataaaatttctttattttgggtactttctttagcttgggttnnnnnnnnnnnnnnnnngtcctaacttgataaggctacctaacataaaactaccaaaatagaaaaaaaacatgcttcttggtagaatgttaggaacagtggaatcagaaccagcctgttgtcccgactattattcactattgtcctggaaatcctgaccagtacagggatgtgggatagacaggcacaaatactgaaaggaaggagaaactgtcatttccagacagtacagttgtcagtccaagaaaagtcaagtccatagaaccattctcagttcaataaggtgatcagatagatagatccacaacatgttaaa

SEQ ID NO: 152634 - DNA, 541 bp, Homo Sapiens
tttttcacagcctcaaaacatttttattaccgtcaatttgcttatagccatagccaaatggcaggatgtacaatcacatgcagaagaaaatatttattttgactcagaaggcaaagggattaagagaacattgtattaaccttgcctttcatctatgttttaaagggaaagtctcctgaggcatccattgaagttctattttttaataaagagtatcaaaggcttttaggagaccaggtgtgtgtttaactgagaggaggagaggaaggaaagaagcttcacgagagagaaaaggcagttttcacaaagctgcttcagagactgcaaaaagatgtatgtgctggaatctgttacaggcattcctaacagccagcctccttcaccgtccccccacccctttttttctgctgcttggaaacaaaatagctttttttccaagcaggttgttatcatattcatggcatggtcaatttccgtttgccaagaaaatatttaggctgatcaaagaaattagaaaatccgctgaatagaaacagacgtt

SEQ ID NO: 152635 - DNA, 519 bp, Homo Sapiens
tttatttttaattttgctttatttttaatacagaaaaaaacttcaatgatacaaatcagtttcagattttggggagagcattatcattctgcagcaccttgttgaaaaggggctttattgtacaggcgtctgtgatcaagtcaagaacatagactaaacaggcaaattccacgtgtgctgtgtgtgcaggaatgagttagagaagtgacctggatgaccgtggggagagaactgttttattggtgttgttcaccagatgcctcccaatgtcttgggaaaaagaaatatggaaaacaaaagccagattcctgacccaaagaaatgggaggaagtggcatggtttggggaagactgaagctatgggaacctctgaggttgccagggccttgaccttgggatgtaaagatacagagatgtaaagatacttctgatgtagtggatctatgaaaacagacacacaccgatcccatcctgagatgaagtcagagcctgaagccggaagatgagcaaagccatgag

SEQ ID NO: 152636 - DNA, 462 bp, Homo Sapiens
agctccgtactttctatggggtttatataagagcaattcgagtctccccactcctcacttagtttaagctcattttgccctgagtttatctggtagcactttattttagcggacaaggagggaagtggggaaaggaaaggaattataaaaatacaaggtagacgtgcacaagaaccttcgttctattattatttagtaaagtgagaactggaaacagcttaacgtccagggtaagttagtttcactcactcgacggaatgtatgcagccgttaatgtatttctgcattttcccatatttccagtgaacatacagtactttcgcaattcggagtacaaacgaaaaagggcgagagaaggtcgcattttgcctgccggagctaggggcgcgcttgccggttccaacgagttttcggtgtcggaaaacttgtctttgctcacattctcggattcccgcggccgca

SEQ ID NO: 152637 - DNA, 429 bp, Homo Sapiens
tttatggccaaatactcttccattgtatggatataccacatttttaatccactcatcatttgatggacatttgggctatttccactttttagctattatgaataacactgctatgaactttcatgtacaagcttttgtgtgaatatatgttttcaattttcttgagtatggacctaaaggtggaattcttaagttatatagtaactctatgtttaacttattgggaaactgccaaactgttttccaaagtagctgcaccattttatgttcccatcatcaattcttccacattgttgcttacatgttattttcctgttttttactatagccatactagtgggtttgaagtggtatttcattatggttttgatttgcagttccctaatgatgaatgattttgagcatcttttcacatgagcttactggtca

SEQ ID NO: 152638 - DNA, 563 bp, Homo Sapiens
aatttaatacaatggggatctgggaggggggatgccgaggtaaagcagtgcacatacctttcaactggtcagcaaccacgctctggcccagccgttcaataactttcccatcttccatttcgtaccggtcatctaagtattttgcggtggcctcagaaatgtgaactttgccggccactcccagctgctccatgagattggccaggttcacatcgttggaccacacgtcaaatttaaacctcctcatgcccaggatgccgcaaaggacggtgcccgtgtgcaccccgactctcatgttcaccatctccttcttctcctggcagaactgctcgatggccttgatcatgcccaggcccatctcgatgcagcagtaggcatggtcggcccggggctcgggacagcccgccacgcagtagtaacagtctcccagggtgctgattttctcacacttggtctcctcacacaaggcggtcgaagcgaccgaacagatcgttcaggagacccaccagggcgtgggcaggcttgttggcactcatcttggtgaagcccacgatatctgcaaa

SEQ ID NO: 152639 - DNA, 561 bp, Homo Sapiens
tttgtttttactttgaaatgacaggagacttagagaaaagatgcaaaagccatagagggtccccagatacacttcacccagctaacctcttatgcagctacagcacaatgatcaaaactaagagattaacatccgcgtaaaaccaactacagattttcctcacatttcatccgtttgggtttgtctgatgttttttcacgatgagtgtgatgttcccagaactggcatgtcctcctcagggagtggtgttgggggtgctgatgtggacgtgtcattactgctgaggttcattttgatctgagggtggtgcctgccaggtctctccactgtgaagttactgttttccccttgggaggtgcttttaagctaagcaaatatcccgttctttaaacctttgcctaccaatttgagagtgtgtcaggggtctcacctgcagcagcaagtgctccagctttgatcccccaccttcctcccacatgagcagagattcttcatccaggggcactggtccttctcacccactttgtcactttatttatattagtatggactcatggattg

SEQ ID NO: 152640 - DNA, 479 bp, Homo Sapiens
tttgttgttgttgtttttgttgacctgcttcctttctgacctgggctgattcacccttcttgagcaatctggtggtccctggctccccattgccatagcacactaaggcccagaacttgtgggctcaagccatcctccagctgcagcctcttgggaactcaagatgggcatcaccatgctggctctctttttctcacttgtttagcaggggaggtaaggaacccactgcacactcaagagcatgttttatctcatatgctgatagtctcaaacgtggtttcagcaagcaggcaagatgatgcattgggttgtaggaagaacatattagaaattctatttttcatctgtgaaagatgttaagcctcactaatatataatatgtggtacacacaataattcataaatgagaaagtcttatgtcataaagcatcctaagagtcggtgatacacatttggaggagatgatggggatacccttc

SEQ ID NO: 152641 - DNA, 536 bp, Homo Sapiens
tttatttctcaaattcatattgcagaagttcatcttttacagtttcttgctgtacatgatttgcaggtcaatatgtcatttccttcatttttttctcccctggagaaggcctgagatgatcattctcctctttggctttttttggttctaacattgctgttttggcctgacattagaatatttatcttgaaggcgtagaaaagcagcgtttttctccagtataacttaattttgtgctcttggcttttcttgatatgtctgaatttttccatataaccagaaaagttactgtggtaagtaacagcatgctgttactaagaaccatgtagttccctgctcaaggtactagttttcttgtttatattcctctataatatagtgtatacttataaccttggacatattcttcctgtgtttcatgacattcaagttcccttttcatcaggttcaacttccacgttatctgaatgagcttcccataatgaaaaacaatcacaccgaagagggctttctttacgtttttggtagcgagtcta

SEQ ID NO: 152642 - DNA, 497 bp, Homo Sapiens
tttctcttcctgtacagtatttattgttcctggcactttatttaaagatatttgaccctcactgagtgtctgtgtgtctgtcctgcatccctgggttggtgtcttgagatgtggagggaatgcgaggagctgaggtcaggccaagccgttgagaagccttttccagagtctgagaacagaggttaagacctctccctaggtctgaaggcggaggcaggccggcttccaagagactagtccgagggcggagggcggaggcagggacccagtctgggtctgagtgctggggcagaactgaggacaacgctgcctacccttaagagcgtctgagggcgaaggccaagtcccttcctccagagtcctgaaacgcagccggagccagtgggcggcctctgtgtgggcggggcggagcgaaccattagcctcgtccgccgggggaaccctgcaggccgcactactgtctgcgtgggagtcgcgggtgggggtgccgcgtgcag

SEQ ID NO: 152643 - DNA, 525 bp, Homo Sapiens
gagtttcatattttacagatacctttaggtccataattgttaaatctttttagggtaactcacatcctgcccatgccttctttccaaccttcttccctcttcccctgttcatgtatagtttgatacccaaacctgttcttaagactttgcctccttagctccaatggcagaagtaaattatccttctacatagctggaatggtttcccctgccttgctcttactttgtgaaccatagccttagaagtacggacgacagtgcaggaaactgccccagcagaggcagagctgggcctgagcaaaccctgctggctgcacttggttttcccaccaaacaggtctgttaatcatgcacagacctttggcatgattaagtataaccatcttctggaaaagatcttaaacaacatgggctgtgctgtgccagaactattcattaacatttctccttttttttctagagctggtactcaaggtgagaattcagaacccatctcttcgagaaaatgatttcattgaaattgaa

SEQ ID NO: 152644 - DNA, 512 bp, Homo Sapiens
ttttaaaggacttcaatcaatgcatttatcaaggaatctttacatcattactgtacatggaaaaccagtagcacttgccaaaaccagaaagtaacggcaagtacaaaaaaaacaaagcgctatcagtacattctagcacgctgatgtcaacagccctgagtttgagaccttctctctattaaaaagagacagtgacaaatgttacagtcattaaagacatgttagcctcaaaccaagaccttttccttgatataatcagacttgaacaaaaactgaaaaaggcccaaattgcagtgtgaataaccaactaggtctggctattctgggttagttcattccaagttagttattgctgggtcccacctaatccccactcctgagtacctttcatctccccttggttccctccaaaattccctctggaagaacacctcattgcatcttagtaaggccagggaaggtgtggtttgttccttcctttattcattcattcagccagtaattgtcagcac

SEQ ID NO: 152645 - DNA, 513 bp, Homo Sapiens
aggactccgaagttcaatattcgcgggaaggcgcaggcgcaacaaaaagcccggcgggtttatgggtgggggtgctgagcccaaaacccaagcgtgtaataatccgccggcgggaggtgggctggctcttgaaattacgcatgcgccagagctctttgtgacgcaacggggcggtgcgggcagctggctgcgcgtgcgcagaactcgcacaagggaccttatttaggttgcgcaggcgcccgctggccatttcgtcttagccacgcagaagtcgcgtgtctaggtgagtcgcggtgggtcctcgcttgcagttcagcgaccacggtgggtaccgtttttgcgaggattgtttgtccccatatctctgggagggccacggggaccttggcgagctgcaggctgccgtcgagagccgcgagtggttcgctgaatctcggcaccgccgctgaggcctgcaggccgcgccgactctattgtgtgagaagtcggaggaggcggagcggaagcggccgc

SEQ ID NO: 152646 - DNA, 546 bp, Homo Sapiens
accctgaggtgctgatatctgtatggatgagttatttgtcactaaagttatgagttgtgcctaaaagttaaaactgttgactgtattatgtaatgatcagtatttcagttgggaagatattttagagtctagataattatgtttgtatattgaaaaaatggtggccagtttttaagttccttaatagaagagaattatgtctcagcacatataacagtaatgctaatttattgaaactactgctgttagagcacttcttaattcattgtcttttagtgaaatttatggcgtaacactttgtcagagaggaggctatataattcggagcggaaattgtctataagtaggcatttatttcatgattgatatgtcacagaaatcatggtagtaaatcacattgctatttgaataccctgtttttgtaagtttttaaaactcatattctgaaaagatttcattctcttagtgttagcttgggagttagattgccatgattaaactattatttatccttgtgtaatattagtttttaactttaacatctgt

SEQ ID NO: 152647 - DNA, 585 bp, Homo Sapiens
  misc_feature (123)..(156): n is a, c, g, or t
tttaatacacagaatgtaagatggaattttatcaaataaaactatgaaaatgcaagtgggctcctatgccagaaaaacccacctggcgttccagatgcaagagggccagagcagaggcctggnnnnnnnnnnnnnnnnnnnnnnnnnnnnnnnnnnagtgatttccaaagagtaatccagggtgcccttttcccttctggggaagtgtggagaggtagagccccagaggagaatgtaaacaagcagccagcacctctgtataggcccggcctggatcagagagaggggagaactctgcagggtgtgggattgggctcagggacctccgagtgaggcagggactccctgctggctgctctgcagcagctgctggaacagggagtggggctggttgcgcagggtggccggggagtccagctctaccactctccccgcttgtagcaccagcacccggtctgagttcaggatcgtgttgagcctatgggcaatggtcagcactgtcttgttggcaaagcgtttgcagatggtctgctggagcagctggtctgtcttctggtccacacttgctgtggcctcatcgataca

SEQ ID NO: 152648 - DNA, 491 bp, Homo Sapiens
tggtttactaaccttttatttcagtccattggacaaatcaaaaaatgtttccctgaacaagagctttatgaagaaatagttgagacttaaaagaaaatttttcaaagacagatagtgataatatgccgacaggcaatgaagcattaactctaaaaagggaaatttaacttaataggtataaatacttttgagggttcagtgcaaacaacatacccgttttaagacaggtgttaagacaatggaaaccacttaaaaataccaaggagcacagcagagcacatttttttcttgcatagtaatcagttttattttctccaggcttaccttttttaagtagaagaatccgtgtttcattgaaggctattaggcaaactgaacatttaaatgttatccatgtgagggctctagatcatgtaggtgattgatacaaatacgatccataaaaaaacttttatcttttgctggtattttcttacaaaatacttggatct

SEQ ID NO: 152649 - DNA, 705 bp, Homo Sapiens
ttttttaggaaatgttcactttgtttaatgtggaagtatattccataacaggtggcctctcaacttgcacaaataaaacaaaattggttggctaaaatctatcagagaagaagaggaagtaatcgccaggtggtaggaccaggagcagatggggactatttacttagatcctcaattcttcttgttgagtgtccctctaattaagtacctttccttagatgttaaataaactttcatatttttaaatagtattttttttagaaaagtgtattcccatgccagtttctccttcttccaaagtcaggggtagaataaccatatagcattaatagagtctgtgtaagcttaaatagtccaactttcctttcaggctttttatttgaagtttccaaattacacagctaaaataaaaacagcacagaatttaaattgagaccattatatatcgcagggacttcccccacccccatattaagtaaggcagtgtcagccctggtggtccgtgcagactcagtgcactggaggcagaagttccaggtggactgactcctgcccccacccagacctctggtgctcccaggcagtctggaacaatcagactctggtgctcccaggcagtctggaacaatcagactctggtgctcccaggcagtctggaacaatcagagttgcccttggtcttccggaaatactgtaattccctga

SEQ ID NO: 152650 - DNA, 523 bp, Homo Sapiens
taggaagtagtaccaaacactggtgcagcaacctttctttttggtttctgtcacaccttgtggcacactctggttgttcaggctcctgattctttgaaaaattactttggctcctggccattcagaagtggatcctcactttctgttacttggaccaattttgtcctaagtagttagaattagttagaagttactagagtgaattgctttatgtctaaaaaaaaccaaatgaagtcgaattgtgtagagaatccagatgaaggtctgttttgcattttaagatgggatatctaaggatctctggggaaagggtgaattagtcaatctgtggtactagcacaatgagcattttgaaaaagatttatttccatacttcatactaaacacaaaaataaattctaaatgtattaagtttatatataaaaaaagtaaatgtactaggtgaaaatatgtaaaatattaaatactaaaaatattttcatattcctggaaaaagatatttgtaagcataataccagaagcc

SEQ ID NO: 152651 - DNA, 550 bp, Homo Sapiens
ttgctattctctaaatgcacctgctcttcctgaatttgctatagtttttcattcttttaaactgcatggaaatgttacatatattaattattatgatacaaattccattttttctcaatatcttatttggaaatttattgatgttcactattgtagagctacactgtccatctgaactgttatataatattcctttgagcaaatgacagttcatctattttcagattcatggttgtaactgtttgcaatttagcagatactgttttttgctcttatacccttggcactcacttctccagattgaaggctgcttcctgtggacacctgcagcactctgctgaaaggtgtctgttctggcatgctcagagcacactcagctcacttgcagggcaagttgaaatgccagagagactgaagcagctttcattcaatgataggccaggatttggtggataaataccctacctgtttttacacctattgtgagacaactctgaggtattttccccaccagtacttgcctcacatcccatggtgataatttgttgat

SEQ ID NO: 152652 - DNA, 558 bp, Homo Sapiens
  misc_feature (209)..(218): n is a, c, g, or t
caattaaagtaatttattgtattcttccagatcagacataaagagcatcttgggaattgataccacaacacaatgttatacaccattttcacaaccaggcttgcattgaattcttttttaaagaacatagtaattttaaaaaatctaaatatttacatattaataaaacatatatacagaagattgagacattatccatagatatggannnnnnnnnngctaagaaagcctataaaaaggtttctgaataaagactgaacagtagtcacagtaagtaaacacaattttaatttacaaaatatgattttgctgttgcagttttgatacgtatttccagtgtgtagatccgttcatcgcacacatctttgggttgaacaagctccacccgtcctcaagtgctgaacaccccaagctgtggccccgccttggaaggcagtgcttctgaaggttcccagcagatctcttaacagaccacagttggaagttagcgtttctgccttgaccagcaacatactcatcctattttaacacggcgaaaggtcaccaattaatcttctc

SEQ ID NO: 152653 - DNA, 326 bp, Homo Sapiens
gtcaaccaacaggttcaattttatgaaaaattaaaacacaaactcgccatcctatttttacagcaattcaatggtatctgctatgcagtgcctactccaatgttgaaaacagggcaaagtgctgtaggacttaaaggttgcttgtgacaggtccagccaagaagacagtgaaactaactcacgcatcattcattccaaggacgcagcgttagttcactaggaggggtggggccacactcttctctgtgtgtgtgtgaagttaagtaatgttcacaatatttacaataagaaaaagaccttccactgcgcatgatgtaacttacagc

SEQ ID NO: 152654 - DNA, 342 bp, Homo Sapiens
ctggagtaccagaagccggtgagcgcggcgttctccagcaggacgatgcagtggtagagggtcatgcggcggcggctgcggccctccttgacgttgaaccagcagaagatgtagatgatgcccacgaccatgttgtagatgatctcctcccacttggacatgcagaagtccgtctccccttggatgacccagaaggtcatgacgcaccagtgggccacgatgaagatgccaaaatagagcttgtagacgctggcgaagagcgcgaaggccaggccgcgggcggcaatgctgaacaggtgccacagcacctgtgccacggcgcccttgtaggacagcggccgc

SEQ ID NO: 152655 - DNA, 954 bp, Homo Sapiens
  misc_feature (53)..(84): n is a, c, g, or t
gaactacttgcaatggtaaggattggagtgtgcttttagctggagtagctgcnnnnnnnnnnnnnnnnnnnnnnnnnnnnnnnnatgagagacgtgcacctatgttagcctgaggagtgtatgtctgtcaggacagcaggggcctcaagactcaggacttttattaggcctccagttatggccttccaggaagcccggcgcggagaagcagcagaatcatagagattaatagagaatgacgtttggaaatggagtgatccaaaagtgatcgccaccattcctcccgcaatgacccaccgccctgaccagaggagatcagcccttaaaagttaacttctacagccaaaccctcttagtaaagggcaacaaagaccacatcctgacacctccaaggggcacacggtttttacagcgcgttttattattcataaaaaaataaatttatttacatatgttatttcctgtggtagtgcagcctcggggcaagggcgcgttccctatcgcaggatcacttgctatggtaagccgcccaccctgcgcgctcctccgcgcggggaagaacctgcgcggcaggacgtggtgttggagttggggcgcccggagcgtggagtggggagacctgatgcagagagtctggagtcggagctgggggtgctgcaggtaggagcaggagcggggcggagagggaggcccgaagaagaccccacacaggttggcgcagcggggcttggggaggcttcagcccagaagtggagagggttgacagacgcctgcctgattagaaaaagccgggagcttgggaaggagacgggattgaagaagccacccggcagggaggccgaacggcccagagctctccgggtaaaacccgcctgcggtgatctgggaagtgtgtctccacctagccctgcgagcagcggccttcctcccgcccgttagaagggcgctgtgctg

SEQ ID NO: 152656 - DNA, 566 bp, Homo Sapiens
ggttcttacattagagttcatattttctgggatttaaggatacaggtgtattttcctattctcttgagaagtagactaaacaatatttgcagtgatgacagacgcacacagaagaaaacattagaagagatgcctttctatcctctcatgtggttgagcattcttacagccaaatgactaaattggctgtaaattggtttctaggaggagcagctgtcactacgtgtgatgtataatatttagccagggccaactcaggggctgtgtcatttgtcctatctttaaattgaggtcagagtgtcacacacaacccctcccctggggcagggtggactggactaggttgcatacgctggctgtcagctcagcaaaaatgccacatggggcttgtcactccgccagacactcactgactcacgggctggcaggtcacgctcggttagcgctccagggcctgactctggattgagctaaactggcagaatccactcaggccaacccttggtctactgctgtgtacagacagcccagtcctgtgttgagtctctcttctcctggatgaccct

SEQ ID NO: 152657 - DNA, 550 bp, Homo Sapiens
ttccaccagatgtggccactctgcactgttgccgcgccgggtgggtgatctcgggacctgatattcttccgccgtcgaccagggtttgaagatgcccactggataggaattcaccaattctcctctgagttcattttcacacgctgtgatccctcaaatgtcaacgtggattggacaaacgtccaggcaacagccgcacacacctcgtccttggctacagcctcctcatgacccgccctcacaatgaccacaaccgctcacaagcgaaagacaagttcaattttggtaactgtgctggctcaaaatacacagacagggaagaaaaccctgttccaccacaagtttgaaaggatgatgagacacatgcatgccaccgagacgcagaaaaggtggctttttgtcttcagtgagtatggatatcataacccatagtccagggaatgaaaaaattaaaatgcacccaccaacaatgagcaaaaaacccggggtgcttcaacaagactgcagggaaaagctctctcactgtttagtgtgcagtagcttagggaaa

SEQ ID NO: 152658 - DNA, 442 bp, Homo Sapiens
aataacgaaacgggccccaagaagtttatttaatgcccagggcccccaagtggtcactgccaggctctagcatcctgtccagcaggcctttctcctcctttcaagtcttgctggacgactcctgaaaagcaaaagtgggaaaaaactgggggctgagagtggaaggctggacagagggtatgtctcctgctctggcacccggaagcctgcgagggcttcggaagcgcagcgtctcacggtcgcgcatcccggccctggacgcatccagcggcagcggtaatcctggtcctcctgggcttccgtaggtcggaataaacttgggaactcttccaccgggaaagctcagtgttttaaaattcaaatcacacttgccgacatgagagcggaacctttgaggccgactccaccctagctgctcgctaactaaacagcgaagagaaca

SEQ ID NO: 152659 - DNA, 505 bp, Homo Sapiens
tctgttttattagcatcaatatatacaaagtggaaaatgacttaatttcattattctagcttagaaagtttgttttgctttttattttgtttggcgataaaatggaaatgaaaatttcccaggagaatgcctacctttgggggtgctgaacaactcaaataatatctgacctcaaatgactcgtcatgcctagtcaaggacataggaagatcatgcccttcggattcactcgaagggcatttttgcctgaggcccgtgcctcagcctaaagctacccacatatttgccaaatcactacttgttatacaaccctcctgattatgcagatgctttgcttccttctgggctgtttggcagtcttcaaagctatcagcctgaggttctgtaggctctccaaggggtgagcttcaaaggatcatagttaaagcacatctatgaaactaagtaagaatggccatcaggtagcaatcagaatacttatgttagctaaataattctacaaaaa

SEQ ID NO: 152660 - DNA, 223 bp, Homo Sapiens
tctttattgcaatgctcagaatacaggtggctcaggagttagcttcttaaataagtttacacatgaggattatcaggttaacagatgggggatttgaggattaggcttgctactgagtctttaatatgatttctgttacaaagcctggaagttggaagttctacctatattcatttaaaagacttcatgttctgaatgtgaagcatgttcaatgtactcgttg

SEQ ID NO: 152661 - DNA, 511 bp, Homo Sapiens
agataaagtttattttcttcaaatagtatcagaaatattttgaaatgaccctcaattccacattggggtcaattatgggggagggaaagggggaaagtggacaggaagataaggtggaagaagagggagagaaagaggcagtgctggcccacggggatggcagctgggggtgaatccgggcgaccctccctccatccaaccgtcggcgctcgcagggcgttgagagtgcggaatgtgcacgcgcagcgaacgcctcttctggctggcatttttcttgccgccgctcccgccggggctggaaacatcttttttcttcttggtgtccataaccgcgcttcccataactctaaccagaagttgattctgcgaaactcctcgggggttcggtcccctccttccctcccccggccgctgccttcggactggagccgcgcgctctgttacaccctgaagccacctcgtggggacttccgcggagagggagggtgagcagggaactcgcgcggccgca

SEQ ID NO: 152662 - DNA, 526 bp, Homo Sapiens
tactcgcagttatggtttattacagtgaaaagtaagaaatgaaaatcagcaaagggaagaggcatgatggggcagggtccaggagagttgcaagtgcaagcttctagttgtcctatcacagtggaactctagacagtgctaattcctcccagcaatgatgtttgggcaatacgcacagagtattgccagccagggaaactcacttgggccttggtgtccagagtttttaactggggcttggttacatagatatggttgactaccagtagatatggttgaccacccattgaccaccttagcttccagccttccagaggttgggttgatattgcaaggcctaaagccccaccataatcacattgttagcatagactatctggcatggtcttaggctgccaggtaaccccatcttatcaggcaggacattacaaaggcttaaaatactctcagaagcaaaggcctaacttctctttgtgcaaagttcattcttttccacacagggtagattagctatctttccaatatc

SEQ ID NO: 152663 - DNA, 517 bp, Homo Sapiens
gatgtcccttttcataagagttcatttgccctgactcaaaagttcccacccagaatagaaaatataagtgctatagtatggaaaggtaataattgtaagaaagcaaacatgtgtgtacttgaaatcagtggaatgataatgaacagagtgagtttttaaattttattcttgtagttcaagggtaagacttagtaattatatataagataattactggaatattatattagtaaccttctgacctcatttcttcaccgtgaaaaaaaagttacatgtgtgtatttgtttctgtctgtaatttaaacagtgatttgtcaccaaaccactttcatcttctagtgttttcacttatctgaccaagaatagatgagccggtcaataatttttactcttaaatctttttactttacttttaaaatacagaagcttgttagataaaaacaggtgttaataaagacttttactttgcactaaaaattgatgttacaagaactttacaaataaaaaaataattaaa

SEQ ID NO: 152664 - DNA, 480 bp, Homo Sapiens
ttttttttgccttaaaagggtcaataatttatttataacacctatttgacaatagttattttctcaaccaacaaataccaacctatcccatgagtcttcaagatgtgttgacattacaaaggaccctcattccaaaacactgggaacccctgatccaagcagtctgtgtcctgggaggtgaagatatgggggtcacctcagcagggcctggggaaaggctctttgaggggaggggcttctcacctgcttttgtacaggcagtggggtggcagtgggacttaggtaagtgggcagtgagtgggcagggcccacattccccaaagggaagagactgcggaggtgtgggggaagaaacagtctgccctcagcttttgttgtgtcctccctgcactttcttactagcagctggaggtcagaaaagggtgtttgttcagggctgcttgagtgggtaacgagctgaacctctctgaacatggcttc

SEQ ID NO: 152665 - DNA, 462 bp, Homo Sapiens
tttgaccaaccatcctggtttaccaggtctgagtagtttattgaaatacagagttttcagtgctaaaaccaaaacagtcccagggaaattcccaattgtggtcaccctacagaacaaccgtaacaacaggattacctctcacacaccctcctggacatgtgcatgttacacaatttgtccactttctgttgctgtcatagaacccatgggactgggtaattgacaaagaaaaggggtttgttttttacagttctggaggctgggaagtccaagacagggtggctggatctggtcagcttctggtgagggcctcgtgctgtgttgtaacacagcagaatgcatcgtagggtgagaggaagcaagagaaagccgaggaagcaagagaaagccgaggaagccaaactcacttttgtaatgaactgctctcaataactcacccacttctgtgagaattaacccact

SEQ ID NO: 152666 - DNA, 414 bp, Homo Sapiens
aatcaaaacgatgcctcagtctaggaagaggtgcttcctctctggaagcagctgaacacctgagctgctgtccacaggcggacggactctccaggagcccccagtgggcctcggctcctccacgtcagctcctctcttgtccctctgctggtccacgggggccgctgcagctggccaggtctcctgggagtcggagggggccatgggttccaccccagggcccacctcatcagcacagtgctctcaccatctgagcaccagcccagaggaaaaggagaaagaatgggtgatgctgatcccccaagcagaatggtaacccctccacctcccaccctcagtgcccagggcccgttgttgggtgcttttgagggtgggaggtggaggggtttccattttgatgttggagcggccgca

SEQ ID NO: 152667 - DNA, 508 bp, Homo Sapiens
tggatgcttctatgtcttcatatgtttctccttcactgtcttgttcctcatctagatttccagcaccatcagagtgcgtgacaccatcttgattgtcttcattgacagggctttttaggtcaaacggaggtttaatgtttctgggaggtaggcttgggactggtggttgtgatgggtgagatgctggcaatggtggttggctggccggatgggatggtggcggtggtggcagggaagttgttgagtaagacgtctggcctttgctagtactgtttccagaagaggttttgtggaatttcgtcaggtcaacatttggtggtctgttgggttttggtggaggtggacccaaggtaaacaagggaggcaatggcttctggtccggagcggctgaatcctggtcatcccctgactcatccggactttggcccaatgactcccccattgcgtgctagaatgggcatatcggaactgccaggaatagtcctgatgccaactcttgctgtataat

SEQ ID NO: 152668 - DNA, 576 bp, Homo Sapiens
tttaaccaaaaggctggaaggacatgtcataaacacctagaaagattctgcagtgagactgctttgcaagtgactttaagtattcattccatgttaaaaataccatagataatgtaagccaggggctagcaagctctttctgttaaacatttagatgtttcagtgctgcaatcacagtgaccggtgttggggagagggattagaaagtgccatggtacttaatccagttactcccccaacacctccaagaggtagccaagttcacacactaaacagagctactgcaacagttctagtgctagtccttagattctagttccagttccggttctagtgcttagattccagttgcatcattccaactgtgagccttcgctgctttaacatctttgccaggaggtgcaaagttctctgggagggagctaccaatcatttcatttcaatttcatactgacagattgaaacattcacgtaagggacacctgtagtaccaacctgactgtgaggggaagcccaagaactccagtgagtctgtggacgctacgctgggacactatctccttagccacaccttgt

SEQ ID NO: 152669 - DNA, 330 bp, Homo Sapiens
ggtgtggacgggagcacaggtgaggcaaggcaggcctcgcagctgaaactttatatccagagcagccagggccactgctggctgcggagtgaggacgcatatccccactgtccttagatgggtggcccctggaacctgggagaatgagggggcatgctgacagtctcattgtggctggaccacctgtacatacacccacaagaccctcacccctaaatcctccccctacacatatgcacacttaagttaccgtatgggtgttgtcgagcattttccctggggtctgtggctccctggaccgacatgccccaaagctgaactcagcctttt

SEQ ID NO: 152670 - DNA, 508 bp, Homo Sapiens
gctgtttcatttatttatttatgaaacatacaggctagaaaaaattggcagtgaaacctgtagtctgattttacagagatgggtttcagagacaaggctgagtcgaaaactttacatttttgtcatctcctcacattttgcagttgtctgcttgcagtattttaacccttcatcactttgtccctgtgcttgccttactgtaattcagacacctctggaaactgctcagggtgctgctttaacctagcaccatcttttgatagtttcctgcaattttcttttctaagtcaggcattggtttaaaggctctgcctgtctgtaaaatgttcccataactgagtcatctccaagaatcagctcaagctccgagcacctggaatcattcacctctttccttgatttgccagtgaggtgcaaaccttctataactgtagatttggtcccaccaggaggctaacagcgaatgtgggggattacttatgaaagaagttttatcttaaaacaaatg

SEQ ID NO: 152671 - DNA, 518 bp, Homo Sapiens
  misc_feature (73)..(73): n is a, c, g, or t
ctccatttttgtaacaacagtgacaacaaaaagatgagttacagtccacacgtgtgatggggagagactgagnaagcaagagttggaaggaaatcttcctggtttgtatggatacccccttttccatcatcagagataaactatcttcatgccatatgacttctaccatgtaatcagtatttggaagtacctacctctgtgaaaagacattttcaaagatgaaacacgtaaaatctcacaaaagaatgtcatggttaaaccaagtgtgggttttagagcccaacagctgacttctagttctaaggctgaaggctaggtttatcaccatggaaatagatttttcagtggaaagtccagtggaagcaaggtgggtcctcactttctgagcacacacaggaacccagttctctagagcatctgaaatggccatgtctgccctcacaggtgtgaaatcctacccaatagaggatcctctgacttgtgaaggttacagattaatgccttgaaatattagtttt

SEQ ID NO: 152672 - DNA, 725 bp, Homo Sapiens
acacgtatttgaattagcttttttattgtcttcaaatgcagtatcttaattatacagtaacaggtgctgaatttatagtacaactatagtagattttgcattcttacattacatagctgtgatacataccttgttatagcagtcagagccagccatctaaacttaaaaaaaggtggacacaaaagaatcctaacaaattatatacaactcacaagtaggggatagcacaccccagctctttatcctgacctactactaccaagtcagaaaagctcttatttgaatgtatatgaagaacaacaaaacaaagcagaacaatatacaccaacaacacaagaacatatgcacgcgagtacacacaagtgcccagcaaattttacatcattctttaaaaattagagtttctagttgagtgaaccactggataatttgaatctgctaacttctttacactgggcatctgtattatgctgtcttcttgccccaatgaactaacacataaaagaatcatcttaactgtcatgattgttaatgctttattacacaaatctaatataatcaactcatgatttagactcaatgaatttaaaatgtttgatatgaccaagaattaaactaaagcttagctttgtaacaaaaatgaagtatttgtaatcaaaactgcagaaaacaaacttaacctactgaaagactttgaaagagtcaattgcgtgcaaataggagtt

SEQ ID NO: 152673 - DNA, 524 bp, Homo Sapiens
tttctttagaaagatctcatctaaatagtaagttaaggttgcgtctatgaaaccggtgcaccttgtcttgtttctacgagctttaaaaagtccaaatactgatgaggctgtggatcagaaggaaccaacagtgactgtgtttgctgtcaggttgccctcctttgcctcagagaacggtcatgggtcgttgggtgacgcgtggtgtgtacgggtcatgttcctgcagaatcctagtcagtctaggagtagttggatgtgcttatgaaatatgtcagatacagaaataaaggcatgaggatgattcttagtttctgaaattgaacagtagaagtgttttagcttcaatcttaatttctagataacagaaagtagttacatcacataaaggaaaatatgacatcgcatgctgccatgatagcaagcgtaagaaacaaaatcttggtaaatatacatatatatgcatattatgcaaatatattttctattaacatacaatgttataagaatgataacataactgcaag

SEQ ID NO: 152674 - DNA, 588 bp, Homo Sapiens
  misc_feature (448)..(457): n is a, c, g, or t
aacttttggtccagaggagggaggaggaagggaagaccccagtggtgggaccctggaccaggccatggatgaaggacaaagaccagggcaggtcacgggtttcccaattccccagcaattaagatttcgagcagaatttatctaaatgtgtttcaaggaaacacaatcgctgaaccaaaacgtactgcagccgagccccctccgtccatcctctgcccctccccctggcttctttctcttgggaaaacgggcaaaataattgtgctggattctcacacacacagaaatatcgaccatcaccctcccccgcgtgaactgggatgcaagttgctaaccgatgtgaacgcaaaatgccttgttcattattcctgacgagatcttgaggttgtttgatgctttaaattttttaattatattattttctaggtgtttattggtacattgcagnnnnnnnnnngaaatttaaaaatttctgtaaaactttgtcttcaagtaatctgacagcattaaatattgcatttaaaaattatactgtagcaaatacatttaaaaattaatcacaacgttaagatgaaattatatttttgg

SEQ ID NO: 152675 - DNA, 408 bp, Homo Sapiens
gtttacactcatgatctgatttcttcctcataagaattccataagaaccccttgcattgtgtggacggttaactctgaagatcagagaactcacgcaactttcctgagacagcacagcggctgagaagcagtcactgccaaccagcgttccataagcccctaacaggtcccgggcactggtcggaacacaaagaggtgtagaatctgggttggtccttcaaggcagctcattgcagctactggcctccagtgaaacaggtctctttgagctatttgttctggaattttattctctgctgtgaatgttgatagacagggaacaaatatcccctggttggactctctgagcacggggcactggaaaaagatgtcaagccctgagaccattgttcacgatgagcggccgca

SEQ ID NO: 152676 - DNA, 506 bp, Homo Sapiens
  misc_feature (413)..(413): n is a, c, g, or t
  misc_feature (480)..(480): n is a, c, g, or t
cttttttaagctttgattatctttaatcatcatcataacagctagcactgagtgtttactcagtgccggacatctctctaagtcctttgtatgaattaattcatttaattctccaaggagccctcaaaggtaagtgctaggttcacctgcatttcacagatgcagacgcaagacacagaacaggtgtgtgatttgcacaaagtcacacagctatagctttcccatgcaggagtcaggatcctgatttcagtttcttccattgtttctgaagctttgtgctgcaccttcacgtctgagtggcagttgtaatatgaaggggaagaggtgaataattcagagcctgtctaggaaggctgtttcctgggcaaagaccaggagacttcccagattttgctgtggcttggactgtgcanaggggccctgacccctcccccatcacaatggcaatggcgagggtcaggggcaggggtgctgtgccanttcactgcctgcgggacactgcccct

SEQ ID NO: 152677 - DNA, 407 bp, Homo Sapiens
ttgcattttttaagctttataaagtttatgtagttaataacgatgtcatcatgttagtcatgaagttacatctcagttcataaactgcaagacatctttgagtagagatccatctcattttccgtaactacacagtgatctactaaactgattttctgtaacttaagtaacccataactttaatagcactaaacattttttccaaatttttcacaattctgcaacacatttgcttatgcatctatatttctgcacttgtgctttttgagaacataactgactaggtgtagaattgtggcaaagggtaattatattcaaaatgctgacaggtaacaccacattgccctctaaaatggctttcctctaatttaccctctcaatatttgaaaatacggtttccctcgtgc

SEQ ID NO: 152678 - DNA, 917 bp, Homo Sapiens
  misc_feature (448)..(448): n is a, c, g, or t
ttggtggtggataaataatactaaaaggactctagtggaaaggggggatatcgaagagcagggggttgtgaatttccaggtacttggactttttgtagaaggagagagaagaagatgaagtttgccaggagggcccatattttttcagctgaagggtaaaatctttctttgcagagacagtattttgctgaatactttttataatgtgatgattattaaaaaagcaaaaattttggtcacttccaagctagaaggaggaatcaaataccctataatattttttgctcgctccttctggtatatgcatgtcactgcatgataattgagttttcctttgttttaataaaactgttctcagacattaagctaaactaagagaaaaataactttgttgccaaaaggttgtgctatccagattttttatatgtctgcatgtttaaaagaaaanagcaacaaaagaaaatgcactctaacttatgtgaactgagagaaaaaaatcaggttttaaacaggaaaacctatggggaatgatattttttgaaagacttttgtataaagttgagtacttagaaaaaagacaaaccagatgtaatatattttgtggatgtttttatttcttggatttatagtaccttatactaaggttaaaaaaatatgcttgatattgtgaaaaggtgaaattcttcaccaacatttcatttgctcctttgtcatattgtaatgccaatataatatagttaatgaaaacagcatttttaaaaaccgaaatattgaaatggtgtaatgttgtaccatttgcactgtgagcaaatgctaatacagtaaatatattgtgtttgctgacaatcagccggcctataaatctccttattttatttcttgtttttatagcataaagctttagtttagcctgttaa

SEQ ID NO: 152679 - DNA, 585 bp, Homo Sapiens
aattagagttcttttatttccaggctgtgggatcttaaggcaagatttacatagcagtgaatagaacatgactttttaatttttgtcccctcatccttcttagctataaagtgagagattgatgcctgccttgatgcctgtgggggataacaaggtatctgttgcctggttggtacatattaggcattgacattagcagaagtctagatgagagacagtgaagtcagccaccatctcaacttggctctcatcaatcctgctcttcccatagtgtgggacaaactccccgcatgccttacttcctgctgtactaatgagtaactcttccctccatatatatccagttacatattagtattgcattataagccagctatttggcagtgatgaatattagaaggaagagctattggcagaatctctgggagcaatctgacatttatatttttgatcaagtagctattgaatgatagcagaacaaggcttttccccaaaaatgttacacatcacaaggcttttgttctaatggtaacatgacctctagtagtaagcagatatgtatccagccttgaaatctgggaacat

SEQ ID NO: 152680 - DNA, 565 bp, Homo Sapiens
tttacatctaaatagctatatgtggataatggacatcatattagttaacacagttctagatgattctgtgcagaggctggttggttgccaaatatattattctgaccctgacaagggaaccccatccaagtagagtgattcacctttttaatctcaggtctattatattagttatcaagaccaaggctattgctattaacaaatgagaaaatctatagaattgccatggaaaccctattggagaaacacaggtttccatgtcaacccctgtccaggataccgctacaaaatgccctataagcaaaaacttctgaaaccacaatgttttctgactaatggaattaggagactgcgacttttgtccattgttcttaggcaaggcatttggggcccttccaagaagtagtctgaatatctgttataaggaaagaaaatgatacagtgtctaaaggcccttgactgaaaaatttgttttttgataaatatgtttttatctaaaggctctttgtcagaaatccttccttgggattatgcttgctgacttttttgatatgtttcaattaag

SEQ ID NO: 152681 - DNA, 575 bp, Homo Sapiens
tgcggccgccaggctggggagagccacggcgcggcccctcccccacctcatcatgcaagaggttcccagagctggggcgactcggtcggggctggccggcgtggtccgtgagactcggaagggatcgcccgggtccagtcccggctcctcttctacagaaagggagagaggttctgagaggggaagttggctaaagctaccgcatggacgcttaaacgcgaaggaacctctgggatgaatctaacccaggcccctcattctgttttgtgaaaagaactggagctccgttccgtgttggtccattcatccatccactcagtcggtagtaattatagagcacctactgtgtgccgggccccgggagaggttccgcgagtcgcctgcggccacacagcttaaagctggaaggagctttttttccgagcgctcccctcatgcttgctggggggaaggatttggttaaggatttagttcgtcgggcagttggagccgtaaacccctaccctcaagcgccagtagattcaaggggcactcctgagctccacagcacacaccgatgtgcctgcttcacagag

SEQ ID NO: 152682 - DNA, 364 bp, Homo Sapiens
cctgtggagcacataccactctcccatcccccaacgcataccttctaggaccacatcgcccttttgtaggacttctctagtgtgtagaatctagaaaggatgggtgttccctgacttcagacttccacttctggtctttagtctgcagggctgaatccttagttcagccaggagtcagaagtgcttttttctgggacttttatgtgagtgattcagatggaaagaatgtttggcgtcagatcggtcacagaagaaactcgaggaccagaccttccctgtggtgggacacgaatcctgcctatgctgtgcagcctactgacccgtttgagtttctgtctgctctccaagcctggtcctgggagtc

SEQ ID NO: 152683 - DNA, 683 bp, Homo Sapiens
catccatatccgagatttatttctttcatcagtgttttacagtttttagcctaagataatggggtagattttctatcacttgaaataaagactatcaattaatatagcatacttgaatgattttaaacagatgtccagcaaatcaggtgtgagaagggttcaggaatatgttaggattaattcttaagtatggttttgtgtgacaagtgtccagaaaggcaagagtgacagaagatcaagaatacttgtataaggttaatttaagagatcacttacggagttcagtttgaacaggaaagataatgagaaagacaaaagctgatatttgaaaaagttaacagttcaaatgtctcattgtggttaaaggatatgtgcaaagagaggaatggtttgataactgggataggtcattgtatgatcagagagtggaatattattcataagaagagaagatagatgtgtaaaaggagctaataagaaccaaagatctgcagcaatgaagggagcaggcatcatgagtcaccatcatcttagagtccagttgtatttctttttgccatcatacggaataagaaccaaagtagagaagatagatgtgtaaaaggaactcagtgaggcctcggaagcatgtgactgaagtggaatgggtgtgaatgtccatgagttctaattatgcctagttt

SEQ ID NO: 152684 - DNA, 715 bp, Homo Sapiens
aatatttctctactctcctttacatttttatctcctgattataacaaagaaaaaaagaaagaaatatctgaaagtgcatgagacttggaagacttggagttgaagttctagctgtttccctgtctagctttgatagtggaaaggtaatttcatttttctgacccgcagggacatccactgtaccaagttcatatagttactgtgagcatcaagtaagaaaatatttgttaaggtgctctgttgcaatataaagtcctgaatcctttttaagttccatttctataaagaggcccctcgtttataatggataagagggaaagcacctgatttctataatcactacccctcctctaaaatccttatttattttcaaagagtcactcatctaattctcttccaaaagagtatctcaaattccagcttgggggtatctttggcctttacatagagtgggctgttcaggatccagtaaatgccatcccagacacagacaagttgtttcctttcatctaactgcaatgaaagctcattgcttcaacttaccccttgtgcaccaaattggtgttccccagttcccagcaaagattccagcgggttcctgtctgctacagaggggtagggagtttaaagtctaatattatatctcacttgtggctataaaaaaaagatcttcattaaagtttttggtccaagctacctcattaggaaatgcaaa

SEQ ID NO: 152685 - DNA, 594 bp, Homo Sapiens
  misc_feature (375)..(447): n is a, c, g, or t
  misc_feature (452)..(453): n is a, c, g, or t
  misc_feature (495)..(495): n is a, c, g, or t
cagccctgtcaataggatgttccgggtatcacctggtttgagtatttggttttagacgggcgcccagcttcttactgttatatttccattctttttggcctaagttttccatgagtagcaagctttgaagaaaaacacatggtaagcctgcctaggaagcttcaataataatgcctgcaagatacctttcttagcttttcctaaatggcaagccactgtgtacacacacttttctaggaagggctccccagactgtcattcttcctgggactgatggaagatattgatgatgatgatgatagtaataataatagcatttagcatttttaagatcatcttttataatgcttagagttgcccaaatagtagatgccnnnnnnnnnnnnnnnnnnnnnnnnnnnnnnnnnnnnnnnnnnnnnnnnnnnnnnnnnnnnnnnnnnnnnnnnngatannttttgacagatttcacagtaataaataactttatattacagntatattggttataatatgctcgtatttcgttattatctgttcatactcttacgtatgcgaaaagttttatatatttaaaacttgattcaattgaatatg

SEQ ID NO: 152686 - DNA, 476 bp, Homo Sapiens
agcaaataatgtttatttttatattgatgatacacttaatatatatgtggattcaaggtacaaaattcatgtacaagagttcacacctgatgaatgtagacacattcctagagaacatttatcaatgtgaaaatttctttaatacactgacaacaaaaatcaaatattctctaatctcgttattcaataaacatcaaaacaacgtttcagttttcatcctctagtactgaagtgccctcaaggtggtaggcactgtatagcaggagaaaacattggaaagcctactgaatccgctctgcagaatcacagtgtttactctgaaattcatttagtgaagtagtggaaggctatcttttatgacaaatcacatctcatacaagagtcaaaagtgatgaactcaagaaaataaaatgtttcaagaacttctcaatttctaaaatcttatgagtattaaccataacagacaaagaagaaaa

SEQ ID NO: 152687 - DNA, 430 bp, Homo Sapiens
tgcggccgcagcctggagcccgcagcccggagcccgcagcctggggcccgcagcccgtagcccgcagcccgcagagccgcgctgtccggggcatcccagtgcacggcgtccgtggacctgggacctcgaacctgggacgggcggaaaatccactgggaacacttgcatttctgtaggtgcttatttcacattcttgtcttttcttgcttgctcgagctgttcgtgggttactttctgccttagttaaaccaaaagggaaaggcggaagaggggaagccctgaagaatgatttagtggttgcccagcctcctttccaaggagaggtgttcgctgagcggctctccccgtccccgacactggcccctttaagaagccaagtcagtcctgatgctgctgtttgtattgctaatccccaggagccccgtttaaa

SEQ ID NO: 152688 - DNA, 674 bp, Homo Sapiens
  misc_feature (547)..(610): n is a, c, g, or t
ttttttaacagcgaaagagagacttttaatgacagtcttgcaagatcaggtgtctggagtgcaggtacacctgggacagtttcaacaaactatttcttccctagtgtgcaagtcccttccccaattcctcattagctgagtactacggggttatagtcttcctgggcatcgcctattggtagttgtattaagacttcaagtatgttctttagggtctttttgctgcattttttgctgcattttgttgcagccacccataatacatggcgactgtctcaagactctgagcatttgacttatggccctagtgactgcacttaggtgatggcaagctagcccaaactaaattctttgatgaggtggggaggggggtcattgagggggccctgaccagtaggctcctggacactgggtcaaagggaaagcaggaaggaggggattgtggcttagtatattttgcttctttatctctttgtttccatgtggcctgcttaaacatattctaaggcacttatgaaaatgaaccttcttcacatgtaggttattnnnnnnnnnnnnnnnnnnnnnnnnnnnnnnnnnnnnnnnnnnnnnnnnnnnnnnnnnnnnnnnngtttattaactgttctggaagttttttactttcttcattataggaggagaagttggcggccgca

SEQ ID NO: 152689 - DNA, 472 bp, Homo Sapiens
ttttcagttctattggaagaaaaagaatgcaagtctgtgaagtgcaatgaaatccttatgtttagaaaaggaatttagccttgtgaattttgttcctaaatctgaatcagaatggtttgatgcaatataattagcttaaatcttaaatatatattacatatgtacacagcacccacaatccttggtttatgccttgtcaatactctctcatcatgcacttgaacacactccatgctggaggtgagtgcattggggtcagtgcccattctgaggactgggtggaggtgactactgttcagctactccagttgggaatgagtagttttaaactgttttaaggcactgttttaaaggcacatttgatgagctgtctgcaggatgggaaaaaaataagggaataggaagcagaaggaagccaaaattaaagataagaagttagattggggatggggatggtcagtggcagtggctc

SEQ ID NO: 152690 - DNA, 532 bp, Homo Sapiens
  misc_feature (96)..(110): n is a, c, g, or t
ctgatgaaattatttttattttattaattgtactggtatttgtgatgtgaaaagtaaaaagaaggatcagatgacatccaaagaaaaatgttaagnnnnnnnnnnnnnnntcagagacagccacgacaaacatgacatagttgtgccctgtgactgatgctggggcacccggataggaaggagggctcctttccagtacatggggtaatgtccagtgaataccttctctcagaggacacgtgcacctctgcccacttgcttccatccctctccacctctgggcacattatctcctgattaagtttattggtaaaagggtctcctgcaactccacctgttacacatcgctgtttctatttttccatattcttttccgggaagaggctatttgcatgaggaaatttgcatatttctctgtggctgttattctcatgtagcgagtttgcatttggcttatttcactcaatattgtatcggaagcattttccatggtgcatatcatcccaaaataattctcaactgtaggggttgg

SEQ ID NO: 152691 - DNA, 439 bp, Homo Sapiens
tctccagacactgacaagtgttctatggaaacaaagtcattccttgttggaaaccacttgtaaacaaaaagtctagtaatggtggaattatacagtgacagaaaagctcaggtttttctgattaggttgaaaaagctgctcagaaattaaatcctactgtgttcataaaaaacaaggaacccagccctgaagcaaagaactcatcagggaagttgttttctctttcaagtctatgatttcaaatgaccttaaagtggtcatctttacagtcagagaagcatatgtgtgttggggaggagaaaaaagaaggaaatgaggcagactttagaattatacctaggaaagaactgtatgtttggttataaactagatccaataaataaataaatggtttccacataactacttggcaaaggtacaataagcctattgtgagaaa

SEQ ID NO: 152692 - DNA, 422 bp, Homo Sapiens
tttttaaagtaaagttaaaacaattccataggccactgaaagtatcatgggccctgagcactgtgactaatgaataagtcagctccagaccagaacctattgattttcaagctactcagcattctagtcataagttagagaaaagaacttctgggactttcttgccagtaataaagatctgcagtaagaaaaccattgttttaccagttagcaaaacactgatgaactctgacacaagcaaagtaatcttgactctactaaaatactgtttgtctttgtaataactttgagtacttcaagaatagttcagtgttttaaatatttatgtctccaataaagcattattattttgtgagttaaaggcaaggctctaacccattgttgcacttaagcttttaattgttttagattattgcttggtt

SEQ ID NO: 152693 - DNA, 562 bp, Homo Sapiens
aagaaaaattattgtctttgaaatcatactatttctgaggttaagtttaaaagctgacctgcttgtgtcatattaggattctttcaatcttaggagagtgagaacaatggaattcttgaacttttcccattctttcttctggctgtgctctcgatgagctctatggacttgaccaagtcacctacccaatttacatctctgttctcattcaccttttgttttatgcatgcttagttttcatattttgacatcgctgtggcatgatcgctttgagcgcaatatttaaaaatcaaaggggccaaggctttcaatcattagacttgttttaaaaggcaaagaaactattgaaaaccagagttgcatttcatgcattttatgcatgcctctaacttacattagaggctaacttatcatgtttatttctggtttatgaaggtagattttgtaagaactattctgttctggtttttactttttattcttactaagagtctgtgagcactactcttgaaatgcttgatctgacccaagttgacatgtgcttattttccttcctgaagca

SEQ ID NO: 152694 - DNA, 740 bp, Homo Sapiens
tttgcaaggaattcaaatgttttgaaaacagcatgccaaacatatcacattggcagacttgttgccagttagcaaccttggttttggtgaattaatttatgtctaaattaacttatatttctacttagtctctgtcaagactaagtaacttttcaaaggaagcataccaatatacttacctccaaacaacaagaatgtgtttcttgaaggaagagatttgacagataaatggaatgctagccaatctaaaattgttttgttatttttgtaacttattgtcagtcttcagctgattaccaatgtggtatcaaaaagcctttcaagacaaatgtttgaaccattagtgtcgaattatatttcagattttttggaatcttcctttaatctcatttatttctggtatacaacacagattcatcaatattgcaatatagaaaatacaagaagaaaaacatgcaaccattttatattaatcacctcattctgatttggaaaactactcaagagtaagctgcatgttgcatgcaggcacaactaaatattctatttacttgtaggttctactgcagtactgcaaactataaacattttcataaaagtcacctaaagtactaagcactgttgtaatttcttttcattattcttcacttccatagaataactatgatataatctgaattggctacgcaatagaaacactagtcagtttctcatcatgctccacaacatcaaaatggtaa

SEQ ID NO: 152695 - DNA, 723 bp, Homo Sapiens
tgacagcagaacctttttttattaagttgacagactatttttcaaaaattgctcagatattgagataagaaaaacacaactgataaatattagaatggctgaaaatctgtatgttttataattttttgttttaaaacactttaaggtgaaatttacataatgtaactaataattttaaagtgaacaattaaatgacaaccacaattagtcatatgttttgcaatcaccacctctatctaaaaattacagaaaatgaagccctgtggaagcaagagccagataaggctttttttcttttgccatgtgcatatgtgactatgtattttataatgaggaggatttttttccaaggctttagggaccaaaaaaaattgtaaacataataacattaaaaacaaccatctatggaacacttcctttagaccagtcacagtgtacaggacattacaggttttatctcattcagcctgtgtggagccttcagctatccgcagtctaaaccgctattactctcaccttctgctaagccacatgtgatagaaattgtgtggcctatcagataactagggtaaagttggaggattggcataacactcctggaggcttttgttaaaagtccaatttgaaaataaatttgtatgacaaaatagaaagcttatcatttaaatcattctaaagtggctaaaacaaacatccaaagaagctattactactgtctggttt

SEQ ID NO: 152696 - DNA, 428 bp, Homo Sapiens
ttgtgagccaccgcacttggcctattttaatattaatcatcttaaaactgctttacattttcatattggcgaacctaaaaaacgtttgccattgcaattcatgaatatctcatgtttgtttgagaagaaaagtcaaaggaacaagacctttaggagttactggccctcctccatactctccataactgttttgttactgcagttgccaacataggatacttttgttcctagaaggctgggctacaccaaagattaaaagcacatttcctacaagtggagtagaagctagttttaatttcgtcttcctttcagtccacttaagataatagttgtggcccctttgggccctcatatctccagccctctaggtaaaacaggagggaagctggactacattgtcaggcacttcaaatgcaccaaagttctga

SEQ ID NO: 152697 - DNA, 505 bp, Homo Sapiens
tgcatgtgtcttctttggattttactgggacaaaagccttcgcggcagaggcttcgtgccagggtgcctgtgatgcacgttggggtgctctgacaccccaacaggagactgcccgcccagggtgacccttgccagcatctctaagcaggacacctggcagtgaatacttccgagaatggaaaagccccctggcactgtgcccacactgatcgataagtatttgcatgccctgtccgtgtccatcgatggtcattttgttttgtttctggcgccccgcaggccccgcagtttattcttagcatcttcagccctgtctccttggtttggagaattaggactgcctggtatttctgtcacgggcgtggattggcatctgtggtgtttcctctggatcaattctgatctaataaattgttactcgctgcccatggaaagggaaagggagttggcctgcgggccttgtggcattatgagataggaaggcgagttcttggaataaaggact

SEQ ID NO: 152698 - DNA, 462 bp, Homo Sapiens
ttttttataaagaaaacagatttattttggcttatgagtccaaaggctgaggagtccaagatcagggagcccatctgatgagggcctcatgctgcttcaactcatggtggaaagcagatggtgaactgaggagggcaaagagaacagaacacaagaagcatcctcacttcataacaacccactcttgtgagaattcaaccattcctgcaagagcgaatccattccagaactaactgagcctcatgagaaagcctttaatccatctcaatgacctaatcacctcttaaaggcaccacctaccaacacaatcaaactggggactcaggcctcagcatgagttttggtgaggacaaaccatatccaaaccatagcaggaagtttaaaaaagcgagtggcggaagcctcagtggaaacgaaaacttctagaccatttaccattaatgcagaggctacattctttca

SEQ ID NO: 152699 - DNA, 741 bp, Homo Sapiens
actcgaggacttaaggcctggaaaaggggtcacggactcatcacaggtgtctgggtcaaagttgtatgattgttggggcagtttgggagactcctgcatttttgaggtggaagaaaaagggttaaaattggggtcatcccacttgtcaatatcaaaggtgtaagtacctttagcaatggggatgtcattgggttcagcaggggatctgggaggtgaggcaggagtgttgtcaagtttctcgggtgtctttttcatctttggcctcctcaggggcattttggcaactggctttttgcctatctttttggtaggaggggggttttcctgctggttgtcccaactactcttgtcctcagaatagtcaaactccagccttacggagagccctttggctggagagtcctcttgccccccgctatccgatggggttacctcccctgcctccggggccgtggtaagaggcagcgttttcctcccgacagggggtgagttctgcactctgccacctccagaagccggggggacaaccccttctgcactctctgagtccagagggcaggcagctttgggccccacagcgggctcaaggggcgtctcctacaataaggctgggctaggaccttccgtcttggcagattccgttttcgtctcagatgctagattctccccactggggacaaggctctcttcatctggctcctgttgcgtctccttcactgggggggtctctgtgggtctctt

SEQ ID NO: 152700 - DNA, 798 bp, Homo Sapiens
tttatctccaaagtttttattcaaaaaagtgaggtagggaaattggtatttcaaaaagattgagagatttcccaggacaaataaggatgggagaaaatagagacaaggagaccatttgggaggctactataatggtccaaccatgatgtaacagcagatgtgtagctgtgagaatagacagaacagggagattcaaaaacaatttccttcctagaaggaaggaccaacagaacttggtgattaacacaaaaagaagaaataagaaccaaaaatgagtctgaagttcgagatatgtttatgaccagagacaaataattttagacctgcaagggtcagactccctcactttaaagatgagaaaactatgtttgcccaaagtctcaggactaattctcaacagagtcagcagcagaatttccaggccagggctatcaggagatgtaccaggcagcgtatgcctaagtgttcattacaaatcatttacagagtgactgtatttctaatgaagagaacaaccagttcagagtgtgtgtactcatataacagagaggtcatgttttataacagtcatttaactacatgaacagctcatgcataaagtcaggtgctcctccctgccatcaatagaaatgtgattagcaacttcttaaggttataccctctccataatggcaacaagcatgacgacttatcccttctctgcctgctttttacacttgctggtcaccttaacatttgtctttctgtgtattgagtgtagctccttctagctggggacttaatttgcctaagttttgg

SEQ ID NO: 152701 - DNA, 533 bp, Homo Sapiens
agtcacttagtgttgtgaaggtgtcaaagaaagtctctatgctgggaagactcaccacatactcatcatcatacccatcctcatctggaactccagtgttagggtcacagtcccggactgtaaacttcatggtgcagctaaaggagcctgcaactggagaagaagggaggcaaacctgcatcagtggggagtgcaagggagacgtttccatcatttcttaggaagtgccatctgtactcagcactgtgttccacattttccagttaaacacacatgccctgttgtctggggtagtggttctcaaaagcagcctacaagcgggtcaggaaggcagtctcacaaagcatgaatgtaaagtctattccacgctgtgggttacagcagtacagaaatgataacatgggcagactgtttctctattggtatgaagaaagcagcagagaggtacttttgggggctttttgccatgcctatcaaaggggcctaaatgttgaaaaataaatattttgagaaccactgctgtaggacctgac

SEQ ID NO: 152702 - DNA, 569 bp, Homo Sapiens
cgtttgattttagcaggtagctaaaggacaatgtattccatcgccgaagggccatggttttgcttgtaataacatataaaccttcgtctgtcagccctgcctaaagtaaactcgggattgtgagcagtgcacgtggttcattactgatggggagcaatagcagttctactccaaatccatggctgcgcaccaggaacgtgtctgggctactgccttcccactccacaggtgttttctactttttactcacagagcagcattcatgttctttctttgattctgagactcagtcaggcagtggagtttctttaacaagatactacttggatattttttaaatacagggaatggttgagtccactgctaccgtgccccttgcagcctctgagagcgagtcacggctttccattttctaatgtgtatgttccgggtctggggaccccagcaggcccgccaggttgcagagtcggaccagtctccggcgtctgaaggggctgcgccgctgtttaccaccccgcgagcagcagaggcggcgcccagccctcctctcgaacaaaggcgcggccgca

SEQ ID NO: 152703 - DNA, 707 bp, Homo Sapiens
ttttcctctggcggcctgggatctgggaaacacacatgcatacagtcggcactctggcccaccttatctcacacctctgcttcttacattccccagtccaatggagttccttcgctctacctcctcctcagcacacactcttttcccataaatgccactgtgcacagtgaacaagagcaaaggttttgacaccagaaaagacctgggttcaaaagctgctagaactatcataaggaccagaaaaggcaacacatacgtgtttagcacagtgcttaccacatagggagcgctccacaaaggcagatgctgctattagccatcacttccctggttccaagttggagacatgttccccctttgaactgggtctttcacctgtgtctctcttatgcaatcatcacttttaaacttaaaatagcgattcttccctgttttatcttctccactggacaatcagcctctaagggcagaatctaggtctaattcatttataaaccctaaaattcacctttcatggcctggcattatacttggcctataatagctagtcacaaaaacatgaaccttcaaaggagtagattatacaccaaccccctgaatacatttccaaagcagggttctcccaacatccacaggaatcaagtatcacatagagagtgatctttgaaagatctctttaaagatcctgttcatttaagcctgttaac

SEQ ID NO: 152704 - DNA, 554 bp, Homo Sapiens
tttcaatttaacatcactttattcttctagtaaataaggttttaatttctgttcaaaggaaaagtcccctaaactcacaaaaatagaaaaattatttcttacaccaggtgtctcaatggatgctcttgaaaacattctcatagtatatacatggctaagtgtcaaataagtgttcctcacaagtttcctaagttcaaaggtggcccatgaggtgggaacattcattagacaggtagaaaggaggccaagcaactactggcagaattcggaaaagggtagagctgtttgaaatccacctgtctaagtgaaaaagttcagaggagcaggagataaggctgggaaaaaatgatggtgggagacaatggaatctggcctttgtcccatacatggtgggacactgtctctaccctccaatgacctcagtctagtctaaatatctccctaccatccatttacaaatatagtattaccaagcacctcttacgtgctgagtaatcacagacaagaaccacacagatgtggccacaacccatatggagcttccatctagccta

SEQ ID NO: 152705 - DNA, 552 bp, Homo Sapiens
caatgaatacaaattataatttgtatatagtgttgtttctatgtgcccccaaactgcgatttacacacattttttcttgtgtaataactaaatggttacaactaggtaggtatacaattggctgtgagtactgatacaaatacacttttataatacatgattttagtaaaattgtcaatcgttatgttatgtttctttgcagcatcactttagagagaataactcacaagccctgaagtcctgcatttggtttggctcattgaaaaactactcagaggaatttgacaacgacattaggtgtctccatcacagctttatggaacagttaatgtgagctcgctttcaagtcagaatctaaaagtccaggtgcatcttaactctgaacctttgaagtttactcatcctcatttaatgtgataatgtaatctatatgttcagaatccatttgaggggcagtacagggaaaatggcatgcagaaggaaagatgaactgctctcaggggtgaaatctatctcacacgtgcatttatcttgggcagacactgttgttta

SEQ ID NO: 152706 - DNA, 562 bp, Homo Sapiens
tctttttgtcctttttcaggtctttggatttagctttagttatgaaaaatccagaataaagctattcaaccgaagtcatcaagcataggtgtcatcctaacacagatgattaaataatatacaagatttcttgaaagttgagtttatcttggatatgcccaaatgaaattaattccaagtgtacaggatgaagatgctgggatacttttgttttccctgcactgtggttttcaatgttacaataaataatgaaaacaatgtacactgtagaagtaccacatacatgttaaacgatgatttaaaatttatttgttgtaacggattacagtatatacgtatgaagcttgtctgtacacacttgtatgtacacagtctagacacctataggtaatgtgtgttgttataaagtcatctatgagaacacatgttaaaatatgtatctaaatttgtatacatccaagcggacagactgtataaaccttaggcacacttatctgccaaggtttatgctacatgaaatgcttgctgctaaaaatggagcagagtggaagacttctatggg

SEQ ID NO: 152707 - DNA, 318 bp, Homo Sapiens; identical to SEQ ID NO: 119786

SEQ ID NO: 152708 - DNA, 112 bp, Homo Sapiens
ttttttcactgaaactggatgtttattttgaccgagatatagtatatcctcaaattgccatagaaagtttacaagaatattagaggtaaattataaatatcagggccttttt

SEQ ID NO: 152709 - DNA, 401 bp, Homo Sapiens
aaggaattaattttgttatttttctcattttggaacactgcacatttgaattcaagcacttatatctggttttcacttgattttagccaaaaggctgagaagtaattatgtctgcttttcaattttagaaacttatgagtcaccaactctgaatactgactttgattttgaaaatatattctataaaaataatcagacttgttttactccatctcatgctccctgtcatacatgtaaattttagattttgttaatataacttttctccttttgtctttacagtaattaattactgcttagtgttctagttcactaatcttctcatcatttcagactaatttaatgtttcacacatatgttgtatattaagtagcctgattatattttcaattgtttacttc

SEQ ID NO: 152710 - DNA, 536 bp, Homo Sapiens
gaaaatttttccagacagatagtgtcacttcatgtatgacaacatttctaacaatattcctcacagaaattataaaggtgagttttatagggttaacactgcaaatattctcttcagttaacccatttatgcctagtgttccattattggaacgctaagcttgtgggagttcttcatatcctgctgtttaaggtcatcgccaaggtctgatttttcacacaaaaaatttgctacctctggcataaaagcaggaatagtatactggcaaagcacagtttagtacaaagcaattccacaagcgatcaaaaggatatgagctcactcatcatctggccagcccctcctgcataagtatttactactgtcaagcttttgataggtatatatcaagcagaaacgtgtggcagttatacaagaacctggaagtagatacatcacactgtggaagaaaagcagtcatgtaagctttaatcacttgcagtgctaccagaagggctggcatcctcaggagcctgactatgctagactagctatct

SEQ ID NO: 152711 - DNA, 758 bp, Homo Sapiens
  misc_feature (60)..(60): n is a, c, g, or t
ggagcagtgccagagtgccgagtgagaagacaaaggaacaggaaccctagttttaggaanaatttcctctggacgctctgattttaagaacaccagttaaatggattttatagtacagaagacatgtttatagtagtgaagaacttcagctataaaaaatagtttaaaatggtttaccagcaacctatccaagacaagtacattcattaaaaaggcaattgagtgtatttggtactaagggtcttttcatatatttgctagttttcttaagtaaagtggagatactgtcagaaaggtgcattttctcattcatccacaccggcccttaaagatggatcctctaaagttctaggtggtttgagagacagggtgaaagaatattttcttgagaggaagggataaaaagcttctaactcatctgaatttttaaaagccactcccatagagttcccatggagttggctgttcctggcagaggcaggtgggtttggcctgctgggcaccatctcaaagggccgtctctacctccagtagcagcgctacatggtgactcaggtgtgcctgccagatgctgatggcttcagctgtaagtgctaccgtgaagttagaggattcaggtgcagatggggtgctggctggagctgggatattagcagcactgtggaaatctgggtagtgccaggaccctcctgtttggtgaccagaatggtaacacctcgtgccgaattcggcacgaggtctgatgttggagcggccgc

SEQ ID NO: 152712 - DNA, 531 bp, Homo Sapiens
ttttggtggacttacaaattttattttatttgcattcacaaagaaatcaagtataacgctgactatgcagagtcactgtttacagccacagtttggagggagggagggagggaggtgtcaaaagtataaaggcagcaggttcagccccttaaaaatgatcaataaccatatacaatcatgagaaatcctggcctaaacatcgcaatgatcaatcccctacatgttagggcattgagtcctctgagtagttcacaaattttagcaattactttatatcttaaacttttaaaagtttcatgcaactgtggattttaatgcagcacagttccttaaaaatgtcaatacttcccttactggaaatagcgcattcctaaaaatacacgcatttttacaaattattacaactagctttccctctacacaatatttaagtaccaggaaataaaacttcttaaaatgcctatttaaggggcaaaatattttgtttttggtttgtgcaacctgctggcttttaaaaaagttcctcgtgcc

SEQ ID NO: 152713 - DNA, 538 bp, Homo Sapiens
agagaactatcatgccatccagtaatcccactactggacatttactcaaaggaaatgaaatcaatataccaaaaagatacctgcactcctgtttatcacagcactactcacaataacaaagatatggaatcaacctaagtgtccattaatggaagatacgataaaggaaatgtggtatatatagattacatggaatactattcagccataaaaaataataaaatcatgtctttcaaagcaacattgatggaactggaggtcatcaagttaagtaaaatgagccagacactgcgggtcagataccacatgttctcactcaatgtggaagctaaatgatgtgtacacatggacatagagaggggaatggtggacagtggggacttggaggtgaggcagtggggagggatggataattggaagttatgtaatgggcacactgtgtgttatttgggtgacggatacactaacagccatgacttgaccattaccctatctatgcatgtcataaaattgcacttgtgccctataaatttataaa

SEQ ID NO: 152714 - DNA, 548 bp, Homo Sapiens
gatgccaggcaccctcaaggcacagaggctggggctcatgttgggggcacttggcctctccaggcctcgaaggcttctcctgggctgacgcgagctggggaacgggagggacggacgtgggagcgagaacgtcacactggaggcagctggtggcacgatgggggacagagtgaaaggtagcaagtcaagagccttcgtgtcaccatggccacacaccccgatggcttccggcttgagggacccctggctgcagcccacagccctgggccttgcactgtgctctacgaaggccctgtccgtgggctctgcccctttgccccgcgaaattccaacaccatggcggcggctgccctggctgcccccagcctgggcttcgatggggtgattggggtgctcgtggctgataccagcctcacggacatgcacgtggtggatgtagagctgagcggaccccggggccccacgggccgaagctttgctgtgcacacccgcagagagaaccctgccgagccaggcgcggtcaccggctccgccaccgtccgaatggt

SEQ ID NO: 152715 - DNA, 533 bp, Homo Sapiens
acatacataagcagtatctcttttttgtagcagagttttattatttcaaccaggttcatgtattttattatgtacctactaggaaggtatttaatacaatttgctaagaagtatggcaagctgggggtgaagaatcaaacaagtctggatttgaatccaaccttcactgtatacatgtggaactttgaacaaattacttaatctgactctcagattgcatttcttgaaaagaaagttattgtgacttttagaaaaactgtattaaagtgcttaataacaatttgcacttaagagatattcaagtaatgatagctattaatttctaagttgtcattattaggattgggggagttcctgactgtaattttcacaatttagaaggggaaataaatttacctaggttattgtgataaacaaatgactatgaaagtacggaggaggtaaagatgaaatctttaaacaagaaataagggaagattttctgtaaatttcacttaggctttgagggatgatttttaaaatttccaaggaaa

SEQ ID NO: 152716 - DNA, 463 bp, Homo Sapiens
tttagctttattcttttattcaaagtttattaaaatacaagaacaaattgtataagcacacatagcactcagcaccaatatgataacactctttctactgataatctcccaaagcagttcattttctgcaactgagaagcacatatgtgtagcatatgcacgcgtgcattctcaccacatttacccaggactcttagcatcatgtcccgcatattctccttgccagggagacaaagatggggagaggcaaactaatgtgactacatccaaccactaactgagtcgatgactctttcgtcagtagttatcatccgcacactggtcaactctgcacatctctgtctccctcttcgggcgcccgattacttgggctagtgagtctggtgacaatgtgatgcaaaactaaacaaaactggccaacattccctacccaatatcatttaattgctttggttataaagta

SEQ ID NO: 152717 - DNA, 633 bp, Homo Sapiens
ttaaaggcacattatcttcaagtctgaggtctggtgaaatcacatgaagtgttctatcagtgcattgctgaatctgatgttggagatgcacaagctggagcccaactgataatccttgaacatgcaccagccacaacgggaccactgccttcagctcctcgggatgtcgtggcctccctggtctctacccgcttcatcaaattgacgtggcggacacctgcatcagatcctcacggagacaaccttacctactctgtgttctacaccaaggaagggattgctagggaacgtgttgagaataccagtcacccaggagagatgcaagtaaccattcaaaacctaatgccagcgaccgtgtacatctttagagttatggctcaaaataagcatggctcaggagagagttcagctccactgcgagtagaaacacaacctgaggttcagctccctggcccagcacctaaccttcgtgcatatgcagcttcgcctacctccatcactgttacgtgggaaacaccagtgtctggcaatggggaaattcagaattataagttgtactacatggaaaaggggactgataaagaacaggatgttgatgtttcaagtcactcttacaccattaatgggttgaaa

SEQ ID NO: 152718 - DNA, 534 bp, Homo Sapiens
gaaatgccattaccatgcttatattctagaacagaagttctctgccatgactgtacatgagaatcactgctctagaatatggcacaatacacattcatgcgcattattccttgtccagcaaatgcaagagtttctctagaggaggggcttatctcaatcctaggctcctgttagaatctcttcaggggttctttcacaaaagtaatacctaaacatccccctccaaatctgattaagttggcctggatggagtctgactgaggaagcctggatgcccattaagttcttccagggaactattgaaaatcttgacacccacgttgcaatccaatatctctggatttgagccccaagctttgtgtaaacaaattacaaccttgtgtgtaatagcaaaaatctggaagccacttagatgttcattgagaggagaatgcataaatacattgtagaatatacctataataaaatatatcctgctcttaaaatgaaacaaattttgccctcatctatcagcatgactgaaacttaaacatg

SEQ ID NO: 152719 - DNA, 469 bp, Homo Sapiens
ttgccagtactcaatgttataatgtttattttagccattcctatagatgtgcctggtatctgattgtggttttaatttgcagttccctaatggctacgatgtttgagagtagatttttatcttagattagtcttgaagcaatgcagaaaaaaacccaaggatggcttgcagagcaggagaaggtggaggctgtggagctggtgtgtggtcctgtgaaatttctggggatagggtccccagcttgtgagagtagagttgacatcagggtttgcagtggcagcagcgagcttttcctctacgaagtggagaagaacagcaggtaggcaccgctgggctttgagtaccctgtgagtcggcttgctgttaggaaggagagcaggaggaaggagattagcattttgcagctctgcattatttttctcttgattgatactcggtgactcagcagattttctggacagggttaaga

SEQ ID NO: 152720 - DNA, 537 bp, Homo Sapiens
aagatatttagaaagtccagcatgtagaagaattgagtatctggtgaagaatttattagatatagcctcataaattccttagatatataacatttccaaattctttgtccttgaaaaaagttgattttgaaaatttgactagtttattgaacatatatcagtttgttaattggattgaatcactattatattccaggtattttactaggacctttaatatacactgtcccatgtaaggtaataagtactgagtttaggtgaaagtatgaaaacaggagagatgttgaggatggaattattgaaaaggaattggccttgaattctaaccaagatagctaagtaaggtcaggctttgatttgtccttgccagcaaaaagacttaggcagtaacagaaaacatgtgaaggaaaataaaaaatacctctgagttaaaaagtgaggtaaacgtttcatgaaatggaaataaaatccagtatgaaacagttagctaggttcttggtccaaaaagttcaccagtgactaggattttagcatact

SEQ ID NO: 152721 - DNA, 556 bp, Homo Sapiens
tggcacctatttctttcttggagtgccaagtttgcaaacctgcagtttttaatttggtagatgacaaatattctgaatcaccaattaaaaacctttttgggagggatggggaaaactacaaacgtttgacaaacacaattctaggatgaacaatgtatacaatgcacttttatgaagtttttaaaaataaaggaaaacaaaaaactttactgagtgttataagtattttcacaataattttgtttgactccatcatgaattttaaaatcaagaaataccaacctactaactaaaatagtgtttttattccatacaagtatgtaaatctgtcaatcttaatttagtcagaatgtttcttaattctaataacaatcatttttacctcttattctattattaagggataaatcaccagaagagaattgtaacatttgtgaaacttgaaaacactaaaactgtttaagtgcttatctccatttcaaatcagtagcctaagtgttctactctaaatcaagtgattctgagagctgatctatgtaacacaccccagctcttg

SEQ ID NO: 152722 - DNA, 220 bp, Homo Sapiens
aaatctttcttggacttcttaaatgtgaataaggtgtcctttatggatgttcctgtagtgctatacttgccttgtaattgttttgttgttcaccatatgccccaaatcaggggtaacttccctctctgcaccagactgtataaatagttcaattcttttgattgtaataaaatagaaaatttcagcaccctaggaaatagagatttctcacagggtttca

SEQ ID NO: 152723 - DNA, 544 bp, Homo Sapiens
tttgatacataagctgatgtctttggtattttacttttgtcagggagaattgaaggcggcatttgactcatctaggggcacagttggttttttgaagttgccgtagtacagtttgattagttataattctacagatgttctgccaaattgtagttttgggctttcttacaatgtaaatccttttattctttaggattttctatagctatagcaatttggtaggagctagcattctgaataaatattttataaaaaatgttagtagcaaaatttgagggagaacattctctttgactgtctatctggcagctttcttgctttggtttttctctgtgccaagacaaccaatcagcatctgctttgcccactcaaccccagttgggcagtagtctaaactgaaatcctggcccgcaggcctccctgtcgcccgcatcctgtcagaactgtgtactgtactcttctcttggttgctgtcgtatctgcatgcttcgtatagaaggacaagtcctttatctaggctgtaggagccagggtgcagattgtg

SEQ ID NO: 152724 - DNA, 522 bp, Homo Sapiens
tggccattaggtccattttattgtcatacaatcgtggtcaccgtgacaaggagggtggcagcgtggccaggcacaggatgcacccaaggagagcagcacagtagcaaaaccagagctgcggaaagtggcgaagcggcggctgcccctaccccccaccttgtccacattcttccacctgctggtgtccacctctgcccacatctcggatcccatcccagcgaaccccaaactcactgtcaacattctcctagcacctatgcattgcccaacaagaagttcaagctaacatcatcccacagagcgaagttctaggtcatgctctaggcttgggacacccgggttctattcgctgggaggctcctagctactttgaatgacttagaagtcactttgatctttcccagccttctgttttctccctctgcctttgatgtggggaaccagtattggagacagcgctgtgcagatgcagctgttactacttgcaattaaatagaagactctcaaagttctcctcgtgcc

SEQ ID NO: 152725 - DNA, 313 bp, Homo Sapiens
tttttattggaaacattttgaatcctttatttatatcatggttccgaaaatagaggccctatacaaataattctggcaacttgtcaacagaaatgaaagcaggagcaaacaaagtatctttctttaatgcataccacatccttccagttttttttaaaaactatgcacatatgcaaatatacatacattttatgcctaactttcaaataaaattatttttaatctaatcccctaaacttaaaaatctctgatttctaagtgagattttcctcacaaatgtattaacttgatcatttaaactcttattaactag

SEQ ID NO: 152726 - DNA, 382 bp, Homo Sapiens
taatgaaaataatatgataaaatgataggcccttcccacttacaaatttaagtgctgaactgtaaataaacattaaatcatgattaagcaggggtttacctgaggaattcaaatatgtgtaataagagcgattcatttcgctaatggattaaaggagagaacccacattaactgaataggtgcagaaaatgcatttgatggtatcccatttccatttgttatcaccgttctggaagactctaaataaattgaaaattacttaatcggtaaaaggcttatgacaaacaatacttaatgccacttaataatacaggagtctctactcccaccttgtattatctgcctcctggtattggagatcctgacacaatgcaatcagcta

SEQ ID NO: 152727 - DNA, 554 bp, Homo Sapiens
gaaaaaaatggtacctatccgtattcagcttggtggcttcacagtccctcccctgaacatccgtatattccttattctctcatttatggtgcagaacactggggtactaacctctaggaaactgttctagctgccagggaaagctaagagccctcctttaacaggaaagcagcagcatgctttttcttctctctgccgtttcagggaagagcaccttaaggccagtgttatttcatgggattctgccctagagctgagaaagtaatggactcatccataatctcttttatagatttgaaagtgtaaacaatacacacttccttttttggaactccaattctaatatgtttctttttcattggaaattgaaaaaccaggctggttttgagattagtactagcagtgagtaaacctcctgtctgtggacttaaatccttttgaggaacatttcgttttagatttttacaagttttctaatctggcacgactttcaaactagcttaatctgttcttacagaaacctgtgtaaggacagactgcccacatacgggctc

SEQ ID NO: 152728 - DNA, 562 bp, Homo Sapiens
tgatttctattttagacccaaggaattaaatggatcaaccggggtgggggggcgttgaattccagtatttcgagttcctgggttttgggaagaggaagaggtagtggaaaaccaggagccaaatgaatatgcttcttataataaaatttgaacagagcagcgggtgggcctagaagcagtgactggggaggttagaattcttgcacgcagagaacccccccaagcccgctcacgcccggcctggctccgaaggtctcagaatccgagcctccaggccagattttccctctagccattcctggccacgcagcgcggagccgcgagcacacagaaaaggatgtcttcatcgccaaccgggatggaacgaacccgcccgctcagggagtactgagaactaaagggtccctccagcgccggccgcagccagcatgccttgactgcctccatcccgcgcggtccccactctccagaagcccccgccctgcccgggtgcgcgcgcgcacgagtcggcgaaccggggagctgtgcgctcggcagcctgcgggcggcggcggcggccgca

SEQ ID NO: 152729 - DNA, 466 bp, Homo Sapiens
tttgttgttgctgccattgttattttacatgcattgaacgaatggccgagatctttggcgtcttacttactgatgggtagaggtaaccttctccattcatggctatatacaaccctgttttcactccctggatggcaacaacacgtagtcccactggtatgaggttgaagagtgctgtgaagataaacattgtctatcatgaatgggcaggaagaagcagggcagagtgtaattttttctttctgatttattttatttaagaaacatcatctttgccaatactttctagaaattccaattaaataacttatattttgctttataagtaagaagtttctgctatgggtaaaatgagtacttcagcttcaacctttaaatgtgagcagtcttgctgacagcattctgaagggctgatgcgacaataaacagaaccaagcctgtaatcgtgcctctagaaacactgtct

SEQ ID NO: 152730 - DNA, 584 bp, Homo Sapiens
tgaggataccctcatggagcgactgaattgtgatcatgagttgttctcaattaaaaataattaaatgtaggagaagtggaatcataactgcctcttctgggcaaatatggagagaaacgccattcattttatggctgctggagaaaatggagttaatgcaacaccctctgatgctgcaagtgacaggtgggaaactggtgcagggaaatatcctgtgccatgtaggctgcaccagcctgggccctactgctctctaagtggccctaccaccattgtccttcatcgcccagagaggctggtctcagttccgcctgcagcaactatgttgatttgcttgtaacatgttttgtccttttggatccattgtagattggccccaaaccagacactgggattgagtcaccaaaaaagtcctttctcttttgattcctgggtgtccagagtctgatggggggacttccttttcgtttcattttcatcattgtatattgcagcttctggtctacataaggattgctgagtttgtttgcactttaataaatagtccattaaaatgctttcagttgttaatttcttggtttctt

SEQ ID NO: 152731 - DNA, 608 bp, Homo Sapiens
  misc_feature (209)..(491): n is a, c, g, or t
tttcctctttaattatggcataatttctcaacataacatgtcaaaacttatacaaccttaaatattaacaaataatacaatgtaagcaatattttaaatacaatatttaatgattagatacattaggtttattatattacttataacattccattatataaaaattcatttgtttatttattcagattaaacaactattaaggctgaannnnnnnnnnnnnnnnnnnnnnnnnnnnnnnnnnnnnnnnnnnnnnnnnnnnnnnnnnnnnnnnnnnnnnnnnnnnnnnnnnnnnnnnnnnnnnnnnnnnnnnnnnnnnnnnnnnnnnnnnnnnnnnnnnnnnnnnnnnnnnnnnnnnnnnnnnnnnnnnnnnnnnnnnnnnnnnnnnnnnnnnnnnnnnnnnnnnnnnnnnnnnnnnnnnnnnnnnnnnnnnnnnnnnnnnnnnnnnnnnnnnnnnnnnnnnnnnnnnnnnnnnnnnnnnnnnnnnnnnnnncaacaagtaaaatgcttcttacatggaagactgtattctaggtactccaggatacacacaaatatgtatactgacctccagtagcttatggtatgcaggagcttccaatgatcattt

SEQ ID NO: 152732 - DNA, 545 bp, Homo Sapiens
  misc_feature (104)..(104): n is a, c, g, or t
gcctactcctctcccttctcaaagaccttacaggcaaggctgaattctaaaatagccttattagttaaaaacaacactggtataactaactcccatttctactntgaaaaaattctttggaataatgcttttttagatcaaataaaaaaatcaagctttttataatgatgataaggaattaattacaatttttaaaattctaatatagtccatacaaggcttatatactttgctctaaacctagctcacctggtctagtagctacaacatttagtagctacagtcagaaaatctaaattctaattgttaaattcatgtcctcaataaaattgttctgaccaaatgagacaatgaataaaaaagactttgcaaagttacaagcatcatacaaatatatacatgaatcattataattttcatggtctcatcctgcccattctattcttaatcccctccacaaagtagaaagtattgattgccaagtcaaagtttaggtgaggaagctatttacaaataagtttccctgcaatcctcgtgccgaattc

SEQ ID NO: 152733 - DNA, 447 bp, Homo Sapiens
tttcaaggggaaatgttctttattctcagaggtaattacattcctaagtcccctgagaatctttttaagaaaagctattagaactgattggttagggggcgagaaaatgattgtcatgatgagcagctgcaaatgaaagttaaaaagccaaccccattcgttaaacgtacgatacttggaaaactcctggaaataaatgagaacaccacagtgtctatgagagaaaaattaaatatcaacaactcccatgttaggatgtccacacgccgcatccctgacagaatccaaaggcagaagcaccagcactcgtgggttgtggctacacccggggcagggccccagctcagatcccacacgggtgcagccagcgccgggccatccactgggcccagccaatctcggaaatgacacctgacttgggactcgctgtgagccggtggcacctgc

SEQ ID NO: 152734 - DNA, 498 bp, Homo Sapiens
ttttttagcagaagcagagtcttttaatagacctccagaggttaatgggcctgacatatctttgacatttattggattttacgagctagtggatctgactcagaaagccgatcagatgttccaaatcgatggcccctttggggtgctgtcttcgcacagagccataatgaggtgaccttggatgcctgagtccggaaagaacagaaagaggatgtcagaatcgtagaaattgctaaactgatcaaggcctacacagtgccttcaggctcgctcctggccccgagatgctttgcccacggattctgtaactgtacgttcctcttgcctcaccgtgcccgaacagttacaatcattagtctcagctcatgaaacaagctggacccaggagctcaggtgacatcgtgacatcatgaggaggctctgtctccccgactcccatctctgggctttgcttctgtagcctcagggaggcttatcccctgtgagggtaaaaatagc

SEQ ID NO: 152735 - DNA, 574 bp, Homo Sapiens
tgcggccgccaacatcagaatgggatggggataggagtgtcttactttttcaagtgtgagaaatggcctcaggctgaagtcatatcttatctcagtcccaaggagggcctgggctcagaatggcgccaccatgccaagctacttcttaagggtacagagagtggaccttgatgctcctcctaagtggtatgtacccatggccaccccagaagtgttcaggggactctgccacattggtcaggggtttggtcagtgaggagtcagattcactatttcttgtactcaggaaaagaatgattccctttgaataaactactgaaatgtacagagcctaggccaaaaaacatgaaggtgattgattactaacccccagttatctaaagcctgagcgatgtagagggtatacgcattcaaggttttagtttagtattacttcatcaggaaaatgctgtgggtcaattaaagaagtgtaaaaattcttggggagaaagtatagttttaatgatagaagcatcgtagactaacattgcaattttagactataactttacagggggaaatcttcaacaattaa

SEQ ID NO: 152736 - DNA, 493 bp, Homo Sapiens
gcttcataagcattttattttcagcacgccacagcttagaaatttggttctactaatagcacacatgtaaatggcagagaatgagactttcaagtaattggcacaggctctaaggaactctgccagaggaaggaagtacagatgctccgccatttacgatggggttacatctggataaacccattcgaaactgaaaatatcgtaagttgaaatgcattgggttacatcctgataaacccattgtaagtcaacaaattgttaaattgaagcattgtaaattgaatcattgtaagctagggaccatctataaaagcatcatttgttcaccacagcccctgggatctcaccacagcttgggtaatgagaaatgtgcaattggttcaaaagtcgaaataacctctctcctgacaaccataattcattttactagacatttttcgctgagcattaagcagcacaaatccaaatgataaagtgcaggccagtttgcagg

SEQ ID NO: 152737 - DNA, 468 bp, Homo Sapiens
gtagcatctccagcggcctttgcagactgctgtcagccaacaggtgccaaaaatgcaaaagaagaagaaactaaaagcagtgctatttttgcagaacaaatgctagctattaaatcatcttaggccaagacaccaatggcacttggaccgataggtatttggagcatgagttaggaaggatatgtctttctccaggtgcgcagctgaaagttgctgagaaaagctgcctgtgttgctgtggtaacatgagaaggaatgaacagctctatacaaaaactggccacacattataaggcctattctatgcagtcatgtttttggctatttgctcatttagtcattgtttatcaaccaaactaggtaagccaaggagttacaagacagctctagagaagctccctctgcttacaggacaataatgcattgtttgttgatacaaatgaattatttgaatccacagaagtgaaa

SEQ ID NO: 152738 - DNA, 803 bp, Homo Sapiens
aggactgttaaaaactgtatttgacttttaattttgaaagcaaattaaatacagttaaattaaaacagaccagatgcagctgcctgggtgccaccctcaccccagcctctgttcttagaactcctagcccctggcctcactcctgtgtggtggggcttgccagcgagggagcagggaacagactgggtttggaaaacagtggtcatcatggacccatttctgatttataacaaactcattcccaataaagatgaaggctgcagtccaccagggttataattataaataaatatacatgcagctaaaagaggatattaggtgaaaacaactgacctagcatctgcccaaagaagtccccattttgttgttcattatcaaagtcctgaaaatgaaccctaggtttttggctaagaaggtggcctcagaccagccaagctgaccttggcacttggctggcttctgtgaggcagtagagtgcccacacataagctcaccacctgtgcccacctcctcccttctctcccatgccaccccacttgcttccaagggcttggtttccaaagtgacatccagggtgtaagaggttggggaaaacgtcctgcaaggtggctcagggatctgattccatcagatggtctcatgaatactgtgggagattaaatccatctcaaaataggcaaccaatgctatattctgaatgttaggtctctggactgagtcccacccacccacccactcaggagtgggttctgaatggccctcagacctctcctggtgagtcttaatggggtgggaggctgtta

SEQ ID NO: 152739 - DNA, 466 bp, Homo Sapiens
ttgtatatatattaccacaataaaataataatttaaacaattctacaaagactttattttttagtgatgaatttctaatggtcttatcactagactcaaaaataaagtgggcttatggatattgctttgttaattcggtggtgattgggactttcaaagatgttttatctatgtttcctgttaggaaatcgaggatggatcgtgattttaagctccttgttaattctgtcaataattagtggtcaaaatggaaaatattcatgaatggccagtacatggaatacagaaaaccccatgaaaagcctgaaagagaaaacaaatgaaaagcagagttctgtgagagttctgtgctgggggtaccttatctgattttcctcatcattcaccaagaagaaccagcgaaacttcacaaccaacggactgcagttggtgatggtaacgtagcgaatgagctcagtatcgttca

SEQ ID NO: 152740 - DNA, 525 bp, Homo Sapiens
agaagtctttaagatactagcagcagccatttgctatttttaagtagtgataaatcctagcaggaagagtttgtgctgtgagccgtttttcattttgctgattctactgtcagaactctctgatgcagatctcacagtaacagtgactagcagtaagatggattaagtacaattccaaaattaaaccttctttaattattcatatgagctgttaacaggtagattctagatacagagtaagagtaatgctttgcagattctgaacagaaagaaaaatttgtggactgtgtaagactggggcaagatgttttaagtgatcaaggccattctagatgttactaaaaataaatgacaggtatttaatattggtagctattaatgatgataatctcttatattttcctctaaatataaacattttgaacaacctcaagttaccgatatggtgacattatgtgtatatattcatgggtgtgtttgtattgtttgtatatctcatgcacttaagacgattctatagccaaa

SEQ ID NO: 152741 - DNA, 921 bp, Homo Sapiens
  misc_feature (539)..(539): n is a, c, g, or t
tttgttttaaaagaaacagtatttattaagaaattatatgttgaattctcctacagtctgtgaagatggtttcttccatttccacagcacaagacaacagctaagattatctggaaaacactggcaatgcttgggaatggagagttcctaggaacaggaggtgaaatgacatgatgtatgcactaatttaaacttttggatccaagggcaagacagtcttttccttggcaatctagtccttacttgtccatggaatctcatacccagactgaagtaataattggatcatttagttcagtagagcggagcatgctcaacttaatcacagatcaaaccaacagttctttaactattatatcacatctgaaatatctgcattctttattaataaaaagggtgcttatacagggcagaaatataactttttcaagtattttatcattatgatctgaagtactttaaactataaattataaataaattataaaaactagcataagatgcatcttttcttacatgacattgttggaaataagctntaaatacagaattgttatatcacctgactttatatatgatcaacagtgaaacatgctaatcatatataaagtcaggtgatattgcaattctgtatttaaagcttatttccaacaatgtcatgtaagaaaagatgcatcttatgctagtttttataatttatttataatttatagtttaaagtacttcagatcataatgataaaatacttgaaaaagttatatttctgccctgtataagcaccctttttattaataaagaatgcagatatttcagatgtgatataatagttaaagaactgttggttcgatctgtgattaagttgagcatgctccgctctactgaactaaatgatccaattattacttcagtctgggtatgaga

SEQ ID NO: 152742 - DNA, 463 bp, Homo Sapiens
  misc_feature (368)..(399): n is a, c, g, or t
cagtgcaaagagctggctgtgaaaggcagctttgttagaactatttatgaaactctcacttgtgcctgactgcggggagataaaaatcaacctccacaaaggcctcccagcttgagttgtggctgctgcactatgggtttgtttatgtttagcaggtggggtccacagggagcctgtgaccagggcaggggctgcagcagttgaagatatgcctgtcattatttaattaaatcatctcgggcatgtcccctaacttctccgagcctcagtttcatctatggtaaaaggaggttgattatccatctactcacaggggttctgagagaagcaaaggacgggctggtcccaaggaactgcatttgataagnnnnnnnnnnnnnnnnnnnnnnnnnnnnnnnnggtgattctcaagctggtgtccctgggatcacccctggagaaaccacaccgatggaagtcactt

SEQ ID NO: 152743 - DNA, 532 bp, Homo Sapiens
  misc_feature (280)..(318): n is a, c, g, or t
ctgtgtcctcgaatgaccacaatcaggttttcttcttgatccttcagtgagccaaggagcagcatatagtccagagggtcagcccatggggagctttgtgttggatggtcagcaacacatggggatccggcctgcaggacctatgagtggaatgggcatgaatatgggcatggatgggcaatggcactacatgtaaccttcatcatgtaaagcaatcgcaaagcaagggggaagtaagtacagtcgggtgcgatctgtcttcactatcacttcagagacnnnnnnnnnnnnnnnnnnnnnnnnnnnnnnnnnnnnnnnccttgcccataactgcatgcctttccaaactaaggacctgtttttaaatatatatcacccatctctgaagtcacagatgacactgatgtgcacttttgaaaaggccaactgacaagcctgcgtgtgttttaagcaggtgggactgccttttagcctatttactgtggccccaatgtgcacaaacacagacatcaggcagatattggacatttaa

SEQ ID NO: 152744 - DNA, 468 bp, Homo Sapiens
tttaacttgttaaatagttgagattttattttcaaaagtaattattataaaaaaatccttagtggatgaagtttaaaaaaacctctacaatgtttgcaagaatttgtgtgctccatccatcctacataacatagaagttggattactcatcttgattcaatgtacttgaacaccttttagatttatctttagtgcatggtgagggtgctctagctaccccttttgggtgctatttttaactcctcttgtattaagttgggctgaaagccacagaaaaggactgatgccatcaacaccgtaccatcaaaatattcagaaattgctctactgaccatttccaacagagctaaaagcaatgtccaggttacaaaatctcatgtttcatataccatataatcacaggtggtagtaatcctctctatgaaacctattctagaccataatggccttttggggtacttgtgtgtg

SEQ ID NO: 152745 - DNA, 687 bp, Homo Sapiens
tgagatttttggcaaactgtaaattttcatgtttatttcaaaatagctttggaagatacaagcaagggaagacttatggcaaagcaatgcaaataaaaaataacaaataataaaggggttatggcattttagacttgaactaccctttcagtacatttgcatatactaaagttctggaaaacaattgaaaaaattctgttaagagtgtcaagaataaccgctcaggttgagtgtaaaaatattttatggtcccatcagcatcaacctgccttaatgcttctttggttgtctcttcagctagttcttattttacagcacatgatatatgaagtgatttcacaccatgcccaagatacgggccacccaccagctacatggcatgatgactctgcaggccgaacggcagccttgataattataaggccatgggtaatagccccccaggggttcacagatcttctggcagtgggtgtagctccgcctacattctatacaacagattccttcgtgatccagtctagggtcgaatgtcatgctttccccttcctgatgataaggattatcaggattgaaggcttgtgagtcctcttgaacactgggtctggtttcattattcagtcttccagcgcctgggttggctcgtggtccactgtgtggtctttttgtggtagttggaacaattttctt

SEQ ID NO: 152746 - DNA, 924 bp, Homo Sapiens
caagggtggtttttctatttgataaatacatccagaactctgtacagtaaataaagtttgcatgcagtttaagtatctttaaatgacattttaagcaaataaaccttttgcttcataattaatggtgtgtaagaaccctcccccctttttaatagccacagggatctctttcccagttccaaagaggaattcatgaagaccaggtacgttcttaagtgttttctgcacatcatactaaataacatgcaaagagttcaacagcgttcttcttaaaggtaagtattactctttaaaatgggcatgttaaccactgagaaaaagtccactcaactatttccattaattacactgcttcatttggtcatcggtagtaaaaaaggagtcaaataatattgaatcaacaggttagtttatccactggctactgcatatgacaccaaatgctgcaaggccaacattctatgcaatatagttgtactggtttggattttctttatctctttccatgtagtcccggtcaattaaagattctattctcttcttaagatcagcaggctttactggaaatttcaactggttgtacacttctgaaacaaggagattgtggctaagtgtctttctcatcttcataattcgaacaattgcagcatcaatttgatactgtctgtcttgaaatactctttctgtagtgcttgcttgttcttcaaccgtttctttcatctggatttgattgatctttatcctgaaaagtttatgtttgaaatcatcattacaaatgaacttgtcaccatcttcaatgtctttgccctttggattgttcgccagaactctagctttgccacaggctaatgactgcagtgttctccttaactctccatcctctattccagttgcctgcttgatctcttctaaactgaactcctc

SEQ ID NO: 152747 - DNA, 510 bp, Homo Sapiens
agtagaggtgagatctcattatattgcccaaagtggtgttgaactcctggcctgaagcagtcctcccaccttagacacccagagccaaataatgcttcttgaagagtacttttgatcggtagggttcaaatattccttggcttaaaattattttctattataattttgatttctgttttttcctagcattttattaagggatataaatagtctatagatttggtatctattctctacctctgaatcttccatcatctctttcaaaacatctctgaaaactggaatgcattttagaattggtaacaccttactatggtcaggcagctgtcatgacacagctgtcaatgcctgcacaggagcgatttgttaaagaatgagctcactgaaaaactcttgggactgagttgcttttcctgatgaaattttcattttcgtgatattggttaacatcatgaaagtgacagtatcaaacgtgcacgatgtaatcagcagcttggagattaatcccag

SEQ ID NO: 152748 - DNA, 413 bp, Homo Sapiens
acctatttcattcctaaaatattccaacatctgacttctctcccaattacaatagtaacaatacatcatgggttttccagtgtagttactttttagtatatattttttcaataatggctattcattaaatatatatgatttgttttggggccactgaaagacttcatataggtaagttcatatcatattgtgataaagtttttggtttttggtaatgaaaacatggattttgcactgattgctctgcggaatttctctctggatgatgcttgatgaccttcacatggcctcttagtctttttttcaatttacctcctttgcagcctttaaaactgtgaatcaagtcttcctgtttcaaatctccttccttagttttcatgaatctacactgtccttcctctgtaaatgcttct

SEQ ID NO: 152749 - DNA, 527 bp, Homo Sapiens
ctttgcatttcaatattagaagtttcttagtctttagtatttagtaggtctgtatctttaggctgtgactctcttaagggtgtctctagtggaatagtttttccccctccctgcttcctattcccctccctggatatagcattccagatgtatttccctaaagtcttgattcttgttgactatgaatttttatttctccctcatgtgagcctaggagactcaaggggcttgctccagtgggagaaatgactttcccccagctaggataaggtcctaggaaggtctttgttctggagaaggctctaggtgtatttcacaatgattactcttcccttgctccagcagagccatccgggagtttcacacatcttcactgggagaaccttctggggttcctggggctcaagcccacagaagtttaaaggtccccctaagactagaatcctcaggagtttctgacccttaggccaatccacactgaaattctagctttgtggaagttaccttttaagtgttattagcaatct

SEQ ID NO: 152750 - DNA, 357 bp, Homo Sapiens
agtagctaagctactgtaatgatttgaaagtttgttatgagagaattatgctttgtcaagccaactataaggcagctttctacaacagttctgcaaaatgtttccaccacattgagcaaagctgacactagacactagctacacgtgggaataggaagatgggccaggctcagagccgccgcaaaggatgaagtccactcagatttgaggcaatcctggggcaaagcactgagcaaagcaacttctctggtaatctcctcctcagccattctctacccaggatttcagaacacagaacagaagaaactgcaaaagccctgcaggatatatcacagctgttaacattctgactttaaa

SEQ ID NO: 152751 - DNA, 284 bp, Homo Sapiens
gcttatccatgtaatgtttcattaattctttgatgctgaagtttcacctcctgcagggagcatttgcagcaccccaggcgagttgtcagcagttgctgcctggcagtagcacacattaactctagtgagcagaagtggagctcgaaggctccccacactgctgcaccttgagctgctcttcctggcccagcccgttctgcttcctgggaccccagatctggtctccaagtactgtttctcttctaagtgtagtcattaacttcccagagtgagaagaagagact

SEQ ID NO: 152752 - DNA, 380 bp, Homo Sapiens
caaagcatggtgggatatacacacacattgctaagtcccttgcccttaaggagctcacagtctagcctgaaggcagataattaagcagctctaatacaagtttgaataaatccagacccatgaaggaatttaagtagagtactggcttccagcaactggagcaaatacttgtgtatggggtacaagggaagcttcagagaaaagaactgtggtaaaagaagaggcctaagtctgaaatgtcattgtgaccaaatgcacacaccatcagcttgcattgaaaaagtcaaaccaatccttaaaataatccattatggctgtggtactgggaagatgatcatgaaccaaaaaatgttaagttctttgataatgaaattagtata

SEQ ID NO: 152753 - DNA, 458 bp, Homo Sapiens
ttttttagcattactattaatctttattattattatttcaagctcatgctaacatattaagcagctcctcttctggcagaatccttcagaggcccttttgaagctaacttgagctccactgctggcctgttgtatggctttggacaagtcacttagtgtctctgagcctgatctccaagatgtgtggtgggaactttctcccactaaagaagttataacccaaagaacaattcccctggagtcaccatccacactatgcattggaagcttaattacacatcatgctctttctctgctttggtgctgtgccgatgcctagattgcatgcttctggagaacagaggtcagattgctctctgaatgctgtcagtattcacacagagtcatgtaacactgcccctaataaaagggaaatggatatttgttgactgggaaccatcatttgtgggtacctccta

SEQ ID NO: 152754 - DNA, 236 bp, Homo Sapiens
tttaaaaagggagggggctccaagcactcccttgcattaaactctgaggatgctgaaccaagagagacagtgtgaaccccagcattggtggctgttgtctaagaggcccatgccagaagcaacatctgatagagtggccacctcaccccacgtgagcccggcttactcgtggcctggaggactttgagtgagactaatttccatatgaaacccaatttagatgaaacgtctttgtt

SEQ ID NO: 152755 - DNA, 456 bp, Homo Sapiens
tttttttgacttgctactaaagactttattcatgcatttaccaagaaatatccagcatactacagggaatcaagtatgaagatttcctctttacctcttttaaaatactgtattcatttcctattcctacataacaaattgccacaaatttagcagcttaaaacaccactgatttattatctcatagttctgtaggtcagaagtccaagcaggcttaagtgagttctcggcttagggtctcacaaggctggattcaaagtgttggccaggctgggtcttatctggagactggagatgaatgcctttccaagcctatgaatgagcttatgggctgaattcagttcctgtggctgtaggactgcagttcccagctcctttgctgttagccaaggcctctctcagctcctcaaagccatgtgcattccttctcatgcagccccctctaccttaaaacag

SEQ ID NO: 152756 - DNA, 701 bp, Homo Sapiens
tttgaaaaaaattcccaaagtttaatggttccaagagtacattttacaaatgacctctaagtaaaacattactgaaatgtttcaatggaagtataacaatttctttcatttggtttttgatgcaatgatcaaatattgctatattttcacaacttacctgatatagttgctacttgaactaatgtcccattttccttccagtgaacatcatcaattccctcaaaaaagcaggcagcgccttgattacaccagaaaggggcatccatttcaggtcggagatggggaaatgtacagttgccaagttggaaaagttcataccattccattgtgtagttcttgccagttaatgtacttctgaatccaatggcatcatgcataattttcaagtgtcccaggaggtctccatatttaaattcccatactggggcttgtaatcgaaaaacttcaatgtcatcatcaccctccataactgggataggtgagccagttggacagaaagtatacttagcttgacaataaggatcaggttttggacggaagtcaaaacgcttgtagggcaccggccagtggcgccgggaggggatgcccgagacccgggaccagcccggaaccaccgcgagccaaagcagcgccagggcccagcaccaggaagcgcgtccccgagccgcgcccgcgccccgccacatctcggcgccctgtcc

SEQ ID NO: 152757 - DNA, 305 bp, Homo Sapiens
aaaacttaattttaatgtttatttttggggggtacatagtaagtgtgtatattatgggataaatgtaatgttttgatacaggcatgcaatgtgaaataagcacatcatggagaatgaggcatccatccccttatgcatttatcctttaagttacaagcggtgcaattacactctttgagttattttagaatgtacaattaagttattattgactatagttggaaaaacctaagattgctttcaatgaagtgttgtcacattcacttaggccacttattagactaccttttacaaactgggacaat

SEQ ID NO: 152758 - DNA, 447 bp, Homo Sapiens
aaggacactttgtcacttggtttccgtcagtctcctgagaatggggaatttaggtctagcgtggttcacagttctggttttttaggagttatacttgaaagctcaatgtcggacacatagcatgaaatccgtcactggtgctttgcatttgtcttggaaaggacatacgccccgcctgtcccttttactaactagggagactgtgaatattcccaagcccagcaccacgtgcacacgccgccagctggctcgcgcgttttccacggagccctctggaggggagggagcgcggttcggactagcctctcccgaacaccaagtgccgctcttagccccgtccagcccgccctgttcatcgggggcctcgccgcgccagtcgccccggctgccttatgtaggtatgcgcggcgggcgcgtgacgtgggcgcggggccgtgggcggccgca

SEQ ID NO: 152759 - DNA, 813 bp, Homo Sapiens
ctagatacttgtgaaaggatattgtggaggaggagctgggggtagtaagtatgatggaaggcagacgagttttggaatcttgtctccaaaacactctcatctgttagaatgactcctaggctataggattgactatggcttagagtggattcatagttgttaatttcatcatgtgacttgtgacttatccttttcttttcataatagaatgaaaattgccatctgtctggcttcttccccatctttttgccttctttcattacaccacacacgtgtcctaattattccaaaggtgatacatttgcatgtttccctttaaactcctttccctctgtcactctgtggagggttcacatgctgcaatatttctgttccaagtaaagatcacaggttttgatcctcagtcctcagtatacacacctcttttagggatttctgggcttcttgactagctcaagctcttcagaggcatgcactttatcttggtgttcagtcttgactggtttaaacttttgatgtccagaaggttttcttcatgtgttgttgtgtggaattgtaaatattttctagcttttgtaaggttgtggctcatatttatatttctcctggtttgaaagaagagagagaaagaagtatgtcaaattgagactcttagattggaaatctgaatttatttacacgattgagattgatctagagttttattttttctgctgtaactgaaatttggattcaagattatatgtgttttgtgaatatgtttggtaacattgtgacttttctataatttagggaagtttgatgtaggagaaa

SEQ ID NO: 152760 - DNA, 611 bp, Homo Sapiens
ggaaattcacaaaaattataacttattttattttccatttgacagtatttacatgttccacagatatttgtaaaacggctgcaaattccttgctttttagatacacattgcatatctggcttcacaattatttaacatctctttatcaacaaaaccagcttgtctcaaacacatacaccttactttagataaaaacaataaacatccaattacagttactcttttaggacttttatgatgaacattaagaaaaaaatgacaattttgggtgacattcttctttgtcttaaagaggcagaagcattcatgtaacatagtttgcaaaagatcttttgggtaattagggggaaaaaaactgataaatttgatttcatttcatttccaggcaattaagcgccgtaaacattttaaatttccccttcactttcttcctctaaatatatatgtagttggataatttcatcctgggagtagaaccagatacaagaaaatcaaacagtaataaatgaaacattccctcttccagaaggtaagagagaaagctacattacactggggaaggctcccaggctgacgacacggattacagtctcttctgacggaatcaaatc

SEQ ID NO: 152761 - DNA, 533 bp, Homo Sapiens
cttagaattatactatcagcccccttttcttccagccccactttattccatctttcctatggctccaattaattgtatatatttccagatctttatctgtagccattattattttcttgagctacagtccttgtattaatatagaaatattacaccagtttcctctagagaccaaagtcccccctcctcaaatgaaatcctttcaagtgagacttgtttcttttgtttaacatactgcaccccaaaatagctgaagtctggctaatacaacattgtttatagtacaggtaacactacatttaaaatgtgagaatatgaattttttgctatagattataaaccgacgagtttgctatttgtgcctgggaagatagaccactctaagagataagactggatccagaggcttcctgaaagacaggatccagtggttttctattcagggaagttggctgcagtaggagatactgtcaccctaatgcaacagttgtgctcattgtgactcacagaaagtccattactctcctgaccgg

SEQ ID NO: 152762 - DNA, 483 bp, Homo Sapiens
tttttgttttttcactgcagaaaggttttaatgataccttttatttctttaatgaatacagcaatattcaaattttctatttcttctcgagtcagtttctccaggtgtttgtccattttccataagtttttttcaatttagtgggatagagttgtttaaaatattttgctattatttcgttaatttctgtagatttttcattaaaaaacagattttaggacagtttatatgtacaaaaaatggagaaaataatacagagttcctacacaccccctcactccacccagtttcccttattagtatggtacacatgttacaattaatgaaccatgttacattattaactgaagtcaatagttcactcagattagataaaaacattagttattttctgttccaggttctcatccaggacattacattttatttgattgccatgtctccttaggcttctcttgactatgatagttttttagaccttcc

SEQ ID NO: 152763 - DNA, 725 bp, Homo Sapiens
  misc_feature (451)..(459): n is a, c, g, or t
tttgtcctcattgccttttattaaaataaacatgcggaggtggagtcgcatacaaaataggtaataggttataaactgaagcatgagtttctgtcaaagtgaggatttaggtgcatgtgaatttcatgcaaatggcctgtaggtgcttccaagttcacgtagcctgaacaatgtaatgacacttgaggaaaataaattattcatgtgaatagcatcaagggtctaacgggtggaactaaatgtgcccacaacactggtagtgtgcttttccaggggatctgggtaacaactaacatcagtcgctacagtgtcgtatttcctgcagcacctaatataatgctgtgtattcaatagatggttaataagtgcaaattaaaccagtaagtgtctcgtcaatgtagctttggaaagctgcagaagggatagtgaaaacatgggtgggtcctgggannnnnnnnnaaccatatccttaaatactttttcattatacagttatttctgtagtgcatgccatggaaatgtgaaatttgtagaattacaagcatctaggagaaaatagaccagtatattaaattgaataaaatgtatgctgctggaaagatgatcctggagtatttatcaatggcggtggtgtcgattctcatgctcacatagctgcttctctgacttttactctgtggggaagctctctctgaggccaggtcagctgcccatcattctgtcgg

SEQ ID NO: 152764 - DNA, 879 bp, Homo Sapiens
  misc_feature (177)..(177): n is a, c, g, or t
ggagttaattaagttcaatttatctgaaggaaaatatggcaccgcgtaccgggaatacagaacacatagggtcacattaaagatgatcatccacattcacattcggtagcacttggcccctctgctgacacgggcctccagcactcactgcccttcacccctgggcttctgggaagngtctccaatgagctcttacactgtcctttcctgttctttcactccatccacttttaggagtttctgcctgtaagaccacttgagggcagcccctcacctttatctctccaacctgtggcatctggagaacgtcgatgaccataccaagaaaaaagcaaactttggagagataaaacagctcttcattctctagggatctgaatgtgcaggagctataccatgcttactgactgtcttatgagtgggcttttttgtgctgaccatttctttgaagcatgtgtaacaggatgtaaaaatgggatccttcaccgctcagttttggctgagcaacaagtgccagttactcctatatcataaagtaaggttcaagaccaccaaagcaggtcttgcaaagcaactgtctagaaaccagtgtatgactttcagtctacgaaaaaggttgagaggccagagagaattctagtaggatatgtggccacaattatcaatgtggtgtgggtctcaacccatctcaggtctaaggaaagttactttacctgggtccctgagagagcttggtatgcatccctctagatttaggacccagacaggcttctgtccaatccgttctgagaaatacaagggcttgtggctggatatctgctctaatagctgagcaaagacaaactgatgctttggggaggtctttcacacccacagttt

SEQ ID NO: 152765 - DNA, 378 bp, Homo Sapiens
atagataaaaatgtatattttgaaggaaatagttttacaatcgaactagagattgtcattgcctctcagaaacaaaacggaatattatctgtccaagataaaacactctttgaaagtgctttcctgaatcgtgttgactcttcagtgtgtcagtgggcaggtcccggctgtgttcgcagctttgtggtctcctccgggcctctgggggtggctttgaatgggacagcttcacaaaatctctatgtggtcccagctgcttttatctctcttcgtgagacagacctctctccttccggagcatccaatttttctttgcctgtgacacctcattcttctgggtttctccatgactccttcttctgttcagaggtctgggct

SEQ ID NO: 152766 - DNA, 498 bp, Homo Sapiens
  misc_feature (269)..(286): n is a, c, g, or t
  misc_feature (304)..(305): n is a, c, g, or t
  misc_feature (325)..(325): n is a, c, g, or t
gagggagcgtgaagaattgtttaacatttggccatcgtttggctgcacactaagcaccacgaagtatttatggttgcagatcaggtgcaaacggggcttagagagaaaggtaagggagcttcctgcgtccgccgagctccggcgtttaccttaatcccggggattgccgagaacttcctattccctgcctctccttcgccttccccaccttccacccacccttctctgctctctctcttctgtaaactcaacccttttccaatcccatnnnnnnnnnnnnnnnnnntgctggaggtataatcgnntattagagtttaaatgcgtntctctttcccaggctagtaactgagttttccaatagcctttctggcggttttaggaaatcgtgtcctttataaaaaataatgctacctaaataagtgttttaaacatctgaagatgccagtccctgaccctatgctgtgatgaaaataaaagcaataaaaaataatgaacttt

SEQ ID NO: 152767 - DNA, 569 bp, Homo Sapiens
tgagagatttcttcacctttatcttccgacacttctactgggtttttcatttctggtaatagctttaaaattccaatagctctcttttgttctgctaagaatacctttctttgaaaataataacatcctgatattatttcatggttacaatatctcttcctatctctctgcggatatgttcactttttaaaagttttattctccttgcagttagtttcctccaagctgcttttgctgctctatttgttttgacctctatacattgtgttaaaggctctcctcagcttggtaatccttgctggtctactcatatataagagtgggacttaaaagctgaatggaagttctgagtgccttagtgaggcttgcaaagtgtgagctttattataaagcaggatttctcaaactctgtaatagtggtatttggggccaggtaattttttgttgggtaggaagggagtctgtcctagagtattttgcagcatcttcaacttctactcaatagatgcctgtaagatcttcccaattgcaaccaccaaaactgtctgtagacactgccagatgtgcca

SEQ ID NO: 152768 - DNA, 895 bp, Homo Sapiens
tttttttctagatgtgatactttatcaaattgtaaaattttataaaaccttactaaattgatatgcaagaatttccaaaggaaatttatttttgaaaaactgcatttcattttttaaattcaaaacatctctcatactagaaaagctattttacagttcaataagctaaatttttaaaaaatgatagaagactcaccaaggcaacataaataagtttccaggctaaaaaaactatccttctgctttccagactttactataaacataagaatcacagtataatcctagcatctcaaaactaatatattgaaaacatttggtagttgagactttctgaaatcagttttttgaactttattttacaatcagggatgtacttttaattttttacaacattttctccctagagatataatttagatattcctatcttcaaagtaaaaatcaaaataggaaataagcatagaaacagcctattggcagtggttacacctgcatggtatttatgagtctccaaactattggaaatttatttcaaccaaggttctcttaagtcttcattacttgggtgtaactcgagagaaaactaatttatatcaatttacagtttagtggtcatgatcaggggaaagtgatactcttccactgactacaagtcattgcagaggcagtttagaacttttcctttattcctaatatacaggacaaaccttgccgacatctcactacctcgaaaatcaaatttaaatgaagtatccaggagtagcctaaagaatgagtgtaatctggatggattttagtctaaatttatgccttgctcttcagtaaagtatagtaactccagatatatgttccacagatgcaataatttctgttccttgttcggtgcagaata

SEQ ID NO: 152769 - DNA, 372 bp, Homo Sapiens
ttttttacaaagacatgtttggtattttactaaagagacactattgaagagattccttaagcctgactcatagcaggtgggaataatttctcttcagtttaacatctactggctttatagcagcttatctctacgttcagagaacaagattaaaagttatggctcctaatatccataccctaaaatcgacagaggcagaaaggcatctgaagacatacatgtcaacggctcaaagtcatcacagtacttctcgctgtgcagacccctcccctggctaccagcagcgctggggcggcggatgggatgctcacagcgtgtctcaaggctgcatcgcttcagccactgctcagcctccctttccttttcttgaga

SEQ ID NO: 152770 - DNA, 243 bp, Homo Sapiens
agcacgttgatgtcttttacactagagattctaaaatgttctctccccagtcagggctctttctgggctgctctgcaggcgagcattcagcactcagggatcccactgcctctggactgccaggcactgcgtctggggtcaggccaggaaggggcagcgcgtggggtctgacattgaggccagcacccaaggggaaagcaagccttgcattttatccatttagactctaccaaatgcgtgatt

SEQ ID NO: 152771 - DNA, 448 bp, Homo Sapiens
cattaaaatgcaatgagctagtgaacagagatgctgttctttcactagctcattgcattttaatggaaaaacaactaaaacctgaataagcattaactgtaattgctctgaggcagacatttccatttcaggttgttattcctaaccatattagtgcagaataatacatgcggatggattttgcggccattacctagacaagggtgagggcatctgattattattattccccaactgaaagcttcagtttgaactctgaagtctccagccctgccaggccctgcattttctgaactacatctctgagtctctgtgaaatagacacataaatcagggcaagctagatttcaatgccatcccttcagtcagttcagtgtgacataagtttctcaaaaatacacatacagaagaaattggctttggcacatttaagagcagcagggaattt

SEQ ID NO: 152772 - DNA, 576 bp, Homo Sapiens
tttcttttattctgagagctgtattctgtggatagggattttgtattttagtgctaacaatgtttttcagtacctaacaccatgagtattcaaaggtctgatgttatctttaatgtatgtaatgaacatacaatggtatatcttatgaatattacattcattttctattcctacaacgttttcagaggaaatatttttaccctgacctggattctatcgctatcctaataactgtggttcagaaaattgtctcacaggcagacagtttcctaatcacgttttactccaattatttatatttctcaatatgataggctgtgaagtagtccactggaaaaggcatcatgctgagagtaagaatagcttatttgttcactgctctatctccagcacctagaacaatgcctgacccagaacaggtgcatagtatttgctgagtgaattctaatcctacttctgggtaaaattaagtaaattaattagttcttgagggactctgtctagatgacccctaaacttccatggtaaggttttgtggtttttatcttggcttttctaaatgctctaaaaaaagtt

SEQ ID NO: 152773 - DNA, 273 bp, Homo Sapiens
cggggcgcggagggaaagaaggggtggccaggcccaggccaggctgcaggctttggcgacctctcagagctgggagcggggtcccgaaggcgggtcagtcccggtcagggtgggctgcgggagcctcaggccacggggaagtagtgggggagccggctccggtagatgtcctcgtccttctcgaggaacacgcagatgatcagccggtccaccttgtccttgtgctgctccagccactctcgcagcgtggccagcacgatctcggcggccgca

SEQ ID NO: 152774 - DNA, 552 bp, Homo Sapiens
aattatttgtgataatttgcttgaaattatttcagaatttatggaatattaaatatatggaaatatatgtgtagagtgtgcatacctgtatacatgttttaaagtgagaaacttttaaaagattataaaatagactgcaaggttcaaaacatagatccccttaaatgacacttccgtcaccaataatcggactgagttacagtaattttactttagcaaacagacatgtattctgtgtctcacgggccacctgctgaatgagaggactccagttgaaaggtcaagaacataaaaccacaagagctttttgagtgggtcttcaacttagttaaaataaaaataaaggacctgtgttccttgagaactggcccctaaattttctttctctacttcagagtgtggcaatgatgtgtttggggactttggccaaaattgaaggtttaggaaacattgaacatgacttgagaatatttagaatgtttacaaatgcatttggaaatatttatatcaccatctatataaaaataaaactgtgaacagctggacaagaaa

SEQ ID NO: 152775 - DNA, 475 bp, Homo Sapiens
gcggccgcctgcgtgtctgtccacctcatccctccgtgtatctgagggagtaaaggtgaggtctttattgcttcactgcctaattttctcacccacattcgctgaagcgatggagagtcgggggccagtagccagccaaccccgtggggaccggggttgtctgtcatttatgtggctggaaagcacccaaagtggtggtcaggagtgtcgctgctgtggaaggggtctccgttcttggtgctgtatttgaaacgggtgtagagagaagcttgtgtttttgtttgtaatggggagaagcgtggccaggcaggtggcacgtggcatcgcatggtgggctcggcagcaccttgcctgtgtttctgtgagggaggctgctttctgtgaaatttcatttatatttttctatttttagtactgtatggatgttactgagcactacacatgatccttctgtgcttgcttgcattctttaata

SEQ ID NO: 152776 - DNA, 432 bp, Homo Sapiens
ttttttttcagtcaacagcagctttaattatgactatcatctcagaggcctggacttcaggctcccctgtgctccaggaaaggggaccttccagaccagaactcggggcctacaggccagaggagcctgcacagacctccccagaaggcccaaggctgtttcccacagctccttccacatgcccccgtgccaggttgcctactcagctctgtgcctcgtggagaaactcggtgtactcgtcttggaccgtttcccctggtcacttccaggcaggtcacttggaagtgcttctggagtctctctcaactccttttccccagaggtgtcaggaaagcaggaagcttagcttgggggaactgcccgaagaggtgggagcctccagcttgctctgggacgccagcatcctgtctgccctcagtccagccagcctct

SEQ ID NO: 152777 - DNA, 523 bp, Homo Sapiens
  misc_feature (62)..(62): n is a, c, g, or t
  misc_feature (64)..(72): n is a, c, g, or t
ctcatttgtcctgtcttcttcactcacttcttggaaaagtcccaacagagatgaagacgtgngnnnnnnnnntcggggtcggggtgtgctggtggggagagggcagagatccggtgaggaatggcttccaccccctggcccattcccctgcaggctggaagatctttctcctgtctggcttctcttcttttcaattcgctgcaccaagtgcttccagtggcccaaaaatgctttttgaagtgtgttttgaaacagcccccaccaacatacaccccaccaggagtactgatcctgccttccttcatgtctaggggaagcattcgcctttgagcacttgtttgcaaatctggggagtttgagacctcctagcatctcttcccttctttccctgcagtctattcactcccgcagccaaaaaatctctggcgttcaggttagcagtttctgggttggtttgtgtgggtttttgttgttgtttggggcttatttttttcaaaaagtgataaagacgggtgggttggag

SEQ ID NO: 152778 - DNA, 416 bp, Homo Sapiens
cttttcttcttctgcaacacggctacggtctacaagatctgcgcctggatgcagctcttggcaggtaggggagggggtggacggaactcccagaacaagcgccagggacggggctccttcctgccaggtccccttcctgaaggagtcggatagattctgcttctctgtgttaagacactcacctctttggctgacggaccctcagtgggtattggggagggggtacgctgcagagagacaccttagggcaggggacagagccttgggactgggtgggtgggtctgtatgcttgggtatgggtacgctgcatttattgctcggttagcattaagttagtgtctctaagggtctctgttggctgtcttgggggaaatatttatctgagtgaggggttactgtaggtatgatcaatttc

SEQ ID NO: 152779 - DNA, 533 bp, Homo Sapiens
  misc_feature (442)..(492): n is a, c, g, or t
tttaaattttcactgaggaacatacattagcaggttggtgaaaaaattaaggcacagaaaggacaagtgcatttcctaaggtcacgcacctggtaagggctgggcatgcattcacatttcaatatctacaaagccttcttgctaccccgagcgcttctgtttgacctcgcttctaggttcggggagataaaggtaaataagacttgcccttgccttcatgagctcctgatctctgttcatcacagtgtgcaagctggatggtctttgaatcaaaacacatattatccttactgcgcgaagacgacagcctgtataatgaataggcaagatagacttacagctgacttcgataggagtccctcattacacacccccgggccggggtgggagaataaggtagtgtggttccctagaagagacacatttgtcttcaccactgaannnnnnnnnnnnnnnnnnnnnnnnnnnnnnnnnnnnnnnnnnnnnnnnnnntcgtggtggtttgtgagaattaagtaagatagcacatagaa

SEQ ID NO: 152780 - DNA, 686 bp, Homo Sapiens
  misc_feature (53)..(66): n is a, c, g, or t
aagaaatgagaattatttaattttttaacagttaaaaaacttagtgaacaggnnnnnnnnnnnnnntccatgttataatattctttccccctctatctagatttgcatgaggtatcatcggttgtcaagataatgccaaaatgaggactttttcaaaagacttccataactgtcaggcaagaaaaattctgagtgtgggaggaacggagggctaaaaatgaaatctgatgtctttccctggaaggtttggattaaagtctcacttctctatctcagagccccaaaataattgtgttttgcccaaagtaaagccgagctcggagtctcaattttcagagaagttggcacctatttgtaggagaaattgggtcgacccaaaacaaaaatcagtcctattttacttggagcagccctccttttgctcatggataaaattaaaatttacatgaccttggaacttagtcgcttcttttatattgtaacaaggtatcttgaaaacaatatatgttaaaacataaaagcaaaatttaatatgaatgatttcctatttaacctacatgataatgccatcttcatgactggttttctcacagacctgtgaactaatcctctagaagaattttactgaaagtattcctactatgagttgtttggaaaaatgaagagtacttcattcttgtaatttt

SEQ ID NO: 152781 - DNA, 487 bp, Homo Sapiens
tttttttgctttgaaaactgagatgttttaattaaattaacaattaaaataatttaattatgtgaattatttgaactcattttagttctttttaggaaattaatactttaagcaagtttgtttttgtgaatcgtttgaattaattgagtcagcacaaatgttagcattgatatctgacccccttccagggttggggcagaggagatgggggcggaggagccaggcctccaacccgctttcccctggagctcagccagaattccccattgaggagccctcagctccctgagagccaggagctcttgcggagaagccactgtctgcacgccacctgcttcgatgaccctgctctgccatccctgtgctccaagggccgggccctgccgttgcctgtgccagacgggtctcagggagatgccggccagcaggtatgcatggcgaggcctgggcatcaaggcccggattctatggctgccagtttcattct

SEQ ID NO: 152782 - DNA, 431 bp, Homo Sapiens
ttctgtttatggcagttgcaggggaagtttcaccatccgcccaccttgcccccgaccctcacccactctctggtttgggaatcacttctctaaattccctattattctaagtaccctttctacaggatttaccctcacgcagaaggtggtgggcattgaagaagccagagctccttacagatgactctccacggataacatgaaggggagggatacctcacaagtctcctgtaaatgggaggtggcaggtggaaagcagcaggcagaaacatggaagggggaactgggcttcctggtgccagaggagaaatcttgaagtggaacttcttggtagtagtagatttaggtacccttcatccacactacataatattccagaggtgttacattatttgatctctgagggctttggtagaggagggaacccagta

SEQ ID NO: 152783 - DNA, 587 bp, Homo Sapiens
gcgatggattcggccaaccgcgccgcgcacctgacgcagcgactgctgacgttctcgcggcgccagccgatcgatccgcagccgttctccgtgaccacgaccctgcaatcgatggccgacctgttccggcgctacaccggcgaaggcgtgtcgctggcgttcgagctcgatgcggacctgtggccggtgcgctgcgaccgcaaccagttcgagaacgcgctgctcaatctggtgatcaatgcccgcgacgccatgccggacggcggaccgttgacggtgtccgcggccaatacttatctggacccggcgttcctgagaccctatccggaggcgcaggcgggcgagttcgtggaggtaggggtgacggatgtgggctgcggcatgacgcccgacgtattggcgcacgctttcgatcccttcttcaccaccaagccgctgggagaaggcaccggcctgggcctgtcgatgatctatgggttcgccaagcaggcgggcggcgtcgtgacgctggaaagccaggtgggggcgggcacgtcggtgcgcatcttcctgccccggcaccagggcacgacggccgatgcggccgc

SEQ ID NO: 152784 - DNA, 783 bp, Homo Sapiens
gtttgtttgtttgttttaatctctacagcacatttaatgcaacttttgaaatctgcaggtttttaatgtcttgtggaaatttgcagaggggcaggtgtgtggtaaacgggtaatgcatgggaaataatgagaagcagctcacagagtttaaactattttcttgtccccaccaccttccaagaacctgcgagggtagtaatcatcttgtcccctttttcatgttcagcactttaatttttttgccttactttcatgtgcaatgagaattacttaagaattggtaacgcatgtagccttttttagtaaccttggaagctgtagaaattctaaggaatcatgaaccttgcctggacatttgccacctaaacgatcagtgtggtgctgcgttctggccagtaaattccatgtttttggctatatctcatccaaactgagcagtttctgtgtatatatagaaggtagaaatgaaaagtgagaaaatatttgaaagggattatattaattgctaaatattttattcacaaaggtcaataacatggcaagataaaattatttgtatagttttgtctgaatgagcgagaaaaatgtggatgtactgtttgtatatattgtatatattaaaacagagatatgtgcatgaaatcaagaaaaaagaaatgaacaaaagcaaagcattagtggctatggtctgtaaaatgaaacaaaaaaactttatttcactataagagtactttattttaaatgatctttaggagaacattttgctaaagcatgaaaaaactg

SEQ ID NO: 152785 - DNA, 342 bp, Homo Sapiens
  misc_feature (38)..(39): n is a, c, g, or t
aaatgatttagagccttttaaaactcttgtaaacactnntttaactctaataaaactaataagataacttgaaataattttcatgtcaaatacattaactgtttaatgtttaaatgccagatgaaaaatgtaaagctatcaagaattcacccagataggagtatcttcatagcatgtttttccctgcttattttccagtgatcacattattttgctaccatggttattttatacaattatctgaaaaaaattagttatgaagattaaaagagaagaaaatattaaacataagagattcagtctttcatgttgaactgcttggttaacagtgaagttagtttt

SEQ ID NO: 152786 - DNA, 535 bp, Homo Sapiens
ttaactctccacataaaatggccagaaatatgaactggttttcaggtggagagttaaaataagaattaagtgatggtttatactttcaagccaggagattcaaagttggacacattcttgttagaatacaccaatggtgggacaaacaccaatggattatctactagatgctgaaaatgaacacctacaactgcaatgtgcctgtccccttaaaaccagccccagactcgtttggcatcacctttgagatgatctcctcagtaaaaatgtcaacgctgtgtttggacaagagagaagtgcctttcagggagtgactgaacatgtcaaagttctgggtgctggcgttaaaaacacaatattgcagatgtacaggtagcttccaaatctaatggaaatattatcatgacatactttctagttcgtttgagattcaggggaaatggatgtcgcatggtatagacagtgaaacccctccacagtcccggggttggtgaacaggaataacacttgttttaaggactactcaagtctatca

SEQ ID NO: 152787 - DNA, 594 bp, Homo Sapiens
actggtgcaacgctttattctcttggatttttggtctttagttgtaaacaattaacaattcttaaggtcgactaaattctattttaaagatcttcaaaattggtttcatgaatgaactaaaatttgcacttaccaaatgaaaaatcacatctcacagtttacactgcctcactgttttcaatgttaagcacaaacaaaagtgctgaggccacaacaaaagtcagaaagttgaaataagttgtttcttcgcttttctcatcacagtgctgtcactgtttatttctgcgtgactgttttgacacagaaaacgtggtaggcaagcctggtccccggacccgaccaaagacaggccaaagctggaagaggcgccaagggcagttcccgttgctctcactgccttggcaacacctggaagcaactgcccatcctccagctatatctgaataacccgtcccctaattagcatgtcattaaaagtggttatacatatgatggcaagttggccccaagcggctgcactctgcacactgaccgagcggcagccctgctctgtgggagcagtcgcggagctggaccacctccactgccgcctca

SEQ ID NO: 152788 - DNA, 603 bp, Homo Sapiens
tttacaattagggagcattacattgctatctgatagtcacttagacacatctttttctcttttttaaagtacaactttatacaatattccctttttttcagtctaatgttactcagtttttagcagccattctcaactgggatttcactagaaaagtaggccttaatccccccctaaggtatccattgtagctaataaattagtaagatctagaatggtactatccttgggagaattgaggattaaagttactcaaattattttctggacagtggctcagatgaggagctgcaattgagaaagacactgccagaatgtcagaaagactggggctggctgtacagcacctttagcattcagtttctccaaagcctctaaaagtcgtctgtcacattattttctgctagtttgttggttaaaattctttttcatgtgctgcttcatccatgtttgcttacagaaagcatactaagcaaattcacaaatatctattataggaaattgtaaacatacaaaagtagagaagcataatgcatcctcacatacctattcctctacttcagcatgtttggccagccttgtttgatttatactctgattcac

SEQ ID NO: 152789 - DNA, 863 bp, Homo Sapiens
tgagccggcccccacctttatgccggggcggggtctggagaacatagtgggctgtgcaggtgtctgggacacacctacaccctatttgggcgtccagtgccatttatgagaacatctccctttcttaggtaacccagtaggaatgtctgagtttgaccttgggagagggagtctgcttttaaaactagacctctcattattccaaaataagacatttattaaagcagaaaaaccaggcttctcctgccttttatccttgaaccgagccagggctttgaggggctggttgcccgcagcgtcgactccccaggtgctggtaaacccgggagccagcgtttaccgagggtcagggttgtcggggcgccagcctttgtgtgcacccgggaggctgctgttaagggagaccgtcttccgggccacttcgctgtctacaaggcgtgtgctttcacccacggggctcagcgatggctgcgtttgtttacagtctctggcaaagctgtttgccacccagacggagaagaagttgtgcctgttcttgtcccagctgtttctgagtctaaaggtttctggagtggactttctgggtttcgggtccagtccacacgggaaatggaaatctggccagctgagagagggctccgtgtggccgcctttcaacagtaaacagtgactcaccgctccgtccccaccctccctgctctccgcgaatggaagatgcctttccccgctatttatttttgctttttataagtcacagactcgtcatgtttccgctttcctacagtttcaggaaactgggagtgtcgtcttaaaatcatagagttttagagcaggtacaagcgaacttgagtggccacatgccc

SEQ ID NO: 152790 - DNA, 550 bp, Homo Sapiens
ttttaatgtttgagtgctatttctttgtggcaccgaggaagcattttgtttctaacaggtctcagccatgaagcttgtgatgggtgaggaaaagatatgacttctccccctacagagaatctgatgagggtgcagctcccaggaacaggccatggacacccccagggttgtgaggtcctccagtcaaggggccccctgacccgaggcaggggacgatgccgtgggcagcctgtggctcggctgctccctactcccagctgccccttccaacaagacaccagctcccgggcagtgcccctcccccgctgactccaaaagccaggacagcttctttccaagcagggtggacccacccttggtcctgaccccaagccctccagctcagccaagggcggagccccccaggccatgtgtggtggggacctgagcgtggctgggctctcccttcaacaccaactcctgctaccctcacagctgtgtgtacatggaggagggtctctgtgggcttcatctggacactgcaaaaggctgcagggggctcaactgccat

SEQ ID NO: 152791 - DNA, 448 bp, Homo Sapiens
tttactttttatatgtttacttcgggtattcttaagggctttcagtacaaagataaaaacatgcgttggaatgcatcaacattccaacttacataagtggtgtagatacctatggcattagtaccacattttgatggttggaccacccaccaaattcccttctctccttttttacttctttttctttctgtttgctttccttgcaagtttccttccgcatccttctttcccacctacaatttgtaactgaaagaaagaagtagctacagaccttacctaacctactcttaacctacttggtaggtagggttcagatgcaagggagtggctcgaataaagcattttagttatgccttttagaaattagggagcaagagatatatagaaaaattagaaatgtctcttctacctttattaagtctacctttgagaaatatgaagggcagga

SEQ ID NO: 152792 - DNA, 432 bp, Homo Sapiens
  misc_feature (201)..(242): n is a, c, g, or t
acagaaaaaaatacagcatggattgagcacaggacttggtatagggtaggtactctataaatgtatactgtaaaaactgctgaatgaatgtcagttcagccacatatcatggttctttatcatagcagtgtggtataaagtattttaaatcatacaaactttgaattataccagcaaacagcttattaactgtatgacatnnnnnnnnnnnnnnnnnnnnnnnnnnnnnnnnnnnnnnnnnncctaacctggccatttttaaaggaatatctgagataatgcactgtaccacacatatatacaactgttacaataggtagctggtcaggtatgagcagggcaagagagggctccccccacccaccaggaatgtcagacgaccatcaggtgatgacttggcagtttcctgattgtccagcagttgtcacatga

SEQ ID NO: 152793 - DNA, 531 bp, Homo Sapiens
  misc_feature (70)..(82): n is a, c, g, or t
acttttcccagacacaatggaaaactgggtttatttcctttttcccagcggcttaaagcctttttttccnnnnnnnnnnnnngtccaagtgggcctgtaccacctaccaaggcattctctggtctcccttgtgtccccagccccatttttctcctaagcaactgctggaggtccttggagaaaaacctacaagagggtatgaactgtctttgtgtctgcagctcccaaggattctatacgctcacgcttgcctacacttggactttagcaattcattaattttcctgctagtacacagccctgcttattttctgtgctctgccacaggtgagccatgcccacaccccacctctatgagtttattattttatagaacatacaacttattcttgtttcagggtaagagtaacattctttccagctttctgcatcttgggggagtctggaaatcatcccataattataaataccacctatatagccacaactcctaaatttagatttctagtctggacctctctcctggacccc

SEQ ID NO: 152794 - DNA, 539 bp, Homo Sapiens
catcaagcgggacatttaatttgatttagggaaaatgaggcaaacatttgagaacctaaataactaaccagtaattaaactaacaacaggaatgcccttgcattacaacccagcaagcacagtggcctttaaggactgtatttacaaagagacctgacaacataattagtcttgtaaattttacgcagcccgcagccgaggagtgatggattttgtgtgtggaggatgaatgagaagaaatgaggtggatgaatttccatttccagtaaatgaaattaacactgcttaattagtgaagctgacaaacaaatgatcaggaaagatttaaatccctaaaagtgtatctctggcctgggcaggcccagggacaggccaggatgtggtgggacagagtgggaagggatttagagctgggactcagagcctgacattggccccttttgagggtgctgtccccagacagaggctgggctggggaacagctggctcccctgctcttccaatacatggcgctctgggaagcttcttgccccatctcc

SEQ ID NO: 152795 - DNA, 484 bp, Homo Sapiens
ggcacgaggtttttctttttccttttcttcaccaaaaaagacaatttattaataactcctccaaaacctctgtgggttccccttggagtgaagcgcgagcagggagccgccatagggagccaggcccgcagcgccgttcgtcctcagcacaacgagcggcagcgggcaccgaattgttctgcaactacttttcacatctgccttttgtagttgctgaacaaaattcgttcccatttgtttccggttggcaagttcgtaggcttcggcggaagtgtaaagtcaagggcaagtggcggaggctgcggccaccccggtctctgagcggcgcaccggacaggtggtcagtcccgggacgcggtgacccgacgcccgagctccaaggctcggcccacgccgggttcgccccagtcccgctggtccctcagccgacgccgccgggcctcgcaccgccccccgaccccggacccccacccacgcggccgca

SEQ ID NO: 152796 - DNA, 549 bp, Homo Sapiens
tttcgataatattttgtggttacttccgcagatccaaaacacacacagagccgtcggacgcgctggcacccactttgtctcctcgggcgttccagcacacctcgaagatgccgccagtgcctcggtagctgtggacaagatttccactctgagtattccagatatggacgcacttgtcgaaggatccactggccaagtacttcccatcagggctgaaagctacgctatagacaggctcctgatgcttcgtgagcgtgtgggtgcagacgcctcgttctatgtcccacagtcgcaccgtagaatcaaacgaagcacttgccaacatgatgttggagtttgggttgctggtggcgggcccagtggggctccacttgatggtgtagatctctttattgtgagcctgaagatcatggatgcacacctcctgtttcatgctccagatcttcaatgtcatgtcatccgagcaggatgccagcaacattccagacggatcccatttgatggcgttgacctcgtttgtgtgtccctggaaggttttgactgggcggt

SEQ ID NO: 152797 - DNA, 554 bp, Homo Sapiens
  misc_feature (226)..(235): n is a, c, g, or t
tttttaatgtttgaatattaaattttaatattgtaattttagcctgaaacaaaacagtattaaaaaggtacatctgctgcaaaaaattaaataatgcatttctggcctcaatacacatgactgagtaatttggccctgtgaatttcttcctggtagcagggttggcctggagagggtgggcagagaggcagcagggcttcctgggacctcctgtcttttaaaaaannnnnnnnnnaacttttaaaaatagggaacgcttcacaaatttgtgtgtcatccttgcacaggggccatgctaattttctctgtatcgttccaattttagtatatgtactgccagagcgagcacctggggcctctcttctactgggcatttcttcctttcctgcagtttcactccttgcaggcttctgcttccacatggtggaccccagttgttttgtgttcttaagggcacctttttgtcatcacagctgacgtttcatgtgatcaccaggtaactcattttattggtttgttagggctgccaaaacagtggactattaactgagtga

SEQ ID NO: 152798 - DNA, 194 bp, Homo Sapiens
atacatgtccttcagtctcttaattttgtcaggtggagcttgatcttaattttaacctattatcttttatttttgtttgtttttggtgaaggataagagtggtgtttcttttgccctttctggtacaaacagagggacactaagcattaacttaataatcacatttaagacttgaacacatgctacccttcacc

SEQ ID NO: 152799 - DNA, 399 bp, Homo Sapiens
ttttcaaaacaacacttcaggtaaaaacgattcttagttcaaagacagacataaacaggctatgggcaggatctggtttgctctgtagtttgctggcccctacttcagtagtttaatatcacacgataaccagatattatgacaaaaactgtcctcacaatcaaatatgcgtgtcactctcagtctgttctagacaatttaaaaagtaccaagtgaataaacatgtctgtatattatttttctgtagagtcaaatacatgtagtcatacacatctcagtgaatactgacatggtaatgtataagtgtagtatctgtatcatttggggggaatgttttattacatttaatctacataaagagaatgcataggtcataaatgtccacagtttgatgaattt

SEQ ID NO: 152800 - DNA, 372 bp, Homo Sapiens
cccatgccattgtgggctgtatcccctaaagtgccccattaaaatcttggcctccttgtgctcttttcaaataagagacccctgttccataatatggcccaaacttctaggacgggggcactcaaggatggggaattttcctcactgacagggtttgctatgtctgtggtaaacccaatagaggataaggctggaacatctgggtttggggcttacctggttcttttcagtgtcatagagtgatagtggaaggtttaaaaaaaagatagggaggatgtatccaccagggctttgggcattttcttgatgaacttattcctttggcttcagtgagaatatctatcatttacttaagagaaggcaatgagctac

SEQ ID NO: 152801 - DNA, 640 bp, Homo Sapiens
tttatttaagaaaggaatttattttgacgcacccttgtgagacagttataaatctttgataagccatttgctgatagacacaaatgttctattgggatcactaaagaaatagtgttttaaaacaagcatttccatgccattgaaataaataaccttgaaataatgtataggtagtcatcaccacggtataaaagaatataaaaacaaataatcaattattagaataaaacttttccatttgtttttttaatgactcctgaaagctggattagtgtgaaggagattatggactaatacctgaaaaattctgatgaattgaacattaagtgctataaattcttgggaaggagtcacactgatttttgggtttagtttaaaaggacagaaaattttctcactaacctaaacttgaaatttccgagtaagtgggtttaccagtgttaatctgttgaactatctgctcactatcactacagtttccaaactcggctcacatctctaagtagagtggttcaaaaacatctgctaatatgtaggctaccaattaatatttcccaggtcactgaacaaagatcaagcattaatagtgttcatttagtaccacactgaattaggtaaaaaagtgaaaactaggtgtttg

SEQ ID NO: 152802 - DNA, 505 bp, Homo Sapiens
  misc_feature (399)..(411): n is a, c, g, or t
tttcttgtcatttcattgtttgtttggaaagaatcatatttcagtttagacataacaccagagttcccttctgatgctcttcttcgggtccgtgcagtggcagattccttaaagttttcttcagctttaccctatttaccctttatactgggcattggcaaatgttgtaaagggccagatggtaaatattttaggctttatggtttggtctctgtggcaaacatccaactctgccagtgtaccctgaaagcagccatcgataatatgtagatgaatgggtatggctgtgttccaggaaagctttatttacaaaacaggcagctagcccttgctttatagcaagttatgttcttctgaggttctgctgtatatgagttgacttctttagagaataatacnnnnnnnnnnnnncacatttatttaggtcataagagaactgcttatgacatgtcagcaagaattagaggatttaaagaaatcaggaactcaaatattgaggaactag

SEQ ID NO: 152803 - DNA, 633 bp, Homo Sapiens
ctgcatctttggctctgctgtgatctgattggaggagggacagtttctggtacccatcctctgatttatacatatgcattttttcccctctggcctttagatggcctcagccccagccaccatatacccctgcagtttgcactttaattgatggtagttcagttggggtacttgttttatggaagttttgattgatttacttgccctcccaccttctttttaattcaatgaaatctgaggttaatgcgaggttcgaggagaggttataggtaaaactaccagtggcagctactcaagtcctatctccactgttagcttcctccaactctaattattaacctatattcttgccaagctaactattgactataggtttgcctttcctggagaattaattgagcaattgaggagtgtctcaggatagcacaggccaaggtaggggagtaaaaaggaggtcaggcaaaagggaggagttttctgtcctttcccaggtttcacactcaatttgatatccattaccatgtcttttctacttccttgtaaataggtatgatctttattcccactgtacagtctgttctatcctctgcctcccatcaggccctgtttctttgttcctttgttaatatcttg

SEQ ID NO: 152804 - DNA, 856 bp, Homo Sapiens
ttttttgaatctcatcccaggcaccatttatttccctgtccctttctgggacccctgaacttctcttcccagaagagcaaacgaaccaaatcccaggcccttgtcctgccccacagtgcctcacatcccttcggaagagtccaaggcctggggaggggcatcttcagctgaaggaggacacagggtgtctgctgggaagactggctgtcccacagcagtgcccagccttcgcaggacctctcttggtctctgtccatgggtgaccctgctccagcctctcagatgatgctggtcctgcaggtgccctggctctgctccaagtggctggccttggtgctgttgctgaaggaggccacggggtgcagtgggaactcacggaggtgccattgctgccacttcttctgaacctccagctgcacctccccgttgaggaagcagtagaggacggccaccaccagtccctggaatgagccaagggctagttcaaaaaacagctggatctccatagcgtcctctggggagaaggcgaagacgatgtagtggatgccaaagagggggatcagcaggagagtggacctggccaggcgcttataatggctgacttcatttcctcttgtttcttgggttctaagttttctcatcaggattcttagaatgtttatgaaaaggatgaaattaattttcaactggttctgcagccttgggcatccctgggctgtccgtgtggatgttacttccagccagagggactgcttccatccatgagatgattcctgtgtgtccccatgtgccttccgcgtcctctgtccccctatgctgaaccatacccatgggtctgagctagcaggactgttac

SEQ ID NO: 152805 - DNA, 754 bp, Homo Sapiens
  misc_feature (474)..(494): n is a, c, g, or t
taaaggtattttttaaaaaggtataacgaactataaatcaaataaaaagctagctcaaatttgcaggttaattatactagcacagaaacaaatttgtttcttaaccgatgattatgaggatcttttaaagacatggttacacagcaattttaacttttaatcttaaaatgctatgtcaatgaataatatgtataaaaatcaactgtacatacacctaacttgctgaatataaaatcttaatctcaggttggaggaaaaaagtgtgaccattttgttcttttaaaatttgctaagcgtatttaaaaatcagcaagttacattctgtttctatttttacagaacaggggagcaaaatacttcagttctaaggtatagacttccctgggggaagaaagcaatgccaatcatttatttttacttcaagttgattaattgccatgtaataaatgatctaaaggaattgactaaactagnnnnnnnnnnnnnnnnnnnnnggagacaagaaaggtttgaagatggttaaagaaagggtattaatatcctttggcaagcacacatcatgagcacgtcaaaaatgcttcactctaggaaataggactgtacaggcaaactctaaggagaaagtcagcatttctcaaaagctcatacatcctgaaaagtatctgaatgttctgtaaaagaaactaaaggtacaagaaaaaaaattttccagtatagttctgttgactcttaagagggcttacattaaaaaaaa

SEQ ID NO: 152806 - DNA, 750 bp, Homo Sapiens
ttttatcgatgatcccatctggaggaaatatgttttttccatgggacgctaaggacatcccgccttccccatcccccgcagtcacttttctgtttattacatcagcctgtgttcccaccacgagtgctgctctggggtgcagggcgctctggccctgggttggtaagattcgctaaagacggtggcgtgttctctcccgagtctgctttgtggggttggtggggcttttccatcgggagccgcaccagccaccctggcaccgcacttccagaaccgcgtcagcaccaaggacagcgccagggagccttggctgcagggacggagccccagatgtggctgagaaggggaagaggaaggaccgtcgtgccctggagcctgcgaccgccacgcccttgttccagcctcagccttcaaccccctacacagacgcccagtgagcactacgtgccgcacgcaggactgaggggtggagagtgggaggccatgggtgtcaacgtagggtccctggaggtattgattcagagggcagtagcccccgggcaggtcctggctggccccacccaggacctcagtcgctgacctcaggacacggtccaggctctttctattcacgtctgtgcgtggcatcctccacgatacaagcgaaaatcaccattccccgcctgcctggcgttggcagccaacccccaggaggctcccggccctggcttctcatttctcacctcagtgcgagcatggatctaggagaac

SEQ ID NO: 152807 - DNA, 515 bp, Homo Sapiens
tgctcttcatggacctgttaacaaccaccatattgtatcttacggacgtttgtatgccacgtttgaagagcaggagccttgtttcggcgtcatgttgatggaacttgagctgtctgatgcgaatctgtgttttatgttagaaagcgcgtagccttaggatctggcagacccaggggccacttaattaaccctttgcctctttgaccctcaatctccttttctctaagccataggtcacctgaaagcctacctcacagggctgttgtgagggccgagggtgggtgtgtttcaacagtgtgcagatgctggctttccctgggaatgggcatatgttgggatttgtcttgaaagcatgagtgatggctttactagtcctaagtgaataaaaagtcagccctgaccttacgctgggattgcatttcccacagtcagtggcatgtgcagaccactggcagagcagcctgcaggtgcttagcgatgtgggcccagagtaaatatttgtttgattgatgaaa

SEQ ID NO: 152808 - DNA, 430 bp, Homo Sapiens
tttcacattttgaaagtgtttattgtagaaggaaaagaaacgttgaatgtttaaaacaaaaccacaatattttatttttacaaagtgagatgcttatttacagcatttattattaactataacaccatctaccttcagttttcaaccatttcctacagacaaaatttaaaaggaagctccttgagcttgtttcttacaaagtaaataaaaatagatatacctgtattaactatgaatattttaaggcagttttgtgccggcatccatgagagactctgtccacctcctgctggtgcttcattcctttcagtgctgtacatgaccaaggcgagcaggggcagtgctcagagtctgatcgccagatgcagtgccctggagtttcctccccgcaagtccagcctgggtcagttccagccgaacaatttttgtg

SEQ ID NO: 152809 - DNA, 575 bp, Homo Sapiens
  misc_feature (264)..(282): n is a, c, g, or t
tttttttctgaaaataatgatgctttatttgattgacatcacatcatcataaatggcatctaatttcagaaaacaaagttcaagtccgcaaaaaatgcatgtacaaatctaaggagataggtctacagaaatagacacgtggctctgtggtccgtaaggtgcagtcaggaacctcacatcctagggtctgtctgggttcaatgttccagtggcgtgagacaaccaaggaaacagacaccccaaagagccgatgttatttttgannnnnnnnnnnnnnnnnnncatgtacatatgtaaatatgttgccttcatctgtaacagtgcaaacctctcacagcgtgcaaagcaacagtgtttcctacagtcaagtaactaaatcagtgaaaagttatccacacagcattataaaaacattatataattacatagcagatatatatgcacgcctttgcacgctgattagagttacttgcattgacttttgctttagaagaaataaaaaaggaaaatctttaaatagttcttcatcaaataaaaggtaacaatttgtaacagattcaactatgaacaggtat

SEQ ID NO: 152810 - DNA, 446 bp, Homo Sapiens
  misc_feature (63)..(63): n is a, c, g, or t
  misc_feature (208)..(225): n is a, c, g, or t
ttcagcatattttaggaactaatcagccttataaaaggtagcactgttaatctactgtttgtnttggtcttcatcacagctccttaagagatagagtgcaaacaaagcgagaattaaggtcattccatttaaatccttcagagaggaagacaagggctaagttattgctgaggactacagagaggagggctggaggaatccaggattnnnnnnnnnnnnnnnnnnccctcattgtttattatttgccagcctcagagcagcccccattcccatatttgtgaagggattaccctcccatcctctgagattaatgggaagcccagacaattccctggcccaccatgcaccctgcaccaaagaacattttccagaaaggtgggcctgggagtgcactcacttgggggatgaagagcgtgacacactcatcagcctgatgtgagaaaaaa

SEQ ID NO: 152811 - DNA, 536 bp, Homo Sapiens
aggtgaataaacaggcacttgtcctgcctttgtggagtttatagtctggttggatgagacagatattaaacaaaaaaaatccttactggaatgtaggggtcacagtctttgtctgttgcattcattgctgtatctctagcacccagtacagtacctgacatgtagtagatacttaataaatatttgtggaatgaatggatgaagtggagttacagagaaaaatagaaaagtacaaattgttgtcagtgttttgaaggaaaattatgatctttcccaaagttctgacttcattctaagacagggttagtatctccatacataattttacttgcttttgaaaatcaaatgagataatctatttagattgataatttatttagactggctataaactattaagtgctagcaaatatacattttaatctcattttccacctcttgtgatatagctatgtaggtgttgactttaatggatgtcaggggtaggtccctaattgcttcttgcttctatcataacagtaagtcttggattcaaa

SEQ ID NO: 152812 - DNA, 273 bp, Homo Sapiens
agatcacaaagcattttctatgtgtatgtgactatagtgtattatagatactgacgagtgttagagataagactggaaaaaattcaggtaccaaataatgaagggaatttggatcttatgctggagttttcacagaactattgaaggttgattggccaaataataaaattttctgtgtttcgaaactttctgtatagtaacaatgtaaagtcataatagggatagtttggagattaatgcttcatgtatcatactccatgtaacaattaatca

SEQ ID NO: 152813 - DNA, 574 bp, Homo Sapiens
gttcctagagtcctccaaatgtctttacattcactgccccctgggctgctcacaacctcagtggaagaggcaggaggaggattttcacatccatttcacaaaggccaacacggaggctcaacgaggcattgttgctggcccacatcatatgcccagtcaacagaacaacagcgttactaaccaggctccaaatcctacgtcccttccgtggggctgtggctcacggggaggtcatgaatcaggaccagggagggaggacagggcataaagcccagctctgctcactactgcactctgattttccccaagagccccaactcaggacagagaaaggtgacagccccctttccgctcatctctccacctgctgtccctcactcccactcagtaagcaccactccagggagagaaccccttgccccagacccagccagccgccatctaaggagccccagtggagcccccacgggctgggcacacgcctcatgttctgcagagaggccaccagacactcacatgccccaggatttacaggccctgacatcctggggcatgtgagtgtctggcggccgca

SEQ ID NO: 152814 - DNA, 723 bp, Homo Sapiens
tattgagatgtttattgaaattccaggtgtggggaacatcaagaataagagagtccctcccgtgaggggcttaggtctagtagaggaaggagatgcacacaaagctacaaagtcacatgagaagtgctctaactgaagtgagcacaggaaattggacctatttgtttgatcctgagatctggacagaaggcaatcctcctccttccttcagaggatacaatggagacccagagcaatctgctcagcaccagtaagctggaagccatgctgccttccacccaattctctgtggggatgctgtgctggtttcagtccctgggtcctgctcctagttcagcctctcttgcttgcttctcagatgtgtctggtggtagaagttgaggaagagaacgaggaggctgagggcttacaggagcacagatgtgttgaacccaacagggaaggggcactcagtgaggagactgtaggaagagggggcagcagtggccacaaactgaccctggctgcctgctacatatttgactccagcccacccatcacagggcatggtgccatggtggtagagatgcaggaaggtgggctgctctggcttcattcataaagtaaagaacacctggagaggaggaagagatggcatcaactctggaggtctcctttctccagacttctccaggggcctcaactaccccttagagtgggatatggtaattctacctgttttac

SEQ ID NO: 152815 - DNA, 402 bp, Homo Sapiens
tggataaaattctttgaagtgtaactaatgggtcaaaatgtatgtacacatttagtcattagtagacataaccaaactaatcctccaaaacaaaatacagcttttaagtgctcctctttgccaatccaagaagaaacaaacaaaaaagggtctagttgatttttaactttgcattcccttaataaaaggaccatttgttttgctttcatctgtgaattacatattcatgttttctgccatctttttctattgtgctgttgatctatttctattacacttgtcttataaatttgtcttaaaaataatgatgaggataatttactacatcttataaataacactctaaaacccattagttatcaaatactaaagacaaatcactttatctaccagttagttgtg

SEQ ID NO: 152816 - DNA, 532 bp, Homo Sapiens
ttttttgatagttgttttctttattatgattatgccagatgtgactgcctttgcttccaggaaagtccctaaaacataagctatgtgcaacaagggaagtgggttagggtgggaagctgagcgtgcaagtcagacaaagcctgatgtaggcagctcctatcagaggcatgtggcctttgtggctggggccctcaaaagacagccactgccagaaatctggagactgaattgtctgggtctccagaagagagtccaaccccaccacacatctgctcctgtccaaggtgctgaaatccaccccacataggctcctcctaatcatgtacagctgttgagtcacctgcaccctaccttctggtcctccattcaatgccacaaatatacactgagcatctactatatatagggagtggaagtaaaaaggatttagatatgtctccaacccaagttgctcacagccatacggaaggaattcaagcatacacacctgccttagggtaggtgaggacaaaggctaggggattcattttgc

SEQ ID NO: 152817 - DNA, 543 bp, Homo Sapiens
tttcattttatttgtaagttttattatcatacagaataaaacaacacaaatttatctcacagtctcaagtgtatcaggattgtgggtacaggttagctgggtcctctacttaggatttcatggttacatccgtttcttaaaaaatttgtcagaacctctcaaatcagacaggaaactagtcactataaatcaatagcaaaacatttaaaatgttgtgtaccatttagaaataagtaactaacaccattgaacacttatttgaaattcaatatggctaagccagctactgaataattcaaacatcagtgagttcaaggttaaagatgacgtgggccatcccaggctgtgaacgccatgaaagtccattctagtatcaactgctaattaaagtcagtagccaagaaattttcaaatgaaaagtctctcacaacataatttttgccaaaagatggatcagcttactcagaggatactataattagcaagttttacaatgctctctgatgcccaagatgaactaactacattcgcatttaccgttaa

SEQ ID NO: 152818 - DNA, 747 bp, Homo Sapiens
ctatattttccttggtcttagaaatatgaataatttagagctggcaatactcaccatcaggatataataaacggaggtttctttgtctgaaatccataaaatgtagtaatactctattgtacttttaaaaatcctatttttgcagttggcttcctctcagtgaattagttaggtagttttggtacatttggagggtcataaacatgtcatagaaagagtactggcattatgaaaacctggatgttagggacttcacaatttggtcattttgcagctgtacaaccttagaaatgtaagttctctgaatttcggtttcctctgctgtaaaatagagataggaatatccatctgatatatttcacaggtactactgtgagtattaaatgatattgtgtgtttgtgcactggaatgtgtaatataataaagttgttgattaatgctttaaaaatgtagcttgccctgtatattttttaaaaatcaaaatagaaatcattgggaaatgtaaatgtttatgaatcttacagctcaaatgcaaataatttacaaatgctttataataaaatcaaagatattcatggatttttttaagtaaaaaatctttgcagctaaatattcatcaacttaaacttattctttcttttataagaatgttcactatgtaacattataactctccaaaggagaaattctataattagttcagttctctgccttaaaagttttattataaggcagaagaatggaat

SEQ ID NO: 152819 - DNA, 271 bp, Homo Sapiens
ttttatgcagattgtggaatcatcattataatggagtcttatgcagttattaaaccatcacagcatgggtgtatgtgtaggcagggaataatctccttgacattttgttgaataaaagaatcagccttcagaaaactatgtatggtatgaagcatttttgttaattctgtgtgtgtgcttatgtgcttagcaaaatgtctagaaaaatagatgccaggctattgaagtggtcacccctggtagtgtgatggggtaggggagggggatgagg

SEQ ID NO: 152820 - DNA, 125 bp, Homo Sapiens
aatttgaggtagtttgtttgtatactgtttctccaaacacttaatatttcttacatcaaagcaacaaaattgtgttcagtgctgtacatttggtgtatggtaggaaataaaaattgataacgaaa

SEQ ID NO: 152821 - DNA, 544 bp, Homo Sapiens
  misc_feature (384)..(489): n is a, c, g, or t
atctattaaaccattgcctaatccatggtgacaaagatttacccctaagttctcctctaagagttttatagttttagctcttacttttgggttctgtggtcagttttttagttaatttttgtgtatgttaatgagctgggtgttcaacatcattcttttacatgtggctttccagttatcccaccaccgtttgttgaaaagactattatttctccattgaattgtctcaacacctttgttgaaaatcagttgaccatagacacaggttatttatgaactcttaattctgtgccactgattcgtatgtctatcattttgccagtaccacactgtcttgattactgttgctttgtagaaagttttgaagtcaagaagtgtatgttnnnnnnnnnnnnnnnnnnnnnnnnnnnnnnnnnnnnnnnnnnnnnnnnnnnnnnnnnnnnnnnnnnnnnnnnnnnnnnnnnnnnnnnnnnnnnnnnnnnnnnnnnntgcgactaagacactgcatttcagtctgggtaacactgagacccccctcgggccg

SEQ ID NO: 152822 - DNA, 435 bp, Homo Sapiens
cacccccccttgcttggtcttgtccttggtggctaagacttagctctgcaggggatgttaaagcacagttagtaggacgtggctctgcacagcccaaaaaccagcttactccttagccagggtgtgaggcctcgactatattcttcaaaatgtacttaggctctggttactgggatggccagtagatgtaatgcagatggttggagtttggggagggttaggaggcatcaagcaggacaaggtgctgctgagttcagagggcccacgttcaagggatggaggtggaacctggagaccgactcttaaaagcacagtccgtggttgggtgtggtggctcatgcctgtaagtaagtctcagccctttggaggccacagcagaaggattgcttgagcccaggtactcaaaccagcctgggcaacagagtgaggccctgt

SEQ ID NO: 152823 - DNA, 704 bp, Homo Sapiens
  misc_feature (74)..(118): n is a, c, g, or t
tttggagcttttaatttttttaatagacagggtcttgctatgtcgcccaggctgaccttaaactcttgttctgnnnnnnnnnnnnnnnnnnnnnnnnnnnnnnnnnnnnnnnnnnnnntactcacaggtgtgagctaccatgcctggtcctgactttttcattttggtatatttgcatatacatagtgagataccatggagatgggacccaagtctaaacacaaaattcatctatgtttcatacataccttacatagcctgaagataattttataccttttgtgcatgaaacaaagttttgactgcaacctgtcaaatgaggtaaagtgtggaattttccacctgtggcatcatgttggcattcaaagtttccaattttagagcatttcagattttggattctcattaaaggtgttcaacctgtactatatactatacatacattaaactgtcacatccttgtcatattgttacggaatactttctattacttttctattttaaagaggtcatgccagaagcagctacccttcgcgtggttaaatacaaaagactacatttattgtaacttcacatgagcactgtaaggtagtttaaggacacagaatactagttttgtcaagatagttcatgaagcacacctttactttgggcaagagttagttggcttcatttttataaattaagatttaaaacgtactgat

SEQ ID NO: 152824 - DNA, 527 bp, Homo Sapiens
cgtagcagaaaatactgactcatctgggctgcagtttcagctaatatagggtctttctccctcaggctacttgcacagccctgagaagctgggtatagacagctgctccccaaagctcagctacttcccgaagctcacttgccccaagcagactgccttgtcccaccatgcctgccctcgtgttcatgggtgctgagtgccaggtgctccagggctcccttagtcgctgatgggctccctgagtggagccatatttcctctttgcagggctggcacaggctgggggctaggaggtggtgctttgctcatgctgggctgtttccaacatatatgagcagaaagatatcaaaagaggagcacaggagtttgaagaccaccggttcccgacagtggaaccttcctctgctcactaaccttgggcctcctctacagaataagggatgattatggaacctacgtccttaagactatggcatgacatagaaccaaatgtgcagaatatattagagtgttgagtacatggtaga

SEQ ID NO: 152825 - DNA, 527 bp, Homo Sapiens
  misc_feature (426)..(440): n is a, c, g, or t
tttttagctcatcagcttttgttagtgttcatgtattttatgtgtggcccaagacaattcttccagtgtggcccagagaagccaaaaggttggacacccctcatttagacccttccgttttccttatccctcacattacatgtaatccaaacgttgttaggttttccttcaaaataccttgcatgaagatcctattctagtcctcttaggaattattacctcttctctgctataataatagaagtaataaaaattagacttatctagcaccttgcagtttacaaaatatttacacatattctatcatcttcataaagctctgtgaaatagttattctttatatgttctgttataaaaacattttattcatcttctttctaattacctcattcacttctgttttatacattggggccagattaatannnnnnnnnnnnnnnataactgacacataataattgtacatgcttatggggtagagtgtgatgtttcaatacatctgtacattatataataaaataagggta

SEQ ID NO: 152826 - DNA, 530 bp, Homo Sapiens
  misc_feature (246)..(288): n is a, c, g, or t
  misc_feature (323)..(370): n is a, c, g, or t
aattcggcacgaggcaaatcccaattttgccgctttctggtgatttgccattaactgtgcccttaccttgctgggcctcagttttttcatcagtcaagtgtagataataagattatctacctcaaacaagtgttatgaaaattcaacaaaatgatagtctttacgcttttagtacagagcctgacatacagtttgtgcaataattagaagttgttttggccaggtgcggtggctcacgcctgtggnnnnnnnnnnnnnnnnnnnnnnnnnnnnnnnnnnnnnnnnnnntgacatattctcacttaatagaattatagagaaannnnnnnnnnnnnnnnnnnnnnnnnnnnnnnnnnnnnnnnnnnnnnnntcatttttgcctttccgtttctgtctatgatgtaggcttctgaggagaaccaagaagcttggctttagtggtagaatgacagaacttagggatcccttgcaggctagaacaaagttctgacccttagaccaaatctttatgttaagagttttccagaatt

SEQ ID NO: 152827 - DNA, 482 bp, Homo Sapiens
  misc_feature (194)..(236): n is a, c, g, or t
  misc_feature (271)..(322): n is a, c, g, or t
aactgtgcccttaccttgctgggcctcagttttttcatcagtcaagtgtagataataagattatctacctcaaacaagtgttatgaaaattcaacaaaatgatagtctttacgcttttagtacagagcctgacatacagtttgtgcaataattagaagttgttttggccaggtgcggtggctcacgcctgtggnnnnnnnnnnnnnnnnnnnnnnnnnnnnnnnnnnnnnnnnnnntgacatattctcacttaatagaattatagagaaannnnnnnnnnnnnnnnnnnnnnnnnnnnnnnnnnnnnnnnnnnnnnnnnnnnttttgcctttccgtttctgtctatgatgtaggcttctgaggagaaccaagaagcttggctttagtggtagaatgacagaacttagggatcccttgcaggctagaacaaagttctgacccttagaccaaatctttatgttaagagttttccagaattcaaa

SEQ ID NO: 152828 - DNA, 422 bp, Homo Sapiens
aagaattcttcggagtcctcaataagtttttagagtttcagggggtcatgagactgaaagttgacaaccgccgtccttaaataaagacaactttacacccaccctagcaaacattaaaaacaaacaagattgcaaaggatcaagtcgacccaatagtaactcaactgcctgccaaaacacacctcaatgctctttgaactttaggacaaggaatattatcagcgataaagatggagatttcataatgatgaaagaattatgtcattaaaaatacataataatccttagcatatttgcatataattatacagcttccaaatacatgaagcaaacctgacagaactaaaaagagaaacaaagaactataattatatttggagatttcgaacaatcatctctcacttgttgataggacaggagac

SEQ ID NO: 152829 - DNA, 512 bp, Homo Sapiens
  misc_feature (100)..(108): n is a, c, g, or t
taaccgtttaaattttttcctaaagatttaacatgatttttccctcctatgtaaagtttactggagagacttgaattacttaaattcatgttaatatgannnnnnnnnaatccaggtcacattttaacaaagtttattatgaaacaaatgaaatttgaactctaaaatggtactccttggcttcctcaagtcacaatgaactttatattttctttgtccttaaggactaagatagttgttttatttcagccgaatcacagagataaccactcctgcaggcccccacagctggcccaaaggggctgtctttctgacctggctgtgttagcactgattgagaaatgcaggctcccaaattttaaattgcctttattaaaaacacaaactacagaaaatgggttaagagtatacgcatttcatcaaacacatataggggaaaaaatccttcaatttagagttaaataactcagctttgtatagtagagttagcgctccaacatcagcctcgtgcc

SEQ ID NO: 152830 - DNA, 427 bp, Homo Sapiens
  misc_feature (322)..(322): n is a, c, g, or t
tttgattatttgttgatgacatttactctgattataggtgtaatctatggcaattccaaaagtaccttgtatgtcccatctccagttcatcctgcttttaccctgagtccagcaacctctattcattaggattctgaacaaaataagcatgaaaggggaaatccaaaataatattcacaagtggcaaatcataactgaacatagttttaaacttgacaatttaaaacttttgcctcttttcagcagccagaagaagtctggttattttaagtcaaaatctctgccccaaaacctccttttcctgcactccatgaacacctcntctcccttttccccaaaggcaacattttggcttggcaagcaatacacatcaatgaacccttccatttaaatgtcccacaaagattgcatccgatcacagacaaac

SEQ ID NO: 152831 - DNA, 504 bp, Homo Sapiens
tcctcagtagctatataataattttagctagcttgccatctggggacccttcctaagtggtagataagaaacttaaaataggattgtactttaccatcatatttccccacccagcactgttactggcataaatatgtgggcaagtgactggtgagagagtgatgcctttggcagggtatctgatggtgagatcgactgagaactgagtggaagagaaggcgaagtatcagattgccaaaagggcttttattcttagctcagcccttcacgtatcctgcaaagagctgctcagcaaaaggtgcttattgaattacacctcataacaggcagaatttgaatgctgttcatcacaggagctatggagtgcatagttttatagagagtatctccccgcaggcaagatacatagaacaggtgcagaattacagcatatactcatttcgcctcttgttaaataaaagcaaagacagtctcatgcgatcctgtgtgctgagtagaatatcc

SEQ ID NO: 152832 - DNA, 275 bp, Homo Sapiens
tacctgaattttaaatagagttattgtaagtcttatgaaatgagattttgctgcactctgacataagataataaaagacagagcaggaattcattattatgagctgcttgatcagttttaaaccactccatttgatgaaacaagtgaggtccttccctcctgaccaggctgtggaatgctgtcttccccaacccccaccccctgcaaaagagcagaacaataaggcaattgctcattttactttgtttttatttcaatgtaacatgcagtaaaaa

SEQ ID NO: 152833 - DNA, 883 bp, Homo Sapiens
tttcagagacttgacacaatagtactttatttttcacttatccaactgcctcgtacaaatacaagtgggagttgcaaatgacagaggtttggctctgcacagttttttcagaaatccaggcttctggtgatttactctgtgtaacacatagcttcccaagtcacatttaatgtcaacatgaaaggctgcacatgggagggttttatgagccaggtatagaaattgcacatgtcacttccactcacattggaagtaatggccagaatttaataatacccaactcaaagaaggctggaaaattgcctggctatgtgttcaggacagaaggaatcaggtttgatgaaaaataaccggtgtcaagcataagcactattatgttctaggcactttgctgggggattcaatgatgagcaaagagcagtcaatgatgaacagagatgacattcaataataaacagtgccctcatgggcttacagtccagcagcaaatacaagtattaaataggcatttccaaatatgatatccattacaaaaggggatgaaagcatgttataggaatccatatcagggaacctgaggattgaaaaagaaaatgaaacttaccacatatatgatcacatgttttagtatttgtaatttgagtttcttggttaacactgttgtcatatcctgttgaagatgaaacctattaacccttggtaatagcccctcagaagcaaaaatgcctgattcccatgcctaagtcagattgctttcctggtctcaaagtccctgttccatactgcacaaagccccaaataaagcatggtcctgaagattccctcactttccagctacgagtcacactcaaaaggccaatgttatcttcaagacctgccattc

SEQ ID NO: 152834 - DNA, 339 bp, Homo Sapiens
gcggccgccatgcctggcgtgtcacagctgcctctgccgccggcgctgggcaggcagcaggccatggcgcagtcgctgtcccagtgcagcctggcggccggtccgccgcccaactccatgggcctgtccaacagcctggcgggttccaacggcgcggggctgcagtcgcacctctaccagcccgccttccccggcatggtgcccgcctccctccccggccccagcaacgtctccggttcgccccagctctgcagctccccggacagcagcgacgtgtggcggggcaccagcatcgcctccctccgccgcaaggcgctagagcacacagtctctatgagc

SEQ ID NO: 152835 - DNA, 197 bp, Homo Sapiens
gcctttatgaatgttaaatcagaaattctggattttcaactgtgctctttaataggtgaaaaaagaaaccccaaaatgtataaagattttatctccagatgtcttttataccttcttggaaagatgaggaatattttggccactgcagtaagataactaaagaatgatgaaatagtgatttatttcactattgcatc

SEQ ID NO: 152836 - DNA, 633 bp, Homo Sapiens
tttcaaaatcgccatttttatgattatattaaaatgatcagaaattcaagaaataaattctttgtgcattcagagtgaataattactaagaatatggttctggtccttactctgggtggtcacagtctggctccatcagtgaatatacccatgtaatttcttttcctacttgatatacagtcttcactgaaatgtcacttgatggtgagtcagcaattctctcttcatgttcataacatttatatatacttagttacagataaatatataaaaagactataaaatagttgctccggtgctttcccctattaaagtactgaatcagattagcaccagctgcctccttgttttggctcatgtatatctattggtcgcatttaaaagcattattcgacagagctgtttgacagaggcaccttgtgtagctcagctgctagttttcatccccagaaggttaagccatttctatgctaaaggtcatcacatttttcactcttattattctgcacttctatcaactttctatttgcttcttttgactatgccctttagggggtactggctctggagtaagagagatctggaattgaatcacaaagttctgccttgtactggctgtgtggcattgaatta

SEQ ID NO: 152837 - DNA, 460 bp, Homo Sapiens
tacaaaatgttgtttagtgtgataatgtgctgcaaaaaatatccaacagcactacacataagtacagagtattcacaatagtaatatgttactggaaaggccacttccgaaaagtttacattcacttggaaggctgccttaaagtatatctcttatctatgaccaaatatctggggtacttttagaagttttcagtatacccccttagagaatagcttatgagttatttcacacattcctgagcacatggctgtgtttagaatgatctagtgtaattcatacatgagctgacatacgttgatactttgacgagtaaattgtacagtcaaatgttcattgatttcatgttatttcaaagcattttcttattaaaaatatatctttagttaatcctattttgctatgctttctagtaaagtaaattcactgtagctaatgatgttacagacttacgtatacc

SEQ ID NO: 152838 - DNA, 128 bp, Homo Sapiens
tttaaaattcaatgttttttatttctcatctttataagaacaaatttatgaacattgttttggggacagtgactactagaatagaataacaaaaggtaagtatccagaatacttaaggaatttacaaa

SEQ ID NO: 152839 - DNA, 500 bp, Homo Sapiens
agggaaaggagttttatgttgcgtgagaggcccatcctgtgtaattggagcagggcacacttgcttcctgttgagttaactcagaggttaagtccaacgggccacatgcagacttcactgtaggcaggttgctctcctgctttgattcctgttttgtgtgtaaaattggcataaacttcttgattgcagtgaaatcacaaaattctctatcggggtggtcaacctgagaacatttatttgaacctcttagccacatttccagcagggcaaaccaactgatgccctggaagagtcttccgcaccctctccaggtgcactcggcccagtcctgccgccgtgtccaggcgcccctcacccccacacctgctgcatggctggccacaccactcagtgcatggcggtggatgggccgccaacccaaacccgcgcctttccttgttccactgcagactcagatacagatgcgaaaaattccttcttccaccgcccttctcgttctg

SEQ ID NO: 152840 - DNA, 610 bp, Homo Sapiens
tttgaaagtatgacaaattctagatttgtggggtcaaaagtcacaacatttaaaagaagatacagcacatgtctgtgtggaatatctcacgacattggcctaaagccaaacacagggggcatagttttctggacctggagttcagtgacagggagtgtgagtatagattttgtgaagtcacaaaaggggctggtttcgtttggatggagtaacatgcaagtgtgagggaaggagtgactcaggcaaggcttttcatagagaaagagtctctgccagcttgtcctctctcccatctctgctccttacctcccctgctctctccaccccgaaaccaactaaatagccagacaagggtcagatgggtattacgtgagataaggcatgtggcaggacagaggccagtgtacttgcatgactcttaaaggcctcttttgcctcaccctggtcccaactccaatatgtgacaatgcattggaagttgtaaggtactaatgagatagcccatccttccaagagctgttcctgttagatcccatccattccaacctaatttccaactgcatcctggaacatactgttacttcgatgggagtactgaggccatctttct

SEQ ID NO: 152841 - DNA, 546 bp, Homo Sapiens
  misc_feature (77)..(96): n is a, c, g, or t
gatctcaactttattaaacagtatacaaaaaaagtgagcaatacaacaaaatcattaattatctgtggatgtaaaannnnnnnnnnnnnnnnnnnngagggtttccttttacattgagtaaaaaattaaatactgtaagttgaggtttttcatactgcatagtatatgcaaaattaatctagacaatctgttttccctctctgttaacctttacttctgggtcctccctgatgactcccaagttgataaggaaacattcaatattttcatggataaattataatcaccacatttcaagcagatggtaaatgagtctgtttcctattagtgaataagttttaaaaattgtaaaaagtatatccctaagtctacatgtagaaaaagcagaaattcaggttgctgtcatgacttcagacagtactagtgatgaccctgcccactcaaacatatttgcaactattggaacagattcttgaaattcctccagtggcgatgtattttcttgatatatcttttaaaggagctaatacatttaatcctcgtgcc

SEQ ID NO: 152842 - DNA, 557 bp, Homo Sapiens
gtaagcaatgaagtctgagctctttgtacagttttcctatcattctgtacatgatttgagttaggtcttccaaaactggtggggagcaaacgccgcacatgtacatgtataatatttttaataataatctacatttgtaagttaaggaggtttacatcaaaatccaattaattttgaaatttaatgaaatgcagtaacttgactaccttggaattttgggcctttttcctgtaaatgtcttttttggtctacattaatatttttggttcccattacaaaagtcagcattaaaaaaataagcagacttttgtttgtttctctacatttgtttttgaaaccctaaacctgagtgttttaagtaaagttcactaactcattcatttattatctgacagttacacgttgacagcatcctcattgaatcctttatgttaaaagcatagcagaaagtgctcccattacttatttggccaaactactgtttggtccatgcaagagaaacatggaagtgtcttcatgtatgttatttccttgagggtataaagttcagaaggaaa

SEQ ID NO: 152843 - DNA, 511 bp, Homo Sapiens
gagacctgatgatagtaggattttgaatgttgactacagggaatgtttcttagtctattgcaaatcacctatttcaacaagttgttctaccaggactagcttataccgtagttaatggtgacatagaggttcaccttcctgccattagtcaagaagaaactagagtcctgcatgcacaatcagtatatatctagggattagggcagaatgaaacggaatgtgactcaaactgagattcttcacttaaaagtttgagatacctagttttttaaacaggatgaacttcagttataaatgcaaaggagaaaatacaagtgttctttgtagctcagaagtattgcacatatactttttaccatttcataatgaaatcatggggatttcttacttgaagttactcagtttcagtctctctttgtatactctccattttcttgtgggggaattatctccttatccccaggcttggtaagaaggttattgctgttggtattttcccagagttggaaga

SEQ ID NO: 152844 - DNA, 353 bp, Homo Sapiens
gtacaggccgtagacctatcctctacctacattgactccccaggttttcttagtccagttgtttaaactaccctgtacctgctgataactcctctaaattctaagagtggtagatgtaattgcctgttattattgtctgagtataataataggaaccccacatttaacataccccaaacctgagattcctctttcctgcaaatcctgaccttactctgtggaagctagtttccaagatgtcctcaatgatccccacttcctagtattcacacccttatgtagtcctctcccacaatgagtaaggctgacctgtgtaagcactagtatattgcagaaatgatggtgtacaactt

SEQ ID NO: 152845 - DNA, 435 bp, Homo Sapiens
tttactatttttactttgtcaagtcatttaaattcatcaataaatgggaataggaataatacttatttcacagagttatgagaagtaaatgaagtcacctatgtgaagcacttagcatgaagcagagactcaataagagctagctatttttataaaaacttatagaatataacaaacatgaccacatcttttattgagcatattctatatgccctgtgctacgtgaattgcatatattatctcttataaacctataacaaatgtaggagatatgtatgagtacctcattttatagatgaggaaactcagttcctgagacagtagcagcttccagaaggactaacagccaaaatttagtggaaaggatttaagctgagacttaagatgtctccaagcatattgtctccattttgacatctccaaatgcgaatgcaa

SEQ ID NO: 152846 - DNA, 480 bp, Homo Sapiens
actcccaatacccctgacatgggctgagtcaacgtggtcatgaacatgtgacaggaggcagcagaagttggagagaagagtgaggcacgtttgaaaaaggctgaaaaatgtttctgtccaggcaagggtgtgtgctgaatgactcaaggattttttggtgcattgaatgaacagcgggacattggacacctgctgatccatcaccccgggcccgggcaggcccgtggatgaagagagatggagaagaccaggcatgagactgtggagaagccacaccaccagaaacccctgccccatgcgccgtccagcccacacctgtggatgcacgggggattgcaggcagggctcccaccgtggactcaggaacaggcagggaagctgctgcctcaccaggcgaagggctcaggagggggaggcggagaggcccgtctagcccctgcggctgtcaccgtggtgcctcctcactggccagtgcggccg

SEQ ID NO: 152847 - DNA, 551 bp, Homo Sapiens
gaagcagtttattaccttaaagcatttagcaaacctaatgtctgacctaatttcaaccaaatgtctttattttaccaataatcttcaaaactcttgatttcccaaagcctactaaagtcatgctgtcacaggccattagacagcatgagcagggcaggaaagggctcttctcccacccaccaggaatgttgggtgatggctcagcagttatcacattgcctctctaaaagtcatacattggcacctagggtcagggagacgccatttcctgatggtccacacctattgcactaaagtgttaattgaatgcagatgccagggagatgcaacttcccaggcaaatgcattaagagacaaaacggcagagtatgacctttccgtggcactccatgggaaaagggaagaaagccttgggtgggcatgtgtacaacttcctaaacacactgcatgtgctcacctcccaaggatagggagggcactgtgcatgcgggcagctcaccctaaggaaagaatcatgggaaaagagccagcctataaagtcctaggatcaa

SEQ ID NO: 152848 - DNA, 343 bp, Homo Sapiens
  misc_feature (281)..(281): n is a, c, g, or t
  misc_feature (301)..(301): n is a, c, g, or t
caatctcttactcttgaactactttatcactttcagacactatttacatatttatgactacttcctgaatccaggactcaaaagcttcttgaaggcatgagctttatacttcacctctttgtatactcagtaagtatctagcacagggctatgtgctcagaattctctgtaattgttcaatgattatgtttctcaaatgaaaaggctttattgtccattctgttctagggcctcttcctggagtgctttagtttgcttagtctttcccaccctacagtagnttgttccccttcccttccgncccttccccttgcttctacttgcttcctgagacctgctatta

SEQ ID NO: 152849 - DNA, 485 bp, Homo Sapiens
agagcagttttaggttcacagcaaaattgagaggaagatacagagatttcctatgtacccacttccttcataaagtcatagcctcctgaattatccacatcccccaccagagtggtacattcgttacaatgatgaacccacactgacacatcattgtcatccaaagtttacattagggttcactctttatgtgcattctgtgggtttggacaaatacataatgagatgtatccactattagaccatacagagtagtttcactgccctgaaaatcctctgtgctctgcctgttcatccctccttccccctaacctcaggtaaccactgatcttttcgacttctccatagtttagccttttccagaatgtcatatggtatgtaactttttcatattagcttcttttgcttagtaatacggatttaatatttctccatgtcttttcatggtgcggtggctcatttgtttttaacattgaataatattc

SEQ ID NO: 152850 - DNA, 722 bp, Homo Sapiens
  misc_feature (76)..(87): n is a, c, g, or t
aaaaaaagagtgtctattctttaatgagcatcccttctttaaaaaaacctaattgccattattcaccacatatacnnnnnnnnnnnngtatcctgcctcttctatttaattttctgtcatcaacattttcccttgttccatgaatcttcataacctcacttgctgcgttgtgccttgttgagtggctatggcgtcattcacagaaccattctgttattcttatgtataaccaccttttaaaaatattatgaataatgccacaactaactgcttaaaacaccctttttttcattcttaagaattatgttcttccacccagaaattatcattgcttcactacagatcagtttcccctgctagactgtgagccccataagggcaaggagcttattgaattggcctttgtatctctgatgcccaacatgttgtagactataaataaatgatgaatgagtggatggaagaatggaggaaggaacgagtgagtgagtgtttggctgatggataagagggtggaaggataggcggaaggatggattggtgaatgaatgaatgaatttcctttggttaagtctcttgaaagaaaggctatggatctttgtatggatgttgaataatttcagtaagcttacagcattttacaatgttcagcaatgtatgaccacttaattaagatatggctagtttgtctctgttataaagtacttttgcattactttaaa

SEQ ID NO: 152851 - DNA, 658 bp, Homo Sapiens
tgcagaatataagtagccccaaattcagcagcaaaatattacaacataacaagtaaatacagtttcaatgtgctctacgcacgagagaatacataccgcgcaagccatgataatttaatcacatacgacacgagacatagctgaaatccagtccacttaaatagctttgtgaccaagaatgttaaatactgtgctaaatgccattttaaacataaaatctcttaaattttttgtgcttaaatttcatttttctgttcaactgtttcttattgtcaatactgccactgtaactgatattacaacagatcacaactttcacggacacatcaacatgaagacatttacttatgagcaaataagtcacttgtcattagttcacagtgtgggaaagtggtgtacactcggtcttgagaagggctttcaggtaatcaccaagtccttcacagatatttcctgatatcagatgtagtgcgagatttaaaagaatggagagcaacacatcacatgttggaagaaaaaaaataaactttttgattcttcatgggtatcgcctaagtgaccttcgtcttctgttgtagaaatgtctgagcccatgttgtcgtgaaaaattcatcatgtaattttgtttgcgagtgcttactaggacgacctccacatg

SEQ ID NO: 152852 - DNA, 392 bp, Homo Sapiens
gaaatccatcactccaaaataaaacctttactatgtctaactgtctaacatgatcaggcttctacctgccctggcaatgtcatcttctggaactctctttattgctctttattctttcaaccacacaggacttctttctgttgatacagcacaacaagctcttttataacttgggcctttgcacttgctatttcctttaccgcattgttctatatcccatacttcctaggtcttttaattcctaactcatccttccattctcaccttgcaagttccctcctaagaggcctttcaggaccatttctgtgatgatctgtcatagcactctttatttcctttgtatggcttacctcactctgcaatggcttcagtagttgcttgttagcctccct

SEQ ID NO: 152853 - DNA, 549 bp, Homo Sapiens
tttttcattatataaaataatgttattatttcaccattatcatcgtttcttacatttagatccatacaggatttcttacgtttttcttttacgttgttggggtattaccaagaaaactgaaaactgcggtagattactcactttgtttgaatctctctcttcagtacaatctacaccttgatctaccatcgccggaaaattgtctctatagaagttagtttcagaatcattcatccataaatctttttcttcagactccagcaaatgcttctagttccgattttcttacattgtactttaatgtcattttagtgcttatttcatatgcagttgctttttggaaaccattttctcctaaaactttatgcaatattttaaatccttttggattctttaaaacgttttctaattgtaataactggacagctcaaatacaaaattaactctattttctgccaaagaccacgatttgctctttgaatgctgcctattatttcacttaactcttttaacgcatctcatgtgttaacctgtctacaataagtcaaa

SEQ ID NO: 152854 - DNA, 556 bp, Homo Sapiens
tttaagtagtactccagtttatcagctcattttacacacatatttaggcaacagaatgtataaatctaccgcaatacagaggacacactatccagaaaagaatgaacaaagaacaggctgttgcaaaaatatttagtccctttacacatatagtcaaacttcattaatgcaaaaaaatgtagtggttattaaatgtctgaaagaatcagtatgtatgattgagattgttaatctctgagtataacacatattgttcatctcagagttgttttgttttaaagccgtggtagatgcttctctttaaatgtgcattttttagaaactggccaaaccttcaaaagaaaagtttaacacctcacggttaatatatgtactaacagcgatgaacgcccaacaagttctggcagcctcatccagcacacaagccagagacttccaaagtaaggtggcgcacacgtggccagggcccttggctggtggcccttcatggggcagggcaagctacacagaactgggaccaacagcactcgcagcatcactagggaggatttcagca

SEQ ID NO: 152855 - DNA, 566 bp, Homo Sapiens
acatgtttaattaaaactgtcttttaatttcattttaaagctaaagacatttatttatttttctcttacccattgcttttactgattaggtatgaatttcagccctttatttccttctaattttggagatttttctcataatatctctacacccagtgaacagcagcaacccttagcccagaattcttcaggaaaaacagaatatatggcttttccaaaaccttttgaaagcagttcctctattggagcagagaaaccaaggaataaaaaactgcctgaagaggaggtggaaagcagtaggacaccatggttatatgaacaagaaggtgaagtagagaaaccatttatcaagactggattttcagtgtctgtagaaaaatctacaagtagtaaccgcaaaaatcaattagatacaaacggaagaagacgccagtttgatgaagaatcactggaaagctttagcagtatgcctgatccagtagatccaacaacagtgactaaaacattcaagacaagaaaagcgtcgtgcacagtacaactgcggtgggggtacgagctgatgtcaa

SEQ ID NO: 152856 - DNA, 424 bp, Homo Sapiens
ggtgcaggttttgcaaaaacaaaccattgatttggaaatcataaatatattctaaattttaatatagttacttatgttaaacataatgtgttaaagttttagcatattctttttgactaatcattagttacttatgttaaacataatatgttacatttttgacatattcttttgactaattaatcatttcctttttaaactcggagaggcaatggggggtacagagtgagacaggaaggcagcctctgtaacaacctgaggactcatggttggggaaagatgtcatctacttttagtcaagagataaatgttttacctgctaatagggaaacccacccaaaagcacagagaaaagtctggtcaaaacattgcattgcatctaataaaaactaattaactggtttaaaagcaaaagttggcggcc

SEQ ID NO: 152857 - DNA, 633 bp, Homo Sapiens
ctcttcatgccagtcgaagatcactgtgagttgtgctgggccaatgcaagtactcatctcagagcgtcagcatataccactaccgggaccccaaacaaagattgtatggagaaagcccgcccgagctcttccccgcttgacgggtgcagcggacttgctccagcctgggtgaggaggccccgctgaagaactcgcctcctgggacccagcttcagccatcgggccaggctgcaggaagaagacaaaggcagcgtgaggaaaccttggctttgaccccttctcgtgttgtcatctttggcttcgctcaccacccgggcttaccagatggaactcttctgtaaagcagcttggcccctccagccagtcccattcgggaaagatgaaaccggaggccgggctcacggtggtggtggagttcttggatgactcagccctgggacctgcacagggacctgtgacttgtgttcatcgggggccggtgtcacttccagttttgatccaggctctttcactgtaaaattatttattggattcctttggagtaatgggaacattctaatgttttatgtaggaaaatgccttgccattctagttgaatatgttcaaggaaattatttttgttgttgttctgtg

SEQ ID NO: 152858 - DNA, 549 bp, Homo Sapiens
taagtgaccatttaggttttggtgcttatgtagaagtaagaattaacactttatatcatatatgagctactacattattacatgtatagcctcaaaggtagaagaatgatcttgtattctcatttatgcagaaatatacaattgagaatgacttgtcccctgttgaccttccataccactgaaagaccagtgtatttctccctcctctccagcagcacggagctgctaatagctctccattaatgcatgtttgctttatttcttacccacgtgcttttgttcctgctattctttctgcctccccttcctccaccctaagtagcccttttctgggtccccatgctcatgtgcgcatatctccatcattgtacagaatacagtgtagtagagattttatctctgtttattgccttagtttgtgagctctagcggacctctgagtagatgatgaggtcaggattatatcatattcatttttgtcaccctagcaccctgaactgccaggaggtgctaaactaaaggtcattggtttttttccataatgttaaa

SEQ ID NO: 152859 - DNA, 689 bp, Homo Sapiens
tctcagaaatagacgtggccactaagtaacaaaatgacataattctaacctatggaaggagagagaggctgagagctagccaggaatgatagattgttgctgtaaacatgacaggaatttcagattctcccctgaaatgtgagtacaataattggctggaaaaccaaatagatgggctccttttagttgtatctcatagccttaaagctgtgctccctaggaaataacagaaatcactaagtgtgttgggggtgtgtataaatatatacataataacaaaaaatgtaagatctactttagcaatcatttgacaagaagcaagacttttgtttttggcaaaaagaatatatatgtatgtaattttaaatacccaaagcacaaacatgattagtcagaatttgagggtagataacttggctggacatagatagcaccaaatactaacacagatagactatcccagaaatgcctctgaatgtattttttctattgagaaacaagtttctgctgccacatacgtttttaaaatgtcctgcatgaaaacaaaagaaaacttcagatagtaataaaatactttatctgtgagctttgctactgactcctctaaatggtcattatgttttctttgcctagaacccactccctgtcttttcacatcattcttctcagaagcttctggaggtaacagg

SEQ ID NO: 152860 - DNA, 537 bp, Homo Sapiens
ataaaaggaataattttttaaatgctagggtagaataaaggattcaaagaagaattaaaggaagagagaggaaaagagaaagagaaggaatcataaatgttctgagatattaattgaagataaactacttcttgtagctttccattcatctttagatagagggcaccagaataagaaatgcttaacagtttccccgtgtttaatttttcacagaacatatttaaggggactacactaggtactataaggaatacaaggaataaaagaaacaggcaactgcttggctttttgactacaagacctgaaaaccattttgactacatacctgaaaagttaagtgacgctgcaagcagtatgtgattaagggctaaaccaaaaaagtaaaggaaagtgtaggtgtgctagtttctcattttacaatgtaaagttctgtaaatactgcctaatattaaagggtcaatgagcaaggccagaccaagggtctaggtcaggttcatgaatgaatggaatgatgattcatgcttgattcaatgtagt

SEQ ID NO: 152861 - DNA, 779 bp, Homo Sapiens
tttgcaattggcactgttattttattagtacgagtatactgaaacaataaacttgtactggtatacagacaatttatttaaaacaattttgttcaaattttgaatcaaacattgttttattataataatgaaataatttctacctagaaaacctgcaagcaccatcaaagaaagggaccataaaattcaataaacagactcgagtgtatcctacaaatagacacaccacgattagaaaatagaatatgaattcttccattttttaatatttgtttaaaaaagctagtgcaagtacaatattttacactggaattacagagagtatgcacgcatatggaaaaaagttctcctgtcacaataaaagctcttaactattatgtatgcacttaaaattttcttttcaataaggtgcaaaacatcattccttccctagttctcctctgtactggccatgtcagtctggtagtgccctcaacccaagttctggtgtctgttttcccttggcctgtgggaggcatatggtgggtaatgatctgatattaaaacatccagtagtacgagtctcagagatggctctggagccaggactccactggctggaaatgaagactgtctaatctgaaggtcaccacaaatactgacaggactatcttgaaacctcctttcggctgacactaatttgggtttagagttgagcagttcaggctggggagatgaggaaaccccgccaaaaagggcagtattcacagaactgaatgcacaggtatcaagttcaaatg

SEQ ID NO: 152862 - DNA, 472 bp, Homo Sapiens
tggggtcatgggcacctcctacctcattctcccgagtagctggaagtacaggcctgtgacattggactgtgctaattttttagttttatatattattattactttgtagagatggagtctcactttgttgcccagccgggtgtccaagttctggcctcaagttttccttctgtctacactcccaaagtactcaaattacaggcatgagtcactgtgcacaggaggtaaggaccccacatcaggacctcaggtggttttgaaacacaaatacgtaagatccacaagcaggactattggctagagacagtggggtcacctgaagaaattttctttgacctgaatagcaacttctcacccaggtcactgggatcccggactatggcactgttccaggcaggcctggttatcctgcttgaggcagcaatcctcttgagcctagtgaaatgcaactggctgtacctcagtgatgtcg

SEQ ID NO: 152863 - DNA, 454 bp, Homo Sapiens
ttttacttggtgttgggatttgttgtgaggtttgctgacaccttgaccatttttcactggctggaaatgaaaggaacttcccacttgctctttgaaggcaattccattctctccagggtccttatttccttcccatattctctcacactcccaaacttctgaagaagggagcaaactttggccacgaggaaggagtggagctgcctctgtacttgtcactgcacctgcactgttgaatccacctttcctgggtcacgccgctgtgctgggtggtcacagcctaggaccctgtagagccgcagcctccatgtgaactggattcaggtctggtgctgtgtcctcagttcagtggcacacttgcagctgaacctcttggggctggtgggcaccaatggtcagaagcaattctacccaaagatgctggtgctaccaactaactcctcaaggtagataa

SEQ ID NO: 152864 - DNA, 523 bp, Homo Sapiens
tggcagttctggtgatttctttattctttataaacacctttttctacagtacaattcagagaataaatagaggcacacggctataacttccaccacaatctgctgttgaagagacattcaatgtgaggctagggagctagaggtgggggacgtatttgggtaccagggtaacgggaggcctacgtaataaactgcagagatcccatcagtaaggtctgattgcggcctgacggtcaaggctcatgatagaagagctacagtgagccaaatgctcctttagttccccacagtcctagagtaggtccaattctaccaaaaccccaggggttcgggtgagtctgatttattggtccactgggaagaaactgtgtcagcccaagccatccgtatgaattcagttcactccatggtagtgcctgaagtggcctaaatattctacccttttccctggagttagtcacaaatacaagtaataagattactgtttacatgagtttttttcttgattgtcccaaaaagggat

SEQ ID NO: 152865 - DNA, 633 bp, Homo Sapiens
  misc_feature (61)..(78): n is a, c, g, or t
gtgccaagctaaaattaaccctcaactaaagggaataagcttgcggcctcatacgcggtcnnnnnnnnnnnnnnnnnnggaataatctaaagctattatttccaaaactttgttaccattttatagcatgatccacccatcatctgaaaaacaatactttttattctttgaatagcaagaatagtaattttaaaacagtacaaaatgtcttttgacatacactagaaaagtaaaacataacatttttggaaactctcatggctgttagggtaaaaatcatgggtcagggaggagggtggttaagagagttgaactccatgaattaccagtggagttcatggatatttcagacagccttcaaattgtgatggagtgataaacagtatgggactacacagtgatgaaacccggacatgaatccttttgacggttatcttttgacaaaaaacttctcaataagagaccattttccatctgtagaagttataattcctgcccactgcacagaaaatagtaacacacttaatctataaagtgctatatacatgttagatatttgttaggcgaaattaagcgaaatcaaaatttttgggttgatttgtttagtatggggggatgatatgtatcgtactg

SEQ ID NO: 152866 - DNA, 571 bp, Homo Sapiens
  misc_feature (531)..(531): n is a, c, g, or t
ttttttaagtatagatggtaatttatttatttaaagatgtaaaaactgtttcaaacaatttgaacctttaaacagaccaggttttagcactcaactgaaatccaatactttctccattcattggcctgatctaatcagacacagtgtagtagtttcctattgctgctgtaacaaattgccacaaacttagtggcctcaaacaacacacattgattatcctgccgttctaagatgggtcagcaaggccgtgctccttctgaaggctccaggaaagaacccatggacttgccttttccagcttctagaggccacctgcatcccactgccgcctgcttcccttggcacagctctttcgtctgcctcagaccttcctgcctccctcttgaaaggatctttgtggttacattaaactcacctgggtaatccaggaatccctccccatcacaaggttcttaatcacagctgccgaatccccttttgccacggaaggtaacatattctcagttccggggattaggatgtgggcctctntgtgggccactattctgtataccccagatagtgattcctg

SEQ ID NO: 152867 - DNA, 445 bp, Homo Sapiens
tttaatccagggtttttattttaaagacagcagaactgaatgtaatggccaggctcaagttatcagacagatagaatacctggctttttcatgtaagtgtgatcactggtgaattgtttaacttctgttaactcaagcttttccccatgtacagcagagacagtaatgattgtggtgatgctgtggaaattacattaaggaaagtatgaaacattcagcacagctcccagagtgtccgtattgctatcaaaagccagctccttctctccccacactgccttcaggacggcagagccaaggagagagcccctctcagcatgcgtgttcttctccatggtggattttaattcactttggcgtatacttacagttgatattctcctacttggtgttctgttttactttgttttttcttttggagctatttactcttctcaatcttcct

SEQ ID NO: 152868 - DNA, 141 bp, Homo Sapiens
tttttaactatttaattcactcctttattctgggatgtatattacagataacacaactcacaaatataccatcagacattgaaaactaaggccattctgtgagttatttttaaaacttggtgttttgcacataatgatctt

SEQ ID NO: 152869 - DNA, 748 bp, Homo Sapiens
tttacagattttttttaatgggaagcgcgtcagtaagtgaaaacttgagttcaagttacgagtgaaggaatggaaaaaacaaaatattgggattctaaagattacagatttcaagaggcttaatgtaacagaaaacaacaatttttcattttattcaacctcaatttttatatgcaaggtaattccaaacttctgttgggtcagtaagtgttaagtattaaaactagtaccaagtcttgagttgcaaaaatatatactctcagacagtgcaaaagatccattttgaaggtaatgaaaattgtacataatttctgacaaattgtttcatttagcattttcacaataaattcacactagaattctgcataggtcagattaaccctgaaatgttgaaagactggtacaataactataatttgtaaatggttacatcaggtagaagggagttaggttgttactgtaccatatggaagtaattttactgtgtcaactcatttagtcatctgcataattactgtaaacacacacacaaccaatggctttttaaaccatgcagagagttaaggcaaacttactgttcctaagggatatttttaataaaaggcatgataaatgtcaaagtgaggcatgtgagatcatgattttcttaaacctactggcaacaagcttaataaatttacagttttaagacttaattgattcaacctaaaaacacagtatttacaaatgcacatttttactcacaagc

SEQ ID NO: 152870 - DNA, 500 bp, Homo Sapiens
cagtctcattcatgagagcctgagtcctggaggccctggcaggagttgggccctgcctgtctgcctccaggcctcagtttggagcggtcctcaggtttctgggtgcttcacttcatttgtacttggccgaagacagtttcctgtttctaagaaaagactgcttggatgtcttttgagggcctttggacagcaaatcctgctggcctgggaggggccgaggggcagcaccagggggaagggaagccaccagggagggcttgttctcattaaccccttccagcccgaaggtgtcctggaactcacagagtgaggcgattgcaaacgtttgtcagattggatgaaaaatgaagacaagtttatgcttgggccaaatatgcctgaattatttgaagaacatctggatttgcttagcctaaatgaaaagatcttacatgacaaggactacagaaagggacctgtgcgtccagcaccttggagcatccggagagaccctgcccttt

SEQ ID NO: 152871 - DNA, 539 bp, Homo Sapiens
  misc_feature (356)..(364): n is a, c, g, or t
tttcatttcttccttgtagaaattaacatgtttattgtaaaaagaaaataagcattatataaaagtacaaagtttaaaaatcattcaaaagttcatcagccagaaagaagtactatctggtgaacttcattcattccaaccatctctcttaatcatacaggcacatatatacaaatagttttacaaaagtgggctcatatgctatatttaacaaatatagcaaattaacaaaaggaaaacaagtgtgaaactgaaaaaatgctcaatttaaatacttttttccccacaagagaatctagtcttgtaagatttctcctaaaattaaggacaattacggaaaacaataaagaggctannnnnnnnnctagcttcatgtatgttttaattagagactgtacgtgattcctgctatgaaagatgaaaccagcacactctacttgttatttctatatagacagtgttcataatatttgactttataatcattgcccattatttttaaagtttctgaagtgtttactaacactccttttactgat

SEQ ID NO: 152872 - DNA, 384 bp, Homo Sapiens
aaaaaatctttttctcatgtacgagaaatacagggaaaaaaagcaatcaggttaatgaatcattctggtttactggattccaattggtagagaatttaaacttaaaaaccaaacaaaacgaaagagctcttcagttaccttatgtcgtaaacgagttaaaagttttgttatttctgaaaaatcaaagagcactatctgtacatggtcataactgcaaaggaaacaacggcgtacccaggacagggggagcttactttaagaagctgcgtctttctggatcatgttccttcggggctgaccctttcggggagtttggcttttaaagcgcggatctcgcgacgcgcggcttgcaggactgcggggcccggcggccgagacgcggca

SEQ ID NO: 152873 - DNA, 362 bp, Homo Sapiens
actttttaatagttgaaatctgcagtgacaggacatcctgcctgcctgggtgcagggtagtgagtatcctgtgatgagaggtgctcacacagcagacaggtcattacttggaagtgatgctgcagaggacaatcaagagagtggcagctgggtggggtgacttttaaggtcctgtcaactctgagtttctacatcaaaaggaatttttaagaagctgcgtctttctggatcatgttccttcggggctgaccctttcggggagtttggcttttaaagcgcggatctcgcgacgcgcggcttgcaggactgcggggcccggcggccgagacgcggcatccacaggggcccctccgcgcggccgc

SEQ ID NO: 152874 - DNA, 418 bp, Homo Sapiens
tacatgttagcatcagaggctattgtacaactagatggttattccctgtttcttggccgatttttggtacctttctttgaagaagagggttagattttaagaaagaaagtgtgcttatttcactcatgtctttgcagaatttaactttgctttactttaaaaattccaatcatcatgtacctataaaggttaaaatatagtgaaagtttctgcttcatgtgaattcaattctgagcacctgcaggtcatatcaggtgtctgatgcagttacctttatagatcgtggcaggtccttacatttcaacaggcttatgcatttccatggggggaagagattctgtttctaggaaattacaaagggcacaccactgcagggagtgtaaacaattctttgttgcaacagacaagatttttttta

SEQ ID NO: 152875 - DNA, 511 bp, Homo Sapiens
tttgatagtaaacatttttatttatattatgtacaaattacccttgattcacagagatagacaaaatccaaagtcatgtatggttctgtacctttagaataacacttaacataaattgtattgtcttttggataggaatcattgacctgaccaatatgcctccaacaattttagtgcctcatccagggggaacaagcactcctcccatggacagaatcacttatattcctggtacacagattactttccctcccaggccgtacaactctgcttccatgtctccaggtgagattgtacagttacacacctctctaatagaaccatcatgtttacatttttacaacatagccttttaaggtatcttgggcaatttttcctcatttggtttcttgtttttcttttaacatttaatagtagttcttatgtgccagctgtcactagataccttaggaatgccttaaaagcttatgttatgcttcagttcttatccaggactcttaataaacaaact

SEQ ID NO: 152876 - DNA, 797 bp, Homo Sapiens
ttttttgttgttgttggtgtttattgattcacctataaaccacatatcaggctatctcttaagaatacaacagactccaatcccattggaagtgagttcgcagcctgctctctgggctctctccctctttccggccttttctctttcacacggaagagcttacctataaaaggctcttgataagctctcttgacccccaagtttcctgggcagggttatttggatagtgctattactccaactttcttcttcctctttctgtcataaatcaaagccacctgacactttgcgcccgacttttaaaacaaacaggtctcctttctttcttcagccaggtcacaagaactgcctatgggctaatcttgagagcatgtttttcttggtctgaggcctgggagaaagagcagagtggatatctcaaaggcaactagagcccgagattgtcacttgaaaatgcgccagcctgggtgtaaaaagaatccctcttttgtctctcctcagttgggagagccgaggtgttcctcagaggttaacactggattatacacggggtgcggcgcgggggagctcgcccttcttttctgctcccatttgtttgtggcttctgcccattcagatttatgctggctcaatgcccttttctcctcactcagggttacatcccagattcacaaatcactcatagccaacaaattaagagagctttaaacagaacattagttacagactgggcattaaatgaagatcaggtaaggtgaaggggaatgtactgatggacaacttgggatgctgagaaa

SEQ ID NO: 152877 - DNA, 544 bp, Homo Sapiens
tcttccattgtgctactctggcttaagctttttcaggggttggtgttccgaatacacagtgagctcacagtataaagacatcaattaggagttgacaggtatggaaaactagagttttgaaaggtaaaattaggctctaggttatatatatggtaaaaactcaacatagcattcattttaccttagtgcttctctctgtgactttataaaagtgaaagggaatagtaagacgaagataatacaaaaaaatttagttcttttaggagcaatgtgatttcagaactaatcgttttagcatttctaagatactagttctaacaaggagatgtgagcagtttgagattatcagaaaatcatggtttaaaccttcaaaaattacaggtttgaacagataggaggacatttctgaagcacaagatggctaagcacattaaccaaggacataaaatgtcagggataggactacaactcgtccattttaatagcctttctgttaggtaataaactaaactatcctctcctccgtctttaccccagtctacct

SEQ ID NO: 152878 - DNA, 484 bp, Homo Sapiens
ttctcacatcaaaacttgttagagaaagcagatataacttcaatggataaataatttaaataattatttgaataattatttaaattccaaataatatccaagactagaaatggccgtggtcaaagacacttaccacaaacacaaacaactggagtttatactgttgtattacgtggggatttccaaaccacacagtattaccccattactctaatggaaccccttaaacagtttattgccttaaaatctgctttattaaaacaaattgtagcatgcaagtgtatgtatgcacagaaacagaacagctaacccttcagatacctgagattagaaataccagtatttgctgtgaaaagttggcttccccgctaaacataaagcaatagattctgctctatcagtgttccctacactactaaggtattgtgcactgctaacccttgcagctctattgcaaggtcaaggtgattatccctattttaga

SEQ ID NO: 152879 - DNA, 566 bp, Homo Sapiens
aactttgtaaatcttgttctttccaccctactggcaaagacattgggtggtaaatttctgttctctcctagaacatcagtcataggccagtttgcctctgttgctactgctattcttttcaaaacaaggggaaatttctagaaagtgtaactactaagttataaatatgtatattttagatgaatttattcagtgttatacactcacacatgccattctgcagattattcattgattgtatgttaggaattagtgatacaatattgaaagagttatctaagacttaggagtatcaagaaaatttcagttaaatgtgggctgataacagcctcctaggatcactacgcttggttcgttcaggtattgaaagtaaaggtcatttctagggtactctttttagtctactaaaaatagaaaatttgtctgttttgagtttcaaaacataaagaaggcaaagaccagttcttaatttgcaaagttagtgtgtttttcctttaatacttcttttggcaaattcagctggttctaggaaatgcagaaggctggcaatggtaagatgataaaaa

SEQ ID NO: 152880 - DNA, 800 bp, Homo Sapiens
  misc_feature (788)..(788): n is a, c, g, or t
gtatgagtctggtgaaacagatggtggggttggagcctggagatgctggggccggcccctttctgcaccctggtcttttacattctctccctcccctgtctgcaggtggcttcctgcctgccctaggccacatggcaggcttcaatctggctggggtcagggcccagagctcttgctccccgcattgtcacagcctgtcctttttgttaggggactatggatgtctggctaatggctaatattagcttgtacgcttctccaggatgtttcatccgttgccccagaacaccggcaactttaagaaagggtgttttgtgccttatccaaaaggaggcgctgtgggggcaattttctgcaggaagggagggaaggcagacctctccccatctctgccatgtgccagccctgcagtgacacagccggctttcctggagccgagccgccctatcatcaaccactccgcttgaaggaagccccctattgacctcactactctctatttgctctagtccagcatgagctgcatggtgaaactttaacacataaaatgtaattactgcccctctaccaccatccccacccgccccaccactctaccccagcagagtaagcagaaagacaggaagttcagagaaagatcagctgagttgtttaggctgcagccttgcattagtccgagaggtggcgctgtgagtctccagagctgagcggcagagaggccctgggagacagagtggggaccgtgattgcttttcatctcctccccaattcgatcttcccacttaggntggtcatgttgc

SEQ ID NO: 152881 - DNA, 546 bp, Homo Sapiens
tttcaaggtggattttgcccactctgggtgtcactgaccaaaggaattccatggacatagtgggttaaaggagagtcaaacaatgatcaagtggggattgtgattgaagccactgggaaggcacagattggctgctttagcatcttagccaggtctctgaatgcatttgagatttattgactctccctttgtcatacttaacaatgccctgaatactgggtgttctgccactaccagaagatgccaagtttgggctatacccttgaggtgtttgtaaaccagatgcctcaaaaatcactacctcaacaagaacagttggtcaaatgccaccacaccataagccaagtcttctattttttcactctttatgattttttctttaaagcaatcgtctgtgtcaccctaagagtttaacactgcccactttactgtcttgatgaaaaagtatgttgatttattttctactcattcacatattcatccaacaaatagttacagagatggtgaacttggcactgggtagacatagaactttcattctggcct

SEQ ID NO: 152882 - DNA, 527 bp, Homo Sapiens
tcggtgagtgcgggcgcgggccggcggccgggctgcctgttggcggtgactttcggctctccatgcggttcccggctccaggccgttcgactgagcacttccggccggggccaggccgcgaacacaggccgcatagggcgggcgctcctcggggctggggcctctctccgggcaggtcctgggcccccgggaccacgtgcgggcccagcgggcatggagtgcgcttgaggctgggcgctccggctccaagagccttcgtgtagaaaagctcttccgcagtgcttgggcaccctgacccgtgcctcgtctctctcagggacacttactcggacctctttcggtgtaattgccttgaattcccccggtcgtggaggaaggcgcccgagctcggctccacctcccaggtcttgtaacttaaaaatagcctcgtgactcaggcaagtcccagcccgtgaaacagcagtgatgggctcgcctcattgcagggcgcctggcacacatctcttttgcttgtgatagaatacctc

SEQ ID NO: 152883 - DNA, 348 bp, Homo Sapiens
ttgtagtttatctggtaggtcacgctggtcagcgggtctttattccataagctttcactgccctcaaatttcaatggacaatatccaaatagcttgtctgtgtcatagtcagtagtggttccgcaccagagccatccatccgaccgcccagcactcgtgcaatctgcgtaccacttgttttcaaacttgaacgggaatgcacaggttgctccattggcattgcctagtagcgtatacatggcttcataacctctggagcacagattgtctgtggttccatagatcttccacctgctccataaacccgatccctgatagagcataatattcttttcttgtctgttgccg

SEQ ID NO: 152884 - DNA, 214 bp, Homo Sapiens
tttgatatttcaacaaatttttatttttgtgaaataagattatttcacctcaagattattcaacattcatgaaaattgtacaaattcaatcaatttggattaagtagggattaaagaaatttggggttgtgatggttttaatgattaacattaattcaacatattaacatcccttctctcctgctcctgagaacacacaaaaatgagagagatt

SEQ ID NO: 152885 - DNA, 682 bp, Homo Sapiens
ttttccattatataaatttattttgcttcacatttaaggagaaacccagcagaggggtcgccctgctcttccccactagaaatgtactgaaaagtgacaagcccacagaaggaaaggctgtataaggaagtaggagcttcagtcaaatttctactttcattaccctgagggaggtgaaggagggtgttattttcatcaggtcaacatggatgacagtttgatcataaaaaacagcccacattaagatttcatttgtgaaatatggtgagcatgatcatgccctaatgatttcttagggtttggcagtgtctctggtcacatgcccatacttagggttgaaagaaatgctaatactgtaccctgggtcttcctcagatgccacagtggctcctgccctaggatgactaaaaatacggctctcctttccttagagatactggctcactatcaagaatagaggtagggaggcattgtgaactccagaagagttgagtctatggagtttattccacagtggatacattaggctttttagagctacaatgagactgtcagtaataggcgatcacctttttatacctatgaaacatttcttaaaattctcttgggtttggcccaaaagagtgaccagattgaaaagtattctgatattcttaaggacaaatgcaattcctttaatgtt

SEQ ID NO: 152886 - DNA, 523 bp, Homo Sapiens
tttaagatttaaacaaatctttactttcatggcaaattttacatttctccattccatttaaaatattttccatagcttagctgaaccaggctgaaagtggatgtctggagtggtggaggcgatacaccatgaagtagacaggacaataaaggaaggggagataacagccttctttgttttgctgggtgccagtcattctctaaaattcttggaaaattgagaaaaagttagtgggccatttccttactgaactacaaaccccagcatcagggcagagttatctctacaaagcagggagagaacgcaacaaatagagcttggcctcaccgcactctctggcttttggatcacatttaatgtgagagagttgagcctgttcttggaatgggcaaactcaaaagattaagccaccaggccatgtgaccattcatccaggtggggtgaaggttccaggactcagggtaaaaggagctaggcaggcaatgaaatcaggtacatgagaagaaatcattttgtttttttc

SEQ ID NO: 152887 - DNA, 513 bp, Homo Sapiens
  misc_feature (349)..(384): n is a, c, g, or t
taagctcttatttaaaattacatttaattatgagattgattgattattatttgcatcccccagagggctgcaagcttcatgaaaccccatgaccatgctgtttttattaaaattccaagagaccaggaaagaatattaatctgctggtgaagtcgcagaatggatttgaggtaagaaatgtaagatgagaagaccaaatcaagaaacaggagatttcaccattagcatatcaaggtacacgttacaaataacattttggaatccctatgacactaaatcatcagataggcaaggttgatttttgccccttctatttgcaaggtggaaaaatatagttcactctatagannnnnnnnnnnnnnnnnnnnnnnnnnnnnnnnnnnnctagtttaaaaagagtttattccagggtgattgttgaagatggccactcaggagcgtagattcaagttgctctgattatacactccaactaccagccattacaagtggctttttttaggaaaaaaacaa

SEQ ID NO: 152888 - DNA, 530 bp, Homo Sapiens
  misc_feature (61)..(75): n is a, c, g, or t
caggcattctatcttattctggtcatttaaacaaaacaatcagaagttgaagaaagagggnnnnnnnnnnnnnnngtagttttagtttagtcttagttgcagctcttcattccactctccttattaagccttgccagacctgcggtttgcagagccaggatgaattacatatatgctcaccttttatgttgcatcattatgagccaaatataagcagcaaatcatcaaatgcttacctgtataaactacattacttcaagaatcctgaaagtcagctcgtggtggtgtcatttctgaggggcagaagcagaatctatcccaaaacttactcttgttttttaggtcacttttcagaggaaggagtgagttagtagttaccaatacacagtgccaccagattacacagttgccctggcaagagtctctccaaatggttttattctctagcagttatagaaaaatcaaaatttatcaaagtgcatacagtatatatctgtgctctgatttaagctgcctcaaattctttcctc

SEQ ID NO: 152889 - DNA, 537 bp, Homo Sapiens
aaattcatttatttctgctctgatctttataatttttttcttctactaatttggggttcagttttctcttgcttttctagttctttaagatgcatcattatgctatttatttaaagtttttcttctttttgaactaggcacataggtataaatttccctcttagtactgctttcactgtgcccatagattttagtatgttgtgtttccattatcttttatttcaagaaaggtttcaatttccttcttaatttcttcctcgagccactggtaattcaggagcacattgtttaatttccatgtgtttgtatggtttccaaaattcctttcgttgttgacatactagttttattccattctggtcagggaacatgcttggtgttatttcaattttttcgaatcttttaagacttgttctgtgacctaacatatgttctatcctagagaataatccatgtgctgaagagaaaaatgtatattctgtagctgttgggtgaaatgttctgtgaatatctattagatcctgtaaatatctattt

SEQ ID NO: 152890 - DNA, 501 bp, Homo Sapiens
  misc_feature (390)..(444): n is a, c, g, or t
  misc_feature (481)..(481): n is a, c, g, or t
atcataattattttattattattatttgctatcacagagtagtgtacaactaacagaacaattatattaggtaagctgcatgaaaaacaattgaagagggaaaaataatatctccatatatatgtaattgatttgtactatgcactaataaagcctgccttagatttctgttctagtttaaaccccgaaacagtaccaggcaaggttagtggctattgaaaatatcattaaggacagggttatctaaagacacactggatactacattaattttgcaaaaataaaaagacagtgtacagtgttcagtttaaaaacaaatcatatgatcttacatttcagctttttttctttgaaatcagtggtgtaatggggagttaaatacttttaggnnnnnnnnnnnnnnnnnnnnnnnnnnnnnnnnnnnnnnnnnnnnnnnnnnnnnnngcctcttttaaaaccaccctattgactatcatcattnttttcttcacccttttcatc

SEQ ID NO: 152891 - DNA, 570 bp, Homo Sapiens
tttttatgtgttaattttttattaaatagcaataagatacttttataactcaataaaattattcaatgggatacattcggaaaataaatgtataaaatatgaaaaagtactaaaaagcatttttcagtacttttaggtaagattaatccaactaaacactagcatatgttatacagtaataataagtggaaaatacaataatgttgagaaagcaaactcaaagcatagatcaatgaaaaaattgagaaatggacataaatgatttagtatttttaaagagagtgaaaaatcattattttatgcttttgtgtagcgttagatgaattaaataacatatgcacatatagctttgcgatacaaatttccagaccataggttgtttcatacttagtattaaaaggcttaaataataagtcaataagatagtttaagaagagacaatacaaatgtttcaatgtcattcttttcatttgacaacttgttattcttttcatttgtcatataagcaaagatttctcataactaaaaatgaatttaatttagtacattttggattacctaaaatattac

SEQ ID NO: 152892 - DNA, 454 bp, Homo Sapiens
ggcatataaccatttatatatttatgatttctaattttattataaaataaaagcagaaatatttcccgaagaacattcacatgagggcattacggggagacggcaagtcggcggctcggggggcgcgctcagccgggagcgctgtagtcacagtcccgggaggaagagcgcggtgtggcggggcctcgccaagagagaaggaggaggggcgtatgacgaggcggcgtttaggggcttctgtggcgctgccctttctctctcacttaagttactagacgaaaagctgacacctgcagctcccactgacccacatgggcgagggaaaaggcctcaggagatggcctaggttcaaagtccctgtcttttctctcctcttccctctcccaccccctactccggtaaagcgagggccagaggtaggggcagatagaccaccagtcaggaggagaaagac

SEQ ID NO: 152893 - DNA, 331 bp, Homo Sapiens
  misc_feature (11)..(11): n is a, c, g, or t
tgtattgatangttttgttttgtttttagcagcaattatctagtgggagcagttagctacgctttaggggtgtatgtttgtatgtgcattgtgtataacagaagtgttctctagagtgagcagtcagattacactgcaatggtcatattaccattgagtcccccaaacactaaagaaagacattatttttttctatataaacttaatacgcagagttataaacataaaatattgatatagacacacatacgcacaccactgcttcccaaagcctatgaatgcatccacgtactagtccacaagaatgatctttattcacaagatataggaa

SEQ ID NO: 152894 - DNA, 596 bp, Homo Sapiens
gcggccgctccaacatcagaaaggtagactcaacttcaacagttccaggcatctctggacgtggagcaggagagaacgttgactttgagtctacctttctggctcgattgaacttcatctggaaaggttttatcaacatgccttctgtggcaaaatttgttaccaaagcctatccagtatctggctccccagaatacctgacagaggacctaccagatagtattcaagtaggtggcaggatatcacctcagacagtttgggattatgtggaaaaaataaaagcatcaggaaccaaggaaatttgtgtggttcgcttcacaccagtaactgaagaagatcaaatttcttatactttgctctttgcatacttcagtagcagaaagcgctatggagtagctgctaacaacatgaagcaggttaaagatatgtaccttattcctttgggtgccacagataaaattccacaccctcttgtgccttttgatggacctgggcttgaactgcatagacctaatctattgttgggcttaattattcgtcagacactgaagcgacagcacagtgcctgtgctagtactagtcatatagctgagact

SEQ ID NO: 152895 - DNA, 341 bp, Homo Sapiens
acactgtatttttactgtaccttttctatatttaagtatgttcagatacacaagtacttattgttgtattacagtcgcgtgcagtatttggtatagtaacatgccgcacaggtctgtagcattggaataataggatataactgtatagctcataggtgtgtagtaggctatatacctaggtttttgtaagtacgctcttgtgatgtacaaacaacaacgaaatcacctaatgatgcatttctcagaacatatccctgtcatcagtgtatgattgtattgtattttcattgttagtatcataaaatgcattagttacgtaagtaatttaatctcaccaggaa

SEQ ID NO: 152896 - DNA, 466 bp, Homo Sapiens
gcacgaggaattgcataattattttattaattacaattgtgatagatgctttgtagaagtactacagggagccatggaatcatttacagtgaatatcagttgggattgtgtttggctgcaacagacacctaacaagatccaagaatatttctttaccatatgaaggcagtatagatggaggaacccagggctggtatggcagttctggtgtcacaggggatacaggctcctcatcttttggattcaccatcccaacatgtggcttccatcttcaaggctacctcctggtccagaatggctgccggagctccagccatcgtgttcacattgcaggcttcctcctcctccaaccctcgggtctcatttccaatgtcttctatttggtgaattcaactgtaagtcagaggacaagggatctgtggaagcagtccatgcaggttggcctcttgaggttcaaatcaggaag

SEQ ID NO: 152897 - DNA, 555 bp, Homo Sapiens
agaaatataaaattttactcagatgtctacttcctgatggcatgaaattcttaattgttttgaaaccaaagtagaaaagcagacaaacgaaaaatactagcaaatcagattctgttatctttcacccaacagagacaagatctctataaaccagcagtccttccccaaatacgtagtatacaaaccgcttcatgtctgtcattttcgtcaaccctggggtccttcaaatgccttttgttccttctcatttacttcaccttgacttttcaagacatattggttatactacacagttggttacatttgaagtatttcatgtaaattacaaaagtatatgaataatgtgaattcatttttgtttatatatgtatatgcatgcatacacatacacacacactcctatagagtgaacatttggctgaatatactgccaaattgttaaacaatagtcatttctagctggtggaattacaggaaaatttgtgtttctgattatatatttctatagcatttaaattttttgcaagtcagcgtgcatttcttagataagcaaaa

SEQ ID NO: 152898 - DNA, 306 bp, Homo Sapiens
tttttttcattgaaaataagtttaatgattattaagtttccaagctagattacagaagtctttttagcccatatcataaataaaatagttctgaatttttcgtatggaaaaatatactctgagttccaagcaaacaacttaagaaaatttttagaactaacacattcctatattgggaagagctcaaaagtctgttcttcctccccatccactgttgtttaattaatctcttaatatcataaagtccctcatgtgccaagtgtagacagtcatttttgaatcagggctcactttgttagctttttt

SEQ ID NO: 152899 - DNA, 520 bp, Homo Sapiens
gttgaagagctgttgtttatgctgggccttgctgttagctttccagagcaatcttgaccaagtccttgctcgtttttgggccatagcctgttccacaagaggttggtttggctaacctctgagggctatttcctgctctgaaactctgatttattcagaaatgttatactcccctaacaatggaggctggtctgccctcccatgggtacgggaatggtggcacacatctcagaaatggttttgttctgtgcggaactgagccaaatggacaactctaccagctccaaaaagttggaagtggtcagctgtgtctgaattttgtaagggagcataactgggtggaggggtgaacaggcatcattagaggccggatgtggatgaggagggaagaagtgccctggagaggtagttcatagagaacccaccagatacaggtgataagctgacatcatgaggtagatggtttatcccagtctgtggccaggttgttcctggtcacaagcagttggtacgccctcag

SEQ ID NO: 152900 - DNA, 526 bp, Homo Sapiens
tttttttaaagtgatgaatttattggtaaatagataaaattaacacctattttaatatatccaaaccccttccttatatatattaggtaaattaaaagaaaaaaattatcaaagcaatactacagccagctagatcgccaatttacaaatgagttaagtaagtaccataagtttgtttgagtatcaggtgcttcagagtttttctcaaacagttacaaaagagattaggttcccaatcagttcacaaaagctaatttaaagaatgtagcttaactacagtactgaggttgtcacacacttaactttcggtctcttgcttatttattcatatctgaggttcactgtttctactaggatacattccgcccacacccacaccttggtccccacatcaagcagctcctcacagcaggaagacatccgctatcagacatggttttctgaagttgtgcttaggatttcagaggaggaaaaattcagaggttctaatagccttcggtaactgaggtagaatatggggctccca

SEQ ID NO: 152901 - DNA, 389 bp, Homo Sapiens
ttttttttgtagaccagaagtatttttatttctggaattagtcctagactccccagcagtatttacgggcagtcatgtctatactttggggaaaacaccaattgtaagattaactgctctgggtcttttatccagcaattccaaacgtattggtttaacctctttgttgaaatttctcacaaatgttaatgctatctatctatacagttagacaatctacatagtaccaggttagtagctgactttataaaaacctataaacacaatacaaactggctacctactaatgcagggagagttttaagtactttatttggggaaagagttgtaaaatggttaagtaagtctcagttactgacataactaaataccttttgcatgcaaacaaa

SEQ ID NO: 152902 - DNA, 500 bp, Homo Sapiens
tttggctaatcaagaatttatgttctccagttctgaactactcaaccactgttgcagataataatattaatgtattgataataatctttaggataatttattaagaagcacctaataagcatggtctcacttaatcctctcaacaactctgtgaggattaacgtttcattaaacccactttatggaagtagaaaccaaggctcagtgaggtgaggattccttgcccaagatcacacagcttggcaggacacggcagagctaggatctgatcgtggcactctggcaccaataccaaagccttaattcactgtgcctgacaatggtcctttgcactgaaagttgaggcccgatgagggggcatcagagttgtgtgttcacaggggtcagatcagtaatggtgctatctgtcccttgtgggctggggatatgccttagccaggggtctaagctgttagaagctgactctgacaggccacaagggcatgggacaagctaaccct

SEQ ID NO: 152903 - DNA, 687 bp, Homo Sapiens
ttttcttccctttcccagcccattgtttttattttttaatcagttttaggaaagtataacttatatacaataaaaggcacccttcttaaatgaacagtttgatgagttttgacaaatgtttaagcagtacagccatcaccataattaagatatacaatatttccatcacatcaagaagttgtctcatctccttcatggtcagtctgctgttcctggcaatcactgatcgattttctgttcctatagatttgccttttctggagagtccatataagtgcaggaattttcgtttgtagccttgggtgcctggctgctttcacttagcataatgcattagaaatccatccatgtcattgtctgtatcagttgttcctttttattgttgaacagtatcccattatatgagcataccacagttagttttccattcaatagttgatggacatttgagttgtttaccattttttgctattgtgaatgaagctgccatgaacatatgtatatagagtgtggactggtgccgaaatgtgggcgccgaggggcaagttcccgtgtgtgagtgggatgagatcgtattcgtgtatgaggtgtgcctggtgagatgggtgtgacggcgccggacatcgggcgtgcgaccggagaccgtgagaggagaggatgggcgaggtgacaggggaagtggtccat

SEQ ID NO: 152904 - DNA, 500 bp, Homo Sapiens
  misc_feature (243)..(263): n is a, c, g, or t
agaaaaacatgctccactaaggtatcattttctaggctacctttcagtgttccctttaaatttagtgcctgtttctttaattgccatgactgagtagtgctcacagccatttctccatgaagcatggaagacccctacgagcatctggaaaggccagcagctgactgacagtcctggagctgccaggattgtggggacctgtcagtgaggtgagcctgcaagaacccattttacagaaagtgnnnnnnnnnnnnnnnnnnnnntaaatgcaactgcagggatatctattatttccccacctccccctacctgaggacactgggctaggtgctgcaggggagggtggattataaaaatgctaggaggggtggaaagaggctaatttgccagccgcggtccatacaagaagagccacagggggagcaggagagatctctgccagctgggaggatggagagcactgtggcaggtgattgggggagctgcaggaccacagagga

SEQ ID NO: 152905 - DNA, 559 bp, Homo Sapiens
tttctgtccttttaatttatttaccttgccattgctaggtaggttttaaaaatgtattaagacccgatgctctgtctcctgcccatccctgggcccatccattcaaggccgcagtgggaagtggccacagccgttcatggtgggccctagaggatgcagtttcttgttctgatttggggaatgaaggttattagactgttgcactccaagctgggttaatagctaacaagtagccaaatcctttgcctgtgaaacatccagtcttagcatcaaagcatgccctggttggggcatgacagctgttgcattcacagcagctacaagattgttgattcttaccagatcttcttgatacaggtttcatatgtcctgagagcccttcccaatacaatgaggacaataaggtgctttccccactctttggtttttgtctgtttgtcgtgggagatggaggaaggctgttctgtgattcagtacaacttcacccagggtggagcatgtcaggctctggcctggctgctgaagggagcctgcagaatgagttagtgatccagtggtc

SEQ ID NO: 152906 - DNA, 453 bp, Homo Sapiens
  misc_feature (111)..(120): n is a, c, g, or t
actttaggtttaatttacatttctttttccaatttattgaggtaggaatgcagatcactggttttaggcttttcttcattctaatataaacaaacatttaaagctataaannnnnnnnnnagcactgctttagctgcatctgataaaatttaatatgttgttatcattagattaaaatattttccaatttcctttgtgatttcttttttgacctatggattatatagaatgtgttgtttaattttcagatatcttgggtttttttaattatctgatttttcttaagctctaatgtaattccactgtgatcagagaatatactctccataatttcagaccctttaattatctggactattataaggtgtatcatatacccttgaaaagaaggtggttggccattttgttgtacagagtccttcaaatatcaattaagtcaaaatcatagtgaca

SEQ ID NO: 152907 - DNA, 525 bp, Homo Sapiens
agctttttaaatagacttttactgtgaaatataataaaagatttggaaatgatttttaaaatttcaattacagtgttaacaattcaattatctttatgcagagaaagcaccacattacaaaaatacaaagaaggactctaaaatgcacatgctaaaatgacttaatagtaattacattagcaaatcatgaaattcagaacctttttgtaattacagatctaaatcagggttctcaaacttagaggtcttcagggctgagcaggaactacaaagtagagaagttgtctgatataagagggaagtccagtaggctgtggcaaactggggaacacacacccaatcaaaagacttttcaaattcaaacatttttgaaacattatgtacatctaataaaataactgtgggtcaaactggcctatgtgaactaccagtttacagatctggtctaaatgaatttctaatattttatgtagtacctaaatcctcaaaatggcagataaatggcagaccgcacttctttgagat

SEQ ID NO: 152908 - DNA, 344 bp, Homo Sapiens
tttattttaatgaagatgaggtctatgttgcccaggctagtctcgaactcctggactcaagtattccacctgcctcagcctcctagcttgtgctgggattacaggcgtgagtcaccgccccccggccaatgtctccatttttgagggcactcaaagaagtaaaaattgtattctctgctctagaggaatttgcagaaggatatgaactgagaaaaagaaagatgggttccagttctggctctacctccaattcttgtattatttatttaatctccacagaactcaatttctccctccataaaatatgagggctagactaagtaaacactaatttccctttttat

SEQ ID NO: 152909 - DNA, 638 bp, Homo Sapiens
cttggctgtcctttacctcatggtgtggggtgtgcagatagcaggttgtggcttggtgagtgctcttcacttcaggtcaaggtgaggcacagttaacatgctaactactttcctcagttctctctgagttgtgtaaagctcccgatgccagacttcctcttaattttgcacattattaaagtccaaagagttaagatttggtgatgtggggcaaagggccagctgtcacagaaatcaatgaaatgatacacagaaatgggtatcatgaaaaggccactggacttgggaaaactgggtgcctgtccttgccctgccatgtacttacctgtgtgactggaggtgagatgttttacctatgggcctcagtttctcattacaaaatgacagagaagactagatacctaagttcctaagtttgtgacatttgtgaatttttcttggccctctgtgagtagagtgctaaatttagaggcttcctgtggttgaactgatgtccaattctcagggaacccagacttctcagttcagaacccagttccagatttttgtgggaatagggaaaggtattaaataactccattgaattctttcctgcataatgccctgctgtggctgagactcaatgaggtcatcacctc

SEQ ID NO: 152910 - DNA, 585 bp, Homo Sapiens
  misc_feature (63)..(63): n is a, c, g, or t
atctgaataccagcagacaaaatctggaactggatatatgtcatctgttgtttttgcttttgntttttgcttctagagtcttgtttgtccttttatgcctggttattttggtgtactggcatttcagaattacttggaataatttgatgcctaagtcttttcacttgcttgtcagacccctgggagccctacctgtcagtggttccccggaccaggctggagaagctaaccagtactttcccttcacccttaccctgagcatctagttgttctcattccagtttaatgtggatggctgtatcctacacccacagtgcccagcctatgattatttctttaggatgcttttctgtaaatggaattgccaagtcagagtggatgcacatttacaattttgaaattgccaaactttgccagggtgtatgagaattcccatttcctcatggcctcataggtgctgtatggatgattctttttcatctttcagtctgaggagagaatttcatctccagcttgtttcagtcgtcttctgcttattgatgatttgtatttcatttttttgtaaattgcctacctttctttaga

SEQ ID NO: 152911 - DNA, 548 bp, Homo Sapiens
atctgttttcagcctgactgctttagtcactggacgagcatcagctactgcggtgtcagatcacttctcgagtagaggtctgcctagtgagtgagcaggagaacatcatcttaatagcctttggctcacccagagtcagggagagatgaaaataataggtcagaatgcaagtgacttaatcacagtcttcctagaattatctgtttatgttgcatgaatgcataagaaaaaaattctgtcatgttcccaaggtagaattgtaataagcatgtgccagtgtgaaagctggaaggaaaaaagctattctctaacaggagaacataaagattcatttctctcccaccctcaactccaccaaagtaaatcctttcgatagtaaaagtttaataatttcttgtgggtttttctttcgttaagtctttcactaactaactaactggatattttcacatattacagaggaagacactacacataaaatacatggttggcctatgatatagttatatggcctttctttaggaattatgttcttttccctctccaaa

SEQ ID NO: 152912 - DNA, 449 bp, Homo Sapiens
cgctggaagtcttactcacttctcaagaacccgcaagggatcaggcctgaccctttgcaagtgacagaatccaaagctttgagctcatgggaaagtggctggaaagaaggtcactgtagggccgcacaggtctctggcgaggctacccaagaacatttaaatccctgcccagagaagaagaggctccagctgtcctgcaccttcctgggaactggcagtccctccgcgcaggggttctgcagcgaccggcagcgcgaggagacaaggatggtggccagttagcagaaaatcaaggcagcgggaaaggtctggaaaacaccacctactatcacctctggagcctgggattatgggataagttttcgatttttaaatgtattgtcaaatagctaaagtacacggaaagtgcgaaataatagtaaattgaacacctgtgtattccccccaaa

SEQ ID NO: 152913 - DNA, 539 bp, Homo Sapiens
  misc_feature (481)..(497): n is a, c, g, or t
agtcatctaatgactatcagtttattaggaaattatcaaaagagtttgattcccagccaaactgaatccctgcctctctcccatgtaactcagttccaaatcaaatgctcagtccagtacatctgagccttttgccagcagagaggggggcccgaatgggttgcttactatgaggccacttgggggggttttatggactggaaacgggaaggaatgtgcttagtttgcccggctgttttggagaatgcgtgatttaggttggcctgggaccttggcctgggactaattagaaagcttggcccgggaccttagcctaggacctcggccgggaataattaggggcttaagtgatgatttgtagaggctgctttgcttggccctagacctattaaggaactgaagtgaaagcttggctcgggaccttgcccaggaccaattaggggctgaacttgtgatttatagaggctggacttgcagtttnnnnnnnnnnnnnnnnngtgcttactggaacccactggagcctactgtgccgatgccta

SEQ ID NO: 152914 - DNA, 443 bp, Homo Sapiens
tcatagaggtgcgccaccatgtctggctcccttttagaaatttattgaaagaagccaatattgggaagggtgtgtccttcctcaattttccttggagaagactcagtgtgtctttaacagaactgtcaggaggcatcctggggcttggaggcctggtgaactgaggaagttcctgattcccaggcacttaaaagccactggcatgaactctgggcaccaaccctaagggcagaggcatccctagcccagttggtactttcactatggccacagagggcaggcttggccacagagagcaggctagtttgtgccagtggctgcccattcaccctctggtcacctcctcaatgaacactggcaaacctgtgccctctaagctgcaggctatccctctgggcctggagatgacattttttcttaccctggactaactttctgatgac

SEQ ID NO: 152915 - DNA, 812 bp, Homo Sapiens
gaaaatgagctccctgctctcgggaaggtgaagtcagcctaggacagcggcaggactgcagctccctctggacaaggggcctgtgcagcagacctcaccaggtacctttccccacagaacctacacagaagcacaaggtcctttgctccttctttgataaggtgtcctctctcgtggttgatttcaaactgtgttgagctaagaaccctttctttaaatgaaaggtgttatggaagcctaaacaacacattattcaataaggatttcttgaaataagtgtgtgtcaaatgcagtgtcgagaactgggtacctggtggtaacccaaacagactttatctctgccttcatagagcttgctttagtgggcaaatacagccataaatgagtaaatatttactaactcttcattatggtcagtgtcgtgaaggaaaaaaatgtgggatggcctttcggttgcattattaggaacgatttccaggtcaggaagtgatgcttctgcacccagcagtacctgtcagtgtgaaatctggggtggagaccaggtcagagctttggatggctgatgacacccaggaggaagaggcagcctctacacgcaggtgggacagtgagcccctgccttgtggtctgtgctgagcttacccacaatgcaagccaaggcatcagctcccacccacaccccaagggacctgcaggaaaccaggctgcatttcaacaacaagcagaaagcacagagctttacacacaacctaaatacatcaaccatttgaagatgctaaactccatacaagagcatcaccaaactccacaaa

SEQ ID NO: 152916 - DNA, 566 bp, Homo Sapiens
ttttcaattcaaaatagcatttattaaatgactagacatgtaaaaaatattttactcttttattggtaggtgttttctgtaatggccacaaatgcttttggaattaggcaaaatataaataaagctgtataacagacttcacaaaatttgataaacaaaaattataggttgtctccactcttttgctgcaatatattcctgaactgaaaagtaaaatgaagaaaatgatttcttttcactgggcagtttaagaaaaccaagagcttcagactgtccttttttaccattagatggcactggcctgtcagtaaggcaaactgcaggaactaccagaaattaaccgacaggcaattccaaggtctaaagtgggaagcaggcgtttgattggtctcaaataagtggatcagcaaaattgaaaagagtgaaaatcaagggctttagaaagttatatgtacagttttgcaggattatatctctgaaatgaggtaaatcttaatttacatttcttgtttttttcctttctagaatgattctaatttgcagtgaaattaattatctagttccag

SEQ ID NO: 152917 - DNA, 451 bp, Homo Sapiens
aaactaaatgtgttgtaattttgtcttttgacagtgccattgtacaggtgattcactactccaccactccactcacctactcacaatgacggttttcaacatttcaggaacggtttctaccttaggctcagagcaattcctacttctccctcatgaggaattggaggaggtggtgataaaattcttcatctggttgtgaggtggtatttcacacaactccttgataaatattggaggtgatactggatacaggaaaacttacaataatcagattgttacaggtagttaggcatcaacagggcagcagagggctctctcccgacccactagaaatgtcaggtgatggttcagcaattaacaaattgcctctctaagaatgagaattcggcagccagggagagacaatctcttgatggtccacacctgttaacattaaaagtgttaattgaat

SEQ ID NO: 152918 - DNA, 282 bp, Homo Sapiens
ttggtgatttagcaaagtttctagttgttatccatgaggatgatgggcatttccccccaggtattgactgcagtggcccttctcttctgagccaggatgttatggtggttgtacatcccatggcagatggggtggcctgactttcaagtgggcctctttggaggcccctggatgctaggctagggatgctgagctgctgaccagacacttcctggcaacattgggagggacccatgaggaaacaatctcctgtttgaagatacaggaagatattgccggaat

SEQ ID NO: 152919 - DNA, 604 bp, Homo Sapiens
  misc_feature (19)..(19): n is a, c, g, or t
ctgactctgtggtgccatntgagagaaataggttcagtagattcttccagagatgacaaacgaaaagacttgatgtggaagtaagagaagtaggggcgtcaggacactgaagtgagagatcttttgttctcgtggcattggagaagccaggaaagaaaaaggctttagcagggaccaggtgcgtccactttgcaagtggatttggagagaacaagcagtgttcacatatcagtccagcaatgtctcaagactccttcctggaacagtcatcagtttaatccagtgaggatggtgtctctcttctttcatgagcattttcctatttctgaaatattaataaataggtgctttgttcctaggaagtggagagaagtcaaggaaaatactcatcatactcctagaagtcaaggaaaatactcctcgtactcctcatggccgctggagcccgctgctatgaggttatggagaacgtcttgaacattccattccccagcacctagtgcagtgactagcatagtaggcactcaaaaagtgtctgtaggattgtatttcaaactttagttgtctttcccaaagaagcctgtcgtgcccacacgcggccgca

SEQ ID NO: 152920 - DNA, 371 bp, Homo Sapiens
  misc_feature (185)..(258): n is a, c, g, or t
gagcctggccaaaggggcaagctgaggctgaaacgtagcccctgctctgtttgctccgtaccctggcatgaggctgtgccgcctggaggaagggacacctttttctaatttgacaaagatgccatatgagctctcagaggctctgttaatgctttatgtgtgttaccttctctactcctcaaaannnnnnnnnnnnnnnnnnnnnnnnnnnnnnnnnnnnnnnnnnnnnnnnnnnnnnnnnnnnnnnnnnnnnnnnnngagttaagtcacttggtaagggataaagctaggatttgagcctgatgccaaagcccatgctctaaaccagtaggccactatactggccccatccataagtgctcaataagtga

SEQ ID NO: 152921 - DNA, 535 bp, Homo Sapiens
ctgaattgcccccccagccccaacaccatgatggcgttttcctccattccccctcccttgggttcactctctcttcctctctacagagacacatcccatggtttcacgtctctgagtccctctggggagaaaagtggatctgagaaattatttccattttggtgcaaattaaaggtgccacccttcctagtgccatttgcattaaaaagaaaaggatattttaagaagatgaaccggagacagtaaacgttttatgatgaattttaactgaattgtctaatttgcaggggaggagctggcagggtctgtgcagagggtctcgggcagctgcacggtggcaggcagccatcctttcagccccttagcaagggaagaggtggaggctcacagggatggtttagaattagatagttgccagccgctgtccaaagggagcccctcctcccactgcacaggcacagggtccgctgacaggcagcactgtggccccgcacccagaacttacccagctctgcagtgagtttctctagagaaa

SEQ ID NO: 152922 - DNA, 464 bp, Homo Sapiens
cctgcttttaattttgattaatttatgtagccacgtgtggccgatggctactatgctgggtagcacagtccttggatggttagctctgaaaggccaaggcctttgtctgtcttgctcactagggagcttatgcccacctctgtgcctctgcccaggctttcttctgcctggaacctgggggcccttaccctcctggaagctggctccttctcacgccccaggtctcagcctaaatgtctccttcctttaccatctggtctaaagtaagcccccaccaggtctttattttagtgtcttattttcttcacagcatttatcacaaattgcatttactttgcctttttactgatatttatagtcttcgcatgcaagaacttgcgttccattgagcgggcagcacacctgtcttgatcagcaccgaacagcgtgtgccagctaccttgcaccaggtctggcacatagta

SEQ ID NO: 152923 - DNA, 555 bp, Homo Sapiens
  misc_feature (457)..(465): n is a, c, g, or t
ctcatctacgagtaaaaaagccaaaatggcactgaagactgtagttgtggctctccacatagtggtcccattgctgggaggaactattgaaaatgatgtataagcacaagtgatagaaatgacattgcatacaccataaaagaagagtcgtaatctgtatccactgggtccaaagggggcctcctgatagtaacacacaactaacacagataagacctgaaaaacagaacggataaaaatcagttctagagatggaactttagaccgatcagaaacaagcctagtgataagagctacacatccatgagccaaagcagatccaaacagcactatccacatttttcgggattgaaaaatgtttttttctgcaaagctctggaattgtccaatctcattgatcattgggtcttctgttggtggaggtagggtatccatggttccaaagaaagctctcccnnnnnnnnncatttcactcagcagacctttctttggattttcctccataaaatttccatagccttcattgatttcttcatatccatcatcgccaggctg

SEQ ID NO: 152924 - DNA, 547 bp, Homo Sapiens
ggctcttagagcatatttttaatacaaaatctgtctttgtgaatagagaatagggacgtattttttaaaattgctaccaatcccaaggagcaaggagcatcgatgctttgacttttctgcagggcaggtgacttggcctagctggttttgggtggtgagtgcagtgagtgggccatgacacagtacacgccatgttcacctgtttcccaaaatgtttaggtttttcccctccagtaaatgtgactgtctctccccgttctgaagaaagccatacaacgacggtttctggtggcaatgggagcgtgttccaggcgggcccgcagcttcaggcactggctaacttagaagccaggagggggtctataggtgctgctctctcatcccgggatgtcagtgggctgcctgtttatgctcagtcaggagagcctaggaggctgacccaggcacaggtggcagcgtttcctggagagaatgctttggaacactcttcagaccaggacacctgggacagcctgaggagcccgggtttctgcagccctttgtcatc

SEQ ID NO: 152925 - DNA, 541 bp, Homo Sapiens
aaagtgtaaaccttttatttcactctttcaaattttgttccataatgttcacattagtgtagcagtacatttgttgacacatattttcattgttcaatacatataattatggacacatgctcaacaaatatttttgtaaggaaatagcatcaggtttggagaccatgatctagataactgagtcaacatttcgctcctcatgcattcatagctatcaagccgtctttcctttttcccccttacctaccatatcctgacttctactcctagtttctccaagaggacaaaacatattaagatgcggtgggtcagaatgtgcaggtggtaatgtgacacccagctaatgagtctgagaggcatgggtatctcctcagctttcaagattacagcctgagctacacagaaataaactgtgcccacttaacttgcttgtgaacctgatatggaagcaatgatatcccattccactaggtggcagcaaaactctacccacaaggtgcccaagtggttcactggtattattagtgcttacttgttcagc

SEQ ID NO: 152926 - DNA, 814 bp, Homo Sapiens
  misc_feature (795)..(795): n is a, c, g, or t
agatgttctgaagtgcctgatatgttaaaattagaggtagcaaaatcacattttgtaaatacctttttgttacaattcataggaaatatttttgggggggaatggccaaatcacctgttgagtaatactcattgtgtttgtgcagtggttcaggggaggagagaggagggggaggtgcagagagctctatgccatcctgtttacagcgaggcaagatgaatcattatgtctgtgcattttgttttacttatctgtgtatatagtgtacataaaggacagacgagtcctaattgacaacatctagtctttctggatgttgaagaggttgccagtgtatgacaaaagtagagttagtaaactagtatattttgtacattttgctttacaagtcctaggaaagattgtcttctgaaaatttgatgtcttctgggttgatggagatgggaagggttctaggccagaatgttcacatttggaagactctttcaaattataactgttgttacatgtttgcagtttattcaagactgctgtatacatagtagacaaattaactccttacttgaaacatctagtctatctagatgtttagaagtgcccgatgtatgttaaatggataggtagtaaaataccactttgtaaatatctttttgctaaaattcataggaaaggcttttggaaattgaattgtgaagccacctttgtgaacagtatagtaatgtctagacttgttcaatagtttagaggaggtaggagggaagaaattgcaaaaggtaatattactagtgtgttcanacttggacatttcaggtta

SEQ ID NO: 152927 - DNA, 559 bp, Homo Sapiens
tttttttatgtttaacagttttattgagctagaatttacttacaagaagctgcagtaacggaaagtgtacaacttagtgaatgttaccagttgcatatgcctgggaaaccaccacaatcaagataaagccagatctattagattggcttccttgaatgggtgacccattttttttattcttggcattttattggcaggtggcagaaactcagcccacactacttaggcaaagaagaggggctagagatgtgtgtagttggaaagtccaggaatacaccagcttcaggtatggctggcttcaggggttcagaggatgtcatgggtgccctttctccccctctcaaccaaattctctctctagagctggcaagatggctgctggcagtccccaactaacattctatttagcaatgcctaagaaaaggagcagtctcctctgatggccctgaggaactcccatagggcagctttgggtcatgtgcccagccctggatggggtaaaatcagcaccggggatgtgtttgtgagagctgggtgtgctcatctgttcccgagtcca

SEQ ID NO: 152928 - DNA, 545 bp, Homo Sapiens
tttttggtaaatagatattttatttttagatcggggaatagcacatagctactttggggcaacagggacttaaatatggcactgcaaactcattaacttttcttctttgtagttgaaccaacaatggatttaagtgcatttaaagatggtctggaagttattgtcccaaatcctatcacgatcctggttccaagtacaggctatccaaggccaactgcaacctggtgttttggagataaagtactagaaacaggggaccgggtgaaaatgaagaccttgtctgcctatgccgaacttgtcatttctccaagtgaacgttcagacaagggcatttatacactgaaattagaaaaccgtgtgaaaacaatttctggggaaattgatgtcaatgtaattggtaaggaacaaaacatttatcatctaaggtgatttggcagtattaacaaatattagttcagactattaacagtgactcgtgagtgcattttttttcagctcgcccaagtgcacccaaagaattgaaatttggtgatataaccaaggac

SEQ ID NO: 152929 - DNA, 459 bp, Homo Sapiens
attcacaaaatggtttatcaactgcagaatattcaggatggtggaactgaatggtaactactgacaacatagctcagaaaggacgtgctaaaacatgctggatgaagctaactttgatccaggtcttaaatggaatggactatagtttatagcttcaacctaatcattaacttatgaaatcagagaattaaggccacttaagccactgtgctcagactgtcaagatatttagtttctcaaagcagaaagaggaaattaaatactcttgtcaattcaacatatgggttggatgattagcaggatccgtggattgttgtttatccagtatgtgaagaaacggatatcctctgttttctcgttattacacaaacttctatccttaatatgtgacctttcaaggttgaactctaggtaaaattatgaagtgcacaattacgtcttgtttcttcttccctttgc

SEQ ID NO: 152930 - DNA, 555 bp, Homo Sapiens
  misc_feature (129)..(138): n is a, c, g, or t
tttttacctccaattgatacagccatttctatagtacagagattcaccaaattttcttctttttgaagagcttcatcctaaaaaatactctgcattttcatgatcttttcaatagtttcaagcttacannnnnnnnnnaattcactgctcccagtttaaattaaactttaaggattatttttatattccaaaaagtaaagaacacaagtcacaaaatgtagaacatttagtacttttaggttactggggaaactttgtgcactggaaggaaaactaaacgtgggtatatgtttatgaatgcaccgggaagttgaactaatttgtgagaaccaataccatgtttgtaaagcaaaaaacagagacattggttagtaaagcaataaacttggatactgagaactgcttttgtttcaacaggtgaaataaagtcaagcaaatgcttcaaattttgttgtgagaatacctatgacctgatcacattaaattctcaaatgtaaaataattgcagaaattcactcttctttctaataagaagaatcagattttagtttgctt

SEQ ID NO: 152931 - DNA, 442 bp, Homo Sapiens
aaggaaatcacacctcaagatttattttctttctagaaacacccgccgggcagcagaggtctggatggatgaatacaaaaatttctattatgcagcagtgccttctgctagaaacgttccttatggaaagtaagtggcagttctgccttctcacaattactggggattcttggggtgtgggggtgggaggtaaggggctgcccccagcgttgaattcagctacccaggtgccaaggcgggaaggggttgtgggcacaggagcatgggcagtccacaccacaccacctgccccaaccctgttctcctcagcagattttcaagtttgatgtagaaagcccatctattcttaaaatttataaaggaatcttatttccctcttctccagtattcagagcagattggagcttaggaagaaactcagctgcaagcctttcaaatggta

SEQ ID NO: 152932 - DNA, 438 bp, Homo Sapiens
tgtttacaaaggtagatttattcaacctaaaggcctggactgtactctgagattgtgtctttcttggggtttatttgcattgaaattacatttactttatgaaatgatagtgatgttagcagatttttaaaaatgtttttacttaacaaaattaaagtacaactacccagtttgggagatcttaccagtctgtaaagccccaaacccttttgagtcagtgaaccagaaagccttggcaaaccacaaagagctacgaccagaggccacctcttgctgtcttcctttgctgcccctctgctagctaaagcctgtgtggtaggggtgggttccaagggtcaaggcccagacatgcttttcatcttgactttaaaagcacagattctggaaccagactgttagggtttaaatatcagttacactcctttctagttgcgtatg

SEQ ID NO: 152933 - DNA, 920 bp, Homo Sapiens
aacctgcatggaagcctagtatatttattaataacaaataaattatactttagtgtactattaacctataccaattttaagttgtgattagggaatggggatgtttttaagctgaattgtcttgctgcggaactttccttttttaataagaccatattatgactctgaatgctcaagggtaagtctaaggcctcattgctgttaccaggagatttttctagttacagtaataaagatgttaattcacatgcatgcagacaactgaaactcaagtggagaatttgtttgtgaacaagtcatactacttctgttatttgcatgaatggaatctgcaatatctttttccatgggagaccctaaaagaaaaccctggatcagaatgatctgcagtttcagataataaaggcttttaagagacatttttagaattaaaaatatgctaattttattaaatgaaaatatttgtaactgttaactttctcactgacaaagcaagtttctcaataaaatacctattttaacttgcattactgacatcttttctttgagtaatctgaataatgcagaagccatcatagaggtcttttctatacattctcaatgttttcttaaatgggtttcctgagttctgttcttcatgactctgggctctgcaaacagggtttcccaattacgcattctataaacacttttatgaatgagtcaatatgacattgagtccttttcatacatttcatcatttccaatatgtagagtgacagctagaaaaatgataaaattttgattaaaacctatctctttttcttcagcatagtcaattgttttcttaactctcaatgagtaactccatgcctagcttgtgcttagctttcaatatttttagactaagacaaagtgtatttggcattttgagaacaaca

SEQ ID NO: 152934 - DNA, 550 bp, Homo Sapiens
aatggattacatatacatacacacacacagtctcttttctcctaccattttgtaaatatgatgcaattaggttaatatgtgttttaagcagcatcaaacaagtttgttgaacagaagactagtgagatttgggccaggaagtaattctaagcattgaactttatcagagaacgtagtggtccacctccatcaatgactctataaatgtaagcttcttaatactatggtcctgtaaattcacattcagtatctacttctaagcctctggcatccccagtgaaaggaggctgaagaaaaagctttatccaaaggctgcctggggcctcacataatacaaagctgggtcgggtctacaaaaaaggtggaaagaccacgtttatcagccaacaacaactaagttaacacacactgtacatgttcatcaatcagtatcccccgtagcccagttatgaccactgcttaggagcttctcatggccaataaaagacatggctgtgaaatgatctgagtaggtcagaaggattcaagagagttcatacgaaaactaaac

SEQ ID NO: 152935 - DNA, 498 bp, Homo Sapiens
tttttgtggcttaaacaaaggtttatttttcttacataaacaaggaatctagaagtagtatcatttgttcagttgctcaaggtcaagagcagcatcttggttattccctgatggttgcaaaatggctgctgcagctcctctgtaaacaaattcatggcagtaaggaaggagaacaggtggcaccagccacctcatcagattggaagatatacaagtttcttttaacaggcattggcacatgtttctagagaccacatccaccattttcactggttgtaactatgactccctttcctaaagggagagcagacaagaaaagatttagctttttctagacactatcatgcagggcagcaaaaactgctagaattctgagctgatgaataacatcctcaaagaggtgttttaggagggtacagcccaggggacaatagaaaaagtggaaagagaagaactagctaaccaagcacattaagaggcaattgatgaagtaaatag

SEQ ID NO: 152936 - DNA, 553 bp, Homo Sapiens
  misc_feature (213)..(242): n is a, c, g, or t
  misc_feature (529)..(529): n is a, c, g, or t
gcctgtgctttttcccactgcctgttatatttttctcactttccttctcagtccctcactttttccaagtcagttgccattcatcttttaggtctcagtttagccatcagttctttcaggaaatgtatgctaaaattctaagactgagacaggtatttttttgtatccctgtgtatcctcctacttactataccagattacagttgcttaatnnnnnnnnnnnnnnnnnnnnnnnnnnnnnnttcctgtcatggtgttctgtcgtatttactgttatattctaccatgtagcacaatgcttggcacatagtttgttggagatgaactaaataagagacaatgttagactaaagtttacttttaaccttcagacgtagtgatttcttatctttatgtgctgaatggtatgatactataattgttgaagttctaagaaaaacccaactataagaattgatactgttttgaggatttaaagaacacagatacaagagattgaaaatgtgctgtaggtactaatactagcctnctgctagtaggtattgtgctagcc

SEQ ID NO: 152937 - DNA, 550 bp, Homo Sapiens
ttttttaattgtataattcctgtaattttataaaaggaaattaaaaccattcaaacaccaacctgacccttctgtaagttagcatttctccattatgtaggtagactcatgtatttggattacaataacaattgtttgtccactgctccattcttagggaaattctcaactggttttatataaccttctggaaggctgaggttctcccttcgagctcccatccccatgcaagatgacgagattccccactctctgttaaggaagtctctaggtattcaggactgctaaagtgcagcttgtctgtccgtggaagacacagtggcaggtgtaaccctggagggtgtgtttatcagaggtcatttccgaaaaagggcctttccttttcctctcgctttgagaattcctagtgtcatctttcagttctttccccagagagtcacagtctgctttttcttttccctttctccagctccaagccctcaatcttgtggtctggttttgttcactctacgggccaacaattggctgcatggtcaacatgtgatttaaa

SEQ ID NO: 152938 - DNA, 462 bp, Homo Sapiens
tttcctatgctttctcttctctttcatgatatccttggtgtcctgcagcatcttctccttccaaagatcaaagaagtatgaagggtctgtgtagaatttgagtgcctcttttccatcgtccctgtaaggggtaagattgttgagagggggaggagtatcacaggtattgtatgtttctaagacaggcactgggagagagtttctgtcaaaaagcttctgggtcttgaatgggtggaactttctgaaggcttttcgggtgttgattccttgcagtgaacaccttcttcttccttggggatcccagctgaggtgacctttaccctgtaagtcggtcgaccctctcagcaaggggagcttacccgagaggcaaggtaattgcctgaattaagaagttcttccaaaaaggtctctggaatattaactcagctgcccactgtcggatacattgcaggtgaattttgt

SEQ ID NO: 152939 - DNA, 320 bp, Homo Sapiens
tttgtttttaaacctttgtttattcacttaataaatttaccataaaatctttgtcttaaaatgacttatttcgtgatcacatactattccatcccatgaatcaatcagccaatctccccttttgttggaaatttaggttgtttccaattctaaccctgttataaagaatgctttctgcacatacttagtcatttccttgggggacatgtacaaactggaattgctgagccagagctgctagcttggaaacacttactgagcactatgggagtcactgttctaaaacacctgacagacatgaactcatcctgtcaacagca

SEQ ID NO: 152940 - DNA, 485 bp, Homo Sapiens
tttaggagaatgtaaggcatttgtttagtgtttactgagcatctactgcatgccaagctctgctcaggaggccaagagagcaggataggagtgagccctgcacctggggtttggcctggctggggagccctagcctcaggaagcaggactgccctggaccccaggaggcccctgctcaacctgcgacaagactgaaaggctccccagatgcactgtgacggtcaagggagagaaatgggtgacctgggatcctggtggcttcagatctcattgggggaaggagcaagggaccccaggggtcagaggcattgggggggtagggctgtcagagggcacccagcagagtgactcacaggctatgaggaaagaagtctcctcttgcttgtatcttcaggatgccaagacctgcagcccaggcctggggtggtggttatcccagagcggccttaccaggtgcacagctggccaagggaggcttggtcatg

SEQ ID NO: 152941 - DNA, 243 bp, Homo Sapiens
aagtcataccattacttctttggatatgaatgtcccaagtggtatctcctactgtagtatgaggaagaatggctgttaatgtattttttgaattttggtcttgtcttggcctggatcatatccagtcaccactatgcaacaaatgatgtgcactgggcaaggatatgatgggttatgaaagctgtatcttgtttgttttttcttttgcagtactccaagtggtctaaacaggaatgtcttgta

SEQ ID NO: 152942 - DNA, 517 bp, Homo Sapiens
  misc_feature (424)..(457): n is a, c, g, or t
  misc_feature (501)..(501): n is a, c, g, or t
ttttaggattttcagtatttttattttccaaacattattttaaaagaacattaaaagcattagaaatacaaatcttgcctaatggttaacatacgaacaattattataaaatgtttaaaatacgtcacatactttgcatcacagtaagcatcaagagaactaattaacatatcctgataattaatcatattcaactgaattctcattacttttagttctcattttagcccttatgaagagataagttatatatttctacctccacctgtatcatcatgacacctttattatgataacacaggtagaagtagacatatataacttacgaagaaagaagttatgtctctatagatatagagatatagatacggacgggggctatgaatcgagcccactatgtatttcatgcaatttataacaatannnnnnnnnnnnnnnnnnnnnnnnnnnnnnnnnngatgagcataaagagacaatacctcatatgcacctgcttagttntctttgtgctgtaatt

SEQ ID NO: 152943 - DNA, 491 bp, Homo Sapiens
ttttttaaacatactttatcttatttaatgtttataaaacctctgaggttgtacgtactcctgtcatttccgacatgaaaaaactgggctcaaagaagttgtcttgcccaggttcacacagatgtgagcaggaatcagaacctgagcccatttctgtggctttgaagcccacatcctttgcagtccgctatgctgcattcttgaaagaaagtggagttcaggtgaggtgactctccatctgttcctcccaccctcttcctacagcccagtcttcccagcagatccaagaggttctggggcctcctccttggaagtttgcatatgcagttccctctatccaggaggcatccccatcactgtgcttagcttatcctagaaacaaacaacaacccactttggtaggtggtgcctttatgacactttggatgtctctgtgatgaacctagatcattgtgtgtgtcacttctgatcaggatatctgatttcctgca

SEQ ID NO: 152944 - DNA, 388 bp, Homo Sapiens
tgcggccgccaacttttagtatgtgctagataagaggggaataaacatttatgtatttaccatcattgtttttgggcaggaagagagaaaagctgctgataacaaaattaaaaaactaaaacttcatgcgaaggccaaattaacttctttgaataaatacatagaagaaatgaaagcacaaggagggactgttctgcctacagaacctcagtcagaggagcaactttccaaggtatggtgactgggtgtagtgtatatttcctaagttgaaaaaacctaccaatacagcagatcttcaccaatcacaaacatttaggatgctaaaatgatacagcactaaataatgttttgttttgttttttcttatagagcttgtagttcagctgga

SEQ ID NO: 152945 - DNA, 449 bp, Homo Sapiens
tttcaactttatttttaaaaacctccataacatcccagacagatctgagatgtcaaatagtctcattttcatggcctcgttccttgaaactttttttcatactagagtgcttactctatggacttagagcatgttgtcagagagagagtatggcccttgaattcagaaacacctcttttgcaaccaactttgccttttacttgttatcttgggcaaatttcttaacctctctgggtctgtgttcccctctgaaaaaatgaggaacacaacacttgtctcacaaggttgttgtgaggactacgtgtgataatacaggtaagggtttgcaatcacagtgacattcactactcgcctcctccctgctatttgtaacctcttgctattactatcaaaggtcttcattctgtttggcttgatgggactgatactaatgagattttcctttctga

SEQ ID NO: 152946 - DNA, 274 bp, Homo Sapiens
gtcccccagtctcgagtgtcccttccctgtttaattcagatgacgatagaaacctcccagctctacctggtggagcagggctggcaggttccttggttccacagcaaggaaatggagcctcaaacagaaacttgccttccaagcccatctcttagcccttccattccctggaaccagcccaagaccagcccaacaacactcacacatcaagagactggagccctgtgaaaaaaaataaatctattttcttgccttccagggcagccaaccagtc

SEQ ID NO: 152947 - DNA, 581 bp, Homo Sapiens
tactctggttagaaatatattactaatctaaactttgttgttggctggctctgaaaaatcagaacattagaaatggttcgcttcacttgtgcaaagcactttaaactgttcaagtagtttaacatattcaagaggaaaataaagagcatttaactttatttacagccttaagtggagttgggagccgagctgaacttagaaactttgaccaaaagagcgagttaggggcgaggatgcgggcgtgggccaagcggaagagcaggagccgggaagaagcccggtgagaagagtgcagagcgctcgaacccacactccgcgagggtccccaaagcagacagcgggcgctggcggtgccagggaagccgactcctctttgcgctctaggcccactgtggggttggggctcgtatagaccccagggcacagccagggcgcctggaccctaggcgcaggcctactgagccgcggcgaagtctaggcgttgtctgaaggccgcggtgtgccctcgtcgcgccctgggctggcgggccaatatgagcggcaggcccagagagcgcaggtgggggcgaccctcagaaaaa

SEQ ID NO: 152948 - DNA, 682 bp, Homo Sapiens
  misc_feature (42)..(99): n is a, c, g, or t
agtagtgacagggtttcaccatgttgactaggctgatcttgnnnnnnnnnnnnnnnnnnnnnnnnnnnnnnnnnnnnnnnnnnnnnnnnnnnnnnnnnntgagccaccatgccctgactacttaatttttaaatgtactgtacatatacataaaatttaagtagtaaattaattccctgctatgattataagcctttataaaatattatcaaaggtatgattagaaacaaatgggaggaaaacccatagtaaaaatattttcattgtcattttaatgggtaaaactatcaattactaattagaaaatgaattgtgagatccacttactataaatttttaactgtacattataattacttttttaaagtttcatgtacctaaagcatatgctaatttttaaatatactattagcagaaaaaattggaaaaatcaccaatttttaagactcttgactctaaaagcaaaatcaaagtgatttggacaaatatgggaaacacagtcttcatgcttactgctgtctcttttatagcagcagatgccagacatgctaggaaaattactatagtcttccatctccaccaacttaagaaaactggcttaggaaggttaaacatgagaataggcctcagcagttatatacagtgtcatgttttcatttggcaacaacatttattctaataa

SEQ ID NO: 152949 - DNA, 537 bp, Homo Sapiens
ttttgggtgcaacaggaaggttttatttaggtggccactggcccagcggattaacatccaaaggctgagcccggaacaaagacagggcttgacttttatacatgcatcaggcaggggcaagtcgggtttttggcgcaaaacctgcgaggtgagaaagcagtcttacagaagcagaacaaaggcagttaatcataccgtgacaggttttacaacaggatttgcaacatgagcctaccttacttaaacatgtcttgtgaccttgccatgctacagaaagaaaaacaagaacttacaaaatctttacagacttgcagaaatagttacaaaaatagttgtgagagcagaacaaagaataatgttatggggagagaatttcaaacagggaaactgataaggagaacttgtttttctcatccctgctcctggagcccactccttcggagcccctgcctggccttgcagataattatcatagctccagcaggactttggagtgagtcagactggtcaggaaaggacttgttttccctttacttg

SEQ ID NO: 152950 - DNA, 500 bp, Homo Sapiens
ttttttttggtggaacaggaggattttatttaggtgaccaccagcccagccgatgaacatccaaaggctgagccctgaacaatgacagggcttgacttttatacatgcaaccaacaggggcgggtcaggtttttggcatgaaacctgtgagacaggaaagcagtcttacagaagcagaacaaagacagttaatcataccgtgacaggttttacaacaggatttgcaacatgaccctatcttacttaagcatgtcttgtgaccttgccgtgctacagaaagaaaaacaggaacttatgaaatctttgcaaacttgcagaaatagttacaaaaatagttgtgagagcagaacaaagaataatggtatggggaaagaatttcaaggcggaaactgataaggagaacttgtttttctcatctctgctcctggagcccattcttttggggtccctgcctggccttgcagataatgttatcatagctccagcaggactttggagtg

SEQ ID NO: 152951 - DNA, 484 bp, Homo Sapiens
ttttctgatgctcctttccagccactgtattgtttttattaaatggaatactgaattaaaggcaaagagcatttgtactaggcatccaattttacagaaaggcagtcatatgatctaccctggctctcaaagaatccatcttgacatcgtacacctggttttgcatgtggcatcagagagggaggaaattctggatgctggctttaagataagagtaaggcatccaaacttctgtgaaaccagcagccatcccctctcagttcccaacttcacactgagcgggaacaaaagaaataaatggagatgaatgatgctttggtttgggaaataatgcttacatgcataggatgcatccacttaagtcttttaaaaaccattgttctaatgattttattgctctgtaacaaaataaatcaaactgacattgattccaaggtgattgtgaattgaagtttaaccacgttaatgactaataggatggaag

SEQ ID NO: 152952 - DNA, 976 bp, Homo Sapiens
aatttggggagaaagaactgggggatgaaggtcgacatggcgttccagattaagcatgccgttcaagtagacagctactggcaccttaaattcataaaagagcatttagcaccaaactgtacagtgatgtcctctagaataaagaacagtacttaccaagaatagttagcttgtaaccttacgtcgacatagttgttcttatttgaatgcagattttaaagttttatcacgcagttggaaaccacagctactatgagcatggattttttcatacttatctctttcatttccgtgaccacttggtccaaaggcatcaggattgtatccattttacaaatgataaaactgaagctcaaaaaggttaagtaacttggtctaagtccccccagctagtaagtgtcaaaaccccatccgaataacttcaaaacctgtaggtatagtcatcaaatgtgtcttgaatggaattacctacagtgagagttagtgcattaggtaacaagcgcagagaggaatgactgcctctgctgatggtaaccttgaattttacaaatgacactggagcctttctgagactagtgttgcatgggtcctcaataaaatcacactgttgttactcacttcctttgggtttataaccctggtgataaagtaattgagaatagtggagtaaaccctcgacttgaattcaggaaaattgttttcaaatccagtttcaataaatctcacatcaggcactctatttgatgaatgaatgaacaaaacctaactataagacacttgacttcagggagtctcaattccttcatctgtaaaaagatctaattcctaacttttggtaatgttggggagagtgaatgaaataatgtgagagtgcttcgtaaattgcaaaagtgttataaagaagttactggtaagagctacgagtgtctcgctgcactctagcatgggcgacagtgcgaggccctgtctcagaaaa

SEQ ID NO: 152953 - DNA, 458 bp, Homo Sapiens
tttgctattcttttataggttagtgttaatgcttagcataaagatgcctttgtttgtaagtaacaccagcaactggaactgaaccagtaaagatttattggttcctataatggaaaattccagttgtagtgtttgggtttcagcagaggtctgatccagaagttctcaatgtcaacaaggctcttccaggcaggaggtattatttgtggtaaaattttaattgttatcattatttctagtttacagatcaggtaaactaagaatcaaagactataaatgaattatacaaggtcagatagcaaataagcagcagatataacactcaagcctagatcttgacactcccaatcaatgttcctattgctcaaatggatttttatatggtttttttcaggttaattagatattctatttgatcactgagtaatctagtaagaaatcagctcacatttagccct

SEQ ID NO: 152954 - DNA, 736 bp, Homo Sapiens
tttatttttatgcatccattttcacttaatatacatttcttaagacatagcaaaatagttaaataagaaataacaaattaaggtggattatgtaggctaccaaggaggtacattactttcttccattaatccattatttgacatcttggtaacctaggtggtttctctattttgtagtaattgtaacatgatttttttgtgcactcaataggttttacttaacactgcaggctcacacagaactattagcaatactcagtctcttgtctcatccttcaatccataatatgggagtaccagataaatactctcctggagggaaggggactatttcttaaatgctggcgaatatggtagtctatactaaggccctatatgatcagctagtcaataaaagtctatataattgtaaaggcaagataaaaacagaccttttaaaacaatatactatttaaaagcagcaaaaagaatcctgcagatacacctgtatacttttaaggtatttaatgggcagcaaatgttgcctatcttcatctcaaagaaaatgagaaaaagatctgttttccacaactatcctgacatacttggttcttgaaagctctgaattcctttgtcttgttctttcatagctgtaaagtccagaaatgaagaatgaagaattcagaaatgaagaatttggtatctaacgttttcaacttactgccagtacatacctgcccaaaaatcaacataaaaa

SEQ ID NO: 152955 - DNA, 522 bp, Homo Sapiens
ggttgctttttgtctcaatctagataatccattcaataagaagtaaattaattatccttaaccaatggtgggctgagaacaacccctcaaaatagatattttttatgttaaatggggagaaatatctatactttatgttatactggataaaaatgtgttttaagtctaaaaaaaaccagacgagctaaactttgcctagtgtgtctacaaccattttttaggagacgcaggaataccagggcataataagatcagattggtgtaattttgtatgtttttgaaatccttcattaattgtagaaccttgatatgattagaaacaaactgtatttcaacaaacaggtttcagtatttgcacactgaaaaagtgttttgtattttaactataaatatttcacgtatctgtatagaccatctagaaatgtagaggtcttacagcattagaacgaaggaagtttacatgtgctctatctatttttctgagcctcttttaataaaggttgcaagaaggcataaaaaaaa

SEQ ID NO: 152956 - DNA, 519 bp, Homo Sapiens
ccctgaggccccaggatacacttttccctaacccttccaggtgcaaaattgtgaaaggtggtagatatattttgttagatgtttgaaaagtatgttataaagtaagagaagctgccattacagactcctttctccaaataccagtggtttaccataatagaaggttatcttttgatcatttataatacaaggctggtgtttctggtctactggtaacctcatccatattgattcaacgaccctggtgcctaccacctcctggctctgttatactaccaggcccttctaattcaaatccagacagtagaaggaaaaagagaatgttcaagagactcatttgatttttaaaaagtagcttggaggctacttcatttttatttacattcccttggagaaaactctgttacatagtccccccagggccccccaaaaatggcaagggagcctgggaaatgtagtctaaccaggtatccagcaaaatcctattaccacagggaagaaggtaacgggttttagtag

SEQ ID NO: 152957 - DNA, 578 bp, Homo Sapiens
gcacctcgacgtagggcccgccgggctggcgctggtgccaaagcgagaaggagtcgttgaagaggctgttggcgatggcgccgcagggcgcgatgggcaggccggccgcgctgcgctggtagggggcgcactcgttgacagggtggcgcagcgcgctggggagtccgctcagctgcgcgtcgtcgcgggacacgccgtagcgccggttgttctggtagaagttggtcagctcgtagtagaggtacactgggccctggaagagctcgggcagcgagaagtaccaggcgcacgagcaggggggcggcagcgcccggccctggccagccgcggcgcacaccgagcagttgccggtgcccgggtcgcctgtatagtcgtactccagctccttgatgccgttggaggagtagtagaggcccaggcccaggccgatgaaggccaggcccgcgcagaagaagagcggcagcgcgatgctggccgacagcagcggctgccaggcggggaggcgctgctgagtgaaggcggtgttgtcgggctggtgggcgccccgggccgtggcgctccaggtcatggcggccgca

SEQ ID NO: 152958 - DNA, 362 bp, Homo Sapiens
agaagcttagagcccaaagcaaaggggtggaggacaagggcatcttcagaacagagtggctcggctgagacatccagtaggatgccaccaggcagaggtgtggtggaaaaacacagggccacggtgaatgctcacatgtgaggagcaaaccaccacagaacacaacagaaacacggtgtactaaatcaggcttcaaatcgcagccctgcaacttgagagctaccacaggtaacccggaaagggagcaccgacagcaatgcccactgcctgaggctgtgagatggaccagaaacctgtgcttactaacaacctgccttattccagaaggaattcaggaaacacagagacactcacggtacagc

SEQ ID NO: 152959 - DNA, 555 bp, Homo Sapiens
tgctatgtacgtttttctttataataggattttactaagttgaaaaccacactttaaacttttttaaggtaattatgcttccccaaaggaacaaaattcatttttcttagacctggctttctacagcaatgcctcactacagcagagacacaaaatcttattactagccaaaacttcactcaggggaaagtaaatagggcattaattaacacttaaacaaaggtttattcatcataaagtcaggaaattcaatgctaagatactcatgaggggaaagaggtaatgaatttgtggaaaaataataatattcactctgtgactacctaatcgcttcttgaaatgaaatactaatccttggcacaggagatggactgtggacctctccattcttcaacaaactatgctcttgctcagttctggaagagctctctcagcaagccaaaggccttttcctctgggctgcccaccaggtccactgcctctgccacggtcaacatctattcctgcctcaggtctttcattgccctaggttcgggcagtccgtcagcggccgca

SEQ ID NO: 152960 - DNA, 460 bp, Homo Sapiens
tttatttgaagtgccaaattaactttagtcagaatgtgagcagatggctaagttctctcctccccagaatggattaacagctgcgtggaaagtgggggagagagtggatggagacttttagagatgttaaaactgcagtagaatgaaatgagtcagggagcttcagttagaaaataaagttgaggcagtttttgtgaagataatatggttagggctggagtgcactagtctttttgcttattcattttgcatggttttaaaattaaaaataattccgaagatacaccagctcacaaatgaaaacgtcagcctctgccccaccctccctcctgcccaaagtgaatttggtactcagaaaagaactgtttataccactcacctttctcccagcatgtactcactgtgggcagatgcaccaatacatggtagtcctcttactcattttaagacgtcctcgtgc

SEQ ID NO: 152961 - DNA, 460 bp, Homo Sapiens
gtaggtgtttgttaatttttgtatatatcatgttcaatggagtgaaattaagggaatcatctatattttgtgtaggcagatcaattccattttactatttctattgaatatttgattttgctcctcttactctcttctctgaggcagtatcatgagaaagaaaagttggttgtaaatagaccttctctctcttgcatccatcatctgccgtcacaaaggaaagtagtttaacaattaagtagccaaggatgacacctgtgtagtagaggttctgcattcagctgcaccctggatcctgggaacataattggacccaaggcctgccccattgtacaccaaagaatgttaataacatggctgcatgcatgcatgtgtgcacacacgatacactggctacacatttgtaaggatctgtttttttcaggaattatatgtatctaccaaagcagatagatacata

SEQ ID NO: 152962 - DNA, 316 bp, Homo Sapiens
cagtgtcaaaaagattttctaagacagaggagcactacggccaagtgtccttttatgatatccacagaattcaaaattgcagagcctaaaaggcactaactttatcctgtcgtatgtcactgtggaaagcactcttcagagccatgttcccacacttgttttctcactgtggagtacatctgtgttggtgacttcagctaaacctgttccccagggataaatgcaacagcccatacaaaatcaggcatgaggacacagtccaacaacttcgtgtataaataaagttacacattcatcgccagttgcttgttttaaa

SEQ ID NO: 152963 - DNA, 434 bp, Homo Sapiens
ctctatcagggaatccttggggagtattgcggcttatacctcagttttcctacctgtaaactaagatgatagtgagcttaaatgagataaagcatgcaatatgcctagtacataagcattaaaaatgtttagctattatgggggagagactagaggaagtaggtggttacagcttgagtcacattgcttctttaaagagtttttgtttaattttctaaaatttcttaaacattgttgcaaatttgttgaggtgaatctcatagcctctggctccattttccaacctcaagtattcaaaataagcttgtgatctttgaagtacagaagtgcagtcccaattaccacaggttaacactcacctgcagctcatatctatttctttgaaaaaggaaattaaaaagttgaactctgagttttaatgttggttcactcca

SEQ ID NO: 152964 - DNA, 554 bp, Homo Sapiens
  misc_feature (145)..(157): n is a, c, g, or t
ttcggggaattgcctttttatatttttaagagcaaaacagagatgaagaagattatttcatttataagcttatttccacccagtaactcagagacagagctaaggaagagtgggcccccatctaacaaatggaaaggcagagacnnnnnnnnnnnnnggcagcagcagcaaaggcaagttagaggctttcccggcttggccactgcgctaggagggagcacaggacacaatggtgatgcacaggattatccatccagtcgccagcatgcctcatcagagatgctcccagccagggtgaacttggtttccaccagaaacatacacgttagaaataagggaaggaaacgtggcaccagtatgaatttctgggtcctcgcaatgcagcatcctctttcgcctgtggtttatatgcttacagagagtgaggccaaggaacccaagatgtctcttctggccagcctgagaacgtctgtagtcaccagtgccaggtggcagtaaacagcaggcgttactgggaaaaaaagttgggaggggtccccaatgcttccctgttt

SEQ ID NO: 152965 - DNA, 905 bp, Homo Sapiens
  misc_feature (787)..(829): n is a, c, g, or t
ttttttctagagaaggaaacttggatttattgagcacctgttcaggcagggcatgtcgcatacacacatgcacttgatgccatttatttcagagacagagccgccttggagatacaaatttcccagctctggtcagtgccctggccaactgcccatcattagggaaacacaagtggatggtcaccacatccacttgttttataattaatataattgaaaccaacaagaggaacttgaaggggccttacacagtttagaagacaaattaacactcaagggctgcctcttcaacataggttttcccatctttggccaagacatatgatcccacaaagccattgccaacccacagacattatttcacttctgtgagcttagagcactgaggtggctggagtgcaccctgagggctgattctgtgttttccaaatgcacgtcccgtcgggaggtgggaacattcctcatggttgcaaattctttctctttctgcttctttactctctctggacagtggtggtgtttgtattatttctcctgggtgatctccgggcatgactgagaatgaagcccattggctcattttcttaaagtttttcttttgaagaaagaggtaaatttgccaagtgtctggtcagggttttgtagcaccaagagtttccttaaaatgggcagttacgcgtcagatgggggctgtcagaagaatgaagaaacaatctcctgccccacgaatcaagttttcccaactttaaaggagtggaaaagaactcacaaagcatcagcatatgannnnnnnnnnnnnnnnnnnnnnnnnnnnnnnnnnnnnnnnnnnctgaccgaccggcagcgtctgttggatttaataattttgaggtctctcaagaaaataaaacaaaaagcaaacgaaa

SEQ ID NO: 152966 - DNA, 1105 bp, Homo Sapiens
  misc_feature (1044)..(1052): n is a, c, g, or t
tttcttccaattgactgtacattttaatatcatggaaacaatccattagacaagctaaatttacaaggtaaccatttccaggtaaatttggaacctttcacctaagcgtgtccctttaaacaaagggaaataaatcttggaaattatagtgaagtggggtgggggggaaacagctgctcagggagcagctactgcatcttacctggacaaatcataattaacacaaatgtaaatgcccccaaatccaaaacatgcagctagtgatgaggtctccgttctcacaattaagttaactttcagtttgtacaaaacaaacctggcagcatctgtgggagccccccacccccaccttcttttaatcacaaaagcaataattagcagaaattgggttggcgtccagcatcagactgcaaccattggctcaatcagagttttagccaagaggcaacaggagagccaaaaaccattcatcctgacacaaacataccagtcccatgagagaacgctaattgatttaagctctctttctcaaccttcaaattgcaaagcctgcagataatttccaggcctaagttattcctcctggctcctctcactctaccaggtatcagctggagaggctcatttttggtaccattgtgcgacgtctgctgcagtaattgggggcttctcatcaatatggctttcttagagaaatctgtgttcatggcagacaggtgaggccacagctcagcttcctaaagctaagtttaggggaagctcaaggtttagtctctatgatagactcaagcaagtttgagctttgggagacaaggggggaaaggaggagaaggagaggggagaacaaatatacactgcagacaaaagacatgaaaatctaaagttcaaaacccatctttgtttccttttctaaaacctttcacaagctactcttaaaaactggaagttcatactgatgttggcaaatggcgatgatacttgccctagaaaagggagagctcagtaaaatgagttgagactttttttaacaaatgaaatcttttnnnnnnnnntgtacattaaagcctgttgttgggtttcattgctgttaaacaggatgaaaatg

SEQ ID NO: 152967 - DNA, 570 bp, Homo Sapiens
tcatagataaataagtatacagagagtgaaagatatgggtacaagtatatagagacctatcaaaaatacattgcttgtggtattaattctcatgtgtgattttagcatattaaaaggctgttttgtgtttttagaaccataagaataaatggggatgttacctttcagtttgttccaaagattgcatgcatcattaccaaagcttgagtctttttactcccctgtcttgttgagatacctactacttgagcatactctggaatgagaaagtttatcgattaacatgctgcttacgcagataggattagcatttccttaatttagtataccacgtgttgtatcaggcataaaagccagctttttttagtcataccccaatgtttaaaattgttaaatgcagacttcatgttcttttgatcatttaaatcatgacatggatatttttaatttttatattctagtaattatcaattgtcctggtctggctgcttagagtatcagtttgctcaaaattgcttgaatcattaaagcaaatactaattgtgagcattgaccagatcttaagttaaa

SEQ ID NO: 152968 - DNA, 456 bp, Homo Sapiens
tttttctatgtccaaaacatttatttcaggaaatatttgtgcctgcacaacaggggaactttgtggggtgtctgtggcttgctacagtgacatctggcaggactaactgggtcatcagagccacagaataaggactgggaaggtggccacaactgcaaggactggggccatgtggggggaggactctgagactgaccacttggctggtaacttggctgtccagtgtatgggaatctcagtgagttcctggcctgaagtcagactctgtctctgacgcagacgtgagaggtcggagtggcaggaactgctcagctgctcatccgggaacttgtcctccaaggggctttgccatttgttttcttcctgtaccttttccacttgtctgaagacccgcagcaggtttccacgaaggacaccctgaagctcttcctcactccatccacgactcaacacctc

SEQ ID NO: 152969 - DNA, 553 bp, Homo Sapiens
tttcttcttcattccttcctctctgtctttcctgcctccttcccctcatggtctccccattcaggttctcacactcttctcctctcttgctttctgaattgctttaccctcttgtgtgcttgtgtgcacacatgtgtgtatgtgagtgtgcatgcatgcatgtgtgctctgtcctgaggctgagcaaggagggagagtggaaacagaggcagagaaagtggagagaggagtcaggatgcaattccaaatcttctgaatgggttttggctcagaggtctcctgttccaaattacaaaatccaacccgggatgggaaagtcatctacatacttagtagactgtctgctatttgcttgaatatctccaatagcagggagcttactatcaggcagggcagctcaatcccttttaggaaacctctaacctgttctggtgtatatcacaccaggaatgaatgaatggccctcgttattctatggagtaagtcttagccctctgccttgtgtctgcacttcatccacttgaagagagccacccaggtgtgcacaagtcat

SEQ ID NO: 152970 - DNA, 702 bp, Homo Sapiens
aatgcttttattgacaggttggccgtttgcttaatgccagaagttgggggaaagttacacttttctaagaataatggactcttaaggcattgagggctctaaacaggattctttaatcatggagcaagagaatttcaaggcaggggattttatcccccaccaaaaacacagtgaaaggcctgcttttgtgtcccattcacatgccctcggtcactgagtctggagtgaaccacgggttgaggaagtcaggctgttggcgtgtcccagcaccacaccatccctaaagtgccaggtgatctcctgtggctcatcggtggaagcagtggggtaggctgctgccctgctgtggaagaggagcaacaatcagacatgagtccaccctttggagaccaggcctcatctcttggtgggcccatggacacccacacaggtggccatcacagccccatggacaacactaattgtccacagcagagggcaaggaatcctctgggagcttcttccgtttcttccggccagatacccatcttgaaaaacactatttctggaatgcttctgcatcaaaggagattctttgagatagcccatcttgctgagctagcaaatacatgagttttcactttctttaggaaagagaaagctttcatgtgaatgagagaatgattttgctgacttcccagccctggtgaccagaccaaggca

SEQ ID NO: 152971 - DNA, 722 bp, Homo Sapiens
ttttaaagtaattatcaatttattatcaaccgtatcttatctgaaagtggatttaatgctatacatagagctcagacttggtaataaaactgtttgcctttgctcagcagtgtttgtgaataacctatgtttttctgcaggtcagacatggctgtgatgccacatgctggggtccgggacctggtgggtgccttcagacgctcctgcacagagccattgatgaaaacaacgagcccaccgcctgctttcttattcgcaggtctgagagtccccagtatctctccacagctttttagtgagcttgttgcaaactggctctttcctttttaaatccgtctatagtcttggcatgccagtagccggcttgactttcacagttaaggttatcagagagtcactgttctgtcatgtcaagtcagccaggagccaggctcacttgtgacgggaggagctcacagccctgaatcaaagaatctgaaagctggagtcagcgtcctgctttgggagctgcctgagctcctgtagtcacggcagaccagttcagactgtgaagcaggaggctatggctggggagaccagatggtctctgcaggaccccaccacgatgtgtgagtcgtaacaggctctgtggcccccttggagtgtgggaagtgtgggagccgaggttattcaggaagccttcacagcagtggttctcagactaatggttttctggttttctt

SEQ ID NO: 152972 - DNA, 486 bp, Homo Sapiens
gaggggtggtagtgatgtgcttttattcttgaatttgctacaataattagtgtcttctcttgctttttctccatcagactaaattggggatcaacagagtatgtatagcttagtggtcagcccaagactagccagatgttgtgctccagcaccttgagccagtagggcttataccccattgatggatctgtttgtgcaatgggagcacatccacatatcagacttttacttcctgcagtgtccttacaggtcttctctgtacatatgcatggccttccagtctgccagtgatgtgttgtgaagacctcagctagctcttctacggtgctctcggttctgttgctcaccccaccaaggataacaacttcaggcttgtattgtagtattatggctttcattattcttttcctatttggatatgggagttttttgctctgcactccaaatcaagtcagcctctgcagcagcaaagctgctcttaatagt

SEQ ID NO: 152973 - DNA, 1039 bp, Homo Sapiens
tttttgggattcactaggcttatacttttattcaccaattttcagaataattataggtgtgattttctaggttatatataatttacagcttggagagtggttggaggagaataaggggtcagcaatgatttcctctactgcctgtcaacctttcccgttctgaatgccccttcttcagacatgatatccacaacagaaagccttcatttcccctcccccaccgtagcttccttagaggactccaaaacaaaacggggctcaccggctttgggaatctcgtcagctgcccccagcgcactggtagactacgaaagttcaaaccccttgcaaacatcaaagctaggaatatttcgcctgagtgcagagggagggtgatacttaaggtaataaagccacgccgtgaaacctgggtgtagcacttttttaaaaggcgctcattcgccttatttgctcttttctcttgttttctgtgtaattgttgcattcctccttttatccaaacgcttaacacaaactcattagggggtaatatttgtcaataatgcgagcaggagttgaggtgtgcgctcggctgggccgcccgggggggcgctgaggttgccttctcaggcggaggaggcgaaccctgtagcccgacaacgccgggcttcgattttgaggagcttcttccgggatgtcgctatactggccggagacgggccttgcgtgtccattgggggatggcgatggggaccagtttccgggtagagaaggagataactcgatacaggaacgcacaggcagcctgcactcgggactcggtcagcccgatacgcagtgccagctcctcacgcataaagatgtcggggtagtgagtcttggcgaagctcctctccaactcgttgagctgtgcgggggtgaagcgcgtccggtggcgcttctgcttctgttggccctgctgctggccggcttggctggggttcgggccgccctggggcccgggctgcttgttcgggtcttttgcgctcacagcccacgaaggccgagtagaacacactgt

SEQ ID NO: 152974 - DNA, 437 bp, Homo Sapiens
tttagtagacatagtctttttttctttctcattttacagcaaacattgcaaatatagaaatatttttttctgtacaatagaacgactacagtgtacatgggggctgggctgggggacgtgcctcccagcccttggccgtcctggccaccccggccgtccacaggcacagcctccacccaccctgagtccagcagggctccaggacctgtcccggaggccacttggccgccggcattcactctgcccctctgcagtggactccggaggcggcaatgaagagacggaccggacagagaatccacagaaaaccacggaccgaggagatcacgtgaggggccccgaggtggccacgccggccacaccccccacggatggcattttatgtctttttaaaataacttgtcttttattatatttctttaaaaaaggaagaaagt

SEQ ID NO: 152975 - DNA, 566 bp, Homo Sapiens
gcggatagcattcccaaagtgggactgcctggccagagtatgtaactggacttgttttcatgacccccaggcagggccgcaggaagcatcaagtgtttttgaaatggcttctggacccatagctctcccgggttggttggcttacctttaaccagaacactcccagcagaggctatgggtctgtgtctccttcaggtaaaatgagattaacttgagtaccaagggaaacagtgaagtgtaaaagtcaagagctaccgtttatcgcaggccaattaggtccgttttgtgtgatcttcaaaataagtctcagaagcagatattattttacccacttcacagatgaggagcttgaagctcatcaggaataaagattttactctatgccatacaactggaaagtaggaaagtggggttaaagctcactttcacatggctcccaagcaaattctgcatccattctggcagcttgaagcatagcctagcttcatggtactgggtaccttgcagaggaggcatgggtagaacagagtccacaccagatgtctgactgtgacataagccacagc

SEQ ID NO: 152976 - DNA, 505 bp, Homo Sapiens
  misc_feature (74)..(87): n is a, c, g, or t
tttatttattagaaaatgcaatttaatataaaatgtaatactgtattacaagatgcaatatattattcatactnnnnnnnnnnnnnngcctggacaataacttggaattgacaaatgcacatcctaaaatcctgtcacctcgctatgagttcatagttctctgataaccggcttcaagaggagaatggcttccccacttgcccccaagaagatagggatcactagtataagtcacatgatgaaagaaccagaataccagcctctcagactggaaggttcctgggcccttcccccttctttcctgacaagggcaggtgaggttcccccattagaaggatctggggcactgcttataagagcagcctgttacaagattcaagcacagagagctataggagttgaagtttggtttcttccacttaaaaaaatatatatccaccctccttactcaggggtagacctttcaaatattaataaataatgctgtgtgacattctgaataaac

SEQ ID NO: 152977 - DNA, 450 bp, Homo Sapiens
tttgcaataaattatgctgtacttcttttgctgtgtgtctcttgtttaaattcttttaaactaagaagataagaaccaaggtattacatcagccatcaacatttctggtgccatgacctgcggagacgtttgtctgcttcattaatttcagtttccctttacttgcagtgaatactatggcagtttcagactacctggttaactatcgctgctggttccagcgctgttccagtaaagttctgggggaaacgtttttaagtcacccgcattctttagagagagaatatatgtccgctctccttttctctgcggcttctgtagtatcgataaatacgctaaccacatgggttgccctcaacatttcatatttgggctatttgccgctcagtttcacatctttctggccacagtttagactcagcttgtcgtttgctgtccgttcagcaatac

SEQ ID NO: 152978 - DNA, 377 bp, Homo Sapiens
  misc_feature (56)..(71): n is a, c, g, or t
ctcttcttgttcttgttgttcttctctgtgtgtgtgtcttactattggacaggggnnnnnnnnnnnnnnnngtgcagggaagtcgagctcaaatgaagggatcagtggttttacaataaacctggaattagcaggaaaggttggagtaaataagtgtaaaatgtgtagcagttcctcttgcaaatcatgctctgcacattctgcacatgtatcccagaaccttctggttcaatgttgacatggataacggcttccactaacttttccttgaacctgtggtcaggccactgcactgcatcccaggtggcagagggagaccagcaggtttgtgaagagaggcacaaggacataaacagctcaggatgggtatcaagcaa

SEQ ID NO: 152979 - DNA, 519 bp, Homo Sapiens
  misc_feature (485)..(485): n is a, c, g, or t
gtctaagtatacttttaaaaaatcaagtggcactctagatgcttatagtactttaatatttgtagcatacagactaatttttctaaaagggaaagtctgtctagctgcttgtgaaaagttatgtggtattctgtaagccatttttttctttatctgttcaaagacttattttttaagacatgaattacatttaaaattagaatatggttaatattaaataataggcctttttctaggaaggcgaaggtagttaataatttgaatagataacagatgtgcaagaaagtcacatttgttatgtatgtaggagtaaacgttcggtggatcctctgtctttgtaactgaggttagagctagtgtggttttgaggtctcactacactttgaggaaggcagcttttaattcagtgtttccttatgtgtgcgtacattgcaactgcttacatgtaatttatgtaatgcattcagtgcacccttgttacttgngagaggtggtagctaaagaacattctgagtatag

SEQ ID NO: 152980 - DNA, 504 bp, Homo Sapiens
tttaactgtttattgttaccaacttgtaagatgatctcaaaaagtgacttagtgcagtggaaaggagtataattacattataaacacaattgccttctcctttgaaaagttcactggactacaagaaatcccataaagctggagaaagaacattccctttcccttctggtaggaacaagtaacaccctccatctgttgagctcctaatgaagctcctctgtgccacccactggatgagggatattacatatgttagctctcatcttaacccatgaaagggctggtaactcctgtttacagaagaggaaacagtcccaaagaaacatgtaaaaagcaccaaatatcacaccacttggtactggggctgggatggatattgctagtgcaaacaaatgaaggttcttacccaaagatttaaatactttcaagcatcttgcttttcaagtttagattttcatttgacctacacaataactttgagtaatttcagtctccaagagcctg

SEQ ID NO: 152981 - DNA, 301 bp, Homo Sapiens
gaatcgagatttatgtgtgaaacacttctaaacatgccctataagtacagtagattctcccctcacagccacaccctgtaagtgctgtattttcagagctgaacaattaacataaggagcatgagtcaggctttgaacaactctgtgggaaccagaaagccttttgctattaggaatgatgtaaattccccaaggctggaagaaatccacaatggaaggcagacagggtcataaataacaacaatgaatactgcatatgccacataaagtatgatgctgtgatagtgacactctttcaaat

SEQ ID NO: 152982 - DNA, 520 bp, Homo Sapiens
ttttcaatgaattaaagcagtttatttaacattaattgcagaatgcagaatttacagcactaccatttaatgataggaataaaaatagaaagaatccagtgtaagcgatgttgcagacaaaacattggggtgggaaatgagcaaaactgaaaatgcaattaacattcaaagaaatcttccaaaaggactgggagcttatcaggggatgggcatccccttgatgatgaagcgtgatcctcatccccaccaggatttcagggcagccactgaacatataccctgttgaccgtccctggaaagtctttcagcacagtctgacttaacatgtttgagatggggcaatatctggattataatacactttggaaatatagcgcagggtgaaagacggtaatagtgtgcatttgtgtgtgggttttctttttcaaaacggaagagagtgcaaattttaggggtgtgttttcctgattttaaacatgagaggtgatgtcaaagggatcaactgaaaagaaaaagttgg

SEQ ID NO: 152983 - DNA, 668 bp, Homo Sapiens
ttttacgaggaaaaatactctattttttaaaaaaataacttgcttcctatacaaatcgctatttaaaaatatacaaataaggcccaagcataaaatctaactctggggctggcggtggagggaaggtgagggagggggctctggcacacgtccctcgtgtgtgcttgcgcgacggctgatgagggcgcgccagggaccctggcgcccaaggagatggggctgcagggaggcggacggagagcgttccaggcgttcggctccggccctgctccaatcgcagagcgcgctccaaagtcgagggtagccccaggtgccgccctgcggcctcaccagttccaggagaccagggcgggggatgctaagtgctggtaggcggggaagaggccaagcgccgagccgggaccgaaggcagggtagcccggcagagggcaggcggcggctggaggggcgccgcacttctcctgggccgcggcggttcccacctcgccaccgccgccgccgccgcacggctgcccgtcgcgaacaagcaccggcaccaccacgcgacgcagcaggcctggcgcggggtgcatcttgggggatgctgccaggtcaggcgactccgccgcccctggagcgcgagcgcgcttcagcttgtagcgatgattctggaaccagatcttgacctg

SEQ ID NO: 152984 - DNA, 448 bp, Homo Sapiens
tttatgattaacagtatcccctgaggcctcccgcccaccctcaccgcggctccatctccagattcttccccagccactcctggctgcttcctcctcaggtgccgccaccttacggagctgaactcggtcacctgacgcttcagcaagcaggggcttgtcctgaagctggggccgcgggcggcagggtgctcagagccagttcatcctgccctaggatgccaccttggtcctcagcagtcacaggaccactgggtctgaagaacttccccatggcacggacctgcggcagctcagagaaggtctccactgccagcagcatggccaagagtcccccttctcaacgctgccaccagagctcttcgactacccctcccacgccgtgccctggagtgaggtccctccaccaagaagtgcgagctggcccaggtggtaaatcacggggtgcagg

SEQ ID NO: 152985 - DNA, 536 bp, Homo Sapiens
tgcggccgccaaccatcaccttcccaggccaaggtcttaggttcccctggaacccctttggctttactcccttcctgggctgggggaaagggtggggatataagctggtacttccaaagcagaaagctggggtttggggctgacagagccgaccttgagcttgagctccatggagtacccagcccaggtcaaatggggtcaggaagccatctgtgccttctggatggctctgtctgaatgattcacttctgcctatggtgggtggaagttcatggttttactcccacatggtgaccacagtgcatggcaattttctagtcaacaggtggggttggggcctctgctacacacaagaggcttctttcttcaagtttaagacttctgatgctcacaagaccctcccatgcccttaccacgtgcagcgctcacccccagggcctggggtttggtgagatgtgtcgcccacatgggctgggatcatattttccccagggaagatgaaagccctcaccctctcacaaagccaattgctaaat

SEQ ID NO: 152986 - DNA, 246 bp, Homo Sapiens
tttttggatagaaaaatgatgttgtatttttcagaatccatataatttggaaatgacacatggagaaataaacatatttcgtcctccaaatttaaacaaatgcttgctttttaaattgaaaacatttgtgcaaatgaacgtatttttaccacttagggtgaaactgttcagaaattacctggatctatacaactccaaatagagcagaaagttgaaatttatttgggaagcctgggctgcattaat

SEQ ID NO: 152987 - DNA, 470 bp, Homo Sapiens
  misc_feature (364)..(390): n is a, c, g, or t
cacccgagaactgcttcaaggtcgcctgtgtctgagtgcgggtaaagtgaatatcaacacccaggctatcagggtgagacaactgaattccatcatgtccatccactttacaaaggggtgggaggcaccatggagaaactgaccagaaatgctctgccctgtcacagaggagacagagccagggcagacacggctgacctctgggaggcacagacactggcagtgatgggtcccatgggatgcctggcactcccagcacagacagctccccaaagcaggtggggaggccctttctgtgtttgggaactttttagttaaacaaatcctcagaatcgaattaagaaggatgtccacagctcgatcnnnnnnnnnnnnnnnnnnnnnnnnnnnccaccaaggttcccaagatccttcaacagaggggcttcccatctgatcttaccctcctgtttcagaaggtattaaacatc

SEQ ID NO: 152988 - DNA, 350 bp, Homo Sapiens
aaagaatggttggttatgcctcgcgtgagtgacagagccagggttttgtcttctatcttcagggcagggtacagctgggtattggaattgtaccaagcagtgtttcccaagggggcacagagggagggcccctctccgggcactgtgcgggagccacttccccaaacagtccccgttctgcaagggccccggcgttgctgcccccgagacccgggtgcctgccccggcggtgcgggtcgcgggcctccgctctcgccgtcctccctcagtcccgggcctcctgcatcgcggtcgccaggcgcaggctcagcgcggctgacagcgctccagctcccgcgctcgcggccgca

SEQ ID NO: 152989 - DNA, 481 bp, Homo Sapiens
gtacaacaaaggttttgccccttcaggtacttctcacaaatgcaaatacaggaaagctttttgtaattgtaatacattcagcaaaaacaaaagcaagcaaagaataatttttccaaatcaagttgatagactgatatgcaagttgggaaataggatctttatatagagtttgatagacctcgattgagagacttttgtaagagtggctttatttttccccaggaaaagacattctggaacaagtttttatgtgaaaacaatctgtggttaagtgacttggagtgaaagctcaaactctagtgtaatctctgacttttgaatactttcttgaacctaaaaaatatgatcaaagctgtagtcatacaccagcagagacaaacagaagttgattcaccatggatgcaccaaaatctcagaaatcaccactaaagaacttattcatgtaaccaaataccacctcttcccccaaaacttattgaaa

SEQ ID NO: 152990 - DNA, 634 bp, Homo Sapiens
atgaaccaccatgcctggcctactttttgagccaaagaggacatttggatgcaggagactatgaaggttggggacagccagagagtatgaatgggttataaaggaagactagttagtgtttctctctccttgttgcttcctggcagtctcagactacattcctgatacagacagaaggctttgaggacatggtggccacagcggcatgctgggtatgtggggcagcgggtagggaaatatacaaggaaacatggctggtttaaaacacaggctagaagtccacagatttcctaatggcaagaatgaaaaggctgcattaggcgctggtgctgtcggagtgaaggggctcaggcatctggattgcccatcctattaggaccatttgccctatgagctaggtcaggacacctctcacttgttttgagcttagggcaagacctgacctctttcaaagtccagagcaggcagctgctgaaagcgtgtttggtcagaagattctgtgttcttagccaatgtctactggctgggggtcagttttccctccgggcatctgggcatggctggacttgggaaggattcaccctgttgactccagagaagctgactatcacatcagctctgaaaactcatcttt

SEQ ID NO: 152991 - DNA, 1184 bp, Homo Sapiens
tacaatataaatacactatacaatttttacttgtcaatcaaaaaagtaatcctaatgtttaaaaaggcaatgcataaaaactgagaacagactataacaactgaaacaaacttggcaaccatgagatgagaaaccagccagcaagtcaatcagaactctttcttcatctcgtctacaatattttgtatttataactgtaaattagtgtatagtgtttcactccagagacttcaataatacagtgttatcaaaggacttgtacagatttcagagaaagacacatttagaagatggagagttctccgttatgttctatctgagagtcagtatgaaatgtcaaatctaaaagtacataattcagaggtctatttcaaattaataatcatttgagcataatttctccactgtcagagacgactgttattttattttcaatcaaattaaaagttgtttttatgcatatcttatttttagttttatgttacttgtacatacgtagcagtacaagtgcatataaatcctgtaagagtataaatcctatagaaatatattaagctgataattatgtctgttctgtttgatcacagagttgcaacaaataggcctcatttcctaagttgaggaaatgattttctcattttatatgagacttgtggtgtggaatttcaaggtagaaccaaaatgtgtggaatgaatatttcaatgaagatgcgttctgctgctaatagcaggaaatcccatctagtggctttatttttctttaacccgttatctcacatagccgatagatccaaggctgggcatctccagagttgctcaactcagcaggccagtggcatcaccagcgaccctggaacttcatagctcatctctttatcacacacagtatgtcagctttcctgagatggtagggtgacccctgcagcagctttaggtttgttattttttcccaacaactcccaaaggcaggaaaaggatactcctttttcctgtgtgcctttataaggagcaactaaactgtttccagagtgttcccagtaccccctttttcacacattggaatgaccgtgggatcacatgggctcagacaagccaggattcaacctttgcagagtgggcctgaggcacatgggaagaaaaggagcaaaatcatgtattttaaaaaataaagaaatggtggatgg

SEQ ID NO: 152992 - DNA, 398 bp, Homo Sapiens
  misc_feature (181)..(350): n is a, c, g, or t
aaaaatataaatttaaaatattttcttttggagtacttattatatcctcagaatgaatttcccatccatgaaaatgatcctcttagaaaattactcaacccaaccaaatccctcttgacctgaattttgccaagaagtttgcagaaaaggagttctacatacccattaggaatgaccaacnnnnnnnnnnnnnnnnnnnnnnnnnnnnnnnnnnnnnnnnnnnnnnnnnnnnnnnnnnnnnnnnnnnnnnnnnnnnnnnnnnnnnnnnnnnnnnnnnnnnnnnnnnnnnnnnnnnnnnnnnnnnnnnnnnnnnnnnnnnnnnnnnnnnnnnnnnnnnnnnnnnnnnnnnnggttatccaagattaatgaacacatacatcctcacaaagtcttgtata

SEQ ID NO: 152993 - DNA, 488 bp, Homo Sapiens
atactactactaagcaatttacaggaatgtactaatatctgcaataacatagatacatctccaaataattatgctgagtagaagtaaaatgaaaagtacatattatatgattccatttatataaaatcattaaaaaactataaactaatctatggtgaccagtgcttgtctggagttggtgggtggttggtgtttggggaggaaaggattacaaaggagcatcttttgggagggatgaatatgtagattatatcttgttacgatttcacaataaatatatttgtcaaacaccaaattgtacactttgaatatgtatagtttattgtcaaatataccttaaagctgtttaaaaagtttagtaaagatctatgaaaagctattttgtttcaccagaggaattaatcaaacatatctctcaatttacctctttgaaatttggttttacacttttagatgttaataagtcactatataagctcccattttga

SEQ ID NO: 152994 - DNA, 702 bp, Homo Sapiens
agaatgttttaaagagagagggtatagtctatcaagaacagcagatttggaaattagaggtggccttgggtaaaagtggtttcagtgaaacagaagccagattaccgtgactagagaactgactgggaagtggtaatttggacttcttggaaagttttaattgaaaagcatggaaatgggatggtagatagagaaggacagaggattaagagaaagttttattttctttgcttctttggaatggggaaaacttgggagtgaagctgaaggatccagtaaagtaaaagaggtaaaggtacagaagagtgagatttaggagaaaatggaatccaggacctagggggagcagggacaccttatgcttgaggtcataggaaaggagatggaggggcagggactcagtaggcatcttgaggagagtggtaaaggtctggaatatcgtaatggaagagggaatgaaacacaaaagaagtgccttcagggctaggagcctgactaagatcaaaggccatgaatttgtagactacataatcttcacagtctgatttacctagtactatgcaattggcacaatataggattgaaaagagctaggtgcagccttaagccatggttgaggttttgttaggcagttatgataggaggatagcaacaccagggaattacaagggccagtgggaatgcagttcaaatgaaagaaca

SEQ ID NO: 152995 - DNA, 540 bp, Homo Sapiens
tgtggctcctagacttttccagttattctggaatctgggtaaaagtttcctgtagttatttttagtcactgacatgaaaaatattttttactcaaataaatatgattataataatttattttttcaaaatgaatccaggtagtacatttcttacaaaatcttctcatttgttctaccatcccagtttcttctaggagacggctcttttatatacgtacatacacacacacacgcatatatgcatagatgtgtatgtgtgtatacatatatgtgtatatacatgcatttaatatacacacatatctacacacgtacatacagatattgatttctctcacaccaatatttttaacttaaaggcaaaaacatgttattttaaaatccacattattacacttggagatgtgggaatgaatcatgctatgatatttataaaccatgcccacttgccaaggcacattagtagaagcttacgggatcatgtaaagataagtgattctcaaattgtttttgataaggagctttagactagcaggaata

SEQ ID NO: 152996 - DNA, 442 bp, Homo Sapiens
tttgctgggatgtcatacatattctctgattactgagctagtaaatggaatctcagctgtcctgattgtgtgtaattctgtcatttctaccacaagatagagaccatcactgcttacatagataacgtgccattcacatccaggtgtactaatgtgagagagaatggccaaagatagcaatgtgcttggcacacccttgcacgccatcgtgatcctcagagtgaagtaagaatggctattgtcttccacaaccttcttcagggttgctgctggggaagagctcctctgtcacaaggtgcctcatctgaagccactattaaagcgggtgtccatgctgaccataaacaaagcacatttcacagacctattaacagttggaggcaggtgtttcctggttgttggacgtttcttctctcacttagcaactcagggacacaaactg

SEQ ID NO: 152997 - DNA, 484 bp, Homo Sapiens
gctgcccagcttcccgttacagtggcgtatcaggtcgtccatgctgctcatgagcagcccaatggtttcgcagccgggctccttgccctcgatccaggtgatcttatcgcctcggatgtccttggacgagtcactcttctggctgaccagctgcccgtccgtgaacttcccggtgtcgtgcagggcgcgcacctcgtcgccgatctgctgtccggtctccttgccgaggaagtcgtccaccacacagatgccgtgcttgttcatgcacggcacgatgtactcgagcgccagcttcagcgccggcaggggcttcgtctgcccgttgggccgcaggccgccgccggggctcagcgcatccccgggcgtgttgcttggggggtacaggttcgccttctcctggaacagcgatgagcgggccggcggctcctccttgccgggctcggcttcggcagccaccgccgagccctggccgccggcggccgca

SEQ ID NO: 152998 - DNA, 499 bp, Homo Sapiens
tcttattcagaaaacacagctgtgaaacaaaaataatgttttaagcaaggacctaattaacctgctgatgagacatatcatctatctctaagccaaacattaggaacttggcacctctactgcccccagcctattcattcttaacacgatttcaaaatgcttttttatttggtttcaagactgcagcaagatggagaatggggaccactggagtcaggcattgttaagaatgagcagcagcagatccgttcatctttcagaacaaagaaaatcaatgagcatcaacactaatccaaacaccgcactttggggccatttagggtagaattaaacagcctgatatacctcgaatgacctaaaagatgtcaccgaattatttttaaaattgattattatcatgacccttaattgctgtggaaggtggcattatgtttagtgtcctgattgtgagtggtataagccactttagaaaggctttttattcaaaattgttattaaa

SEQ ID NO: 152999 - DNA, 609 bp, Homo Sapiens
caagcttctaaccataaattcagcttttcaagagcaaatgctttgaggatcgtcttaagaattataaaaaaactattgtgagagatctgcaaatttaggtttaggccactgctgatatcctaaactaagtgagatctgtaatgtctgcaagttagtcagaggtgaggatggaaagcagcaccagtatccacaggacaccagcaccatccatggagttctcaagggccactcaaaaaagcctgcattctgaacacttgttgttttatagtatttggtgcttctggtcgtcaccatgtcctcccacgcccactacacacatacacacatcccctgcatagtgcaacataacattgcaaagccacaaagaaatgtatcagagaactagtatatggacccaacaaagcttcaggaggaccttgttagacccaattaaagccatatggcatctagtgaacacatttttaaaaggctatcctgtagctcagaaattacaaaataccacagaaagaaatgtcaacaactccaattctttactacacattaagctactaaaagtaacaggcctcaagaaaatcgtattattcactgcattttcttcactgtgataaa

SEQ ID NO: 153000 - DNA, 688 bp, Homo Sapiens
  misc_feature (451)..(459): n is a, c, g, or t
  misc_feature (461)..(461): n is a, c, g, or t
  misc_feature (463)..(463): n is a, c, g, or t
  misc_feature (465)..(466): n is a, c, g, or t
  misc_feature (469)..(474): n is a, c, g, or t
  misc_feature (476)..(476): n is a, c, g, or t
  misc_feature (478)..(479): n is a, c, g, or t
  misc_feature (481)..(483): n is a, c, g, or t
  misc_feature (485)..(485): n is a, c, g, or t
  misc_feature (487)..(489): n is a, c, g, or t
  misc_feature (491)..(492): n is a, c, g, or t
  misc_feature (495)..(497): n is a, c, g, or t
  misc_feature (499)..(500): n is a, c, g, or t
  misc_feature (503)..(503): n is a, c, g, or t
  misc_feature (505)..(505): n is a, c, g, or t
  misc_feature (507)..(507): n is a, c, g, or t
  misc_feature (509)..(511): n is a, c, g, or t
  misc_feature (513)..(513): n is a, c, g, or t
  misc_feature (515)..(515): n is a, c, g, or t
  misc_feature (517)..(517): n is a, c, g, or t
  misc_feature (520)..(522): n is a, c, g, or t
  misc_feature (528)..(529): n is a, c, g, or t
  misc_feature (535)..(535): n is a, c, g, or t
  misc_feature (550)..(550): n is a, c, g, or t
  misc_feature (553)..(553): n is a, c, g, or t
  misc_feature (567)..(567): n is a, c, g, or t
tttttatctggatgcaggttttattatcattaggatgactgtcatcgacaagggataggggcttagagggttatatacaaaccacaattcctaggcgatgtttcaatattcccacacacatttatcccacagccagacacagcacaacaccacagggtatgcccctacatatgcttctccaagcagtaacacagctgtgggtcagggctctgcccacccacaaagggatgcccagaaaggagaagatcctgggtcctgggggtgaagtttacacatggagaatcctgccaggttggggaggggatggaagctggatttgcacacaacgcttcagtcccaccccaccctcactggctgccctcccaggggctccctgtcccacttggggagtctttgcaagacacagaaggaccatcttagccaaggctaaggaaggagcaggcctgtggtnnnnnnnnnanangnnctnnnnnntntnncnnntncnnntnntcnnngnnaangntntnnncntntnccnnnttcttnnctcggngctttctccctttcnctnttcctttggtcttnccttgtcatccctgctgctatgtgacatgtttctgttgctcttccccctctttctagccgtatcattagttgaatctggggtgataatggagactacattaattattaggttctcctattc

SEQ ID NO: 153001 - DNA, 444 bp, Homo Sapiens
ttttctagttgttgcagtagatatttatttattgaacaagtgtgattgaactagttgtttgggaaagagtggggaacaaaacagacagaagtccctgctcttatgaagcttacattctagtcagggagacaggcattaccatctgcaaaggcccataaatgaaaggtacaagggtggtccttatgaggaacaggctaaaggacagtgtagattggagttcaagagcaatggatgaggctgtagagatagggtgtcattgtaactggagtctagattttaacaagatgaccacacatcatcatcatcatcaatcgttttatagcacttgatatgtattaggcattgttctatgcccttaaaaacagtacttttttaaaactctcacaataatcctacatgtataaaatcatgctcattttatagaaggggaaaccaaggcgcaga

SEQ ID NO: 153002 - DNA, 540 bp, Homo Sapiens
ttttcatgaatcatgtttggttcctgtgaaagtccctggtccagggatcctcctcctttctcttttacttctgaattctgaaattcagttagttacttttgcctttcgctcttctatcacagccaccttgaccttgggtaaaacccaaggtctttccttctggctaccttcctgcaggtccaccctgtctgccattggtctcctctgcctctgactacatctgccaccaacaaccctcccctcacccctgccaggggcagacaggcttctcagcagaactgtgactgaaatcagagctgctgtctggggcagtgttaactacacagaggcacatcctgacagggtttgccccagagatctaaattccagaaggagggcaccacacctaggaaggtaaattcagtatcagaaggttgctaaaagattaaagatcaagaagcttggaaacatcccatgggtacaatgtcttagaaagtctttaagtcacataccatgaatttttgcttcattactgaccatatatgaccttggaggaactct

SEQ ID NO: 153003 - DNA, 433 bp, Homo Sapiens
tttttagccaattagtcgtttaatctattttctgaactgcatgcttattttatggatgcagagtagattggttgagtgtgaggacacttaaaaatagcatgatacagttattgtaggaagtattaatatttaaaaattgttacagccaagaccaaaaagtgagaaccacaattcaatattttctataaatttcataaatgtctatgtttaaacattcctggtaaatatgtataatcgtacacttttaaactttctctgataaattcagtgagtattcaataattgctcattatcaaaaggttgtgaatttgtctctcttccagccagatgacaggagcctaggattccaatggtgtgctcaggactgacatcactggggtcaaagattcagctgccatggtccaggctccaggctggggaggatgttagggat

SEQ ID NO: 153004 - DNA, 486 bp, Homo Sapiens
ccgcagcaccacgaggtggccatctgggcaggctcagtcagtctggcggccgggtgagtcccgcaccaggtacacgcactcgtgcaagcacacgtgtgacggcaggtctgccttcctccatcggaaaggaacgtagcgtctcttcgcaccccccaccccaggcgcggggcgcaaaagtcacaggaagggccgccagggcggcagagtccatcggaattgaaatcccgttactggtgtgtagagaattctacgtgggtgtcaagagcccctcagggcacgggctggcccgggtgggccctgcctttcccccaccaaggctaggggtggcttggcccctaggagtggagaactggcccaggccaatggggcaaggcggcggggaagtgagactcccccattctccgcttgaaatcccattcaaggaaactcactacgagtgaatacagattgaaatggaaactgggatcgctcgaagtctggtgattt

SEQ ID NO: 153005 - DNA, 320 bp, Homo Sapiens
tttttggatatcagcttttattttgtataacaaaaagtaaccttaatgaagcaataaattacatgacaaaattcaaagattagataaggtgaggatattaaaagtaaaagtattgaattacatatacaagaaggcattgaccagtaaatgcatggttgcttttctccacaacacagaattcataatattggaacacttctgaaaaacaccaattggatgaggatcttcaagaaagtcagcccagtgtcaggctgtgagtggttttcctgggatgactggggaatggttagatcaggatgatggtggggtgaataggtttg

SEQ ID NO: 153006 - DNA, 536 bp, Homo Sapiens
cacccaatttggtgcttggcctgtccggtggtctccatctctcactgctgctttccaaatgctctgcctgccatttctagaaggggaaatgggaggctgagggaatcagtaaggcacccaccaaggaaccatgaaggacgctggattcttgctcatgcccttagctgggtgctgagctgggcccaggttgcagtaaaacagggctcctgacccaaaggtcacaggcacagtaatggaggctgaacggaccgctgtggggactccacccttcaatttcaaaagctcttccgcacctccctcccaaacttaggtttaaatttgaaccgcctcatcccttggggaagaacccccttactctgcctcctcctcctcccatgcgtggaatgcaagagcacagagggtaggaataggagacctccttttctcaaatccaggagagcacagagctctgcacacccgcatgcccactcagcacccccaagtcccgggcggagaacggccagggtaccaaggcctgggacagggacgcggccgca

SEQ ID NO: 153007 - DNA, 527 bp, Homo Sapiens
ttttttcactgacaaagaacttttatttctttttaatgacattaaacacaactgctacaagggaaaaaacatgataaagaggaggcaccaaacttcagtttcataattgaaactgacaacgccagtaaatcagggcctgcattcgaaactacaggttatttcaggctccttacttgtaagtaaacaatgtaaacagcatatttttactctgctttgtcaagacccccatggtgggaatgtcgtcatggatgaagaaagcagttaaatgcacctaacacttgcttaaaaaataatacagcaagaattccaactgcaatattagacttagaggccaataccaaatatgagagatatgcagctttgaaaagagatgaaaactccagattctacccagtaccatctttaaggcgaacatgccagataatgagttttctttggctttgttttttcttcttaaagaataccatgttaaccactagagaacagctctctcctcccccagtccaacagatttaattaagctgcta

SEQ ID NO: 153008 - DNA, 862 bp, Homo Sapiens
  misc_feature (777)..(785): n is a, c, g, or t
attatgtcaccgctcaactctggcaaatggtgtttatcaaggctggcagaggaataaattatgcttgtgtttactcttttgttcccatggccaagtgctgttttattaattgttgaacaccattttgaggcactaaggaacgtaaggagtcaagatgaaaggacatttaggtgaggatcaagactgttaacagaggcacaatctaccgtcttgctggtcattgcaaaacattagccagttgccagaattgagtcataacacttacatcaatgtttagttattttacaatttagaactcccctgtactgttgtaatatattataatgttccattgcctttgttttccccaagatctaatcacgttgttcatttctcttaggacaagaccagcgctctgagcctgagcaatgtggcaggcgttttctatatacttgtcggaggtctggggctggccatgatggtggctttgatagaattctgttacaaatcacgcggcagagtccaaacgcatgacactcacaaagaacacccaaaactttaagcctgctcctgccaccaacactcagaattatgctacatacagagaaggctacaacgtgtatggaacagagagtgttaagatctagggatcccttcccactggaggcatgtgatgagaggaaatcaccgaaaacgtggctgcttcaaggatcctgagccagatttcactctccttggtgtcgggcatgacacgaatattgctgatggtgcaatgacctttcaataggaaaaactgannnnnnnnnccttcagtgccttatggaacactctgagactcgcgacaatgcaaaccatcattgaaatcttaatactttgcttgaaa

SEQ ID NO: 153009 - DNA, 410 bp, Homo Sapiens
  misc_feature (382)..(382): n is a, c, g, or t
accatgcttggccatgccggttgtttctgctgcttgctgtgtagaccgctgtgatgaccatcttcttattgaccctgctttgtctctggagccccgccacctgccttctacctggagccttccttccaggtccttcttcaacatcagctccaggatctgcaagatctttggatatggccgctgcagaaggaaggagaaccacttcctggagaagcaggagtgagccaggatctgccacacaagagagccgggaacccagggcatgggttaaggcgaggagcaggtccggagggaagatctgaggcaaagagagagcctgtcacctgtgctgccttgagatgctgacatctgaggatgccccagacagggcctgtggctgctntctgaaatagtgcagcaccttctctgct

SEQ ID NO: 153010 - DNA, 543 bp, Homo Sapiens
tttgttttatgcactctgtacatttttcttttatggtaaaaaaaatatctttaacctcagggggaaagggagaaaaaggaaaaagcgcatgcacttgtcccatgggtgctgtgaagggctgttcagagttccaggggctccactaaggcagcagcggctcggcaggccatgtcttttggcctctgcaccaacctgtcaagagttaagcctcaggagggcaggccaggtgactttcagcacacgcattcgagtgtgcacgtgcacacacctttaacttgatttcccaaattctccactttgtggttttaaagctctctcaatacccagtggctgggaacctgagccaggttcctgaataaaggctttgaggttgcctctctatgctaacagagtgctctcaagggcctggtaggcagcccgaggtggaaggtgggctcacaggagctgctatgggctgcgtcttagagtcttcctctgccagttaagagcccgtcctgagaacctgagaaaactactcaggggcatactcatgggaaaggcaga

SEQ ID NO: 153011 - DNA, 791 bp, Homo Sapiens
  misc_feature (53)..(73): n is a, c, g, or t
cgagttacaccaccgcactccagccttgggtgacagagtgagacttcatctcnnnnnnnnnnnnnnnnnnnnngttttagagcaggaatgaaaggaagcaaagtacacttggaagagggtcaggtgggcaacataagagatccaagtgccctgttcagccttgggcttggggttttatacatgggcatggttccggggtttgtgtttttcttcccttaattttccccttggggcaggctgtctgcatgcacagtgacctgccagcacttgggaggggccgcatgtgcagtgcgtttactgaagttgtgtgtatgctcgtttgaggcatttttctcttaccagtcaagcattcccagaggaaggtcatataccagttaaactcccattttgcctcttagtgcacatgtttgaaccgactcgcctagctcctgagatcttatcaggaagctgctgatcactagctccaggtattttctatctactgggagactgcaggtccctggaaccagctgcaaccaattatcattttagcgacacagtttaacaactgcctgaccatcacctgatggttgcctgacgacctgataggggccctctcctgccctgctcagttctgcctaactgcctactctaacatactgatttatgtcttggcctgcaacttctgtctccctaaatgtgtaaaaccaagctgtaactgaccacactttctcaggacctcttgggattgttctcccagccatggtcactcatattggctcagaataaacctctttaaatatcaaaaaaaa

SEQ ID NO: 153012 - DNA, 565 bp, Homo Sapiens
  misc_feature (542)..(542): n is a, c, g, or t
tttaatttataaacaatagaaatttatttctcatgaatctggaggctggaaagtccaatatcacaggaggtgctggcatctggtgagggccgtcttgcttccttggtttgtgacctcttccctccatcttcaaagctggcaatgtagcatctttctgcctttgcttctgttttctcatctgcagcagcctcattaagaatgactcccgggcgaacgcagcatctaatgggttaatgaggctgggcagcctcagcctgctagcagctgcttaagcagcaggctggggaaagctctgttgattttcattcttcactgctgagtgatgaagggcaacaaaatgccctcgcatgatcctgagctggaagtccgccctcagaacagtggtacaggaagtgatcgctcactagctgagccaatagattttttccaagttccccagtgatccctagggagtagctgtgagacttgaagaatctgtgttgcctcctgtgttacaatagagaagtccaaaaactgtccacatagctaccacctctgctcangctgccataacgaaataccatgg

SEQ ID NO: 153013 - DNA, 156 bp, Homo Sapiens
ttgttttacaaaacaaggatgataattatcatagcgcctaccacataggttttgagaatcaagtgagttagtacatagtgcttggaacagtgcctgatacacagtaaacttcataagccttttctttttgttattatttaatgtgctcacatcaaa

SEQ ID NO: 153014 - DNA, 488 bp, Homo Sapiens
ctaatttaataccctcaagttgtatatataccaggaaatagactcataatctccatcctaatcagtttgtaatataaaaggaagaacaaaattcccaaactttaaccctatggccttttcagtgtttattgatgagtatattgcaaacacctgggtagccagagcacctctgcttcactcctctgcttagaagcagcttctgccacacatccaggattatgtaatacatatctgtcacggtccacaggaccagcggactttaaaaaattaatggtgacataaaaactcacagtggtagctataccacggaaccctaggtgagaaggcacctccacccgcacacaggtgtatggacgcaaggatgaacgttccggccgcacgcgtcccacacacggacgtgcacacgggcgcctccgaataggctcgcggttcccgaagccggctccgcggacgcctgctctggctccgtgggaaaggcgcctaaagag

SEQ ID NO: 153015 - DNA, 393 bp, Homo Sapiens
gttttgttttgtttttattcttcagggaccccatttatacatacgttaaataaatactgtttgccaatgtatcaaccattttgcttcttatttatttttgttcctttggttctttttcatggctttgctttggtgctccttagattttcagtcagatgtatttgtccttgggtaccttgtaatcagtattaccttttcttctgtcgctttgttttctgttcgttttgaaattacttgtttcctggtctggcaataacagttgagatatgaggagtttgagctgccatctgtctgtgtatcttgctttaagactgcactcttctattgatatcactggccttgattttgtgatttctttatttcttcaggaccacccttcattttctactgttt

SEQ ID NO: 153016 - DNA, 598 bp, Homo Sapiens
  misc_feature (575)..(575): n is a, c, g, or t
ttttctgtccttacatcatttatttctatggaattggcatctgcacgtacgaggtgtaggcaagactttgggtggccacgcgaggatggaagggaagggcttcgcagtgctcagggtcacacgtgggcagagcctcaccggagggtctgtgcatttcacgcgggctcggccgcacgcgccggggagcgcgtctccaagggagggtctgtgcgcgtcgctgcgcgggcggtgctctccgggctgcatcgagtcccatgctgatggctgcgtctcaagaaagcagaaataatccgaagtcgatggcaggaacgctccaagcatgtgctgctcagctcagctgctgttccctttctgcccaggagttgggtcttgtttgttttgtttcggagcggctcagaataggtggggaggctgatagtgaaagagaatcaggacctgccgaatgagtctgaagttcaagttatttccttccctcacacaatcagtatttgctctgcatcagtatctgtcagtgtggattcacgcacaggtgtgcagtcagaaatgcccattttgcaggggttcatggaggtgtngattaggctgggaagagaaaggg

SEQ ID NO: 153017 - DNA, 472 bp, Homo Sapiens
  misc_feature (360)..(397): n is a, c, g, or t
attattttaggtccagggttacatgtacaggtttgttatatgagtaaattgcatatctcaggggtttggcctatagattgtttcatcatccaagtaataagcatagcacctgataggaagtttttcaatcctcaccatcctcacaacctccaccatcaagtagaccccagtgtgtgttgttggcttttgtttctagttctgtttatgcagtgaatcacatttattgattttcatatgttgaaccaaacttgcatcccaggaataaagcctagcctacatggttgtggtactggtttgggtttgctagtattttgttgaggatttttgcatcagtgttcatcagggatattggcctgaaannnnnnnnnnnnnnnnnnnnnnnnnnnnnnnnnnnnnnctctgccaggttttggtatcaggatgatgctggcctcatagaatgggttaggaggagtctctcctcagttttagc

SEQ ID NO: 153018 - DNA, 509 bp, Homo Sapiens
ttttacagacgtgtgaataatattcatttttgaatcaagagcttaagaaattaggatggctaccctagtctaggatcctcatattactaatttcttccgcctccacaaacactctgggtagggagattctgccattaactagctctgctgtcctaagcaggtggcttctttctgcctcacagccctgttcctcctctttgaggtgtaggtgctggacaggatctcctatgcctccagccctaacgttcctctgcctgtctgcagggggatgcaggagggtggctgcgggaccactgccttcagaccggggacgcctttctcatcgtcttctcagtcaccgaccgacggagtttctccaaagttccagagaccctacttcggctccgggctgggaggccgcaccacgacctacccgttatcctcgttggaaacaagagcgacttggcccgctcccgggaggtatcactggagggtgtgtatcctgaacagattccatacttgcgatctca

SEQ ID NO: 153019 - DNA, 828 bp, Homo Sapiens
  misc_feature (61)..(91): n is a, c, g, or t
  misc_feature (585)..(585): n is a, c, g, or t
gtgccaagctaaaattaaccctcaactaaagggaataagcttgcggccgcatacgcggtcnnnnnnnnnnnnnnnnnnnnnnnnnnnnnnnattatgaaggtactttgcagttgtgtttttattgtagagacttaatttatttaaagaaagagttgtctgtagtcctgtcctgtcctggagacatgaggggctgtctggtgtgaaggaaagtaggagggacagaaaacaccgtatcgattcagttccatcatccgctgcagtgacttcggaaaacagaatccagcatcccggtcctcccagcctcaggatgaactggtgaggagttgttctttgtgctgtggccagcgtgaccagggtgggctcctggcaatggccacgagaggtcaggagggggagctggcttagtggaaggtgttggggttcggtcggatcatcatcaccactttcttgagtgagtaagagcctcctcggaactcagcccagtagactccgtcctggtagcggctccggtaatggcccccgcggtaccagaccccgttgaggttggagtgggcacaggcgttataccaccagccttccttctnggtagttggcacagtttcctgtgtagacatcatgatctctgtccagggtggtgaactgcttgccgttgtgccatgtaaaggagtcacccgcattgccatggtagcgccccagccgcagcttataatactcgctctcaggttccaggcggaaactggcgtattctgcaaagactttttgcggccggaccagtcctccatggtcaccaggagtttgtagttgccttggttcgtcagccagtaaat

SEQ ID NO: 153020 - DNA, 110 bp, Homo Sapiens
tttaatttctatgaataaaagaaatttttaaaaactttaaaattttaaatattagtcaaaatactttttaagtcctgagtgcttacaggtagttgttaaaaaaattttaa

SEQ ID NO: 153021 - DNA, 518 bp, Homo Sapiens
  misc_feature (375)..(383): n is a, c, g, or t
ttttattgtaatgtctttgtctggttttgttattagggtgatgttagcctcacagaatgagtcaggaagtaatcgtctgtttctatcttctagaagagactgtagagtactggtataatttcttccttaaatggttgatagaaatcaccagtgagcttagtcaagcttggtgctgttttggaaggttatcaattattgattcaatttctttaatagatataggcttatctggagtgtctttctgcttgtgtgagttttggcagcttgtatctttcaaggaattagtccatttcatctaaattatcatctaatttatttttaaagatgtattccctgggtataatttttcaatttcagtaaactaggactagaggnnnnnnnnnctttcaatatttaaagttgtcactccattatcttctggattgcatgttttctgagaattttactgtcattgttatatttattcctctgcatatgttttttgtctggctacagtgatgattttctctttattttga

SEQ ID NO: 153022 - DNA, 584 bp, Homo Sapiens
tgcggccgccatcctgaaatcgcttgctgattttccaaggtaacatattgtctcttgcatctgatatgcctttgcaaatgctgctccctttgcttgtggcattcttctcgcacctccacttctccatccttccttctcaaccattaatgttcagatccaagcttagctccactgtgttttccctgatgctgcctcttctccaccagccccgacctgggaaggtgtcccatttctgagcttagggcttgttcccaaggcctttctctcttctctgtatgtttccctggtgatctcacctaccccatgccttcagctactatcatctatctaaagtgatgaacactcagtagaatgcaggcagcaagagaatcctcattttctccatgagggaaaaacctcatggagagggaaaaagggactgaaagcaatgggctgtatgttgactctttcaccaggttgacttgggttccagtactatctctgctgcttttccaatcgcgtatcctgaagtcgctcattcaatccctttgcacatctatctccttgcctttgaaatgaacaaagtaatcgcactcactttatag

SEQ ID NO: 153023 - DNA, 513 bp, Homo Sapiens
  misc_feature (404)..(404): n is a, c, g, or t
ttttgtcaattcagaaagtttattttgccaaggttaagaatgtgtctgtgacacagcctcaggaggtcctgatggtggttctatacattgtagggagacatgagacatcaacaaatatatgtaaggtgtacattggttcgatctggaaaggtgggatgacccaaagtggggatgggggcatccaggtcataggtagatgagagacaaacgttgcattcttttgagtttctgataagccttccactgaaaacacaatttacaggaatagtcacttagtccttagtctcttagtgaaacaatatggcaaaggaagcaatcagataagcatttgtctcatggtgagcaaagagaggactttgagttctgtctgttctttgttcacaaggaatttccttgtggcctantgatatttggggtcccaagatttattagtgagttccatttggcttagtggtttgggggtcctgagatttattttcctttttcaatagtttctactgaatgcatatgact

SEQ ID NO: 153024 - DNA, 545 bp, Homo Sapiens
actaagcctatagttacatttagaagatttagtaccaaaatcaaacttttagtaacaaacaggaatcttgtcaacacaatgtaggccagggattttgtaaaggtttctcaaagacccaaataagggagaaaaaaattttagttgggctgtttaacttgggaaacactgtcatcagcttgagggtcctcagccagcatgtgattattttgatgacaggactcaggctaccctttaaggcacattttttactcagcattaaacactagctacagtcgtgaagcagagctcccattgcagctacatacttgagatgtactcttggtttcagaatcgtaactaagaggtaaggcattggagaaggacaatgtaaaagacagaggtttagaacaaagtttatggtgtgaatgaggctttcaaaatcagtatctgggtaaattgatactaaagacactgaagaaacactcatccacataagatggaaaggatgtctgtccatctaacaagctcaggggtttctgagtctcagaatgacatcccatttcaaa

SEQ ID NO: 153025 - DNA, 702 bp, Homo Sapiens
ttttaaaaatataaatatataaatattcctgatttctgtcagtataaaatattcccattcttctgccatgcctgtatcagggtcagtgtggcccagggcaggtccaggccactcccaccatggctgtggcccaccccttggtccctccaagatgaccatcctgagtttctagctcttgtttcatgagagagcagctccccggcttggccagcctcatctggccggtctcactcctggactggctcccagcagtcaaaggggatgacaagcagaaagtccttcaggttctctttgaaactttcaaaggtgataatctgggttgcacaggaagtttccggggttggagggcagtgctgcttgtagtggctggccatcatggtcaaggggcccttgagcttggtgaggctgccccgcaggccctgcttgtacagctccaggcgggtctgtaggcaggtcggctcctggaggtcaaacatttctgagatgacttctactgtttcattcatctcagcagcagtgtctctactcaggttcaggagacgccgggcctcctggatggcattcacatgctcccagggctgcgtgctggggctgggcgagcgggcgggtgcagagatgctgcaggccacagtgcccaagagcagcaggctctgcagccacatcctccagagaactttagcctttctctctgtggcggccgca

SEQ ID NO: 153026 - DNA, 487 bp, Homo Sapiens
tttttgccaatgagaaataaattgtttattcctgtagtgtaaaaatacatgctttgggatttgacaaacttttggaaggcatattctgcatcttgctggtgtggaagcattttccctgcaagaagcgtgtggagatgcttgaagaaccggtagtcagttggtgagaagtcagatgaatatggtggatgaggcaaaacttcaaaacctggttcattaaacttttgaagcgttggttttgtgacatgtgatcaggcattgccatggagaaaaattgggtgcttttctgttgaccaatgcctgctgcagtcattgcagttttcagtgcatctcattgatttgctgagcataattctcagatgtaatggttttgctggaattcagaaagctgtagtggatcaagttggcagcagacggccaaacagtgaccatgacttttttggtgcaagtttggttttgggaagtgctgtggagcttgttctcagtccaa

SEQ ID NO: 153027 - DNA, 401 bp, Homo Sapiens
tgcggccgccaacttttttctacctgagttagatttgcctttcatttgctcaccctgatctgtgtggctttattgaccactacagtttaagcccatgcaacctgcatgctgtgcaagaaagaaaggtgatggacagatagtcccagagttaaacttctggtgcctttgccactccatgtcttgccatcttatcatcatagtagctttgggtatggcctcctagcagcttcattgttatgcctgtgggcattcgtgtcccactgtcaggcagattctgggggactggggagccagaatgatgggtagcaggcaggtggtagatggggagacctaaagtccaaaagctagaccccttctctcttaactcataatggcattcagaagttgtaattatttcacaa

SEQ ID NO: 153028 - DNA, 467 bp, Homo Sapiens
tttcaaggaaacatccttttataatcaccctcacgcacgccggcaggtcagtagcagtcagtccatttcaacaagacaagattaagtgctggaagggatggctgtggcctcagacactggggaagggtctcagcttctgaatcacggatactccctatcctgcctcgtcaggccagcggctccggccagagcccgcgggccctgcacgcccagcacagtggtcaccaagaggcaggctgggagactggagggagtcggggaggcctgttttcccttcggttcatgaacaaacggaactacagtgaacaaactcattcataacctgaatcgtcctggtctaaagcttactttgagttcatttggtgtgcaatacgttatttttttaaaatgaagaaaaatgatttcaattgcacagagcttttacacatagtcatctatttaagtgctttccgtttaaagcaaagtac

SEQ ID NO: 153029 - DNA, 483 bp, Homo Sapiens
  misc_feature (375)..(419): n is a, c, g, or t
tttctgggaagtgctaacatgtatttattccacaaggtgggagatggggtgaggagatgatcaccagtaagacgtcaccaaatgagacactgcgaatcccacacagggcaagggggcagctacagggttcagctctgggcagggcttggccagggacagtgtggggaaaaagagatggggactgggagatgggacagcctcccatcgggggcaccccacagggcagggctgagacacatccttccggccagtgacatggggccaaacccacacccttctcatccctcgtccccatccaggtgagtaatgaagcagcaagcccaaggccacacagctaggtcagcatcgtcacacactccggaacgcacagccagnnnnnnnnnnnnnnnnnnnnnnnnnnnnnnnnnnnnnnnnnnnnnacacttgtgcatgcacacgcgttcatatattaactctgatttatatgtgcaccctaaccagagg

SEQ ID NO: 153030 - DNA, 492 bp, Homo Sapiens
acttataatcgaccaagatttcttccatacatgaatagataaacagtagcacatcaagaaagtagaatacaatttagcattacaaagaaattcaatttcaagcaatgaaagtaaatatagaaaacttaatgcaattaccaagactcccaaaaatctcaatctgaacaagctgcttacggtttgaatccaactatatgatatctatatgcaaaaggcacaactatgaagacagtaaaaatagcagtgtttgccagggtttgggtagggaggtatgaattgatggagcagaggacttttagagcaaggcaatgaaactactctgaatgacgctataattgttgatacaagtaattaaacatttgtccaaatccatgggatgtacagaatcaagagtgaagcctaatgtaaactatggactttgggcaataattatgtgtcaatgtaagttcattgattgtaacaaatatatcactcaggtggggaatattgata

SEQ ID NO: 153031 - DNA, 497 bp, Homo Sapiens
tttaatactcttaatactttattaacttaaaacatcactctaataaatatgtattaacaaacataatgcttaccagaagatctaaaaacatttaccaacctcatcaaagtgaaaataccacctttcccccctctatggtacacatggagggtcaaagagttgaagacagagccttccttcccacatgcctgctagctcagaaatctttaaaatatcagcttaacaataaaaaactgaatatacacacatatctttgaagtaactgttcagctttttgtttacacctgataaaatccaaaagggtcaaaagggaaggtttacaattctgtgctgtcttctcagaattccctccaagagtaagaacagacccagccacttggaggtgcaaccgttagcttttgaggagcagtcaggggttgtgacttcagtctctcttccccaatacctagcatggtgcctggtaccttggtagccggtgatccatgaacatttgctga

SEQ ID NO: 153032 - DNA, 496 bp, Homo Sapiens
  misc_feature (443)..(443): n is a, c, g, or t
  misc_feature (464)..(464): n is a, c, g, or t
cagagctgacagatgtccgacgctactggggtaaggagaagtcacattatcataagccaccctgcggcttatcattattattatctttatcttttagaattttatgttctctattaggctcatgttttaagatttatgattctccttccaagacacacataacttacccctccttataacttctaaacaaggttcctcccagttttctctcaagtctttatcaagatttctctcatatcacaaataaagttacattatatcccttagctgacctgttaatttttctacagttgatgtgacagtggctccaaacaacatttcatgtgctgtcatttctgaagataagagacaagtgagctctccgaaaccacagataatatatggggcacgagggacaagataccagacatttgtgaatttcaattattgtactggcatcctgngctctcaaagtatcacatcanggaaacattactgggaggtagacgtgtccaag

SEQ ID NO: 153033 - DNA, 413 bp, Homo Sapiens
catctcttttagcaaagggtgatttttaactacttaaaggtagcactaggaagttcaaaagttgtttgcttgcttatgattcaggatacattgttcacagacaccatgctagttaatctcttctgccggccctcgtcaaggactctgagtatgatggggcccttaccgggtgttaggagggacctgctgggtgtggaaggtggggctgtgctgagcagtggaggagggcacgctgggcattgggaagggggacaggaaggaaacgcaggctgcacatttgcctgtcattctttctgaccctcacactcatgttctttctgggtatcatctcatttgattctcataatagctttagaaggctgattttataattatcccaattttgtgaatgaggaaactgagtcatagagcgg

SEQ ID NO: 153034 - DNA, 643 bp, Homo Sapiens
atcagttctccttgccttcaaaatccctgataagtgtccatttctttttgtatcctttgatgtagaagccacaagaatggctttagcagcttattttaatcttatgaattattcattcaggattttttaaatgattcagatgctttcagtctgttaacagtatttataaaacatgtttcagtgatacaacataggtgaactaaaccaaagatgcaaatgccttggaggaaaagaaattgtattatagagaatcctgagatatatccttttgggttgtttaatttaaagcctatcacaaaacaaagagaattgtcgcactttaattccaacctcctgcagtacttcacaacccttagcataagattctgaaatttgtaataggtggtacctagtttgatgcagggttttgcagcagttgtgcgaatgcctctgcgcaacggcctttcagtcagactaaatgagaaaatccaaactgtcctatcaaaactgacccacaataactgtactctgaggcgaaacagagcaaatgtgggtttcctgttttcattgtaaaacattccaggttctcagattgaagagctacattcagctgatagttgacatctgttccctcacacgtagtggctctcaacacgggctgcac

SEQ ID NO: 153035 - DNA, 397 bp, Homo Sapiens
ttttttaagagttttgccttgcaaacatttatttttaatgaataatatctattactcattaaaatataagcccagtttcacattctgagtgatagccacgttttctttctccttagcaaacttgcagatagaagacccatagaacggtaccctaaaagtgttactttctgctttatattgttatttttactagcacttgttatattcagcaatttctctggtaggtacagttgtcacatgcagctcacatccgcagagtcacttcagcatgttaatgcctctgtctgtgttgtttttttgttccacagtaagtaccagctcgtcttctgctacaccatcattgagaggaacaatcgccagatgctgccagtcattaggagtaccactggaggagact

SEQ ID NO: 153036 - DNA, 431 bp, Homo Sapiens
aaacggtgaaaggtttttccacaaaagttacaggaaaagggctgtcctttgagtatgagttttttgatgccgagtcatgtttactctgttgccaacatgaaatctctgatgtatagagagggatgagagaaacctaaaggccttttgacatacatcacatttgtatggcttcagtccactgtgcatgctctgatgttgaataacctttgaaggtctgttaaaagtttcaccacattggttacattcaaagtgtttatatagtgtacatattctctggagcattgtaaatgatgagcgatgcctaaagccccttgtattttcaccatattcgtgggtttcccctaccttatggattttctgatgtccagtaagttgtgacacatgcccaaaagccatgccacagtcatcacattcataatgctggacaaagt

SEQ ID NO: 153037 - DNA, 471 bp, Homo Sapiens
  misc_feature (236)..(244): n is a, c, g, or t
tttgctatgcaaaagctttttactttgatgcaatcctactcctttacttttgcttttgttgcctgtgcttttgttgtcatatcaaaaaagaaatcaacgctagcaccaatgtcatgtatctttccctgcatattttcttctaggagttttaccattttaggtcttacatttaaatctttcatccacctttagttgatttttgtatatggtggaagataaagatccaatttccttannnnnnnnngcatgtggatatccagtttttccagcaccatttattgaagatactattctttcctcattcttgttcttgacaccttgtagaagattagttaaccttatatgagtgggtttatttctgtgctttcaattctgttccattgctctatgtgtgtttttatgccagtactatattgttttgattgctatagctttataatataatttgaacacaggaagtgtgatgcttct

SEQ ID NO: 153038 - DNA, 598 bp, Homo Sapiens
  misc_feature (47)..(47): n is a, c, g, or t
  misc_feature (513)..(513): n is a, c, g, or t
tttaattttagatgcagtggatacatggtgcaggcgttcttatatgnggtatatatttgtgatgctgaagtttgggcttctattgatcccatcagccaaataatgaacatagtgtccaataggtgctttttaaaccactgcatctccccccttttgtagtccccactgtctatgattcccatctttatgcccatgtgtacctactatttagcttccacttatacaatagagcatgcagtatttggctttctgtttctgcattaattcgcttaggataacaacctccagctgcacccatgttgctgcaaagaacccaatttcattatttttcatggctgcataatattctttggtatacatgtaccatattttattttcccaatccacttttgatgggcatctaggttgtttacgtttgctttttacaacagcaataaacatacaagtgcagatgtctttttggtagaatgatttcttttcctttgggtatatacccagtaatgggacaactgngtggaatagtaatcctattcttagttctttgagaaatctcccaactgctttccacagtggcttaactaattcaccctctcaccaa

SEQ ID NO: 153039 - DNA, 750 bp, Homo Sapiens
  misc_feature (682)..(692): n is a, c, g, or t
ttatcctttctctaagccagtgagataggcacagctgatagtatgaacctttctagctaagagtcagatcaagtgctggacagagacatgacaagttctctcaattaagcaaaatggtatctcgagacaggatttcaattctaatttcatattaatagcttacatttattcaacatttattgtgttaaagtgctgctacagtccttttcacgcagaatcttttaaccctccagaattgaacagcaacagcgctattatccctattttacactaaaggagctggctcccagagaggtcaggtcacccggtggacggagcaagaatccaaatcaaggcattcttgaccactaaccaatacttctccccctaccatcatccctgcccccacccctttttattttacaaagttaacccgtgtttattatggttcatcttaactctgatttttagaaatctgccttctgtcaatagcgcaaaatagagtgtttcattagcctcttaaaatgccagcaattgtaatgtatacagatgtgaaccttcatgggaagagcgtgtctttatgttagagaagagtgagtaaagctgcccagttgaggtcatatatattgacttatctgcaggaaatattcatttagatttgagaagttatgattgttatcagtctcatcctttaaatttaacnnnnnnnnnnnatacttcaatatttagatcaacaatctgttgcaaatctgaaaggaagctataatcatt

SEQ ID NO: 153040 - DNA, 486 bp, Homo Sapiens
ttttttttgtggcttcagagctcatttctttttagcacttaatattccattgtatagatgtaccacagcttatctgtccacccattaagtgatatcttggatgccctcaagttttggcaattatgaataaagctgctatagacattcttgtacaggtgtttgtatgggcataagctttcaactcgtttgggtaaataccaaggtgtggagttgcttcatcttatggtaagaagagcttggttaagaaattgccaaaatgtcttccagactctaacattaggcattcccactaggaatgtatgggagttccttgtgctccagatcctcatcaacatttgttgttgtcagtgttctgaattttagccattctaataaatgtgtaatagtatttgtttttttaaattgcaattctttaatgacatgatgttgagcatcttttcatatgcatatacatatggtgaggtgtatgttcagagcttttgcccg

SEQ ID NO: 153041 - DNA, 514 bp, Homo Sapiens
tttaatttagaaaaaaatctgcttttcatatctggttttcctatttaaagctatgtgatttgaggaaaatggtttaactcctctgagctttagtgtcatctacaaaatttggataatgatactgagggaagctgaaaagccgtatcaaccaacttatacaaaaaataataaacattcacttccatttctaatgcatggtgctgaaaaagtccttgtatgtggaatattgttcacctttaaggaacctgctctcaagagctgatgagggactttttttagtgcagttctgttgtcactggctgttgggctcatttagttggcaccaacaaatctctgtgaacataaaaataaaataaaataaagattgtggaggaatagaatacaaacacacagtaaggtgagatttgcacaacagagtaaaggatgtgtgcctgattctttttgcattctctttgaatcatttttagcctttattctaagtccccaattattgtcatccttctcccaacaagat

SEQ ID NO: 153042 - DNA, 640 bp, Homo Sapiens
accgtttctagcataacatcaaggctaaaattattcatatataactgcacacaacttaaaaaaacttgttttagttcattttctgctgctataataaaatatcacagactaggtaatttataaagaaaagtaatttatttatcttatggttctggaggctgggaagtccaagaccttggtgctggcttttgctttgcttctggtgagggccttcttaatctgtcatcccatggcagaatgtggaagggcaaggaagcatgagggacagagagaacacaggagctgaacttcaacttttttatcagaaggcaacttccacaataactaacccacttctacaataaattaagtgaacctctggcagtggccagattactggattctgcgggtgacatgctccaaagcacagtgtctctgctcaaagctcacgagagtgagccgacattgctcaggtgcccaggcttgaagggtgtccaccaacacacagccaacactctgtgttctccagagtgcagggcactaatggtgatctctggagtcctgggaaagtccttgtcctccctctcatcttcccccagcacagaacaccacagccagtcaagaaagagtgtggcaggctgtgggtgaccggatgtgtaga

SEQ ID NO: 153043 - DNA, 724 bp, Homo Sapiens
aaaggaaagaatgcgaagatattttctttttatatatctatatatagatattcacaccaaaacattcgtaacaaaacaagaaatacaacaattacagtcctcgtttctgtagctggtcacatggtggttgctggtattcatggttgcctctttccactacccattctgtattccctttgcactcatctcgcaagctgatcgtggtttacctggtggggtgacccagaccttcattcttcaggggtgtgggccattcatagtcctgtatggattgttgttatttttatcgactgtaatcacagggcagggtacagagatgtcctaagggatctccttaagccagacatactcctccttacctccattgtgtagcagttccagttcctcttgggcaggatcaattaccccagccaacactgtaactcccttccttgcctattgattcagaggtgtgaggagcccaaagtggctgggtggctgtcttaacttccagttcagtggaatgattgtaatttttcatcctctaaataatgagtagggatacatttattctaaaatgcatattatgaatattatgcagcagattcattcaccttgtgataaagtgaaatagggtgttaagcagaaataacatgcagatatcttttatcatcaaattagggagcaagattctctgatgcagtattcctcagtcttaaaccctgtattgatgccttttcatgaa

SEQ ID NO: 153044 - DNA, 580 bp, Homo Sapiens
  misc_feature (50)..(137): n is a, c, g, or t
  misc_feature (170)..(246): n is a, c, g, or t
ctatgctgacttcatcatcaattgtgtctgttcttgaactccatctctcnnnnnnnnnnnnnnnnnnnnnnnnnnnnnnnnnnnnnnnnnnnnnnnnnnnnnnnnnnnnnnnnnnnnnnnnnnnnnnnnnnnnnnnngtttcttttcttattgctgggtagattccatcnnnnnnnnnnnnnnnnnnnnnnnnnnnnnnnnnnnnnnnnnnnnnnnnnnnnnnnnnnnnnnnnnnnnnnnnnnnnnaagtgattacgcgcctgcccctttaaaaacagattatctcattctctcgctgtctcttgcacacatacaggccctcgcacaggtgccagagcaggccagcctcctctgggaggtctccccttgcccctcaatgctgatttcctcatggctgggggatgagggctccgggctgggagccagggtgggagcagcgataccctcttcctaagactcatcgcgtctcttccagcctcctcgccccaggccgcgggcgccctgagccttcctgaccccgcagggggcctcgcccgcggtcccccatgagcgcgcccggctgaccggcggggcggccgca

SEQ ID NO: 153045 - DNA, 979 bp, Homo Sapiens
aaggacagccaagtcatataaggctgccagagagcccttcctgccagcatttactcgagtcatgatgtcattgagagtcaggtcccctgtcaaaaggtccgggtgatctggctgatgtttccgcttctcggggggcttctttaacattatcttcaggtcactgtcccccagttctactttatctgcagttttcatatccggggttgaaagtgtgggcaccacccgcaggggcaccgcaggactaggaaaacgtgctggagagctcggaaacccatgagctgagatcctcttcatcagatgacagggctgtgtcaccacactcctctttcacttcccttaagaccttcaagtagcgctgttggggccgccactcccgctcctcaggtgtgcgggatggtgaagggcgtcaacttttctttattccttgtctatctttcatacatttcaacatgtcaaagtattaacatatattttatagtaatctcaaataataactaatcaataaatacagaacatctctgtaccatgcaacaatttcagtttcacatgatataaaagattagaactgttacagactttgggcaaaagtggtgagctcagacaatttcacgataaattaaacttagaatcaaagagtgaaaccagaataagcaacgttaagaagtggatgatcaggccaatcttattggaaacgtcaatcgtgtacttgctaacctacagccttctactacatgaagctgcccaactcacagtcactgccaaatggcagttctgtatatacaaactacatggacggcaccctcaccccacaaacaagcagccaaaatgtattcggttgagcactttgacttaggaatttgaatggagaattcacagtatcacttagcagtggagcaggagctgaaagattaccatatgagaattaaagtcatagagggctggatacagtggcacgcacccagctctgtaatcccagagc

SEQ ID NO: 153046 - DNA, 498 bp, Homo Sapiens
ccttctgttccaggctgtgctaagtgcttttatgggctccaggtctggttgctcttctctagaccccggtcctcttctgcctgtcactcttctatggcactgagacatctttgtcttattttaggattgtttgtggatatgtgcgagcttatccagggccagagactgccctgttcgtttttgtgtcctccagggtcagggagagggttgaacctccataattgtttggcgaatggtcctgaagggacagaggtctgtttgcttgtacctttgtgtagtttataaatggaagattcagaaaagggcataagagttggtacatactgccacccaggccttcctcatttggcttggggtggctcacacagagttcacacaggcttccccacaggcaagctgtccttgaccactcctggctgcagaggaagaggcagatgtggaggccacaagccttctacacctccagccccagcctgttctgaaaagttggcggccgca

SEQ ID NO: 153047 - DNA, 501 bp, Homo Sapiens
tttaatcttgccttttttttattcaaaaggatcacaagcttcacatcaatttggcttcaaaaagaccttatgtcttaaaactaagtaccgtgacatttattttgccatctgtgacagtttcacgtcgaaaaagcctcaacataaaaaaattaccttcaaaacccactgagacattctcacataaactaggatactgcacaaacaataaagttctttcttcaatagtcaatcttttcaatttcatccatgtcttcagcgttgagttgcttaatactgctgtctaacagaacaaaagagaacagaactagtctcatgtcagggtctaaatggaacttcattccatccatatttctgaagacagtgatacctcgtataaaaagccttggtataggaacataaggaaggaagggtgccaaaatcactgaccaatactaactcaaacagcatcaaatgcaccagaccatggaatgtatgtatctagatacgctggggcagagaagg

SEQ ID NO: 153048 - DNA, 625 bp, Homo Sapiens
tttttgataaatcttgccttttttttattcaaaaggatcacaagcttcacatcaatttggcttcaaaaagacctcatgtcttaaaactaagtaccgtgacatttattttgccatctgtgacagtttcacgtcgaaaaagcctcaacataaaaaaattaccttcaaaacccactgagacattctcacataaactaggatactgcacaaacaataaagttctttcttcaatagtcaatcttttcaatttcatccatgtcttcagcgttgagttgcttaatactgctgttaaagtggtcctggattttcatgagcgagggcagctcatctacttcaatcatgttgaaggcaaggccttttttcccaaagcgccccgtccgccctatgcggtggaggtaggtctcatagtccggctcctctccttgttttacagggagatcaaagttcacaacaattgtgacctgcttcacatcaatccctcgggcgcaaacattagttgttatgagaaccttctctttcccatcccgaaacctctgaatgatggaagctcgctgctcccggtcagctccccggttaacaaagacacctggtggccatcctgtatcattttcacgggtcaccacttagc

SEQ ID NO: 153049 - DNA, 526 bp, Homo Sapiens
tttcccaaaagatgttatttttagagcagcattagggtcacagcaaaattgagcagaaagtacagagattttccacatacccgctacccacctccagactcccccactatcaaaatcccacaccagattagaacatttgttacaatggatgaacctacactgacatatcgtcagcactctgcggcaggtttgacaactccttcaggctccttcagaagccagaggcagttcatgagccatgtgacaggacagggaatttgagacattttacatggactaaattgccttcccagagacaggaagaccaacttttcagtatcctcacaatgacagggagggcaagaacagaaaggaatgtgcaatgcatggatgtacacgtgcaggctgaaaaaaatctgctaataataaaaataacaatttaagttaattttcactgacatatgctctatgcaaggtgatgacctaagtgttttataggcatgatcctatttaacactcaaaccaactctgtaagtatgaggaaact

SEQ ID NO: 153050 - DNA, 535 bp, Homo Sapiens
tttgctttgacccccaggcaggacccatgacctgcctctctgtgtgcagctgtgctagcgtcttctaatctctgtctcccggacctagttttgctttttaaaccttctcaatattactcagcctgttttctgtaaggcactcagaccttctgtggaataacacagggtctaaagaaagaaagaattaaggatatcacagcagaggttggggagaggtttctaaatgaggactatttataaaaccaataatgatcacgcctattaggaacgcacttttcgatcagtccctcaccaactccacgaagtttacaggcgcagttttccccatgttgcagatgagaaaactgaggttcggagtggggaaggaccttgcctagggactccggccagtgcacaggcgggacttgagcataagacttctgtccccacagccccatgctgcctctgtggcaccgtggtttcggtcagagattaaatcaatcccaaaggcaagctgagggcagcgggattcatctcgctcaagctcacaccatca

SEQ ID NO: 153051 - DNA, 649 bp, Homo Sapiens
aaatccttgaatgaattttaaaaatgaatgtgtatcactagtgcctgattcttaatctgatcagtaactgcttgatgactgaatcaatcgctgatggagggaacaattatgcctcattcactgccgtaacatgggaaccttgcatacagcaggtgcttaataaatgctgggcacatgaacagatgaagagggcttggttcctcccaattccccagggccaagccctgttgctggcatgcagtaggcactccattaatgctgcctgtgtgcacgtgattgcttagcaagagctggctggacaccaccccacacgagagccctctgtggcctgccaaggggtccagaggtggccctgatgtcctcagtaagcacgtggagcctgggccaccgatggctgctttggctttctggctgctacccctcagagttcatcccgggcagcactgtccagtggggactggagcacgtccgagttcttggcctcacggctcagtgcctgctgctcccgcatcttctgggactatgcgcggtcccagtcggtcttgacgtgctcattgttccatacgactgaggtctcggtgtcactcacatagccatcgtctactgtgtagtgtgtagggtagatgagcatcggcttcacatagaacgc

SEQ ID NO: 153052 - DNA, 498 bp, Homo Sapiens
aacattggggtttgatgaggttcagatttggggcaagtttcaggatagtgtttgttctagcaacttccttcccatctctgtggaaagtctgttagagtttgttgtggttctggaagccacactctgaaggctctaggctggggcatccaatctgctatttgtgcctctgcccacgcttccttcgctgtgtttcttggaactgggctttcctccactgcaggaacttgtacatgactgagaggagcccagaccccttctcctccaaactttgatggtggagcctctgcttacttcccacctccaagaatctccagcgtgtcctgggccccagtgccttcagatgggtggctgtccaattcctgcctttagctgagcttcattccactgctctaagccttaccttgggtctggggggatttcttatgttcaaccagcaggttcttttggttgtatcattcattcagctctggaaatccactgctttctgggatataactt

SEQ ID NO: 153053 - DNA, 582 bp, Homo Sapiens
  misc_feature (25)..(25): n is a, c, g, or t
  misc_feature (430)..(505): n is a, c, g, or t
gaagacaagtgggagattaccagtntgtgctactaaagaatgttcccaaaaggaatgatgatagaagctacataaaatgtttatgcagcagagagggcgctttcatttttcatctggtttttggtttaacataagtaggcctgcttgttctctgagccagtaacaggctacctacaattccacgggcgctgccctttctgataggagctgtagcggttgggtctgtctgcctcttctctctcatttcagttcttaaacagcttcccatcaaccaaggaaactcctgggtagacagaaaaggcagtagagacagcctctccagctgttttattgggagttataggattttcacctggaaggagcctcagaaaacaagctataaaggcctttggtttcatatcgtggaggagaagaacaacacacatcaagnnnnnnnnnnnnnnnnnnnnnnnnnnnnnnnnnnnnnnnnnnnnnnnnnnnnnnnnnnnnnnnnnnnnnnnnnnnntaagaagctagggctacaaccagttttctgggacccaggccttttttttctttcctcctagagatcgagttttccaa

SEQ ID NO: 153054 - DNA, 560 bp, Homo Sapiens
tacttgaaaaacaggattttaccagaaggctcgagtggccctccagattgtagtttctggcccctcccgttcagaggtaactggcatcctggttttcatgttgatcagtggtgtttaaagtacacctgtaggaagttccaaagtgcaggaagggaacaaagcctccttgcagagaaatcttgtactttggtgtttcatcatctgtttgtgtgacaaatatacaacgttaatgttgaagatgtgggttagtgaaattgagacctggcgcttcctgaggctggcagcccggttgagcctgaggaccagacttgaggcagttggcagtccgcgcctcgttgccctctgtctgccctgggtaagtgagaggctccttgggaggccagtggagatggctgtgggaggacagattgagtagctgtccttggagctgctcctccctcccttcgtggagaaatagaaacagctttcctccggccctcacctgttgccagggctccacgctggtgggggcgagctgcgttttgctgagttgcaccgtgggagagcgttggcggccgcaa

SEQ ID NO: 153055 - DNA, 564 bp, Homo Sapiens
taacttttgcctcatacagaggcaatcttgatgacaaaagattgggctcaatttttgtttttcttatgtagaaaagcaacacctctgtttcggactactgttcagtagacaaaaagcatcccagctttcgaaatgagagtccaaattgggttaccactgagattttaattatgatgtgaaattggagaaggtgaactgtacagggccagacaaataatagagcccactctctgggcagttgcatgcagtcttgctgggtgctgagctgagagactgagagccgcttttgagacgtgttttgaggcatatcttccttaaatttttgctggtgtctgttttttagaagttttgccattagcatttttcactttgagtatctagccatggagaatgctctaaaaaatacaaggagacagggggatgctttatctatttggcttagtcactggttcagggtgaagtttcataatttattctgataatctggaggggatgacctccttcacagtactgttaaagccttccttgaacaagctcatttcactatataacttcctaaagaca

SEQ ID NO: 153056 - DNA, 512 bp, Homo Sapiens
ttggcttgagtttgaaagaaaggctgcttgaaataaaatggaaacaaatcaattgaaacaaacaaaatggaaacaaaatctccctagggatggccacatcaacatgattttaagtctagagcatttttgccctttactgagggtacatcaacatttgtaaaactccacaaatgccttctgaaaaaatccatgtttaaccttaggaatttgttgtggtttctaatcatgcttttccgagtcccccagcccaccagcatccccacccctgagcttgtgtgagatgggcctgttctgggatccccaccctgtgctgacctcccagggctgaggtcatctgaatgtggggccagttggttcccctagcttgtacgttgctttgaacctcgtgtttcccacaagggagggggccccttctctggtcatcgcaaagacctgctccagaatgggcccttttccttcccattccctcctttggtgcctttctcagagtacatggacttccttctgccaga

SEQ ID NO: 153057 - DNA, 542 bp, Homo Sapiens
tttattacagccgaagtggcaggggaggttttcagatcatcagcaaaactaggaaatttcttgtttaaatatctttccctttttttattcataaatgaaataaatttcctaggggaaaatactggctcttcagtcataaatcatgtctttctcttctaggagcaactctgtatgaagatgtagccaaatttcactctgcatcccctgtgcttaccaatggtggtggtgacattttctcctggaggaaattaaatgggccttcacctagcccttcaaaatgatgagctttgcctctcagcaactggttgtcctcggcagagctccatccctaagataaggcaatgcatcactgtgacatccacaatgggttttcaaagagctgtcttccaaactgtacagggtggctttcccttgctggctggagcctctgagtgtttgtggagagagtccagacagcagccttttgagcagggggctgtttacacaggtgccttgttgactgagacatgctctaaattaaagctttattgctcagtacaata

SEQ ID NO: 153058 - DNA, 552 bp, Homo Sapiens
  misc_feature (89)..(134): n is a, c, g, or t
tttcttctcaaacatatttgatgtttattactgtatcactttgaatatttgcgagagcctatttacttctagcagaggtttacattagnnnnnnnnnnnnnnnnnnnnnnnnnnnnnnnnnnnnnnnnnnnnnngaagtccgggtttttcttttcagtgtgggagaccccacataaagcaacaatgtatcatagctttgacactggataaatgggatgttaagagtgcacttctattcaataacatgcaaatggtgacataattcactttttgaaagcttccccttggaacaaggggaagagttcagagaaaactaaaggtaaaaagttgaactgacaactagaggtgtatcaaaactgcaaatgacaatcgtttttgctttaacaatcttctgaaataggaatgtaaatccttgagacttcctgaatcagaggtctaaccataagcgttgattcccctaacaacctaaatttaacaaaatgaaaattcctccctacagtttttcggcttgctttatcatttttaaatttctgggaaagacttacattctcg

SEQ ID NO: 153059 - DNA, 496 bp, Homo Sapiens
ttggtaaacacaatctgccacattatttattgccatttttatttttccttttgtgaattgcccagccatggctgtgtccttccatttttttctgttgatttataaaactatagtacatacctcaaatcttttgcacggataaaaattcttttttccaagttttaatttagaattcttctacctcaagtagaagaatataataagagtgtgtttcatttactttatatgcttccttttaaaaatctgttaggatgaaacaattacagaatcctatgtgtctaaaaaattaatatgatattatatatataaagccatttctcaaatattttaaaattaactccattacattacaaattcaaattctatcagaaagtaattatagcaaatggtacacaaaagctaaaaatcactgtcttcattttaaccctctactacaatgggcccttttctccccttctaaactacatataatcaatacctttggttaataattaaa

SEQ ID NO: 153060 - DNA, 587 bp, Homo Sapiens
tttttcacagaagatcatttggtaattttatttactatttcactatttgggcagctattataactacatgtaaatgaatatcaaagatgattaatattaaagcagagagcaggtgcacactggcagtgcaaggagagggcagcactgcccctgctggatggaggctccaggaggtgagcgcatcaatctccaggttgtgatctgacttctgcttctccgggagctgacaaagcccctcctgaggaagtcgtgagcaagatcttggagttttgggaaacacagtgctcagcatagtcaggcaccaggcagggccaaggtggggaccaggcgctggacctgcagtggaaatacagtcagagcaagggggctgccctgtacttcctgtttctaagctcaccatggcctgccttcacctctcggtgggttgcactgctgcagtatggctcagttgccctccacgtctggtgcagagccgccaccctaggatcacttctcgccatcctctgtgggcctcccaggccatgtcttctgtgttgggctcctgtttgctgtatctgtgtcttactctttcatgatttagtctttca

SEQ ID NO: 153061 - DNA, 541 bp, Homo Sapiens
ttttaaagcttttaaagacaggtttatttatatataagtgcggtgaaattgaatacagaaactttattaaaatactgtatattacaaatttttaatccaataaattctgtgtaatgacatttaagtgctggattcactttttaacagttgtcttgtgtgtatcagtaaagagttcaccctgtatattacaaagaggagagccacatgtggacctcagaaatggtcctgtgattagacactgaatgatagtaattgtgcatcttttccttaaagcaatgaattggaacctagatcttatctttgtagacctactttctataattaaaaataacttgcatatgtttattgctgccctttgaagaaaatgagaatggtgaaaaataatttaaaataaagatcaacatctctaggctaaactgatgcttactgcaattaaaattacttaaaattcactgcaaaatttgtgttctccaggaaattatgctatatacataatgagatttgtacatgaattgggaaataaaaaattgcttatataaaa

SEQ ID NO: 153062 - DNA, 359 bp, Homo Sapiens
tttttgcttctaatttgatttatttttgctctgcaataaaaacaaacgtatttaacaaataccatatgttgcacatttccatatatgattaagatataattatgcccagtagaaggtgggagaagggaaaggaagaagatgaaatagaaaatataagttgaatctgatgcttaatatgatttttactccatgtatacttttactcaaatgatagctcgtgcacatgcaaggacggactgtgctacttcaaggtactttctatggggaaagaaaagcaggagaaggaaaaagggagggggagatggccatgcatctccacttcctgaaggaaaaagcactttggtccccataggtaggag

SEQ ID NO: 153063 - DNA, 620 bp, Homo Sapiens
tttgcttgcattcatgtttattaagacgcagccaagtgaaatgtgtcagctcctcctcttgagtacagccttctttactggtgtataacaatgcccaagggctggatgaactacataatcaaaatcaaatgacagctttctacagacttggccaaaatagtacaacctcagacaccattttaaactgcaagaaatctgagcctttcatagtcttgctttttattgttgacattcacattttaatttttatgatcattgcagattcacattttaaaaacccaagaaacaaaaaagctcttattctaatttagcaaaaagcagaatcatcggtgtgaagacaatacactatctacatacagctgctttgtatccataattatctatgtaagaaacatgctgtcattcacagggactccatttacacgtgcacataagccatgctgaggcctaacaggtaatgtgggttttcgtctagcatcttcccttgaaccgggatcctatccccctccgaaaatggggggaaagacttcttgcaaaaaattttccagttcctgtcctgtaggaattggttgaaaccctcgcgcttgggtttctcccccctaattttctctagaggtgtt

SEQ ID NO: 153064 - DNA, 479 bp, Homo Sapiens
actctaaatacctgcatattcagtggcctattcctgtgttgtctacaaaatcagaataatttattcctgggtgtagaaataacttcttaaaagttatttgagattactaatttcaagtaattactaattttatttcagactgcgtatttccagtgtcaacatgtttacatatataccaaaaaaaggccactatatgttaactgtgtagagcaaaattcaatttttccactttcaatttccactgaaaaacgctgttatcctctacaactaaacagcaagtccttctattatatggggtagtgaagtaatctacactacagcattatcaaggttcacttaggtttttagtatttatctgaaataaaagtctgaaaatgaggaatcgagaaagtcagcatttcaacttttgagaataaaagttcataaacataccttttgttgcattccagcttatgtgatttttatgtacatcttgcagg

SEQ ID NO: 153065 - DNA, 206 bp, Homo Sapiens
aaattctgcacaaaaaccaaacctgttcacaagggcttgtccaccaggccagggccagatgggccgccaggcaaaacagttttggagcaccttctgaatttccttgagtttacagaatgtttccttcaaagtaacacttttataaaaaattattattataaaagcaatgcttgtttgttataagtttggaaactccagggaagtat

SEQ ID NO: 153066 - DNA, 464 bp, Homo Sapiens
tttttttgcaatccctctccccctgaaccaatttcacattgggaatgcaggacctagactgctgaataaaaagctacttcttctataattgtcaggttctctccaatttctcagcttcctcaaagacatggggtggagttgggtgtgccatcactgagagagctctggaacttttgactcttagtgacatttttagatttaggggttcatggccttccacatgttgccaccaactggtgatctctgccccttcatgctgatcaagaaagtagaaactcctcgtcgccttcaggtttgcagtcgcagaaacattgcctgctgtggactgtcagcacaaaactgggacactggtgtcatttagactgtcagcagtgcacatgattgtacgatagactccaggcaaccatgtgcatctgtgcaagatgacctctgccccaagagaagggttacggtctaattaaatg

SEQ ID NO: 153067 - DNA, 352 bp, Homo Sapiens
gctcctgccctgtgaccttggtcaacgtccttctctctcagcctcagtttccccaccttggatcctcctggcacggaaacggtgactcttcttgaggacccaggtgcttggggccagtctcacctctctgggtctacagttcttagttccgggctctccgctcctggtgcgtggatgggggaaggtgagccaaggggcaggaaggaggacccccgcaacccaccccctccctggtcctggtggctgcagacttagggtgaggagagccagtgaacagaggggagccctagtgggaaaggggaatcggggccgaaggggagaaggagccccgggcaggtttggggcggccgca

SEQ ID NO: 153068 - DNA, 522 bp, Homo Sapiens
agcatgtccgggcactttctgctcgcacccatccccgagtcctcctcggactacctactgcccaaggacatcaaactggcggtgctgggcgccggccgcgtgggcaagagcgcaatgatcgtgcgcttcctgaccaagagattcattggagactatgaaccgaatacaggcaagctgtattcacggctggtctatgtcgagggggaccagctctccctgcagatccaggatactcccgggggcgtccagatccaagacagcctcccccaggtcgtcgattccctgtccaaatgcgtgcagtgggccgagggttttctgctggtctattccatcacagactatgacagctacttgtccatccgacccctttatcagcacatccggaaggtccaccctgactctaaagcccctgtcatcatcgtgggcaacaagggggaccttttgcatgcccggcaggtgcagacacaggacggtattcagctagccaatgagctgggcagccttttccttgaaatttgcact

SEQ ID NO: 153069 - DNA, 372 bp, Homo Sapiens
aaaacagtgtcagggattatattcgttttactatacaaaaggacatcattgaggaaaagcttgtttctaggctgtatcacagtaaataatcttgattgtttctagaacaggggtagaaaagtcccaagatcttcagaagggcttggttttttcctcccaggattcttgctcagtgatgagttgaaagcacaggataagcttctaagggaggaaggcagcattggggagcaggaggctgatggtcctcctcagggtctcagtgtaaatgataaattgtctaaaaataaggaatattcctgcctctagagaaataaggtgtacatagttaatgtagcatatctggtcgacgttgtatttgtatctatttgtaaa

SEQ ID NO: 153070 - DNA, 440 bp, Homo Sapiens
  misc_feature (337)..(350): n is a, c, g, or t
ataaaaatataatacaacttgtttctcccccttttccttttaagctatttgtagagtttatgactaaatagtctgtgcaggttcatagaccgaagatactacacactttaaaccaattaaaaagaaccaaaagtaaatagaaaagacattgaatcaccaaggcctgggatcaacctgggctgtccacacagaaaacaaaaacccaaccaaaccaagccctgttgtgctcactggtgcaaagagaagatcagggcagcttaagtggtctaagaatccttcaggcattctttaaggagaaaaaggatacctttgattttgtgtgtttcatgctctggannnnnnnnnnnnnnccttctctgggtttaagagattttttttgaaatagtgaggaactgaccattatatgccttcactggcttcttgtgcaataatatgatgtt

SEQ ID NO: 153071 - DNA, 480 bp, Homo Sapiens
tgcggccgccaactttttaatgatcagatagcctcctattttttaactatgagttggaatttgctgcttttgatatgataagaaagttcaaagtttctcttccttgctttgttgtgtgttctaattcttttctgcccatcccccagtaaagaaaaggctcagtatgatttcttgaatagattgtttaagctattttcaaaacaggacttggtcaggggcaggtagtcttaaatgttcagaagccactggatggaaaattgtgagcacataagtgtttttcttggtcaaccatgtcattttatagccaaagtttgacttgacatactggaattaatccacacgactttgaaaagaataaactctttaaaaagagagtgagcgctccgagggtgttatgagagtcactgtctgaaaccctattgatcatattgtggcagaagaaatagagtcctgccatgaattatacttttcaggttaaaa

SEQ ID NO: 153072 - DNA, 512 bp, Homo Sapiens
ggaataagctagattatctgggcctccagcatctctagacctagaggttttctctatttctccttttcactgtgacccaggaaataattttcagaagtaaaaaaatctcatctgagactctgcaacaggcaccagagagtgaggaagaactttgagtaacagaaactgctccaatttctcatccgcatctcacatctctgtgtcaactatccttctatcccatttattctggtattagatatgttgtcagtgtctcttgttaggtagagaaatcagcagtcagatcttaagaccatttggtaggtgcatcaggaattgacacgcaggccagttttccagtcctacatgtattcttttctctgtatcctgcctctcttgctcttggcttcctgccttctctcctactcatttttagaacagtctagatgcaggcagctagaagagttatttcctccaagctgtctaggaaaagggacaattaaagagagattctgcacttattatgatataaa

SEQ ID NO: 153073 - DNA, 630 bp, Homo Sapiens
ttttgagcaaagatattgtttaatttttccgctactgtttcttctacagaatgggcagaactcactctggaagagctggtgggaataatgccatttgggaagcacacaacataggcagcacagtggagcacaagaaagtccggagctgttagctcccaggtcctgaaggaatgagaactttcaccggagtctggattccactgtagacaaaatcctctctgcatcgccaaatgactcttattttcctaaacttactctaagaatatcttttaacagcaatttgaataaaccgactcacatgccactgtgatttaatgtgtgatttgctgccgaatcagctgtgtttggccagcccttctgtcttcacatttttcatagtgtttatccttaagcttagcaaccaaccaaacttcgagtggaatatcaacattcaagagtaaaatgtattattagttttctaattgttccacaagagattgagtttgtgtagtttacatttttgcactttctgttttacttatatcctcaacgcatgaaattttggcctgttcccctttactattcacaaacttccaaacactggtaaaaatgcctttgtgtgtctttaattcacgtaacagatttgtgtta

SEQ ID NO: 153074 - DNA, 428 bp, Homo Sapiens
gagttttatggtatgttattaaaagttgtttaaaagtgagggacccctccagttattgatatggaatgatcttcaggaaaagagcataatatgctacatttttgtacaccaaaggggaggtaggtacgaatatgcatacatattgcttttttctagaagccgcctaggagtgaaaccaaaattcttcacttcttttcggccctacctcgagctccctttagaaaacctttccttccagctcacagtatccaccatgtccaccttcgcctcccggcactgagccttagaggggcggtgctccataaacatttgctacatgaatgaacgaatcaactatcggattttggggtgggtcgggacagctcggttccagcgagggctccgcccacccgcgggctccgcagaggagcagaggttgggcggccgca

SEQ ID NO: 153075 - DNA, 483 bp, Homo Sapiens
  misc_feature (467)..(467): n is a, c, g, or t
tttccttttttaatgcccctgctttgctacttgccctcagcgtgaacttattcttcctaccagataatccagcactgggtgagccttccaaactggtagtctgagccccatgtggaagagggaggagaagagaaagacagcggtatggtagaacatcccagactgccatgcagtctaagaaaggttctgcaaggccactgaagagtcttcaagccaaagtcggctgtcagaggagttctgtgtctcctagaatttccagactaagtatgtcttagtataacttcatactcagccagtcgctgagagaaaccacggaaggcatgggctcaatgcaaatacagcaatggatttcaaagtgcagctgggcccctaggtcaaccgcattctctgtaatcccccagtattggaggtctctgccacagatctctagtgtgataaaggggctcagtacccctgagaaaaagctnttctgactagtatctt

SEQ ID NO: 153076 - DNA, 546 bp, Homo Sapiens
tttttttattttgagaggggagttcctacatgtgggcgcggggcaggagctcactcaaagcttgatgagcgaatgaatgagcctaggaaggagccaaggaacacacgcttttcaggccacaacagacattagcaaaattatcttatccgatctcagcctctatttaatcagaaagggtaagtacacaagtactcaagtactgttatctgtatctcaatcttacagaaactaaagttgcccattctttgtcccaactacctcaggtcagtttccttcctctaaacacttccagtacattcatccaaccagaatttactccatgcttgctgtctgccaggcaccacggagggtcagagaatctggggataagactgatttcccacccatggtggagcttacgatccagtgaaacaggcagagatagaataaataaacacaaacaagggtgtaattgtagactacgaagactattataaggaaaaagacaaaaagtctgagaaataaatatagacattgacctaatttagatgacaatgaggtgggtag

SEQ ID NO: 153077 - DNA, 679 bp, Homo Sapiens
cttgagaattatatttttaggaactaaaaagatttatttatattcagtttccatagttttcagaagtattcaattaatcagagtttgtgaccaatcctaaaatacatcctttatgtaactaattaaaaaattaactttatatacagttacaaaatctaatgtctcaggtgagcatgtccagtgtaattctcttcatgttcctgtacagattatttttattgcattatataataaagatttgaaaagcagagtttcatttgttttgggtttagagtttcagaagaataacagataaagcttcattcagccaagactgttagaacagaactactctacgactattcatccatatttcttgagtgttcatggagtaaaaatttaactttttaaatagcaagtagaatgcagttgaaatatttggttgctgaggtgttgcaaaacagtaaatctgagcattgataacttagtgcagtggacacttctatttttgtgcaaaattaagttatattatatgcaatttcctaatagctgcacctttgtgccttttaactcttgttaacatcttgtatataattcctacacagataggccttcattctagagagcaagaattccaggccatctttgaatagtttcacccagttttccaaacagcgtaacataccaagagtgtaacatc

SEQ ID NO: 153078 - DNA, 449 bp, Homo Sapiens
gagagtgagattgagttcaaagggaagtcattgcaaggaggcagtgccagtactaaacttaatacctccgtcctgtgtagacacatccactttgttgaatggaaagctggcctcttactacccttcaactactttattttttctgatgacttgtaataaataccgtctacctggaagtcagtgtgttacaattagaatgtgaggattagaagaaactaatataggtaggactaggaaaaataataggttagagtgataaagtaaaaattttaagaatacatgcaatagtataaaaatcaaaagatataaaaagattatgtatcaaatataaagctcttatcctctagccatctgattcccttccttgagagtaactagaatagtttcttatgtcttatttatcttttagcagtagcctatgcatttacaagtgtatacataggctactc

SEQ ID NO: 153079 - DNA, 618 bp, Homo Sapiens
ctttgtccttaaacctgaagtggattttattgagatgagcaatttacaataaaacactttacagcacattggaaaaactcaagtttcacaaattttacattcacaaaaagaagtcactttttgctcaaagtcacacacggacctcggggaagggacagatctaatgagccatcagtgggttctccccagagtaaaagcgttttctctgggacttggcagtactgaaggtcccggactaacaatgattcaacttaggatttttaaaaattttatgatgatgggaaagcaatacacattcagtagaaaccatacttcgcatatccatacaaccattctggttttcaccttcagtacagtattcaataaattacatgagatattccatacttcattagaagataggctttgtgttaaatgatttttcccagctgtaggctaatataagtgttctcagagcatttaaggtaggcttggctaagctacgatgttcagtaggttgggtgtattcaatgcattttcaacttccaatattttggacttacgatgggtttattgagatgtaagtcaaggagcttctgtattcctagacaccctcagagaggagtgaagtacaacatc

SEQ ID NO: 153080 - DNA, 385 bp, Homo Sapiens
tctttctcaattttttgagcttatattaggtttatgtccaaaaagtcattgaaaaacttccttgctcgactgatattttctcccctttgctaagaggatgcatttgtgccagaagcaggtgcttttatatatcaggtagattttttatccttgttcagtaagagtgcatgatgaacgccatcagcacttggccaagggagagggacatgaacggtgagagctgaggaatgggacctggctgctcgcacgcctgtgctgggacaggcaggggctccgggcgcggccatgcctgtgagcagttctgctgaactctgcttgctctcagttggctctgagaccaaaaattgcctaaaataggtcacctgtttgtatcctaaattgtaaa

SEQ ID NO: 153081 - DNA, 421 bp, Homo Sapiens
  misc_feature (50)..(59): n is a, c, g, or t
tgtttttctatttggagggtgagggatagcctactttaatatcagaagannnnnnnnnnattgaattgtggtactgagtgaaatgacctacctttacttgacctgcaacagagttgctgtagaccaggggtgggcaaattctttctgcaagaaccaggtaataagtattttacactttacggctacatggcctttgtcaaacctgtcacctctcctgttgtggtacataggcagccattagacagtctataagtaaatgggcttagctgcattccaataaaactttattcacaaaataagaagggggccaggtttggcccatgagccctggttttcctacccttgtttagatgctcatgcacttgctacacctggaaatcaacataaatatagtaggtccaataaggcaaaccagctactg

SEQ ID NO: 153082 - DNA, 310 bp, Homo Sapiens
tgaagaatcaggagtaagatgaggcagcttcaatgactgggtggggaaactaggaagaaaagtccagacaggaagctttgaggccctgcttcctccacattttccaaaagtcccacatccgtgccctggcactcccagcccctaagccacgatgtgggaggtgctcccatttgagaagctgggaagatgtagtcccctggtctcccttgatgcccaaagcagaagatagagagaacagtctggaaggttgctacggcaaccagagtccctggtgagctgggctctccacaaaccctttcagagcgtgctc

SEQ ID NO: 153083 - DNA, 263 bp, Homo Sapiens
ttttttccagcacttccttcatttatttcctcactcattcattcaccacacattgtatgagtgacaattctgtatcaggtgctctgctagacacatggcgaaggctacggtccctgctgtccagacttctgcagcaacgtcatgaagccccagcactcaggaaaatgtggaggaagcagggcctcaaagcttcctgtctggacttttcttcctagtttccccacccagtcattgaagctgcctcatcttactcctgattcttc

SEQ ID NO: 153084 - DNA, 474 bp, Homo Sapiens
aattcttacatattagtcaactgactttggacaggctatttcacatctctaaatctaagtcaactcatctgggggtggggtggggagagagaaagagtaaaagtttaaatgagatactagattttaatactgactgctctcattgtgttagaagttattactgttgagtttgtgaaccgagatttaaaagtatgacattgaatgggatatggttacatatccgacatgtgtagatagatgcacaggatggtttgtgttgaagacagctgtctccatgacaaccacattgccctctacttagcaggtcccctgacaaatcacctaaggcagcgttttactcatagctcaatgattcctggctgttgcagatgctttaataaggaggaagagagatttttctcctttttaatataagaatagcttttattaattttaattacacatataatacattaacacattctttttactaaa

SEQ ID NO: 153085 - DNA, 485 bp, Homo Sapiens
  misc_feature (417)..(417): n is a, c, g, or t
tgcggccgcgcgcgtctcccgccgttgtggcccccgagttactgacttttgttcacaccggtcagcgcctgttggaggacgtgctcagccccagccggtccctcctcatccagccgatccccctcctggggagcgcggtctctgctctgtgctgctgaaaggatcctcgggctttcccgctctactttaaaacccctagggctaggggcctaggggagggactggcaatgcacgcttcacacaaagaggtggaaaattagagggaaacgtgacacctcttaggtatccgttagagcagaaaggacctgagcagctgaggtcctactgcgtgccacagacttggcagggtgcttggagatcctggcgtttccccacctgctgctcctgtgtgcaagagctgggaggctggaaacctgngcgagggtaggtcaggacctccattcctctccatcagcagaagcccgcgttaatgcagagcagtgatg

SEQ ID NO: 153086 - DNA, 408 bp, Homo Sapiens
ttttttttgggtttgtttcctgtttaatgaacattttccagaaagaggggagatcccgtagcagtgggtttcagatacaggagaccagacaggagaaaatattgtgagatgggaaagtggatgccagcaacaggaaacagcagagaggggctgaagttctcgaaaggccaagaagagcctggtgggaaaccgctcgcacctcaggactgcctgtgctcagggcacaggatcgactttttcgccttgggctgctttttgttttctttctgccttcagtcactgtaggttaatttgcatcttctagagctttgcataatggcctcctgcagtgcgtacgtggtttcctctgacatcttccactcggtacagtgattcggggactcacccaggctgtgtgtgtccttcccc

SEQ ID NO: 153087 - DNA, 516 bp, Homo Sapiens
ttttttttgagacacggtctcgctctgtcacccaggctggagtacagtattagagggagtggaaagataagaggtagaggtcaaagaatgagattaaggagggtttcacaatgacaaagttatatgatcatggaagtgaatagctgaggagtataggacacgatcactggatatgagttgaaggaacagagaggtgagggtgttggaaggaccatttacatatacactgaaaaagccaagaattaagacaggaatggagttggacagacagtgagccagaaaccagtttttttgagaaagcaggagtgactttgggggagctgataaattgacaatgcaacaagagatagtaggtggtatattctagtgacctgagagtaaaagctataggtttttaggaatgtgagagggtgaaatatctggaaacagcaataaggatcaggtatttcatctccaggctttagtagacttccaaaatataggccaaatccatctattcctcctcattttcacgtt

SEQ ID NO: 153088 - DNA, 399 bp, Homo Sapiens
ttttttataggcaaggatcttctttattactaacagatgttttggttgaaccacattaggtataaacatttatatatatctatagtctacactgatacctaacgagaagtacagcaacaaaaactctgcaaatacttttaattgacacgattctagatcaagaagacagatgattcagaaggctatcaaattattagatgatattaaaatcagcagaaccaaattcagtcttaatcatcttgtcatcagagataatacctaaacctgatgcacctattggggaggtagctggggtcatgttgtggacattgagaccaagactctgagagggtcctggggctgatgccgctatgggaggccccggagggttctccctctggggagaggtgagtgggtggg

SEQ ID NO: 153089 - DNA, 414 bp, Homo Sapiens
gggtcgcgcccgggctgcaggtccttatcccgaagctggggttactaggtgaacacggccggagggagagcgctctgaaatccattcttcagccgcacgtggaaaatggacagctgtgactcttaaagagaattaaagcaacaaagcatctcagcctgctctatgagctggatatttcgtaggaaagagccgatttggcgaaagttacgtaaccaatggaattgtctcagtttgcgcctttgtttcgtttgacagcccttcagggagtcatcgtgattgctggagacggtgaactaacactgtggggacccttgtgctaaacgtatcaagtggcacaacaaggataggaacacgggtcctttggactccacagcttctgctccttccagattaaaccacactgctttctccaaa

SEQ ID NO: 153090 - DNA, 275 bp, Homo Sapiens
actgttgttgatcttgggtcttatctatctcatcttctcttgggaacttaggaagtgaatagtccaggcacgttcactgattatagtggcccaagataagtaaaaacataccactaatttcaccaaagcatggcatgggcttttgcatcaaattttttggcctcatttcatgcaaacgaagtgaattcactttacattgaccaatgcttcctgatttctctttcagttaatcaagacagttttgaacatgctttagaaggtgagttccagaacga

SEQ ID NO: 153091 - DNA, 664 bp, Homo Sapiens
ttttagtttttaagtaatttattttctttaaatcaaatgaaatgcatctctcagagtcccagtgagttggtgagaaatttgatctcagttattatttgggtcttcttccctctttccaaatataaacatctgggaggcatatgagttacctgggaaagagggaaaagacatgtaaattatgcagcgtaattgaagctggtcatatgccaaaaactccaaatcacattgtcttaagataggatgtttattccttgctcaggcaaagtccaacgtggatgttcatgatcaggaagccatctcaggcagctctcctccaagcagtgactcagggatccaagccccttccaagatgggtctctgtcatcatctgggctttgaaatcatttgcttcctaccactatgactggaaaggaattagaggtagagatagagagatcataaggatatatttacgagtcaggccctaaagtggtatatattactttagcccacattcaatcagtcagactcaaccacttagctgtaagttgatacaaggaggctggcagagaaatagaatttaactgtgtgcccagtaaacagaaatatctattgataaaatttagcaatctgtaccaatgtatctaatcttcaggtcatatggctttttctgttagtcttctcg

SEQ ID NO: 153092 - DNA, 683 bp, Homo Sapiens
  misc_feature (161)..(182): n is a, c, g, or t
  misc_feature (634)..(634): n is a, c, g, or t
ttttttcctgtttttgagacagcatctcaccctgccacctaggctgcagtgcagaggtgtgattatagttcattgcagccttgacctcctggctcaaattatcctcccgcttcagcctcccgagtaatggggaccacaggcgtgcaccatcatgccctaannnnnnnnnnnnnnnnnnnnnncatagagacaaggtctcactatgtcacccaggctgctctcaaaactcttgggattgggagatcctcccacacttttgagaccataacaatcatgcttgtgatgtgccagtatgtgtccactctgcagatctctaaatactgaaaacacatgttccagattccagcttcagtgtctgcatttatggaaagaagtgtccctcaacctggtaagaacacagcaaaaggactaataagcagaaggctaagtgtcccagagtgaacaagcagttcctttttaacaaagcctttttcccagggggtactcaagccatttcctgatggttctgggcacacagacaagcagccaccacttcactgtccttcaatgcacagagcaatgatgcacttaatagcaccagtaacttcaaaggcttaatgagtctaaactactacctggaaatgataagacactnattaagaaataactactaaaaaactgtcctataaaagctagcaaaagtt

SEQ ID NO: 153093 - DNA, 363 bp, Homo Sapiens
tttaaagttttaaagtttctaaaatgaaagctggccctgcctctctcccagagtgagcggagacagcggttgcatgagcagctttccttgtgaggccacaggtccctctggacacgctgctgcctgaccatgcctcctttccctttcagctttctcatagaccaatgggcttggagcattaaggccatacccctattatgcattctagtgcgaccttgtttacacctcccctggctcagtcacacagctgtgttgtaggctactagaaagtgtttagtagttgtcactgggatcatgctgatgtggccccatccccgcctctccctgccctgtgatatcggaggaaacctgacagagcaaatt

SEQ ID NO: 153094 - DNA, 488 bp, Homo Sapiens
atttctccctttagttctttcacgtttgctttatgtattttgaatttgttatgaggcatgtacacatttataattgttatatcttactggcaaatggcattttttttattatgaaatattcttcttcatctcaaaatatactttttatcttataatatatttagcctaacattaatatagccactccaacttttttatgattagtgccaatagtcagtgaggacctgtggcctcctgccaacagccatggggttgagctatgcaggaggtagatttttcagccccagtccagccttcagatgactgcagccccagatgacatctcaaatctaaccttatgaaagaccctgatccagaacttgccagctaaacttcttccatatttttgactttcaaaaacattgagacaataaatatttgttgttttttaagctgctagttttagagtaatttgttacataacagtagataactaatacaggaattcc

SEQ ID NO: 153095 - DNA, 197 bp, Homo Sapiens
ctgcccctcctgtcgggaacaatttgaggaaccaagttaatcgcttggctttgagggcgcgacgcttccaggcgctctccgcggctctgtcccgcggaccggtggagcctgggtgacggcgcctgggccggaggaggggagatgtttggggtccctggccaggatgaatcagcgtaaccgtcccgtcaccctcgggg

SEQ ID NO: 153096 - DNA, 605 bp, Homo Sapiens
  misc_feature (94)..(94): n is a, c, g, or t
aatacatgacacaatgtacttgtccaaactcatagaactgtacaacataaagagtaaactctgatgcaaattgtagaccttaattaattaaaanatagaataaaatcaacaacaaaaacatttttccgaattatagagattactgttgataacatgttcatgtatctctttccaaatgtatatatgtaaatgtatcataattagttttttacatacatgaatgaatttgatatttctccctacactgccaaaaatcaggctttgactaaatacagagtaactttttgcagagatagtatttcttctagctgtaagaaggaaatatccttaatttctctaggaaattcaatatggatcccaagggatgtgtcaaattctaggcattagtggtgttaactggactctaaagatacataactttagcatttttaattatcaatattccttccaatgttcttaggcaacaacaaatttttcattctttcatacattcatgcattcattcatctatctaagaaaaagttacagagctcatataacacgtcagttaatgttttttggcaccaggaacttgtcttagtggagtctgtattcctatggagaaa

SEQ ID NO: 153097 - DNA, 382 bp, Homo Sapiens
ttttgaatgttattaaatttataaatttatttaactttccagatcttcttggaataaatgtcaggtagtagaatttgtacaaaccttggtaatgtcttaggtttagatacgaacttaacaggtatatttaattttctgtattccacaatggagctagaagcaggactcatgaaaatagtaactatatgttttgcatgtatccttcaaagtgaaatccttaacaaatttaacagtatatattaggctgctgatgaaacagctaaacctgtctgccaggtggcttcgaaaatggaattaatttttacatggcattgataagttactattttaatacaaccaggtggtaattgatacccaataatgtttgaggtttgctttaaat

SEQ ID NO: 153098 - DNA, 381 bp, Homo Sapiens
agtgtgcctcgcccttgtttgtgtcgctggggtctagcacttgtgaggcgttccattaatgtttgttggtgggaggaataaatgtctcagaggaaggacatgccacgtatacaggggagagtgaccctcgttcttcggtctcttcccagctgctcccgtgacgttagggaaaaggctcgcttcacgctctcacccgacccagtgtgaagcgcctccagccaccggataccttccctagccccagtaaaaaggtcggggaaggaacgggaaagccaaggcctacaaatatttaagtgactgtttagcgagaactaatattcgttgagtgcccactatgtggaaccaaggaccttgcatgtgttatgtcatttaatcgtaaaa

SEQ ID NO: 153099 - DNA, 477 bp, Homo Sapiens
  misc_feature (413)..(413): n is a, c, g, or t
attaaaataacttttaatatttgtctactcagtacatcattgtttagtctgcatttctttgatttatattgataaaatatatatttattaaccatttgtttttctcctttgctatgatcttgttatgtcatggttcatttcctaacaaaggtagaataggaggtgtcagagttttctctctaaggatgcatgccatctttgtgcacttgatacacctggtcaggcagactcacatggagactgtgctggctggaaggccctggccgacctgggctgcaggtggtccacatggagctcaaagacttgaccaggattgacagacaactggaggctcgagctctggggccatgattctggcccacacttcctcctccacccctaatcttctgtgattggggttttatgagagctanaaggacagagtgacaaagttggccttgaggttttgaggtgggactgggaaagaggagagtagtg

SEQ ID NO: 153100 - DNA, 487 bp, Homo Sapiens
cttggctaacactcaacatcttccagctcaatctcctcagttgtgctttctgtaaagcaaagacaagtcaatgagttggaaatcaagccacatagtgctttcttcgtgagaacaagataacacatgccacctctggcctcaaaaccactcatggattatcacaaggcccagggggttacctttgagtttgtgtcttctcttcctctgaaatttatatgcacacttattacaaacccacatgaggctgattaatactgcggccacagcagcgagaaaagcaaggatgacagcgacaaagtgcaggtcttcatagaggatctcagagacgtgcagcacgatggtgccaaactggctgctccccaggcgctccgtcacggtgatgacatagtagccggaatccctcactcccacgctgaagagctggatggagccgttgtcaaaggtgcagactctgtccttgtggctttgagagatgttggcggccgca

SEQ ID NO: 153101 - DNA, 504 bp, Homo Sapiens
cccaggaaaggcctaagctaaacttttggtgggcttttcttatatcccagcctttgtataagggccttggcttttaatatttaactactcagacagtactaaaacacttgttacagaggcctgcgttagtgagacctggcctgccacaatccccactgtcaatttgctcatgctttttatcatgcatgtatatgtatttattaatcacgagaatcgtagggagatgaagcattgtaatctttctggctgcttcctgctgagagagggttgtcgtcatggggcaccaaacacagcgctggagtggaagaggtggatttgttcccggtagcactttctgttctgggggcttcgaggcagcacctgctgaaacgtaataggatgcaacagccacacatagaagtaggttgctgctgttttcttcccaagtttagtcttcagtttacagggcttgaggaaagcatagcttagatttcagtgatttccaattaggaaaaaggaaacaaa

SEQ ID NO: 153102 - DNA, 418 bp, Homo Sapiens
aactttagtttgaattttatgtgtgtgtgagcatctgcatttacttttaaaaacttttattgtaaaagccttcaaacatatacaaaagtagagaatacaaagcataatgaacttaagtacctattagccagcttattaaaacatggtcagtcttgtttcacctgttacatcccttttcttttactgtctaaaggaaggaaagaagaatcacaaatcagtttatgaagtctgctttctaaaaagtacttaagtgtttattgccaatatcttattttggtcagcaatcaatcacgtactcaagcatacttctcttaccttcagagaaattaaaatttaatcagcaaaactcatcagcctgtacatttaaaatatatgcatgttattgtacagaaactataccttaataaaaagtgagaaa

SEQ ID NO: 153103 - DNA, 263 bp, Homo Sapiens
agctagaggcaatttcaattgtgaatttttgttgttgtctattgttctgaagactttgcataatttattggtttaatttatcctaatttatttgatgaaggtgtacaattttgtattaccaaggatgtactgtaatattaattgatatgataaacacaatgagactccctgtccatattaaaaagaaaataaaaaggtgcagtagacaattgattttaaaggaaaagttaaaaaaattagtttggcagctactaaattttaaa

SEQ ID NO: 153104 - DNA, 653 bp, Homo Sapiens
  misc_feature (111)..(123): n is a, c, g, or t
tctctatttcacttatttctgcctgatttttattatttcctttattctactaatttgggatttcggttgttctcatttttctagttccttgaggtgcaatgttagagtagnnnnnnnnnnnnngagatctttccaccttttagacgtaggtatttattgctataaacttgcctcttagaactgcttttgttgtatgtataggttttgaaaagttgtgttttcatttccctttatcagaataatttttaaatttttctttttaatttcttcattgatccattagtcattcagtagcatggttgtttaattttcatgtatttgtacagttttcaaagttccttctgttgatttctagttttattccattgtggtcagaaaagatacttaatataattttgatttttaaaaaatcaccaagactttttttgtggtatcatatatgatctatcttagatgttccatgtgctgttgagaagaatatgtattctgcagctgttggatggaatgttctgtaactgcctgttaggtccatttgctctacagtgccatttaactgtgatgtttcttggttgattattgtctcaatggtctgtcaaatgctacaaatgtgttgttgaagtcccctattattattgtatttcagcctatgtctc

SEQ ID NO: 153105 - DNA, 502 bp, Homo Sapiens
  misc_feature (31)..(31): n is a, c, g, or t
  misc_feature (54)..(54): n is a, c, g, or t
  misc_feature (114)..(114): n is a, c, g, or t
tggcagggacaagtgacccagccagccctcntgcaggtgactgggaatgagagntgagcacctcctaggtagggaggataggtgcaaaggggctcaccccagctctcgccatcntgagaggagagaggaggtgcccttcgcaggcagcagagccagcccagccgctggctttcatttcccttcctcacaagagccatttatgacaatccgtcagggcaagctgatgcggcagatcgcttttggcagaagtcctttctacttgtcataaatcacagagaaagccaccggcggtgaatacaaagaaagtccaagaccactggctggaggttaacagctgttagcgacccagggttcaggagactttacaaatccacaaatacgaacaaggcaggctcctacaaataaattgggctgtgaacaactaagaatgctgtctgggatgaaagtcacaactcagaatcacaaatgataatacagcaagagcaggacaaaggcggccgca

SEQ ID NO: 153106 - DNA, 292 bp, Homo Sapiens
ctaaaactactaacataaagcaacaacaaaaccccagaagatttgaaaagggcacgttaaactgaaatgtctaaaactagtgtttctggctgtccgtgattctagttggctctgtttccacctgtgtgcaaatgtagtccccaatttctttaaattcctggcccattgcatacagttctcactaataatacttaagagttcctagagttgccagataaaacacaagatgtgaactgagtgaatgagtaattacttagtatatttcaaatattgaatgggacacacttataaa

SEQ ID NO: 153107 - DNA, 549 bp, Homo Sapiens
  misc_feature (12)..(12): n is a, c, g, or t
gagaaggaaaanagtgataaatgctagtgaggtgccacttccctccttcttccaggctctaaccgccagctagctctctttcacaaaacccacggatgcagaatcaggacatgttaaaatggaacagtctttagagagggtctagtctttttaaaataagtaaggatttggggactaacagagaggaagcccctgacttgctgaattgttaggagcaggcggttctcgagattctgagcccaggatccttttctgtgaaccatgcacgtgctggcactggcctcaggagacagtgccctgccttggctgtcaggtccacggagaaatctcaggtttgccccttcactagggatgccctagaaagcaagggcaaaggaagctttaggggtcatcgtgactggggcaggggaagtgagtgcaaggactcaagaaaaacacagcagaggaagggactgaccctctgagcacacagtggttgacccacatgtgtaaaagagggtgactggggctgaactgggggcctgatatctgccagaattggcggccgca

SEQ ID NO: 153108 - DNA, 760 bp, Homo Sapiens
  misc_feature (12)..(12): n is a, c, g, or t
  misc_feature (140)..(140): n is a, c, g, or t
ccttttttaatngcagcatcgacagtactgactgaatattttatggagttgcagagtatgtgtgttcaatcgtttcagcttcccagaagattcattacagttacattagaaagtcaaatcaggcaattctgcagtctggngaaagccagcatatgaaagaaggttaatacaaaagaatttcattttagaggacatttaggactttaaaaagcaacattatgataaaattttcaagatatttgttcttgccttagcacatgctttccaggtctaatttcagagctgtctcaatgcttttctaggaaagaatgagggtgtatgggaggaaattgtttgatctacaaggtctgccatcttaatgatcctcatgctaagaacactgcagatgtatgttttgccctcactcatggggaaagaatctatggttctccaattatgctgatgaagtagaagtcaagtaaaagtgaaggtgcgttcatttaaaacataaagattttcagtgactgttaacatctgtctttctgattataaataaaactaactgctgagattttcagatcttaatatgtatttatataacaaaaaccagtaagttaattgttttccatgattagtagcaggtatagaaagatcttcttcagattggtacatgtttaactggcacttgtgtataatatagtaattcccctctttctagaattcaagcctcaataaacccctaactaatcttatgtatttatttccactggtttataggtaa

SEQ ID NO: 153109 - DNA, 298 bp, Homo Sapiens
tccgacccccactccatccccagacctgcagcacaagtgcgcgggcctgtcctcccaggggcctgggcgactccatatgcaatcagtagcgagcagccgggccccacagaccctcatgcactctcttacgtgccattctccccagactttttttgtacttaatgtatgaaagatccaaactaatattgctgtaaaaaggagagacaaattaatatagcttattctataaatatatctgtatataaaggtttctgtatattgtatagagctgtgtataaactggatgtagaagcacaaa

SEQ ID NO: 153110 - DNA, 518 bp, Homo Sapiens
tttccctgaaaatttcctcatttcactctcaaaaaaagagtagcagttcttctcagcagtatttcttgggggtactaattctccttatggcaactggtgactctccttcatggcgtatcatttatatgcaaggacttgatttttattgttgcttatttctgagcccatcttcagcagatcctttctttttctgtggggttccattaccctggatcataaaaatgtattgcatttgcttttgctgagattctataggtttcaatggttctgtcccagcttttaatttttcagcatgtgattcccataccacacagtaaattttgaccccacatccacatagaacataggcctgggatttttatttctccttgtggttccagagacaacataagccctttcattgtttattcttcaacccccttttaatggacaagagaagttactaaaggctttacccagaggtttcacctatagctcctctgcctgtggtggacctgaagctgtgttgtcagcacctg

SEQ ID NO: 153111 - DNA, 531 bp, Homo Sapiens
caatgagccatagcagggaatggaccgaactgtacatacaagatgaggaggggcctcgaacaacagggaagccccgtggagcacgcaggggagcctggacgcggggaatcgcctccgtttctcaccctgacagcagggagggcttcccggagctgacagtgaggcagacatcccggatcccagttatcacaggtgcagccacgcaacttttgggttaccttcccgccacgaaatggaaatgatttcctgagggccggaaagatcatttgcatcgggcctcaggtctggggctgggaaagcaggccccggccggaaaggaagactggaggccgccgccccagaggccggaccctcgcgtcccggccgcgtcccctcccggctggggatgcgcttcgggcgcggggctccctcgcgaggctggactgggtggagcccgagagcccctccggggagctggctgccggggaggcgccggggctgcggggccgcggggcgggccgggcctggagctccgcgctagaggcggccgca

SEQ ID NO: 153112 - DNA, 561 bp, Homo Sapiens
ccccaagtatctaaaaaatttattttgctcctttccaatgcaagatctcattagatcacatacttggtaaagtgttccatgggtgtgaacaataattcttgtttgtgcaaattctttcaagacttgtggataagtaactccagtattccttcctccggaatgaacaccatccagccaatacattgtacttatgcttttaatgaaagcatctatgtttttgtctttcttggcttctttcaattcaaagaaactgattcaaaacaacacatttattgaatccagtcaaaggaaaagatgcatcatttagtgatggtggataaaaacacatggccgatccatcagatttttcaaaggtcctatcttttccttcctggaaatgatttgtagtatgagaagaattggacatctacaattagatgctgtggagtccttattccaatcattcaaattttcctttgataaactactctgacttaaaagcattaactaataacatataaaggtgcttaaaagctccagagtctgtattgtgttctgggaaaccaaacatgttacttttca

SEQ ID NO: 153113 - DNA, 493 bp, Homo Sapiens
  misc_feature (276)..(294): n is a, c, g, or t
gcagcacctgggccctggaagtgggccaagggaaagccaagggaggagccagcaggcccagagggacggtgtggctctgtgtgtgtacacttgggcatgtggtggtgtggccgtgtggggttgtctgcatgcctagagctgaaagtacaacacatgtggatggaagcttgtgcgagtgggtgtgtattgtctgctgtgtggtgtctggtgggtctggggatgggaggcaccagaaacaggtttagcaagacatggtttccctcccaccactaccannnnnnnnnnnnnnnnnnnaggtttggaaggatgcctccattccagcaaggccaggcccagctctatggcgactgagggggtgaggccagagaacagaagacttctgggacctccaaagctgacattggcagccttcactctcagccttaatacctgtgccctggtgctggtgccttctgaggcagacccagccctttactcttcagatcctcacagg

SEQ ID NO: 153114 - DNA, 639 bp, Homo Sapiens
  misc_feature (434)..(457): n is a, c, g, or t
ggcccccatgaaaagcagaatcacactcaggattgggaaaatgctggaggccctcacggcccggaggaaatattctgctgtgtcagcttcgtaatctgcatcctctgggaagtgatcaatttgcttgcacagacctttgacattcccttctaggcagcaggttctccataatccggaatgggtcataacttcctcgttctttttgctggtttcattctcactgacacttttggtcttgcaaacccctctggagtagagccaatagtcggttcccacagctatggtcatcaggctgaaggcagcgaaagcaccaacggtggttaaaagcatttgaacacctcgatcaaacagccccataattcttcattatataaacacccaaccgacttctggttctcgggagagtgtgtgtgagggtgcaagtactaaagccnnnnnnnnnnnnnnnnnnnnnnnnttattccactactaatataatggatatatgtatgaatagagaatatggagagttataaaaaaagggaggtaagaaagctcacggaaaagagtgtaaattataaagatcacacgggaagaggcttgccttttgagatcagaaactgttccagttgcagtgtaatttttattaaaaagaaaagg

SEQ ID NO: 153115 - DNA, 818 bp, Homo Sapiens
tttacttttctcttttttagatggaaggttccccatttttatttttacatcacgttcttcctcatacagttttcttcaacagtaccaagagtcgtatttttaagaaagtgtctctaaattttctttgcttttgtaggactatgtcatttctgatgatcattaattggtatgcctaactctcccctttgacccaggtattactaatattgactgaaagatggaaaatttcaaagatggaaaatttggattactgctgtgtctttaccattgagtcccaggaaataacttgcccagtttcataaattcttagacgttggtttctcttgtgattgtcaagtctttggtgttctttactttattcacctggaccacttgagttgttattcatcgaacacacacgtgtgtgtgacatgaagtataacttgttcacccttactttgtgcagtggtggtaataaaattgttttaaacctcttaattatggtttttcatgttggattcactgtgagttcttaaaaaaaaggatcacccactgatggattcaaatctacctttggaaaattaaagtgataagcacttaatggcattttgggattagcttgagaatatctgtaagttgattgtacttgaaacatgcagttgtgttgtgaccatctgtagagtgatgtggtaattaggcaaagcattttagaaaggctttattactaaaaacaagtggtagctagttttcataggcaaaggagacagtcttttagaaaagtggtgttccaggtgatttaatggaaagccaatgaaattatggagacgaaggtggaaagg

SEQ ID NO: 153116 - DNA, 468 bp, Homo Sapiens
tttaacatagcttttattacaatatattaattggcccaatttaatatttttaatctcttactgtgcctaatttatgaactttatcatagctgtgtatatatagaaaaaaacataatatatatagggtttggtactatccaaggttttaagcatcccttcctcccatcctcagtttcagtcaactgtggtccaaaaatattaaatggaaaagttctgaaatacacactattctaagcaacatgaggaaatcatgggggagttttctgcttcatatttttataggaaaggaaggtcatgtgtgctcattttattgttcttacaatttctcttgaccccagagtggtaccacttcctggaaagatttgttttcaaaacagaggttcaatttttatatagtcctcttatttcccccattagaattcacttgactaggggcttttatttactctgtcatttaatcatgtttca

SEQ ID NO: 153117 - DNA, 546 bp, Homo Sapiens
  misc_feature (163)..(223): n is a, c, g, or t
  misc_feature (443)..(504): n is a, c, g, or t
aagttttaattatgcttagtattacatatcataacgtacaaacatttgtattccaaatggttaacacttaattgtttctgcccaagattaataaattgtctgaaaaactcacttatacaatttgagttttacttatattatctctgcaaactaacatacattnnnnnnnnnnnnnnnnnnnnnnnnnnnnnnnnnnnnnnnnnnnnnnnnnnnnnnnnnnnnnggcctgtaatctagagatgcactttgtgaagctgattccatacttttaatatgtatctagaaatgtactgttttaaaatagcagattgaaattatatttactcttttacaatcatgttcatataaaaaaagcttttgatgtcagtacataaagttccatttcattgttttaaacccttgcattccatggtatgaatatatatatattttttaagagtctnnnnnnnnnnnnnnnnnnnnnnnnnnnnnnnnnnnnnnnnnnnnnnnnnnnnnnnnnnnnnnagggtgcaagcgattcctgtgcctcagccacccaagtagcct

SEQ ID NO: 153118 - DNA, 264 bp, Homo Sapiens
ggaatcattaaagagggaaattgttgctttatggcacggcgagagaagagttaggtagttagtgggagtgtagcatccagaaagaggaaaagatccgctgtgttctctgtgggatgaataatacggcagctagtccaatgtctactgcaacttcaagtagtggaaggagtacagggaagtctataagctttgcaaacagaattacagagtatgatctcgtattgttgctgttgagaagtcctggctgggaacggtggctaacac

SEQ ID NO: 153119 - DNA, 462 bp, Homo Sapiens
tttgttttaaacagaaaagaaaatgtagttggttaaataaatcgatgttcttcacaaattttaccttagggtcacaggtttttctctctatttgtttaggaataacagcttgaaaagcagtctcttctttacttcccgaggaagagaactgcacagactgaagtggttcacttagttcaacttcatcttcttttagtatctgttgagaatccttgtgcagatgaggagactttggtgaaactactgtaataaatggtttcctcacttcaggagggctatctggctcatacgtctgttgagttccttgctgaaagacagtatttttctttttcaatatttccaagctgtctaaagcagtactgtgttcacatagcgactttaaaatagaaatggtatttactaatccagaaagttctgaagaatttctaggattccagtattgtttcaaactctggcagtttc

SEQ ID NO: 153120 - DNA, 568 bp, Homo Sapiens
ggcaactgtggaatatcctcttaaaatattttataaaacatggtttacactcaatacacaataaaaaaatagatatgtgcaggattttactatcttatttttttcattctcaaatcggatataagacagacataaacccatacacgcctttatgtttgttaatgtggttatgtttaaacatttttttgagctttttctcacattagaagcgctggcaagagatgtttttttgtgttatagccttgggtagcatgctggtatatagtctgtgaagccaggagagtaactatataatgaattgaccattaggttatgtaatggggatgactatctttatagccttgggtagcatgctggtatatagtctgtgaagccaggagagtaactatataatgaattgaccatttggttatgtaatggggatgactatcttcagatttattttgacaacttgatgcgaaccaacggtagacccgctcatcagggtgtaataggaacatttaatgaaagaagatataatgaagatctttaggtctcttcttgtcatgtcattttattgtgtctgaaa

SEQ ID NO: 153121 - DNA, 232 bp, Homo Sapiens
atgttttaaccactgatcaatgaatctaaacttgcttcatctccattgtagtccacatccctctggcatgcatgcatatctctttttgttacagcgttttattttaaccacagtcattacagatgacacagctgcaacactactcttgtagttttagctgtggtgaacatgagttccagctagtgtttaattccataatccgtgattggttctgttctgatatttgctactc

SEQ ID NO: 153122 - DNA, 400 bp, Homo Sapiens
tttaccagtacataagcctttatttggggagggatgcctggggagctgcctccagctcctctgctgcacagaggcaggatttcttaaagcatcttccctgaatgaggaagagagtgtagactctcctctgccaatgctagttaggtgtgccagaggccaaagcaccaaagctcggtggagaaggtttgtgatgcataggagggaggtgttcacgtgtctcagggccacttgtgaatgagggcagggaggtgaggggggcctaaaagctgaatgggcatgtaagacttgatcaaaacagaaacctggaccctgcatcatgtcctgtgacccgctctccactgtggtataatcctggagcagtcatttttcttctctcagcctgtttcctctcatcggggga

SEQ ID NO: 153123 - DNA, 479 bp, Homo Sapiens
tctgggtggaggacttaaaatttgtttttcaggcagcagatttaacccatggcaactgtaactcatcttgtgtgagtggcggtttatagtattgtatcctgtggcatcatacaaggggtgcaagttaaactctttaaagttaatcacgatttttgctcgtggccttctgggtttatccgtacgccgaagacaggcacctgtattacatgctaaggaaatgtgaataccaaaaattgatcctgaggaaagtcttgattaggtttttttggaatcgcctttgaaatgtaatttccctcaccttggcagtgcagaaagtttgtgatttttattgccgaaatagctttcaacattttgaaattgacttaagagaatgttggctgtgtatgtctgtatcttgcatttctattggctttgtgaacctaattgttttggatttagtctgatctttaaataaatgatttctttgtgttctctctaaa

SEQ ID NO: 153124 - DNA, 497 bp, Homo Sapiens
tgcggccgccaactttttcaaatatcatttaatcaactcagaataaagtgccctgtagccaacagtgcctctttacttgcttctctgggaaatacatggtactaaattagtagcacaaagtttgggaatatgcaaaataatggataaccatttttcaaaatgtacattctctgaagaggaagcagctggttggacaggatttcttgaagagccaggtgctaagggcatcaggtcgacatccatagtaaccatgtgccataacatctacacatttccacttgttttacagacaaggtaacaggcagaaggaaaatccagagtcttgcagtaagcagatgacaaaacttcaatatgcttgggcaccacttaggtgaccccagggagatttagtgtggccttaggaaagcaaaagagcactttttattggaaatatgagcttgtcactgggaaagatttgtaaaattgatcaagaacttgatttataattatgcctcaaa

SEQ ID NO: 153125 - DNA, 374 bp, Homo Sapiens
  misc_feature (26)..(26): n is a, c, g, or t
gatgtgagtttaagattctttatgcntggtctgggctttgtatcttgtaaggccacaggtttacatgtttcatgatagcatgtacctggcatgattgcagcacctgagcctgcaaacgtctttgtttaattccctgcagcaccaccttgcatgtaatcagctccatctgcaaagtatttggcaaaatcaacattcttctccttctgactttttccacattgtgcccagagccactaggagccttgtattagattgaattacatgaaatcaccatttgggggagataaaaaatagtcaaaagtcagcgcattttgtgtgtgtgtgattcaacctaaatgattgcccttgcttaggatttatttaaaaagtttgtc

SEQ ID NO: 153126 - DNA, 219 bp, Homo Sapiens
gctattataaataaagccactataaacatttgtttactggtttttatgtggacacgttttcatttctctcactgcgcccagcaatgaatacatttattttatggcaaaactaaaagtttgtcaaacacccaaattcagtatgataagttagctttttataggatactgacaggttattgtgggtactccaatcttgttcagcaaggccaaattttcaaa

SEQ ID NO: 153127 - DNA, 519 bp, Homo Sapiens
  misc_feature (498)..(498): n is a, c, g, or t
tttgacagagacggagagatttattttaaggaattgtgtggctggcaagtccgaaatccatagggcaggctggcaggctgaaaagttaagtgagggttaatgccatagaccggagtcctgagtttgaattccacagggcaacaggctggaaactcagatagggtttctatgttgtagtctcaaggagaattccatcttctttaggaaacctcaatctttgttcttaatgccttcaactgattggacagggcccacccgtagtatggtgggtaacctgctttactgatttaagcgttaatctcatctaaaaaatacctttaccaccatgtccagactagtgtttgaccaaacaatgagttggcatactccacgcaaggtgacgtgcaaaatgaaccatcacagcacttcttgtgtcttcatgtgcccacctggtacatgggggtacaactatctggcccaaaggggtggtcaatcctgagtggataaataataggaatntagtcctatgatgtgtcttga

SEQ ID NO: 153128 - DNA, 782 bp, Homo Sapiens
tttttttgggagtgatgtattcttttattgaagcaagtatgtccagtcacaccaaaactgacgtcctgcattatggtacagcttcatactcagagttcatctcaaataccaaaacatcaaatcagggtatgtatcaaattgggaaaataaagtagcagacagacactgtttcaagtaggtactagaactgatcacccgtgaagtgcacgtggatgtgtacagaaaccgttctaaggctgtattccaaatatatattctcaagttttaagcctttctcatctcaaagacataaacaaagcaatatgtactatcaatatacaatctgtactagctagaacctcagaaagtgcaaacacactgtgacaatacagtggaactattcctgctccacccaggaccagaggcatgggcagcgggcccagggctgcctcctccccaggcccagcctttcccaatgtcttcaggctcttccaggagctttgggaattgggacctggcccatcctcacccaggcttccccattgatcaaggctcctgcggaaactgggaatgcagagagggacaaggatgcggagttcctgcgagggagacggtccacgtggattgaccgtgtgctttctgaaggacagctgtcctgcgccatggtcagtagggcccagggctcacaccacgaagtcagacatgggaaaatggagtgtgctcctctagctgggtgtagaaaacacctctcagtatggggcagttttatctggatgggctccagcagtacaacctgccggtgg

SEQ ID NO: 153129 - DNA, 484 bp, Homo Sapiens
  misc_feature (81)..(188): n is a, c, g, or t
agagataccaggagatagaggtgaagtgcagtacttttattctttaagaatatagtctttagccaggtgcagtggtgtgtnnnnnnnnnnnnnnnnnnnnnnnnnnnnnnnnnnnnnnnnnnnnnnnnnnnnnnnnnnnnnnnnnnnnnnnnnnnnnnnnnnnnnnnnnnnnnnnnnnnnnnnnnnnngtttcccattcatattaactccatcttttaaaaatgtcatgattacaaagtgaaaagatttggctttcttagaggctcaatcacagaggtgaaagtgaccttggaaatcatatactctatccccatgttacacagattagaaaaactgaggttatggcactgacttaggcacccccagcaaggcaacccagggactacaactggcaatcccaactcctgggctagggctttttctacctttttttgcattggcctcttaaagaggcaatgaatactaattcctggcatcagaaaaa

SEQ ID NO: 153130 - DNA, 609 bp, Homo Sapiens
  misc_feature (50)..(58): n is a, c, g, or t
cctcagccatggagaactgatgtagagggatttctgtcttcaataccttnnnnnnnnnggcaaccttcccactgccaaagaacttggaaatagtgatttccacagtgactccactctgagtcccagagcccaatcagtagccagcatctgcctccccttcactcccaccgcaggatttgggctcttggaatcctggggaacatagaactcatgacggaagagttgagacctaacgagaaatagaaatggggaactactgctggcagtggaactaagaaagcccttaggaagaatttttatatccactaaaatcaaacaattcagggagtgggctaagcacgggccatatgaataacatggtgtgcttcttaaaatagccataaaggggagggactcatcatttccatttacccttcttttctgactatttttcagaatctctcttcttttcaagttgggtgatatgttggtagattctaatggctttattgcagcgattaataacaggcaaaaggaagcagggttggtttcccttctttttgttcttcatctaagccttctggttttatgggtcagagttccgactgccatcttggacttgtcagcaaa

SEQ ID NO: 153131 - DNA, 522 bp, Homo Sapiens
tcatcattttttcctgagctttcaggttctcctcagctcctgatacttaaataattcccatttaaaaagcatttaattgagaggagcctggaaactcaccagctcagagaaaaattcagtccatcaagaggttctgagagtctttgggtttaagtctttctgatcttttactcctcaatcctctaatcctttttgtgaggaatctttcacaatccttgtttttagttcttatttctcaagtttccctttgaaaagcaggattcccatcacatctcataggtgaaggcagcataaagcctgcttccaacaacactactgcggttacataaagacacgagtcatttctgctgctggaggctccagtggagtgttcccttggatttgctcatttctttgcttggtcctccctgtgatcttagaggattgcagtatttatgaacatcatcttgttactttccatttagtacatttctgcctagtcattggtttttaattttgtcctcgtaccctccatttacaaac

SEQ ID NO: 153132 - DNA, 489 bp, Homo Sapiens
tttttaaggaaacacagatggaaaacttaatgttatgttttttatccgtctctgaagccagcatcatacttgatggtgaaacttgagtatttccagctaagatggggttccaggcatgtttgggataaccacccgagtctactatgtggaacccttcttctctgatgggtagagagccctaaaccctcctgttctggactccatgactctcagtcactttctctctagaacgatcttcttggtatctaggactcagtcctatttgttttgagattgattccaaacttgattccctcccctcttatccctgcagggcagaccagaccagtctgtggccatggctccttactggcggcagtgagggcatgtgggctgcttccaaccactcctgcttttcttctttccttttcaaaattcctccccttccccctttagggagcctccctcttgcccactgtggtgaggaagggagaagagactctgttccca

SEQ ID NO: 153133 - DNA, 449 bp, Homo Sapiens
ttttgcaggagtattgattttattgtatagatttggtgggtagatattacagggagacagacttcaacttgttatgaggaaaacatgttagcattaagtggtgacctgtcctatcactggcaggattcaggtagtaaccattcctattgctagatgattcctgcttaaaatctatagaaggaatttgttgatgtgcgttttgggcaaaatgacattttagagctattctagctccaagagattatatactactagtgggtatactaatacgacttgtacatttattattaattataatagctactgttatttactattatgtctgttatatgctgtatacaatgcttgatatttacatacataagccatttaagccccataccaatactttgtaaatattatccccacccatgtggatacctaattgttgttctctatttttaatttca

SEQ ID NO: 153134 - DNA, 518 bp, Homo Sapiens
tttatccagtctgacaatctcttttgattggattgtttaatcagttcacatttaatgttattactggtatagttgaatttatgtctaccatttttgtgtgtgtgtatcatggggtttttgttcttctgttcctctctatgccttctttcacattaagtaaaattttaaggtagtgttttaatatctttaattatttttccctatatacttttaattatttcttagggcttaccatacacactttaactcattataatcagattcagtttgattcaatttcatactaacttaatgctagtaacatatagaaatgttattgccacatagctaccttccctttcccctttttaatggtaatattgttatatatattacatctatgagtgttacaaaccccaatgacatattcttataattattaccttatataattttatatattttaaagaagctgaggttagaatggggagcaattatatatttatagtctttttatgttaacctttactatcatttct

SEQ ID NO: 153135 - DNA, 511 bp, Homo Sapiens
gaaattcttttcaggaatcctaaggttatagttcccttaaaaaaatatttgctgttttacctcttttaagactgtaaacaggacaaaaaggcatggatatgagaattagctagtgatcactggctattctaaatagtcactaaggcttgaattgtctcttcaccagatgcctgtcagaagtcccaaaggtttccctgatcatattaataactttataaaaaattgatcattattcattaaatattagatattagtaaggaaaatataaatgaagtctaaaccaaaactcttaaccagactaacttcaatgttatgaatcacaaaatctttttgattgattgctctattgacaagctcttatatgcttttagagaaagattaagtcccattataagagatgataaattttagtcaaagactagaacacaacttacagaatacataactggacttgacagttaacaacttagttatttacactgtacaatggaacaaagaaaaagttggcggc

SEQ ID NO: 153136 - DNA, 354 bp, Homo Sapiens
gaactggagaaatgttttatattttgaagatttaggacataattcaaccaaaggcaatgtttgaatcctgattggatccttctgttaacaaactgcaagaccatttctgagacaatcagggaaattttaatcttacctggatatttgataatatttattgttaagtttttaggcatagcatctgtgttgtaaagtgacaattgtggccccaggaagagtacctaaaagcagcctctagttgctgagagaaattcctagctgatagccaggaaggaaatgggacctcagttccacaaccacaagggactgaattgtgctaactgtaccactgaacttggaagcagatttttttct

SEQ ID NO: 153137 - DNA, 220 bp, Homo Sapiens
caattgtaaaatgttaagagaggctgcctaccttgtggctggaattaaatgaattaacgtgtgtgaatgtgactagaattcagtacatgttcaggaaaagctgatttccgctttgctgttaccgtgaatattactgttttaggatgtagaaaagggtggaaggggatgttattgcatcctggaagcttatccttttgaggtaaagattgatttttggtcc

SEQ ID NO: 153138 - DNA, 457 bp, Homo Sapiens
tttttaaaacaacacaattttattctcgatgaaatctgaaatgggtttcagtgggctaaaatcaagttgtcagcagagctgtctggaccatctaggagagaatccttccctgccttttccagcctctagaagttgcctcctgttcttggcatgtaaccctatccttcatccttcaagccagctgcggagcatcttccagtctctctctctctggctctgactgattttcctgccgcttgcttttactgataaggacacctgtggttacattcgtcccacctggataatctaggatcatctccccatatcaagacccggactgtaatcacaactgtaaagtcccttttactgtgtaagacaacacatctacaggttccggagatgaggatgtggacatttagggcgtgctattattctgcctgccacttatatgggtctatgtaagaactgggggctg

SEQ ID NO: 153139 - DNA, 477 bp, Homo Sapiens
tttgtgatcctgcttcatattattctgttctgtccaatttcttttctgtagggaaacgccaaagagatataaaaaagagatataaaacagtggtgagtggcttccaaatgactgtttgcccttgctttttaagccaaaatcctctaaaaataggtctttaattctggcagcagattaggacaaatgctcaaaaattcatgttttcttcaaaaaatttcaactggcgagctttcacactgtaagttgtatacttttcacccatgtgctcccgcaaacgtacctatttgagaaacaaaaagaaaatcaatcagtatgtagtaggaaaaaatatttctgtaatcttagaggaagggcttttctaagcatggtatccaaggtggaaaccatacaggaaaatactaatagttcagtttacataaaacttttaaacttcaagatgtttcgaaaagtcgtaagaaattaaagagcaaacaaaca

SEQ ID NO: 153140 - DNA, 531 bp, Homo Sapiens
tttttgctggaatagaggcgcacgttctttattcacatgctgaaatagcattgtctggaccaatggaacccacgtcacctatcggaaggacacacactataaggtattgggggacctttcaagaagggatgtccctttgactatagaaaatacagctgtgtctgacagtggcttatattgttgccatgttgagcacagtgggtggttcaatgacatgaaaatcactctatcattggagattgtgccacccagggtcacgactacaccaattgtcacaactgttccaaccgccactactgtttgaacgagcatcactgttccaatgacaacaagcgttccaacgacaacaactgttccaacgacaaagactgttccaacaacaacgagcatttcaatgaaaacaagtgttccaatgacaacaatggtctctacctttgttcctccaacgccattgcccacgcagaaccatcaatcagtagccacttcaccatcttcacctcagccagcagaaacccaccctatgacacttca

SEQ ID NO: 153141 - DNA, 495 bp, Homo Sapiens
ttttttgcctttcccaaatttaaaatcttgcaagagatagtacaacaaaggtagcccagttcttcctcagtgccatcctggtgtgttcaggttttttggcaaaacctttgaggagctggtgggtggcaggactaggttaaagggactgagcagagggctcccgactgctgagctacgaggaagagggggcagtggagagcacactgagggctcagtgttgatgacatccagcctcctcgtgccagaggtccaggtcctcctggtgcaggagcagaagctgctcaggatcctgcagagatggtggcagagcccaggtagaacctggcaccctgttgcctccaagaccacctcagatgctggtttggccgcctcccatgcctccttcccctttgccagcagctcagtccttcaagagcagggccttggcaggtctgtcttaaaacaccgtgggagtctggccatcatcctggcctagcactgctgtgccctgtccct

SEQ ID NO: 153142 - DNA, 605 bp, Homo Sapiens
tttttggtcctttgagtatttttatctttagcactcatatgtctagcagagtctgggtggctccatattgctaccaggaaggaggacaagtggctggatttgaaagcagatggcccctgggtgcagaggaaggataccccttgctccctcccccgccacaccacagcgtttcctacctcaacatatggggtcccccaaaggcctgtgcaagccacctgcttcccactgtgaaaacagctggcagagcagattcctcagcccctagctgggtgcctggagagaggttctgacagcccccagcctccaaccaacccccgtctcgggagctcaggtctccagagcactttgggccaggaccatcagtcttgggcctgggctgtgacccactgtgggcggctctctgcagctgcctcgaatgtgtgcatggatggtgttttcccctatccctgagctggcaggaggtctgggcacgtgccctggccctctggctggtcaaggacaagccgatggatttcgaaagctatttaatccctgggttctgacgcacccggttcaccaccaagcgggatctagtgcccacaatctgatgtcagagggcgggagtg

SEQ ID NO: 153143 - DNA, 767 bp, Homo Sapiens
ttttaggataattatttcagctttattgagggcagattagttgaagtctgggcgctgcgtttcaatacgcgttgtacacgggccgacaatgtggtcattgttggctactgtgtgtgaatccattcaacatatacactttttaacaccaaaccgagtcctgtctaaatatacacagtgctcagggaaagacgtctctgaccccgacaaatctgcgtaaatcacacttccatagttacagaagcctcacaaagggaggcccggctcaagatgctgattacatcttcttaaaagcaacatacctaagaataaatacccatgcctggcctaggggctgtggtggccagaggcagagagggccctctgtgttctatgggccttttggcgtctgttttaggctttcgatgttactttccctagagaaattagacagtttaaaaataataatggtaattattattattttacaatacgagcaaacaagcaattttcaggccttattcacttcatccgggtggctggcctccaaagtttgagtgccctctggggctggcaggcaggaccagagctccttctgttgtgtggtgaggagtgggcaactgtaggacttttctgggtccagagggctcttgggcttctcggctcccgcagctcctccaccactcctcagagaggcagctgaatttgtggatttaggggagatattatgaggctgttgtcattagggcgattgcggtggaatcgctgaatcttgactcggcggtggttgg

SEQ ID NO: 153144 - DNA, 511 bp, Homo Sapiens
tttagtatatttgcaggtaaattttatagaatatcatgtgcgtttttctactcaagtgaaacattagcaaagcatttaaaaataagtttaagtgctatatgacagttacaggctaaaaataatgaggaatatttgtggataggtagatatggaacatcctgctgtctgctgaaagcctgattttaagctccattttgtactgattgaaagctgaaggaagtaatgaggcagcctcccctgcccacttcctaataattctgggcacttctaactccactgagggttctattagactaactgcctcaaagttgaaaggaaaacaaaatttttaccagacatcgtctaattctacatgatttcctaatctaccagcagcctaattttatttctatcctagctgataaccttttggttacaaccatttgtcaaaactactaaaaattttacatttccaaattaagaaatgtaatctctctgataaatttggtcgtaatactgttttatctttctg

SEQ ID NO: 153145 - DNA, 444 bp, Homo Sapiens
tttgctattgtatcttaaatttcccagagctttctttgtggttggcaagttcctttgtaaagcaccctctcatcacatgcacgaggtctcttagctttctgagtagaaggaaatgctgagtattttaaagttttattctccctgaactgttttggtttcttccaggttcctctttctgtttttcctgtttgttttgttctttgcgtttcatgggagaagtttgtttcatttaatcatatagggactctagccttaggcttcccaaacacagatgaggccaagatatagtccccggtgctgggggattcggtatgaggaccagaccccagtcgccttgccagttatccctggggtgctcccccagaggccctctggttcatctattctggaaagcaaacctctcgtctttgggctagggtaggggaatggggaatggaggtttcc

SEQ ID NO: 153146 - DNA, 557 bp, Homo Sapiens
  misc_feature (470)..(470): n is a, c, g, or t
tttgcgtttttgttttcttttcctttcccctttgtaaaaactttggctacattttaaaacaaaaagcctcaaagtaaaatgaccctgctgccaaatcactgtgcctagggatgggcggctgggccggaagcactgctgagaaggcgccctggctgcgcggcaggacagggaggaggcagggagggcaaatctgcactgcacaggaggcgtcactccacagtcacggtaggagcagatgggatgaaggagtcgtctgcttttttgtttcgtatcaaagcaagcgggtcaatgccatatatccacgggtgcaagctggttgacaacggagctttcgggagtggagaggagggaggtctctcagtctgggccacgcatttggacggtggatctggtgaggctcccgagtgtcggctgtgtcgaggccgcatggcggcaccgtcctcagtagggagaggcgaggtggcagccangcactgtcaggccttactctcctccactttgacagcccgaggcttgatcgctccggttcgcttcatctgggaggcagccgatggggc

SEQ ID NO: 153147 - DNA, 696 bp, Homo Sapiens
tatacttctttcaagtgttgacatatgaaaagtattagtctttagagattgtaagaattttaactgttggattctacaaggcactaacatcataagtgctctaataaatttttgtcaaaagtcaatcattaatattcaaaaatgtagataaataatacatgtctagcaattttcaaaggcatgctaattcatcatgctttctctttcaaatagtttttttaagagccctctgcttattccagtccccccctttaaaatcttttaaaattattaataacctattaactttgagcacttcattaaaatccaaaaaatttgagggagtacatgtctttgtcctttacctttagaaccctcaaacatagcttggtattgctgtttttaaaattttctggagcatttaggattcacttagaaacaagcctttagggagaaaaatttatctagcaccactcactctatttttttgcactgactacttctatttttccccctttcatttccctagacttttcaatgcttttttataaaggtgcttgagttctgtttctcaacagctccctcatttattgaatgattcacacagtcactggaatattataggctcttaataaaatttttgaatgattgaaagagagaaaagtattttacctgtgatatattgatatttaaataaactagaacacttaaaggaaa

SEQ ID NO: 153148 - DNA, 443 bp, Homo Sapiens
aaagttcattggtttttagtacattctcaaaatcgtgcacaatcaccactaatttcagaacattttcatcacccgaaaaagaaaccccaaacccttagtagtcatgcctcatctctcacagcctccaggccctggcaaacgctaatctatattcactctatatagattcgtccattttagacattgcatttcaatgcagtcagacaatatgtgggcttttgcacctggcttctttcacttagcaagttttcaaggctcatccatgttgtggcatgtgtgagtacttcatttctttttagagtctaataatgttccattgcgtggacagaccacattttatttcccattcatcagttggtagacatttgggttgtttccactttttggctattacaaataatgttgctatgaacattggtgtacaagtttttgtgtgtatgtac

SEQ ID NO: 153149 - DNA, 233 bp, Homo Sapiens
cacagttggttttttgtgctactgatttttgtatgttggttttataaataaaatcagtttcttagttacagttcgtttttggtgggatctttagattttttctaaatataaaatcatattatctgcaaataaagagaatttaacttcttccttcccaatttgggtgttgtttctttctcttacctaattgctcttgttagaatttccagtactatgttgaataaaagtggtga

SEQ ID NO: 153150 - DNA, 716 bp, Homo Sapiens
  misc_feature (427)..(427): n is a, c, g, or t
  misc_feature (473)..(473): n is a, c, g, or t
  misc_feature (587)..(588): n is a, c, g, or t
tttaacccaaagacctgatttatcctgtatttattcattcaagtgtttttactgtaatatgatagctgttttactgaatgtcttaaataaatacaacatacatttgtaaatgtcttttaagagtcagcccctatactgggtaataacaacataaatatggctatctcagacctcataatctatcatacatacataatttttggtgtttgctaccatattttgattgcatattatatctcgccctcaaaataaaataacacattatacccaagttttaaaaaaagctgaaaatcaaatatattaggtctacctacaatttgacaataatctatttaacttttatttactgcatactaaaattatatctacaattcactaatcattatcagcttacatcatcagtagtagcaaggctctcactaggagnttagttctgagtttgatgctatccaagtcccagagtttactgactntacattttctcctttttcatggctctcagaaatatgtctggatacctatgtcctgcaatgcatataaagccctctgtctcaagtagtctgtggtttagtagctgcagctcatgnngaagagttcaataggaaaatgtggacgagattcattttgagaaattaatgtagctacttcagaaataatagtatctcggcaagctttaaacttggaaaaatactcccagtttcttgagatatttctgt

SEQ ID NO: 153151 - DNA, 563 bp, Homo Sapiens
tttcatgaattgatgctttaatttctaaggggttctttccccgaaatatgattactgggtcaaagggtatgctacacacagtttatatttttttacagtttaacactgagagatgactttctccagattttttcgtttccctctcggcgtctgtttgttccggacactttcacttttcgagttccaaggaggaggtagcccgcgacaccggccgcgggaaacacgagttgcagccagcatcctagttagcgtggatgcaggtggcactccggggacgaggggcttagtggggagcactacacagccagaggcggaggcccgagatctagcacgacgctgggcaagtgacggcccctccccggccttggttttcttctgcgtagtctgtgactctaaacaacattaggctcagcctgggcctagagctggtgacctcaaatctcggcctttgttggctcccctaggactgtaggctgcgcttcacccctgctctgccccactacttctcctccgcgcggccccaccttttcagaggagttggctcaacaaggcgagagagagta

SEQ ID NO: 153152 - DNA, 168 bp, Homo Sapiens
ttttttttaactctttgcttcatttagggtatattttatcaacctgtctttgtcactgatcccttctgctatacctgagtctcctgctagtccctctggtgatttcttaattttaggtattttccacttttacaatgtccatttgggtttatttttttaattgtggtt

SEQ ID NO: 153153 - DNA, 560 bp, Homo Sapiens
tttttgaggggattgttaagaacttttatttgctttgttatttctataagaactagagcttctttatgtaaacgttagggctttaaaaagtcactagatgctacattctagacaaacatttttatttcttcatttatcccaatatatctataaattctgatttcttaatcacgattctatttcctttaaaagtcttaacgcgaaactgttattgttctgtctactacctgctgtttaacaaaagcaaagtgtgcagcatttgaagagatgatatgtttgcacagaattctctagtaattgacaaaaacacatttggcattatatattttagttcccagacataaatcttgatatctcaaacaacattctcctaatttaccaatccaccatcctgcagataaagattattcatataaaccatctggctgttctcttagagcatcaaagagtaaactttcaagaagtagcatgaaatataaaattattcatagaggagaaaaagacacaatacatgctagtcaaaagctgcatataaccaaaatcatattcatgagcttagt

SEQ ID NO: 153154 - DNA, 483 bp, Homo Sapiens; identical to SEQ ID NO: 119797

SEQ ID NO: 153155 - DNA, 484 bp, Homo Sapiens
tttatttatcttgaattaatgactccatctgtttctcatatttggaaaacccagaatgtacacagtgttctggaacaaatgtattctgtccaagtggaagccggttaagttccgatatcctcagctcgacagaacatttttgtgcactgctcttcctgttcttaaactggagaggaagtcaggaagacccagcggttacataatgtcacctgtctcacatcacttatgtgggtgggtaaggggcagctgctcagatttcatttggtatccaaaaaaggtgcaaacgggaaaaaaggtctgggttgttcactaagcacagataggccagtggttgaattttcattccggcccattgaccttgtgggtagtgtaactcactgagtcattctttttaatctctactctacattcacatgtgttctatgagaatgctagcgagaagtacattgtggcccttagctagaattctttagccaaaagtcct

SEQ ID NO: 153156 - DNA, 505 bp, Homo Sapiens
ggtctagccacagtggctcctttagtcctccactcaggacccttcctctgagcctacaaataatgcaggctggcctctcccattctcgaccctcattttcccccatcagcccagcgctccctgttccctctaggatgcttccaggaatatacagcaccgttacagagaggattgaattgcatggctttttgagcaacttggaacacttgagccagccaaatttttgctttatttcagaccaccaggtataacagcagaatttttcatcctgattagaaaggtgttagtgtgcagtccatagagagagagacatcatggttaagaggcaggttcaagggcctggatacctcaactccatcctggctgtgccacttactttttggtggtggtggggaaagtgcttcatttctattttctcacctctaaaatgaggctgatattaatagttcctacctcaccgggatgttatgaaggttaaatgagatcatccatctgaagcacttag

SEQ ID NO: 153157 - DNA, 451 bp, Homo Sapiens
tttttgtcctgggacccttctctttgttccttactgagacttaaaggcagcattaaagcttgtttgtgtgttttatttgtatcccatgactctctggcctgggttgaaagtccccacacatagagttgctagaatgtcctgtgatatcagccctggaagttgaaaatctgtcctgagactgatatgtgtcttcaaacatgggagaaaggggtgactgtccctccaccatgcagagtctgagtgtgacaggacccatgagaggatgctgagtgggtgccaggaggactcacctccaagagcaagatcctggtccctgttgcacattgatttcaaacagaccaaccagcttggacaattgaacttcccaattgcagtcatgatgaactgaagaccagaggaccttcctccaatttcctggtccacataaagcactaaattgtaatgtaaccct

SEQ ID NO: 153158 - DNA, 487 bp, Homo Sapiens
tttccctgttggaaattttttatttaccactgcaaggtttttgctccaaagtgtcacaccagacatatgactacaatgtctcatgcatctttttgtgctttagttcatgactgcaaaacacacacttagcatttgacaacaggaaacacagagggcagaaacaaatcacaaggactagttggtttaggttacagccacattttacccaggactcctttacatccaagagaaatggaccctgaataactggtctcctagctgattctctgtgcccagctttgtttggagtgatttgtcattcaacccacacaaaaagttgtatctcaaatcaaaatggacagacatatgcaaggtcttaatcaataagtgctcaacaaatagatattgatttgatgcaagaggtggagtcacagattaatgagggcagactcccgattttctatccccgtagaaatctctgaagaaagaaccagatcacctttttgag

SEQ ID NO: 153159 - DNA, 391 bp, Homo Sapiens
ttttatgttttttttctgtcagtttaatccattttattgacttctcaattaacaacaaaattcatttggacagtaaatcagaaaatactttctatggtggctttaaattacattttttaacccaaaaatgttatccagagccattttagacaacaaatgtatcttaagtacaaacggtaaaaattcacattcccttcagtaactctccttccacttagaacacaatgaacttcttaggtaggcagagttctcgttcacttaaccacaaccccattttagcacagaactgcagcaaaaagaattgaagaagtgattagaaaggatatgcattattaataaaccatatgctatgtgagtgttaggttcccacgaaatattttactgtatattt

SEQ ID NO: 153160 - DNA, 603 bp, Homo Sapiens
tgcggccgccccagctgtaacccctggctccaggcccttcgaggaaagggagggatggatcacggggagatctaggcctataattacttatgatcctataatcactcgggtcctgacccgatttcccgttgtgaaaggcaaagagcctcctttttttccccacagacagaagtagtctgctcccaaagacccatcatcactggaccctaagccccccacagcacacacgagctgccccagtccccctgatggccacctcttacacaagctcattcattcagcagacactttctgagagccttggcttctgagagcctagcaggcttctgcaagcaccatgcagacgggcatcaagtcagccttactcaccactgttccttctggggctcagcccagtgtctggtacagaggagtaaattgtattaaatgaagtctcagccagatgatgccagaaactgcagatagagttacaaggcaggggaagccctgccttctgggagctcacagccaagggggagagtccgatggagaagcagacagttttattgctatggaatcaggctacaaacatgcatactcacactgactgctagctggtacctc

SEQ ID NO: 153161 - DNA, 532 bp, Homo Sapiens
ttttaatgtttttagatttattttatcatatgtgcatacctaaacacagaagtcttaatatctttcataaatatctttcataaacatttcagtatttattcatatgcattttttccatgttctttggtcattcagtactcataatagacttcatagttatctgagggaagtcggctgtgtagtcaattttttgttttaacctataaaatggctaataaaggattttcatcctgtggtcacagtgacaattcaaagatttatggaggtaaattgatctgtaatcctaaatgatcataaaataatatcagtaaatttgtcttaagcttttccaaatacattctgccctcaacttgtttttattctcctgagtgtcaaatcaaaatttgtttctgaaatgctgcagttgagacccactaaagtaaaaagaagtgggattttttactccctgccaagacaaggccatggaatgggaagtgtgaggtcacagggcaacagcatgacttggtgtgatagcagcgaattctggagactg

SEQ ID NO: 153162 - DNA, 599 bp, Homo Sapiens
gggtctttcattctacttatttcttgagcacttactgtgtaccagctgctgtgccagtgtcttattttaggggtaacacaattttgtgtggtctagcaacttactcattttgagatgcagacatggaaacgtgcccttccggtccgggtgttcttggacaagtgacttactgtttctggaatttcagcttcccgatgggtaaaatgagaagaataacggacttctctccgaaggtttgtgtgaggatgtgactcagtgagccacatggtacagcactcagcctgggacacccgcagaactgagatgagaaggagccaggatttaaagtcaatttaattgtcacttctctggggtctaccatgcctcccactaaagcactctcttttgctattagccacaagcacgacatgcggtttcccaacactgctgggtgcacacctctcctcctgacccctctccccacttccccggcaaggacacacaggcggctgtggactgggggggctcatgtatccatccatttcatgtggatgccattggggggctgcactgggctgggttattttttaactcctgttattagtcactgcccgtcatga

SEQ ID NO: 153163 - DNA, 436 bp, Homo Sapiens
  misc_feature (321)..(332): n is a, c, g, or t
gaatatttgattcttatgaacaaggcattactcaccagagaagatttttttgttctaccaggtgcctaggaatgctaacagtctgggaccacatagaccaccaggtgatgagacaatcctgggagtcctgttttactttggcccatcttttctcccaaccctgtgggaatagtcattcatatcctagctgcaagctagaaggtggtttatcagagcccaacttcgagggctctgggctttagctactgtcaccccatcataactgagcttcatggattgattctctttttatctttcagattttcttttaaaaatctttgnnnnnnnnnnnncttccgaaagattcccccaacattaccattccccaccttccgttgaatttttttggctctcattttgaatttttcaagagctcatgttctttgtcttcattaaa

SEQ ID NO: 153164 - DNA, 558 bp, Homo Sapiens
ttttttttcaggtgcacgttaaattttaatccagtttcagtttacatattatacataattagacaatgaagtgatggattttcttttcaaaacgtcccatgtttgctgctttgggtaagaccaggcaaagtgttatctcaggaagtttaagagcttagaggatccaagagcgagagtttatctggaaaatttgttttgtccatgatcaagaatgtcctgttaaaggccaaatatcacaattcagtgttggaagtgacaagaagaaaatttccagaaagttccatttgttagctgacatgtattgtagagaataattttgggggtaattggggcccactttctactatgtgtttatgaacgattagagactgttacaggacacagtgaatggcttaatatcacgatgttaatcagggacgatgctgctgcaggacaaattaaccaaacccttgaaaatatacacaaagaatataaaaaaggactcatgcgggaattattctaaagaaagttgttgcgagtcatgaggggctcagtccatgctcctgggcttgagagacc

SEQ ID NO: 153165 - DNA, 458 bp, Homo Sapiens
gtcaaaaaatagtgggttttatttcattttgaaaaacagactcacacagattgattcttcaggtcccccgacttggacctggcacaggaagaagtccaaacaactctgcatagttacattagtcgttttctggtgctgcagtcgctggatgcgggtagcagtgaaacattcccaagacaatcactaaacatgcagaatgccagccagaagcatgaatcactttcaggggtcttgctgcagggagcatgaggttgtattctgtgtgcattgacaactgtataggataagccagctgtgtccaagggagcaaagcaccccatattcttctgaacctaaaggggtttcctcctcaaagaagcatgttttcaatccctaaactttggggccagatacagctccaagtggcatttattgctctttggagagtcaaagccaagccaccatgagcacgaaagctg

SEQ ID NO: 153166 - DNA, 540 bp, Homo Sapiens
tttaaaggtcagatattgtttaacacttgaaattccaaagagaaaaaatattcccaatgagtgctctgtttcctatagagtaattgctgaaataaaggaacacagaaaacaaggcttctgccagttgtcacttacaaaaacatacagaggatcataatctagagacatggctaaggcctcaggtggtttcatgctcaagattgatgttttgccagagagctgagttgtggagtcctgtttcggaagggctgtgatggtggtgacttcatcctcagctccttgctttagggctcgggcaagcttttgaggtctgtaacttgttgaagacttgtggacagagaatggctgatatctcttaattttgtacagttgaggaacctgcagattgaagaaggaataactctgcttgatttgaacttctgaagacttaattgggaccagtccaaggccatcaggagccaactcgttggagtcctggggtgggctgcagtctgggaaagcgaagggcagcacctccttgggcgacacagagaaccggct

SEQ ID NO: 153167 - DNA, 700 bp, Homo Sapiens
tagctcttgtatctcttgtctgtgagcagcttgcaaagtcttccaatgccaatcgtttgtctttttcaaactgtacttgaagttgtccacagctccgtaatttttcttcatatttccttctaatctcttcgacttctctagacatggtcactatgcgttggacatgctgggcttctgcacaaagttgcatgtcctcaactctgtgcttataagcttcaaattctgtcaaagcctgctgcttcatttttatgtgatcttctaatgatgattctaaaacttgaatctttcttctaaggtctagctcctctgttactttgcttttatactgcaatattttttctcttgtttcagcaagaatttgttgaatttcttcttcatgagcatctttgagggcttgaattgcagattcatgctcatcatttttagtgtttaaagcatatattaccttggtgagctgggcgattttcttgctcattttcaggtgcatctcctggctgtagtccatgctgtgcccagccagctgtgcggtggccggcgagggcgcgaatttggccgccgagccgccgtaatagtgctgctgccagctcatgcccggggtcgccatcttcccaacagaccccagccggggcacctgtccccgcgggtggaggcaggcccgtggagcaacgacgcccgggaggcaagagtcgcggcggccgca

SEQ ID NO: 153168 - DNA, 531 bp, Homo Sapiens
atcaattttatttcttttgggatattggaaattaccccattgactggacccagacttatggtggaagttccagcacaattaatactgaacggggttgtgctttttcttctggcatataattgaattatccattctcattataggtgaaggacttgcaaatctgtttgttatcttctaccctcccccagcctattattttcagggtctcactatggaagaacactgtggtgaaggaaacaatccagattcctttggcagtcatagtcactcatgtctttatttctgtcatgtgcattttgcagtcctgacacctgacttctgttgctagagccgcaactatgtaggtaggagtactgttggcttcggggatacacacactggtgaccctataggacagtcttatttgatatagcataagtatgtttttaagaattcatgttatccaaaattataaaagcagttgtttgaatgagtgaaagaaagggggttaagtttagagagctccatacaaagtcatatataagcaatgca

SEQ ID NO: 153169 - DNA, 578 bp, Homo Sapiens
  misc_feature (110)..(243): n is a, c, g, or t
  misc_feature (309)..(358): n is a, c, g, or t
  misc_feature (381)..(424): n is a, c, g, or t
ttgcctgagatcaggtctcactggagtacagtggtgtcgtttgggttcactgcaacctcttacctcccctccaacttggcctcctgggtagctaagactacaggtacacnnnnnnnnnnnnnnnnnnnnnnnnnnnnnnnnnnnnnnnnnnnnnnnnnnnnnnnnnnnnnnnnnnnnnnnnnnnnnnnnnnnnnnnnnnnnnnnnnnnnnnnnnnnnnnnnnnnnnnnnnnnnnnnnnnnnnntcacccaccacgcccagccagagtaagccttttgtgtgtttatcagatcaaccaacactacaatcnnnnnnnnnnnnnnnnnnnnnnnnnnnnnnnnnnnnnnnnnnnnnnnnnnaattgctcaaggcttcagaagtnnnnnnnnnnnnnnnnnnnnnnnnnnnnnnnnnnnnnnnnnnnnacactgctgctgtgcgctcgggatggtggggctgggcccaggcccgctgggtatacatgatctttcacttgttaactagggaaaaacactagtcaccagtgtggtacaaacttgtacttaggtggattcttcaaattgtcaagattagttttta

SEQ ID NO: 153170 - DNA, 489 bp, Homo Sapiens
gtaacccaatacttgcaggggttgggggcacggttatagattcaaccattgacctaagtctgcgtagcactgggaagaggctttggtttagaagccaaggaataatgagtatattggggagaacagattatttacaagatgaactctttaatgtttgtgagaatctcaagtttcagagtttctcttttgagaaagaaaaaggggtaataaggtagaaattcacaccaatgaacaagaggattgctgcaaagtaactgaggagatgtctcgccattgggaccctaatgccatttttggtcaaacattgttttgagcaagaatctggcaaacaaaataatcaacaacaaatgtgaatatagtttcatttacttttaatttttaaatctgtggaaaagtttagttgtgcttcttgttaaaaagaacatttctatccctgaaaatgctatcttgggcttatgattattgttaaactccaagtataaactgaaa

SEQ ID NO: 153171 - DNA, 501 bp, Homo Sapiens
  misc_feature (387)..(401): n is a, c, g, or t
  misc_feature (422)..(447): n is a, c, g, or t
  misc_feature (463)..(463): n is a, c, g, or t
ttttttattttgaaaattaactctttattactttcaattgttaagaaagaaatctcattatatccccaatgataacgtttctgtccttactcaagaggtctgggtgtgggtaacagccacctcccaacaacgtcagaggtccgggttcagaattcctcaacgcgactcagtcactggctcaaataactactgtggagtaacgagaggtcattttaacacaacagagactccaattcaactctcttctgttaacacagtcagagttctcttctcaatgctctcacaagttttaaaaatggagaagctataaaataattttgttagaagaaaagtaattttcttctgaaatggagtaaagcaaacacatacccaaggatcttaaaaagnnnnnnnnnnnnnnnacagaatatatgtatgtattnnnnnnnnnnnnnnnnnnnnnnnnnnagttacaaacactatntatagtatagctaatatgttaacttcatcgcagtgtct

SEQ ID NO: 153172 - DNA, 510 bp, Homo Sapiens
aatgggtaacatatttttgcctttaaaattctgtggttcaatccgtgcaagcacagcttctccatctagcaagaggttcacagggatggaatgaagattaactgcttttgaaagccccaggagaaaggcagtaaatgaatgatagggggtaatacaccagtatctagtgaatactagatactgaatgtccactgatggctataccattgttgaaagggggcttgtaataggtaaaatggttatgaagatgccaaatagatcaaattggtgctttaactcataattatagtttagtagagaaatgcgagacaagaattattattattccttaaaattcattcccatagtgatatgcatttgtctgctacattctttctttcagcagataataccacaagtgaagtcataaataaaagctattctactcatagcagaaattatttctagattcacattaatgaaaaagttttaattttatttttctttcttttaacgtgaatgcaaaataaa

SEQ ID NO: 153173 - DNA, 720 bp, Homo Sapiens
  misc_feature (260)..(292): n is a, c, g, or t
gcggccgccaaatggataaatgggtagatccacgagaagagttaggctaggacttgtcataagggcacctgactccactaatagaggaataaatgcctaataaaaagagagcaagcaggaaggaaggatgctatgaatgcaggaaggaagtaatgagtgagacgtggaaccgcacggccaaggatggacgtttgcgggtggctttttgatgcgtacagccaagccactccatggcaatgagctccgaagacaaagtgcannnnnnnnnnnnnnnnnnnnnnnnnnnnnnnnnaacaataaaaaatgggaagaaatgtaaatagtaagaaaggaagagaggtaatatattaaggaataaatacatgcatgcagatttaagacagagccatgctagaacaggaatgaaaggctgtgtgaaccaagcagaccgcttaattggcaccagtgctgctggtatggtcaatcacctactcaactaaggaacggctcaaagcatacacatgggagggaggagtggggccacagagagagggcccattagttgcagattacgatgtatccagttaggtgcacctgccttcgagaagtgtaaaaataagtatttacatagaaagaaagactgaatggatgcacggtgaatgcatgaatgattgaacgacagaaaagatttgcattgaccgatgaggagggcattgtagacagggatgagggtcattgatc

SEQ ID NO: 153174 - DNA, 548 bp, Homo Sapiens
tgcggccgcggtggtattggcgattcccatgtctccggcgatgagcagttgggcaccgcgttgaatggcttcgcgagcacaacgcgctccgacaccgagtgctgcagtcaactcgtcttcggtcatggcggcttcgacgaggagatcccgcgtgccggcccgaactttttcccggcgcacggcgggcggtggctcggcatcgccggcgacaccgacatcgaccacctgcatggggcagctctcgaggcgggcgagcacattgatggcggcgccgccggcggcgaagttggcgaccatctggccggtcactgaaggtgggaaagcggatacgccctgtgccgcgacgccatggtcggccgcaaacacgaagacttccgtgcgcgaaatctcaggaatgggattgccgctgcgggcggcgaaccaacacgccagctcttcgaggcggcccagcgacccgggtggcttcgtcagttgcagttggcgcgcccgggcagcggtttcggcgcgcgcatcgggcaccggcaggtcagtggagctcataggtttca

SEQ ID NO: 153175 - DNA, 428 bp, Homo Sapiens
tagagaaaaagtaggctagggctcaggccccttcctctggatggcagtggtggcaggggggtggtttggaaagactcccccccacacacacaccaggcctcaccccactccttccatctgggggacagaggcttcggctcaccgagagtgacaagcggcaggtgcagatcccggcgtccctggacaatctttttgatgtgggggcgctgctggaggacacagagaccgcgaacgctgtgctggagcacatggaggaacatgtgctggtgctacagctgacagagcggcttccgaacgcctcgaaccaatccctggccatgatcgcccagctggacaaacccctcagccaccgcctcaaagagtcggagaccccgccggggatgctcgagcggatggccacccacacgcccattacatgccggcgagtc

SEQ ID NO: 153176 - DNA, 439 bp, Homo Sapiens
ggataagcagttggatttattgtgagatgaagatggcttcacggtcttctcgaagcctttccgtacagcatcagtatgtttgctgttccccccgcagttcctgtagacggagctccttgaggccctgtggttaccattctgttcccttagattgtaggcatctgatatggaggaaaagagaaaagtagcacagagacacggcaagttgccaatgtcagcatttttacttctttctgggtaatttatctaacccgtggtagcttggatttgctataatttcagagtagttttaaaaacgtgccttccttggtcgctttttcgagggtagccttacagtactgaggacttttcctgtgagattgtcagacccccacagatccccatgatagcccagggacattggtgatgatctcgaaggatgtgtgtaggccctcgtgcc

SEQ ID NO: 153177 - DNA, 470 bp, Homo Sapiens
ttttttctattggggtgaaattcacataaagccagccatttaaagggaacaatgcagtggcatttagttcagacacaatgttacgcaaccacgatttctatctagtcccaaagcatttttatcaccaccaaagtaatcttgtacctgttaatcagtagctgcccgtattaccttcaacccagccccagaacaccaatctgtgtcctgtctctgtggacttacctattctgagtatttcctataaatggaaatgtacaatatgtgactgtttttgtctggcttctttcactttgcgtaatgtttttgaggttcaatcacattgtagagtttagtgcctcattcactttcatggatgaataatatttcactgtatgtatatgctacaactggtttatccactcatcacttgatagacatctgggctgtttctgccattcggttattgtgaataatgctactatgaacatgct

SEQ ID NO: 153178 - DNA, 440 bp, Homo Sapiens
tttttcttatttaaagctttaagttataaaaggaatacatgttcattgtagaacatttcaaaaatacaagacagtataagaaaaaaatcaaaattgactggattcttagcaccccatgttaacaaatgttaacacttctttccatgcttttttgtgcaaaactcttatgtatttttggtaaaattcagtccacactgaaactgttgtataccttgcctttctcaactcaactttgtactctcagtacagtatgttccacatccttaactctgctgtggaaatgggattatcaatggatgcatctcattttaacacagagttgtatcaaaatgtattcagtgtcatgaaataccattggatatagaggatgcttccattttttaataggtaattaatgtctcagtatgcatttctggttagatgatgggaatgaccaacta

SEQ ID NO: 153179 - DNA, 660 bp, Homo Sapiens
tttttcttttaatgaaactactattttattcattacaaacatcatataatcattctctataatcactataaaaatttaaatgcttcctttctcctgtatatgaagatggtagttctaaagcaacactctaaaagtgttaaaaagcccattcgtaacacacaccccacctcagtttttgaaagtcagtgcattcagtggttataaataggcatgatgttcttccacagctaagagttctgagtgtcaatcagttgtgtttttttctcccaagggaagacgttcccataactggagcaactgttcaccaacctgaggttctagttcctgcccatccctgcttatctgcactttcttgttgtcattccatggattgagtaaatggtgtgcaaattgaaagggaaggctttcttttcgtatccactccaccttaaatactcctcctagtccagcagagccccagtcctgactcttttcccttccaatctcagaagacatcctagaaaatccctggaaatgtccagatccttgaacagaaaataccaagtaaactatgctggtttgccaaaaggctcgatttagcttccgttcattactaggagtggaagaccagatacccttctggtgagaaattacaaggtttctcaaagtgctgctcttcat

SEQ ID NO: 153180 - DNA, 457 bp, Homo Sapiens
tttttttattttacaaatccaatatttattttatcttgtatgtacaaaaagtaaactccaagtgaacatccaatcaaatctaatccttttggccacatgactggttgttctttatctcatagttacaatgaatcatataaactgtagactgccactaccacgatacttctgtgacacagaaggaatgtcctatttgcctatctatctgaggaatgttaaatagagaaaaatagattataaaacaacctggaggtcacaggattctgagataatccctctgttaaaaaacatctgaacagcaaatgtccaatctgtaataaaatagttaaaggtccaagtcaagtccacttctacttggctggcccagcacaagaaatctaacagcactttgtaatcattttgcttttctaattttcccggaggacatgggccattgacatataaggaaaaaaaacaa

SEQ ID NO: 153181 - DNA, 568 bp, Homo Sapiens
atttttacaaaacccatcttttttttatttcataacaaaaatttaaagtacgtctgtacttcctgcataacatcaagacatggaaggaagagatgctactaaatggaactcaagtcaacatcagaaaacacaacacgtcgtcaaaggactactcagaagggggaacacagcgctcaaaagtggtcttatgcatacatatagtgcagtcattgggagtaaaacaatcaaatctggaaggtataaacaagtctaagatgatctagtttaaagcaaaaaagtgctgaagtatatttagttacttttaaaatctgattgcattcattcttagaatagtcacaagaaatcaaacaatgaggctctgcaaatgctctatggtcaactggtctccacccaagtgtagaacagaaacgtcgtggtaagagtcctctgaataggaccaaatgctgattcagagtcaaagtcgggcggggggagcaggagggaaactttaccgagctgccttcccaccagatccagcagaaaactcggtccagtaactagaagactcacaaatcatttgcctttatcc

SEQ ID NO: 153182 - DNA, 766 bp, Homo Sapiens
  misc_feature (44)..(45): n is a, c, g, or t
  misc_feature (57)..(57): n is a, c, g, or t
  misc_feature (73)..(73): n is a, c, g, or t
  misc_feature (115)..(115): n is a, c, g, or t
  misc_feature (141)..(141): n is a, c, g, or t
ttaggcgtgcttccagatgctgattcttctgctgccagtaatannataagtggtgcnagtaattctaagccanatcgcccttctctgcccagatttctctgtcatttggatgganatctggccaaacagcaggcctatcgncatattcttacagcattgcaaatcatgtatgccagagatgctgttgtcggggccctgatgccggccgccatgatcgccccggtggagtgcccctcgttctcctcggcggccccttccgacgcatctgcgatggctagtcccatgaatggagaagaatgcatgctggctgttgatatcgaagacagactgagtccaaatccatggcaagaaaagagagagattgtttcctctgaggacgcagtgaccccctctgcagtgactccgtcggccccctcagcctccgctcggccttttatcccagtgacggatgacctgggagccgcaagcatcattgcagaaaccatgaccaaaaccaaagaggatgttgaaagccaaaataaagcagcaggtccggagcctcaggccttggatgagttcaccagtctgctgattgcggatgacactcgtgtggtggtagacctgctcaagctgtcagtgtgcagccgggccggggacaggggcagggatgtgctctccgcggtgctttccggcatggggaccgcctacccacaggtggcagatatgctgttggagctctgtgtcaccgagttggaggatgtggccacagactcgcagagcggccgca

SEQ ID NO: 153183 - DNA, 603 bp, Homo Sapiens
tttttcagaaagaaatttattctaaacattggcccaattagttgtttttatcaaaatttagtattatgggatcatgtcctgtcatcttcacaaatgtgagaaagtcttcagggctcaatcccatggttgcagcattggtcattggatgaaagtacaccttttcatgtccaccttcgagaaaagcagaatccagaacaaacttcacatctccaccatcacagaaaagtgccaagggtgtggcacagccttgaccaacttttagtttttctagcatggctgtttcatcagcaaatcgcagatttccactcccaacacctaactgcttggcaagctcatttaaattaatttgtctatcatgaagaactgtcaccagccaataattctttttctttttgtctttaagaaataagttcttactatgtgctcctttcagatgttgaatatgaggcatcatttcttcaactgtaaatagctataagatatcagtaagttttaaagtaatatgcatgtttacatatgcacacgtttatacctattttgcctgctgggtgaaaacagcaaggtttgggagtgcctagtaagaacttatttcttaaagacaaa

SEQ ID NO: 153184 - DNA, 545 bp, Homo Sapiens
tagaaaccacaggagctatggctttccacagatttaaatcaacatgcctctggttcctgtgtggttaattagctctacccagcctgcaggcttggggagttgccctcctcagagtggattcctggctgttagcagacctccagggtctttgctgccctggtgacaaagggcacagcacagtggacccaggagacctgaaaatgtgggttagaggtgcccctcctctcctctcaaactctcccagttctgtttcctttgaggagcatccccaggaacatgcctgccctgtgttcattcacccttgacattcagcccagggactcttgtggaccatgggatggtattggcctctggttatctggggctctgattcaatctcccatttccattcactgtcccagaggctgtttacctccttttgatctagactggggctcctcaacagcaggaccttgtctgactggtcctatcccctgggctggccttcagcaggccctctggggctcatggttgtgctggcttctccatgacgctctgagcatttc

SEQ ID NO: 153185 - DNA, 553 bp, Homo Sapiens
gcagcacagcctatccccagaccgcttagtccttcataacatatatctccacggaaaagggtatttcctcccgtcagaaaaagcgccccagtctggtctgggttggtttttatttcacgttgttgcaagtaggcgaagtcccttctgtctcctcccttggggtaagtggaaaggagtccggcagggggcccgcagtggcctgcacaggggaactgggtagcgagagagttccaggcaattccgggggctgccccacagaagcaggtggggatcgacagtggctctccggcccagggaggagagcgcggtcgcgggtccctcccctcagcctggaggctgcagccgctcgagtcggcccgggtgggggcggggtgggggcggcgcggagggcacggagattacggcggcgccacccgggacatccagggccccgaggccctgggcggtccccacgcgagatcgcaaaccatgacaataggcagtcacccgaggtcaaataaaaacggagtgggtcccccgcgcgccgccgccccccgcgtccctggcggccgca

SEQ ID NO: 153186 - DNA, 623 bp, Homo Sapiens
ctgatgttggagcggatgtgccactcgagctccgtgctgtctactgtgttgacccgcggcaggcggtgggtgagcgggggcagcagctcatcgctggggctgaggccaccgcctgcgctgctggccgagcccgggccctccaggccaaatagcttctccacgtggtagtgcgcgtaggccgtgcggtactcggccagcactcgcagcggccacgacagcgtgagcagcgccgcggcccagaaggccgacgagcaggcgtaccagggcggccgggccgggtccgggaaggccaccatgaactcacggaagtccacgttcttgaggtgcatgccctcgcgtgcctccatgtagtcgtctaggccctcgttctctgcgaagaagcgcgcgcgctggcacaggtacgcgttctcggcctccacgctggcgaaactgaagcacttggtgaagcgcagccgcgtggccggcgcgccctccagccccaccagcgtcttggacacgtcgcgaacgccgcagcgcgcgtagtcgaactcagcctccgccacgtgcgtgttgacgcgttcgtggtagacctgggtggtggtataggcgtctccattgcggtatctggtgacctggcggccgca

SEQ ID NO: 153187 - DNA, 601 bp, Homo Sapiens
tgatgatcttagtatctctaaaattgttcagaatttatgttatttaaaatagtcaatcctttaaaaggacacatatgttaacacatatagtgggtgtagtcaaatccatatgagtataaactctttgtaccaatatccacgtgaagctatctgacagttagagggacctaagtttaacataaaaggaatgaaaaataaacttcccaactaacagtgtttctttaaaacatacatgatattatgaaataataccttaagtaaagatatcttaaatgattttatccattcagttagctcagttttgtccaaaggaaaatgcatgtttatgttttgaattctaacaataaattatttttctacatcatttcttgatattattcccaatacaaattaatcaaagcacttcattctgtatatcagatttctggctcatccagatgtaaataaacctcagttctaaatcatgccaatctagtcctcattatttaggaaagccagacaataatctcaccattgtctttagtagtgccacatgctaaaggagaagacacctttataggtccaactcttagaaatctcccaacaatagtacattgttaaa

SEQ ID NO: 153188 - DNA, 545 bp, Homo Sapiens
ctctaatatttgatttaaggtggctagcccttttggaataaacctatgaaatgtttcttaccttaaaagaatgttgcaagatttgagacattgatatttagacaaatgtaacacttctgagaaattgtaagatgacataatggaaatagtaataaagtaagtggcaaatgtggttttaaaacaagccagcagtgtctggatttgtctactgatttataggaaatacatgataaattacatcacagatgggcagtgaggagtatctagactatgggaaattctacaggacccaaaacctggtttcctcaacaaacaaattgcaaggaaggggtgggggaacctatataaaatacataaaagacttaccaatcaattacatgtggacttcatttgtatccctagtgaaacaaacacattataaaataaaattatgccattcttgaagcagttgagaatttgaagtctcttactgaatatttaatattaatgaattattgttgatttaatggtattgagtttatatgttaaaaaagttggcggccgca

SEQ ID NO: 153189 - DNA, 797 bp, Homo Sapiens
tggagccattgtttgagaaactgtgaagccataaccctaatagctgcctaggctgcagtcgtgcccactatggttatgctttttattaaagatgctgttcttaggtcctcatctgatctaatggtacagtttgctgtttggatacagcctctaaaactcattaggaatactaataagatccaagaatgccaagcctgggaggaaatgactagctaatttatctggcatgccagctccacaagtcacacatctaatgtgagaagtctactgcagagccattagaagctgatgaccagtgaatcctgaagtctaactcatcaggtagccacagccttgggccatattgtttccattttttttccatgggcatttgataagctgtcctgggcaggtccctaaaatgaaaacttgactacattcagatacttgtcattttcgtgcactaagtggaaggaggcaggctggaaggtgatatgtgcctcctgcttccagcagaccttataactgtgtctctttgcatgcccactagaaagggattttgctcactaatttaaactgaaatgctggttgctactagaaggatcctattccttgtcagttgctggcagaattcccttgccaacctccccaaccacacaaaatccttccctgctgttagggcctcacatttctgcaaaagtatccctttgaccctggccttacatcatatatgataagacccctataaagaccagagaagttagttattaggaaaatagtagaaacttcttacctaggagttgcagaagctaaaaaaa

SEQ ID NO: 153190 - DNA, 207 bp, Homo Sapiens
ttttaatttccagaacatctttattgttgtgctaaagtaattggtttacatttataactaaaatgacctttctcacatcactaagatgttccactccatcaacagccatgcgtatcacaattttaccacccaaaatctaatcccgtgtctttgtatctgacaagtcaaacagagcaaggaagtactactagtggactcaagtgatat

SEQ ID NO: 153191 - DNA, 483 bp, Homo Sapiens
tttttttagaagagaataggtgaaaagtttaataaagaaattaagcgatgtggaagtcgttcccgctgcttgcagagagtggggaggcgggcctgggcaatttcggaactaggagagaccacgtcggcaaagcctgtggtcccgaacaagggccatggatttcccatttctcagatcccggctgcccgacttcattcttgtttctttcagcacaagccatcctcccttctccctccctccacgtctcttggcagagacaaagggacaccgctctgcccgcgtccagcgcgaaggaggtgacctaaaacccatgggcccttctcacactgcgttctctgcgctccggcccagttccgggaggacctcccgacggcgcgggagaaggctgtaagggctcttggcccccgacgcggcctgggtctcgggggacgcatgaacccgccacctctggccggcttccttttagtgccccaaatagcagcg

SEQ ID NO: 153192 - DNA, 581 bp, Homo Sapiens
gagaaatgaaaaatcttttattttttacaaaaattttcataaatgcattttatatttaatatgcatgctactataacaaagcaactgaaaatgtaattacagttaagatacttttatgcatatttaaaaagtaatattttaatcccctcgatttttaaaaattgaaagtggaataagcaattcttcaaaaaatatccattctcccccatgcaactgttgcaatgatttaacaaggaaaattagaataatcggtcaaatgaatgtttaaaagccactgtcacctcatgaaaccctttccatttggtaccaagtttagaaatgctcacatttcaaatatttatctactgcctctgtgttacaaccactaatgtgttctaactgaagagtttctcatttggggtattgaccttacttgaatgctaacccacttcttattgcagttaattgtaaattcatagaaagtattttctagcatacttgagaggaaattcagactactaggatccttttttcttttcatgtaaatgcttccttaaaattaaaaccggcaaggaaatacagccaatttatagtttaccaat

SEQ ID NO: 153193 - DNA, 383 bp, Homo Sapiens
tccccaagatttgtcttggtcctggactttttgccaacttcttaaacttcacatagctctaggtccttgataaagttcatagcaaatttagagttggaatcttatgagaaaggaaataccactctcctttggctgttttctttgattctagaagaagcaaaggacatttctgtcccaggaaacttgcctctctccagatgtttgttttgaacaggatatgcacacggaaacagcaactactaattctctggccagagtgcatcaaggccttaatccaaagcctcccatccatccagctgtctggcatttgctattatagggcaccaacagagaaatgaggctgtggctttatcactgcaccctgggtgacaacttgattttct

SEQ ID NO: 153194 - DNA, 444 bp, Homo Sapiens
attctttcttaaattataagactaaatgtgaacccaaaattcgaattgaattctggtcactgttaaagacaaaatacagcagacgactgaagagtttttatttgggttgtgatcatggcgaggacattcattacaaagaaaaatctcaaaaggaaggagtttgggggctcctaaaggcaggtaaatcagtgcatggtctgtgaccctatgggagtgtgaggaaggtgggggcagggcttaacttgaacatgtgaggccagggtgggtttcggcaaacacaaaagactgatgttggagaaattattattttttctattaaatgagtacaaaaaatggaataaataacaaagtagatgcaattagtttaaattacagagatcagaaaattgcaagtagaaataagcaggaaacattttaaaacctgtcaacacccattaagacaaa

SEQ ID NO: 153195 - DNA, 948 bp, Homo Sapiens
tttttttaagtggctttattaagatataaatcccataccatacaattcatccatttaaagtgtacaagtcaacagattttagtattacattattaatatttttaactgtggtaaaatatatgtaacacaaattttgtcattttaaccatttttaagtgtacaattcagtggcagtaattacatctacaatgctgtacaaccatcactactacttatttccaaaacttttcatcaacgagcagttttaaacaagtgatacggatgttgtccatgttccttcccttccgcttcccattgctgcttgtacctgaataaatctggagttctgagtgcaaggaagaattggtgggtggagggttgggggcggtgacaaatgggcagacaaccaactttgcattggttgtaacattttccagggtaagtctccactcagcatatgagttttgcatagtgggacggaaaaggggtgatgttttaataacaatgacttttccacattctgggaagtgacaaagaattatgttggagagtgtctgttctttagttttagagaacactgtttagcctttctggtttcttcttgagaagatgaagaactgggtccttgagtctagagtaagagtaattatgaaaaaagaatctgttctgatttacagagggcccagtcacacagcagcaggaagggcccaaggagggaggaccgagaaactccaagcagggacttctgacattagctttcacgttttccttttctacattgagatgcccttatagtaggtggcatcaagcgttcagtaaatcttgtcaactgcatcccaatgccagctttgttctgcaatgctttgggtaaaaacaggagtgcaggagtaggttaagaaaaacaggctgcaaaaacaatttaggataccaagaaatgatcagtccatataggcagatccatggagacag

SEQ ID NO: 153196 - DNA, 592 bp, Homo Sapiens
tttttgtggcaacaccttgtttatttagagtaagatgtgttaacatccagcatgacaaaatttgtacaaagttcacaatttaaaaatgaagtatcacagcaacttgtgattccacacatttatagcaaaattaaagtgtcaacaaacccatgccgtgtagtacaaaaataaatcaaacttcagttccacagagagcacaataaatagtttatacaaaattctgtcttaataaatgattacttaaattaacttagaaatgaatatgaacaataagttataataaactctgatgactcacaataatccatatgaaaggtcagcattctaatatgtgacacttttgtgatccctatataatagtcacagataacttttgatttgagattatgtaccaacgttagatgagcagcaggtttgtgcttaaaatccctttccattgtacataggtgataacaataagaatccaaaactgatactatctagtactctactaaaagcattactatattggcaaagaagctgcagacacaacgcggtggggaaatgcatatgctgttatgaacaatgggggccctaaaggcagctggggccc

SEQ ID NO: 153197 - DNA, 446 bp, Homo Sapiens
gtattccattgtatgaatataccacaatttattatggttgtctctgatgtttgaatatctcgaataacactgctatgaacattcttgcatatatttctgggtgtacctgggcacacatttctatcaagtatatcattagaaatggaattgctgggtcaaaagttaagtcatcctatcaaatttactagataatgccaaactgttttccaaagtgattatactcatttacattaccctaggagtgcttaagagtcggtgataaactttccaaccaactcttatttgcaaaatttttaatttttaccaatctggttaggtatgaaatatacctatgattttaattcacatatcactaatgatgaatgagattaaacctcatttccatatgtttacatttgtgtttccttttctgtaaagtgcttaaatctttttctcatattctactg

SEQ ID NO: 153198 - DNA, 537 bp, Homo Sapiens
gctttttcatttcacatggggctcctccgctcctgccttctcggatgggccaacagtcgtaagaaagccctctctgcccgttctgttcacctctccacagcgcaccccgcccgccgctgctcctcattctttccaaacctcgaaaccaaccaaaacgtgagaagtatttttgtaccctgtgtaacaaaatatttatgcatcataaaggatttttcatgtgcgtaccattaattattaaagcgacctcgttcgccctgtcagataagtttaatgtttagtttgaggcatgaagaagaaaagggtttccattcttcagcagtacgcctttgtgtctggcatttgtttaagaaaatgaaatgaaggaaacactgtgcaatgttttttgttttgagcatatcagtgctttactgtcagccgcagctgtgaccgtctggccatttcagacttgggagatgaggcggctgttgtcattgctgatcctgtgagaatgtgaaactggataatatatgaaatgcaaaataaaacaaaaccaaaatg

SEQ ID NO: 153199 - DNA, 465 bp, Homo Sapiens
  misc_feature (253)..(268): n is a, c, g, or t
tggggttttctaaaactaaagaatctaggaaccttgcctgcgaccaatcatggagccacgtgagctgatcgtggctgcacctggggggagggtagggaggaggggcatgccacctaatgatcaagccctataattagcttctcattagagccgtgatggtgatgtgtgctgtctaaaatccaatgttgtgggtagagagaatgagtttgtgactaggagagactaaacttttgttttccttacccagtataannnnnnnnnnnnnnnnttaatctatttttattagaagtttttctgctctttcttacataaaagaaccccaagcatgcatctttcatgtgtgtaaataattcatttctgggctaatttcaaaagaatcccaatattgctgtatagaaagagaactagcttgcacattttaggtctgtgaaattttgtgagacttttcctgcactggacagtaaa

SEQ ID NO: 153200 - DNA, 443 bp, Homo Sapiens
cgcgacaccctcgagtcggacggaggccgagttgtgtcctcacccccagcagcctgcggcggccgggacccccggaggcccttcttccgctccttggaaacttaaaatgtggggtgagggagagacgcgttacgtttgacagaccggtgaaattaaagacactcaagcttctcagagtgatttgaagaaatgctcagcgttctgccgaaatatagttttaagtttttaaaccacggcatggtttttaaaggctgaaggacccacagtttttttctcttaaagggcacgcattcattttgattaatattttttaacatgcagccaaagccaggactcgggctcactgctgcaggggtgtcctcgggaagtcccgaggggggaaaggcgcgcaagcctgaaatggagatgaaaataaacaggcataatatttgctacctcactgc

SEQ ID NO: 153201 - DNA, 368 bp, Homo Sapiens
caggaccttcaaagcggttttatgccaccatgcctgcttatgaccctcctccaatacgcatgccctgttttgccagccaagccagcacctcacctcaggctcagctcatccatgaagtcttgactgactcaagtccccatccccaagaagaattggccctgtcctcctctgctcccattccatgcctcgtagagactctgaacctggccgcagttcaagggcaggagagcctggctgtggaggatgcagggttttggaaaggcaccaaaaagtcatagcaaatgatgtgggacaggggaggctgatcagggcttagcttgcaaataaaatttaaaattgtgaaacagattgggcatggtggcttacac

SEQ ID NO: 153202 - DNA, 483 bp, Homo Sapiens
  misc_feature (473)..(473): n is a, c, g, or t
ttttaagatggaatttcagatcaatgctaggttataaactgaaaccacaggtgtcatgcttcgaaccgttaattacctggcattatgccgccaccttgtggctgatttactttatggatttcacgggcgaaaactatgtgagtcatttcagatgaaaggagcagagccggatactgtcttgagaggatctttgagctgagcattgaaggataagtaggtgttttccagaggcaaatgaaaaggaacaaacatgtttaaaagaataaagtgaaagaacatggcccattatagggacaataagtagttcattaagtccagtacatattgaatatgtggtgaagtactagaaaataaagccagaaaaatgacaccagaatcatgctggaatccctttggtgattatgagtgagttggacttagtagtgtgtgcctagaaacggatggctgctgtgggccaggtgagagatgatganggccaaccaa

SEQ ID NO: 153203 - DNA, 560 bp, Homo Sapiens
tttagtttttgggggatttttccctggcagatatatagagcaatgctttttctctttggatcctgttcctaccctgggaattcttttcagtcaactgaaattttgttaaaaagcaattttatgttccttccatctgttcacttttttgttgttgttgttgtcggcatgatttttactgagaaaaatgtaaaacatccttggcctttttgggaagtttaaaatcttcccaaattgagccctctaagaattgttttcccatttactgttggcccttcttcctttctgccaccttcaataacacacgaagaaatcgagagggaacttctagcagtcctgagaccccttgagaaaccagaaaaaggtgccatacaccctccttttgggggtcttttgtcttcctcacggagccccaagggtcatgggcaggttactctcaagtctaaagcgccgcagtcttttgcattgagttccctgatattttcatttttttgagacacagtctgtctctgtcacctaggcaggggtgcagtggtgcatttgtgagaaacacactcacccat

SEQ ID NO: 153204 - DNA, 578 bp, Homo Sapiens
tgcggccgctgcctgctcttcaccgagggcatgtggctgagcgccaacctcacggtgcaggagcgcgagcgcttcacggtgcaggagtggggcccgccggccgcctgccgcttcagcctgctcgccagcctcctgtctctgctgctggccgccgcgcacgcctggcgcacgctcttcttcctatgcaagggacacgagggctccttcttctccgccttcctgaacctcctggtcagcgccttcgtggtcttcctggtcttcattgccagcaccatcgtgagcgtgggcttcaccatgtggtgcgacaccatcaccgagaagggcaccgtaccccacagctgtgaagagctccaggacatcgacttggagctgggcgtggacaactccgccttctacgatcagtttgcaattgcccaggtccaattccggaccccaggctggcctctgaaggctcttgctggccgtggctggcctgaggacgcttctcctggccaggagccctccaagggtgctggacgtgggtgggcctgaatgctctttgccgagatgaactggacctgtcaaagacaccttcatgc

SEQ ID NO: 153205 - DNA, 352 bp, Homo Sapiens
aaattaggctttaaaggggctgctggttttcagttcacacacacaatcgaactctgctgtagtttccatatttataaaaaatccctgctgtgaagctaacaaggaaaaagcctctgaatctcttctttctgcttatcaagaatcaaaatagaaacaaggaatgtttgaaataatacagaaatggcactgaggaatgtgaacattctggggggaagggaataacttatgtgttgttgggggtgcttgtgcatgcgaatataaaaattgatattcatagactcgttaaccacagtgttagggggctagagatttgatttaatccttgatatttttattttcataaaggccagag

SEQ ID NO: 153206 - DNA, 546 bp, Homo Sapiens
tttcgtaaattttcagtagaaaaagaactgatcttatatttggtcacacactgcgtatgtacaaatatacatggaaaaatgacttggatagctctgcctaggaaaagtgcatattttaatctacaggagacattgtgtgtctccaggcacaacacatagtgttgtatgacatattattttagggccagttcaatgtcctcccagtgatctggtaaaatttttgattaaaaggatgaaagaatttgcgcaatttagtaatgacagaggggtccacctctggatgaatgcgccccttgctgcccgccaggcacttattaaagataatattaaaccgcaagcagtaaaaccctctggtagcattgaagtataaattgtattgacttatccttggaggcagatttaggaacttctccacgagctgaagttctggcagaggttccgtgatgaggcgatctccatcgacgacatgaaattgctcaattggaaagtatttcaaccacctttccagatgtttggtgtagatgctggttcttactgctttgtatt

SEQ ID NO: 153207 - DNA, 352 bp, Homo Sapiens
tattgtttattttggggactctaggccaccaagtattagcacacatacttatgttttctctactaatctggtccaggtcctcatggaccacaggacaaagctttcattttcattcattcttctattgaaattataccaaattcagctgaggaatatggaagtaactttagacttaaacaagacaaaagttttttcactgaagaattgacaagtatttgctccttaaaacaatgcagattagtgaacgtggattcctgctgagggagtgcatcccataatatggcaataattttcagtttctccaacgaaaagatagtgaaggaattaaatcttttgtcctcccatggttaaa

SEQ ID NO: 153208 - DNA, 487 bp, Homo Sapiens
  misc_feature (68)..(68): n is a, c, g, or t
cagtcaggtcaatgataggatgacaacagaggaaagagaacgattccctacaggccagcaggcagttncccagtgcagaccctcattgagacacagaatcagaacatggagattggtgccttggccaacgaacccaattctactaacttgcgtgctggaaggactaaggaaaaccaggaagaaggctgtgaatttttcagtgatgtccactgtaacacagggaaaggaagaaaatcctactgcctttctggagagactaagggaggcactgaggaagcatacctccctgtcacctgactctattgaaggccaactaatcttaaagattaagtttatcactcggtcagctgcagacattagaaaacaaacttcaaaagtccaccttaggcctggagcaaaacttaagacaccctattgaacttggcaacctcggttttttataatagagatcaggaggagcagtcggaatgggacaaacgagattaaa

SEQ ID NO: 153209 - DNA, 400 bp, Homo Sapiens
  misc_feature (208)..(217): n is a, c, g, or t
ggttctctgacaccatatgtcgacagactagtaagacgttctgaattgtttaaaggacttgcatttatctgtctgtaaaggcttgtataccaattgattgaaaatggaaaatagggccctgttcatttcttcagtattatctctaggatatgtttgaactttcagatggttcagctaatagttgtgagaattcaggattactgaattnnnnnnnnnntgactagagtgtgtagctagtaagttcctggtagtatcagtatgcattaatacacctgaagtcttccagtgatcctgtccagtaaacagtattatacctgttcaggacctcatgtctttcctcttcctgattctggtactttactttattattgctacctagctgaccctggtcaactaggta

SEQ ID NO: 153210 - DNA, 583 bp, Homo Sapiens
ttttttagaagaaaccaaattaatttttaatttatactccacttatatatgttttcaatcatccactactgcaggatgtacactgaacagtacaactcatatgcatcattttcaccagacaacctcatctaccaaaatggtgataacacaatcttattttgaagccaaaagagagttataaacatcaatcgttttcagatacgctttaaaaatatttctttaagtttgttcaaaggtaacatcattattttaagttatagcacaatcattaaaggaaaaaagaacccaagaacaaatgaaattcgttattattttagtcacttttagtggaaaaaataaaacaagatttggattttcatccagcataaagtaaaaagactcttgtcagatgtcaattttctcattaatgaactacttgagactgtactcctgggtcaacttatttctgcttctcctgtctctagacctgtcttaattatatttgtgtctcaggatccatgacatagatttaaacagacccatgggcaaatctaaacagtgaccacacagtgtccagtctattcgtttctctacaaagtgacag

SEQ ID NO: 153211 - DNA, 331 bp, Homo Sapiens
tgcggccgccaacttttttaaaaatgtgcgatggaaaactaaagttataaattatatcataaccattggacctctttttaaaatgcactgaagccttataatgttatccatggatatatatctatgataaaaatagaaaaaatatatgatggtggtgcttctgaaagggaggggaacggtactggggaagggacaaagggaacttcaactttatctgtaatgacctgtttattttgaaaactcaagagcaaaattgacaaaattttaacagtaacttaacaaaacctcaagtctggatagtgagttcaagagtgttactttatatggacag

SEQ ID NO: 153212 - DNA, 549 bp, Homo Sapiens
gaaacaattttgtgaccagagaatggttggagacaaaggtctttctatctgatctgctcaccaggctggcatgggatcgtggggggcctatgtccctctttcctggcaccacatggattgctatcactgcatttgtctcctctctttgattaggacaagacaggcaggcaggcagagggttgtatttcaactgcccttgactctgtttataatcacaaacatgaaaggaaggggaagagattgagtttataggactggttctttgtgtagcctaatttatctctctcaggcagcagtgggccgagcgagtttcctttttgtttccaatgcaggaaactgaaatatgaatctatgttgatgagagaataaaggaattgaaagaggcataaatcttatcttctcgcaaccctagaagatcagcttcttgtgaagaaggggattatacttctgtaattaactgctttgcagctcctggtgatggctcagagctgaataatagcacccagccaagttggataaaaggctgttggatgggcaggtgcggccgca

SEQ ID NO: 153213 - DNA, 936 bp, Homo Sapiens
taagacagtgggcatttattttcacagttctggagaccaggatcaaggtatcagggccacactccctccagatactctagaggagagtccctctttgcctcttccagctcctgttgtctcagatgatgctcagctgtggcagcgtcactcccatcctggcctccgtctcccctcacctctcctctgtctctctcttttgtgtcacttcataaggatacttgtcattggatttaaggcccacccgggtaatccaggatgatctcatctcaagttctttaatttaatcacatctgcaaagacccttttaggtcccattcataggggctggggattagcgcgaggacgtatattttgagggctgccattcaacccacacagttgaatggatctgagatgccctggagggaacgcgtgggagaaaaggaggtgtgggccagagctcaggggttgcaggggagccccctccttgtctctgctactgttttactccttgtagtctcttctcactgtcctctccacaacccagccatagagatcaggcgtttgtctgtctgtcccaagatgctgtgatttctatgatgtcctgctggaggaggcaggcagagtggctggacggagggacactctgtccttcctgggagaggatggcttccctgccttctccatatgttgggagcctgcagtgtgcccagccccgtgcgtggtaccctgggggctgcaggagaacattcagcttcttgaccatgctggaactggataattttggtggtcaccactgacaatgatgctgcagaggtacccccaggcaggggaagaggcaggacccactcagttttccatcagtcccttgaggggttggaaggagaccagagggaggggcagactcagcctaggtgctgctcacattcagccatgcactgcagactcaggaatcct

SEQ ID NO: 153214 - DNA, 314 bp, Homo Sapiens
cagggctcatgggtacccatggatcacaggccagggcaccggatggcgctccagcaggaaggagggtgcctcacctcggcacaacactggatagggctttggtgatagctacaatcacgaaagctcaggaagctggtccagacgaaacgagcgtccacggcgtacctcggctatgcgtggggtcaggtttggcctgcttcactccctgctgtggtcgggctgggctgaccagcagtgaccggcgcttgtgcctgctggcacgcagaccagcccgcctggcaatggtgacatggcgtggtcgacactaagcccac

SEQ ID NO: 153215 - DNA, 735 bp, Homo Sapiens
ttttattgttaagcatatttgtatattttttactagttatttcatacttgccctgaaagaatacacattcaaaaagcttgaaattaggcaatgtcagtctcatcaaacaaaaccagcattggaagcgaatattaacaaatatcagaatgaaattacaaaatatacatctccagcctcataaaacatgaattttataagcactttcataaacataagaaaaatagctttgacaataactatttgaaaacattattattaataatcttgtatactgtacatgtgcacttaaatgtaatagcaccaacattcattatattatgaaggggatactttataagaattataaattatttttacatgattaaataattttggcagagtaagtccgcaggacttaaataaccagtcagccttagtatctacatctggaccaggaagcctttgtgttacagacacagattccctgtgaagttctccagggtgtaaagaaggccccagggaggtgccgacgggatgtgagggctgcctttcagctcaggcgagcctgcaagcaacagggcagtttgggaagggtcacaggcacaggaagggagcagtgggcaaccattgattacatcaaaccaggatggtttcttctttttaaagaaacttttgttgagtgtttacccacccccatccacacaaatatgctctctaggaaatgtgaaagtataagcttcagaaaaatgtttttct

SEQ ID NO: 153216 - DNA, 531 bp, Homo Sapiens
ctatattataggcattttaaaaaataagtgcaatggaattctttagaggtaaccaagtttctcaggatatctttgaggcagtgataaagatttaagtttttaaaatcactatcaaacccctttgtgcaacatttgcataaattctcaaacaatgggactgttttcatgtaaatttgttttcagggagattcctgctttctgaaggcagtgtaactgtagctgagttacataaagtgacattttattgcctcctgtggaagatgctttgcactaatgatctgaaatctgatgtctcaagctaggaattagatgatctgtggctcaaagtgtgaaaagagaaagtggggcctttatgttttagttaattacttctggctaaaatgtggggagcgctccctggaccttctgggactcctggaatccggaaacctgtctacaaaacctaaaggattgaagcagttgacctcatcacaggagtgaccacagggggaaaaaacagtgattcacaaatccaagcctgatttcagtcag

SEQ ID NO: 153217 - DNA, 581 bp, Homo Sapiens
  misc_feature (290)..(325): n is a, c, g, or t
  misc_feature (479)..(521): n is a, c, g, or t
tttttattttttgcagtaattctcaaattttttattggcataaataattcagacattggtttctcactaaacattgcactaaacacaagaaacaacaggcttgccggctcagaggcacacaaactgtccaacagcccaagttagaaatactttttttagaagtgtagaaaactttataaatgattctgtacaaatatacacagtggaccctccatccatctggcctttctttcctggatggcatctgaatagagtgttccttctcagcaacaagacattggcaacaagtnnnnnnnnnnnnnnnnnnnnnnnnnnnnnnnnnnnntagaaacggaaaggaaaagaaagaagtggccccccaaaagaaaacatgaaaccaccttcttacatcaactcactctgcaacagtcgacacaaacaaacatggagaaaagaatatggaccatcggtccgcgttggtctgtacaagaattagtctnnnnnnnnnnnnnnnnnnnnnnnnnnnnnnnnnnnnnnnnnnnctttgtgtatagaaaaagataacagcataatttacatatagagaaagcctttttacaatt

SEQ ID NO: 153218 - DNA, 702 bp, Homo Sapiens
  misc_feature (219)..(219): n is a, c, g, or t
cgatacacgatacgaaattcatccactcacaaagtgaatatggcctctcggcgaacgatatggacaaaggacctttaagtactatgcccccatattgctgccattgtaactcctgagagtaccatttggttctttaacccagccaaccagactcctagggatacgtattacccccatcttatttccacctccctgtagtgcaaaccagttcactacatntacaactcctaacacattcgctgcgggcagtgatatccgctaatcctggatgaggcagcggagggcccccaaacccctatccaggacttagtaaagttggcgttcaaagtttttaattcccgagaggaggcggctgaggtacaacgacaggcaagactgaaacaaaaagttcagctccaaacccaagccctggcagctgccctgcaacaggcattccctaagagccccagcaggagaggtggaggtacaatctcccaggccccgtctggcacctgcttcaagtgcggcaactcaggacactgggccagccggtgccctagccaacagcaaccgtcctgcccgccttgcaactgtttcaagtgtggcaatccaggtcattgggcaaaacagtgcccaaaccccaagccgccaacacgcccgtgccctaactgccaacaaatgaggcactggaagtcagactgccccggcctcggagcggccgca

SEQ ID NO: 153219 - DNA, 462 bp, Homo Sapiens
tttcagatttctttcttcttaatgtaaggtaaggtatgtgggggtgaattttaactaagaatttattattaacacaactatgataaactcatagggaatgattacatgaatatgtgtgtatatatgtgtgtgtacatacatatatattcatttaatttgaactttatttttttaagtacatttggaattccttggaagtaataatataatgtatatgtaaacgcctaaataatacccaggaggtcacaatttgacctaaacactcgcatttgcgtggggattttattgtgctcacttttttttagaggaatgctttgtcctttacaaaatggacaaatactcccactgtactgcagttccagttctataatcattttggaggcgctctttaccccgtggtgaccacaacacggagaaccgtccttacccacatgctgcttgcctggggagctcaggatcagt

SEQ ID NO: 153220 - DNA, 506 bp, Homo Sapiens
tttgctaattttatcatttttttcttcaatggccatacattgcatttataatgaaataattgttttaatttaaacatttaccttttagctgtaacaaatgtagacttttcgatagtctgttatatttttcccggtggcatctgaacagtgttctttgctcagccagcttttcttgctctatcattagcgtggctaagttaatcagattttaagctccctacgggcaggtttacattttttcgttattctttaacatatcttgcaccccttctggctgctaaataaaaatctgctgccctgaaatgcagtcaagtgcaatttcaatttctgctctcattaaacgtcccctataaatccatttaaacagttctagtaataagagtatcccccaaggttttcttttttcctttgtattgtaagccaattactcatgattcctgacactagggaagaagagactagtacgataggggcgtatgtgtagaagcggaaagatatttgttttg

SEQ ID NO: 153221 - DNA, 379 bp, Homo Sapiens
  misc_feature (82)..(82): n is a, c, g, or t
  misc_feature (94)..(149): n is a, c, g, or t
aagttttcactgcattttgactgtgacctgtcacacaatcaggtgtgaaattttgcttgtggcattatgttggcactcaganagttttggattnnnnnnnnnnnnnnnnnnnnnnnnnnnnnnnnnnnnnnnnnnnnnnnnnnnnnnnnaatgatattaaatagataatctgaatagttacataactattacagacattgaagccatgatcaaaaagcttccaaatggaagtttccaggcccagatggcttcactggagaagtctaccaaatatttaaatatttaaataaaaattagtacttattctacacagtctcttccagaaaacagaagaggaggaaatagtccccaactcattcaatgaggccagtattaccct

SEQ ID NO: 153222 - DNA, 421 bp, Homo Sapiens
gtgacagagcaagactccatctcaaaaaaattataaataactctttgcaaataggaaagtgaagctcaagggtaaccagtgaggctatgaaattgccagtgaattaagaccagggctagagtcaacagtccagaacccctatccgtatgaacaggggcccgtttctggttgaaatcaaggttaggatgcaactgagaaaataaaagactgcactttggagaggcaagcacgctatccgggttgttgttttgttttatgtcttggtgcttaggtgaggacttagctgggtttattcaaagtgggcgggtctgggctattcttgagaatgtcccttccatttctgagaacaagtcagccccttctacctgcctccacccaggagactgatgcacaagatctgtttgtgaaagcctgatttaaa

SEQ ID NO: 153223 - DNA, 450 bp, Homo Sapiens
  misc_feature (50)..(156): n is a, c, g, or t
  misc_feature (311)..(332): n is a, c, g, or t
taaaaccttattttagaagtgagcaagtgggccaggtgtagtggctcatnnnnnnnnnnnnnnnnnnnnnnnnnnnnnnnnnnnnnnnnnnnnnnnnnnnnnnnnnnnnnnnnnnnnnnnnnnnnnnnnnnnnnnnnnnnnnnnnnnnnnnnnnnntttaaaatatcttaaaattagccgggcatggtggtgtgtgcctgtggtcccagctattcctcaaccatgcttggagcccaggaggtcaaggctcagtgagctatgactgtactgctggattccagcctgggctacagagcaacactttgtctctnnnnnnnnnnnnnnnnnnnnnngtttgcaaaataagtcattatttctcctttgcttttctgaaaacaaccaaaaagcagtgggcaactgcataaaatgatagtccttcttaatgttaaagacagctttatcaaggacatc

SEQ ID NO: 153224 - DNA, 169 bp, Homo Sapiens
ttgccttaaaatacaatttttttgtaataaagtcatgctaatttgtttacatattgtctatagttgctttcactggcaaaacctaaaatgtttactatctggccctttctagaatgtttgctgaccttgttctgaattcttcaagctctaaatttacctctgtagagaa

SEQ ID NO: 153225 - DNA, 741 bp, Homo Sapiens
tatttttcagttttattttatttttaattgacaactgtacatatttatgaggtacaaagtgatattttgatacacatatacatgtggaatgatcaaatcagagtaattagcgtacccattatctcaaatttttatcagttctttgtggtgagaacatttaatagaaagtaaatgtattctattggaagctcaagttactggtttccagctgttacagctgaaagaaagagggaggaaggcagggagtaatggggaaaaagttggcggggaaagaaaacagaaaagggggagcgggaacatgcaatattctttcagagttaagaaacttaatctgacaggtttatagaatttcgttggaacctagagcaaaatcacaatggctgaagcgtcaatcaggcctataaaaacatctgtgtttagtttaaatgactaagggtgaaatacatcagcttatggaaaatggggagggctcccagtatttggccagcgttctatgtgatggatgttgatgagcgaggttgccttcaacatctgatttactgccaacggacaaaatgctggaagcacatccaaaaacttatctgcaattaaaattacaagcaagtggtcactctgttcacctcctttaccagagaggtgaccctgctcccggcaactacctccacccaagggccacagaagaactcctccttcctctaaccctctttccttggcctcaaacctcacgataaaacctgcctt

SEQ ID NO: 153226 - DNA, 580 bp, Homo Sapiens
ggttagcagccatcattgaccttgggtgaggtctgttttgctagatggcaggtgtaactgactgatttgtgtttacacaataaggaaatctctcctctggggtctctccgtagttcacagggaccctgcttccaggggcacgcgtggcgaagagagtccgtccagagctccagccctcactgcacttcccaggtgccaagacaaaacatcactgggtggggagagaactgtcatgaggattattcccccgccacacaatgctgagcttctctccctctctttttgaagaagtgcgtttatgactgatcgctcaacaccttgttggttctgattgcagaaaacacaccttataaatatatgataaccatcctgtaatagagagtgtgacaatttacttcacagtgcgtttcgggctgctaattgatcgtttcagtccagggacgatttggaataaattatagccatcaaaaggatatcacagctcattttggtggaagggtttccacgtcgcttcgcgttcgtctcccggagagagcagattgcacccggcgggcgttgaggagcggagggagggggcagg

SEQ ID NO: 153227 - DNA, 493 bp, Homo Sapiens
aatgatcacctaacatatacatgctccaaccatattgattttagaacaaaacacagcagcccataacagtttgtggcctctactaactgtcctctgctgtcccatctagaggttatgtttctctatttttaaaataaaatgtagttaaattagcctgacggatgtttcctctctatcccttatctcagacacatacaaaacagacagacaataacaaaaagacatcatctttaaatgtacaaaataaggtatgcacacttttttctttgtgcttctgagattggctcctttgcatatataagatacaagccatctgcacgatcaccctcattccctatctttgttgacatgttcctcttacaacacaagagcaaattacctctatttgaaagcaccctgtcttcaacacagctcatgacaattttatttaatattgatcctttgaatgagagatcaaaagcatgcacaggtcaatcctctgcacattagcaac

SEQ ID NO: 153228 - DNA, 667 bp, Homo Sapiens
cttttttgtggagattccatcttcacatatacttccgtgatcactgtagtgggaaaagaaatgtgttaaaccgtgcctccaaaaacttcagcccagaatggatatatgtcacttctcacattttattagccaaaggaaattacatggctacacataattttaaacagaaatagaattgaaattctaccatatgtccaagaaggggagaaccaaaatatttgtgattggttcaaatgactatcacagcattttaacaatcaaccagaattcaatatttagatggttacttacttttgctacccatattacccatgacctccattttgttggcagaacctctcatataataaccctcctttttgcgctcttcagaaaataaaactccagacttatgttagggtcaagggggtaggtaggttactcagtgactggaatggggaaatgtgatctaactgctagagatttaactgctttacaggaatctttaacacaatccttcttatttggcatgaggaactaggattgacatttcagatgcctctatatgtcccaccatctaaacagaatttattctagtcccacagtctgaacaggatcgattctcagctcttcccacttcatgactggtagttgatttgtcaggtctactaaatcattcatctgtttt

SEQ ID NO: 153229 - DNA, 511 bp, Homo Sapiens
tttctgtacaagccatttattaggaaggtagcagtctgggacaggcgggaagagagtggggaaacaggacggggacgacgggaagaagccaggcaaaggatccctcgggagctctggggcatcagtgacagcccatacagtcccaccttgaggcgagggccaggctttcaggccccgcaccagccagtccttgccaggcggccggcctaggtgggtaaactccaggcaaggaaggaggaggcttaagggtccagagtcaaccctcaaaggaagtcaagggtgcaagacagagcagcagagtggcccatgccccgggggtgcaggctcagctgggttacgagggtgtccaggcaaccactgcagggcagaattggggcttcctgccggggagagcaaggagctggaatgttcaacctcggggcgagaggcaggctctccttcggaaacaaggagagggaaaggcgggtgggtggagaaacagcaggatctgccgcaagcccggtacgccaga

SEQ ID NO: 153230 - DNA, 572 bp, Homo Sapiens
tttgtttttggcaatgttgacaccataagttgcagtatttttaataataggtaaaaaatcagtatcatttgtgttattactgctgagctttttaaatgtatttagcgatacattcctttagtaaattatatttttccttaacctatatttctgttggatgttggaatttcttactaatttctaaaaattctttatattgagaaaattagcccttcaaattaaagagaaagtatgttgcaaatgtattttctcattttactgcttagtgtttttgccacctctaagttttctttttattgccaaatccatcttcttatctttggtttcttccttggtgtcatgcttagaaaggttttcatcccctaggttatataaatacttgcttatattttcttgatttttaaaatactttaaacattaaatatttatctggcagctgtgttttgcatgtggtatgacatggatatataactttaattttcaaatggataaacagttctcttacatcctttattgaatatcctatacgctggagagctgtcatttcctctttgcgaaaatgttcttaaaac

SEQ ID NO: 153231 - DNA, 517 bp, Homo Sapiens
tttagctttgacacatttttattaggtgcatgaaaactaaatgtcttattgccaagtatcatttttacattttctcgtcaaatttttataaaagcttaagagcaaaatgcagtaggatcttaaaaaaattctacaaacatagctggataaattctgctgctgagccagaactgttggctggaaggcagcgccaccatgcgatcgttccaaaggctgtcagttttgtctaaagacacaagctgggatcctctaagagttgggcaactaatagcaaaagcccacttcctgtcataggaaggttattttcaaactccaaaccccatcaccacttctgtctctgagagggagagggagagaaggaggagctgtttacaaacaggatgtctgattacggagttacaccagtggccagattggatcagatatttaatgcttgattagggtggctagtgggcaggttaaggctggcagattctgagtactctccatttaaggacgcctgcaccgggatacaact

SEQ ID NO: 153232 - DNA, 558 bp, Homo Sapiens
  misc_feature (471)..(510): n is a, c, g, or t
tttaacatttatattaactttattatttatttaccacaatttttaattgtggtaaaacatacataacataaaatttactatcttaatcatttttaagtgtacagtagagtggcattaagtacaatcatattgttgtgctaccatcaccactacccatctccagaagtctttccatcttgcaaaactgtattcattaagcaataactcccattcttccctctgctcagccccaggcaaccaccatttgactactctaagtacctcatataggtggaataatacagtatttgcctttttgttattgtctcatttcacttaacataatgtcctcaagattcatccatgttataccatatatcaaaatttccttcctatttaaggctgaataatatgccattgtatgtgtttaccacattttgcttattcagtcatccaccaatagtcacttggtctgcttccacattttaactnnnnnnnnnnnnnnnnnnnnnnnnnnnnnnnnnnnnnnnnctctttgatactgctatcacttcttttgtgtatatattcagcagtgga

SEQ ID NO: 153233 - DNA, 506 bp, Homo Sapiens
tttttttaaatttgcgttgtaagatttattttggctctccccgcctgttctttgcacattaaaaatgaaaaagtttgtagaactaagctaagcagatggtcttcctgcaaaaagaccgggctgaagtaaagcattgttttggagctggttcacagaaaaaaggcaaaactggttatcctgaccctcaagctccaacataaactgctcgctttctccgggaaacttgccccgccacacacacttgactgcgtggccagttctttcgaagcctctcgctcccaacacggagttcctcccatttcttcacagtcggctctcagcagctgctgctggtttctcggctccagcaccacgagtaccgcactctgaggtttacaaagcactctgcttcaccgactgtgatcctcacagtcctgtccggtggcctcacgcaggtggcggtgcagcctttcaggcccagagcggccaggagcgaagcccgcagccccgcctggaagcgcagcgcg

SEQ ID NO: 153234 - DNA, 338 bp, Homo Sapiens
gaggagaaattctgagcttagctccactctgtagggagatacatgtatcctacagggtagagacatttggaactagatggttctgagacagctggagcatctgctgggagagtcaggggaggacagggtcccaggccccacccaaacatttcctgtttgtctccatccagctccaggatgactcacttgacccatctccagataattcatgagcaaagaatagcatctcctgggtcgggataagctgaaaagatggggaaactatttttcaaagcctcccttaaactgtgaaatgtgactagctctctttaagtcttagggaacaggagtgcctggtt

SEQ ID NO: 153235 - DNA, 551 bp, Homo Sapiens
ttttagacttaaatcagtttattatagaaaatttaggcatataagtaagacttacaaaaataaatgtacactatattttaagttcatacaatagaaatgagtattttgttacctcgtcaaaaccagattactatgggtgaggtagtctatttctcttaaagaaagttaaatgagaggaagttatattaagatgacagatcacaaattgctaaattgaccaggactccagactcactgcttggtcacctggattgaggccatatgttaatgagctgcctagcattctgaatcttgaaggtttagtttgtaaaaggccatgtgtcaactccatcatgcaaagcacatataacaagtcacataagcatgatatgacagcaagtactcagtcacctgccagcacagactaagaaatattaacatatgaaaatcattgccacagatatattcaaactttagcttctcaataatatattttaattaaattctaatatagtttggttatcaagagactgaataattaaatgtcatcatgtaatatggccatattatat

SEQ ID NO: 153236 - DNA, 633 bp, Homo Sapiens
  misc_feature (385)..(393): n is a, c, g, or t
tttttaaagcaaaaaaaggatttattgaaatcatgtgacaatatatccctaacaccatgaagaagatgacaattatgatttccatagagtattttgcacttgcctaagcacaaaagcaaaaccagagcaaggcaaacaatatacaaacaaaacttgatcctatctaataactttcatgaaacaaccataaatgaattttgttttattaagtcaggcttcaggactactgaattgcattcactaaaatgctatttgaaattttacttactcgccacccaccccactactcttaattcatcgccctctccacaaaaggacaaaaggcaaaaaaggtagtaagcaaaatataaataataagaattcaaaaacagagatcaaagtaaannnnnnnnncagtctctgcgtctatgctcaaatcaatgttttctgagcatacagggaagcaaggaaaccaattctctagctcttgctctgcctcttattctcctccaccccccaatacatttctgaatattttttaatccatttatcactgagtacttgcatataactagaagcaccgactatattgttatcaactttggagcaattttcatggggaattgtacaaatgttctctgatatgcctcgtgc

SEQ ID NO: 153237 - DNA, 478 bp, Homo Sapiens
ttaccattctgatgttgggggtttgttttggggggtgggagttgatcttcccacccagtctgcccctggtctctgcccatccaatcagagcccaccctcctggaagagacccccgtgttcagagtgctggcagccctgcacgtgtccagggacactgcatttcaaagaaccactgagtgggtgagctaccttgggcaaaccccccactcctgactctgactgccacgtgggtggcccgacctctgacctgctgtcatcgtagaggtagaaagcaaacaatctggggctcagcacacctgggggtgctcccactcattcagtgtgtggggcccctgagcagaggctgggcattgccactaggacctgagctcctagagaacaaggacctgggtggcctcgcttactgttccagcccaggccaagcacagggtctggctcgtggcaaaccttgaataaatatttgttggctgaaaaaaaa

SEQ ID NO: 153238 - DNA, 533 bp, Homo Sapiens
tttgcttttctaccaaatactgcttttaacacaggcttttcactgagtagtggacaatctatcagctaggtgctattcagtgtgaggggcatttgcaaaggtctgcatcagtgctggctgatggaactttctagtgatagcatcattctgtagctgcactgtccagtgcagaggctacttgccactgtggctactgctcaggatggtgcaggtctgaatatcttagacacagcggccaccgtgtctactgcacgggactgaatattttagacacagcggccaccgtgtctactgcacgggacggcgagggtctgaatatcttacagacagcggccaccgtgtctactgcacgggacggcgagggtctgaatatctcagacacagcggccacggtgtctactgcacgggacggtgcaggtctgactgtcttagacacagctcacctttgatccgtgttaggaattatccacatctcctctctgggcaatattctactttctttttatattgacccaattattttacttctttgg

SEQ ID NO: 153239 - DNA, 523 bp, Homo Sapiens
ttttcagtttgtggcttatctttccattctaatagtcttccatatgcagaagttcttaattttgatgaagtccagttgatctttttttcctgttatggattgtgctttagatgtcatatctaagaaatctttgcctaatatgaagccacaaaggttttctcctatcctttcttctagaagtttcatagttttaggttttacatttaggtctgtgactcttttcaggttaatttttattatagggtgtgaggcctggattaaggtttacttgttccagcactatttgttgaaaaggcgatagccttttctgtgaacaccaaaaattcctttgtcctatgaacaccaaaaatttgagacaggtctcagttaatttagaaagtttattttgccaagattgaggacacacctgtgacacagccttaggaagttctgatgacatgtgcccaaggtggtcggggcacagcttggttttatacattttagggagacacgagacatcaatcaatatgtaagaaatacatta

SEQ ID NO: 153240 - DNA, 345 bp, Homo Sapiens
ctcaggaaagaactagttctggggatatatgcatggtcttaataaagtgaatggttagcctgtcctgactattacaaaatcaaaacagtgagaatatctgcagaatctatttgactctaaatgactttaagtactccctatcaagtaacgtatctttaacatctcaaacaaatcttcatttctatttttgtactctgcactctaaatctaaaagtttaatacttcttctctagagatatacatgtaagcttccatgttagtacccaaacagcctacctggcaaaagagccttagattaaaaaatgcactgttactgtaggcctaaattgatcaagtgaacttaaa

SEQ ID NO: 153241 - DNA, 921 bp, Homo Sapiens
ataaatatgtatacttgagtgctctcatgttagtcataacctttagtttagcactgttatatagaagtgacagtcacgtagcccactacacattatactagtttgaatttaaacaaagcaaaacaactttataattttaaggggaagaggaatggttcctgaggccaaaaaactagagaggaaaggcttcaaaaaaagaataacacaataatatgtcactatcattttaacattgtaattgtgccttagaaataaataacagaaatgtggggtatcatttatttaaaaataaagcaaatgtagagaataatggataataattttgagggtctactcccaagtctctgggtgtgacccaccccatccaggctgttaatttatttggtcaacagtttcgtgatttccatatggtgctgatgtctttgttagctcttcttcacttcctgcatttatttttatgtggcaggctgcctagtccctaggggaatagctgagtggtaggaggggttgtgatcttttagcaagatttcaaaacagaataatgtatgcatgtaataaaaacaaatacgctcactcacagtgcaaaaccaaaaagaacacccaaatccctggaacttctgtgctactaagtcttttgttgtaggctaagattattttccttttggggttaattatttctgccttaattattgactgttgtgaaatctctcttctgagacattcccaaattttatttaaactagtgggtaccagctgtactgaaaccataattttagccatgtatttttattagaaaaatgtttccaggggattaaggaattttaatatttagtggaagttttaaaaaagaatgtaaaaatgccttttggaacctaagaatagttgtctattttagaaaaatcagaaatattgatggagaaa

SEQ ID NO: 153242 - DNA, 552 bp, Homo Sapiens
cggtagtgttcaggtaccaagcaaagcaattgtttgtacagttttcccaaggcccatttcatcagccaaaatgccattgactccattttcatataaagagatcaaccaattcagtcctcgaatctgataatctctcagtggcccccctttcacatatgaaggtgacacctcaaatctaatacacacattagatgttttccgactctcagacagtagctcttcatcttcttcttgctctgtgcgcctatggcggtagtctccagcagaaattaagctctgcttttcatctttctttattcggggacgtcccaatttcatgttcagtggagatgttggagatttctgtgctgaaggctgaatgaaatgtgcaaaaagttctgtctgcttcagtaaaaattcaaatctctttgctcggtcggctttcattttctcttcatattctgggtccatttccttttcagatttaggcgctttagcagcaagtttgagttgaaatgaagaaacgtttttctccttcttcttctcgcccttctccgtggccgcgaaggcttc

SEQ ID NO: 153243 - DNA, 306 bp, Homo Sapiens
cagagaaaaaatagcgaaatatctttattttcccattctgccctttttcaaatccttctccattatactttggagaagggatggaatcacctttcaactacagcagtctaaccagaagtgtgctgtaaagaccgtcatcagctgagtagatccagccaggagtagatcataacccagtgaatgcaattaatgtaaccacacatctgagacactattgaaaacaatttgagaaaacattttaacagtacaatgtgtttgtgggaggactgcaaaatacagaacaaactatttacttaaataaatgtt

SEQ ID NO: 153244 - DNA, 464 bp, Homo Sapiens
tttttttcattttaaaagagctctttatatggaatgtatcatgtgaagtacacaatcataggaaaagatggactgagaattaaagacctggaacaaagtacaaagcatcaaaatgaagatctccagtaactggacaaacagtgccaattatttttttcctaaactgtgctgggcacacaataagcatccaattccacttattataagatgatagctttaaagaggtgtatgtgaaaagaagacaactacttttttaaggattatcatacaaagaacagaactgaagagaaaaaaattatagatttgaacttaagacttagcttgaaaatttttgttctttccacatgtgcattaatgtaataggctgtttgaacctttcgcatggaccccccaatgcctctagcatcataatgaatttttatctcttacatccaaggatctaccaacaatttaaggtatggaga

SEQ ID NO: 153245 - DNA, 545 bp, Homo Sapiens
  misc_feature (439)..(439): n is a, c, g, or t
tgcagggaggggtgttgtggaaagggtggctctgaaagcctaggcacatccaacatatcaacgtctctataaggcctttctccttggccttcctgaattaatgggtgatttttagaggcctctgatgtgttccacatggctaattttccatgaagatctttgtagtttgcctgctatcctctcaatagctttaacttctccccacatgacagttattgcttcttagaaatgaatgtgcagaaccgtgaacaataatccattttctccttttatccctagtaattaatcaaactcaataacagcacaaaagtaacaactcaggtgaaaagaaaactcacttatgtcttcaatgtccaatcaacattgccaaatgggagaacagtatgtactatactctactatatacagatactctttgttttgttttatttgtttttcnaccatgcactgtgtaacaggtatcacaacaacatttccgaacggcacatgaagaaggagcaaatgttcagtcatgactggaacaggattgtgcaagccatggatgc

SEQ ID NO: 153246 - DNA, 595 bp, Homo Sapiens
  misc_feature (232)..(282): n is a, c, g, or t
  misc_feature (524)..(524): n is a, c, g, or t
tttttcatttatgtatggaagaagatgggatgactgcgctgacaactctctagagagaaatgatcctacatttctgtagttgtctgaatttaatgaatatttggaaaacagatgggttgggcagtgtgaggatgaacatttaggtaacaacctaaaccaacctgccttccactttgttggttaccactaagatggctgctgtttgtgttttctttttccctttcagagcccnnnnnnnnnnnnnnnnnnnnnnnnnnnnnnnnnnnnnnnnnnnnnnnnnnnaccgatgtatgacaaatacaaatagtatatactggaaggtgtacagtgtgatgttttgatatacactacttctgtggatatacaccatcttctgtggtggatatacatcatcttctgatgtggatacacatcatcttctgtggatatacaccaagaattaggattgctggatcatatggtagctctatttttaattttttgagaaacctccatactgttttccataatggctatatcaattntcattgccaccaacagtgtacaaaggttccctttattctgcatcctcactaagactgattacctcttgaat

SEQ ID NO: 153247 - DNA, 614 bp, Homo Sapiens
ttttaccagtatttttataaattgtttcaggctttaattcagagccacagtgctaaagcatgaagccatgccacagaatgctgtgtactgaagcaatcatattagtgacaaatgaaagtaaaatctaccctaaaagaaataaatgtgtataaagacaagcttctgaaggtaatcagaatatgtcacccccaaatatgcctttttgacaaatattttgaagtaaaggcaattaagaagcagccaatggaggaagagctctctagatcctcccctcttttcatctaaagacaggatgtaaattctcttttaccggagaccattcttaccagctcagggatgtcagcagaagaatgtacaaacacacgtattccactagtttcttcccatatatttatcttcccacggtttcttgccttcggacacctaaaattgctttccattgtcctgtcatttctccacaaatgtattgttgaagatgagccagacttctaagccactgcgctttgagtttcactgaggtttctcccacgtgctgtgggctgcatgccttagtaaacttgcttgtttttctcttgttaatcagaggtctgtcccaactacaaagttaggaatga

SEQ ID NO: 153248 - DNA, 717 bp, Homo Sapiens
tttgcttagaagtcttgcacgtcttttattagatatgattttattcctatgtactcaattttgatgtgattataagtgatatctataaatttcattttccaattgtacatcattgatatatataaaaatactaaaatacaattaagtttagtatattgacccctgcccattgatcttgctaaattacttactcagcttaagagtctgactgttacttaatttggattttcttcatacacaaccacattgtctacaaataatgaatgatacctgtgtttcttactgtttcaatccttaagacttttcttttcttgtcttgttgtctgcctggtacctccaagcacaatcctgaatagaaatgagaacagtgttcctgacctcagcggcaaagcgttcaatacttcaccatgaaatgcagattgtggggctcacctctgtaaaattccagaacctggctccccaagtcctggctgcctctgcagcctctcaatccctcaaacatatttttaaacaaaattttacccaggttttacagttgctctttgtggaaatatcagttggctacaagatactctattagagccagaatggaagtaggtagtgggttttgaacctgtttccatctaacagaaacatttacatgaatgatgacaaatgtaacccaggttgaaaggggtatcctggctctgaaccagtttagtctgacctgagtctccg

SEQ ID NO: 153249 - DNA, 1308 bp, Homo Sapiens
ttaagactggaaagtagtttattattaattatatcatagctaaattggactatatcatagtattattaattatagtcaggaaactacattttgttcccctcaacaaatggcgataccagtttctaaaacatgaatgattttctgcgctcttatccaaggatggcaaatatctgagatggctaattttcccttaagaccctccttcccctctatataagggtcaatgccagtggatccagaaaactttttccccctggatcctggatgtaacctcagaatccttctcaataaagcattctaggcagccaccacaaatcaaagttgccacgcagaataaaagttatgaaatgtagcatttcatattagtctcctgcaaatattaaagtttttcattgttataagcaatgaaaattatcaaaaacaaagtacaagtatcatattcctgcattcttgatccagaccatcttttattcctcatgcttctacattggtagaactttaatgttcttcgaaaatttactgacaatcaaacacttcaagaagtaagagttgagcatgttaaagcattcaaacctttaggaacactttcctaaatgacagtgttttctggcttcaactacagaattctgtgaagaatcaaagactccaactgtaattgcatttaatcagagaatgctcttctgtaaggcattctttgagaaatccatataaaaattagatgtttaagaatctgtatattcatttagccatacaaaagacatttaaatgaaaattttattaactggaattttgttatgccacagagctaacttaggagcaagattccaaggcagaagtgaaactgatggcagcactgctttcatatttagcatataatactatagtggcattaataattcagcagatacagaaattttttggtccattcctgattttgttgattcagagtggtagaagctttgtaaaatataaattctgattctttttcaactttgtctaatttaaatttccctgtcttctgctgagtataaaataaatgggtctaggtttgtgaatttgcttttttaaaattaaaaaataacctgctgaaactattcagaaatatacctcaattagggcatttttttaaaaaagaatgtgtgaacatgtttaaaattaacctttaccataattaagcttggtagaaatagaaattattgataatgataactcataaaattaagcttattaaataatattacttgggacaagtactatgcttcattaactttaacatttttcttcttttcctttctttggctctttatt

SEQ ID NO: 153250 - DNA, 468 bp, Homo Sapiens
tttttttctattccttttttaccccctcaacctattcctgcgttatgggaatcatgttccgacagacacactggtacaaccacagaaaaggggagaagttctgatcccgtcagcgaagggcgagggggtgcgaagggaaggaaaagagacctcacaggccccggcccacgaaccaactccagcaattcagtagttaagttcggccccgctgggggttccggagcgcggcgccccgcctccgccggctctccattggcctacgcgaatgcctgcgctagcgctctatttgctcctgcggatgcccatcatgtcaagcccccccaccacccgagcccgcagctccaaactgcgccacagagtttacggaggaaagggcctggaggcagcaagctgccgtaatttgggtatgacgaaggcgtcaggcgcagcgccctggactgcagccggccaaggagcatggcggccgca

SEQ ID NO: 153251 - DNA, 471 bp, Homo Sapiens
tttgttggtttttgcctttcatttcattgggcttggaaggaaactgtgtcttgaaattagtctgaagccgcttgaagactttgggaatttgaatggaattgcttttggtgcagaacaaaattatccagttgggagccaagactcaaatattatttccaaaaattgttagtggtggttctgtttctcacacgaggaaacgttttagccttgtgagtgtggggcttgaagctctgcttcttggtctgcagtgcctgtagctgccatgcctacgatgtcgctgccttttggtatttatcataaggcatgtctccagatccgtcattgttgccatcgactttggtgccagaagtgaaaccagtcctgcttcagtagacttgcctctcatgcctctttgcctcccttttagaagtcattttctcactaaggaacagcagcagagacactgaagtaaccttttctctgaatgaccat

SEQ ID NO: 153252 - DNA, 590 bp, Homo Sapiens
ctgttgtggagaatgatacacaagacaaacttaccctgatgttgttaaatatatgttagatgaccagttgctttgatttctttgctcaataaacattggattacagctggtttgctgtgtggcatgcctacatggagggaacacactgagccaatgatttcatcatctgggtccctttggtttatatcagtttccaacatgacttgtttgtggggcttgtgggaggggcacatacatcggccccaggattctaacatctcctggtctctgaggttataattttcacttaacattgtcgagttggcattttggttttagtccaatggttcagttctttgaaactgactccagagatggctctgttcattaatagattgttttgttgaccctgtgaggattagtctgtggatcttggaaattcggcaggtgactacaattctagaaggcctcttgtgagatataaggtgttttccttaagtgacatggccctgcgttgcaaagctgagaagtaatatgaaggagcgttttgtaagtttgaatctctataatcaaaaaccagactaatgacacattcgcttttagaacttaaa

SEQ ID NO: 153253 - DNA, 580 bp, Homo Sapiens
tttttggttttaaagttctcttaggtataacttacataaacgttaataaatcttagggtacaccttggtgaattttgtatatgtctatacccaccacggtctccatcaaaatattttatcgtcccagaaatttcccttgggccccacctcatcctcaaaggttatcactattctgatgtctatcaccatagatttgtttttcctgttcatgtaaatggaaccataaacagccctcttgtgtctgttttcttcacttaatatagtgtcattgagatttatctatgttgtattatcagtagtttatgctttttaattgctgtgtaatagtccatagtctgaatataccacaatttaaaaattctattctgtttacaaacatttgagttctgtcctccaggttcatccatgttatcacaaatgacagaatttccttcctcatcaaggctgaatagtattccattgtgtagatataccacattttctttatccattcatccaccgatggacagttaggttgattccatatcttggctattgtgaataatcctgcatgttttattgttatgaataaagctgctgt

SEQ ID NO: 153254 - DNA, 530 bp, Homo Sapiens
  misc_feature (120)..(130): n is a, c, g, or t
  misc_feature (355)..(365): n is a, c, g, or t
agtcccgatcaccaaggaaatactttattggctcccacagcttcttctttcttggcctgtgcacaaagttgtcgccacagtatgtgaggatcctttaagctaggttgctggccagtttcnnnnnnnnnnnctctctctgtgttgctgagagtctgggtttatttgcctcaatttgtcattcctgagggcccctttaatgaggtaggggagtgcactccctcatgagagaggactggagaccacccctggaggagaatgtatccccatacagactgccaccaaattgtttgaaatgcttgttccccagtgccataaaaaaatagcacttgaacatagatttatttagtgtggccannnnnnnnnnnacttcctgcagaaagggtatactcaccagcagttttgccacgagtgtacaccaaacaaaggagacagcatcatttataacctgccgcatccaccctactgctgtatccagtttccattgactggaacaggacctcacattctgtatttgtcccgactggctagca

SEQ ID NO: 153255 - DNA, 612 bp, Homo Sapiens
  misc_feature (43)..(96): n is a, c, g, or t
ttttttagtttttcaattttcatttatcagtcatgataatgtnnnnnnnnnnnnnnnnnnnnnnnnnnnnnnnnnnnnnnnnnnnnnnnnnnnnnnggtgaacaaaatgacacagaataaaatcaagaaaaatcaagattaacagtaaatatcaatacttacttacacatcaaagtagactgttagcataataaagctaacatatagtcacagaaagacaaaagtatcaatgatcaagatactattttgcttcaataactcctcattttggcctgggagttcatcaaagcctaagcggctggattctgtttttctccctcctccctccctccctcatgcttccatccttttcacactggggtaccagtgtaggaggctcctggatgtagctaaccgtgcggcagcacctaaggcagcagtggctgtacttcgaggaatgtagagcttctgagaaatctggcactcataagacaaaatcaaagacagctggtctacagattcttgacgcttgtctttgtacaatgtaatagcacggctgctagaaaaatcttcattctttaggatctctggtgagctttccactttaaagtgaggtttttttaattccatctt

SEQ ID NO: 153256 - DNA, 618 bp, Homo Sapiens
tgcggccgccaactttttaaatcactggaggactgaggccttattaaggaagccaaaattatcggtgcagtgtggaaaggcttccgtgatcctctcgctgcacccttagaaacttcaccgtcttcaaactccatttccatggttctgttaattctcaaggagcagcaactcgactggttctcccaggagcaggaaaaacccttgtgacatgaaacatctcaggcctgaaaagaaagtgctctctcagatggactcttgcatgttaagactatgtcttcacatcatggtgcaaatcacatgtacccaatgactccggctttgacacaacaccttaccatcatcatgccatgatggcttccacaaagcattaaacctggtaaccagagattactggtggctccagcgttgttagatgttcatgaaatgtgaccacctctcaatcacctttgagggctaaagagtagcacatcaaaaggactccaaaatcccatacccaactcttaagagatttgtcctggtacttcagaaagaattttcatgagtgttcttaattggctggaaaagcaccagctgacgttttggaagaatctatccatgtgtctgcctccatatgcatct

SEQ ID NO: 153257 - DNA, 488 bp, Homo Sapiens
ttaaagttttcctgggatagggatgatagtgtaattgttcatgcccacagtaatcctgggaatcttagttttttcctatgattgtggtttctcagcttctttacctctcctttgagttaggtccacctcagttttctaaaggtcaaattaaggcccccccaaaaatacagtatgtagctgaattcctttgaaagatcatgataaactcagaagaacaaacatagaaggaatgtcatttttaatctttttaaagagtgtgtgaaaattcactttaactggaattttaacaggcaagccggcatgcatatatgtagggatgtgtgactttcacagttgttaccatggacttaggcttgattaaaatgctacacatttagagcgttttgtaattccttttttatatttttaagactagattttgagccatgtgatagttttacctcatattaaatatattgtccagaagtatcaataatcatgtattcaca

SEQ ID NO: 153258 - DNA, 503 bp, Homo Sapiens
tttccggaatgatgctgtattactcagggttctccagagaagcagaacaataagatgtggagatatatgtatatatacagaaagacattataaggaattggctcatacaaatgtagaggctgacaagtcccaagttctgcagggtgagtcagcaagccgagacccaggagagccgaggttgtagttctagtctgaaggccagcaggctgaagatccaggaagagctgatgtttcagttcaagtccaaaaacaggaagaaagctgatgtcaccacttgaaagttggtcatgcaggaggggcgccctccaactcagccttttgttctatttgggccctcagctgatggatgaggatccccaactgcagggaaggaaggaagcaggagtgtgtgcttcactttgcttcctaggctccagacccccaactgcccgctgggaaaacaagggcagctcttgcccacatgaagcagggagcctcgctcctgaggcagggcgctggtggag

SEQ ID NO: 153259 - DNA, 498 bp, Homo Sapiens
gtaggaacattcacagcagttttattcatgatggccaagaattagaaacagccaaaatgttcaccaacaggtagatggataaataaatcatggtctaaccacagaggggaatactactcagcaatacaaaggagtctctcctaatacgtgcaacaacattcatgaatcccaaaaactttatctggagccaagccagacacaaatgtgtacatacagtacggaatgacttcagattctgaaaaaaggcaaatctgaccaattgaggcagaaagcaggtcagtggttccccaggtctgggactggggtgggttactgatagcaaatgggcatgtgggtgccttggggtagggtaaaggttccatcttgatcacggtggtgtttcccaagtgtatacactcaccaaaactatacttagaactcaaaactcgccaaatatatacttaaaatggatgcagttggttatgtataaattatacctcaaaaaagttggcggccgca

SEQ ID NO: 153260 - DNA, 536 bp, Homo Sapiens
tttatagagtttttttctttccttagttcagaagacttggcggcctacaaggaaaggagcagatgtggaagagtaacagctcttactggagactcaattctcacattaacacaccggggactgggaaaatctatagacccagacaaaatattcctcatggaagtgaggcaggacgacagcagggtagtcagaggtttagggtagcaaaacttacacttcacagactaaaacaagggtatgctagcacatattgtaatgactggtttacgatcctcacataattgggtgaatatttctctatacatttttaatagaatgtgaaagcattatttacaaagatttgatttaagaagagattaaaagaaaattggggtgctagggtcagtccctccaaaacttattggaaatcatatagtcttttttctaacttcagaattttcatgaaaaagtaaattcagatgtaccagaaaccatctcttttctcttgcatttataaaaccaagaggcaagaatgtggtcagagatatttaccactg

SEQ ID NO: 153261 - DNA, 256 bp, Homo Sapiens
tttttaaatgcattcacgagtttattaaaaaatctgttaaagaattacgtattaggcaacagaattaggcaaactagaagtgttcttgtcatgcaaattcaggaaactaaagtgaaaataaagtctaaaggcttaataatgtgttgtgaagggactttgtttctatgcttcatcaacaaccctttaagagtatagcttatttgaacaaatactttttagcatcacctgctttgaaacagacttactacctggccaa

SEQ ID NO: 153262 - DNA, 466 bp, Homo Sapiens
  misc_feature (369)..(369): n is a, c, g, or t
  misc_feature (371)..(372): n is a, c, g, or t
  misc_feature (380)..(380): n is a, c, g, or t
agataaatcaatggttttattttattgagcacttattaaatactttacatgcatttcccataccccccttactaggtaggtattctatcctcagttttcagatgagaaaactggcactgagagaagttaaagcaatttcagaggtcccaacatttgaaagttgaggatacggaattcaaacccagttcttactcatgacaagccccaggctcctaaccatcctacatagaatcctgcttcccaatctctcatagtactcagggcagagcatctcatctgagccaggcagagatgacaaatgcctccctgagcttagtttagggattaggaagtgttggggaggtgaaggggggtaggtgggtgccctantnnagggacangctgagttgacccaggaggaagaaaactatccaatgttagggtattatgtccattctaggctgttggagattaagccaggaggcag

SEQ ID NO: 153263 - DNA, 343 bp, Homo Sapiens
ttgaaaggataagcccattttatttagaaaaacatatctggtcaatacccaagtgtaaaaaactgtagcttgtctattagttattcttctaagtataatgttgtaaattttaaaaagtgagcagtacagcttgctgacaatgttacaggtgattttcctcaagataatttaaaattcagtttgcagaactgcttcacgcatacttcccttttcatcacaccatattaagaagacacgtactcaagggtccatatttaatgaaactagtaactttactgctcatcaaagacattttttgagagagtcctactctgtcacccaggctggagtgagactccatctc

SEQ ID NO: 153264 - DNA, 427 bp, Homo Sapiens
tttaatttagaaagtttattttgccacggttgaggatgcgtgcccatgatacagcttcaggaggtcagaacccgaggtggtcagagcagtttggttttgtacattttaggaagacacgagacatcaatcagcgtgtgtaagatgaacactggttcagtccagaaaaggtgggacgacttgaagcaaaggtgggacaactcaaaacagggggcgggcttccaggttttagggagataagaggcaaatcactgcattcttttgagtttctggttaccctttccaaaggaggcaatcagatattcatttatctcagtgagcagagggatgactttgaatagaatgggaggcaggtttgccctaagcagttctccgaagcttgactttttcctttagcttagtgattttggggccccaagattttcctttc

SEQ ID NO: 153265 - DNA, 519 bp, Homo Sapiens
acaaatagaattctgatttttctcctttctctccatattttgaggaaatgaatccaatgtcctcaccccacctcctgcagcggagaagtcccctgagcatctctgaacatcatgaaccctcaaagtaagcttagcttgggccccttttccttttctatcagtgaggccaaagagccccagatgggagacaggtggatttttctctcagctgggaccttttctctttcttgtctagcacattttgggaaaccttcaagtacattctcatgctggtattatttaaactttgcactggagtgaattccaggagttatgtccacactgagaccaatggagatgaacctaaagcaatatgtggccaaacaccttagcctctttaaatatactttcctttgcttggttaacagggtctgtctgctcgcattagagaaactgcccagtgactcagatcctgaaaggatctgctttagagaaaaaaggagtctggtacttctcactccatctagtgggcaacctgtc

SEQ ID NO: 153266 - DNA, 444 bp, Homo Sapiens
  misc_feature (326)..(326): n is a, c, g, or t
  misc_feature (345)..(345): n is a, c, g, or t
aatccccaaagacattatctgtggtctttttttcctttcaagctcagcctgtgtgcctgatgtcatttctttcaagttgcccacagtatctccacttaaactaggctagtaaccaaaataatgtggaccttctttaggaaacagtgtgggagaataggagtccagccgtaagataaactggaaatatttgggcgtcttgtacctggctacgcaccacctcagtgttgttcctacataaacagggccccttttaaacttgtatgtggactgctgtttggtcaaagaataccttcttagcattgcagaaaggtggtcagatgaccagntgtagtgcaggaaacagcncctgtctcaactaatggaaatatatttggcatgtaacccaaaattagcttatcttgcatagaacataataagtatgtgtctttggtgacactaatgttc

SEQ ID NO: 153267 - DNA, 543 bp, Homo Sapiens
tttgctaggattcgagaaatattttatttaatgttatatttcccacgagaggatcatgagcgctcaactcttcccaaccccagctgactcctccatgagaaatctgtcagtggttttcccagaaggctgcccccgtgtgaaattcaaagatatgtagtgtgttaaggccagggtgttgctctccgaatgcctccaccaggaagaatctgggacccagcttctgcccagttacaaatgaatgggacaaagtcatgttcactggaaacttgcctgagaaaccatctgaggacgtcattgtgcgtccatcgttccgagaaaacatgagctgtgaaagaccacaggacagatgcagaggactcccctaaattatctaccccagggagtgctggcatttctctctatccctgatgccagcaaatgcagccacgcccaagagattttttctttctttgtcccctacgagaagaagatatggagactatgtggttattaaagctcttagcagagcaccaagttcctgggcaaataccacacagccattta

SEQ ID NO: 153268 - DNA, 552 bp, Homo Sapiens
  misc_feature (26)..(26): n is a, c, g, or t
tagtaaatagtttgagagtaaagtancaatatagatcccaaaattattagggtgttttgaaggtagaaccctgcatatatagctaacatttttcatttcttattctattctaattcattgatcgtgactcaaaaaatacagattcaaaactgtttactagtcagatatgtatgttcacaacagtctgacaaaaataaaattagtgttcgatatttagctgatatttaggatttgaaatatgcagttatcttctgtgaatacaaaattggcacttgctgcttgggtatgtggccttaattcggcagtgccagcacccacaaagctattgactgttgggatctttgtccgtaattagcattagctgccaccagtaagttacagcattttgataatggcttagtgactgaagagttagacatcttataggcataattatcttaaacagagattcaaacattttaaacatgcttttctaccccctaaaaaggcacatgacttatttaatacaaaattatttttaattgaagtcacaatgaaattttgtgaagcaaa

SEQ ID NO: 153269 - DNA, 507 bp, Homo Sapiens
caggttttgcatcagaatgcacatatgccacaatagggaatgtagaaaaaaactctcacattcctgcctccgtttgcctgctgcctacccagctttgagattctaaatgagtttttattcttttctgtattttatgtgttttcaaaattagctttactgctttttggtgtaatctatagttcacataacaaatcatataaaaagctatttgaactaaaaacactagtaacattgctcttcctgtactcctatgagactccctcgtatgcttgtggatgagacattatgaggatgtgatgactgagaaagcagcggccattttgggaccacgaggtgacaagctcaaataagaaaagccaacaaaatggtgggggaaggggagatgttttaagaagcctgagttcttgatgacacaactgagctgttaaacaaactcagggaggaccacctgtttaaatttatttatttacctaattatttatttgagacaaagtcttactctgttgc

SEQ ID NO: 153270 - DNA, 534 bp, Homo Sapiens
ttctttgttgacttcctactgagtttgaagacagaatattagctacgccacacattctcgccttttttttaaaagaagcgtttgtaagagacgtatctagaaaagctccagaaggcacgggctgacttgcgactgtaggagacatcccatttctcgtaggaaggaggagtcatttacggactcctgagtgcctgggacgctccattcctttgttataaattgtgtaaattgtcctcgacctcttatgagtttttccatcttgcgggctctttcccagtagtttttgaaagcttttatgtggttccctgttttgacattgcttccctcttagccatttccgtatgtttctatgaggttttaggacgctacgcctatccagttttttggtcactttaaggggagccttagagcctccgtgatatttccatggtaatgtagaattttaagaactaatgatcagaaagactcttgtgcaggtttaaaagcaagttcatgaattcgcgtgccgtgtgcacggagagaggccgtagttcc

SEQ ID NO: 153271 - DNA, 623 bp, Homo Sapiens
  misc_feature (569)..(569): n is a, c, g, or t
tgacagtctttttcctctggtctacaaccacctcattaaccctggtgtgactgacagttccctggaatactcagaatgcatccggatggctcgccgggatgtgagtccatttggtaatattccccaaagagtaatgggacagatggggaggtccctgctgcccagccgcacttttttgtcaggcactcaatctgggcattgaagtcattaacaccacagactatctgcgctttttcatagagtgcagcagagccctgctgatgatgcagttctgcccgcactgccaaggcctgtggctcactaagccttgtgtgggatgctgtctcaatgtcatgcgatgctgcctgtcgcacatggcggagcttaattcacactggcatgcttatattctgtcgttggaagaactttcggattcaatgcatggaacattcgacatttgtcacgtgctgctgacctgtcacttgttttttaatgatgctgtgttacaggctcacctcaatggacaaaaattattggaacaggtaaatatgatgtgtggccgccctgttagaacacccacacaaagcctncgttgttcttttgatcagagcatagagaagcatggaatgatagacccctctcgt

SEQ ID NO: 153272 - DNA, 799 bp, Homo Sapiens
gacaatctgccccaaatgacaatagtgcctcctctgagaattggccatgatgatctctaggtgacatgataggagcctctgcattccttcccatgacctgaagcccaggagctctaaatttctactctcttgatttgctcagcactctcagctctctctcaatctgttctcatcatctcccctccacttgaccgcattcagatttaccagccccaaagttaatgtcctaatacttttttgtgactttcttttccccctctaggggttgctattcctgagtctggtctgaattgggtggaaatgctgaggggcagggccagaggctctgaccaggccggagatggtctcagtggccacaccatgttacctgctggtcccagcatgctccctggcagctccagcctccagtctctgggtcactgtggttagcttttgaggagcccttacccagatagtggctagagaaaaatccttggggagggaagattcctaggtgcttccctttgagggatccatgacctttccctagatcctgtctgggctcccatcccccatctcctggagcctgcaggatttgacatgactacatgtcctcctgagagtgcgcctcccctctgcccagggcctgagcattcttcccccactgtctctctgtctggctggggtcaggctcacctcatagacaccaatgttggggctgtccaagtgttggctggggccgctgcgaatgtctgacatgctgcgggcacccagacttgatcgactcccctgggccacctagcaggtagaggtcaatgca

SEQ ID NO: 153273 - DNA, 588 bp, Homo Sapiens
  misc_feature (511)..(511): n is a, c, g, or t
tttttgactatgaaaaactcgtagtatattttagcatttagatgtattaacatggctgttaagggtaatctttaattgttccaagtaactgaactgctgacatcattgtactatgtagcgctgtccccagatagtgcagatgtctgaatattgcttggttattcccatgtctctaagaccaactgacagcataggacattttaagaggagctataatcaacttaacatagccttttccctgtgtgttagttgtcatgtaagaattaaatattaaagaggcactatttcttagatctacatcacttcgttttttccctgggaaaacaaagacccagtcttttcagggatagtcaaggtgctaaaaggccaagatagacatcaggtgaaagggagtgaagtcaccctagttccactattatattctgatgtgagctgtgtggttcctcagatcaagaaagaaactagtttgctgagttctcattgataaagaataagcagtcacaggccatangacacatctatattagacaaggtttcacacctcacccactgaaacatattcactggctattcctttcagtccttctg

SEQ ID NO: 153274 - DNA, 496 bp, Homo Sapiens
cgaacacaatgattctgaactaacgacactgttgtgtttttccagttgtctcccaggtggatggaaagaggacattttgctttgcaagggtctctcttcaaaaggttcaaatgtaagtccctccgatgcctcctttctgctccccgcgcagtgcatagtgaggccactgctgcttacccttcccggaaccacaagattgtcaatgccaatcaaatctttcttgagttcgtgcagcttctggaaattctccatcttgatcatcgtaccgtggagctgtgccaccatctccgtgatctctgccaaagcggctcggcagtccctgaagtcggcgtggctcggcgggtggtgtttgcacagccgctccaggacctgcttgtagtgcatgagccggtgcagtggccgcaggaggaaggtgttgagcggtaggtaacacaccttctgcagagactttgagctgcagaaggtgtgttaccattctgatgttggggcggccgca

SEQ ID NO: 153275 - DNA, 699 bp, Homo Sapiens
gtcccaaacacaatgattgtcagtgtaatcaatctttcttgagttcgtgcagcattctggaaattctccatcttgatcatcgtaccgtggagctgtgccaccatctccgtgatctctgccaaagcggctcggcagtccctgaagtcggcgtggctcggcgggtggtgtttgcacagccgctccaggacctgcttgtagtgcatgagccggtgcagtggccgcaggaggaaggtgttgagcggtaggtaacacaccttctgcagctcaaagtctctgcagaagttctccagccgccgggagctcttgattccattctccagggcctccaaggcctcgctgtgcttccacaggtgagccgccaggtgcttcatgccctgaatgttcttcagcatgacatcgccgattctttggtaatctctgatttgggcatttgagcggccttcccacagggcaagtcgttgctcaatttccttgagaaaattagtatgacatttgtgcaaaggttcaaaattcgggaatatgagacttttcagtgcttccggcatggcgtcctctttgctcactgtgctctgaaaccacgaagttataacttcgagatccttcagatatgttcgctcggtggtagacacttccttagctatgaagtacgctttatcagttgggaatctcttcctccggccctcaaccgcatcacccgtt

SEQ ID NO: 153276 - DNA, 718 bp, Homo Sapiens
tttgtgttttcagtattttattaacaaatgagctggcaagaggacaagtgatctagtagtatcacccccaccctcatggagcagccaccacaagcccaccatggtggggggtgtccaacatgctctgctggcccagttcccagccgatcccctgagtcttggcgcccgtttagtcacccttcagctgcttgggaggcaggaagagacttcccctcttcacgaggtaagggagacaaaagcagccatttggatgccagggccacaggggcaagccatgccctatttctttggagggacagaatcacttcttcccaaggccagacactgtagcccatggtactcagccttctagaggagggtagcctagcagaggagaagccctgagtggaagcagcattttgaaggcatcgtcattcttagaccagctaagagctgagggcattctctatctttgccagcagacagtgagactccaggattaaaattaaaagcccgtggtgcatcctttccttgacattaactttccacaaaaccttggaggagtcaaatcccacactgcacatactccggtgtctccagctgtgaagtgggaccagtatcaatacatgggaaagtgctgagaaggaagaaaatatttcaggtataatactaatccatcaaacacgttttattcaagaagcttggcaccaactttgtgccacatcctcaactcttcaat

SEQ ID NO: 153277 - DNA, 607 bp, Homo Sapiens
  misc_feature (76)..(76): n is a, c, g, or t
  misc_feature (496)..(513): n is a, c, g, or t
cgtcgcccatactctgtgtttgataagaaaagtcaatctttgagtggtaattgaatgggtaagaaacgtttctganagttttcacatccctaaaaacattttgagaatgcttatctgaggccatccctgaatttttagccccagagccaccaatttggaattttctgtgtatacttaagtttaccttaagaaatggtcacttcctttgaagtggaaaatctcttaagatctcctgcttctcatccataaatcctttctcagcagagactcatggatgggctagaagctatattcagtcatctttagaagcacatgggatattgatcaaaggggtggggtggtgggaaggtgaggggtggttgagtgtactccttgggtgtcatggctgggatctcagtgtcccttcttttctgcttatttgtacttattgagaagtctgtcttccattttctccttccccatgaacaagtgtgtgaattatttggaggcaagttgnnnnnnnnnnnnnnnnnnactgccctaactttgactgtggtgcttcacacatgtgaatgcgcttgggttgaaattttattcgttttaccattagtaattatttgaatcaaag

SEQ ID NO: 153278 - DNA, 589 bp, Homo Sapiens
caagaaaatatttcttaatgttagctgtataaaacaaaaatttgttctgataaaatttttaatatgggcctttatttgccaataaaatcctttgtaaatgtgagctttattaaactgtttaaatagacaaagttaaagcttaggatagggaatatatatgtatgtgtatatgaaatgatgtcttcgagttttaacttccagcctgagatggcctagatttggtgtgttagtttgtttcactgaagtcagtgagataggagtctagctgggtacatgcttaaaaagctggaagtgaagtgggtggcaagtggcagctccctctttcatgtagttttccataatgttcatatagtttccttatggtctaagtgttacaactggttttcaagttgttatattgaatattcctttttggaattcagggttgaatcactttgagggggaagggaagcaagggcaagagactttattttaaccagatgcggtcttatgacctcaaagatgtgctctagaaagaaaataacaaaaagtgtacctgtgaacatattttttgtcttggtgatattatgcaacacagtgttcagaattg

SEQ ID NO: 153279 - DNA, 493 bp, Homo Sapiens
tttgcttgtgaaacgttctaataacttaaaattatacatgtattaaaaattaaaatgtgacaattagaattgtatctaaactatttttccagaatatttaaaacttccaggaaaaaccttagtggtgtcttcagctctcccgcttctatgtccccagtttgtgccatttcttaccccctgcagttaagcctagcttcctagtgcctaccacgtcctctgctgccccttgatggttctgccaggcttctctgccttccttctaatctcactgctttcaaaggatatgagcaagtacgtaaatggatgcatcccttggagatgcttggtggctggaggccacctctccatctttgcagttgtggatgactttattggtgggagttcatctgagtggggctggctgcagttttatggagcagaacttgttccaggtgcttcacataattctagcaattgccctttcactgtgtctgggtgtagctagaacctgctc

SEQ ID NO: 153280 - DNA, 481 bp, Homo Sapiens
ttaatatatgaagctgtctataggcatgatagaataaaaagtttaaaaattatttgggtcaggcttaaataactttaacaggtaaaaaaagtgtttgacaatattcaacaaataattcttcacctaatttcttattgaagcaatcaccttaatattcattggccttgataaatgtgaacactggtcatatttatgtaaataatggtcatgtggctttcttggcatatctaaattcatgttagatctggcttaacctgtgcttatgtatgtatatgttacagttatgtacattaaatgtgtgtgtaagagttggaattatttgaaagatagcaaaattttaactagaaaaaataagttaatatctaatgattgttgactcattgattaaaataagtagttattatgaaagagaaaaaaggtgatttcaaattgattcagaagaactggcccagcaactaagattgtatgctttcctttttaa

SEQ ID NO: 153281 - DNA, 501 bp, Homo Sapiens
tctccggggtccgccgaagctgccctgcaggagaccatgggctgcggcggggacttccgggtgtctgagaaagggaagcagaaagactgggaggccagggtcgcatccccctcgcattcagccgacccggctggcccccgcccgaagttgctggagccggagttggaagagggtcatttgcatgtgctaggagctgtcttccctgttcagaatgaaattggttaggacagagaaccgtgtctgagctaaccaagtggaacagaattccctatggtcaaattaagtgatctctttatttcgccattctgattgaataatcttatcattttaaatagagaaggtctccaaggaatgtaaataatatgaatgcccacggatttgtatttactgagcgtctccttctccttctcttggcatataaaacacagcaaggagcggcaaggttagctcaaatgttaacgctatcaattttcttctgttaaatgccctgggggaggaaaa

SEQ ID NO: 153282 - DNA, 625 bp, Homo Sapiens
  misc_feature (594)..(594): n is a, c, g, or t
tttgtttttgtgtgtcatcctcagaccagccatttgcctcttccaaaaagctggggctaagcatgtgggtggttcaagaggggcagcccccaggccccaggctgggccgcggtaccagtggcaggtccccctgggtctcaggagcttagcttctacggagctcaggtgtcatttatggggttgccagagcaagctgttaaagggcgaatttggtaagactgagctcagagacctggtgggagggcaaggactggcgggcacagcaggaggagattagaggagggtccacctgaatctttgcagcaggcacagagcttctggctgcatctcagaagggggcagacgcacaggccagggaacacggggctctaggctgtggctccgagtgtccctggtgactggaaagcctgaggggaggctggaagctgatacaggatgccggtggcttgtgagacagaatgagctctttcttcctgaagagggacagaggggagagaagagagcagacatcacactgctccttccatccctgcccgtggcagacatcactaatcaaacttacggtgcctggcagacatcactcatcaggattgnactgccgtctcccactgagcccagaccaaac

SEQ ID NO: 153283 - DNA, 590 bp, Homo Sapiens
tttttacatttacgtacagatgcttatatttaatcttaaaaggtagtcctatatagttctatcagaaaccgtaagagctctttcagaccacttttattaactcaggtattacgaaaggaaccattgaagaatatgaaagctcaaataagattaaaaaatgctttaatactgctgaagtctttcaattctagagcaggcatagaatatatagaatgtttaccttatgaccagatacaacctcccaagaaaaactggatcctgcagggcagctggtcttcacagttcctgctgggactacagttgcagaagtcattccatcacttttctctttttaagggagttaagtacaggtaaaggaactcttctagcaaagatcttaataatctcttgattatcgatgtccgtggaggctttttagtccttcctttgcttctgcattcttgacccttggcttctttcactcactctctcctaattctcctgtctttctgaatgggccattccagttttcataggtgacttctatttcttcctgtgttggtgttgcctatgttctgttgtgtgcatttctgatatatataacactctgg

SEQ ID NO: 153284 - DNA, 473 bp, Homo Sapiens
tttgatgttttgtagagatgggattctgccatgttgctcaggctggtatctatttcttcttgaatgaattttggtactttttatttttcaaggaatttgtttatgatgttgaagttgttaaatttattagcataaaattattcataatattctattggctttttaatacccataggatgtatcatgatgtcgcttctctccttcctgatatttaaaagacttactgagttttaaatggtataaatttctggcatctggcaggtgctaaataaatgtttcctggatcgaaatctacagtctcaaggagtcaaggctacaattcttaagttgcttcagatgactggttctatctatttatcaatacatccatcgatccactcatccactcatccatgcatcctcctacccttcctcttccccgtcaaacattcatccatccaattggtggcttggggaaagggacaaaaagggga

SEQ ID NO: 153285 - DNA, 494 bp, Homo Sapiens
  misc_feature (434)..(443): n is a, c, g, or t
gcagtagcagtttggaggccagaaaacacataaattactactttaatagactagggaaagttgagatctatgtctctggcatgaaaacttcaaaatttggctgattaggacgtcaagaccctaaaatagttcaagaattagagataacatttacttctgaaccaggaggtgggtttgggggaaaggagtatagaactaagaacaagagaattcatcgaaaatctgtataaaaagcagttacagccttggaaactgttccccaccccatgtagcagggtgactgctgattaggattaagcgcttattctacggagagacttcaaattctgggatattaggcataggtgagagcagaaatagtacatgccaacaccacaaaacagtgagaggttccatactgaaaaatctacatgttgaatggtaacgatcatagnnnnnnnnnnttctttactctgattctaattccctggaggatttctttccaggaagcctaa

SEQ ID NO: 153286 - DNA, 498 bp, Homo Sapiens
tttccaaagtgactcagactaaacttttctttccacccaccacatgcttaatataagctacaaaagtataagttgtatttcttcctattatcagtgatctgggccaaaagtggttaccaaagttactttaaccctacaaaaaagccatgtgattcagttacattaagtttatgtaaaggagatgctgccaattttcaaatatttgaggaactggaaccaaactggtaataccaacttcactgtggtcttaaccatcacagcaaacctagagtttctcagtaatgcaaaccaaatattcctatgctatcctcaaacgacagtcctaaagatgaatactgttaagaaaataaatacgctgaattttacaacctggttgcccttcaattagtaatgacaatcacacaaaagtttgtttcacacgtgtaaacaaaaccttcacccatctcacacacagcactcaacaaataacacatatgtgaaacgagtattagtctatat

SEQ ID NO: 153287 - DNA, 326 bp, Homo Sapiens
  misc_feature (195)..(195): n is a, c, g, or t
  misc_feature (213)..(213): n is a, c, g, or t
  misc_feature (228)..(228): n is a, c, g, or t
gctttttcactagtgaaaatgttacttcccccatgaaaggacatttcttgtaataaatctacctgtgaattttgctatatttctttgttggtttggctttacaaatatgtagctgtcttctcacatgttacctgctgtaaaaccattcatttgaatcttaatagctttcacgtttacagtaacaaatgaatttcncgagaaatcaatgtaagnttgcccaagatccanacatatataataaacatcagaactagaacttgaattctgttctttcggttgtttccaacatggactaacacattttatcaagaatgttttcaatattc

SEQ ID NO: 153288 - DNA, 287 bp, Homo Sapiens
ctggccccattctggaaaaggcaaagctgcatgagacacagccttctgcctcctcgcctctcctggactggcttcctctttgagaaaatgcacaaagccctgggagatgacaagcacaaggactgactcaagctgtgtctttcagaccaaggaacatcagagaagctgtggggctgcctgccaggcaggatcatggctgccatcaagccttttctggatccagccatcaaggacatgtttgtggtgtgatgcacacttttgcaagcgtgtaagatgttacctggttt

SEQ ID NO: 153289 - DNA, 245 bp, Homo Sapiens
agtctttaaaatgacagaggcctccttggccccaaatctgagccagaggcccccaccgaaggagcagatctccgcccacactgccctcccttccaacccgggcggcccagcaggcaggggccggatcacctctgctctgctccggcccaggcctcccaaacagacccacgccctggggcgggctggtggagcgggggctgaggatccgcggtccgagagattcctgagatgaagaagcggccgca

SEQ ID NO: 153290 - DNA, 421 bp, Homo Sapiens
tttccctatgattttatatatttctttctcaagaaggaaaagtaaagcccaaataaatggaggaataacattcttattttaaatagtttaagcttcattatttcattttcacaaaagggagggattaaagtctcacggaaaagctatcatggatgaattgtaaatatatgtaatttagtcactttcagcaaagtacaaataaaagtactgttaaggtaagggggaaaagatcactggcaatatattttgcattagtgtaatttattacaagcatagctgctaaataaagtgtcccttgttctttcataaatgtattttaacaaactgaatagctgaatatcaatcaagcattcctttctatcatgattctgaacagactgggctcagggatctcttggagaccatgataagttatggcttc

SEQ ID NO: 153291 - DNA, 926 bp, Homo Sapiens
  misc_feature (265)..(298): n is a, c, g, or t
ttttttttgtgcttttaaaaaaatgctagggcccacaggtctggggaacagcaacgaacaatgagactcgaaatttcaagaattagcagcatagaatcatagtgtgatggaatcttagaaacatggaatcattccattggaatcttagaatgatggggttttgcaatcctagaatcttggaatctttcacctgtggaacgttagaattcatgactcttgcagtctcagcagggcccccaagagtgtatgtggtcctggctgtgannnnnnnnnnnnnnnnnnnnnnnnnnnnnnnnnntcaacaggggccgttaggtcttgggtagagacagggcctttgctctctctctcctccaggaaaagccgtgtcttggtctgggtagccgggcttggtagtggtggtggggcatctgtagctctaggtccagctggaggccccgcctggccaggtgttgagtgaacaggtctggaccatagccttggggtctgtggggtctcccagggtggccctgagtgggttgctgggcccctccaaagtattaaatttctgctgcttcttgttatatcagctttctcaaggcagccttcatgctgcgaagctaaactcagacagactctgggtctgagggtctttcttaattttcctgaaagcttaagctctgtctgggcacattcctgagggtcagctctaccccctacttcatgggtcctaatctgcgtctgggtttgggcatcctatctgaaaatgtcctgctttttcttaatccctgtctacagcagaccctctctctgcagacatcagggcagtttgttatgggggaagagtcaagtgaggatttccatgtctggaggaatctcctggaggagcttgtcaaaaaatggagactcttgggcccaaccccagggattctgatttagggggttgg

SEQ ID NO: 153292 - DNA, 528 bp, Homo Sapiens
  misc_feature (457)..(487): n is a, c, g, or t
gtattgtcatcacttttcaaggtgtcttgacttctacacaaagtatatatattcaggactttaaaaaatagcagtacacatttaacagtagcgaattacaccaaaatgatttactttgagatttgaataatttgcatagcagtaaaatgtgttttgtgtaacatacaaatagaaaaatgacccagtatcttaattgatacttactagagagtatcagaattacccagcagctcttacagaatgccataaattctttaagactaaatattgaaatcaattatttgaagtaatgtttctgatttactgttaaaagttgctgagctcagtttttggagatatcatttctgcctgcctgttcccttatgacagtgaggccttctttggctccacctagtatgataatcatgggttctgttttagttgatgagaagtggctcctatgaatgcctctgctcannnnnnnnnnnnnnnnnnnnnnnnnnnnnnnaggggtctcgccaactcctgggctcaagtgattctcctgct

SEQ ID NO: 153293 - DNA, 903 bp, Homo Sapiens
  misc_feature (672)..(798): n is a, c, g, or t
tttaggtaagaagtgactttattttaaggagtattgcaatggaaaaagcactaagcacaagatctgcaagcacctccaaaatgagacagataagggtgatttttcatatggaggatcaaacgattagaaggaagatgggagggagaaggcagaatggagaatgagaatggcaaaatcagattcaagattagagaatgtttcaccctgaagtcagcctgttcttgggaggggcatcaagagggttgtatgctggcttagactgaaggtggagcatagtccaggggcctgggagaaggagagaaacttgagcagtttggttaacaagtattctgaacactgaagacaaaattattaattatttatgagggaaaaatgagaatgtagaatctgtgaatttgtgatacctaaagagggagtatcataaaagtcataatgaaaagggtatttctttgcagtaagcttttcttgcagaacacaaaggatttgagagatgttagtcgtaactaccatgattcactgcccacatcatgttttccctgcttttctttgtcctatgtgttttttcctcttagcatttactgagttgtatccaatataataatctagtaaacataggtaaagtgtttttgccaagttctgtgagtagttttatcaaatcctttaacttgaggnnnnnnnnnnnnnnnnnnnnnnnnnnnnnnnnnnnnnnnnnnnnnnnnnnnnnnnnnnnnnnnnnnnnnnnnnnnnnnnnnnnnnnnnnnnnnnnnnnnnnnnnnnnnnnnnnnnnnnnnnnnnnnnatgctgacctgggtgttttcagaattgagttgttggacacccagtttgtgttggagaatggttgatgttcagcaaactccatatatttggtgttagaataaagat

SEQ ID NO: 153294 - DNA, 561 bp, Homo Sapiens
ggaaactgatacaatgacacttgtttcttaagagaagctgattgaatccggtagcacattactgcacaattaatggctttaaacgagttacaagtcgtaagttcttatgttttggatcatgttgtggaatgtattccaaatgaaaaatggaggagaaagtgcacaacatcatatgcttcatggtatggcatatacatgtcaattatttttacatataactgtgatgaatgatacaattaaaagctatactacataatgcatacagttatattataaaaagttaaatattatgccacagtactaaaaataaaatatattcttctcaaatagtgaaaataagatatccttcatgttttttatgtcacatatgcttcctcgtttgaccatacctgtttttcttttttaatgaaataatttaatgatttattaaacaataatgacagagtatgggcaatttcctgaccattaatggcctacaaaaagtgataagacgattaccttgtcgtgaatttgctgaaataccctcctgttgcgttcaatgcatggtaaaaatattagaat

SEQ ID NO: 153295 - DNA, 536 bp, Homo Sapiens
tttgatctatttccctttattctttgttatagatagcttttaacccaagtattcatatttatgttaatataaattataaagaggaaacaaagctgttttacaagaaattgatgcccggatgcatcaaactaaataatcgatgattgctgtaactgtgggggaaggaatgtgtccaggctttgaagcaatgttccttgaatggtctgtcatctaaggaaggacaaatcaggatcacatccacggaacaaacagggccacctggataagagacagatcctcaagctgtaacctgaagaggtagtttcttgctcctacaacaagttctttctgtcctgggtcaaatgttaactgcgagaaatccacagcattcttcgctctgaactcccgtaaccaggggccaatttctttataggagatgactggatgctcggttctctggcactgagtcgtaccctgggcctctgggtgggcgagtctccacagccccaggcttgagaacagccatgctataacacaggttcccttcatggtgggca

SEQ ID NO: 153296 - DNA, 473 bp, Homo Sapiens
tttggaatttattttttaataatattaaagcaatagttgaaaataatattagtgatcaactttcgaatttttacttgccatcctcattttagggccaaattttacttgtaaggcaataaattgaattaggattaatatgcaatattagggaaccacctgccttgttcagacatgggaaataagcaattacaacttaatatgtaccgcgtgtttaaaaagttggcaccaaagaaggaaggagaaaaatctttaataaatcacccttgttcaatcttctgatctcagttaagttcttttttttattgaccacaccccaaaagtactaaagtgtttctcaaaagagggtagccaagctagttagtgacctcacccatccacaagagttggctgaattctttcccttgtatatggttcctttgtgaaaaatatttatagttatgccttctaaggcttagaaataaccagctatttct

SEQ ID NO: 153297 - DNA, 344 bp, Homo Sapiens
atttttctcatgatgaggttttcttaccttaaaagaacatgtatataaacatgcttgcattatatttgtaaatttatgtgatggcaaagaaggagagcataggaaaccacacagacttgggcagggtacagacactcccacttggcatcattcacagcaagtcactggccagtggctggatctgtgaggggctctctcatgatagaaggctatggggatagatgtgtggacacattggacctttcctgaggaagagggactgttcttttgtcccagaaaagcagtggctccattggtgttgacatacatccaacattaaaagccacccccaaatgcccaagaaa

SEQ ID NO: 153298 - DNA, 471 bp, Homo Sapiens
atccccccttttgctctggaagagccttttgctctggaagatcaggtttaaggcaagcccttgctccttgtcttttccatacagcatgagtggcctctcagctcaggatcccaccagcacttatgctaatgtgggcacattatggtaacaagcacctaataatagagggaaatttaattccagcagcagcagcagcggcggcggcagcctctcactggagaggagccatcctccttaggaggaggaccggtgccgtttgcatatgagggtggcaggaagccaacacacttgcctcctgaatttggtttccttccctttattcacgtctataattgagcctttgtaagcagagggatgagtgtaaaggagctaaatttggagctgatttcacgggggtgatgagagctctggaggccagctctaccttatgttcatcttgccgaccaagaggaaattcttggccctgatcta

SEQ ID NO: 153299 - DNA, 538 bp, Homo Sapiens
tttttaattacacgtttatttctggactttgcattctgtttcactgcagaaagaagacagacaacattttgtttcttgagaaagggcctgtgcctttatcaactctttgttttagctaatgagaccgggaaaggcaaaaaccacaatagttttaggtgcatgaaagcagacagaaattgtgctatactttgtggttataaaaaacagcagaaagatttacagtggtgaccagtagcggcttggtatggcaacagtagaaatggacggtattaaagcatgtccagacaaagcttccaagaggattcctgtgcctccagcagggtatacttgggcattcaagaagttccccggcttccctaagaggagcttggcagccgctgaggaagagcctgtagtcctggagaggctccacgatcagtaacttaagggaaattactgcaggtcttacccccagacttcatatatctctttctagatgggtaaccaattatcttcagtctgtatttctctccaatgcatcttgaatcactgggattcc

SEQ ID NO: 153300 - DNA, 386 bp, Homo Sapiens
ttgggggcttaaaaatcagaaatgtattttctcacagttctggagggtggaaatctgagattagggtgccagcatggtcaggttctggagcagtctcttttcctggctttcagatgaccatcttctcaatgtgtctgggtgccagctaacaacttgcccaaggtcacacagcttatcagtggtggagccagggtttaaactcagctctagaatctattcttgttattctgtttcttaaagtgtaagctttaagctggattgcaggacatggtaggtatgtgtccaccaggccagttaactctccatcaccgacttagactctcccaggcagttgcagaaccagaggtctcctccacaggggcagaatgcaggcggagcaacccgat

SEQ ID NO: 153301 - DNA, 543 bp, Homo Sapiens
ttttttgaatccggaagtgtgaaattttattattccatcacagatataaatggttcatcaaaaaaaatcagcttgctttttatttctaaaactaaatgataggtacaataattatttctagactaaggcaatgcttttgaattatacaacctcatcctctgattcatagtagagaagtacagaaatggttgagctgaagaagttaaagaattttgtggaaaattattgagaccttcaataattattatactagcttcctcaatttatctaactgaaatatacaatatacataaccattctccactctgatttttaatgattccctttctccattgtactacgaaaatatttctatgccacctatgtgacatgtctattttagtgtttctgatttttcaagctagtcacctggacaaaatgttttccttcagcatggtctacagattacctgcagccaaaccacatgaagtgattgttaaaataagaatctctgggcctcattccagccatgtgaatcagaatcacttatcccacaaatctgca

SEQ ID NO: 153302 - DNA, 511 bp, Homo Sapiens
acaccagttctctttgttgggctgacttactacccacgctgcatctctgcacagagcctggcagagggtcagaggtttgaagagaaggcacagagcaagctgcggacaattgcctgggagtactttttgtattgatctcaaacgtgggatatcttgacctcaagtcttgctctggtgggagacagaaatctgctaactctccattactataggttgaatgcagaagccagtctccactaccatggtggacctgggaaggtgacacagacctcaggagggaggattcttgagggctggcccagccatccttctgaattttcaagggagactccctgaatacaatctggtcatacaactgggaatactcagcaatcctggcaccaatggcgggccctccttgcttcttctcttccaagatggcagccaggtctttgtgcatggatttctgatgctgactggccggcggctgctccagctccagacttttcacttttaaaagttggcggccgca

SEQ ID NO: 153303 - DNA, 403 bp, Homo Sapiens
  misc_feature (177)..(190): n is a, c, g, or t
tttgagaacataaattttgtgttcatttattatcccactgaataacaaacttgtaaatcataaatatatattacatagtaaaacaaagattagaccaaaatagaccatagtaccttaaacacttcctatgaattaacatatggactctatcatatgttcctttagagaattcaggannnnnnnnnnnnnngaatttggaagccaacttaaaagctaacaataattatttacattttggtgtgtcattactacttgtataactccaaatgacagaatatgtagataaagaaatgtaggtattctgaagaccagcttttgagcatccttaagaagtcatgaagatattaactatgtctttgaataatgatttactgattaagaattattaaccggctgggcatgg

SEQ ID NO: 153304 - DNA, 258 bp, Homo Sapiens
aaaaaactcctcaattttaatggtagcacctgctacacataagacacaagagtcaaggtggaagatggaagagtgtggggtctgaagttacaaatctcaattgactcctggttcctgtcatttatgccctatttgatcttggatacttcataaattatctgagttctgggttatccatctgcaacatgggcacaattactggcacttagcaggcatgaacaaagaataaaacttgcctcacagagccaaagagattcc

SEQ ID NO: 153305 - DNA, 530 bp, Homo Sapiens
tacatggcttggctcacaatttaagtggttataaatatatatacatatgatatagtggtataaatagatttataaatatacatcattttttgctacactttgaacaccaacatgtaatctttgggcttagcagaataaaagatagaataacacaaagtctatcttgctggagcacatttactcggtttctcctctagagaagcaaatcattagataagacatcatttcctgcactactggacacactcaatgaggtaactgttgttgaacaactttgcaatgccctttcatcttccattaaattaaccataaaatgtaaaaacacaaatactgaggaaaatctgagttttacagaaaaaatacaattgatgtgttggggataggaatgttcattacccgcttttaccccaagatgactagaatacccgttttttgttgtttgtgtgtttgtttttaaagtgtggcatgagcctatctacctcgaatccttcctggtagagcgccatgtttgtgcaattttgacattaaaa

SEQ ID NO: 153306 - DNA, 356 bp, Homo Sapiens
caagtcttttgtgggaagcatatagttggctcttttttaaaaaatccattcagtcactccaggtctttggagaatttaatccctttatatccaaggtaattaccgacatgtaatgtaagaacttcctactgccattttgttaattgcttctagttgttttgtagatcttttgcttctttctctttctcctttcctttatgattatcttctgtactattatgctttgattccttactttttatcttttgtgaatctactttaggcttttcctttatgattaccatgagacttacaaaacccatcttatagtgataacaggctattttaagctgataacaatctaactctaactggta

SEQ ID NO: 153307 - DNA, 449 bp, Homo Sapiens
  misc_feature (290)..(290): n is a, c, g, or t
  misc_feature (312)..(312): n is a, c, g, or t
tttttagattctattgctttattgattattactttcattaaacaatgttagccatataggatgattaaaaaaacaactaatatccttggaatatgaacatcctattaactgatacaaactgactccacctttcttatagcagtgaattttcaggtcacatacaatcagtaatttatactccaaatacaacaatcacgtttgtattaatcatccagtacaattcacaggttcctattacacaggtggatgtacttagagagttttagcacaaaagctgatacaaatatganaagtgtgctcagtcgaatggtntagtgaggtggctacaggtgagtgtcggcgaatgggtatacctcctgagctccacgatctgggaagtcagttaaagggtgcccccctcctgggctgccttgaaccagattcattatcactggacactgagaccagca

SEQ ID NO: 153308 - DNA, 635 bp, Homo Sapiens
gcccccattatcctcctttctgtgtaaacattaattcattttctcccatctttcctacccagcagatcttaaagagaggaagagtttgtaatattcttcaggggaagccttttgagattgaaatatcatactttgaatgataactctatatctatctataatatactatggtttaatgtttggaaatcaaacgcagtatttatttgtcatgtgaactactaaaagtaaatctgcatggacttcttgcctggtgagttacacagaaaatgaaagtgattatcagtggctgtggcaagatgaaaggaaccatgccaggacttctgagggaaggaagagtgtttgggactgaaaaatccttgtctggatctagtcctcagccactcagaagctggcatgccatgactcaaagagccgcccgtctggaatgaagacagtgacccgtaactcccacttgaagagcaggtgcttggaaaatgctgccagtccgcaggaaaaagttgttactgctgctgtctgtgaccaagaggacactttatttcttgaaacaactgggggcaaactggctcccagataaggcttcagtccctactcatgtgaggaaaccagccctgcacctgagagccagtttgcagcca

SEQ ID NO: 153309 - DNA, 449 bp, Homo Sapiens
tttggcttttaatgaaaaaaagcattgatttctgttgtcttggaaatcagaggggtagacctggcttcaacggtggctggatttcagggtccgatgatataagggctcatctctctgtttgcttttggctcttgttcttgtttgttgttgctgctgtggttgttcatttattctgcctgatttttgttctcaggctaataaatgtaggagctctgatgtccactttgcagatgaggacgctgaggcatacagagatcaagtaatttcccttctgaggcagagtccgtggacttcccacagccccatgacacccccttatggctgtgtatccaactcaacattccctgccctgatcagggcgccccctgctgctcacccagagatttagccaaatccctacaccaatctcctccaccctttttgactcccaaatgcttcttgacacctga

SEQ ID NO: 153310 - DNA, 698 bp, Homo Sapiens
  misc_feature (109)..(151): n is a, c, g, or t
ctctggttatgttttatttctttacatcaaaaatatgcagagagtcagtgaaagggccactgataaattctaattatacagagtatactatatcacttatctattgctnnnnnnnnnnnnnnnnnnnnnnnnnnnnnnnnnnnnnnnnnnngtgtctgcaattcaggctaagctcagctgggcagttcttctgctggtctcgcctgggctttctcatgagacgttagttatctggcagcttgactggggttggagggtctatgatggccttactcacctgtctgaagcctaatgcgggctatagactgggcctctctctcacagggtcttttatcattcattagtcttgcccaagcttccttacatggtggtggaggatgctatgagtgggtgggcaaagagagaagctacaaagcaacttatgcctaagttctggaactcatgcaacatacattttgtcatatttccttcatcaaagcaagcataacgccaggccagattgaaggtggggaaatagactccacctcttcgcaggaggagctacaaaatattgtagccatgattttcaatcagctaaatactccatagctaacaattctcagttgtatcgattgactaagtttcatttagaaatattttttatataggcacgtgatacacatcctatccagggctctaaggtgctgttactccaactt

SEQ ID NO: 153311 - DNA, 478 bp, Homo Sapiens
ttctcccataatgaatgaagagctatcaacgtgcctgacttttgtatcttgaaggaatgacttctagtgtgtttgttcatacttggttgttgggcaatcattaaagagatttagtctagcagtccagataagagaatctctttccatttatttaatcacttcacagtcctgggatacctagactttgagtcattgctgaggctatatcgtcactttagagttgaagcaacaaaccaagaaacttatctctgaggtcatctgttcctcttcacctcagctttcatgagaggcttgtcttaaaactgagatatatatattcttagaagaggcatggtgaacatacggaaatttaaacctcagggtaacagttttccttgtacagtaataaagatgtatctggagtcagtggctacaggatcaaaaaatagatcacagtaatcggatcaaacctgagaaatggctttttgctgtgtttaaa

SEQ ID NO: 153312 - DNA, 540 bp, Homo Sapiens
tttagtaaatgaaattttttattttaaacacacagatgggtgttatgcacacagtttgcagtgatttttgatgaagggaaggttcattccctcccacaaacacccttctggcttaatccctcctgtaatacagggtttctctacattatactcatctgtcttggcttaagcagtaacacctgtgcctgttgaagcgccttcttcctaagtgtctggctttgtgtactttcatttgcatacagagatctgtaactgttaaggagcccctgccctctcacactgtggatactgtcagtgcctacctttcactgagatcagcgggaaaaacctctggaggttgggtgctgcccctggcatcttgcattaatagtttacagcccgcggtccccacatcccggctgcttctgccctgtgttgtgctcctgagagatgtgttggtgtctggccgaaaggtccttttggtttccagggtaccataaatcctcaaaattaatgggcaatgcaggcccttaccagctcctcctcctgtgtggtgacctc

SEQ ID NO: 153313 - DNA, 551 bp, Homo Sapiens
  misc_feature (372)..(384): n is a, c, g, or t
caatgttcagcataccaattcaaatatcaaaaactctaagaagtcctgtaagtaatctgtataactttatataagtcaatattttttcaacttatcacatttctataagtcaaagacacacaatttcacagtttctgaaatagaaataaatctttacaatttatgtgtacaactgttgtgatggtattctttgtgtgcctagaagtgattattaagctgtagtgcatcttatccactgtctcctcaaatcaaggaattatggaattttattgcagaaacttttgtttgaggctcatagtctactaatacctcagaggacccaggtgttgtctgctgcttacaatggtagtccccaaagtggagtgtgtgggnnnnnnnnnnnnntcacaactttaccattctttcataatttttatatataggtagctatctatctatataaaacagtatacataatatatagtgacaaaacaaatgtacacagcatataaggacaaacaaatctaactatacatataaaacaatgtatataatatataaggacagtagtt

SEQ ID NO: 153314 - DNA, 473 bp, Homo Sapiens
  misc_feature (90)..(119): n is a, c, g, or t
ttaatagttttcagtagactatcaagagatgcatgatacagacatttccccatgtagttttcaaattttatactcaagtccttatattcnnnnnnnnnnnnnnnnnnnnnnnnnnnnnntcaattgtttaaaattcagttttctttacctgaagatatgaatgtatgaattattagagtggttatttaggaggaaaagcgtgtaaagttaagtttttagaatttagactgtttgaaactctgaattcatgtcagtcagtagccattttaaaaccctacaatgacttcatgttccttgctttaatatttccattgtagtgactaaatattggagccaaaattccattagttcaatttattttaaaagtttctgatttgtatatctgtacagataagaatcttaattgaatgacagtatctacaagttttatacctgtggcagatactgtattagcatctatagtattagggcaa

SEQ ID NO: 153315 - DNA, 665 bp, Homo Sapiens
acataaacataaattctactggagctcctaaattatttaggaaaagttctccaatcccataacactcccaaggccctttcggttcagtccattttccttttttcgcctcttcaaaccacctttctgcttcccttattctcaattccacttaaaaacccttgacccagcactattcatcggccccttccagtacaatgcagtttgcctgtagaagcttccagaacatttcctctccaatgtcccgcattttaggcctcccttagccctcatgggcttagccagttgcttggcctcctccacctgtctcccttcagctccctgctcctccttccttgctagagcaatgcagtcatcccccagcccacctttcagcactaattacaccgcccattggcttctgagatgaggcagccttagacaacgcatgggcttttcttccatcttgatccaaactccatgaagatgctcaggggtgttccggccgcttccatgtgtcacctgcattcgcagtggacgtggctagaatggaggtgtggtttctccacaagcccctcttctcccgtgttttccatcttagtcaacagcgctaataccttcccacccctttgcttaggtaaaactctagcaggtgccttggacacttctctctcccaggtctttgagaa

SEQ ID NO: 153316 - DNA, 483 bp, Homo Sapiens
tttgatatgattctatttattataagtcaaatagatataattcattatgagaatgaaatgaattattgttaatagttatgagattaacataaacaatcatcgtcgtgtattgccagaaaagttattaagatggtagcagttgttctcgtgtctctagcacatcccccttcagagaaactttcaaatagaaaatgaaactgggcatctctgctatgcaaatattggtggctgttgtcatattcctgcaacagcccttgacagtgggctgggctgggtgctgttctcactttaaatccggggagctgaggcttggaggaataaagggaacagccccaggacttgaacagagcccttgggtcacccatgtctctactgtagcttccaggccgtttccccttgggatccaatgtgtttcctgttgtccccaatcttttaaattttttttccattattagagtagtaccagcagccagggtggaactg

SEQ ID NO: 153317 - DNA, 369 bp, Homo Sapiens
tttacaagtttatgaccttgagcagaatgtgactgggaatgaagttctcagtgggtgtttttccttgtctcttggcaaggaccttgggattaacatgttacatgctgagatgccagtatttttcattttcatatagtccccacattcacatgaatgacatatctgtccaggattgaagggaaggttgcctatgttgagctgctgggagatggtgctgcatattcaccaagcctcttcctaatgagtggactcttaagggttattttgatcagagatttttgtcctgttcgggctttagaacttaacctgccttcaagacctcactcactataatcacagcaatttcaaccacccgaatctttcccacca

SEQ ID NO: 153318 - DNA, 548 bp, Homo Sapiens
ggtatgcatgtactttatattgacaagactaagaaggttcacccaatacagggagactcccatgtgaagacaaatcctaatcactcctctgtcatgcagaaatgtcttgtaaatccttgaattacagctcctttgcttcaaggatttaaagctctatattctcccctgtctttggcagcagcccgagtgctcaatgggaagacctaagcctgaggttcaagccccaggtctgtcagttgccatccgtgactttgggtaagtcatgaattccccaggtctcggattttttagctaaaaaacgaggataataccacttcttccaacctgtcagggttgttgagaggatgaatgcaagcaaacttttgttaagtacacttgcctaggcatggtaggatccaaaaattagtaagacactggccttatcagactcatgcgcttttagggtgtttagacttcaataggtaacttcattatgatatgagaagaaacagcttagatctaaagtgttctgtaaactctaaagtgttatatacttgtgaaaaaagaaa

SEQ ID NO: 153319 - DNA, 549 bp, Homo Sapiens
tttcactactgttttgacagcaagaaaagaattcttcttgaaggtataattaacctatcacctgttcctatgtccaggatagaagtaacacaagtactgcagcttgttcatcatgtcacacaggagcatagatccaggcaaggaagtggtattattggaaactgtggagaaggaaatacatgcagagtttgatgatataataattttccaaacttattatttatgccatgggccatttagattcttatctcctcctaggaactttggaggtgatgccaattttacaaatatattctccaagtccactaatctacgcagacgtttgctccctttccattgtgagttgaaagagcacctattgttggtagcgaacaactttgagagtttaacaaatataaatacactcaaatatgtttcctaaattaccagaataatggaagcactagactctctgtccagtttaaggccttggttttatacctctgagacaagggacagttggtgaggtataacttttatttatgtatagtaagccaagatttatgtagt

SEQ ID NO: 153320 - DNA, 569 bp, Homo Sapiens
cctgtagttcagtgagaactgttttatgcctcttgttacattcaatcttttccactcgtgttttcaattctgccagagtcttatcaaatacagcacactgcagcgcacacaatttttcttccagcaaccactgtataaccttttgaagtttctggttaatgtctcctttggctgtaatctttacttgaaattctgcctcatattcttcttccatatatcgacgacgtttagactgtacattgtccatgtcttctgatttagaacgttttcgtctagaaaattcatttttctcagaaggtctttcatcatcttcatgtattacttgctcttcttcctcaggtttgttgtccttttcattactttctacttctgctggagagcacgtttcattttgcgatataacttcagactcatctttttcacccgaaatatcctcttcatcagagaggaccagaaaggcttcttttggcaaactctcactactttcttgtttagatggtgaaccaaaagaactttccattttctcttccaaatctggatttgtctcatcgattggaaggagagatgtt

SEQ ID NO: 153321 - DNA, 549 bp, Homo Sapiens
  misc_feature (53)..(53): n is a, c, g, or t
cagttacacatttgggtgcaggagttgacactttacaattgctcaggcaaganagtattttatcatttgtggccagatggagtcctttgaacagtgaggcataatatttgtcacccaattcctgttggaaaaaaaccctttgagcctctgacctagatattttaaccattgtttgctttaatttgtgttgatggtaatgtggctgtgaacgacacggaaactggtggacagtcatgtcaaggtctaaaaccgtgggttccctataccccaagacagacagaaatagctttttgtcctgtctagtctaatagactcactttttagaagacgggtctcctggaaaccttggatgttgctaattgacagccactaagtggtccttccttgacagaatatgtgagtgatctcagcctcctcccaggagcagcacaacccactgctggagggtgtgagagagaatatgaagactgctggacctcttttttaagggccgatttcttttagcagaggggaatatacttgtaatctattccctttgtaatcatgaaa

SEQ ID NO: 153322 - DNA, 510 bp, Homo Sapiens
acccacagaatgagataatttttttaaaatcatgtattagttaagggaggaatttgtatttagaatatgtaaagaactgttacaataataattaaaaggcatataattcaatttttaaaaatcaacaagagatctgaattaacagttctccaaagaagatacacaaaaggccaataagcacatgaaaaggttctcaacatcactagccatcagggaaatgcaaatgagatctacaatgagatatcacttaacactcactggaatagatatataatcaaagtgataatatcaagtgttggtgaggatgcagagaaattggaaccctcatgcactgttggtggatacccacgtgatataaaaacaaatgtctacacaaaaacttgtgcacagatgttctttgcagcattatttataatagcccaaaattgaaacagccctaatttctatcaactaacaagtgaataaacaaaacgtggcatatccatacaaggaatattattcagcaataaa

SEQ ID NO: 153323 - DNA, 674 bp, Homo Sapiens
attttttatacaaaggtgatgagaaaaaatctcatgcaaactccgggcatacaataaaaataactcaaatattaatatgatgattttgtacaaaataattcttttgaagtaggaccggtggcaaccaacacggctccctgctccaggccgggacgcccctctgggaggaacgcgcggccacccttggaaacctgtaagtgatccacggtccaggtgtggaatgctcacagttgtcactatgatgaatgatgaaaaccctattgctgctactcagaaacgagactgagacctagggacagagtaaggaattcctcaacactgcgggaatcctggaggaacgaagtaattcacaaaggttttcagaaaagttttcgccaatcgtcttaggtgatgacacaaatgccttgagattgttacagaggctcccgttcctgcttccccacagtcctgcagtggattgataatttgtgtatattacaagtaatttgcataattaaaacaattaagggatcgacgtatcacggtgattagaaatgcatcaaactctgaatgtacaaaagagagagcttcaatatgaaacagtaatcctctgagaacgaagaccccgcagtgccggtgcccgctgggccgtgcaggtctcggccgccccacgcccgtgtccgtctccaccgtga

SEQ ID NO: 153324 - DNA, 502 bp, Homo Sapiens
aaagatgtttttattgttgaatagacactacggcattaagatttccactatgatgggtgctcacaaatgataggcctcttaggtaagaagctttaattgacaacattaaatatgcggggcggggggagtgggtgcagagtctctctttcctttgttagggcatcccagtgacagaaacaatgcctgacacatggtacgctctcgataaatattcgttgattacataaccccctctaccacccaataacttctcatcattcattcaaagttactgaacgtaccatattagcgaatctgcaatggaaacagtggaggctgttttctcaaaggattttctaataaagcaacaaatctttttttaaaaaaatgaatggtgtgccccaagtcaatgctgggcttcggatttctgcggtagtttggcctggggtcctcactgggatgctggctggggatgtgctccctgcccttgaatctccttcctttgtagtttttggcggccgca

SEQ ID NO: 153325 - DNA, 545 bp, Homo Sapiens
tttttgcttttagatttaatacatatacggacgattgcacagacttaggggagaatccatgaatggtttgtgtgtagtgtccctatctatcaccattactttatcaagaagaaacagttacagggttgtgagtaaaagatggggatcagcccctgtaatctgccatactaatcgctgtggcacgtctcaccacatttgagattgagacataaatggaaacaggtgacttataatgggcatttcctgtgccagatgtttgttcaatgccattctaaacagtgtgagcctcaacaaacctgcaggtttaggtgctatttttcctattttgtaagaaaaggaggcaccaggccttcccctgccatgtatatgaaggcttgtattacaagttcttttgacatatttctcacctgttttcctctgggccagtatgtattcatgggcactgggagaatttacattctgttgatgagaaaccatataattatccttagcagcaagtgctatagaaaaaggaaaggcttggaggatagcttccagcatttaca

SEQ ID NO: 153326 - DNA, 332 bp, Homo Sapiens
aagaaggaaaactgttccaaatgtattttatatgaaaacattctttattccatcttttgaaatttggaataagacaaagttttcatgcttaaaaatcacagaatctactgaaggtatgctattattcctcgagtatttatgcaagctgtctgcatgatatcctgacactattctattaattgaacttgaatcgagcatttgtatctatcataggagtgaagtaatttattggccattgataagtggtttggctgcaatgtagaaactacagtatgaagtgttttatgtctgcattgtcttaataataaaaacaagaggtatttatagaaaaa

SEQ ID NO: 153327 - DNA, 511 bp, Homo Sapiens
tttcccctgttgtgagttatttgtttcaactttcttggtttcaggtttttttcctaaatcgttcacatacggtacaatctagtctggtgatattgaatggaatgtggggaagggtgtgagctgcttaaagaacatggggataaattcacaggtcaagtacagatcagttacatatctgagatgaaggcctctccttggacctcacaggctcggcccacattgattctgaaaatgcccttgttatttgggaggcctgctttgcttcaaccacccagctgttattaaggcattttggcatactaaagcatattggggggaaaagtaaacacaaactcaattttctgctttgcctggttccgtaaacactgttattagcccccattgaagctggcagctctcatttaagtggacagagcattgggttcaccatagacgtcatcataggccaactctaatttgtggcattggctttcacaggcacaaattaggtcacctctcctcattgcattgt

SEQ ID NO: 153328 - DNA, 463 bp, Homo Sapiens
tgtctcagtagcatagtttgcatgatatcaaggaggaggaagttaaaagtttcatgtttacttctgacatactaacattacatcttcaagttaaaaacattttagaagtaagttcatgaatttatattttctgaaacattttcagattcttaagagaaacattttcattaacccttgccagtacatttattattaggttctataaattccatattaattgttttacataggccaaagtctcctgctattgtcactcaaccatttctctgtatcattcattcctaccatatacttaggtttaagttaacagaaatatgttgtagtttttcctgtaaataagacacataatcggctggttggaaggtagtgagttatgttaattgattgttcagtcagttacagatcgtactctttgttgtcgtcttccccccgcttctcactgctgcacttgactagtctgaaa

SEQ ID NO: 153329 - DNA, 255 bp, Homo Sapiens
ggccgccaactttttttggaattaaaaaaagttttcatgaaaaaataaatacataattgaaaagccaacatgattgctgttcactacacccttttggcagtattctatgaaaataatccaagtctgtatgtaagagctttcagaaaatgatacatagctaagtctccaaaaaatgctaataagcaatgaccacaattaaatagaatgcatgaaacaggaagcttaagagaccaagctggtcacagtggctcacac

SEQ ID NO: 153330 - DNA, 348 bp, Homo Sapiens
tttagccttgtaattttttagttgaaagagagatattatgtatcaggtaataggcttttattatgcggctttatgttaatttggctaggagctgggttgtgtttaatgcttattgtagctataggtgccagagacttcagtttctctagtgtttttttctctcctttcctattgtctttgggtttccttatgaactccttaaataggttctgtgccttgtagctctctcacttataatcttctgttattatactggagccctgttgatgtggtagtaaagtgttggaggagaatctgtttatacttttatgattaaatcttattcttttagtggcctgagcctctgga

SEQ ID NO: 153331 - DNA, 560 bp, Homo Sapiens
tttagttgagattaggatttatttttgatgtacattctgcagatttgaacaaatgtatagtggcatgtatccaccactggagtatggacagagtagtttcactgacttaaaaatcctctgtgcttcaccagttaatccctccctcctcattaactcctagtaaccactgatctttttactgtctgtttttgccttttctagaatgtcatatagttagaaccatacagtatgcagtcttttcagattagcttctttcacatatttatatgcatttaagttgtctccatgttttttcattgtttgatagctcatttctttttagcactgaataatcttccattgtctggatgtactgctgtttatacattcacctactgaaggaaatactggttacttccatgtttttgtaattgtgaataaagctgctcctttgtattgatgccaatgagtgcgattgctgaattgtatagtatgtttagttttataagaaaccactgacctgtcttccacagtggctgtaccatgttgcatctctaccggcaatgaatgacagctcctat

SEQ ID NO: 153332 - DNA, 312 bp, Homo Sapiens
tttccaaatcgcttttggtaactttacttttcaggttcacatatgttaacagaatcaatacacgatcaacttgttaagtgatgttaccaaatacttatttggcaaagtacatccttgatcaatgccttagtgattctatagctaaaatattagatgttttattttggggggagtggggaaatagcatagaccgtcatttaaaccttcagacaattagtgactgtgttgtacaaaaaagatggcgaaagccttatctagataccaaaattcacatgtcatccaacctagcttactcttattttttccatcagt

SEQ ID NO: 153333 - DNA, 513 bp, Homo Sapiens
tctgaacaaaaattttggcaaagtaaatttgtagcaacagacttaacatgatttattgcttatgttgcccatttctgctaatggaaaagataatttaaaaatatgtggcagaggacagatattagaaatactttttggttacagaaaccattgtaaactcatcctcatttataaatggtattatgctagggagtaattggactaggaatgtttaaagataagtaaggaaacaatgtgtgctcaatcgtcaaagaacttagttatatcattgggctttgaattatctaagttgattacataattctatattcttaaggagtcttaactcggtacttgggttaacgccagaaattacttttaattcattgtttttttcactgggatgagtagaactctgcttttagtaaaagtgacagaatataggtaaaatggatgatttgggatcagagcttttcatcttgatattttagcctgtaaaataaacagctatattgttttgccctttaaaaaaaa

SEQ ID NO: 153334 - DNA, 340 bp, Homo Sapiens
tgcggccgccaacttttagcctattcttactgacctagagaataataagctctttaaatgacacccttaatgaaaactgtcacataattttcctctaaagtcagcgatattttttaacaatcatattctttatagaattcctaaatctgggtttttgaaaaaagaaactagtgaccatttaaaattgttggctctattcccactgcttctagtggactagcctgaaaaaaatatttttccatgtctgcgtatattttataccttatataatgtcctctctgaaatcatggaggaatttaagaaggagaaaattgataatcatacttacttagtttctttg

SEQ ID NO: 153335 - DNA, 416 bp, Homo Sapiens
aggtggctccattgtagggcggggcacacagacacatccatgcataccactctcagctgcccctgtgtcctcctgccacacccatgcccatagagacacaccactgccccccagctctccttcagccaagtacccggcacacccagacccacaccaaggcccaggcaaatggacatccatgcctgcacttgcgtgccggtccctgtgtaagccctctctggacccactgcaggaaacaagggcaaaggtgtggtgtgcaaagagaaactagtcagaaaaccaggccaaaaagataccctgtgacctcccacacctgcacacacacccagagctagcatagaggctattcccagcagccccagagtcccagtggcggtgcctgcttctctctttccagatcgggatctgcggccgca

SEQ ID NO: 153336 - DNA, 437 bp, Homo Sapiens
tttttgccatgccaggccgtctgtatttataggagcgattagctggtagttggagaggggggcagttaaagcgcttttcagctccctcgccgctcctccatgttcacacaggtgaggccaaacccaccatgcttcccaaagttggagaggagagtgtccgagccctccgaactcccagtcttggcactgggggacagaagggcttcccaaggggtggtggccagtatctggccccaaggtcccggagggcgcggtcgctgggtaacagcgacccctgctggacgacgggggcgacggcgaggctgggtccgggtattcaccaggagcttgtcgcctcaagtccgcgcctttgcctgggttatctctgtctgtctctgtatatgtttgtcggcacatttgtgtcgccgtctcgctgagtcccttgctggcacatctct

SEQ ID NO: 153337 - DNA, 482 bp, Homo Sapiens
tttttttgcagctgcacagacaacacactaactttattcacactggtacaaaagtagttttttctagaaatgttctcttgcgccagaaggagagaggttgagcagcgcatggtgggagggtggtgggaggaggctgggcgtgaggccagggagggcagagcgcccaagtgtgagtcagaggcaggcccggggctgagaagcagggggagccgggtgtggcgaccctccaccccattcttccatactggagcatagggggacacacacagatgttcagggaactcccagaaccccaggagagctacaggagagccaggccagggaatgtaggcaggagaaggctctgggtagaattgctacccatgtcctttcctctcctcctggctgcagcacccccatgggatgccctgggctctgggatgccccaggctctggcatgcgaggctgggcaggcgtgccccttctggctttcccttcctgac

SEQ ID NO: 153338 - DNA, 542 bp, Homo Sapiens
tttaactcatcagttattgttagtgttagtgtattttatgtgtggcccaaggtaattcttcttccaacgtggcccatggaagccgaaagattggacacctctaccctagattattgagctaataatcttcattatgactataaactcagattatatttcagagtttttacatatttatttagtgcttataaagtatactgtatacagtgttctcctccattcctgctttgtttctccacaaactacatcagaaataatattctaatagaggtaacatagaggtttagaagagctgccagtcatgtattaaagatccagaggcatttctagaactgtagtctgattaccattaccttagcccttggctttttcacatactgatgttctttatctttttctaggattcagacatctcagaaaatgatatacaaaagttgtgtaaaccctttctgtgaagatatgaaacctatttatggccccaaggtcagaattcctgattgaatcctcctggggcctgcctccattctgtttcttatactctc

SEQ ID NO: 153339 - DNA, 505 bp, Homo Sapiens
tttgtagcaactgtaaatggtattgtgttttgaattttggttttgatgtgttcacagtatttgaaaatgtagttgatttttgtgggttgacattgtgtcttgcaaccttactaaactcaattattaactctagaagttttattgtagattctttgggattttctacatagacaatcatgccacctgcaaattgggagggctttattttgtcttttccaattcaagtgcccatcatttctttttcttgccttattatactggctagaatttctagtactatactacattgaataagagtgatgagagcagctatccttgccttgtttctgatcttagtgtatctttccctttttctgatataagcatttactgctatttgtttccctctcaatactcctttagctgtgtcccacaaattttgatatgttgtatttttattttcactctgattaatttattttttgctccatggattattgagaagtgtgctgctttgtttccaagt

SEQ ID NO: 153340 - DNA, 697 bp, Homo Sapiens
  misc_feature (674)..(674): n is a, c, g, or t
  misc_feature (686)..(686): n is a, c, g, or t
acttccgccacctgattattggtatgcagtatgcaggcctccccagcatcaactcactggaatccatatacaacttctgtgacaagccatgggtgtttgcccagctggtcgctatctataagacactgggaggagaaaagttccctctcattgaacagacatactaccccaaccacaaagagatgctgacactgcccacgttccctgtggtggtgaagattggccacgctcactcaggcatgggcaaggtcaaagtggaaaaccactacgacttccaggacattgccagcgtggtggctctcacccagacctatgccactgcagagcctttcattgactccaagtatgacatccgggtccagaagattggcaacaactacaaggcttacatgaggacatcgatctcagggaactggaagacgaacactggctctgcgatgctggagcagattgccatgtcagacaggtacaaactgtgggtggacacctgctctgagatgtttggcggcctggacatctgtgctgtcaaagctgtacatggcaaagatgggaaagactacatttttgaggtcatggactgtagcatgccactgattggggaacatcaggtggaggacaggcaactcatcaccgaactagtcatcagcaagatgaaccagctgctgtccagactnctgccctgtctnctcagagaccc

SEQ ID NO: 153341 - DNA, 557 bp, Homo Sapiens
tttaaaacacaataaatttattatcttacaattctggaggtcaaaaatctgacacaggtctcactgtgctaaaatcaggatgtcagcaggggtttttccccttttttactaatgtgtgatagatgttcatagtgtttagaagtagatatgatcatataatacattcatataatttgtaaagatcaaatcagtgtacttgggatattcatcaccttaaatatttgtctttgctttatgctaaaaccatttgaattctcttctagctattttgagatatacaacacattactgtaaactatagtcaccatactaatataacattagttctcagttcttctatcaaaccatatatttgtacccatcaatcaacttcttttcaaacccctcttccaccctacccttcccggtctctgatgaccaccagcctactctctattttcatgagattcacttttttatgtcccacatgagtgaaaacatgtgttatttgtctttctgtgcttggcttatttcacgtaacataatgacttctagttccatccatgttgctgcaaaag

SEQ ID NO: 153342 - DNA, 1179 bp, Homo Sapiens
  misc_feature (64)..(64): n is a, c, g, or t
  misc_feature (120)..(120): n is a, c, g, or t
  misc_feature (206)..(412): n is a, c, g, or t
  misc_feature (430)..(743): n is a, c, g, or t
cttgatgctgatttgtctgcagggcgctatgaaacccgcagcgctttacgtctgcttgtggctntgtcaattttctgcgtatcctgatcttgatacgtatacgcttgatggtgtacgtcncgcacgaaagacgaggcacgatcatggcgagagccgagacgccatacgcaacgcctttcccgcgcgtgccgatcataatgcagctnnnnnnnnnnnnnnnnnnnnnnnnnnnnnnnnnnnnnnnnnnnnnnnnnnnnnnnnnnnnnnnnnnnnnnnnnnnnnnnnnnnnnnnnnnnnnnnnnnnnnnnnnnnnnnnnnnnnnnnnnnnnnnnnnnnnnnnnnnnnnnnnnnnnnnnnnnnnnnnnnnnnnnnnnnnnnnnnnnnnnnnnnnnnnnnnnnnnnnnnnnnnnnnaagaattcggcacgaggnnnnnnnnnnnnnnnnnnnnnnnnnnnnnnnnnnnnnnnnnnnnnnnnnnnnnnnnnnnnnnnnnnnnnnnnnnnnnnnnnnnnnnnnnnnnnnnnnnnnnnnnnnnnnnnnnnnnnnnnnnnnnnnnnnnnnnnnnnnnnnnnnnnnnnnnnnnnnnnnnnnnnnnnnnnnnnnnnnnnnnnnnnnnnnnnnnnnnnnnnnnnnnnnnnnnnnnnnnnnnnnnnnnnnnnnnnnnnnnnnnnnnnnnnnnnnnnnnnnnnnnnnnnnnnnnnnnnnnnnnnnnnnnnnnnnnnnnnnnnnnnnnnnnnnnnnngctaccatctcagcatctgtggtgaggggaggggtgccacttcctctttgcccagcgagagggcgtactctaccccagagagggaaacaccatgcccacagtgcttggttttgcactcaggtgtgcgggcagcacagcaggcctcaccttgcagcactctgggcacaatgacactgtccactggggagctgcagagcttagcagctggctgggtctgccctcgggggaggggaggagtttgcaaaaaaaggaggccctgaggtgaggatatctgggggcccaccagacaggtttaaagaggaaacctcttcattcacagcttcgttgaggggttcctggaggacgtctctggattcaagtcccaggggttctggttgggactgtcagggcgaaatgaccagcagatgctgggacagcaactgcccgcagactcggg

SEQ ID NO: 153343 - DNA, 462 bp, Homo Sapiens
cgttactcctcattggttgagtttctttccagcgtgttgatgcctccaaagctcagtccggctgtgttctgtgctgccgaggctgtgagcactgtgtgtaagagaatcagtacaagaacacacagcttgagtctgctgttgcacagtcttgttgctgatgacactgtgagcgatgtcctgtgacaggagccacttttctctacggtccctttggatgggttatttgatttttcttctctcctgacgtcacagcattctggttcatcattggttagaaaggtttcataaagccctgtacagatgaaactggagaggcctccgtagatgacttcatcattgtcgggcaatataaatggacacctcgtctgaacctccaaacagtattgcttgcaaggaattgtctttctgcagttaaactgtgtgacttcaaaatactgggaacagagccaggctttgtagaca

SEQ ID NO: 153344 - DNA, 564 bp, Homo Sapiens
  misc_feature (30)..(30): n is a, c, g, or t
  misc_feature (38)..(38): n is a, c, g, or t
agacacagcgacagaggaggagctgtcatntctgatanatccatgatagaagcattgctgcacctcgggtttctgagtctctgaagcaccatcttttccaagtacctggacaataaagtgactgctcaaaatcgccgagggcttaagttctaagtgcagttcctgtccaaatgctgaaaatcggtagtgcagggagcttctggcattctgcgccgatcgctttttcctgccgttgtgcaaaatgtcgtgtgaaatatatgacccggctgagtctacttctactggcgtgacaaagacgtaatcatcatttaatccgctggcgccgctgctgctgtcactggctaaggccgcggcgaccgacgcacagcagaggcagcacagctggagcgccttggccacgcgccccagtcccgccaggcccctcggcgggcccgaacccgcagccgggaaggcacacgcgagcaggagggcgcactccatggtcaggtgcggacgcggcggctgcgggtggccagacgcggcaggcggagcgcacgggcggcgcgcattctttccgcggccgca

SEQ ID NO: 153345 - DNA, 176 bp, Homo Sapiens
aacccacacttcttaatgttttaaggaaatgtgatatatatataaagctttgtactataagcagagttacaggtaaattaacattctaacaataaatattttaatacatttaaattattgattacatctatttccaattgcctatgtgtacatatttagaaggatattggctgagg

SEQ ID NO: 153346 - DNA, 524 bp, Homo Sapiens
  misc_feature (487)..(487): n is a, c, g, or t
taagggctgtgggtttagaaattaatctcctatccaactagatgcagaatgagttcccagtttccacagtatggtaggacgtgcattggagaagttcttctcttgaaatgagaggatcgatatgttcgtagattccaggtgatactatgctaattgtaaacagttgttgttttttacagttgctccgtaaagactgggtgagtatcctgtaggccagatgcctggcctacaatgctgtgtgccttggtaactcgaaagcatatgctgtgccttcctccagagaccactgtgttccctcccagggtggtgtgagcatcctctccaggagtttttattagcagttttcttatgagggagggtcagcatcaggagcttggcattttctgtgaattgttcatatttgttgcccatttgcttttgggatgttgacctctatttagattgatttgtaccttttttataagttagccctttgggtaagagttcncaagtatttcttctggtttgtcagtttctccaccaaa

SEQ ID NO: 153347 - DNA, 297 bp, Homo Sapiens
ttttttacgttaacgaaagttttaatacacatttgacttaaagatgcatacaatgactactgaatctccattcataggcagccaacaagatacgaatgaatttattaatttcaaacaaaatttcaggtagtgcacttaaaaaattacaaagcacttgaaaatggaaactaacaatggaagcaacaatgactataaaacatgatgggataactttaaagaaagggttcaagtattgtttgtaaagttcttcagacactagtctttgaaaagtttgtgcatttcccatctttgcatagt

SEQ ID NO: 153348 - DNA, 540 bp, Homo Sapiens
tttaagtaatgcacctttctcttataagtagattttattttttaaaataagaacttggcattgaaacatgaaacttgagttttgaaaactaccctccaagatgctgaagtatgtttactttttctttgtaaaagggggcttaacctatgtttcctgaaggtctaagtctgtgcagataaattatatgacatgtatctgtttttaaaacactctatatgctggtactcacatagaaatagaagccagaatgagaagcctcccaaattatcccatcctgacagcccttccctttttcatttcctgtttatgataaggcaaagttcttgcctggaagcacaatttaaccccttttaccaaaaccaaatccaaatctctttggaggaaaaatccctaaaagaactggcagggtacacatgctgggatgtgggtatgtcaatactgttcttcctcacagtatgctgttttaaaattatttttttaaaaaaggtcaggtattgatgtatcttcagaaaaatacccaccctaaactaggttacattt

SEQ ID NO: 153349 - DNA, 505 bp, Homo Sapiens
cagttagccagactcatgtgtggagaattaataacagctttgttaggcactgatccagactaattctggaaaaacctggttgtttctgtgaagcatgcatgattcacaaaatttgccaccctcaataccccaaaaacccaacaatttcgtaacatactcttcattagctatataaaaataatctatgtcttagattcgtgcttgacttcaaattcttagaagtaactaaaggactttacattctcttctttgatttaggttctgtataattttagatcactcagcttagtcaagtttgaacaaaataataaaatggtttggccaaattttataggcacacaactcaaaatgcaaaaagcagtgaagaatgtaaccatctccaccttcaatacggggcaatgctgttccctgctcccctcaactgtactgccggtactcaccaaacagcactatggatatgaaaaccttagactttaccacaatgcttccaaatctgctgacttgg

SEQ ID NO: 153350 - DNA, 427 bp, Homo Sapiens
  misc_feature (143)..(169): n is a, c, g, or t
tttttttcaaagcttcaggtctgatttattagccactttagtttcataaaactcagcatttctattaaaataaaatgatgtccaaaaggtttgcttgtttttaagaaaattgcatttaatacagggcaagactttgttatggnnnnnnnnnnnnnnnnnnnnnnnnnnnaacaaagctcaaattctcctgacttcacgcctgttactacagctggagggaaaccgatttcagaatctatctgatatgtcggatttctttgtggcatccacttcatcgctcagcagccagccatgatgtcataagcccatcagatttccggtagggggaaaacgctgcccccgggttgctgaagggtgcctcggtcacggggccgcgtctccacaggctcaacagctgcgagtccccgggactgccgacctcagcctt

SEQ ID NO: 153351 - DNA, 308 bp, Homo Sapiens
tctacttcttctatatacatggtacccaaattcatactaagctgttttctaggttgcttaagtgcaccctcccacccagcgcagcagccctgtgccctgtgtatgtgtggggagggaggtttaactctttcatgctacacctacgtagtctatgaactaaggtgataacttatacagatggtccccaacttctgatggtgcaacgtcatgacatattgactttatgatgatgtgaaacagttgcaattttgatgtaatgtacagtattcaattcaataaatgacagatattcagcactttattataaa

SEQ ID NO: 153352 - DNA, 533 bp, Homo Sapiens
agtacatgttgtatgattccatttatatgaagttctaaaccaggacaatggtttcctttcaaggttgggatagggcaaaggcaacattgattagaaaagcatgcaaaagaatttttcagagtgatacaatattctacattttaataaaaacttgtgtgacacaggtgcgtacatttgtcagaattcatgaaatggtacatgtaagatttatgcatttgactgtataaaaggttttacctaaaaaagaggaaacacatacacattttaagcctctgtttccttatcagtgagtcaaataaaaagtgtcatctttgtaaagcataatgcctttatatagcattgttccaaaagtgacaataatccttcaaaacctggacattttttcaaaacaaaggatcggtatacctaatatataaaaagctcactgagagaaaccactaaacttcaaatagggaaatgagaaaaataaataaatttaaaattctaagaagaaatgtacatagccagaaaccatgaaatcatgttcgaactca

SEQ ID NO: 153353 - DNA, 421 bp, Homo Sapiens
  misc_feature (45)..(80): n is a, c, g, or t
gaatttataatgattcatcgttattatttgggtcaacttaatatnnnnnnnnnnnnnnnnnnnnnnnnnnnnnnnnnnnncaggttcaaggggtacatgcacaggtttgttacatgagtaagttgtgtgtcacaggggtgtggtgtacaggtaattttgtcacccaggaaaccagcataacacgcaataggcagcttttcaatcttcaccctcctgccaccctccaccctcaagtataccctggtgtctattgttcccttctttgtgtctacggcacacacattttctagaagttattgtgttaagggttatatggaatccaaaagtattaatggcaacagtccatgtccttttaaatggattaatgttgacggtaacctgatattgtctaggggaaaaaaacagatgacaaagattatgc

SEQ ID NO: 153354 - DNA, 439 bp, Homo Sapiens
ttttcaaggggcttaaaaacaatcccaacttttattttattcacaaattggcaatttcggtgaggcttagtggggagggctcatcttgctccactccattttggtcagctggggcggcccaaagcctgggccaggagttgtctgaacctcattcactcatgtggctggcacttgacactgctgttggctggggcttcagctggggctgttggccagaacactcccacatggcctgtcctgtggctgcatggcttcctcacagcatggtgactgggtcccaggggtgtgcatttgcagaggaagctgtttcactggttaccaatttagccttggaagtcccatggcatcacttccactccaaccacagtcgaggaaggagtgtcagctccatattgtgagaagagtatatgggatgggatatattggtggcaccaatgat

SEQ ID NO: 153355 - DNA, 320 bp, Homo Sapiens
gtgaaaaagtacatatattttgcacaaggttttatactgctaagtgcttggttggggtggtgagatgatgattagatcaggggtgaggctgagagactctgggtttagggctagccctgcctccatctcccttgggtaaaatgaagggtgtggggtaaaagatgcataaggccttttctagctctgacagcctagaagtccaatcaccctgtactaaatatgtgttgaatgaagaaatgggtgaatgagcttgtcaatgtgattttaaaaaattgactccctggaggaatgattaggaatctaaatgaagccagccctcc

SEQ ID NO: 153356 - DNA, 536 bp, Homo Sapiens
tttattataagatgctttttaatcatgaagctctaggccgtatgttcatgatcacatttgatcttgtcattaggttttggaaaatcttgactcacttgttggttcttttagtgtagggcacttttgcacatggcttctctcaacctgttatgaattttcttctgtctagttttaaatttcaggacattttccagatcttgctccaggtatgttcttgttcttcctgtgtagccacttgttttcgtaatgattcttcatcttttatatgctatattcgcaggttaattgcattaaaagtaatttgactttgtttttgtttccatttgggttgaaggttaagatttctgttgtttctggacattttatttattttacactttttatctttgatagctgccatgcaaagaaagcccaaatcatattcttcttctttaatggatcagattcctatcaaattccttattcgacaggctcaagggctgcagcaggagttgggaggtatgttttattttgctttttactgctaaagtttattg

SEQ ID NO: 153357 - DNA, 469 bp, Homo Sapiens
tttaaatttatatcacataaactattattttggggtctcactctaaaagagtgaggtcagctgccatctctgagctgagggaaaaaaataagggatgattctgcaggcataaggaggggcgtatatgttgattttttaaaaatatacataacataaaatttaccattttaaacatttgtagctgtacaattcagtggcatgaactacattcacactgttgtggaatcaccaccatccatcaccagtacgttttcatctttccaaactaaaactctgtacccactacacagtaactccccattctctcctctctccagcctttggcaacaaccattctattttgtctctaagaatttgactactctaggtacctcaattaagtggagtcatgtattcatccttttgtatctgtacttctataatttttaagttttagaagtacttgaaaaggctaaaaatgttttaaaat

SEQ ID NO: 153358 - DNA, 479 bp, Homo Sapiens
tttattatcaatctgcatttattgaaatgttacatttagattctgctcatttttatagtttgtaatggtatttgtttggatcctaaatttggattctaaattgtcatccttcctaagggtttcttattatctaaaaatttgatcagcactcctaatttactagtactatctcttgtgtaaatggcttcaaattcttttgtggaatgggtaaggcataaaaaaagtcatctgtcactaatatcaaaggaggggccaaggacacatccctgggggaacttaccaggtcaacccacaatgggtgaatttatagtttgttagttagtggtcagttaccaacttctctgtctgtctaatgctttgactaaaatgtccagattatttacctagttaacaaaattaaagaagattctaagaccagtttagcatcattttctctgaagtccataatgaatgtctgttaaactctcgtcactcttatt

SEQ ID NO: 153359 - DNA, 468 bp, Homo Sapiens
  misc_feature (246)..(246): n is a, c, g, or t
  misc_feature (354)..(416): n is a, c, g, or t
tttcctcaggaagctttaattttttttctcaggaagcttgcagaatcttccactgtttgcagcactgcattttagtaatgatacctgctggtatgggaatatttttatccactgtattgagctcttgagaggcctgtcaactgaaaactcatcaatttagttctagaaaatactgttcgaggatttgctatcctctacttttttctgttctctctttctgaatttcctattatttggatattgggncctcctgaacatgacccctttcttttctttcaaattttctattctttgtctttctgctctactttctgggagtttgcctctattttatcatctttttaaaactaaatnnnnnnnnnnnnnnnnnnnnnnnnnnnnnnnnnnnnnnnnnnnnnnnnnnnnnnnnnnnnnnnaagtagtttactgcctttattcatgaaagtaacaccttctcttatctctttg

SEQ ID NO: 153360 - DNA, 405 bp, Homo Sapiens
tttgcttattaagtatttattgaatgggtaaatgaatgaatgaatgtcttaggcattcagtttccctgttggaccctggtctggcatttctggttctttagagtattgctttcaaactttaatgtacataaaaatcacctggggatcttgctaaactggagagttggattgaataggtctgagttgaggtccaagaatgcattggtaccacgcttccagggatgccaatgctgctggctctgaagtcacattttgaggagcaagactccaagaggagggttctctcaggcagatggtatcctcagcctaaatcatcgtaggcctcagcttgtcatctcttgttactagtccaggtgctttgagcagttcttgtggtccatcctcaagcccatttctgtgggcact

SEQ ID NO: 153361 - DNA, 825 bp, Homo Sapiens
catcaaatagtgaatttatttttcttgagacacgtggttcaggcagaggaaaggtaatgggcacacaaaccttgatcatcttcttataaaacaaggcagcatccacatttcaatactgtagcatatgaaataatttctcaattcctactctgtcatagcttaaatgacttactgattaaaatatgagtaacaataattctggagctgaaagacattctcaagccaaaaggtaacattaaacaatgttttactttaaatttaatgtcatgtagggtcactaaaaacaaaatgtaagggataaatgtaagtgcataaaacagagataataccaatttccacaaatacaacttttattatccaaaatcatcttggaaggactttttctaatatgcccattttctaaataagattaaccatttgatgggaatatttccaattgtatcacctccttccttgactttttcttcatcaacttagggcctgggttgtaggcactgtggctctttgggatagttaaatgggtgcaatttggctgagaccgcccctgtcttaaatggcccaggctacagggcttgccaaatggctttggtttgcaacctcttcctttgatatccattgaagaacacatgtcctaccctcttgattgcaagcttctatctgctattggctatcaggagcataacagataagttctaaggtccttccagttccaaaagccattgaccaaccctgtgaggcactatgagagattggagattactgaggaatctcttccaataacatatgatatataaaggtaattgtgattctatgaagagtgaataa

SEQ ID NO: 153362 - DNA, 548 bp, Homo Sapiens
ttttttagtagctactattttttattggaagagaggctgaaatgctatcaggaggggagagaaaaggctgcaccagccaaactgggtcgtgtgtgtttgatgggatttcaacagcgtggatgaattgtaagtccccctccccaccaagccctccccctccgctgtgctcaggtctgtatgctcagcagcactgggaatggtgccagaggctgcgcgtttgcccagtacagcttggagttttgcatcagaagcagcggggtgccaattaggcacactctggaggtggtgatgcaatgcaaagaaatggggtggtggagaatccgctgtggggtccgcggtggctgccgcatccggtttaggggcggcagagccagcggggtgtctggggagttccagcgttggttgtggagtaggatgtggtgtctagctttcagcagtagcacctgtttggtcctcatcaaagtggtttagaggagggacttttggctgcggagcctccctttgttcttgtctgtattctgagacatcctgataattctgtgggttac

SEQ ID NO: 153363 - DNA, 480 bp, Homo Sapiens
  misc_feature (35)..(35): n is a, c, g, or t
  misc_feature (381)..(408): n is a, c, g, or t
tgctccgggatgccctgctggcttcaaagatgagnagagccacatctccatcctatctccatcctatctccatccttctctccccaacagcgtgtggttgtctgtttcagggagcacatcgctcctggggcatgtggggtttatgtttcaggctgagacaccgccagccacagcacaaggacggtgcatcaagagctacgtcgggtattaggcagggtacgtggaaacccttgattccagggctttggccatcagaggaggatgttttctccccaagacttggaaaaataacagcaaggaaaacagtggtggctatacctcacatgtatttacaaagcgttctttagaggggtctgtctttaaggttacctgtgtgacgannnnnnnnnnnnnnnnnnnnnnnnnnnnctagacagggagctctgtgtatgaggaccacaccaagaacagactgaaaccacacagatacgagcggtggag

SEQ ID NO: 153364 - DNA, 658 bp, Homo Sapiens
ttttttaacttaaccatttctttactgatgagagttccaggtttttttgtaactgttttgctatcaggaacaaaactagaataattgttctagtacatataatccttacctgatagagtatttttttgaaaatggaattgagagttaactttttcttatttctattaataattgacacacaacaattgtacgtatttatggggtacaacatgacattgtgcaacaagtatacaatgcgtaaagatcaaatcagggtaattaacgtatccaacatctcaaaacttttgtaacttctttgtgttagaaacattcaaaatgtgctcttctaggtatgtgaaaatatacaataaattgttaattatagtcaccctgtagtgctagagaacactagaacttattactcctatctagctgtacttttgtatttgttaatcaacttttgggtatcccacagcccctagtaaaaactatattcagaacgaatttgctcaatgtgaaattatatgtactttaaatttcaatatatattgtccttgctttccaggctagcaatttttttctttacaactttatccaaaattttatcttattacttcttgtactttcaatattgtccatgcatcggtacctaatagggtttttttcccacttatttttg

SEQ ID NO: 153365 - DNA, 625 bp, Homo Sapiens
  misc_feature (564)..(564): n is a, c, g, or t
ttttgattttatgtcgatttctttaattggttaaattgagtattaacataaagctatcttgaaaacaatcactgggttcaattttcctactttgcaaggattcctgaggatagtatcacccttaaagttgagcatttgggggtctcggcccagggctctgtgactttgagggtcccactctggtctgcctcctccagcagaaccacttagctgggagggccaagggcacgagcccacctgaagcccacaccaggtgtctgggatcctgggattcctcaccctcaaaccctaagcctttttctaaggactgtgcaggcctcttccctgggtctcccctgtgggcagaccacactgctggaatgttcatcctggacctgaggtggggtggggttgggagagttgattaaggggcagggtggatggagctcggacatgagggccgagatgcccgtagccatgcatgtgaggcctttacagatgtgggaccagcctccgtgtgtacctttatcccagcctcacgaagatgaggagtgagtctgtaggtgtgcacagtcattgtccacngatcacagccgagagtcaatgaaatgtattacagccaaggaacttcagaaaaaaattaaaa

SEQ ID NO: 153366 - DNA, 436 bp, Homo Sapiens
tttttagcacccagcaaatgtttatgttattgttacattatcacagaaaaatgcaccagaatttaaacaacgctgacaataaatatgcagtcgatgatgacttcccagagctccagaagcaactccagcacacggagaggcgctgatgtgcctgtcaggtgctgctactgaggaagccgttgctggtctccggaagctcttgtatccccaggagtgccgtctgcctggcctccccattcctgcagtcccggttgtcatctatgtgggccaggccatgagccctccaggcaggctgtgcttcaacccatcccctgcaccaacagcagcctgctcatctccaagctcagctcagcccaagagcagaaagggagtgtgctggaagcaggttcaggaagatgagcgttcatgggccgtctgcatgccctgggctggggag

SEQ ID NO: 153367 - DNA, 860 bp, Homo Sapiens
gtgggtacatattaggtatatatatttatgggttacatgagattttgatacaggcatacaatgcataataatcacgtcagggtaaacagggtttacaggtatagtttttaaaagtcatcttatttcaaaagtccttccagaccttactgtgtcagtgggtaataaattatgctgataactgatgacggatgggttccgtcactgagcagcatgtgttgagtgctggccaggatgccagctcccaggaagacagtcctcatgctggggcatcccggctccagggtgcattaaccctgctgcctggagcatgtgccagagcgtgtgctagggccttctcgttgtctaggcagccatgggctctgctgggttgagagatgtgatgcctgagcattggcctcctctccaagctgcctgaatgttgcctccatggtggaagtaatttgtcttcgagtccttttcagaactgtcaaccagcattccccatctccaaagcaagtcataatgggccctgcctgctcactgaaatgcagaagccagactgacccctggagcctggaggtctctgctctgaggagcgcctgtttatggcattgcttctgcctgggctcccggtcctactggctttcactggcaaagcaaagatgtgagcctccccagcccaaagagcaggctgctgtggatgccaccaactccacaggaccaagcctcacagagcaagcccttccctctgctccccgagacgcctgtcttacagagtcgtgtgtgtcaagaacaagaggtttcatataaaaattaatgaaacaagattttttttctgacatgaggaaaatgcattattcagagtttccaaatgccaccag

SEQ ID NO: 153368 - DNA, 402 bp, Homo Sapiens
tcataattgaaaggcatttctttggtacctactgcatgccatccaccttcactatgaaatgttctcatgtcacataattggaacccaaatggtaatgggagtctcctggatggaccttttagattgaaactcgcttcccagatacactggaagactccatactcctgggtattcttgggtaacagcaaatggagggtttctatttctcccggttacctcctgctatggttaatttacttcattttggggatcctttcactgactgttcttcccaagccagagaaacagccccaattcctgccctccacaaaacaccactgtcacaagccaagaaagtcttttcagaggctgacattttcccaaaggttcatatgaaggggtgggttgcccttcacacctgtg

SEQ ID NO: 153369 - DNA, 907 bp, Homo Sapiens
tttttttggggaaaattgttctgtttgttttaattaaaccgactgaagaagccaagacacagatggaaagagactaagaacaagactggaaatagtttagaaaagaaatgaaaaccggtcgtggagatgtcagtgcctgatggagtggccggggcgggtgccttcacgtcagctccagaatcactgtcagggcgagcaccaaggtgagccgggcaccagtggggcccatggaaccattagagtcctccgttcctcttgggatatttgggttttcaaacacgatgagccgggtgtgcgtgtcggtggagcccagtgggttctgggcggtgcatcgatacatggagccattgagctcggcgggaacccgctccagcaccagctccttcccgtcgaactcagcgctgccgtccaggaggcggctcccaacccgcgtccacgtgaacatgggctccgggaagacttcgttctgaaacccatggaccagaatcctcactgtgtcccctacccgggctctgctgggcgtcatcacaattttgggtcctttgggggcaactgtagggagagaaaggccaggtcagagagagtaaggaaaggagggacagggtacatggaagagaaagttctagtctagcaatcaacatccttgggatcagctgcttctgtgagaagctcagtgtgctcattcattcattcactcattcacagctgcattcattcagacatattccctaagcccatgcaatgaatcagatgctctctaggacctggggagtcaagggtgtatataggacatgattcctgctcttggggggttcacacatcagtggggaagaaagacaaacaacagacaagtacaagccagtgccatgagggacaagatcagagaggcccagtggacagtggggac

SEQ ID NO: 153370 - DNA, 537 bp, Homo Sapiens
ccatggaaaggcttaaagaacaatatgctgagatggagaaggacctagcgaaattttcaaccttttaagaacttgaaccacaacaatcacaaactaatgagaagatgttcacctctctcctgaaaactattcccaccagaccgtttagcctctgcttcaagcttagcaatatattcagtggcactcttatatcagaagaaagaagtttctactggcattctgattggatatttaaagaagggtgccacatttttccagctttaagtgcctatatatgattatttgaatgaagaggagtaggaaggaaaatggaatcaatatactctttgttagtcagaattgatcatcttttccattgattagctcagagaactgtaggtatagacttcttagaaagataatttcattcatttctatacagggttaacaatagtttattattgtggcttaatgggaaggtatagaagctacctgtcatagcctccttggctgttggaaggatgtataaagtgttactgcatgagtaatgtagacaaa

SEQ ID NO: 153371 - DNA, 541 bp, Homo Sapiens
ctgtaaagggaactggaccgcctcaggggaagacggcagactcatgcacagagaaggaaaagggaacatctcatcacctccgaggatgagtaccctggagccttatgacggcaccattggatgtcatgtttaattccatccaagttgtggatggcaggcaggagcatggagccctcaggaatccatggaggacatcaaggcatcccaaggccatattcccctaacattacttccactgctaacaacaggactgcctttccctggtgggaaaatgctccctttatgcccattcctgtatcccctccaacacccacatctgcattaaacacccgtgcctttctcttggagagggtttagatgcagatcccggccctggagctttaaaatgcttgcccttccttcttcaaggatcaaatgtttattggggttcagctttgttttctcaaaaggccatggtatcgtgcccctgaggaacatgtttatctaagaagctttgaggtagtagagcgataatttttgaaaccttcctcctgcaatcttt

SEQ ID NO: 153372 - DNA, 470 bp, Homo Sapiens
gccttgccagccccagttgaaccacttcagagagccattaacctctgcaaaacggagtggacaacttccacgtggctttctgtagaaatcagatgggactgcaagcaatggcacggcccctgccaaggtggatcttggagcctccagaagagacatgggcagagacctccctggtcttcctgcagctcctgccctggaacctgagtctcccaggcatctgaccagctgcactccaccaccagaagccggttaccaccgtccttcgggctttgtcctggagggtgcggggctggtgtggaccattcagtctggcagtgaccaccacccagtcagaggcacggcagaacgcacctgctgcacggacgctgtttgaacttcttcaaaacgtggtgcagtgtttcctgaagacatttaccatccttggcagttaaatacagcacagtgtcaattacaggtccatcttctgtaaa

SEQ ID NO: 153373 - DNA, 357 bp, Homo Sapiens
tatttatctttcatgtaacagtccagggctaatagagcagttctgccatcctcatcacagggcttctgcctctgggtccaaagtagttgccccaattcctgccatcacatctgcaccccagccagtggagagggtaagagggcaatggtaacacatacatattcttttttagggcacaaactagaaataatacatgcaacttccgttcacatctcattggccccaaactttggacaaacccagatgcaagagaagctggtaaattagcctttaattgagaagccaagcgcccagaaagcagggagttagagtatacaaggaaagatcatttttatggatatcagtctcattcagaaa

SEQ ID NO: 153374 - DNA, 494 bp, Homo Sapiens
cacacgcacccacattccttctgaatcgtattttctaggcatcttactaatataatccccacaacaacgagctgcagaaggttgtttctctcacagatttctgcatattctctgtacttgtagaatttgggggaacaagtcaagttacacaagctaatccctgaaacgtgagccccacggctcctcagccctctcccagagccggtggcctgcgtgccaggtccccgacaaatgctggctccatggcagctgcgatgacttccctcgagaagtgccagtccgcagggcaatctcgaggtcctcgtgcgggtgaccagctgcggcacggccagcacggcacagggagggaggggctgtgctgaccctcaggtgtctcgcgggggcccttggcggtcccagcagagggtttgcccgtgagaaggtctggaagtgctgcttcttacagggctgccttcaattatttcagctgctccgaggtatttcaaagtcagacc

SEQ ID NO: 153375 - DNA, 257 bp, Homo Sapiens
  misc_feature (131)..(172): n is a, c, g, or t
ttttttttgattgtaaactgtccagtttattattattatttttgatggctacagacaatgtgggctctcacacctagactagcttttctggtggaagggcttgggcacagacagacagcagggcttctggnnnnnnnnnnnnnnnnnnnnnnnnnnnnnnnnnnnnnnnnnnaagaagaaagcatagaggttgattggggtggggggcttgctagaagcttccatttaaaaaaattttcccccaaaaaacccccctg

SEQ ID NO: 153376 - DNA, 468 bp, Homo Sapiens
atgctgaggcttttattcaggtgacttgctatctagacacctggggtggcgtgttttctttgggatgcataatacacaaaggccagggagcctttggcttggacccccagggagctattgaaacttttaaagtttgagtttaggagtaagaacatatctcagaccaccttagtcagctttgctgatgggatttagggccaggtcagagtttcttttcataactgcctgaaaagagagatggtgtgaaacaagattctgataatggtttgtgtgagatttgatcatagtctaaaactatcacgtctgagttgccttaggatgacagtgctgacacccagtaggaagtatcccatttttatcaggaaagtcagtcacgcgtagggatggtgaggagacgcgtatggatggtgaggagggagggggagagggagagtctgtgcccttgcaccagggtgaggcctgactcac

SEQ ID NO: 153377 - DNA, 175 bp, Homo Sapiens
  misc_feature (137)..(137): n is a, c, g, or t
cctttaagaattaaaactgggaaatagaaacatgaactgaaaagtcttgcaatgacaagaggtttcatggtcttaaaaagatactttatgtggttgaagatgaaatcattcctaaattaacctttttttaaaaaaanaaacaatgtatattatgttcctgtgtgttgaatttaaa

SEQ ID NO: 153378 - DNA, 423 bp, Homo Sapiens
tttaagaacagggcacattaaaaactttattcaataaatacaacaaataatttaaaaatatatttcaattccaaagccaattaagaagaggaagtagagagaaagggaaaaaagtggggatgaggaaggtagaggaaaagagaaagcggccaaacaatggtttggttgggctgtgtttcagagtataccaccctttaaaattctgatcaaatactcttgacccataaacccttagcccttgttctgatggggtagccacaggagtccaccagctgggaatcatccactgagctctggatcagagcattctagaggctggaatgtcgggggagttttaggggtagttttccggtcattcctaaaaccatccgtcctaactcccaggcaggtttaaatagcgcagactcttaggcagagagctcc

SEQ ID NO: 153379 - DNA, 431 bp, Homo Sapiens
tttgcttctttttaaattttttaaaaccaagcagtggttatggaaggaaacacctctttgtgtaacagggcatgtactgccactgtcggtctctaaagtcactttgatgatctaacaaaaacagcatgtttcatacatgttagacaacctctactctggatttttttctccaacaacttattttctcttcacaaccccctcaagttttcaagcctaaagaaattccatcggttctctctgcacccactttccttgctttgctcctagaattattcccacctttcttctgcagagcgtagacaatgcctcaggcacactgttgccagtctcagagccctgagtccctgctacctctagctccctgggactccaacacccagcacaagattctgcaggcagccacacattctgctccagtacttctcaagttg

SEQ ID NO: 153380 - DNA, 552 bp, Homo Sapiens
  misc_feature (477)..(477): n is a, c, g, or t
gtgaatagcaattcctaacgggagcatctttgtgtgtgtaatttctgctttggttttggtgagggttggggcatggactgaaagatttacctacaaaatatatgcatagttgatctaaatttactaaagaacaaatctacatttttaggtgatctttcaaaatcagtcctcggtttgaattatccattaactagtggggatgcaagctcgcccccttgtcattaaaatacatattcataaaactttaaagttgcactgctctagttacgaatagcttctacttttctaggacataatttcactttgtttaagaagaattcattaaagaagctataaataacctttaaatatttagccatgaatagagagggtggactggcattgatggcttattttagtactaatgcagaatgctttttaaaagctacattttagcatgcatcaagctaatgattaacttgtaatgttattttcaantgttagaataaatttattttgaggaattgtggtaaaagtaaatgctcgttattccagctagtacccaagtagcct

SEQ ID NO: 153381 - DNA, 646 bp, Homo Sapiens
tttgttcagctctgaacacaattagcatcaggatggtttgaggctcctccttctatgactgctcctgtggtgcctctgtggacaggattcacatctttgtggggcttcatatgctcctaggtattttaggcatgcccactcaccctatcaggtgcgagaggtcaggtggaggctggagacaggctgggaagcagcaagtccccaggactgggcccaccctgctccactctcctgactgtgctccccaaggctctcaacccggctttgggcctccgctgtgccagccatcctttgcctccccacttccacacaccagccctacgctttcccaaggatacagcgtagccagcgggcacccagtggtgaggcaggaggggaacaaggatcccaaagccgatcacagcaaagaagaggtacagcagccaggccacaatctggagcgggtgagggggccagctccacccattccggcgggatcgctggccctgcagctcaggggagggtccgctgggctgtgccggtgccgtccacacactcttctcaggggccgtcttgttggagggcttgttgcagatgttcatctccagagggagaaacagtagagagagcattagcccatctatcgaagaatttttcacttttaaaa

SEQ ID NO: 153382 - DNA, 264 bp, Homo Sapiens
tttactatataaactattctttatttttttatacatatgaaatatttaatgattattctttgcaaaaatctagaaaaatgattaggggtgaagaactagaaacagtttctttctagatactgcttggagcaatcagcccattttaatggtgagcagcagagtttaatcattattcagatgaaggtgtgcagttttgaaggcaaagggaaagatgcccctgggaaaagagagatgtaacattctataaagagtgatgatttaggt

SEQ ID NO: 153383 - DNA, 428 bp, Homo Sapiens
gacgtaaccctttattgcaaattctaaagtaaaaagatgtacagtacaaagtaaaattgaaatttcatactataaacttccaatccacttacacattctcatttctcaagcatttctgccatttccgcataaacagaacagggaacaagtcgcggaggtgagggaaggagatacagcaaggggaaaaaattgtcttgaataatcacaaaccccagaagcaagtgaaaggaaagacattttctcgacctgctgtcctggtgatgagaagcgggggtggttggagcagtgcagtttaaaatggctctcagaatagcagcatttatggtaccatttcagcttccttaagtccaataatactttgcccttccctagcgcctttgcctctgtatctcaaaacgctttacaaaacatttagttaaagcctcaca

SEQ ID NO: 153384 - DNA, 457 bp, Homo Sapiens
gtactcagacttgctcatagtagaggaactcggccgactgaggtcactgccagaggctaagttaggggaactacgtgggagcacctgagcctgcttttccccctcagtttctcggtggtagaaatagttgacattgtacccaatgacaggtacgggcagggcaattgttagcacaccagcgatggcacacaaggagcccacgatcttgcctccaattgtcacagggtacatgtcaccgtatcctacagtggtcatggacaccaccgccctccagaaagcatcggggatcctggagaagtgcgactcagcttcttccgcctcggcaaagtacactgcactagaaaacaggatgaccccgatgaagaggaaaaagatgagcagccctagctctctcatactagctttgagggtctggcccaggatctggaggcccttagagtggcgggagagcttgaag

SEQ ID NO: 153385 - DNA, 502 bp, Homo Sapiens
  misc_feature (481)..(481): n is a, c, g, or t
ttttgtatgtctaaacatgtctttattttgcctccaatattgtacataaaattctaagttgatacttattttcctcagcactttgaagatacttttctactgtcttctggactttatggtgctgataagaaagaagtttgctgttggtttaacaatgattaccttgaaaattatgtgttttttctcactggtagaatactcacatttaagtagacatttgatgaatgtgcatatttattgataagactccacacaggactcctaattccatagattatgcggggaggatcatggtacaaacatccttctcccttatgaaggggcatggcagaaaatgaaggctattgtgactaaaaggaagctctgcgagattaacaacatataactataaccttgtctccaagggagatctaagagtgcccccacaagaatctgagagactgtaataggatatgaagagaacagctgaggaccctcattnttatttatttatttatattta

SEQ ID NO: 153386 - DNA, 666 bp, Homo Sapiens
  misc_feature (440)..(440): n is a, c, g, or t
gaaggggcatagagaccattcttttctcaataatattctgcaaatattaacaggtgtcatgtcagaaactaagtttaggaattgacaaattcaaaaatctcccttacagcagggctttgagagcctttgctacactaaatgctctgtgaatctatctggtgctgcgtgggggcctccaaatttatttaaccatattttttaatttggcatttacctagagaaatgctatcacatttaattccttcgttttacagtttcacctcctcatgtgattccttcattttgtaagtgaccgattccaccctatacaatcacatggccaatgcatgacagtcagaattagaacctagtcccctgattcccaaccatgtcttataccagactgtttcccctaatcgataggaaactactcctaaagggcagaaactgcctctctttgnttttgtcccccaacctcccctccacacatacacctctgtaatctgatgctttaagctcagattaaagcatcagcaagctttaatctgacacatggccgtaggcttgagttagcagttggtcccttctttcttccagactctcataagagtaccctatcaggtctggacagacttccgtttatgcctcagattcaaaatacccaggaaaaagaagaagaaatacaaa

SEQ ID NO: 153387 - DNA, 537 bp, Homo Sapiens
tttttccctaaatggtatggccaaaagtcagagttaaaatatatatagttagattccaacttcctccttcactctaaaaatagaatccaaacccactcttcatatatgcttccagaatggggcttaagtaccaatctctgctttgcaatgggcacaatcttggtcatgtcctgaggctctctaagaaaagagaggatctaggatgggagagctagaaagttgctaactgggaagaacaaggccctgagggcttggtctaccaatctgggaagatttgaaaacaaacttctcgcaactgaaggaaggctgaaggctgctgcaagtcattgagtgactttaggatgagcaaaacattgggccacttcctaatgccctatgtgtatagtaccagaagcaaggtctcagacttaacagacccagctctgttccaaggtgagtctgaaccaatagaaagcaaacatgtgcagatatccaaacaagactgctcatgcaagtcggggctggctacccgtcttaggcagcaacagcagagctcca

SEQ ID NO: 153388 - DNA, 544 bp, Homo Sapiens
tgcggccgccaactttttgcagttgtggggtagtgtgtaacactgtccatcttgcatcattgaaactactacaatgatactatcatttaataatattaatattacttgaaatagactaagataaagaaaaggggtctgtatgatgtgcagttttgtgcctttatgtatttgccttgttctttgtcgaatgtgtgaaattccgtactgtggtttttcctataatagaaagtagagctgtgtattaaattagactgtgtctctctgatacctttacactactgagaatagcatggttttggccatgtaaaccaattttcaaagttctaatgacatagccatgtgtttttggttttttatatttcattttaaaatttgagtatcaccatacattaattaatactcctgtagtagataagctgtcattaagtaattcccaaaaaaagggccatttgcttgcattactttgaatttaatgttgcgcttgtgcactgtgttaatattgtttgtgatggattggacgttgtgactcttgccttttaagaag

SEQ ID NO: 153389 - DNA, 564 bp, Homo Sapiens
ttcggctcccgccagggcactgcaacgacgacctgccgcattcccactcgggctctccgctgactcagcaccgcccctgcgccaagccagccggccaggtcaaagttgtctcctctccaaaccttgcagaagcacctttcttctcttcagcgcactgttttgggactgtttatgcagcagatgtaagtagacaacatggactccatgtgacatgcctctaatagtaaagataaagtattactgaggttaaaaataaaaattgagtagtattaatttaaagtgcaccatcaggacaacaaaccatttaagctgaaaaaacgctattttatttcttgagtttgccagttgcttccaccttgagttaaggacgtgtctcatcttcacctactgcgcattctcccttctctaactgtgtaatatgtcaggtcaaggacattgaatgttatgaattgagaacctaattgatgcgcatagttttcatctatgcaattttacttgcttctgtcactttacgatctgttcatatttggcatcaattaaagatactttttaaggatcttaaaa

SEQ ID NO: 153390 - DNA, 609 bp, Homo Sapiens
tttttagcttttgctcttttattaagttactgtttcaaactacaaaaatactagaatttaatgctacaatgtgactcacttacaactgacctgcctcatcgatcatctgcttcttgacacataagtgacagcagaatgtaggtccttctgtttcccagttctgactgaaatatttctgcatgtcctgaggtgaatgaataatgaaagtggttaactgacaatataaaatctcagattcttagaaaagttgtgtagtcttctcactaagcatgtgcagagatgatagctcaaaatccccctgggggctgcaacttttagggaacttgtgggatgctccaagctcatcccctggcttagagggagcaggttgtttagggtgactgacctcagccttatgtggactttagcagtggaggcctctggcagctgtttcctcggtcagggtgcccctgatgcacctgcactttccacctccccgctgactgagacctggtcatcctcctgtgaggcctcccttccaggtctcctcaggcaggacccaacctccctgctctgtgctctcacagtgcctggctgatgggtcctgtctggcatttgtcacgttgtttt

SEQ ID NO: 153391 - DNA, 450 bp, Homo Sapiens
agaatagcctttttctctgcactatttagatccgaatgaaccttatgatgtgtatattgagatgtactcagtgtgattttaaaccaaattgtcttcctgtagtcacaatatatactgtagccttttaacagcaagtcttgctttcccaaacagaaagccattctgaaaccctacagtatcacaggtgagaaaaggtggttattttttccccaagacaacagcactagtaatcccacttaataagagcttatttaattggatgtcagcctcttaactgctaagcactttgtgggtctcagcgtttttcataaaagaacttttgtatttaatacaaagtttgctttgagacttttcagcatatgatcttttttccataaacttgtacagtgcaaaagacattttgaataccatgatcgatgatgtcccatgcttcgaggaaaaccaaacact

SEQ ID NO: 153392 - DNA, 487 bp, Homo Sapiens
caccttagttctgacattatctaagttgtggctgcttcagaaggtcatatgacaaaatatttaccaaataattaaaaataataataataatattccttttacaaaatggtacagtaataccttaaggaaccggaaaatactaaatgtctttggctatacaactaaaaggccattctttcaaaagaatagggcatattcatttcagaatcaactaaaaaaaacagaaagcataacagaaatatgcatagaatttaagtatactttgtcttgccttcttctcccattctacccacataagcaaggagaatgcaatttatataatctttccagatgagactcaatagcactacaaagaaaatacccaaatttctgcaaaggcaaagtgaattaaaataattacacaactaggtgaagactgaaagggacaaatgttatttgcaattttctttttaacttgtttgtaagccttacaagtgtagaaattata

SEQ ID NO: 153393 - DNA, 528 bp, Homo Sapiens
cctcatctcaataaaggcaaggctgttttccggtgctcagatcaaaaaccttactgcttctcttttttctcacacctcctttcaattcattagaaaacagttttgactctacctttgtaatgtatccagaattcagcctcttctcaccaccttcccagttcccactctgtctactccaagccaccaccactgttatttctttcctgaatcactgcagtagccccctaactaatcttcttgcttctagtgtattctcagcataggggctggagtggttcttttaaaacagaagtctgatcatatcacttctctgctccaaacccctggtgcagagtttcttcatctcagcactgttgacattggggccagataattctttctgtgaggactctgtgtgttgtaggatgtttagcagcatccatggcctctacccactggatgctaatggcacctccccgcctacttttgctctagagtaaaagtaaagtccaaattcttagagcggtccagaagatcctgtctgtttgc

SEQ ID NO: 153394 - DNA, 464 bp, Homo Sapiens
gacatatcccacgcccagtgcacgggtgccctcaaatagcaccctgctcacaagcgtctcggcctcggccttgaggttggtgcggctcagtgctgggtgcaggtaggcacaggctgcgctccaccgttttccttcatggatggtcatgtccatccagccgaagccctcctgctggaagccattcatgtcctcggtgagcgggtagccggcctgctgcgtggcctccaggaatgcgcagtgcagcgggtggttggtcttgccccgggacacccgcagcgggccatcggcgccccggtaccggctggcgcccagctcgtggccctgcgccttgcggaagtagggcaggcagtgcgcgtagtcccagccgcgggcgccctggcgctgccagcgctcgtagtcctcggcgtgcccacggacgtagaccatggcattgagggatgaggagccaccccagacgcggccgc

SEQ ID NO: 153395 - DNA, 274 bp, Homo Sapiens
  misc_feature (137)..(223): n is a, c, g, or t
gccccacttcccccaccccatccccagccttccccttatccagcttcctcatgtttggccatcagaatcctgcttagccacatcaggtcaggaccagaggcctggtgggagggtgcccagcaattagaaccattcgnnnnnnnnnnnnnnnnnnnnnnnnnnnnnnnnnnnnnnnnnnnnnnnnnnnnnnnnnnnnnnnnnnnnnnnnnnnnnnnnnnnnnnntaaacctctgtcttcacagagtttaaactctggtgagggtggacagacaaa

SEQ ID NO: 153396 - DNA, 461 bp, Homo Sapiens
  misc_feature (243)..(288): n is a, c, g, or t
gtctgtccaccctcaccagagtttaaactctgtgaagacaagaggtttagtcttattggttcactgctgtatccccagcatctaaaacagtgccaagcacatagtagttgctcaatgagtattgaacgaatggatgaatgaacgaatggttctaattgctgggcaccctcccaccaggcctctggtcctgacctgatgtggctaagcaggattctgatggccaaacatgaggaagctggatannnnnnnnnnnnnnnnnnnnnnnnnnnnnnnnnnnnnnnnnnnnnntctgtcccttagccccctacctctctacctcctctctgtgctgcagagactgcccacctgtgacagtgacagtgaagaaggccgagtcatctccagcatcacatacaaactcgcccccgtcctcgggctgagcagcaggtagcaccaggcggcagcgtggcccatccctctcc

SEQ ID NO: 153397 - DNA, 923 bp, Homo Sapiens
tttgagagaaaaatgttttattttgtgatatgcaggttataagtatattcacaggcctttaaaatataaagaaggtgtaatggaagaagacccattgtcaaggttttcaatgatagtacctgtgtcctttcaccaagtttacttacagctttcatagtataatactaatccttgaaatgcttggtaaatttgccaattctgggtacaaatgaatcctccacttctgaaggcttggtgtggactccgatttaggtctccaatacatgtccagcgatttttggtgcccttttgggaaatacaccacttggcatgatcttgataagaactgaaataagagtgtcgtgataatttaattgcttttatattgtagacatggtaaggaagggagcagtttgaaggaagctcttgtctttttcgctgccaggtttctgttaacaagtgtgtcttcagccgttgagccatccaggctgcaaagatgtcatcaagaaaagaatccgactttgcaaaatggaggaatttttgtccctgggccgactgaagtgtggtgaggagcctgccaggaatctctgatgagctggccctggtgcacagctggggcatgtgaatgagctcctggtgaaaggtggctgggatggagcagctatagacgttggggttgcagaccaagagctgagaatctattgcctcatactggttgtacttgaaagttatgcagatgccactttgtccatttcgtctccctgtgggtggataatcatagccttcttccggaattggaggaaactgagggatggaatgaatcagccagaacccttgaactctgttccacagcagtaaacctttggtgtgtccatactttctgctgtaattcacaggtttagggactccatcattgtatattagataggctgtgttgttactct

SEQ ID NO: 153398 - DNA, 515 bp, Homo Sapiens
  misc_feature (177)..(182): n is a, c, g, or t
  misc_feature (204)..(242): n is a, c, g, or t
cctatcccaagttgtattactagttttggggagtttgcagacaattgaatattctataggctgtgttgcagctttagatggatcgacctgtcatgtttttgaggttatccaggctgtatatctctggagagaagggaatggcaaagagtgggagtctgagtcaagtttggttttgtnnnnnnaagagacaaggtctctgtaatnnnnnnnnnnnnnnnnnnnnnnnnnnnnnnnnnnnnnnngacttgggctcagccaatcttcctgcctcagcctcctgagtagctgggtttggttttccccagggccatatgtcagcttatttaccctcctcacttggtgtctcccagcctgccagcccatgctgttcatccagtatctgctgaatggtgattacctattaagtggaactaacacaaaattgcttatctaaaagcaattattggtgattatttccttgcagtggcccactagagggcgccattgttaagtgtaattccagtaggtgttttgtg

SEQ ID NO: 153399 - DNA, 409 bp, Homo Sapiens
ataacatcatactgtatttccatatgtacttattattgtaaataagtataaaacagtgtggtaagagttatctaggaagtaaaattttaccttaatggagcctgggattttggtaggtgaagtggaagaagagctagttcgaattgactcaatgacagtgatacagtaagttagtaactgacaattgaactctactgtaatactaatatattacttagacctttttaataagtgcattggttattttgtgatcctccccttcaaaaaaccaacaagaggttagtaataaagccttaacttttacttggtttagtagtcacgtaacattgattaacttctattaagtttttaagaagcttaactttttattgccagggcttaacaggactatctaatgaaatctgtgaaa

SEQ ID NO: 153400 - DNA, 439 bp, Homo Sapiens
ttaaaattaggtttaacattaataacacactaatataaacataacatttagcttatctggtataaaaatcatacaagaagcattgttaaatgtaaaatggtatttggctttctttggtttaaaaactaataaaaataggtgctaaaggaaatttctcagtaaaaagacactaaggactataaagtccactgccaaggtccccacatttaaaacaaaaggtcagtttcttaaaaattatatacttggtttatcttccactttcctttctctcaaaaactaaaagtcttttagcacatgtaccaccgctagaatttccagtaaatcagcaccagcctgaagatcacgttctcatcaaagggtggaaagaagaaaaacttgagcccgcctgggaaggaccctaccttgtcctgctaaccaccaagactgctgtttttacaaa

SEQ ID NO: 153401 - DNA, 390 bp, Homo Sapiens
gcagttacttgtttgaataaaagttttatttattgcacgagttgggtatggacctccttccggttcccggcgtgcgtctttgccgtgggggccccgccttgtgcccacctctgccaggtattttctcggcactcagtcgcctgctagataacctgggcttgcacacggtgctggccccagtgacagtcgctcactctgcccgggctctgcggggggccgtctgcagctgaggcaggctcctggctccctccaggcccgcaagtgaggcaggctccgcaggcgccgtccagggagagccagagccccagctgtgtgccgactccgagtgctccagggttctaggtctcctggcagctcgcccgtggtcccccctcctctgcacccccgagt

SEQ ID NO: 153402 - DNA, 472 bp, Homo Sapiens
  misc_feature (401)..(422): n is a, c, g, or t
tgaagaactttctctgttcttcagtgggtagttcttcaatgatcaagccctgggggcgattaacctcttgatatctgtgagtgtttgaaacttcccgcatgtgcctcagcaatggcctcccctggtgtgtgttttgaaattctgcagggtggcctctctcctacaaagtgggacctgttctatatggacctgagagaggaaggaaatgtcagacaggtggagttatgagaattacccagaggaaacagtcaaaatgtcactctataactaattcacgtgtaattgaaatgtaataatgtacagtgagccattttgcatttatgtaccatctttcatctgaccatggaaaatattaatcttttcaggtccctggtctggtttatgctaacagtcctgcctannnnnnnnnnnnnnnnnnnnnncctagtccctaaggcaaagaaggagtaactgacttattcaagtttgtaca

SEQ ID NO: 153403 - DNA, 453 bp, Homo Sapiens
agggaaaaaagaggtctctgtttcagctggacctcttggcattttatatatccatttagttcatggacaacttaatattattccaatttcgttgctgaaggatatcaagatatactgtgtgcttcattcgtgggctgatttgctatcttgatgctaagtggaaattagcaaaaagttttcatttgttagatcttctgttattaccatgaaatatatccacaatttaaggatcttaggtttgcttgagtttgtactgtaaatggaatattttatcagtatgggtctctaatggaaggcttagtgctttatactggtttctgatcagatgacctgagatagtcttcatgtgtgcagtttatatactgaaaagtcagaaatacaaatgcgtagccctccatttaatatattgttagtgtttctgcttattcttaaacttgatggttttgatgatgg

SEQ ID NO: 153404 - DNA, 592 bp, Homo Sapiens
tttttaattgcaaaacttgttgcaataacaagttagtcaaagcacaactatcaatagaattttgagtctgttgagtcaatgagtcagcacttaatccattggagataataggtcatagagaatgttccagtaattcttgctatattcataaacattgattagtgctgcagagtaagcaactctgcctaagcacattagcacttagctgaccacaatttatgatttatgccagatgaataattcactgaaatggaatcctttatttggagttatttttcatgctttccaattgctaaacacatggcagaagtgagaaaaattgtaagctcttctgaggataggaaagttagttcaaacttcattctcctcccctaagtctagtacaagtttgtcattctgtaagtatttgttggtaacaaatgctcttttttcttatgtaatcatggcaatttccttataactaaaaataattggctttatgggaaattatggccaaaattttaatgaaattattcatactgctgggtcaacatttataattttgattgaataaatatgttattagaactaataaagtgttaaaaagttaaaa

SEQ ID NO: 153405 - DNA, 540 bp, Homo Sapiens
tttttctgctttaaattttatttacaagagtatactcaattgttaagggctacaaatagctcaagagaaaaaaaatttgacactgaacaacaaaaagaatcagcaatgtttcaaaccaaaaaagccacaaaagaatcagttcagtcctctattagctcagtccatgcaattaactcttgttttgcttcatactgggttagcaatctttatgaccacatcagccttttaattagagtcctagaagttttctgtctaatccaacagcacagtctttctgacatcatcagaaacctgcattcaggagtcttccaaggagcaaattttggactgtagttgactgtaagccgctttttgagaagaatccaataaaacaataattgtagatgataaaatttttaagacattctagtcaaagacacattaaatatacaattgtcaaggaaatctggttatttctgtggcatacaacaatttaacataatacacatattactaatggcatatactaagacatatcaggattttaggagtgccatgtaa

SEQ ID NO: 153406 - DNA, 516 bp, Homo Sapiens
taagtgggtatcttttttatttcaaaataagaggggttttaatatttctacacagcattagataatagcccaaacatattattgatccccaaacaagtattttccagatcaattaatagtcattatcaattaatattcatgtctacctgtctgagcaatggattagaaacattataagtttcattttatggaagagaaagcagactaaaagtctagggatatgatcatttggtttctggtttcagttctgacactaacaagcaatatccttgggcaagttgtttaatctttggggccttatttttctcaagtagagaataacgaagctggatctcatgctccattcccatctcttccctaccccccattatttcataagattttcttgcccctattatgccttagtaaattctagatcaagagagatcctgcccaatttcagagtagagaagcccaggactagctgcgtaatttgtggggctcattgaaaaatggaaatgtcgaattccttcttaa

SEQ ID NO: 153407 - DNA, 562 bp, Homo Sapiens
aaaaagttaaagtggtttataattaggttaccaatagtgtgtgtataaatgatatttccaagaaaggaaacttgagagtacttggaaggcttgttttcaagtatttgtaccatttcctgcaatcttgttgaacattaacttattccacctgggaaaatgcagttgtttatcaaggagacccttcagccccacacgagacattctgagaaacttggttgctgtctttgctgtcaggaaagaggaagactacctagacatgttgctccagagcagaatttccagcagtagattgaaccttcggaggccgagtcccagcccagtgtaaactggtaaagagtgagccctcttcctacaatctggttattgctgctgtgtaaaaagtcctcttgatttttatgtatttatttcttatctgctgccttactaaatgttttaatgttgctaatcattttgatttctgcagatatatatcattattactaatattgtaactttttttattttctaatctgactgaatttttggatacatgttaaataataacaattttaaaataaaaaaa

SEQ ID NO: 153408 - DNA, 646 bp, Homo Sapiens
  misc_feature (262)..(319): n is a, c, g, or t
  misc_feature (595)..(605): n is a, c, g, or t
gcagttagtatacacacatttattaagtttgctctcttatacagacagttcgtgggcctccaaaacaattacaatagtaacatcaaagatcactgatcaccataacagatataatgaagagatttgaaatattgtgagaattatcaaaatgtcagacatgatgaagtgggcacataccactggaaaaatggcgctgatgacttgctcattgcagggttatcacaaaccttcaatttgtaaaaaacccacggagaggtgtgannnnnnnnnnnnnnnnnnnnnnnnnnnnnnnnnnnnnnnnnnnnnnnnnnnnnnnnnntgtctcaaaggagtagcagaactcccttaagccagtaccagtggcccctgaaccagaaaacagttatttcctcctgtggatactagacttagtcctctttattttgaatgcaactgtgaaactgctgatcacagaagatactctctgctcctatcgttctttcatcagccttgggttgggaggtctttctattccatctaccatcaaaccacttggcactttcattcccaaattgagagcaacatacttacactccagaaatgttgtcttgacaannnnnnnnnnnaattagggaaataagctgctggaaagggtaggaaagttctt

SEQ ID NO: 153409 - DNA, 531 bp, Homo Sapiens
tttatggttttctcttctgcatgtaactcttttaatctatcttgaatttattttagttaataatgtgacataaggctctcaaacaatgggaagaaactatctgtaagtagcaacttgcaagccattgagctgtgttcatttttaaaacatgagactggataaactgggccatctacaatttagaactaatatagaatcttgtttgcattcttggtctcaagataacgtcctcttcaacaataaaacttaatacaccatgtgacagaaactaagagtcttgctttcctaacaaagcaaatctctagagaatggaaataggaaatgcttgtgcctttttctctggttgttgaaatctggtaactctgaataacagacattcacatagttactaagccaggaaaggtcactgaagatgctgtgcttcagggggtggtgctgcctcttgagactagataccctattgcacttgggattctcttcccacctcactttactctgagaggaagacaagaagaattggacttctagggc

SEQ ID NO: 153410 - DNA, 160 bp, Homo Sapiens
  misc_feature (80)..(88): n is a, c, g, or t
cttcttgtttttttaaataatatatttaaaggcagtatcttttgtactgtgaatttgcagtagaagatgcagaatgcacnnnnnnnnnacttctgttggtgtgtattgtatatagtgtgtgtgcttcttgtgatgaaaataaactttttctttataaaaa

SEQ ID NO: 153411 - DNA, 588 bp, Homo Sapiens
ttgtgaggagccctcaagcaggcgttcaatccataatgagagcttgctcacatatcgtttgatggacttggatccaagaccacaggaaggtttccctcgagattcgcacaggtagagggtagagtcaacatcactgcacgaccctatggcttcctcctcttcgactgtcttttggggcttgaagaggcagaagtatttcttgtggccattcagagccagtacataaccagtgtagtcacgctccatgaaatgcttatcatattggtttgggattggagctgcatcttgagcaaattctagtaagtattctagccattctctgtgtttatctagactcaggaaggagaagtgtaggcagctgctcccagtaaatgtgtagacctccaaagcaaatttctgtagtaggctggtcttggtagaattcgacaggatgaggaccacattcatgtggcctggcctcagacgtaccaagttactggtgtatgttacatctgtgagttcagttacctccacaaagccttttttaggaatcttgctgtggagaaatattgaggagttaagatgctgtcaggatagggggaaagccgt

SEQ ID NO: 153412 - DNA, 594 bp, Homo Sapiens
  misc_feature (44)..(44): n is a, c, g, or t
gatatgacaagacagtacttactggtgaattttctgtgttcganagcctggctctgtagaactagaaattggtattgtaagcccaacagtgggttcattttttagagtagtctcaaatttataaatctcaaaaaaaaggaactgtgtaaactagaataacaatttactgattttcaagtaagaaatacgacatgcatttaattcaaactcatgcaaatatttatgaagcacctatgtccaggacactgtgctatgtgttgaaaatttggagttcaaatttatcaagaaagatatatattgaaaaagtaaaagtaggatgggtgttaagaaagaggaagtatgggagcttgtagaagcacgcacgaggtttataacctaggttagatggtcaggaagatctccaaaatgattttatcttaagggaatgagaaattattaaaaaggctttaaataggaaattagcatgatcagatttgtcggctagaatatttgtgtaatcggaaagggtaatgtttcaagaagtgtattaatgtcactttctgggtatacaacttaatcaatccaaggcacctttctgatgttggagcggccgca

SEQ ID NO: 153413 - DNA, 632 bp, Homo Sapiens
agtcacagcttccagaggaacgcaacaataaattacatcattaaataaactccggctggacccctctgccccgcccctccacatcctccactaggaccctgtggggactcagcctggtccagcccccgcattaggggagaccccattctcccctaatgagcctcacggggtcccgccctgatcctcagtccccggtgctcacttgcctgaccttgacagctgggcagctgctagtcagctgtctctaggggatgcagggggcagggcgtggagggcaaggagggggcagcagccaccccgcgccaggcctgtgtggctagaggtgtgtggggttctccaaagaggggtccgtcttagtcatgtgcaagaccacggtgggagccttatagtggcagtgcgtgccacgtccgtagctcccgggggcgcggcaggccttggcccgggcccggccagctgctatcttgcggtagcacaggctctgccaggtctggaaagtcttggagctccacacccagacgccgctggtgatccccaccaccagtgacatgaaaattttgagcatgaagaccgccacggtgggcaccgagccccctggcagcgagcagtccctccggcctccgggccccgcggcc

SEQ ID NO: 153414 - DNA, 552 bp, Homo Sapiens
tttatatttaataaatgaagttattgttctgactttggcaaacatgatagggtagagaatttctatatactctaaaaattataaaacatgtaactttaataaatggaagatgaccatatcttaataaacatgtaatgcttttctactgtgtaccacgaactattctgtttagctttccattacatagatccgttccacctgtttctttcttttaatctcaataatctctgtactgcctccatactggcctcaataagtgccactctccagttactgcttggccccagaatgaacacatatctgtgtcttaataaaccacagcaaagttgaggccgtaaacagcttttctaatgtcacgccgttcagaagagatccctgtttgttactcgtactctgttactgatacactatcaagaccaaaaagacaaccatatgagaacacaacagcacaccagaataaaacaatctgtagaattttatttctcactgttctcgtaattacacattagacactccaacttcttgccagactactaaaatgctacacaattg

SEQ ID NO: 153415 - DNA, 274 bp, Homo Sapiens
tttattatagccattctggttagtgttgttatgccattgtggttttaattttcttattactaataatgttaaacatttttcatgtgcttgttagccattcacctatctttttggataaaatgctgatttaaatatttttctcattttaaaatttgaattgtcatcttcttattaagttgaagtagttctttatatattccggatccagtgtcttcgtcagatatatgatttgcaattattttctcccagtctgctgcttgtctttttccctccc

SEQ ID NO: 153416 - DNA, 590 bp, Homo Sapiens
  misc_feature (131)..(153): n is a, c, g, or t
  misc_feature (188)..(227): n is a, c, g, or t
acgatcctttattaatcagaacaggccttgccacaaaaagcagggcccattcccacaaaaatatgattttgcaaagaggaaatcttgctggcttagagggtatgtgtggtggaaaaattttgtatggttcnnnnnnnnnnnnnnnnnnnnnnncttcagtttttcttcatttctcttcgctgcaaaannnnnnnnnnnnnnnnnnnnnnnnnnnnnnnnnnnnnnnnataaaacacttgcactcaagaacatacaaacagtggccaccaatccccacccctggggctccggggagccaccttggcttgtttgtggctgttttcctctgtcccttccctggcatctggtgccagagggcaggtgcgggggtcctggggcgggtggaatttgtacagcactttcatggggagatggtcacaagaaaggaaaccaggacaagataaggactaagtctagggcacccacaaagatggcagacgaagcccatgaaagggcctgcgacagagtgaagagacggatgggcctgcgttggcctcagctagctctggaggctctgtgggggaggggcaggtgggccttgcagtcaggat

SEQ ID NO: 153417 - DNA, 470 bp, Homo Sapiens
  misc_feature (345)..(354): n is a, c, g, or t
tttttggagatttgcagttcactccatggaggcagggtgtttgctggggtcaagctgcttcaggcatggacaggttttcccctctaggggtgagaacattttactgaaaattttttttggtaatggttgttggggggtgtttttggcacctcctgccttgggattctggagcttttgctgtcactgcatctgggcttgttaagaaggggcccagggacagggtgatcactgggtcactggtattctggcagccctaccttactcctggcaactggagggctcttttgtgctaaccccaagcctcaaattccacatttactggttgtagctgacatgtaatctgtnnnnnnnnnnctcaacagatctattttgagaactatgatgaacctccccttacccccagcctcctgggattggaagatgaccttcgagcaatcctggcaaactcctggccaaacctacaattccag

SEQ ID NO: 153418 - DNA, 564 bp, Homo Sapiens
  misc_feature (253)..(454): n is a, c, g, or t
tgaagaggcagtgaatgttccatgagctgcaagcagtggctgcctggtctctgatccggggttctaaccctttcttgtcttttaagctaagggagctgtgagactgagtttagacaggctgggggtcaatatgctgggtatttatataagcacatactcttaagtttagatctgtgctacaaaccacgacctagaagtacacaacactgtcctgtggaggcagcctggaggggtggaaataataataataatnnnnnnnnnnnnnnnnnnnnnnnnnnnnnnnnnnnnnnnnnnnnnnnnnnnnnnnnnnnnnnnnnnnnnnnnnnnnnnnnnnnnnnnnnnnnnnnnnnnnnnnnnnnnnnnnnnnnnnnnnnnnnnnnnnnnnnnnnnnnnnnnnnnnnnnnnnnnnnnnnnnnnnnnnnnnnnnnnnnnnnnnnnnnnnnnnnnnnnnnnncagtgactccaagcttctgacccagtttacagctgaggaaacatctaatgtgtgacaaagctgctgtcaaacctcattaggatgagttcatgctcttaaagttacagaaa

SEQ ID NO: 153419 - DNA, 495 bp, Homo Sapiens
  misc_feature (184)..(385): n is a, c, g, or t
ctttcttgtcttttaagctaagggagctgtgagactgagtttagacaggctgggggtcaatatgctgggtatttatataagcacatactcttaagtttagatctgtgctacaaaccacgacctagaagtacacaacactgtcctgtggaggcagcctggaggggtggaaataataataataatnnnnnnnnnnnnnnnnnnnnnnnnnnnnnnnnnnnnnnnnnnnnnnnnnnnnnnnnnnnnnnnnnnnnnnnnnnnnnnnnnnnnnnnnnnnnnnnnnnnnnnnnnnnnnnnnnnnnnnnnnnnnnnnnnnnnnnnnnnnnnnnnnnnnnnnnnnnnnnnnnnnnnnnnnnnnnnnnnnnnnnnnnnnnnnnnnnnnnnnnnncagtgactccaagcttctgacccagtttacagctgaggaaacatctaatgtgtgacaaagctgctgtcaaacctcattaggatgagttcatgctattaaagttacagaaa

SEQ ID NO: 153420 - DNA, 526 bp, Homo Sapiens
tgtggtagaacactgtagtatatttacaccctctgtatattgcattctaacttggaattctggtccgtggtttcatccattgttagctgcgatgctagactctcccgggagttaaatacagtggggctgtatttatgtgaagcgggtatgcttggtcgttcagtggctgtttcattgcatattacctcccactttgctcccatctgtgtgtgtggtaaagggaattgtcctaaaaaatacaggcttcctctgaacacagacatgtatttgtataccagtaagtcaacaatctcctgaatttgggtgccattaataattgtcctttttaaaaggcttttagagcttagagggggttagcagtcgttctgtggaaaccgatgtacatttccacattttctgtaaatgcattaaaaaataatgtgtattaaagtgaaaggaaatctgtaagatatctttttaacagaaaactttaatttttagattaatacagagatgaattgtcgtgtatctcttggaaatcaatggt

SEQ ID NO: 153421 - DNA, 685 bp, Homo Sapiens
  misc_feature (64)..(116): n is a, c, g, or t
tttctttcccgattaaatgcagcagcagatcccatgagccaagcttgatggatcaaaccttttnnnnnnnnnnnnnnnnnnnnnnnnnnnnnnnnnnnnnnnnnnnnnnnnnnnnnctcagtgctgcattgtacctaacttccacaacatctttctaaaactggaacccttctgttggtacattggcagatgaattgaaaccaaatgttccgccttgaattgcctctggaacaaggctagggtcttcatcaatatcatctgaagagaagaactgatcaatgatctcataggccaatttgtagatgtcttcattttcatgattttgaagttgttcaattttctccagccctccacattcttctataagattgcctatggtttctgcctcatcttcagccatttttaatatattacttagtccatcgagtactacttgcacaacttgtgcatcttttacagtcagcaagttgcaaaaaggtgggataacattttgttggataaggtaagccacttgatctttccttccactaattgttaagttacttatggcccaagcagcttctttttgagtgccaaaatcccccttatccaaaaggtgtattatcattggtacaagattggcatcaattactgcctgtacctgctgctgatttcctgcagtgatgttggataggcaccacactgc

SEQ ID NO: 153422 - DNA, 472 bp, Homo Sapiens
  misc_feature (313)..(313): n is a, c, g, or t
tttgacaaccaaatgagaaattttatttcaggtcagtaagtagaatttatgaagagaaaggagataattatgaggaatccctaggaaaattgggaggaaaacaacagttgtatagttgggagtagttctttaggatacgctcctcccttccttcttaccagcacttccttcctttctttctgactatttggatcccagtagcctgctcccaacctcatttcacctgctaaatctcttcttcctctgcctgcctcttcctggcactactttactgctattttaccaacctgaacatttggataaaacctagctncaggtaagaacttaattactttcaaaatatacaagggatatgggaggagacagcatggatacagtggagcagtagtcagtagtcagagcctaaattctattttcatttctgccgcttgaagctttatggccttaggcaaatcatctcacctttctgggt

SEQ ID NO: 153423 - DNA, 481 bp, Homo Sapiens
tttaactagtattgttataggtttagttttttcttgagttagttttggtagtttgtgtgctgctaggaatttgtccattttatctaggttatctaatttgttagcatataattgttaatagtatttccttacaatcctttttatttctgtaagattggcagtaatgtccccactttattcctgattttagtaacctgaatctttttgtcttgctcagtctttttaagggtttgtgaacattattatttcaaacaaccaaattttggttttgtggattctattttctactgtatatttcatttatctctactccagtctttactatttccttccttctgctagctttgggtttgatttcctcttctttttctagttcctgaaggtggaaggttaggttgctgattctaggtattttttaatgtaggcatgtgcagctataaaattgcctttgagcactgcttttgctgcattccaaacgttt

SEQ ID NO: 153424 - DNA, 544 bp, Homo Sapiens
ttttttttgattatgcctcgtgtgagtgtttcaggtttatttttctttcattgactgcttagtcaggcataaggactaagatgggaaattagctgccacagacctaccatctgatcctttacagaatgtttgtctaaagggaaagcaattcttcaggataagtgagcgaggaggagataagccaggccaaggcctctgtgcattcagcgagtttggaagtctgcaaaaagtgagaataggtgcaggttaactacttgattgtgcccattttcaccagtcacgatttgccagtccatgtgctgctcttttgaaggcacttgaattgtgtttgacttaaggtggtgatccaaagcagcagggaggggcctgttgaccagtgtggaagggcactcccaatttactgaaggagaatctgcagaacagagttgaagccttgtccttctgcaggtaaaggtccttctaggtcatcaagctggacttttcacatggtagctggctctgaagccgatatccttggcaccttcctccggtggcaacatcatag

SEQ ID NO: 153425 - DNA, 586 bp, Homo Sapiens
cagttctttaatatcattcattactcagttcaattctccacatctcttcattattcttaagatgtactacaatgactgggtcatttaattaagaatacttagttcttacctgtttacatgttttcctttctatggaaaagttggaatgtgtgatttactattttacaactcaaaagattattttaaaaatgttatagccactctaagttttcctgtcagccctgactcctgtttcccattcagaagcaaccacacatcatttttctagtcatccttctagaaatacacaccttttgattaaactctcagaaagtttaaacagcctaaatatctgacttctagctctatctgacatttcagattgggaaaaagtactaacttttatggtgtgatttcttttgccccttcatagccctttaatgatatattgctctgtacttattctaagaaaatatcaattactataagctatgttaaagagctggtttatggaactagcaaataaatagttaataaaaaaatattcaactcaaatatactgaaatgttctacataaagttttgagttaaaatcctaaacaatgaaa

SEQ ID NO: 153426 - DNA, 510 bp, Homo Sapiens
ttacttcactttattttgcaagtagggaaactgagcaaagatagtttaactgtgaagccaggacactggtcatattctaatgtttggagctttttctgctacttcgtgtcaaaatcattttacaaagaaaattatattgggttctttgaaagcaaccaagtaaatcatattttaataaaaagcaacactttacacttctattctcaccagtgatccacccagttcttcattatctttgacagtggcattacctaagggagattatgatagctgtcttgtataatctcagctataaaaataacatacatcaagtaatcacatattttccctgatccattttagatctataagtagtatcaaaatactacttgaaccttattttcagcttttatgaggatgaaaacacagggctatgtataaggcagtgttcttaccactttaaatgcatttaatcctcacaaccctttaagataagtagaattactccaattttacagatgagaaaaccaa

SEQ ID NO: 153427 - DNA, 469 bp, Homo Sapiens
ttttttttgagagtttgaaggcctggttataaactttatttttggctttcagcttccattagttctatgagtcagataaaatttacatttcctgactaatttacaaggttattgtgaggaagaaataccataatgtatgtgaaagtgctttataaactaaaacaggatacaaacataatagtacattacactcctatgtttgttttcaagaaagcttcattgaatcattcactaatcctaggataattaaccttttacctggattcaaggattgaggatttgatggaaagctggttgcataaaacacatgagcaaaatggatatagtgggttaagtttgctcgaaaatggatagtgtgttaagtttgctcttatttttaagtctggattcccagaggacatttaagtttgagaaataactcctagttgtggtatgttgctttcatcgtctgatgcctttgaagcacact

SEQ ID NO: 153428 - DNA, 474 bp, Homo Sapiens
ttttcaatattatctaaatatattcttattaatgacatacaaagtaataaatacattacagtgttaatgcatgtgtgtgttcaagagaaacaagtagaaagtaaacacaagacagagttcgtccctgtagattccacagtgaaaatgtgcagcgcccataaaggttgggacagaacggacgaaggccctcagtgcttccaatccactgacgtttattttcaggcaaaggcccattttaaatactttctatcaatgttaaaatgatgagtttaatgtgtcaaagtagcatgcttttaaaaattggggatttttttcatgggatgatttcatcaagtaaaaatctccaggcaaaaatatcctacactccaatttgcccaacctcctctgtccaaacaaaggaataacactcatctgagcaagacctcctcttcccgcctaagccttcccgcaccgcacgcccaccaatgggctggc

SEQ ID NO: 153429 - DNA, 478 bp, Homo Sapiens
ttttcataacacattagtttatttgaaatgtgaacagacagcaaaattgcacatggcccatttagtccagcttgcttgccaactcttctactcaaagacagggggacctattccgcctatctgtctcagaacctttaaaatggggtcaggaaatttgctacttgggcttagcaatgtgctggttgtctttgtcccacactctgcatctatctaggtgttttgcatataagaacatttcaatagcattaaatcatcaacaacctaaaagtcatgtctacacctgcaaagtgaaatgtggaattgagatagtttagagaagaaaaagggatttttgaaaatagacccaaatagtccatatgaaaaaaagatttatacttttgggcaagactcatggcccactgaatttgatattttgactctaagggtgtatcacaggctgtggaatgaaaggggtataggagcccagagccactcaatt

SEQ ID NO: 153430 - DNA, 549 bp, Homo Sapiens
tttttctatcctttacccgtcattatcattagttgttatgattctttctgcattttcggttaactatcatttccaaagacttgtcattcagtaatattagcagatagctgcttcgataaaggaatttggagtttaaaaatcaacttgtgaaaacaaggttgtttttgtctttatcgtttgttagagttatagatttatgatttcataggcttgattctatgtgaaatatctttttacttttatgcattttaataagatttaaaaatatttagattaaagccccctttaatgagtacaagaaaaactcttggcttgttagaagaaagtatattctttctagaatttggtgcaggaatatgtgttcatatccaggcaaacgggtgtgtttttatcttcagacaatgaaaccttctcctctggggctttgttgccaggaagattagaactaaatttatttttttcatttctgtcatgaaatcattccagatacctcttttcttctttccaaatggttttcacatgtgtttgaaatatttgtacttcgaattg

SEQ ID NO: 153431 - DNA, 500 bp, Homo Sapiens
ggaaggtgcacattgatgccactttgagaagaagtggactgtggtggatttgtaatgtatcagttttgccaagctgaatgcacatttcccagatttgccatctttagatagctctaggttagcctgggcaacaggagacacttggaagatagaattcgagtggctgttacacgcttttgtatactgggaagggcgttgttacagctcaggcatgatcttcatcttccctgacccttggactggtgggtgttttgcttcttgatctaacattaaggttagaagttgcaggattccagcagggttttgtcacatccaatctggtttaagttcccatattattaggaaagctttagggtgcttcaggaaaacgctttttaaaaaatcaaatttggaaaatatcaaatggaattacaggcaataagcataacccagtggaaacatgaatcaaaccctctagagcagggttgtctaaattttggcttccttgggccacactggga

SEQ ID NO: 153432 - DNA, 388 bp, Homo Sapiens
tttaaagctttctttgtcttcagtgacacttttcgtctcttgattgttgaagtactcaagtacttttccactttggcctttctttgaaacaaactcatcagatattcctagtgcttttagggtattagaataatgcttttctgctgccattcttgcatttttctgagcaactctttcaaatagcagtggcctcttttttaatttttcttctctttcttctagttctcgttggtattctctcatcctttccttttcgctctttctaaaattaaagaaaagcaatggaattttaaaagatcatctaagaaataagaacttacatatgtaacatttaacttatcaacttgtacaaagtcaatggaaaaaaagaaataacatttagcttagc

SEQ ID NO: 153433 - DNA, 573 bp, Homo Sapiens
ctgaaatggagccacaaaaaagttttcagtaagacagtgacatgatttaattttcttttaaagtcattattctggagctatgcagaaaatagattggaggtagacaagaatggaagcagggagaccagtagggaagctattgtaatagtctaggtgagagaagatggtggcttgcaccaggggcaagctcagataggaagtttaggagatgggtttgcaatacattttggaagtagaattgttgggattcagagatggattggatgtgggtggggtgtgaaggaaaaaggaagtcccaagtatcattgcctggtttcaggttttagtaaataggcagatagtgatgccattttttgaggtaaagaaacttgaggaagaggcacctatgtagggataatcattaaatccattttttaaaaagtcagtttatggaggtataattttcactcagcaaaattaacagtacaatttaacattttgagaaatattgtttttgtgaaactatcatgccaatcatcttaaaaagtttcctgatgccctttgtagttagtcctctccccctctacatctaca

SEQ ID NO: 153434 - DNA, 683 bp, Homo Sapiens
  misc_feature (77)..(113): n is a, c, g, or t
  misc_feature (362)..(369): n is a, c, g, or t
tttcccagcttctgcagtatttatttctttaaatatttaacagtgttgagaggcaatgactcgcaataatatgtagnnnnnnnnnnnnnnnnnnnnnnnnnnnnnnnnnnnnnaacaataaaatcctgtttgatgaaaaacagcagtcagtaaaactatacagtctacgatattttaaagccatagcaataactagtttaaaaagaatagaaagcaaacagtgcattgattaaatcacggtcataaaggaacatttacgttcactaaaaagtccacccaggtaatttccccttgtatgtattaggggatggaaagaaggcacaggaaaagtggataaagtatggattaaaaaacaactcttnnnnnnnncccccgccaccccccaaaagccaggtggagctctattgaccacaagccggggtagctacatccagtgcaacggtggggtgctccaagcgccttcgaaacgtcctctacgccagcaccaactggcaaaaccttctaattttctagacgcctttctgcttggttttggaaggggaggcacccaagtgggtgtgtgcgacacctctagttgtaagccgggacacagtgacgtcgagagagcgctattctactcggagaggaagttaatcccatcgaactccagccaggaaaacgtgggcttgggaaccgcggccgca

SEQ ID NO: 153435 - DNA, 621 bp, Homo Sapiens
ttttttctatcctttttccaaaactttatttcacaatacccaaatataattctatacttttgtcacgcaatcaggaaccacacattgatttaagcatctacatcgtttttgctgtgcaagcaatacttttccagtcttattctgaactgaagtgagctgtcagtcccgacaattctcaactgctttggaaatgcaatccactggtgttccatttttaataccgtgaagtcttgttttattcttgaagaatatgaatctgaaatgtacatgaagatgctggaatagataccatctcaaactcagctgtcattgactgaagaaacaagccaagggcaggccatgaatcagggagggagggcaaggtcgggcacagccaactggtccaggttcctcttgctcagtcagacccactgtgcaggacctgaagggcaggaaggcagctcaaactatggccctggtaacagtgacaggagggcagccaaatgcctaggcagatagggggtgggacccccagtgaaaccccacttccaagccaaagacagtttaaagcctgaaagccaagctacaggttaaatcctcagaccagattgagaactggcctttcctctgattgatccccac

SEQ ID NO: 153436 - DNA, 597 bp, Homo Sapiens
  misc_feature (125)..(149): n is a, c, g, or t
  misc_feature (443)..(443): n is a, c, g, or t
tttaacacttcttaaatataaagttttgcaacaaacctttgatttatatcaaatataattaaaaattaacaaatgaatacattgtatcaaaaagtacgaagatatacattatcatgcacatactnnnnnnnnnnnnnnnnnnnnnnnnngttacatgcacacataacttgttcaaactacagccactgcttgactggttccagatgcagacaactgggtgatgcacttcaaatttggcagctcactatgagattcaggggacatatatgatagccggagaagacacagtgagaaacaaaacccaaagtcaggaaaacaagacataatgtctcctttccccgctccctgtagttttcatcaattccaatgcctagaagagtctagacaagccagctaggctgtgtgggtttagaaaagtggattctcgacccaacactgcctgnggaaatggctgtggttctgcatggaatggacacattcgacacccaagataacatgggctgggggctggggaacaagagacaaaacgtcagtgtcaaaaaacacatccttctactttgcaacacgagcacagtgatcacatgcacagtccgagat

SEQ ID NO: 153437 - DNA, 305 bp, Homo Sapiens
tttttaggttcttcctgtcctttccttccttccttttttctcttttccgccccgcactccgtttcccggtttcccccctcgttggtaaggcgtttttatagtttatgtgacgtagcaatcttggttgctggaatggctgtatcatagcgatatttatctcttcctgctcctcgataggccactggccctgcaccctttaccttctccactctttgatcagaaacagggtatatgaacaaattttctagtcgagttttcaatgtgaatttgttcttacattatggctcccgaggggaagcgattac

SEQ ID NO: 153438 - DNA, 360 bp, Homo Sapiens
tttctgttaagcatggcttcagatttattaccaaaatgacagaaaatgaacgcatttttatttttgctatgttctacccaaatcagcaaaaacaaaacaaagatgcattgtaatgttgttatattgtgttccttgcagaagaaggattgatgaccaacataatcatcagatagtaaaacatgtgatgtaaccaagaagtgttacagttctattatcacaaaaagggggacaaatctgccaagtagttgaacactacggatgtttaccaaaatcacagtaaaataaaattgaatcactgataaatacaaaaagcgaaagtaatatattaaaggtggtagtggtttgggaggtgaaggggaa

SEQ ID NO: 153439 - DNA, 512 bp, Homo Sapiens
atgtattatgtatagaggagtcattttctgattgtattttaacaatcacaaagcagatatctaaaggcaagtattgcctttcagtttcctgaaggtgtttagcaagtgtttaggaacagatttgttgttttttcaaaaccacatagttctttctctgaattcccttttcaaaattttctctctccatcctcccatgagcccttttccccttcttgcatgtttctgtgcatatgtgcggacaagtaaactgttttgaaggtgagactcttggcagaaaagagatgagattgaggcatttgctgttctacaaaatcaccgttatcagatttccagaatcagatgtcagtgatagatcagacactaggcctgtgaatttgcagatagtattgccttgcctaatgaattagatataagacctggacttagtatatatctcatgctccgtttctggacaagattttttttcttccagtggctctgcttattatatataataaaattattttaaaaaa

SEQ ID NO: 153440 - DNA, 381 bp, Homo Sapiens
  misc_feature (328)..(339): n is a, c, g, or t
tttttagaaaagctctttgtcttaaattccttggatttttttcatgttgagactatctctttttcttatatttgaacaacatcttgactgggtatcattttcttgggccacattttgtctctgaaatttgtggcatgtttcatgtttttctggcattgaaccttgcctcagagaggtctgagataagtccaattcccaactctgcttcaccccttttaggcaacttgctttattgtctggttggttgtgttcaaggaattctttctttaactttaatgtttagtgacttaactgggatagagatcagtagctaccatgctgtgtcagnnnnnnnnnnnncttggaacatggtgtgttatttccatctgtaactaatttcct

SEQ ID NO: 153441 - DNA, 531 bp, Homo Sapiens
atgagtatttttcttttgaggtcattgggggatggcaaagccctgcctggttcaagctagagagaaacagaaagagctgaattaaggaagggctgtgcttctccattctccttcccagtccaggaggagcctgggaggcctgggagtgatgcaacccaacacccactagatggcaggcggcacagccttctgttttcactccccaacccaaattagcacacccattgagcttttccttagactagtgctgcaaacttgaaatccacatagtttccagaggtgtgcagagctgctccaacctccccagtggagcaggggtctggcctgggatgtgccggggaggggttcctgctccccagagggccttgcaccttttaagtatctggtaaagtgcaagggacaattgtgatggctgggttcagaattagctttcccaagtgagaggccccccagatccccccaagtgtcaggctgtatagtaagcctgtctgctgagtaggctgacccaaccctcaacacttgagattgtgg

SEQ ID NO: 153442 - DNA, 607 bp, Homo Sapiens
ggtctttcattctttctatttattttgtacccattgctcatttctttggactaaacttcttctgcttataatcattattaatgtctagaaagaataataggcctgaaagcaaaaaatgccagaatttcatggggttatttttgtcctatggtagatatgggaaattcagtccataattttatatgaatatatgttcataaaggcataagaattatgttagctaattgctgagaattgtgggagaaatggagattattgggcttttgagacagaacaaggctgcagagtacttagatttcatttaagttcaaagatacacaggaagtgcttggttggtgccgtctctgagtgcagctgatgttcaatggatttggcctggggggaggatgtctagggaatcggttggaatccagctctggtatcagacagacttggtattcctggttctgctgcttagcagccatgtgaccacgaaaatgctgcaggacccctgagcctccttatccacttctgtgaaggtggattaatcatgttctttcctcatgagatggtactgagacttgtattggacaaagtaagtgacatgtcatcccagcactgagtacag

SEQ ID NO: 153443 - DNA, 614 bp, Homo Sapiens
tttctgtattttctatatttttcacaactaatatataatattttatagtcaaggggaaaatataatttgaaatattaaaacttccagtacagaatttgatattaagataatttcctaatttaaaaactactctgccaactatggatactgaacaaaataaaagactatatgctctaaaccctaaaagttgtccatctaaattacagaacactatgtcgacaatgtgtaaccatagcaacattttcaactgtaatcaggtctaatcattgcaaatgtcatattgatctaaaagggtatgttttttcttccaacaacttactgacatttcacccatttcccaaaataagaacaatgaaaagaaatagctgacaattgttaagttgccttacatcattcataatgtgcacaggacatggagtcttacttatgaccaaatcacactttttgcgcaatgaaaactttccaatcattgaggtcccccactcccctcttttagtatttactctgtgccaatgatatccacagtatggaaaggtatcattgccacatatgtcactccttactgagatccacatctatttctaggcatgaacatatcttaacagactttagct

SEQ ID NO: 153444 - DNA, 565 bp, Homo Sapiens
tttgtttctcttaatatataatttgtaaataaattataaattgtacagtggtatttcatataaaatatacacttgcatcctactcatgtaaagtgagcacagcagtgtaacaagataccctatgtgtatgaaaatatcctaattgtgttcctggaatttctaagtcacacaaataaaatctgaaataaaacataaaccccatgacaaaggaaaacggaggggaatttccttgatggacctagaccttcttttgcatggctttaatttcagcctgataagctaatttcacaaacaggcgttagttacatatttataatattttttttctacatttattaaccccacattggcagaagatttccttctcaggcacagtcccagcttcatagccataatcccatgttagctctgttcttgctttcacatacctgttggtgaagaatgccaccaatggaaaattcctgttgtgtgtttctacaaaaacattctgtaccaagagatttgggcaacaactatgattaaggaagcggccgacatttccttcttttgtggcatccaatagaaa

SEQ ID NO: 153445 - DNA, 458 bp, Homo Sapiens
  misc_feature (329)..(387): n is a, c, g, or t
ttgcggccgccaacttttctttgattaataaccccagttccaggttgtaattttggtggactcataattgaatagcataaaattattcataaagttatttgaggtaatctcagttgattaactgaagaaagcttgtttgcttgatgtctgatatttatgttacttttgtgtgcacatgtgtacacgtggtgtatattaaaaacttcaggctctctgcactgtggatgaatttgatccaaccaagctagactgtgagtttcttgaggagtaattgtcgggaaagtagataaagtataagctttagaatcatatatttagattcaaatatnnnnnnnnnnnnnnnnnnnnnnnnnnnnnnnnnnnnnnnnnnnnnnnnnnnnnnnnnnnattccttaactctccctgttttccattcctaaatgtgtatgatgaattatttgcagagccatttggaggac

SEQ ID NO: 153446 - DNA, 839 bp, Homo Sapiens
  misc_feature (95)..(95): n is a, c, g, or t
  misc_feature (717)..(730): n is a, c, g, or t
acaattgttgtcaaagctgtttggatttttaaatgtaaatactgaggactaagaaatcttgttaagaagcaggaaatatctcagttgatacttanaagcagatattccacagaaaaggacacaaaacctattacaagctctatccaatgtagttacatggtctattgatgagggcagttcatttattttatgtagtaaaactatggtaagttaaaagcaataacacttggggcataaattagaagtattattttcaaagtgacatcttcattgaaaacacagttgaagcactgaaaataagtgatctagatgaagtggctctcctacaatctgcctgagaaccctggattcccccactgtagaatgtgtcacactatatgtaattgtttatttatgtgtctacattttagctaaaagatagcaaggaccaagacagccctgtgtagagctgaatcctcaatgcctagcacagtgacttggcatgcagcagctttttgttaagtacttatttcatgaaggaatgagtaaatattgagtctgatggcctcttgaacttgacggttcaagacactgacacctctctttgggaactatatcattttttgaggagtatgatatgtggagaatgatggagtacgtgtctggaaataagaataatcataatgatgttctattgataacacatatcaataagtccagatgcaccttttgaggctnnnnnnnnnnnnnncaacagtaaacactatcattaaaggaaacttcatagaaactgttccaataactgcaatgagaactaattgaacctgaatttacaaatagtacacaggcttccatgctaa

SEQ ID NO: 153447 - DNA, 569 bp, Homo Sapiens
  misc_feature (236)..(270): n is a, c, g, or t
tttcagtccaacacactttattcatttttaacttttttcttaattttcaataatcaagtattcaagatgctgtaaaccaagattagtacatcgacaacagatttcattaaacacacggaaattatacatcttttaaattaccttaaaaagtctccaaatgaatatcattttaaaaatcacaaaatcaaacttctttatgcaacagtgcaaaacctttcatcacaaacatacctctnnnnnnnnnnnnnnnnnnnnnnnnnnnnnnnnnnntccactaagaacctaatgccagtttagttgacacagtattacatttccttaaacaaaagagtcagagcctgacctgcctgtttcaggattctaaattaacatttggggtttggggtagaggtatgtattttaagaaaaatgcccactatttggtactactcttaccaattatcaattaccaattgccaataatcggtactagtcttaccaatgattcttatttttcatttctagatacaaactttaaacctcttttgttcacccctttggtttaatgtgtccctgcaattactttagtt

SEQ ID NO: 153448 - DNA, 504 bp, Homo Sapiens
tttggactgattgttttggcattgtaaatctgccttccaaattcacccacaaacatgtttctgtggaaacagagccacaaatagaagcagtggttattgattttcctttggggctaccacctggtttctgcaaaaccctggagagcatgtgccaacttccgtgtgtattttatctcctcttttctctccctattgctcccatacccacatgagttttaaaataatcagttatctattatttatcaaaaagccagtaaactggctgtgtcttagtcatctcaggctgctataacaaaatattataaactgaataacttataaataacagacctttatttctcacagttctgaaggctggaagtttgagatcagggtgtcagcaggatcaggttttggtgagagcccatttcttcatttatagacacccaccatatttgtgctgcatcctcatatggcagtaggaggaagggacgtctccaggtctttttaataaggatgttaatc

SEQ ID NO: 153449 - DNA, 559 bp, Homo Sapiens
  misc_feature (50)..(50): n is a, c, g, or t
gtatttatcttttctgatctgaggagcttcagttcttattttcccaatgnattccccaataaaactcaatgactcaatggaattaaatacacagaagcacccatgtggtttaaaggcggcagtccataactgactcaaaaagtaaggcgatttggcatcaaccggccgaagatcaagttcataaatttttccatctaaggcatactcatcatcagtggattgtgtccttatctcatttgctagttcttgggcaaggccatccttccctaaaataaaaaggttaactttatctatattggtactatcgtgatataatcttaagcggccatgatccaactgtaaaagactactagcaagtaactgctccactttaatgtctgtacaattttggccactaagacatgtttctttagtgggatgataaacaaatcctatatgcttaagtagaagggattccctatcaggtgcaagtttctgtaaagctttatatctaggttcttcactcagaactgtatgaatttcactcattttatctgaactaggtgttgcattaagatct

SEQ ID NO: 153450 - DNA, 490 bp, Homo Sapiens
tggtgatctgaaattgaacgaaggtcactctagtgaagttctcctgggcatttttctactaaaggtttggccaactttctcaaaacataataaacagacattactgcactttggccctccagaaagtcaacgagcaaaatgtcttggcatcccaaaacactgttgccatgacctttgctcttgactggtccactttcgccttaatgggaccacttcggcctcttggtagccattgctttgattgtgcttagtcttcagtattgtactggtgaagccatggtttatctcctgttacaattctttcaagaaatgcttcaggatcttaatctcacttgtttaaaatttccattgaaacctctgctcttgtctgcagctgatctgggcatgagggtttcgacactcattgagtggaaagtttgctcaactttaactttcagtcagaattgagtaagctgaaccagttgagatgtctatgatgttggcggccgca

SEQ ID NO: 153451 - DNA, 451 bp, Homo Sapiens
ttttcaaatttccaaaggtatatgtactttaattgtgacttgaactcaaggtaaataaattaaataattaataaattaaccttagcttactggacggccaccatcttatatgctgttcccttgactgaaatgttgtggggtaaatgactatatatgaaatgggacttattggaggaattaatgcatctgataatggaggttgagaagttccacaacaggccatctgcacagcagagaccctgaaatgctggaagcaggacttaatccagcccaaaaacctaagacccagggaagccgatggtgtaattcttagttcaaggccaaaatccttagatccttcgggaggccactggtgtatgccctggagtccaagggctagaaatcctagactctgatgtccacaggcagaagagtgtcccagctccaggagatcagatggatttgcttttcc

SEQ ID NO: 153452 - DNA, 456 bp, Homo Sapiens
  misc_feature (219)..(227): n is a, c, g, or t
accataggcctattggaacccttaaggtaaagctaacacggacagttccccccagaggaagatggcatccttaatgtgaacagcttttcccaagatcacagatcaagacttctctactatcatgagactcttatcttaagtatctgtgcagctgctaacacttacagcatgtggagaaaacatggggtattataaagatttggttgtagggaattaacnnnnnnnnnccacttagttaagcaagtaaaccctttatctaatgcattctttaatctatttgatttttggtggtttgatttatggggaccctgagtaaggagcatataccacatcttggtgttatcccaatagtcataagagtctccctggtgtactgtacttactcaaatgtttcaagagtttgcatgcagccatctctaaaatgtcaaatggtgtctctttaactggaatgacaag

SEQ ID NO: 153453 - DNA, 483 bp, Homo Sapiens
  misc_feature (372)..(389): n is a, c, g, or t
tttttttggtgcatgtgtttttgatgcatagaatagagtaatacatatgtaatttataaatgagaatacataggatggacatgttcaaaaatttttaccacatgtgatctaaaaatttagaaaccattgctttccaaaggtgaattgaacatgaataagggcttcatgatgctatggggaggaacgggaaatgattacggaacaagtgtttgtaatctcggaattctgactctggttactactagttccagttatttgatcaatagggagttcactaactcttaatctgacgccaggacagtcccttttaagatgtgaagaaattgctcaatgttaggatgttgaccgaagaaagtagatttcaatcatgcnnnnnnnnnnnnnnnnnncattttgttttctcaagggtcccatgggaacagaaagttttgagggagtttactgtttgtgcaagatgactggttgggtaaagaagtccaaagt

SEQ ID NO: 153454 - DNA, 390 bp, Homo Sapiens
tttttttataatgcactttaatttattggctcgtgggactgaaggctgggaagcccaagatcgaggagctggcatttggtgaggaccttcttgcttcatcaacccagaggccgggcaaagagagggtgggaaggcaaacttcttttataagaaaactacttgctctataatgaacccactcctttgagaatggcattaatgcatttatgagggtagtggccccatgacccaaacacttcccactaggtcccatctccaagaccaccacattggggatcaagtgttctaacacatgaactttaggggacacattcaaaccatagcagtagtatgcattttcactagtaatatacattgaagattcttctgtgtttttttcatgacttggta

SEQ ID NO: 153455 - DNA, 489 bp, Homo Sapiens
aacaaggaatgagcttacatcgttaacatgcaaataaatgacccttgtagcacagcggggcaccctcccagtgtgaggcgaggctgctgaggggagggcgtgtgagggtgaatgcggacggtgcaggcgcagctctcggtccagcgccaggacatgggacagcatttacccaagtcagcactgctcctcttggcacctgaaacaactcaactcaccatttactggagctcagagaaagttcattgagaggctggcttcaaacgcagttaaaagacccgagagatttctttaggccagtaataacaagttaggaaaatacagcaggaaaaactcttcatcagcacaaaacgtgctggaataagataactgacgatcggtcagagctgatgcagggaacgccccggctccaggatggctccaggaccaggctcggggtccgggatgcagaggcccaggtggcagatgccgcgctaacctgacgcggccgca

SEQ ID NO: 153456 - DNA, 987 bp, Homo Sapiens
  misc_feature (430)..(444): n is a, c, g, or t
  misc_feature (462)..(867): n is a, c, g, or t
gccgtcgtcttctgtgcttgtttgaaaacctgtttgaagaggtaaggggtgggccattccgttgtgaacactctgagctggtgtgcatgtggcccctgcacagcagccctggccgagcttggctgtgctcctggcactcagagtcaggtagctgagcactcgctcccttttcttctccctgaaacttcaaatattttcttaaagcaattattttttacttatctgtcatttaatgacaaccttagtttcctcctctctttccagttagctgtgccaggggataggtctgtcctagggagcagctgccccctcctctcctcctccctcaggagcgtgcaggatgtctgtgcacaccagcgccagcctgcctcctggtgacacctctcatcacaggactaacaggacccaaatgacacgaggggttttattnnnnnnnnnnnnnnncctcgttccgaattcttnnnnnnnnnnnnnnnnnnnnnnnnnnnnnnnnnnnnnnnnnnnnnnnnnnnnnnnnnnnnnnnnnnnnnnnnnnnnnnnnnnnnnnnnnnnnnnnnnnnnnnnnnnnnnnnnnnnnnnnnnnnnnnnnnnnnnnnnnnnnnnnnnnnnnnnnnnnnnnnnnnnnnnnnnnnnnnnnnnnnnnnnnnnnnnnnnnnnnnnnnnnnnnnnnnnnnnnnnnnnnnnnnnnnnnnnnnnnnnnnnnnnnnnnnnnnnnnnnnnnnnnnnnnnnnnnnnnnnnnnnnnnnnnnnnnnnnnnnnnnnnnnnnnnnnnnnnnnnnnnnnnnnnnnnnnnnnnnnnnnnnnnnnnnnnnnnnnnnnnnnnnnnnnnnnnnnnnnnnnnnnnnnnnnnnnnnnnnnnnnnnnnnnagcaaagggcaggacgttaaaaggcgctgtgctggggttgtccataggcgccgcccttgacagcatccaaaatcttgctcatgtcattgggggaaccccacggctttacatacacggttc

SEQ ID NO: 153457 - DNA, 535 bp, Homo Sapiens
tttttttaatgatatatgaaagtggtttatttagtttttatatgcactaaaataccaagagaaatggaatacaatttttactctctctataaatcatttctgtcacgtggtggcccctaaaactaaaacttgatagctgatttccaaaaccactgttgtaccttatttcaaatctcccaccttaccaaacttgaatgaaaaaatgttttagataccagttctacttgtgggaaaaagcttttaaatactgcctgaaaaatggcttttcatgaccagttagatttcaaaacttacagacaataccatggaaataaggcggaatttatggagcagtacattgtggcagaaacaatgaggtccaattcgtgtagacagacaaaacaggtactgccattcttggctatctagtgttatcctgagattgtgatacacgacattacacatcagtacacggtgcttcatttagcctcaagtgttgaaacagtacccaatatcaaagatcagggtcccaacatgcagagaaactctgagccaa

SEQ ID NO: 153458 - DNA, 467 bp, Homo Sapiens
aactattgctgaattgaatttattgaatacatgcagagtacaaacggccccaaatcacagcaggttgaagtattcacagagcctgaaggaaagtggacagcagagatagtggctctggaaattggatgaggtgggcatctggaatgtagtaaagcagcagcaagcaggagatactgcttggcgactagatgagctcaggtagcccatcactggtacattgtttggggatgctgtagacaaaggaatgacagcattggagtatttattgaatgcctatcacaggctgagccctttcctaggattcatatgcttttctcaatggaagaatcaagaagatagttcattatttctccttaatacaaggccccatcgtcttcccaagaaccccacactcctactggctcaactcccatttgttggagaagctgaaaaagctgaccaggtaggaagtttctttctctgaatga

SEQ ID NO: 153459 - DNA, 402 bp, Homo Sapiens
ccaactctaaagttaggtccaaccattaaaactccagacgatgaagacccagttcctcgagtgttgtgtcccgatcgaccactaggtcgtgccattttatcatctgatttgtccttgtctttctttttattttccatatcaagtttgcggtactccactttgaattctttaatcaagacaagcacactgaaacagggtattgtgaaaataggtacatcactaggtaactgtaccagatgggtaatgttaacattcaaattgcagtaggtagtcaattaactggagcatgttcatcccattcgtaaaatttttcttagtgtcttttcagcaaaacatgtcttcaaaattatcttttcaatgatgtgagctgatattgatagagagctcaaaggcgcggccgca

SEQ ID NO: 153460 - DNA, 407 bp, Homo Sapiens
ctggctgcgcgccggttttaaatagcatctttcggacttgtcttcgcggccccagtccccgacctcggcgctgcctgggctcctgcagcctctccctaagtcttctccaaacgaccacctcacggattccttatggatcgcagctccaagaggaggcaggtgaagcctttggcagcttctctgctggaagctcttgattatgatagttcagatgacagtgattttaaagttggagatgcctcagattctgaagggagtggtaatggaagtgaagatgcttcaaaggacagtggagaaggttcctgtagtgattctgatgaaaatattttagaagaagaactgaatgaagatattaaagtaaaagaagaacaacttaaaaattctgcagaggaagaagtactatcatc

SEQ ID NO: 153461 - DNA, 420 bp, Homo Sapiens
actttcaaatgactgtatattttaattatagcatttgcatacaactgagtttatttatctatgctgtacgctaagtttaggggcaggcttggtgcacaaatggtttcgcccaccctttgcacagggcaagccccccccaggcgcccaggctgggaggcccaagtcccggcagctgctgcggtggacttagaggcagcagctcctgcttctgccccaaacgttcagtgtagtcggattcccggggacagcagggcagtctgcgcgcacatccccggggcatcgcaggacacctgctgccccctatcggtggtgagaacaataacccgaacccggttggaatcaactggaagaggccttttgaaaaaaagaatattccaggactacgcagtagccagacgactctctaagaacatgggtttc

SEQ ID NO: 153462 - DNA, 387 bp, Homo Sapiens
ctaaggaaaaggcatttgggcatttttatttcttctgttttatttttgtaaggaatgggacaacaaccaaatccagcctttggtcgagtgtttagtcctcccaatgcaatgatgtcgtcaaaaatgggtccctcccaaaatcccatgatgcaacacccgcagggtgcttccatttattagtccttaaaaatgaagggctggccatcaggaaatttggccaggaacaggtaaagaacagtgacttataaagttagtcacatcctagtcccaaaagtccaaaaacttaatgtatttttcagtcaagcctttttggatggaaaggttgaaaggactgggttcatattaaaaggtgtgatttggcttgtccattttgagagtccttcaagc

SEQ ID NO: 153463 - DNA, 511 bp, Homo Sapiens
gccacacatatcaaagcagtatgcattacagtcttttattcaataaacgatggttacaggcactatgcgaaatcttttccatacattgtttcattttattcacactaattttcatacaggtagttacaatccctattgtataggtaaggaaaatatgaggctcagagaagcctagtgactttcccaaggtcacacagctagtaaatgacaggtctggatgtttagtccaggtctatggaaatgtcaaacatatacagttagcactaccctgcactgcctcccaatctgtttggctttaaagagtccctaatcaatctggtcatttacaattaatgtgtaaaccataatgaaaatggaaatgattaaggctggaacccaggcctattattcttgaattagtcttgtgcggtggttggaatactaggcccagtggggtgagacacaggcctgcctcccagggtctttcctgtcctccgctcattccaccactacatgtagatatttgaaaagg

SEQ ID NO: 153464 - DNA, 384 bp, Homo Sapiens
agtgctacattataaatttattgaaggtaaagatcattttcttcctagacaaagccttatatttaagttttaaagcctcacaacttaaacatgtgaaaattataaacagtcccttcaactgtatcattgcttaaaactcccaaagttcaggaaaacaataaatcacaggtggaacagattcaatatgagaaaatgtagtgggagttggagaatacagtttttcgagggcagagggggctggcttgccctttttactattatgtacactactactacgttaagataacaagcatggtttttatgtttcttaaaactatcttctaaaatataacagtaaaacagagtaaaaagataccttaagagaagcatggaatgacccacaac

SEQ ID NO: 153465 - DNA, 446 bp, Homo Sapiens
acgtgcttatagcagctttattcctaatcgccaaaaactgtaaacaaaccaagtatccttcattgaatgatgtaaatcaaattggtacatcaatacgatgaaatactactcgctgttaaaagcaacggcatagatgaatctcaaagacattatgccaagtaaaggaaggcagcctccaggttatatcatgtatgatcctatctatgtgacattctggaaagggcagcagggacagagaacagatgagtgtttggaagaggaggggtggggtaacaaaggggaagcatgaggggatttttaggtgatagaactgccctgtgtcctgattgtggtggtagatacattaatctttacaaatgttacaactcagagctgtacatccaaaaagttacgatgcaaaaaagttttatttacctcctcacatttatgatgtttagaattctaaa

SEQ ID NO: 153466 - DNA, 504 bp, Homo Sapiens
ttttcaggtcttttaccagagtttctagagtaacttcttttccaaaaacagaaagatcaaggatggcatttacagagctgaagatcttgtcaccaaaatgagagactctgagagagactgtgagttcagcatgtctagtcttccttgctagccagtgtttcttttgtctgatgacattctctgcaacttttttttctttgaatattacatatgcaactcccttggttcttgtcggatatatcacatcttcaacatctccgccctcattcttaatgtcttggaagtggctcttcactaatacggccaataattgatcactaaaaaggtcaactggaagaccagcaactacaaccgttctttcaggagctttggattccttgacattcaaaactgatgccatggcggaggggagacgcgccctcagcggccacaggaagcccacaaccagcggaacgcaggcgatggggagaggagcgagcaggcaggttttggtttcgttttttt

SEQ ID NO: 153467 - DNA, 537 bp, Homo Sapiens
  misc_feature (158)..(158): n is a, c, g, or t
atctatgcatttcagcaagtgctcccggcaatagtcccgttcgatcatccgcaagtttgaaataggtttgtctccactcgtgcactccacagtagccccgactgtccgcagccggacaaatgtcggtgtgaactgatagtggacataacgtcctgcgntgatgtccacgtctccacctccctcctcctcatcctcctcctggtctgaaacgcaaggtttggcaatctcaaaaagtactgtccctgtctccaaatctcgaattttgaagcgggtgaaatcaatactgtagatgttgtcttcgggtttacataaataattctcggtgacccggctgaggcgcaggacgtgctcgggccggatggtgtccagcgccagcagctcctgctccgtgaccgctgccccgacgccgtcgtcggccgcgtggtggggcgcctgccgccgcgccttcaggcggttcaggacgccgccgcccgccttcttcttctcctccttgccagccaccagccccccgggcccagccgccgacgccgcggccgc

SEQ ID NO: 153468 - DNA, 489 bp, Homo Sapiens
ttctaactaagttttaaagagaagggaaacttaagcaagtacattcattctaaacttgtgtatataatctttaatcttagaagtgcatctgtattttgatttttaggtcagcgtacacaagtagagttagttgtccgtagtccctcaccttatctgcggttttgctttcgtatggttctgaggtcagaaaatattaaatggaaaattccagaaataagcacttcataagtttaaattgcacaccattctgagtattgtgatgaaattcatgccatccacttctgtcctatctggtctcacctgggacatgaatcattcctttgttcagtctatccacactatatacaccacctgccgttagtcactgtgtagccatctcggttatcagctcgactgctgtggtatcacagtgcttatgttcaagtaaccttattttacttaataatggccccaaaacacaagagttgtgatgctggcaattcaagaagc

SEQ ID NO: 153469 - DNA, 443 bp, Homo Sapiens
  misc_feature (302)..(302): n is a, c, g, or t
  misc_feature (312)..(312): n is a, c, g, or t
ttcactagattatatgtgtttggggatgagaaagattagaaaattaaggcagttttttaaaaagttggcatgagatacagcaaaacaactggatggaaggcattaagggcagagactgggggggttttatttctattctggagaatgaaccagactccaggcctgtgtgcgcccccactgtaccccttgcttcctttccaaatagccaataaaaggctgcaatgaagtgtgtctgacaagcagtcccaatggcaaaagaatatcaagactgtttcaattatgtagaagaaatgtggaaaggnctgcaaacangacactgacagtaagcgtattaaggctgttataatagctttatgaaatattataggagaattcagagtttgataataggtatttgacagctttctacctcttagatagctttctgttctctgtagactcaa

SEQ ID NO: 153470 - DNA, 605 bp, Homo Sapiens
  misc_feature (41)..(85): n is a, c, g, or t
aagatgtaagtatttatattcacagcctcttatgttaacgnnnnnnnnnnnnnnnnnnnnnnnnnnnnnnnnnnnnnnnnnnnnncaactagaccccacaccagggcaccctaagaggggaaaaaagtgaattcaaagcaaaaataactatttgactataatataggccacaaaaaatcttgatataactcctagttataattttgatgcaaccaagttattttttatatattttgttatttattcttttaataatggaatttttttaaaaagtattttgtaactgaggaattttgataatttggggattttgttttcccttggtctaatggagagaaagacattttggttttctttttccattttgggttccttttgtttcaggcacggataacagcaaatggaattctgtatttattattatttaagtgtagcgcagatgtgtgtgcttgggcgtgtttctcgtgtcgcgtttgcgtgtcggctcttgcggtggagtcctgttgctgtgagggagtgctggccgcaggcagcctcgagtcaccgccaggctcacaggctgtgccacccgtccctccgtcagctccaatgctgtgaccctcctt

SEQ ID NO: 153471 - DNA, 387 bp, Homo Sapiens
cacattcaatatccaacaaatagagtaataaaagtttgttgctagtgttattgatattgtggatcattttacaaggatatattaatgatattattgttatatgtgaaagtttacagttgacagatgttttctttatatattaatgtgatatgaattttcacatttctgtcaaatagaagatggctgttattatcctcacttttttataggggctatgcagttttattgtggagaaagagttaggaaacattcaaaacagaactcaaatttgtgtatattatacatataaacttaatgtactttttattatgtcctgttggaagaaagagaaaagaatgcaaattccaaacatgtaaagagcaattgatgtgttttgggtttggattt

SEQ ID NO: 153472 - DNA, 339 bp, Homo Sapiens
ctttactcatggtctctttaatccagcagcctcacatcttcacatctctcttcactttggttgtcacatcccctgtgacaatgtcccgtatatagacccctgtaattatgtataaatctatagagattttctgcttctcactttttatagaaagcagttactgcatccagatttgggtaaaatccagaaccagctgctgtaaataaggtcataaaggaagaaaggtaaatcaatgacttcaggatgtcagggcaaacaggatagtggataggatctctcacaggtaaaaggaggcagtagagtgttagttcattgaatggactttgtttagaaccaggt

SEQ ID NO: 153473 - DNA, 504 bp, Homo Sapiens
  misc_feature (220)..(413): n is a, c, g, or t
tttttttgagagtagattttcaattattagcattattaatctaaggatatgatcatacatctattaacctggacatccccaaagtttccttcaggagaggggaaggaagcagggtagctgagaaagatacccccctaacagaagtttctagcttccctcattctggatctcacaggaagtacagaacaggaacagtaagttaggctacttacacttgtgnnnnnnnnnnnnnnnnnnnnnnnnnnnnnnnnnnnnnnnnnnnnnnnnnnnnnnnnnnnnnnnnnnnnnnnnnnnnnnnnnnnnnnnnnnnnnnnnnnnnnnnnnnnnnnnnnnnnnnnnnnnnnnnnnnnnnnnnnnnnnnnnnnnnnnnnnnnnnnnnnnnnnnnnnnnnnnnnnnnnnnnnnnnnnnnnnngtatgtatttatttttgtgagacagggtctcactctgtcacccatgctggaatgcagtgacatgatcatggctcaaagcagcctggacctc

SEQ ID NO: 153474 - DNA, 288 bp, Homo Sapiens
  misc_feature (197)..(208): n is a, c, g, or t
atgtcacccaggctagctattttcaaacatttattgctttggaaccagagcccatatgtggataaaggtaggtagcattactcttgatgatgcaggcatgagtgatgtcctctccattccccaatcctcgagccccttgaaatgctatttgaggaatgctatcaaaacaccagtgctctttgagagaatggtgcacnnnnnnnnnnnncagcctttggctgggaatggttgttcacgcctataatccaagcattctgggaggctgaggcaggaggatcgcctgaagcc

SEQ ID NO: 153475 - DNA, 771 bp, Homo Sapiens
tttgagctactgcattttgggatcttattgttttatcagcttaacatgcatcctgatatgattactcaggtatgtttcaaccaatgttggttaatgtattatccccaggaacttattactagaggagcagctgagtgttaaattctgggaatgtggaatttcaattcttactttgcttactttgacagtgcatcgttacacaagtcaaagctagtttctgcattacataattatacattacaaacctacaactgtaaatggtagtagtgtggaaacttgggaagaggagttaatgtggatttctgccaattctaaatttattgtggtttgcttgttgtggcttctgctcaaattaactaaggctaaagaaagaatgagtagttataattttaaaatacttctttgttcccatatagcaccctttacgcgctgagatgaaaaaacactttttgttgagactaagagcttattactcttcccaagattctctggcaattcagattccccaacttccatatcagccattttcttctaataaaggaactactgatattcttgggcaaattattacctcctctggctcagttgttttgaccatgggctaatgagcccagggcctggggtttgattcccacgcatgccaattagctttgcttgcctccaccaacccaggctgccctattaaagcctgccgcctgtccgaagatgccaccacacatcttgccttatgagtcattggtcataaaaggggccagctaatgagtagggaaa

SEQ ID NO: 153476 - DNA, 633 bp, Homo Sapiens
  misc_feature (114)..(114): n is a, c, g, or t
  misc_feature (141)..(142): n is a, c, g, or t
  misc_feature (146)..(146): n is a, c, g, or t
ttcattagaagtttcaatggaagtcatgggactgagtattattgcctcaacttggataatttgcccatggctgaactgattaccatggtgggggagaggggaagaggtggcggnagaatattctgattggccaggttctgnntcgnatgttcattcctccaaattgcattcagaaaatgggtgctggatggggcaaaaaatcaggtgtcattcaaagttcactaggcttagggagctgggctcagaggccagaggcctgatcttgatcttgtcatcacttagcaaatctcctggccattcaggccttcacacttcctgtctgtaaatgggtttatcaccactcattcaagtcctaattattaccagcgctgagaaaccaatactttctttttccatctcgcttgtgtaatttcttcggagaagcatttggatggtctgaaccatttttaccctgagaaatgggacttaggaaattatgcagccacattttatatccattctggtcatttcagtaattggttctgagacactatttccccgagcaccatcccaagtataaactactatttccatctgtgttactggaggaaactggggaaagacatttgtgggttttttcccccccaggccaaa

SEQ ID NO: 153477 - DNA, 712 bp, Homo Sapiens
  misc_feature (214)..(226): n is a, c, g, or t
  misc_feature (440)..(449): n is a, c, g, or t
ttttttgataagtacaaaattttattgctgaagacagcctgctgaatcagttgattcacatgccttatttctgtaggtaaggaaattaaatttcctaaaagtgatataatttgcccatggtctttcccaaagtcaagagcacagcaaatgtcttctagttgcttgctttgctttccttgtcagcctttatattagaaggaaacataattgagcnnnnnnnnnnnnnaaatcaatctgtaaatgcctttttctcttggaaaaagtgcaaaggagaatttttaaacctcctcttcaggctcaagaatatgaattcaccatgcattccattggtacatctgggacccagtgagacaatgaataattcatgtaaacaactgtaatttttcactgccatctcttgtttacctgatagagatgcacgggtaatgctccttgattgnnnnnnnnnntctaattatctccatttggttttagaatgtcttgtcgtccagataatgtcaaggcatttacttcaaacaaacaaattaaataaagccagtctgcaatgctcttaatctaccttccctcccccagagtccttctctgttttttcctctcttgtcttctgcatctcctatccccatcctgaagtccagcaagctgtagtgacagaccttaagagtatcacaggcttcctttctaaataatattcccttccctggattttctttcc

SEQ ID NO: 153478 - DNA, 224 bp, Homo Sapiens
atgtttgttcaagttattcatgattcacctcaaatggacaaatgccattcaccaatatttaaagacttcttggtctcattactaaatctgaagagggctgtgctgtctgtacatcagctatatggagaaaacagctctcctgtaaaacagctctcttgtaaataatatttgaaaattttaagggaatataacaatcacaagctatttagggtggagggcagttt

SEQ ID NO: 153479 - DNA, 561 bp, Homo Sapiens
ttttttaacagttaaaccatgttttattagaaacaaaacagctgaattccaatattgttcagagtccttgcaagggtatcatttgttttttctagctgaatagtaatctaagctaactgacctgaaatgatgggaaagaagaccatattccagtattaatatgttttctacaagcacatcattgataaccttcctctttgttcccaggaatataggcctcttcaatgtgtttgtggtttttgcattcgtttcaccatcagcattttttcttcacaattgtccttcaacgactgcatccggttatgaactcttagcctgtgaccacctgcctacttccagattttgactaaattctcaaacccttcatgtcagttcttgagcctgaactgtgctcagagtagcagacagaaacccattagcagtaatccatcactgctcaagatcttttatcatttgatatctagagatatctgcatttatttatgaaatatgtcgattatcccttagaactaaattccttgtaatttaaatcaaatatctctactagggacatttcctttc

SEQ ID NO: 153480 - DNA, 731 bp, Homo Sapiens
  misc_feature (577)..(585): n is a, c, g, or t
tcataatttctcaacataatttattttttatgttaaaatgtacagagttcttttgaaagtacttgctagaaaggggaaaaaaaggtattacatacaaggagaggaagggaggccggctggcccaggagcgcgtgacatggagagatacaaaggcatctaggcaccccttccccttagcttacaagtcaccatgaacaaagtacaaagaggttacaaaacaggaaaagcaaatataaacagacaggatagacgtggcttcctttgtacatgcggcttttagaggcatctggagctctattcacacacgctagagatctctttaaagagaatttatctttcttaaaatagtttttaatattctacaacaaagataaaaaattttaaagatggaatgaaatgaaaaagctcttattttaaaaggcatcaaagtcactaacagtgagtttttaaatttcttttttagaagattacccaagttatcttgctaaaaatacattttttttaaacagaagtgaaaaaatgacaggtaccaatattactgtgttggataatttcttttataatatagaaaagaacnnnnnnnnnctacaatagttctacagtcacaaagaggcttgtggaaaagggagctgcccgattgaattttttataaagaaacaaacaaaaccaaacacaaccgcaaaccaacagaaactgatttcacggccctcatttcaacagcttctccttct

SEQ ID NO: 153481 - DNA, 329 bp, Homo Sapiens
agccattgctctaggaagcctggagaaatacactcagaaaataggcaaaataaaggggcctaaacaataatcaggatcacaacctaagccctgccactggcctattttatcgaacctgcagtcactgctaacattgaacactgaatgctacagctcctgtgacagctgccacttaaggcagtctggaacactgcctgctggtgcccctgacactcctgccccagaactaattttaaaattattaaatctatttatatactatcttggtgcaacattacagtattgtaaacttttcgtctgtgttttgcattaaagttacattatctaaa

SEQ ID NO: 153482 - DNA, 655 bp, Homo Sapiens
cagtaaaataaaaaacctggttgcagcacattcacactgttgtccttaaaattccccttttttctctatgtacgataaagtaacagtatgtcagataagccggtggggggatgagattaggctgaggcagtgctagtcaactggggaaaaggatgatggaaaaatcacccagttgtgctatatttttaaagaaggaggtcgtttatgtgtgcagacaattctccctgaggttagcccaatggagaaatgaagcagaggaaggaaacatagaaagacatgggctatcagggaggaagatgttcaatagaacatgcaagaatttctggaagaaaggctgtggaagggccaatggagaaaatgaatggacaaagctcaggaatcctacgctatgtagaatgtcttggtgttatcagggttaagcctgtaattatgtaacctatttatcgcaacatgaatttttatgatttcttgtgatgtattcttttatgaaattaacaagaactcattattttgaggtagaggaaaatcaatgctttatctgatatgctgagaaattattagattgccaatactcatgtgcgtttcatgtgttttataaggtttgttcctttgaagaattgtagttcttagtcccacagggaaatgtgtatctatt

SEQ ID NO: 153483 - DNA, 491 bp, Homo Sapiens
  misc_feature (246)..(295): n is a, c, g, or t
ctcggcccaggaaaaatatctcagcaaatcaaccacctttctaatttcatccagcaccatttcaaaggactttttatccatcttgactactatcccgacgtggttttaacagttatacttgcaattaaaagacgttcatccctggtctgctccgccgatagtaaaaaatatttatagctgaggaggaaaaaagactccacgagcaagagaggatgcgaagaggtagagagtattgcaaacttcgcnnnnnnnnnnnnnnnnnnnnnnnnnnnnnnnnnnnnnnnnnnnnnnnnnngaaaaaacactccagtcaggcttccccagcttattcacacaatggttcagggcacctcgggcaagagccaggtcctctgagttttgcagaaaaacccgggctcggcggcaggtttgagtgcggtttccctgcagctgagggccaggtgccgccagaggtagctcttgaaggcgctttcccaggtggagcggccgca

SEQ ID NO: 153484 - DNA, 361 bp, Homo Sapiens
agggtttaaactaatgaatgtttttacaattgagttttcatttactttctatgttctggcttcaacaggttactgaagctgagtctctctcctcacaggcatctaggcctgacaatcagctgtgatgatgtatctttgaacagttgtatctctaagaggaggctataattaaccttgaaattaatatcttaatatatcaaaagtcaattgatttattttaaatgcttagtttttcaactcatttttcatttactttctagtgttcattccctatgattaaaaatacatatgaatatgtatatacaggtataaatgtacatgttataaacatacatacaaatttcattttctattacctgag

SEQ ID NO: 153485 - DNA, 382 bp, Homo Sapiens
  misc_feature (308)..(308): n is a, c, g, or t
tttgacttgtatcagaacgttatttattttttatctgaaattcaaatgtattgggtatcctgtatttcctctgggaaccctctgggaaccctgggggatgagaaatctcccttgcagggaggggtcactcccagtgtctgcctcacaagaagagggggtcctccccagctacaggggactgggcagctggccctggtatcagggtcactccacttggctctgctttcttgggtcttcagggctttgggacagcctgggggtgggagagtggcttctgcttcactggtactggccagaaggtgggccangggctgggagagagggggtgtaatatctggttcatttccaccctgctggctgtaaaccctttagtcaagtgagg

SEQ ID NO: 153486 - DNA, 510 bp, Homo Sapiens
gcaaataatcaggccaagtataagactaaaatttattctacaaacaacacacacggtcctatcataatttgtttttacaaaaaatgaggactggagagagaaattgtgctccaaagcttatcatacatttgtcattaaatcctagtctaattgtttttaagctttttgcctacattttagactaaccctgcttattcctgtgaatcaagtggcgatctcctacagcttggatgaaacaaaatgggatggataacataaaaatctggatcaatatgctggttctgggcaattatcctgcaaattctgccaggagtaccaagacaataaaatagagaaagaatgaatagtcttttcaacatatgatgctgagacaactggatatccacatgcaaaataataaatgaagttggaacccttcctaacaccatacacaaaaatcgactgaaaatgaatcacagacctacatagcaacaatgtgcccagctacaaattacgattctatcacacaaa

SEQ ID NO: 153487 - DNA, 474 bp, Homo Sapiens
ttttatgttttaattcaactttgtcgtggtacaatttacacacaataaaattccatcacccagaaaattcccctgtggccctcagcaatcaattcccacctgaaaaacaaccactgatacgatttctgccactctagactattgttggttgactttatattaatggaattatagtatgtgttcttttccaatttttttatagctttattaagttgtaaaactgatttacataaatacacctaatataaagggtacaatttgaagtgttttaatatattcctatcttgaaactattactacagtctagataacccatcaccccaaaaagttttatgtccttttgttttctatccacccttcctaccccaactactgatctgctttctgtcactacaaattagtttgtattgttaagaattgtatatagaatcatctagcaggtactctcttgtgcctggcctctttcactcagca

SEQ ID NO: 153488 - DNA, 559 bp, Homo Sapiens
tgcggccgcccgggagtccgagcgccagctgcgcctccgcctctgcgtcctcaacgagatcttgggcaccgagagggactacgtgggcaccttgcgcttcttgcagtcggcattcctgcatcgcatccggcagaacgtggccgactcagtggagaagggcctcacggaggagaatgtcaaggtcctgttctcgaacatcgaagacatcctggaagttcataaggatttcttggccgccttggagtattgtttacacccggagccgcagtctcagcatgaacttgggaatgttttcttaaaattcaaggacaagttctgcgtgtacgaggagtattgcagcaaccatgagaaagccctgaggctgctggtggagctgaacaagatccctaccgtgcgcgccttccttttgagctgcatgcttctgggaggccggaagaccacggacatccctttggaaggctacctgttgtctccgatccagaggatctgcaagtacccgctcctccttaaggagctggccaagaggactcccggcaagcacccagaccaccccgcggtc

SEQ ID NO: 153489 - DNA, 551 bp, Homo Sapiens
tttccttagcagcaaactaaagaacatattttatttttaataaaatagtggagcatgaaaaatatcatatattacaaatatacacacgcagaaaccactctttcctggcactgtgaagagaatacactagacaaagtgtctctgccaacctagtgcttcctgatctgtttgtggaaatcatttgtttaacaatagaaagagtcaataagccctttgggtaacttttgaatgatccttctccctcttcccccctcctttccacaaatcagtccaaacgtctataacattggcttggtttccattaaaaagccacaaaatgtagcactgaagggtttctgagggctgggcctcttagttcttttgttaggagatttcttttgttgtctttatatatagcaaaatacttgtttctctttttattttcaaggaaagagaaaaaaatgtattgcacatcgtttgagttcacaaatgtgaggtttgatggaggtttctgtcttgcagagagactattggtgaaggccggagtctattttaagcaactccaaatccac

SEQ ID NO: 153490 - DNA, 539 bp, Homo Sapiens
tatttactcatatacttgaattatgctgttaaaaaaaactgtgagattttttgcaagtttggtgcctgaaagactctcctgtcttttaaaaagtagtatgtatatctttaaaacatgacatacatatttacgtgtcaaaatttcttgtcacaatgagtgaatagagctttttgctttcacaaacactgaatctcttgtaaataatgtcattaaaggataaagataatgtcattaacagacaaaccatgtctaatatagttcattagctaatgattagcctatttttttggcaatttaaattgcaacaccagccagaatatatacgattgtaacttaactgggtgattagtgaccgatgttaattcagtgaattcacaacataaatattttttatctagagaatgaacgtctggtcgaaatcagtagaaaagaatgtgctagtgatagatgctgttttaagctaacatcacttatttattcacattaaatgaattcaatcatgttagtcttgacaagaatctgagtttgaagcaggtgag

SEQ ID NO: 153491 - DNA, 501 bp, Homo Sapiens
  misc_feature (212)..(212): n is a, c, g, or t
tgaggagagccgtgagcctcacttttcctgaagtgagccagcagaaacggcaccgaaattctgcccaggatgccaccggtattcaaagaagtggccagctccttgctgcccaccccggttccagaagcaaagagacacttcctatgtttttgcatcagtagaagctgctagccctgaggctcaaccgaccgcatgacatcggccggacacgngaaatgccggcggaggcgggaaagagtctgcgggcgcagctgcaggcactgctgcccgccagcactcggattcgccacagcctgtgtctgcgacaggcgtgcccgtgggcactgggcaagcgggcagtgtcccagcgagcttcagccgcgcctctgggatacagctgcgaaaagcggggagagaatggtttctcgtgcccgacggtggccccgcctcaggctccagccgcgcggcccggaagcgccgcggccaccgcctacggaaaatggctgcctccctgcggccgca

SEQ ID NO: 153492 - DNA, 538 bp, Homo Sapiens
agttcgtggtcacggatgcgtgtggggttgctgctcagtctgtaacggcaggtgggagacggacactgggtggaggatggagtgcggtaatcagcggttgtaggccgcttaggctttaatccagcgttgttttgtgtaaagaacttaaaatggtattgtcttaagcgccgtgtcagccctgacagtcttcctggtgtttctaggaaggatgccgttatgggaaataagagggtttcattttttctcatacggttgtagggtaaaggtagtttattcagcaggctccatccatccatgaattcagctgaccttttttatttcttttctctaattaaggggttggcatgtagtaggccttcatggcttattgactgaatgaattatggaagggctcagttgctgtcctcattgtgtatgccatttcctgtttccatgcaaattgtttttaaaatgagaataatcatgatcccacgtaaacgttctgtaaaatacggttacttgatctgttggtctgagtcccaatatatgagtttttaaa

SEQ ID NO: 153493 - DNA, 516 bp, Homo Sapiens
ttttttttaggtacaaaactctttattctatcatatattttgctgacaccacaaccttccacaaacccatttgttttacagggcatttggggagttacccaaatctttcattttactgagacaaaagtactctaccaaaactatacatcttaaaattagctcataactcatgcttcaaaagtataactttataagccctattttctttgttaaaattgagtgatgaagactttgtacctaagaatcactaaggtgaaccaaacaaatttttgagactaaacaccaaatacctgtgttgtttttaatatcataaatgggaaaaaaggctcccatttctttcataaaactgtattataaaggcttctttcctacttctatgacatcatcaacaatgtataatagcttaacataaaatgatctctagaaaatatcaagtagctcatgaactatagagcttctgagtagctctttctgaataaatctgaattgaactctgtgatcacagaaatcactctt

SEQ ID NO: 153494 - DNA, 468 bp, Homo Sapiens
gtttggagtacttctgcgcttttgtgcagcagaaggacgtcggcggccggctgcaggtcggccaggagctcctgctctaccttggcgcccccggcgccatctcggacctggaggaggacctgggccgcctaggcaagacagtcgacgcgctcaccggctgggtgggttcgagcaactaccgggtatcattaatgggattggaaattttaagtgcctttgtggacagattatcaacacgctttaaatcctatgtagcaatggttatttgtagctttaatagacagagtgggagatgccaaagacaaggttcgagatgaagctcagactctgatattgaagttaatggatcaagtagcaccacctatgtacatttgggagcagttggcttctggttttaaacacaagaattttcgatctcgagaaggcgtgtgtctgtgtcttattgaaaccttaaacatttttggggct

SEQ ID NO: 153495 - DNA, 575 bp, Homo Sapiens
cctttctttcttctcaagatatttaaggatttttatttcttaatttgttactgtccatggacagtcaaataactgctcacccttactgtattattttccccttagaaagaaaagccttccatcctaccatgaaggaatttttcctccaaaaaatcttatcttccatttcaaatagcactcatgagcttttaagagagaaattctctctttactttgaggatagaacagttaaaacaaaaacctgttccttgagaaagaaacccgtttttacctaaactaacaggtctggggccaaagaatagatttttttattgattgcagatgaagaccatgcattttgtactacaaatccttattgcctcctcaaatcctttttggaataaggctgggaataaattagtttaattaaattctttgggtatttctaattaatatctactgcaagatacccaggaaagaaaaggaatgggtgctgccgaaatgccaaaatcaattgatctgttgatttttatcattgtagttggagcttttctagccatttcaagactgtatgtgttcatgaagtcttaagtaga

SEQ ID NO: 153496 - DNA, 558 bp, Homo Sapiens
ctgcattttaatttttgtacctcttctcagacgctgcattgtatgatagaatatttattttattattaaaaatggtgaattaactagcacattgctttttctatcttaataacgactatcttaattctgtaaaattataatgtaagtcttgagtaaagtagtcattgcagtattttataatcctagtcatataccagagctttctcaaggggaaaagtattatagttatctcttcaatatttgcttgtgtgaaacagttattaacaccgtttatagctacccctgtctgtagtgcctgttttgagaaccctaaatctctaatttaaaggcccaagattttatcagtttgtatggaacctgtgtttgctcctcagtcctggtttcctaataaacttatgaagatatttgtgatggatttctgaagatttcgagtacatgtgaggggattcagtacaaattacagggattcaacacattgacagcaggaaaaatgtaatgaattgttaggtggggaatgatgtaaagtgaagtaatctgaataaaagcctatattataaa

SEQ ID NO: 153497 - DNA, 532 bp, Homo Sapiens
  misc_feature (353)..(422): n is a, c, g, or t
tttgtgttcattcaccaattctttcttcagctatgcctgttctgtcaattctatccatcagtctcctaatttcaagcatgctaattttcagttctagtgtttcctttaaaattttttttaaattgacacaaaataattgtacatatttatggcatatatggtgatatgttgatacatttactgcacagtgattagatcagggaaatcagcatattcttcaactcaaaacatttctcatttgtgttgggaacattcaatatcctctatttggaaatatatattattaactatagtcatcctacagtgcagaagaatgctagaacttatcccccccatctagctgtttcattttnnnnnnnnnnnnnnnnnnnnnnnnnnnnnnnnnnnnnnnnnnnnnnnnnnnnnnnnnnnnnnnnnnnnnnaagcttgtctctgaaaactccaatatctggaggtccctacagatgtttaaatagaagctcctgctggtattcactcatgtctctttctgtggctactttttattgtgtgt

SEQ ID NO: 153498 - DNA, 153 bp, Homo Sapiens
aaactggttttcaatgatgggcaacctaaaatttactcacacagaacacaaaacagttgaatttgttaaaagtccaaaatgtgcttttgtacttttgtaaaatgggaatgtgcttcttgtacaaatcacaatatgctttctagaccacaacct

SEQ ID NO: 153499 - DNA, 662 bp, Homo Sapiens
tttactttttggaatatataattttaattagttctcagcagtgcagtaaatgaacaacacttattaataattaatttgggagaagaatagcaggaggaaaaatataaacagtagctttttgtgaccatttttaagtagctgacatctcagtatgtttctggaatgaacaaattaagggtgtattgtatatagtgatttaaataatcagctttcttatagtcttatcaactgagattataaaattgtaaacacaatttttccatgtttaccatcttcctggctttcatttggacacattaaaccatacttttccattatgtagttaattcatttcttgagtgcctgcctgccattagatgccaggtgcttatctaattttccagttagttactgttcagcttaagtcactctacttggttgtcaacagtagttaaagcagtatcttaaaccagaggtcaaaattaaatcaatattttgattcgaaatgattacaaacatatccaaaggtcataaaatgctactgagaagagttgtgtttaaaatgcattttcttcttacagataagctgtaatatatacatgcgtatgtagctatatacctttgattatggtagctacacctgaaaaatcttttctccctactactgaaagtcggtaccgagc

SEQ ID NO: 153500 - DNA, 404 bp, Homo Sapiens
  misc_feature (173)..(181): n is a, c, g, or t
ttttaattaaatttaaatattacaaggtataatagggaatcacaattacgaacactcatcctattaaaaaactaaccgtaggactgagtagaatgaaggattctgaatgtttaatatgtttgttacctgcaagcatttaccacaagacatacaacagcaggtgttaaggttgnnnnnnnnntcataagaaaaagacttaatttttcttgataactggtagaaggccaccattcttctgtttcagccatgggacgcctttgtccagcccaaggaaaacacgcagaggctcagtttgagaactaggatggcctctcccaaatatcaaggttgccgtggaaactggtggcaactgttgcattaaacgaaaatctccatttctaacactgtgcaaagccgactcactc

SEQ ID NO: 153501 - DNA, 540 bp, Homo Sapiens
tgttttttttgcaagatgcgtgggtggtaggtagtgggtcaccaagatagtcccttttaggggcaatgatgtggggtatattcttggctattaccctgttgagatgagtttggtcttttggtcaatttcattgtaacttttagtttgaataatagactttcaagttcaaaaatcaaaacatagcaaaccatgcagaaaattttagaacacagagggaaacctaccaagtacacattatcctaaccactctgtgcttctttccaagctttccccagtatgatcatacatggccatcctgatacatagacattttgttttcttgtttccacttaatattttattataagtacttttcccaagttgttacgtagtcttcaaagccattttcccctcagctgtatagtaatcctgttaaggttctgtggcaaatgatcatggtctgaaaggcaagctcatcatagcactcgtctcccactgggagaagggggtccgggccgggagctgaattagactttggagtgctgggaccctagaggatgg

SEQ ID NO: 153502 - DNA, 564 bp, Homo Sapiens
ttttaatgatcttttagcttttattttaaaacttgagccatgagtcgggtaaaacccccttgtttagaagacagttagattcaaccagcgtttctgtaaataaagtaagttgaaatgtatctgtcccacatagcaaaatcccttaccaaattttagagaaaagagggtggcaaatttacatctcaaatacagaaagaatttaagctttctcaacaaggagtctgcgtgtgctagaggaggattaaaattaatgccaaagttaccataattcacaggaattcatcacaggacaagaaaacacacagatgagtctagagaaatagtttagaaccttttcttaaaataactaggtgaaaacctgaaagaggaaggagggaatgaaggataaagctggtgaagaaaggtgcagaagacaggtagagcaacaggcaaggcagctagtggaagaatggtttcaatgttgtttctacagctttggtgttggtcctgcaagcgctaatctttctatttcactaatgtgctcactcactttgtagttattttcccgaagagagatgatgactg

SEQ ID NO: 153503 - DNA, 582 bp, Homo Sapiens
  misc_feature (551)..(551): n is a, c, g, or t
tttttagattttttataggacatttaagacagttttaatgtaattctaaaagtactccaatattgttaacctgtggttttatacttacctagtttgtacatttacttaagtttgctcatttagtctaatgctggaattaatctgaattcaatttaatttggcttttcccatatataagatataaaaatgtgaaaatcataggaattatatgtcttacaaagtattgcactggaattccctgcaataatgtatcatgatttcatttacctgaggaccaatcctgattcactaggtaagaccagctatatcatgcttcagagaaatcaaatgcttttgaaaatatatttatgttttaatttagaattacacattttgtgaataattcttaaatgcatctctaaacttgtttagtcccaagaagtttctaccaaaatctccctatgcaaaagtcactattgctttcttcaagaatcatgcttaaactactacatatatctcaattacacaaaataatcaactgaccaattctactcaaaatagccacacaattntcactggtatattttcctcttgaaattattg

SEQ ID NO: 153504 - DNA, 475 bp, Homo Sapiens
  misc_feature (20)..(20): n is a, c, g, or t
cctacttgatttattttttntaatgagtgaatgaattcaacttctactagattatcctctgtaagttgcgtctattagtttacacatcagtctttcacgggtgattaacctcactaaaaacttcatgttcatcaatattgtgttgaacttgaaactgtattatcatatatgtttattaataggcaatggtgtcagataatcgtgaaattgagaagtcgcccatccatttgggtgggaaaataaccaacatcctcagttgtaatcccactaagaaccgccagggcgagacgaaagcgacatcgcttccatctttacgtgagtcttggaaatggttcagcaccatgacgtccgccgaagacgtaggtgtagacgaggaacaaaagagaagacccctcgtggaggtggcctgtggggcccgccctcctcgggcgcctgtcgtcgtctgtccctgactccgctccccccggcggccgca

SEQ ID NO: 153505 - DNA, 480 bp, Homo Sapiens
tttatgctttttttggcctttctttagacaacttaagtcccacttttgaaaaaaattaattcctattttccctccactatttagaagaattagctctctccattcttatgagtatctttgatactacagtgcacacttaatttaacaatgttgaggttaaccaatatcttacagcttttgtcctgaacagttcatgaatgttaaaacacttaattcagatcaccctatcccaacttacatactacttctattctctattttagtaaatttattaaaactgtagttgtattttagtggagggcctttcagaatatcatgctaggggcactgaaggaggcaaggatcttctccctttatttgctgacccagtcttctgctttttgctggtttcttgactcagggtttactcctcattgtttggatggattattcaactgccccacagctcttttgccgtggaactgcttctctgtagacctg

SEQ ID NO: 153506 - DNA, 402 bp, Homo Sapiens
tttgtaggaatggggttttgccatgttgtgacagtgtctttcatcccatgtgtgtttccacaatgagagcttgatactctttccatcaagagctggggtctatggcaccctcctctcaaatctgtgcagtttggtgacttgcatacaaccaacagaattcagctgaagtgaagttgcggaactcccaaaatgagctagaaaaggccatgcagcttctgcctgggtcttcagcggccatataaagtttgactaccttgaggcagccatgctgtggggaagcccaagctggccagtgcagagactatatggtgggggaggccctgagaccacagagagatgcccacttgtccagcacccccagccgccctgtggcaagcatcactgattgcactgtttgtttgc

SEQ ID NO: 153507 - DNA, 584 bp, Homo Sapiens
ttttttttaacagtttctcatcttttaatactatttatggtaaatacatatatataacttacttgcaatttaaattacaaaattcatatacaaagtaagcaaaaaggcacacataagaaatccaccttgaccacagaaatgtgaaaacaccagccctaatgaccaagacaatgtttcaaagacaacaaacaccaagaaaagttgagattctacaataaatcatattaaacgcaagcactatgatgcacagacgtgagcacctgaatatttactaaagcataaaacttaggaaaaatcattttacggggaatctattcatattccaaacagcattttaaaaaacattaaacttagcttagttttaaaaacaaaattcagacccaaacaatcaagaaccagaaaatgggtttcttaccttttgtttccagtaggatgtgggctgaacagcaaggtgggttattcaatctgatgttatgaaaagtaattgcttcttaaagagacttaagtttttccttggttagaaaataattataggctccctaaaatattctaaggggacataaatagggagaagagggggaaat

SEQ ID NO: 153508 - DNA, 563 bp, Homo Sapiens
tttaaaataatcacacccctttttttcaaaatataaatggctaattttaagagtttcaaatctttacaattcacaataaaatttgtggcaaagcacaaccagaaaagagcagtgacattcacagttacagcaggtatatgaatattacttctcaaaacaagcttttgtctttaaattacaagactcatttccaataatgaagaaaatattcaaattcctgcctcattactgtactgcatattaaccctacataaaactttagaaacttagggctaagtaaaaacatctatggggctaggataacaatggagaccttgattcctggctcaaggatatagcaagactttccccttcacaagtttttcaataaaaaagttattatcttatatacaaactgaaccattatgcagttccatacttgaaacagagaacacaggtctactcagaagaattatttaattccatatttgtccttgtgtgctagtcttttcaaatcatagtgttttctttagagaagtcatttaccaaaactagtatctgctttctggctaatatgggaaaaa

SEQ ID NO: 153509 - DNA, 645 bp, Homo Sapiens
  misc_feature (90)..(90): n is a, c, g, or t
tacacggcaccccagtacgtcatcaggctatccgtagggctctcttttgaccacttctggtgccatataatgaggtgatccaacacgtcntccagctacaagtccagactcccttaattgaatagctaccccaaagcctccaagtttaacaggtgccgagttttcttttgaggcaaggagaacacagtggggcttcacatccctgtgaattatgttattatcatggcagtagcgtagagcttccagtatctgtctcatataatggctggctacagcttcactgtacacaaaaccagcgtcagctcgctttacgatttcaaaacacagatctgctccatccatacattcgaaaaccatgtaaagcattccatctgagctatatgtctccaataactctacaatgtgtggatgtttcagcatatgacagatactggcttcccgctttagatcttctgtacttaaccctggacttgatgtgaacttggctacatcaacaatttttacagcaaattgttgcccagtttctctgttgatacatcgtcgtacaacactgaagggaccctttccgatcacctcgcacagctcgtacacatcctcgaacagcacgtcgtcgtcggccatggtccggaggggatagcggccgca

SEQ ID NO: 153510 - DNA, 545 bp, Homo Sapiens
tttgtttggtttctttattgtttgttttgtccacacaaaaagaaagttgaattaggcagtctttaacattttcttttaaaaacaactattccttgaattattttaaagtgaaaagtcattatttttacagtccttccaaaggatattaacaagatagtttttgaatgtattcatggtatagccctaaacaacaaaggacacatgggcaagtgccaggatatccaggccttctggattccaaggggacattcaaccatgggagatgggttaaacgtcaaagggttgcataatcaggtacagattctctgaaaatgtgtgagtgattttgagatagacataaccctctatagtcaggacaaggggataacatgtttgagaacttacttcagtcctattaggggattgatgcttcagagaaaagaggactacaataagatgaaagctacagctatgcagtaaataaacgtggcataatcattctgaatattctagtgcttggtgcactttaaagtgtgtgaattcatccatgaggagctctgaggatg

SEQ ID NO: 153511 - DNA, 238 bp, Homo Sapiens
ttatttaaagtttgctttatcctcaagaggcacactttttaaggaaagtgttaattatgctccacattaaatgactttacaacgactgaattacttgaaaagttcttttaaaaattgctgaggcccaggcacagcagttcatgcctgtaatcccagcgtttttggaggctgaggaggaagggcttgaagccagaagttcaagaccagactaagtagcaaagcgagaccctgtctttac

SEQ ID NO: 153512 - DNA, 159 bp, Homo Sapiens
taatgtttagcctctgtagtctcaataatcatcccatacacacagtgtccttactgatgtaacttctcaaagcactgggtactttccttcacactgcttaccaatttgttattagacacttacacacatattttcttggttaattctgccctctcccag

SEQ ID NO: 153513 - DNA, 266 bp, Homo Sapiens
ggtgatagtgttgacggctgctcatcttcaaaggcacggaaactggtggagcaatcattaacagagacagaagaaagtgggaaggctctctcaagggtgtccacgttaccacgcacacggcctgacatgcatgagcagtcacgctcagaacgtccgcaatcaaaacaacatgcccgtctcattctcttgtagatggacatcttgggccgtttgcagccacatttttttattcttttgggatctgtgatgtcatcatgacaggcctt

SEQ ID NO: 153514 - DNA, 534 bp, Homo Sapiens
ttagtgaataatctgttcgtattcttctttgttttgcaatatgggctttaaaaaacctatttctaattttatgtgttaaaattggtaacacatatagggcagaaatatgtgttaccattctgtagtttggctttggcttgtgttgaaaaggttttagaaagtcaaacagttttttgctttatgtatcatcaggaactgtgaagagctgaggttccacctcctcccaagctgacaagtgaccctcggagaagaaccgtgaaaacctcacaacagtgaagttagtttaaacaagttacaacgacaaacacattgtgccatccttatgatttcacctgttacttagttcacactgatgggtggctggtgtttaaatgctttccaagttcatttcatttattatacaaatgcctgtgaaatacccaggcagcatcattgcttccttctctagcctccaaaccgaatatccttttgctcaagcatccaggtaaaaaaagggggaccttaggaattgtgaatttgaagccagaagccatg

SEQ ID NO: 153515 - DNA, 389 bp, Homo Sapiens
tcctgagggccagagaaagggagaagggggtggggggacagccacgtggccgcaggaggatttacaacattttctttcgccatcgatgttatcgcaaaatgtgtgagagaagcggctgcgcagcccggacgggagcgtgagggtgcgggccaggtaagcagccccggcggtttcgccgcatacgggactgcggggcgaccgcgggcaccagccacgcgcagcggctccgcggggtctcggccgggtccgcgctctgaaggatctcgagagccatggatggtgcaggcgggaccctcgagctgcagcatctccggtgacccggggttgccgaggaggtggagaccagcacaggtggtccggcccgggcgcctccgaatccgggggtggtc

SEQ ID NO: 153516 - DNA, 571 bp, Homo Sapiens
tatatgtacacatctccaaaaaatatgtacttttttccccgtaactaccatgccattttcgtattttataaatgttataatatgtggcctctactaccggatccataattatacttttatgattgtctcagaaatgcctttttacagttgatttgttcaagtcagagtccaaaccaacatttggttgcttgtctcttaagttaaatagagagctgtacgggactccctccctgcttttcccatgctcttgtctcattgcataaactgggtcattcatcctacagagcgtccccattcttggtttgcttcccggtgtggttgtgtaacttgttctgccatcattacctgtcctggctttccagtaactggaagttagccgtagaggcttgattcgattcaagcctgagtcttggcaggcgtgccccatgggaggccggagagggcttcgtgctttgcctcgtcacatgaggaggctcacagcctccttaggagtaggttagtttttccccgttagtgatgctgattgctcatcttttgaagaggcacagctaggaaatgtgtatttttgaaa

SEQ ID NO: 153517 - DNA, 722 bp, Homo Sapiens
  misc_feature (67)..(122): n is a, c, g, or t
  misc_feature (677)..(677): n is a, c, g, or t
ttttttaaacataagcacatttattgtcaacctttatagtgttatgtcaaataggtctgacataagnnnnnnnnnnnnnnnnnnnnnnnnnnnnnnnnnnnnnnnnnnnnnnnnnnnnnnnntctcaataaaactcaaacacaaaccacactggtatttcacacagctaatttctaatgcagtttacataaatatttacaacacttaaacaatttcaaagaaaataacactgtattccatacatagcctgatcacagtagttgttctctcttatttcccagagtttttctgcccctttaaaagaacctctgctgttctgatccttatcacatctctgttttgactgttggctttgttgttgccagtgttcagccagaacttctctgaaacttttttttcaacacatgctaagttaatggaagtgtaggagagttttgattctcacactcctcaaggctagagcagctttggcaattactgactgagaatttttcattgccagtgatcaactgaaaactggagattcctttggaattgtttaatctgcttataaataaacataaatgcttgctcacacaggcattcctctcttccagggcaccctaacatacaggaggaaacaaatagggaataacctattagacatcttcattcgtaaaaatctaccagatgactcntttacatggtgaagtgctattgtgaatcgaaatccttcatatata

SEQ ID NO: 153518 - DNA, 570 bp, Homo Sapiens
catgtacctgttggccatttgtatgtcttcttttgagaaatgtctattcatgtcctttgctcactttttaatgggattatatgggttttttttcaactgttgggttgtttgagttccttgtacattctggatattagtcctttgtcacattaatagtttgcaaatattttctccaattcaccaggctgtctcttcacactgttgattgtgtgtagatgctgtgcagaagctatttagttcaacatagtcccatttgtctagtgttgtttttgttgcctatgcttgtgatcctgttttatatttatggaggatagaggtgagacatcataatcatatcagtgttaaggaccttgaaaggttgaatgcagatctttagtagcacataaagctgggactatattttggaagacttgaattccaagtgaagcagttggaccttgcatatcttgatgtgcaaagggctttgaggacaatgactacctcaagttctctgggtctctggagaaaaatatttctgattttacatacctagtctaatattggatttcgtatcttttactgcatagtgta

SEQ ID NO: 153519 - DNA, 549 bp, Homo Sapiens
tttgcattatttcaattttattgtattaagaacaggaaggactgccatttctttaaataacaaactatacaaataaaaaggagcagaaataatatggaatgtttttgacgaaaacaaacttatggattcaataaataatataaaatgcctttgtgctaaaatagaactcttgtttcttatatatatatagttcagtgatctttatgctatccagaaaaagccagatctattataattaaacatagaaaaataccatttaacaataaaactaaaaaaatggccagtgttgagcttataaaccacatataatatatacatcatttaatataatcaactaagaaagtaaatttcaagttctttgtaatacaaatacacaattgaaaatatttctccattccctacccttacatcaaagacatctgatatttaggacaaaattaaaaatggaagcatagttaccagttttcagagatgattctgagattgttagatactggagcgctaactctactatacaaagctgagttatttaactctaaattgaaggat

SEQ ID NO: 153520 - DNA, 512 bp, Homo Sapiens
tttcccagaagctaagtaacttgtttattgtcagacatctagtgagtcgcagagccagggaactgaccacgggcattttcaccccattacccttccagcttattgccgactgctcccgaagggagcgaaaaggacaggcaaagggtttcaccaaaccctttgtaatgggagattcttgccttcttacctttcctcacgtttgcttctctgccagaatgtcttcccgcactttccccagaacccaagttctcctaatcatctttcaagatccctttccctcaaccacagatgagccgtgcctatttctccttcaaatgactccctatggcttctagttgggtagtcttttatttaccacctcatagtccttttatttatatcccataaatgatcgtccggccccgcaccgtgggaccaggacgctgcctcgaccatggcggtctcctggaaacaggctgctttgagccgaaactggtgaccgtttcccaaccccgtccaggagtccgacgcct

SEQ ID NO: 153521 - DNA, 484 bp, Homo Sapiens
tctaccaatcagacacattttattatttaaatctgcacctctctctattttatttgccaggggcacgatgtgacatatctgcagtcccagcacagtgggacaaaaagaatttagaccccaaaagtgtcctcggcatggatcttgaacagaaccagtatctgtcatggaactgaacattcatcgatggtctccatgtattcatttattcacttgttcattcaagtatttattgaatacctgcctcaagctagagagaaaagagagtgcgctttggaaatttattccagttttcagcctacagcagattatcagctcggtgacttttctttctgccaccatttaggtgatggtgtttgattcagagatggctgaatttctattcttagcttattgtgactgtttcagatctagtttgggaacagattagaggccattgtcttctgtcctgatcaggtggcctggctgtttctttggatccctctgt

SEQ ID NO: 153522 - DNA, 648 bp, Homo Sapiens
tttatttttcgccccgccggggaacggtgaagtgcttcttctgcatgattttggctgaagaatgctctgcatttccttgatttctatggagacctcagagctggttttgcttctgctgacacctcatctagcaccttctctacctcccagggtctttgcctctatctgtggtttggcattgtacctgggtacaggaagcctttgatgaacttaaaaggagagcctggagaatcatcctgatagactttgagtagaaatggctggacatacttcaaaccacatcttaacatggttcgagccatcactagaaggcaagtgctaacagtaaaggcttatttgcattttatttacatttaatggactgagcattggccaatttccatggcagaaaaatatatttcattttctaggcacaacttctggctgtcagacacttgctgcctttgaatcttgcagcaacatcactaaccacatcccagacatatttccaaatttcaacatctacccccaaaacataggtgtctgagagactccagcattttcggacttcttagtcttgagagtgccaggctatttatctcgaccagccaagctctggagagcaatgttgaatccctgagaagagagagcatggtgcgtgctgattta

SEQ ID NO: 153523 - DNA, 510 bp, Homo Sapiens
  misc_feature (66)..(409): n is a, c, g, or t
aggatcttttatgaagtagtttcattttaagacatttgcccaaccttctctcaactgtcaaatctnnnnnnnnnnnnnnnnnnnnnnnnnnnnnnnnnnnnnnnnnnnnnnnnnnnnnnnnnnnnnnnnnnnnnnnnnnnnnnnnnnnnnnnnnnnnnnnnnnnnnnnnnnnnnnnnnnnnnnnnnnnnnnnnnnnnnnnnnnnnnnnnnnnnnnnnnnnnnnnnnnnnnnnnnnnnnnnnnnnnnnnnnnnnnnnnnnnnnnnnnnnnnnnnnnnnnnnnnnnnnnnnnnnnnnnnnnnnnnnnnnnnnnnnnnnnnnnnnnnnnnnnnnnnnnnnnnnnnnnnnnnnnnnnnnnnnnnnnnnnnnnnnnnnnnnnnnnnnnnnnnnnnnnnnnnnnnnnnnnnnnnncctccaaatcattttccctcgtataaggaggtaggtaaaaatgaaaaattttcagtccgcagtccggcctgggcgacagagagagactccgtctcaaaaaa

SEQ ID NO: 153524 - DNA, 536 bp, Homo Sapiens
  misc_feature (262)..(274): n is a, c, g, or t
ttctattgggttgttttcttaagtatagaagttttgggggcatacctacaatttttttggaaaagcactgtaaggatgctttatttatttaatcatttatttatcagattagactcgtggatatttattttattcttggggttccgatccagtatttcttgttttgttgctcaaattgttccaggtttggccattatgagctctttcctgttgaccctctttcaggtcttgcaggctgaacttgccttcctcttcgtttcannnnnnnnnnnnnagcacttctttattttctgacattacaagatgttccaggcttatcttgcattttccttgtatcagcattagaaatcaagccctttctccaaggagccttggttcatttcattgtagaatggtatcagaaaccaaacatggacctgggtgtaccctatgctactggtttgtcactgcttccagatgctctgagtggacagagctgggaaatatacatttgtttagtatgtattcatttcctcatctgtcatctatttgtctat

SEQ ID NO: 153525 - DNA, 563 bp, Homo Sapiens
tttggaattcagtgcaaattttattagactacaaaaacatatcatacaattattattttagatatatttatgtaaagtcataaaagctatgatttttgaaaaacagcataagaaataattttttaatttgttatataagtaaatgaactttagcatcttaaggattcaatgatacagtttttaaatttattttttaaattgacaaataccaattgtacatattcttgagagcacataattatatttccatacatataatttatagttatcagatcagggtaattagcacatccaccatctcatatgtttatcatttctttatgttgagaatgtgcaatatccttccagctatttgaaactatatattgtattattattaactgtagtcattctacagtgctgtcgaacactagaacttatttctcttatctcgctataattttgtatcttttaacaaatctctctgtcactctcatcccagcctctagtatcctctgtcctactttttacttctatgagatcaactatttttagctttcgcatatgagtgagaacatgcactg

SEQ ID NO: 153526 - DNA, 561 bp, Homo Sapiens
ttttcatatttctcttttccatcatttagcatcaagttcacctcagtatttttccagtgaagtctgaagagcactaggtcattatgttccactgtaaatgtatcatagttcaataatgtttcatgaaaagatttaaatttattaatttgttttttttcaacaaggatatactttagattacattttttcataaaatgagttgataatgacggtggtgaatctggctcgataggtacataagcagccgggacttggagaattcctaaaatccaagagggtaagtctatcccaggttggcagtagagaccaatttcccgaattccttgaaagtcacagtgtaacagcagaaaatttgataattcagaagcagcattaaccacagtcttgtaggtgtagtaaactggaagctggttgttgcattcatcaaaacatacagctactctgtccatataacaggaggcagccttatgcaccaattcctgaagagtcatttcactgaagtttatctaaacattaatttgtagcacagaaccttatcaagtctcgtggattaggtttgat

SEQ ID NO: 153527 - DNA, 387 bp, Homo Sapiens
gataaagcttttgaagccatgaatttgcttcttatccttgctttaaatgtattccttagtttccatatggaaatggcatttgcctgccatgctgctgccatcattctatttttcacctttctgaatctgtttttgtttgtcttccctgtgtagcataaattgagtctgtctttgctttgtgagataatgtgaaaacccttgttgtaagttttatgtgtatttgactatatttgctttgtttctgtatatgattctcttttattttaaacttttttaatttaggaaagttactgttatttcctcaattgttgcatatttgaaactttttaaaataacgtctatacttgaatgacagattggccagatataaagtccttggttctcaat

SEQ ID NO: 153528 - DNA, 643 bp, Homo Sapiens
  misc_feature (267)..(366): n is a, c, g, or t
  misc_feature (571)..(584): n is a, c, g, or t
ttttttgaaggcttaaaacaatagaaatttattctcttacagttctgaggccagaagtccaaaatcaatgcattagcagggctgtacttctacgggaggattgaatatctgtccttggccttctccagctttagtggctgtcagcattccttgatttatgatcacattactccattctctgcctccacggtcacaactactccctcctcttctccatgtcttctcttctgtcatatatgaatacatgtcattgactttacagtccannnnnnnnnnnnnnnnnnnnnnnnnnnnnnnnnnnnnnnnnnnnnnnnnnnnnnnnnnnnnnnnnnnnnnnnnnnnnnnnnnnnnnnnnnnnnnnnnnnnaggaaggcttaccttttgcaggggccaccattctacccctacatcttacctaagaataaaattttttcttctttcaagctttgcctcttgaagctctgaagaaatttaagacctgttcttttctcatcaccttagctttgaagacttaggtctccatttaagcactcttttggcaaattcagtctattcttttgtttcagttgannnnnnnnnnnnnnggaatttcttcttcttttggttaaatgacaccaatgggcaaaaaagttacttagtaaaa

SEQ ID NO: 153529 - DNA, 469 bp, Homo Sapiens
tttttttgaaccgagagactcacagtacatttatatccattgcacatagccactttgtcattaggaacaggagtttcagaagttgacgggacggggagtgcggggcaggcgccagcgaagttgctacattgtattcacaatcgggttcaaggctatacaatgggagggggcgctctcccctcccgccccccgtctgtccagttaaccccttgaggtccgatgccctagagttcacacggggtagggggatttgaggcgcgaggcggtatttacacttggaaaccaagccggggccctggacagggacgcccgggagggggcgggcaaggccggggagcccggtaggaaggcgggcggacgggcggctgtatttacatcggtcgggtccgaatggcttgttcctcgctcagggccaccgcagcagcgggtatttacaaggagcagcatggcttgagggcgcaggggtgcg

SEQ ID NO: 153530 - DNA, 432 bp, Homo Sapiens
tttcgaggtagttacataaaattattttgtttggcattatttttctcactcgaagaaactatatagggttgtttttcctttagcttgtgctcaagtcctcttgctgtgttttcagaagcactcacatgttctttcttttcctgagtgaaaagcaaaggtcccacggtgtgtgctgtggtgcaccgcctggctttgggggtcccggaggcaggctgcctagactcacagcctcgggaccgttgccacggcctgtcttctcgttcaggcctgcctctgacagcactcaccatgaggacattccatccttcaccccctcctctggcacaggccaccactgcggtgctgtgccttcagatgggaggtgggcgcggtggccgcctccttccctccaggacctgcccgtgtgaagaccccccggagtgctgagcttca

SEQ ID NO: 153531 - DNA, 388 bp, Homo Sapiens
  misc_feature (97)..(105): n is a, c, g, or t
taaaatgattaaagtattggagtactatatattcacttagtaaatgtgtgtatctagtatatacgcatgtcttatacaaaatatctaagtatatgannnnnnnnncacttggagcaaaatacttgcagtagcatggggatattgaaccgtctgctatttctgtttgcctttagtcattggaaacactgttagctgtaagattacacaggagcttcagccaaggttgaacatttattttctgctgagtttaaaatggaccagctccttttgttccttgccagctctttaaatcctctaaaatttggaataaaatgaagacctttctttaatattagatttcaaagattccaagttaaactatttgcctgggaactaccaggttttttaa

SEQ ID NO: 153532 - DNA, 548 bp, Homo Sapiens
tacatacagaaggccaacatttaaactgaatgataattaaacgtttactaccataggtaatatttacgcacttctgggtccaatagaaggtgttgaatcaatgtgatcctttaaaaacaaagtcattagtttccgtaacaatcacactcagggttggttctttttttcttcccccagcagaaaaacaagttgttcaagcattgaaccaaaaaatataaaaaacagaatttgccttgtaatattttcatgttttggatgaagtcagcccattatgtgaggctgcttaaatgcctacaaccccttatccaaaacccgctgggctggatgtgtttcagaattcataatctttggggttttaaaaaggcaatatgggcatattttgaatattacaaaacacctccacagcatctaagggaaaacctataatcaaatccatggatatttcttcagggaaaattaagtcacaatgaagtagcataaatataaagtacaatactctcacatcagttcaagtcagattttgctgccaaatgaattacggtatcaaa

SEQ ID NO: 153533 - DNA, 542 bp, Homo Sapiens
caaattcagctcgaattgtgcagtcaaggccctgtcaagcttttagaggcacccttgtcttgaagcaccttcatgactggcatttcactcaaaagccctcggcactggtccttaacagcttatgacatcacaaaggacactccagacagatgcctacatggcatcctgcagcattttaaaagagaattagtggttttaattatggtcgtagtatgaaagggaaccatgcaagctccacaggagacctttgatcagacccttttgctagtacaatgccacggaactgtgactattccctggtaaggggcccttttcttgctgaatgactcaccagtgatctttgaatgcagcgaagcttctagccctccctcttcattagtgagcatttctatacaggggcctatatagtgcttggagtctaggagctatacaattggggggaaaagaagccctacagatttctggcctctacttaggaagtgctgaaggactctgagtgactttattcattaaaacaggttgctattaattaactgtcataa

SEQ ID NO: 153534 - DNA, 351 bp, Homo Sapiens
  misc_feature (328)..(328): n is a, c, g, or t
tttgataaataaaaagtttgatttaggtccaagtatccattattttaccaactccaagtaaccactaagtagctgtgaagggtcagctctggtgcagcaccaatggtgtggacagccagagggcagagctgcagaatctgtatctgacaggagacccccgggtgaagtgcagatggtgcctgaggttttggtgcctgaggttttagttcctggaaaaatcccagagagatgaaataaatatttccctctataggatatgtgcagctagaaaatgtaaatcttcaggtggtctttaaaattaagagatacattttttaatagaatgagncttagaattgcagattgcataga

SEQ ID NO: 153535 - DNA, 501 bp, Homo Sapiens
ttttactgttccaataaagctttatttataaatcaggaggctggtcagattaggtccacgccataatttgtagacccctgagagaaatgacagaaataatatcacttacttttaaggattgctgttaagaattcagttgtttactatctgtttatttcttggcacatagtagacaatagatagaagctgctaatattattatttctgaggttattccagtgcagtctgtggccatggatcagtggctgtaagactttttgaatgggcagaacagatttcccaattgaaaataactttcctgagtggaaaaccgtttttgagggaatataatgcaggtagtcctctgtagtaccccactctgacagttacacgttgcaagggcagacgaatgctgcctcagagtgcagatgatcttattttaaaatgaagtagaagtgaagctattaattttattttgtaaaatgacaatgtatattgttagggttttaactgcaggtgcca

SEQ ID NO: 153536 - DNA, 496 bp, Homo Sapiens
tttactattgtaaagaagctttatttggccccatctgatacatcctaagccaatattaaatgtttcagtttcttagggaatcggctatccaggacatttccaagccaaactaccagctaatgctaaaaatcaaggcaaagtaaaaacaaaggaagagtaactttggcacaagacaaacccgatgcaggcagtcatgggggatgactgttttttacccagaaatgcaaaaaagtggccttctgtgccccatttaaagaatcccaaacgggagagtttcctgccaatgtgcaaatccgtcaatactccctgagccatgtggccggcaggtccaatcctaccgtgactttccaagcgcaagcctcgtctagttctttttgctcagttgttgtctcactgacgccctttgccactgagatccctgtaagtcactacagaacaaatggcaactgcacatttaggatgacgtcccttgtgctactcaaacaggccaccaaag

SEQ ID NO: 153537 - DNA, 906 bp, Homo Sapiens
ttttgcctctttgacttttttttattattaaacataaatatttttatcccaatattttgccccaacagtggtaattctcactgtatccccactccttgggtccaagtctttctgagtctttaaggaaagtaaaatcaagttggtggccatcttgggttcctagggagtatatggccatcttggctgcatttccattggccgagcaaagttcccctcagggagagccagggtggggcctggtatgctcttcatcttcatctatcctatgctacctttcctctcaatgcagatggtcatcttgaaatatcttctttcagtggctagaaacaacttccatcccggccccaaactcccaacacccactgccctgtccccatctctcctcaaagggcctacctgccatcttgaatctcttttacaccggggaataggtgggcatattgggtggccatgttgctcccacttggggcatctcctttggctgagctgactgtatacaaatgctcctgacaaatgtaatgatctttccctccccttgtgttcagttttggaggagtaaggtcgccaacttgtcctggctcctcagaaatcagaacaatccattatggcaagttggagatcccaggactcttccattggaaagatgtcacacgtgagtctggagacgcgggtggctaggtgtggggaaggcagcatatgggaaggggggagtcccgggggccagatctgggggcccaaaggatgtgggtttgatgtagctggtgaaagctcgagggtggggtgtggtgagatagcctgccctggctctgtaaagtctgcagggggggaccatgcccaggtgtgggttgaagtcatagaaggtaggggtccctgggggcccaaggggggagggtggtggcggccgca

SEQ ID NO: 153538 - DNA, 673 bp, Homo Sapiens
ggcacgaggttttttaacaggaaataaaacatttttattgaatatctgtgtaatatgttaagtcatttttaacaacaatcagaaaactactgtggaattcactacacaaagtgaaacaaaatttaaatcacctcatcaaaaatgaaggtaaaatacagctgaaatagttggctcgcaggccacgagccatatggcagaggaaaacaccccaacatttctacaagatacagggaaaacccacacatagaaacactcaagcaggcagtaaatatacacaaaggcaactaggatctttctagagcatcagattctaatactttacacagctttgtcagaagggtacatgtggcttatttgaggatgaatcttggtcataaagcaggttccatcactgacttgtgaaagagtgaaagatggcatagtaccaactaattctatggtgacaatcccatgtctggcagtgttgcaagagaatgcattagtggtattttaatgcaagaaataatgtctattcagcagcttgaacctgcttgtttgaaagtgtggtttcattgtgaacaacttaaagctgaatacagtgaaattaaatgtcatttgtggtatttaaatactttttaaaagccagtcaactccctctctttggtagggtttggccctttaaattggaaagagt

SEQ ID NO: 153539 - DNA, 580 bp, Homo Sapiens
ttaaaaataaattgtattgtgtatatttgaggcatatattatgatgttataagatacatatttttatagtgaaattgttattagagtgcaacaaattaacacacccacatctcactgatttcccattctctcccctggcacccatgcaggagcagccataacctactcgatgcggcaaaaccctgagcccagcacgctcttgtccactcagtgcggcaaaaactctgagcccagcacgctcttgtccgctctagtcctcgtgttgtacgttgggtttttggacagttcatcctaaataatgctaccttgtgttttttgacctacacctccccatttccttttcactttttctttccagtctcaatgtctgtaacaaccaattacctcaggttaacaaaaataacttcagtgttaacctgtgtcaattagctaatgtaccaaattcaggatttaatgaatagattgttggaattttaagaattttcattttattagttaaaattagtgtgaaaactggcctagaattatgtgaaaagtcacacacgattctagattttgcctgttacttcaatgagtgtct

SEQ ID NO: 153540 - DNA, 439 bp, Homo Sapiens
tttgttcaatagttttatagcatgcatatagcatgacaatatgctagactgatagccactgctaattgtatcgatcattttgccctgttacaactttagaattttagtagtctataatattcacatttccttctttcccgcattacataaaggctgagagttgactgcatgtctgctgtgggccatcttcaagttcagtccatgtgtcctctcatttctggacctaggctgatggagtggcccttttctgggacataatgtttttgtggcaggaggcaagagcacaagaggttgtgccgacatcttggggcagccactgaacatttccaaggatcaggtttcttctttaggaaatggggatagagcaaaaggaagtcccagtctatttagaggtacagccatgtttatgaatcacagcaagaaggttcatctggcagaa

SEQ ID NO: 153541 - DNA, 353 bp, Homo Sapiens
aggggccaggaagagcagacatgcatcttggagctcatcagattagcactgtggggcatctggctttagcacatttccctaatggagtagaagtgagtgtagtgggaaaatggacagacttgactaggaagctccactgagcaggaaaggcataattagaggctggagccaaaaactctccatacctggatggtaaggtttttctcatggtgattgcttatagcaagtccactccccccaataaatcttcaaatctttccaatcttttggggtaataattagcatagatagcagtctgttggctagacagttaaaattccttttcataatgaatacttcattagaacatgtaa

SEQ ID NO: 153542 - DNA, 113 bp, Homo Sapiens
cctgtcatttttgaagattatttgtagtatccaaaggctcaaatgatgcttgtctataatctcctgctttccatgttaaccctgctagctacttctttccttcccccacatat

SEQ ID NO: 153543 - DNA, 466 bp, Homo Sapiens
ttttaggtttcaacagtaaagtctttgtttttcttcatagtattatactggagaacagtaaagtctttaagttttaaattttgggaagctgtgaagctcatgtagcaaatacaagtgttccaaaattcgatttttcacttgaaagcttgaattatatcattggcaacaaacactgtcagatttttccctgaagtgacagactcactttgttcctttttagaaaagttctgccagctacctaaatctgataaccacagttttgtcggccattcttttgagtaaacgtggcattccataaaagagcagctagttcagctcacaactcaaagaatggcctaagttatttcctccagaaaaccatcatactttggtatgcaaaatgtcttatgcatacttcccactttatcagacagaatgttgaaaagccttttccttaaggattaaggtttaattaaattaatacatt

SEQ ID NO: 153544 - DNA, 533 bp, Homo Sapiens
tttgaaaaaataatttgattttattcccattatagaggaagaaattaaagtttagagatgttagaaaacttgttcagtattacatagaaagtagtggtattggaattgaaactgaaactcaggctgaaatcttaactcctacaggttgtgatgggcacaacctagaaatgatatttctttgcagctttattgaggtataactgacaaattgtataaatgtaagatatataatgtgatgagttttatacaaatacattgtgaaatgattaccacaatcaagtcagttaacacacactgatcactgtatctagttaccattttgtgtgataacatttgagagctactctgttagcaaatttcaagtatacaatacagtattgttaaccatagttgccatgtgctacattagacccccagaacttgttcatcttataagtgaaagtgtgtaccctttgaacaacatcttcccaatcccttcatggcccagcttctggtaaccaccgttctacgctctgcttctatgagtttgactt

SEQ ID NO: 153545 - DNA, 518 bp, Homo Sapiens
tttgtcttcttaagcatttactagtagtagcattccatattaatctgttgacacagctactccaggtaacatgttgaatattctgcaatctcttcctgtcagccagtatatgagggctatttctttaaaagcacttggtatggagagatggtgtggtgtaatacaggcagcacagacattctgctctcggtagtatgtctagccagcagctctggcatttgacacaatggtaatatcctaagagcatttcactttagatttgtgaagtacttggtcaagacattaactgtttggaattgttcacaggaaagtttttagcagacaacatcgttgggtctgtcctggttttctccttgatattttggattcctttcagcattcttgtccattgtgtggtaagtcatcaacttttaagtaattaaatgttttatttaaattttgatcaactccaaccatgtaatctctggaaaaggtaaaacttgttcttagcaaagtttggcctgatatttccaatagct

SEQ ID NO: 153546 - DNA, 633 bp, Homo Sapiens
tatgttctcgactcgttacggggtgaaccagacgaccggcgacttcatactgtttatccaactttcttatccacacaagggacaagaatgctgaagggaatccaagaatatcaaggagaaaaccaggacagacccaacgatgttgtctgctaaaaactttccaaaagtatggatgctcagctggtcaatgaaatcctaaaatcgttcaattacatcctgtactcgtttctcacattggccattcatgtcacaaaatcctactgtacagggctttcctttcctcaaaaataagttctttggttcagcatcgagatagggcacacagcggccggaaaggtccctgcagcacaccttgcaggagtggtcagtttctggaacagagaacacgcatggacagcgggatggttctgagacctgcctctcctcctgcctcctctttcctccctgaccatgctcccaaaagaggtaagaaatcacatttattttttatttaaatagctaatactatccatagcccccaccaaggagtagtttctgaggtcacactcctcagccttcagtgacagaggccccaagaacctgagagctttttgtgtagccctacaggtagtgtgtttgagcctgcaggcaggc

SEQ ID NO: 153547 - DNA, 773 bp, Homo Sapiens
tttgtagctcgaagaacattttattaacatttttctctatataaatccacccagtgcgtcaagttaatggtaacaaatcattagtgaaaaagcatcttcctgaatctgcacattttgatcctgaccttgggatctataaagtctggcacagatgcattgccttagcttccctctgcatcaggtgtgacaacctgagggagaataattcagcccaagcactgtatggacaatcatttgtttttaagtgacatgcatatttcatattctcagtgcacaatcgacctgcttaagtactgccattaatattcacaatgtggctgttacaaagagaagcatgttgagagagccattcgcatttcaagtttttcaaggaaaaaaactagacattgcttagtaaagaccctaatggtaacacataacagggcctccttcaaataggctggaggaggggaaagaaaaatcactgtgatgacatactcctaactctgtgacaggctgatagccagacctcagctagtgctgaaatgagaaatctgtgagaaattaggaacccagggggttaggaatacctctccatctttgcttttttctaaatacagacagttcccagcttatgatggtttgacttaagatggttgcaaaggcaatacacatttggtagaaaccatatttcaggtacccatgcaaccattctgtttttcacttttagtatagttttcaataaattacatgagctattcaatattttattataaaataggctttgtgttaaa

SEQ ID NO: 153548 - DNA, 140 bp, Homo Sapiens
gacttgaagcaggtcacagagtcaactaaaagccaagcagagtctccgtgggtcttggcaagggctcctgcagactggtcctgcattcatttgaataatctgatactggaagctactctttattttctgtcctattaggt

SEQ ID NO: 153549 - DNA, 503 bp, Homo Sapiens
ttttgactatgtaggcttcaaaatatatttagggttttccatgaagcatttatagcaacatcacatatgttctgaatcaaagcctatactccttatcccattatgagttcatagaataacaaaatgcaagataatttggcaaaattgacacaatgaaattataatacacaacattgctcccttgcttcttgcaataataaaccaaaccaattaacacttacagaaaatttacagtcacaaaagactgagtgatttctggcaggcacaaggtaaattcatagcttagccaaaaaactaactcatatttcctacttaccattccaaggtttgttacactgcgtgtcctgccttcttctttcgtttttgcctcacaggttctgaaagaagtaattgcctagagtctctgaatttaaccagtttttaaaaggatcaggaaacatctagggactaatgaaatctctgtgtaccctaggggggcctatgctctgtgactcttctcagaa

SEQ ID NO: 153550 - DNA, 547 bp, Homo Sapiens
tctagccttgcgtgagcctttctaaaaattttctttcaccagctcactgaagttgattcatatagccttctatttgaccccccgccccgctgtctcccattctcagctcaaggagaaatgtttctctttgctcaaggccttgtttgcctgttaaccttcagaagccactctgctcccagaatccctttcttagaaaaagcccatccgttgctctgtaagactaaccaagcgcgactttctcctccattgcggaaggaaaccggactgacccattcagcccagcaccaaatctagcgcctctccaacctctccctccctctcgtcgtccccaccctcggccagctgcagcactgcgcaccgcaggccgctccaggcccagggcaacgcgcagccgatgtcctcccaacggtccaggtcgaggtcgtagcccactacgttgcgggtaggcacctggcgcgagtcccgccacttgaggccgcccagcagcaacgctgtctcctcgaccacggccagcccatagcagaagcggtcgtagggcagcggccgc

SEQ ID NO: 153551 - DNA, 664 bp, Homo Sapiens
ttttgaccatctcatgtaatttattgaatactgaaagtgaaaaacagaatgattatatgtgtgctcaaagtatggtttctactggatgtacatagcttttgcatcatcataaagtcaaaaaatcattaagttgaaatatcatgagctggggacttatctgtacccgaagcccaccaaagcccatcactggccatgacctgtgaccttcaaaaccttcccatcttgatttccccaagggattccacggtcctcacctcactagatcaccatgactcactgggtagatgggctattgttttcattaccctttcataggtgaggagcctggggcccagagaaaagggggtgagctgcggaaggtgagcctggcttcaaaaccccagcgtagggtttctctccactctggtgcccagtgctcccagccccctatcaaataagtcttcttggggctaaaaattgctgtacataattaccaagcaccattaaaattccagatctcttctgttcatggaagataactttgtcttatactggatcataaggagctgggggtgggagggttcctgaagcactggaagcaatcaagccactctcagattgggtgagcttccctttggacagagacccagtctagatccttaaacacccccctccccaccaaggg

SEQ ID NO: 153552 - DNA, 147 bp, Homo Sapiens
ttttagccaccttatataatttattatgggagaattatgaaatacatatttagatccaaattgtctttaaaaatatgcattacaactggagttttccactgagaataagagtttggttttgacctcacataaatccaagggttcttg

SEQ ID NO: 153553 - DNA, 238 bp, Homo Sapiens
tttatgtcttttatgcccttgattattagttgggctcttcataaacagaggccatctctactactgtttatttttccctgctgtgcccagaacattggcgtagacacagtaagaacctagtaaatattactgtttctagccatcagggagattgtggaactcctcccagtataatttttacaaactccaagcaaatctgacccaaactcccaaattgtcaagtcctgcttaactttct

SEQ ID NO: 153554 - DNA, 252 bp, Homo Sapiens
cttttttttgtcatttatttatttatgtgcagacttcaagtgctcaggcttagataacttttggtaaaagtacactctcatctttcgcccactgggtcctctttctttctttgctattctttgaactcgttctctgtggtttatttttctatgccaggagcatatattatttgtatcagtcctaatgcttagcttacaatagtctgacatggtcctccttacagagttactcattactcatcctctagtctg

SEQ ID NO: 153555 - DNA, 447 bp, Homo Sapiens
tggtgtgagccactgaacctggcaatgtctatgtttttaaaagtcctttaatgagcagaaattgtaacttttttgaagtcctatttatccatatttttcttcgatgattactgcctttagttcatgtccaagaaatctttacctatcccaatgttgtgaagataatctcctatgttttcttcccaaagccttattcttttggattttatatttagacctgtaatcaatcttaaattaatgtttcagtaaacagtgagaaaggtttgagatatccagttattcagtatcatttgttaaaaactttcttttccccgttggacttggtaccctggtcaaaaaacaactgaccacatacgtatgggtctacttctggactctattctgttgtactgatccatttgtctatccttaagccagtaccacactgtcttgattattgtggcttta

SEQ ID NO: 153556 - DNA, 460 bp, Homo Sapiens
cttatcagtttaatatctgatacgtcctctatccgaggacaatatattaaatggatttttggagcagggagatggaataggagcttgctccgtccactccacgcatcgacctggtattgcagtacctccaggaacggtgcaccccctccggggatacaacgtgtttcctaaaagtagagggaggtaagagacggtagcacctgcggggcggcttgcacgccgagtgcctgtgacgcgccggcttgacttaactgcttccctgaagtaccgtgaggttcctgatgtgcgggcggtagacggtaggcttatgcggcacgctttcgtttccaccgtggctactgcgctttgggaaggccacgacctcctcctttggggaggtccttaggatctcagcttggcagtcgagtgggtggcgaccttttaaaggaatgggacccacccggagttcttctttctcctg

SEQ ID NO: 153557 - DNA, 515 bp, Homo Sapiens
ttttaagattagaaaaatttggtaatagctttattgaaatataattcacccatataatgtgtacaattcaatgatttttagtacattcagagttgtgcatctaccaccacaatcaattttagaatggttatatcccatatcctttacccgtcgcccccaatacccccatccttcccctccacatgtagccactaatctactttgtctccatagacttgcctattctgaacatttcatataaatgcacttgtacaatatgtagtcttttgtaactggctttcatattgtaacatgaatcagtatttcattacttttatggtcaaatactatttccttgtaaggatttaccacattttgcttatccattcataagctgatggatattttggttgttttcatcttttggctgtcatgaataatgctgctatgaatatttatatacatatgatttcatttctcatgggtacaaacctatgagcaaaacttctgggtcaaatggtaagtcaatttttaac

SEQ ID NO: 153558 - DNA, 459 bp, Homo Sapiens
ttttagttcacatcatcaaagtctttattccagtgattaaaaattactggactcccacaaactgtaatgaagtgccattgtgtgtctggacataaggttggaggaagtgttcttaggcccactgaagataccctgggccatttatgtcaaagcattgtggaccatgcaccatttaaaccagatggcaagtcccttgattaaagagctgagaatctgcactaatttgtctgttgtacatctctcaagagtactgtggggcacaaaggtgcttagtgagtgtgagctgatagacgggttaagcgctggggactttgcagtcagaccacaatttaaatctcagctccattagttcctagtgccagtggccttgaacaaattatttgacctcttagtcttagtctccttatctataaattgaggggtggcaggaagagggggaggagaggattggggtagcag

SEQ ID NO: 153559 - DNA, 564 bp, Homo Sapiens
gacttgcagacgtgccccacgtagtacaacgggaagaataaaaagttccagttggtggcaaaccacgtgagggtgaagggcgcgtcgaacttcctgaaggtcagcttggcgagctgcgtggagcccgcccacgaggagcacacgcacagcacgaccgccacgccccagaagatcttcttgagttgcgcccgggagcacgtccagcagcggcgactcgctctcccgccggcctccaccccggccggtgcctgggcctccgccgggcccggggagtcccgggggcgctcctccccttccactttggtaagggtcaggaccggactgttgcaggcgctgagcggggccacccgggccgagtgcttcttcatgatgagccggccgcctgcaggagcgctgccgccgatcgcctacatcctggggccggctggagcgcgtctctcccgggcccgtggccgacgcggccctctgccgccggggagcaccagcggctcgcccctctcagtcccggcctccccggctgcccgccgggctccggttgccgcgttgctcacaaaggcggccgca

SEQ ID NO: 153560 - DNA, 472 bp, Homo Sapiens
  misc_feature (359)..(374): n is a, c, g, or t
gtgacttcaccataactcacatcatctggatctcaaagagccactctgatgacgtaagtataatctggcagtatcgtgggaatcaggaccaccgtctttgctgtagcaatacccgggacctcagtttacatatctcctttatgtgtcgagacagtgtatgtgtgggtggtaggagggccaggaaaaaaagctagaatcactcaccgtgtgattgttcagcatgaactgtaccgcactaagcttcactagcttccttacgctactgtagccaatggagaggtcattgagaagctgtagtgtcttggaggtgattggttcacaacggccccagtacttcaagttggtgatgctggaggacnnnnnnnnnnnnnnnngcaggagacccttttgatttgctggtttccttgagggctgggagaagaagaaagtcattcatcaaaagtcaccacacatctgcaccaccaattcacag

SEQ ID NO: 153561 - DNA, 495 bp, Homo Sapiens
actccttcctctgggatctctgtccttgaggggcacccacctgatgccagtagaaatgctcctgtataaggtgtctggtgacccactggggtgtttcacccagttgaggggcacaggatccaggacttgcttaatgaagcactttgattgtccctttgggaagggggtatgctgtgccggggaaaatcccactcatctgggctgcctggaatcctcagagtgagcagggggaaagaacaagtcttccggtttgtggagacaacagccagccacccctcccactagggactcagacctagagagatcagagttctctccctaattccctggcttgagttgctggagttcctgcagggaggccccacccagtgaggagggatgggtcagggtcagcctaaagaggcagtctggccatgatctgccacagccagtatgctgcgctgtggggaatacctcttgggaccaagccgtccagtcttcctggcatcagcaaag

SEQ ID NO: 153562 - DNA, 522 bp, Homo Sapiens
tttaagagaattcagtttatttcccagttcccccttctctctccctccctccccgggcagtgggggctcgtggcaccacttcccttctccggattagttgccaggggagcagccgggagtcggggtgcagggacctgggaggcgcccctgccccccacagggaaaactgccccacaactcttttgttttctcaaaccggttccggcagccgagcccgggttcggacacaggtccgcgggccagagcacagcggggtagctgggtcaaggtttggggaacagttcctgtttaaggggtgcgcgcggaaattgcaagtttgttgggagccgggcgagcacgtcgcgttcaagtccaaagctcccgcactcgcggagcagggtccgcggctgagctgtacccacggcccgctgacctcgggtgccagggccgcgggggcccggggagaggcggatcatgccggtgacccggaggtggggcgctggcctgggctgctgcggagttcggctgggtccacctgataca

SEQ ID NO: 153563 - DNA, 484 bp, Homo Sapiens
tcagaacagtccagtgacaccagttctgtgttggcagttgagtaattcaaggtagaatgctgaattagaattcaatcctaatcctgctgcaagtgctggttttactgggtcatatcttggtagtcagaaaatgaccccacagccccacagttttacagatccaatatccgcccatcaagtcacacacatgaaaggcatcatgtcactagtgatatgcaaacatcaaatgtgatgagtacaaacaaaaaggacccacagtatacagtgaaattcttcattattgttcttttatcagtccttaatctctccaccctcatacatgaaatatcttacaataattttacatactgacacgggtgggtggagtcataagttgtgccaaactaaattgatttagacatgatgataaggaggatcatagaagagtgatgtattatcagaactgtaccacctcaattgtcgttggccattcagtgtattaatc

SEQ ID NO: 153564 - DNA, 570 bp, Homo Sapiens
taaatattgtaacatttattgagcactacgtatatatttttgaattcccacaaccctggaagaatgagaaaatcgagactcagggagcgttaagtattttgcccaactgcatacgataaatacataggaaaaacaaacacacagaagaaaaccaaaccaaccaaagtatctctttcaaaaggaaacgacagtctccttaaaggcaacccgagacaaatttcagcaaagccgtgggacacatggccttcgagctgctgtccattattgagtagcagaagccaagaaggatggaatgttttggaagaaaggggtcgggggtcggggtgttcaaaggacggaccgaaggtaagattgaagtggggtcagaccatggcgggacagcgcaccggagaatgaacagcgattagggaagagtggcgagcgggtggcaaggacggagggcggaatcccggccggggctgcgggaggaaagcgcacggacaggagccccaccgctcgaatgcagcgcccggcggctggcctcgtgaggtcacaggcccttacgaggtggggcaggcaggcgcggccgca

SEQ ID NO: 153565 - DNA, 549 bp, Homo Sapiens
tttttgggtaatatgatgacagtgtaataaacggcaaacagtatttacaaagatgagggcaagatttgggaaaaccatcaaggaacagtgcaagtgcctctgaggctaacaacaacaaggtgctggcactagccctaggcatcaaggggtaagggagggagtggttcccagatcaccagagagtagctgtaagacagggctgccaggaaggagtcatggcctttctttggtggaggggtgcagccaacctatgggcaggtggcaatgagagatccagggggatagacagctcaatttcatgctcttcccattccagtcttgagtccctaggagtaaagtcagagcctttcatgtggctggggaggaattatggagattgggtatactggatgtcatccatttgtcccacccagacctattctccatccttctccatcttgtcctatgcttagcaaggctgattcatatggctggcatccaagcattctcctgggctttggtttctgcttgggttccaacagtaggaggatattatggattgaattctat

SEQ ID NO: 153566 - DNA, 562 bp, Homo Sapiens
tgcggccgcggggggactggactcacacctgctaacggccagtccacaggacctgcccagaggctgggacacaccgctgaagtcacatcccacggggagcatcctcaccaactgacaatcagcacgggtttgtaattaagggtttctgcccagccaatgaacggcctccagaaacaacctttgtggaaccccctataaaagccttcccagcgcttgccttcaggacactgctcagggctgactcagtgtacccaaactgcagtctttgtttcccaaataagcagtcattcattctacctccgtgtcaatcttttcttcgtgaacacagctggtgtcaggagcagggctcagcaagatctctcctttgagcggctttctctggaatcgggtgaagtccccacaacacagaggcccctgtgcgcgccccttctttggggccagcacctcccttcaactgaggctgatacctttatttgggaatctgggggcagttgctgcctctgtgccggcaaaggctttcagcttggaggacgttttccctgcttactggagattttcccaa

SEQ ID NO: 153567 - DNA, 555 bp, Homo Sapiens
ttttttatagtgcatgcaggaaattgcaattttatttatgtttgtattgatacatatttgtacatatttatggggtgtggtagtttgatatatgcatacaatgtgtaatgatcaaatcagggtgtttaggatatctatcacctcaaacatttatcatttttgtgtttggaacatttctaatctcctagttattttgaaatatataacatattgttaactatagtcaccctactgtgctatcaaacacttgaacttattccttctatctacgtttgtacccattaaccaatctcttccctccctcccccaactccaccttcccagcctctggtacttatctctactccatgagatcaactttttaagctcccacatgagtgagaccatgggatatttgtctttctgtgccagacttatttcacttagaataatgacctccagttccgtaagatgggcagccaggaaaggccttacttagctgatgtttgaattgtgaagttatgtaatcattaagatgagtatacatacaatgggccagctgagtgcacagcaaga

SEQ ID NO: 153568 - DNA, 543 bp, Homo Sapiens
  misc_feature (28)..(28): n is a, c, g, or t
  misc_feature (36)..(36): n is a, c, g, or t
ttatttttcctggtgggaattttaaaanaatgaaantcttatgccaatatctactataaaagttagatgaaaacagactgctctaagtgggagctggggtgaggacccagaacactgtccttctgaccccttcctcttacccctgcagtggctcccgagcagcttggggcatggaagagcccagtttaagaatcctttaaggttctttaaggttccttccagatacaaagcccagggattctctgacttaggagggaattgaggtaggtcagggtgggaaagacacacagccttaaaagttgagaagtgggctgtttgagaagtgggttgcttgagaagcggattgtctgagaagtgggttgcttggggctaatctataaagtctccatctgtaaagttatcctaaaattatgtcttgtctcttaggaaggatgtgcagtggttaactttcctaggtcatgaccttttacaagatgctcttcggaaatacctacatttttgaattttactagaacgggctggtctgggacttggaagtacatt

SEQ ID NO: 153569 - DNA, 411 bp, Homo Sapiens
  misc_feature (277)..(285): n is a, c, g, or t
gggataacacatacatacatttatatttatagaaatctcaggaagaaattgcagcatgggaagatggacagcaaagcaccgatgtcctgctagaacgtcctggcaggtgggggctggcagagttggggcatgggctttaaaaccctttctggaagcaaggggtggggcaaggatctgatgattgtttccacgtggcagggaaagaggaacagaggaaggatgatcctgggagggtggccatcctgatgaccaacctgttgtggttctgattgacttnnnnnnnnntgtctcagcaacagcttctccaagaggagctggagggtggggaaggcatgaaggctggggagaggctcatccttccttctccccatgacactgctgggtggagctgggttggtagtggagtgcccg

SEQ ID NO: 153570 - DNA, 438 bp, Homo Sapiens
ttgacagtctgaccttgctggcaggatggttccaaagttctgttggaagccagctctatatcctcaatctagcaagatgagcagttttccagggcacaccatggtaagggggcccacccaatcctgcccatctgatcccacaggctggcccccggataggtaacttggtggcaactctagtctctcatcatgtacagggggtaaaccagttcatgcgaagatcatgtattaagctgcctaacatatacaaaaacactgctaggtcctgaggaaacagagatgaataaattacagtcttcctctgaggagtttgaaattagcaagggagacagacacataagaagtaaaataacactacagtgagatatgctataaacaaacctgggaggagatgtaagggaaggctttatagagaaggtgacatttgcactgttcaaa

SEQ ID NO: 153571 - DNA, 491 bp, Homo Sapiens
aggcttactctgaaatgacctgtcaaaaagcctgacaaaggtagataacactacctctcaagataagctgcctcttctaaataagcatgcaggaaatactgtctggttggtgacatataaatgctccacaaaacatgcaaattaccgagtattagaaactgcattggttgctagcgccatgctgcaaagactccatcatgggagcaaacagctaaatcacagatagcttcacagtaaaatctacattcacaatactaataggtttctagtgttaacaaattatacacaattataagctcttaaaatgcaacatacttatcaagcagttgcagataatgaaacattatcagctatcaataatttgttggcactttcacttttgtttataaaatttccaatacactgtaccacagttatgtgtctaaacagtgaggatgttaatggagtaatgactgttctactggccaggcgatgggatcagtagtgaattc

SEQ ID NO: 153572 - DNA, 513 bp, Homo Sapiens
tttcttcaagttaaattcattttcatcactttatgtatcttcttaaacatctgcacttaagtggcacttgaatggctcactatatagtattctgtcctcatatagtcaccccaattattttgcaaggcatgaagcttgaccaaatttataaaggtaaatttatatttaccgtgggtaaatataaatgcaccatccaaacacccaacagaagcctagtgcctacacacaattgtggctcctggagtccaaagccaccagagctggtgacactttcacctggaggcagccctgctccccagccagcattcatcttggtgggggactgggtatgaaggtataaagggagagaccctgcagaggcagccttagcaagggtaaacggagctcgcattttaccaactagcgaaattcaaggactgggaatatttctgggcttcatcacaccctccagatactgcacataactgtctagccatctgaagtccaggccaccattcattaacttagtagaga

SEQ ID NO: 153573 - DNA, 656 bp, Homo Sapiens
aacttttgtatgaagaatttaattatctatacacggaactaattcaaaaggttgtattacagttgttaaagccgcaggtttatatatttatatattttacattcatatccgtgaaaatactgaagtgcaactgaacgaggaggagaggtcctcgctctctgcaccatgtgaaaggagaaggacctttacacgaccaccagcacagcctcccgacagcgccgggagaacgcgaggggagtgagcattaccagagtttttaggaggacagctagattgtgcttgaggctccccctgccccattttctgtgctgtgagcagcaggcatttttattgagagcttccaactagtgtttaaaagacaaacagggcttcagctacagcatatctaacacacaaacggaccatgagctccatttcatattaatctgtagaaattccacagtctagttaaaaaatgtaaacattggacattaattgcagggagacttctatacattctttcttgtcaagaaaattacttgttcaaaataggtcattccatgaaaagtaactggaataacacttcatgtcacagagactaaaaagagactgtggatatcgttgatcgcaacgacctcagtggtgttgtctactgattcctatgctatgcacacacg

SEQ ID NO: 153574 - DNA, 446 bp, Homo Sapiens
actctttcaacgaactgccaattggaaaacctcctataacttggaactgtccccagcccgctttgggttgtcctgcctttccagatcaaaccaatgtacatcgtacatgtattgattgatatcctctgtctccctaaaatgtataaaaccaagctgtagcctgaccacctcgggcacatgtcatcaggacttcctgaggctgtcacaggcatatccttaaccttggcaaaataaacttctaaactgattgagacctgtctcaggtactttcttggtttacaggaatttaagcaaattacaggactgcactacccatgagtttgtgaaaggaaaaataaatctcaggaccccaaaatcactaagccaaaaagaaaagtcaagttgggaattgcatcgagcaaacctgcctctcattttattcttgaataagatagctacaaagatta

SEQ ID NO: 153575 - DNA, 352 bp, Homo Sapiens
ttttcttttatacatgtttttctttctgcctcttaagtccaaagaggcaaatcaggacaagtggctttggttgtaaactttaaggtcaaggatcctttctgttgagcttagctctcaagttctcagtagtcaactgcggtgaaacataattaatagcacgataaatacaagttgtggaagattcgattgaaagttggaggccctctccgtggatctctctacaaagagcctgtaataaagaggacttaatcaacgttagcagggctatttaaaaagcatcgtctattaaaattcatttcttctctagagcctcttgttggagtttctctggtgtgggtgtgttcgtaagaga

SEQ ID NO: 153576 - DNA, 415 bp, Homo Sapiens
ctctgcttattttaatatgcaccacgtgtaagttagatgagggctacggtaaaaacatttttgatgactgaaatcttacttttccttctaacgatctggagcaaatcacatattcattgatcatgacgaataaaatgatttctgctacaatgttgagaaaaaatgtgttcattaatatgaacacatgtctacagagatgatttacacgatgcaagtaatgaaagagttcttccttaactagtctactatcaaactgaaaagatgaatcttaaaattcccttgaaaataccatatgattggtcatgtgttagtaaaagaaagacggtccccatcaccaggccaccaccataagagagctatattaaatacttgggaaaaaatatggaaacaccggtggtgatgattaaattgataa

SEQ ID NO: 153577 - DNA, 318 bp, Homo Sapiens
ttttttaggaaaacatgttctttaataaacataagagatagtcaagtctaaataaaataataatgataataataacagattctacaccacagttgtatacacttccagtgaagctttatgcattccattctgagctcctaataccaggtaaacacgaatcataggtggaaatatgccatgtttagcactagaagtaacatcacagtttattagcaaaataaagcagaaaatgatcaaaatgatcaggtaaataaatattacaacatataatgtactggtgatgaagctgcaataaagtaatataagtgatgtttacaa

SEQ ID NO: 153578 - DNA, 242 bp, Homo Sapiens
catgatgatcacagatgcagtcacattttctgagttcttgtctctctgccagtgccacccagatagcctcacaaaactttgacccagccactgttagtgtcgccaccgcccataaaggagctgagcccagcaggggcactgcctggggccctgtagccaaaaggctacagcaggagctgatgacccttatgatgcctggtgacaaaagaatttctgcctaccctgaaagccttatcaaatgg

SEQ ID NO: 153579 - DNA, 344 bp, Homo Sapiens
ctgttagcagtgtgatctcacgtaattttttacggttaggggaacatgatcaaaagagtttggagaccactgttaggaagaaagagcccttgtctggtggttaagaaccttagaatattccctttataaaacgcaaggtcttgggctattcttttaattgatcagctgttagagacctctcgcttgtaaaatgaggatcctgaactgaaaacatgtgaattaaaatttgcccttttcatagcaagattgttaaagtgataatagtttttcattggtaagattttctcaatataaaagtaatacaaccgcactaaattatattttgaaaatgaagactaggcaaa

SEQ ID NO: 153580 - DNA, 588 bp, Homo Sapiens
tgcggccgccaactttttaatcatagggcctggtcaccagaaaccaaccacatgattagaaagttggaactttaagccagccaggggatatctgggaaggaagtgaggctggagactgagttcaatcgcgtgtccaatggtttaatcaaccatgcctatgtaatgaaaccttgataaatactctggacaggaaagctcagtagagcttcctggatggtgaaaacattgacaaggcaggatggtggtactcgctaactccactggaaatagcaaggaagctctgcatccaagaccctcccagacctttccttatgggccttttcatttggctctgctggattgtattctttataataaaattgtaattgtaaggatagcacttttgaagttttgtgagtcattctagcaagttatcaaacctagagagggttgtgggaaccactgaacttgtaactggctggtcagaagtgctggtgtcccacagccccatttgcagctggcatctgaagtagagccaatcttgtggaagactgagcccttaatttgtgcaatttgatgctaactctgagtggttagcatcacatttgt

SEQ ID NO: 153581 - DNA, 531 bp, Homo Sapiens
aaactatcaatgccattttttattttaaaaacagaaaaattaaaacccacaattatacgtagccaagttgttttcactctccatttattttccttttaaagtgctacatttgtgaactcattagcagttaccctatcaaaatttcaaaatcatgaagaaggttatacataaaaaatgaatgttggcttgagggccaaggaaatattgactgattagatagaagagcacatgatagatctgaactactctatgtcatcattcatttggtcaacaactgcaagctcctggatgtggctgattttgataaagtcatagaattcacagtattcttcacatttgttcaatggtcatcataaatacacatcacaataaccctaatttgtgactgaaacagaaactcttttcttttttcttcgaattttgtataatatttattttatcaaactcttttctaaatagcatttttaatgaacatgaatgtataaaactgtgaacaattttaataaaagcagaaactggtcgggcatggcg

SEQ ID NO: 153582 - DNA, 768 bp, Homo Sapiens
ttaagaaaaaaacaagaggccatttattgagtgttcactatgtgccaggcactattataaacattttacatggttcatttaatcttcccagcaatactatgaactatgtactattactccactgccagaagagaaaactgaggcaagaaaagcttaaataacttgccttaaaatcaaaccataaatagccagatctagcaaatgaatccaggtgtctgtctctaaagtctcttaaaaccaaatgattgacacttaagaatttttgtcttttctctatgctgtactacttaaatttagtcaacttcaatagtacatcagcaaagccattcaactattttaaaaactaatttatttattcaaataggtaataaattcatatatttctaaatcaaaaaggagcttccttatgcttttacgtagatacatactattccattttgtgggtgtacatttgatacctacaatccaatgcaccctcctatctgtaatgtatgtggagacctttcccccacagcctgatcaagtgctttatcaagttttttggtctctgtcaatctgataagtgaaaaaacgcatctcagtgtacttttaattcagatgttttatcgttttaattgtttaagaaccatatatatctattttggtaaacttcttattgtttcctttgcccattcttctattgggcaactttaaaattagtatgacctgtttacattcaagtatgagacatctacctgaaagacaagttgaaaataatttccctcgtgc

SEQ ID NO: 153583 - DNA, 439 bp, Homo Sapiens
atatatatgcatctaacagtagagccctaaatacatgaagcaaaaactgaaaggaaaggagaaacagataagtccataaaaagagttggaatattcaatacccctttttcaataatagagcacctagacagaagataaaccaggaaatagaagacttgaacaacattataaggcaaattgacctaaaagacatctatagaactttccacccaacatcagaatacatattcttctcgagtgcatatgaaacatctccaaaataggtcataagttaaagcataaaacaagccttaataaatataagtagactgaaatcatgcaaagcatgccctctgaccacatgggatgaagttagaaaacaatgaaaagttgggaaactcacaaatatgtggaaatcagacacacttgtaagtgactggctgggtgcagtagctcacgc

SEQ ID NO: 153584 - DNA, 478 bp, Homo Sapiens
tacatataattatgcttttctaccccctcacactcaacactttgactccagcaatcccaaatccccagatccctaagtgtgctgtgctatttcacatggctctcagacttggccagtgctgtttccattttggtctttattccccacatctctgcctggggggtagattctaccctgaaaaatgttcttggcacagccttgcaaactcctcctccactcagcctctgcctggatgcccttgatttttccatgtcctcagcatatcatgtttgtctttcccagcactgacttaccatgtgtcacccctgcttggctgtaccttccatgaggctaggactatgtgtctcctttgttgactgctgttgccctagcatcttgcacagttccttgcacacaattagagctctataaatgtcaaataaatgtgttataattatatgtttaagatagttgtttaaataaactctaaataacccca

SEQ ID NO: 153585 - DNA, 170 bp, Homo Sapiens
acttaacgttttctaaaaaggatgttacgttgttttagtataacaggtgaaaaacacgagcttaaataataagtccttataaaacaaaagccaattttgtttaaacatcattgaagatgcttttatttccttaaagatatattgcttataagtattatttgttaaaaaaa

SEQ ID NO: 153586 - DNA, 491 bp, Homo Sapiens
tttttactctaggttatgggtcacattttcctgcttcttggcatgtctagtaattttttattggctggtggacattgagttaagtatctgaactttgccatgttcccttaaagaatggcttcgttagaagacagttaagttactggaaaatcagatttgtttgatcctttcatggcttctttttaaacgtgtttagggtaggtttgaagtagcctctattctgggatagtttagctctactactaaggcatgggatgacccttctggttctcttgaaaagtcactttggaagccaattctcttgaaaggataatatggaagttccctggctcgctcttgacaaaatactcataaaagtctacctccactataataaagctcaaaacaaagagttgttgtaaaggactgtggaatataagattggctgcagttacatagaatgaacgaaagtgtgatgagatgaatgctgagaaatgtttaggatgctcctg

SEQ ID NO: 153587 - DNA, 427 bp, Homo Sapiens
acagttaatattcaaaagaattaattcctgtgaaatgtggaaacattaattgttttcctctttttaaatagggtacagcttttatcttgcacatgaattttttgatgttcttcctgtgcataaatttcaggtattgaggggggaaaaaagtcatgtctataattgaatacaaaaggcattgtgttgccaatgtttatggtatttattcagtatacaaattttacttgttgaggttatttttaactattatttggaattttggtacacaaataattcaaaagcaaaaaatgaaatattaatgagaattgttagttctcctgggataattattaagaattcttaattcttctgatttgaagaagtaagggaatgaaaaatggtaagatggtaactggctgtggtgcaatgaaggatttacttaagcaaa

SEQ ID NO: 153588 - DNA, 772 bp, Homo Sapiens
cattctgatgttccaaagcaatggctaaatttagccgtagaaaaaaccgccatactccactttttgaaaactctctgactctgtataccaaaacactagaaatggcaatgagcaatgctgcttaggacttcttcatttgtcataattctgcatccatatttcttcttcctgatctttgttttacactatccccatattcagtcttggacttgttcagaaaaatcattcaggatactgccaaaacaacggaccaacagtgattagacaaaatgttacaagggcagcaaagcaaactgacaatcatctctcatttgaaatctttcaatactagagctaggggtgtctcagggtgaaaatctcaaacctattctccaaggaacattcaggcagccacatcacaacacagtctcgggcaccgacggcacctccaccacgcaggagccaactctgctgtcagtgaagtaacaaatccaactaaagacaaaggtagtaaaactgcagctaattggcatgaagcacaaaagagatttggaactcccatacagattctgcacccacctttaaagagtctacaaaagaggagaacatcttaaagtcggctaactttgcagaaagcaacaagtttggagcacactgcctcaacagtttcagtgcacagtgaaaatcagaaatattataaacaagaattgagacattctaaagtaagactagtgaaatgaatgtagaagaacagagaaagcgtattactcctaagactaatgaggtctttaaa

SEQ ID NO: 153589 - DNA, 328 bp, Homo Sapiens
ccaaaatatagatttttaaaaaatatatacatacaatatatagaagctgaaattatgcaaaactaataaacaaaacaccacagtagattaagtgggtgcagcatatagattataaaatgtccccacagcagtttgggggcttgcccctccctttacctgcttcatgattttataatcacacctaagtattatcaagcctgaagtaaaggcactactgataacaggtagtgcaaagagctcagatatttctttgaataagaataaaatactttaaatgagtagatgaaaatgcaaaatggcacattttttcaactcattccagtgtcaa

SEQ ID NO: 153590 - DNA, 578 bp, Homo Sapiens
ttttttcatattaacagcagtttattgcttttcaacttttagaacccaactatagacaaacataaaaaaactcaattatgattacagaacagaatttaacattatgttttgacaatataaaagaccagatgacagaagttgggaggttaatggtgcggaagggggctataggaaagggtattctctcatctaacaaagttctagtttagaaatattgtctgtagttcatggaacaggaaataaaggcattactcaataacccacagaaaaactaaactatactagaagcaggacggagttgaacttgctgtaaatgatctaaatcctcatttctcatagcaggacatcaatgggtaatgtctgaaagtaatgattttttaaatgcccacatattatgtaggtatggagataaaaatcagaataaataactaaaagtggtggcaaaaagtgagagtgggggttgggatgtgtggggcagtagacttttgcttttcacgagtccgtctgtagtgatttgactttactgatttgagttttctaaataaggtacatggattacttctattttaaaatgagaa

SEQ ID NO: 153591 - DNA, 506 bp, Homo Sapiens
tttattgttgattaattaatttattgaacgtttgttgcattataatgctccaagccctgtgcaagagaaatatggtccttgtcttcatgacaattataatttaatggggaagctgtttgtttgccaaacatttattgggtagctactatgtgtcagctactgttatagacactggaatagaatggggagcaaaacagacaaaaattaatcctggcccttgtggagcttatgttttaatgggggacacaaaccatacacaagataaataactaaagtatatggtgagttagacgggaataagtgctaagaaaaacataaagcaagtgcattaatctcccattgctgctataacaaattagcacagatttagtggcttaaatgacaaaaatttattatcttatagttctggaggtcagaagtccaaaaatgggtcaatagggatgtgatccttctggaatctctaggagagaatctgttttcttccattttccagtttgtagaggcag

SEQ ID NO: 153592 - DNA, 627 bp, Homo Sapiens
ttttgctatgatcatctaatatttctttaataataattctagttccataggttttcatgttatgccaatttgtacccgagtttaattacagaaaaggcaacaatttctaaattggtggtatacatttctttacaattttttaatgtaaggccatttattaaaatagacaaactagaagatgaaaacgaaggcaacagaaaaattcaacttttcacaaccaaaagaattagcacaaccttagaaataatttagaaaaaagtgttgttaaaagatatgttgcagatctccgttccattacccaagattatgtcaattcacgattctaaataaatctttttaaagtaagagattaaaaactcatcttcagtgtatatgtaaattctgtgttttatcacacaggtatgtttattcaacactgtcttttgaaaatggaccatttaaaaagacatagcaatttccattctgttaagtttcattcaactttacttagggttgaatacacatgaaatgtgcttttaatgcataaaaatcacaggggatagcaccaaaggactgggcggggggggcattgaggagaatttgataattcacattgggattattctgcacattgatgaaacataattc

SEQ ID NO: 153593 - DNA, 554 bp, Homo Sapiens
ttttgatctaacatccatttattgagaagtttccacttgctgtacacttagattgcagccttagattttatatttggatcaaagttccatcacattgcatcattttcagaatatttgaacttttatttcaatacaaactgaggtaaataaatatcccccccaaatagacgctgatgttccatatctaacaagtaaccaaattgtcatgataatctgggatcactatctagactccatttatgaaagaaaatcttttatagatttcacaatagcctgattttcattttgtaaatgtgtctcattgttgagagtgtctttattcactcccattcaatgatgaagtgactctactgtttgaggcccaatgccacaagttaacttcatagaaatgagtcacgtccaatttggcccctagaagtgcttgccagcaatacagatgggcttattactagcacataaaattactttcattctttacctcctgtattagcttccaagaagggctccattggtttataatatttttgttttcttctaagtatatacgcttactt

SEQ ID NO: 153594 - DNA, 870 bp, Homo Sapiens
  misc_feature (124)..(141): n is a, c, g, or t
  misc_feature (640)..(640): n is a, c, g, or t
  misc_feature (769)..(769): n is a, c, g, or t
  misc_feature (797)..(797): n is a, c, g, or t
  misc_feature (831)..(831): n is a, c, g, or t
  misc_feature (844)..(844): n is a, c, g, or t
tttggctaattatatgagtaaatgaaaggatgggttaacaacgacacaaggggttcattttttggttttaggggaacagaaagcatcaaaagttaattgttggagacttgccttttgtttttcnnnnnnnnnnnnnnnnnncacaaagcagatctatgtgttttaattaatttatttacgtactcatttaattaactggcatccacatacgtgaaacagagtgaatgtacttgatgtacttgccctcacatccatttaccaccaatgcatacatagtacatgaatgaagcatcattgatctttgctgataacagggacacgcctagtggttagactatgtattctccatgaacagtatttaaagaatggtgctccatattgcttgtaaacatatagacatggacatcaggaaatcagtggatatgaaggtcatttgctaatcttggtaccacatagctaaaatggcagttgtattgataaacatctcatgggcatggtagttgacagaaaattcctaatgggtttaactaacagactaaggacatgcactgattacaggactctgtcccagcagactctaggaccaaatggtctaatcgtcttcttcgtcttcctcatcgctgtccttcatgctgatgcncttgcagtcctccaccttcactcactgatgctgtggcttcctaccacagtgagacggttccggatcgtttcataggtcttgctgtttaaggtggagtccaggaccccttgcaatcggaaatctctgtangttttctttaccatcctaaattagtgtntcaactgataaatatgaagctgtaagtccatccngtccgtcaaccangtgcagatcacgttcatggagctgtg

SEQ ID NO: 153595 - DNA, 543 bp, Homo Sapiens
gagttttctcctgaagaagctgttgctagctctgatgtggatgatgaaccgtgatccctagggtcatacaaactaataccactaagaactgaagtggaagttcccagtggaaggccagctgaggaagagagtttaggggcatatggaggcagagccccggaaccagaattgctagttcctgcccctgagggctgtgatgaaccagggtttgatctgggtaagtgaggggcaccctttgatgcatgtgaatccttcataaccacttgatgagactctgtattgggcagtctgtgaagcctaggatcaaaatttttttgtagtctaggatctcctaatttagctcctgaaccgtgtgagtctccaaattgttctaggtagccttctctgtttgttgtgttaattttggctttggctgctaattttggatcaatggacactgtgttttgatgaagatcactttttgtattccataatctatttagcctctggtcagctataagtgggggcagaggtaaattgattgaagacactggatcaggttta

SEQ ID NO: 153596 - DNA, 462 bp, Homo Sapiens
ctattctcttgtttacaaaaaaacaggcaggtcacatcacaccattaatgcttcctttccttattttacatactgtagtcactccttattttaaccttgaggctgattaaaaaaagattttaggagaagggtaaagaactaaacttcaacatgcctttaaaaacaaaacaaataaacctgacaggttcaaggtctctcacatttcctcccttgcaacatctcttggctgttagcaggacacagatacacagggaagggagccgagctggctacagcagttactaagctgccgagagaggggacgggaatccttccattgactactcgataagccaagcccaaaataacatcccaacattgcacatgtggttatctgtactgatgggagttttatttcaaatgtaataatactcttcaatagatggggtaaaataaagattgttttcctccccactcctcaac

SEQ ID NO: 153597 - DNA, 514 bp, Homo Sapiens
  misc_feature (487)..(487): n is a, c, g, or t
tttttcacaaatctagtttttatttagaagataagattcagatagcccatataaaaactgctgttagataaagctttcaaagtacatgaataatgagtttgtaatgcaaataattattttcatttcccagtgcttgtcagatataacaaataaatgtattgggtagcaaatacaaatgtgaataccataacttatactcaaatatgattatgatcccagagcaaggaggttcagtgcataaaccagccaacgattatgctcacaaaatcaacagcaatatgtaatcagatggacccaggtctcaatcatctctgctcatgggaaacaaggtaacacacccataggtaccctccagtcttttataaatcaggtagttccatcctctctcttatccaaagcctttcaccaagagtgtctggaaagacaggatggactaactggaagccctcctggtccccccggagatgttcaagtgaaaatgcaacanagaaaaatggttaaaggaggaggaaga

SEQ ID NO: 153598 - DNA, 472 bp, Homo Sapiens
ggtttaaaatagcaacaacaacaaaaattacaaataaccaaaaaacagcataagaattaaaaacagttatattccaatgtttttaatacttggttcacattttggatgctctccccagggatccgacggcgctgcggaggcggcagcgatgtttgggatcctaaagaaagcatcagaccagactcaggtctggacgtccctcaagtggcccggaggtaccgatattagtgtcaccgccgtcagtgccctgcccagaaataaaacctttgttctgagagaaattgaaaagctggaaaatatggagtaggcgatgtgaagagaaactacagggaatgtagaggtcgggttttaaatgcgtatttcctcaaggatgttgtggaagcagagacaaggtggctggcctggagcaggctggaggacctccaaggatctccacagggaggcagttacatttaacaccctacctagcaaa

SEQ ID NO: 153599 - DNA, 758 bp, Homo Sapiens
  misc_feature (63)..(97): n is a, c, g, or t
gtgccagagctaaaattaaccctcactgaaagggaataagcttgcggccgcatacgcgggccnnnnnnnnnnnnnnnnnnnnnnnnnnnnnnnnnnngcgataaatgcaatttattcttttgtgcaatcttacaaggagagcagaaatcgcagcccttttctctagttctcagtccttttggtgacatctagtggaagatctttgaaaaacacatttgcttctatggtgttcctccaaaggtaagcccatccaattaagtcatttaaaccttggttccacctacaagtccctctgtgtttcagtctctgagttagaaattccaaggccaaatggactctctttggctgctggtaagcacgtgccatccgggaccctatatcacagtagtcagaaactctgcatttgaatctggttgtcacttttcagcagtgtgatcacctccagctaaaaaatgcatctaataataggacctgccctatagggttattgcaaggaccaaacgaaatgatacccatgaaggactcagcacagtacctgacatacagtaaatatcagtctgaccagctaacagtggccacaattttccattaccctccatccacactgcagatcctacctgcacaaacaatgctcttgggtggagggccgcatagtatggtttgactacgcagtttgctggtattaactatgaggtggtatcattttaagatcagcttcttaaaaagataatgcagtcccccactcctccaccgttctc

SEQ ID NO: 153600 - DNA, 536 bp, Homo Sapiens
gtgccagctgtgatgcatactcagtaaacatcaacagccattaactgttgtttgtatttgaccagatccttttatcttcaagagacttaaagacttatctttccaagattcttaggcaaagcctctccctagagatcctatggaccaagtccatgtcatttatcaaaagtaccttgagtttctcccctcccagaaacattttatggctcccagatactttaggattaaagtccaaattcctcagccaggtatttgccctccctgggggatctggctctatctcactgtgccctacagttcacctcccttcgaatctctcactcaccctgaaccccagctactcccgtccactgtgagagacaggcacaagcgagtacttgggaattttccttgctgggaaagaaccaatcagggaggcatggactgcccaatagaagaaattaagaagcaaatgctggtggaggaactaagggaaaggaagatgggagaagagtttaggaaagactaaaccccaagcagcacagccaggtgccctg

SEQ ID NO: 153601 - DNA, 250 bp, Homo Sapiens
cttcctctaaattaagtggccctagactaatatatttgttcagttattctgttttcttccttactgccatttcacatctccatcagtgagttcctcaggatttgcctttatgttacaactatgaaagtcttcaatccaattccctgcttccacacaaaggacaaagaaagcctaatctttccttttccttttttctgggctccaataggaagcagcatttacaacgtgtctggcttggtgggcggccgca

SEQ ID NO: 153602 - DNA, 626 bp, Homo Sapiens
  misc_feature (521)..(563): n is a, c, g, or t
ttttttttcgtgttccagtaaaactttatttacagaaacaagtggaatatattttgccaacccttggctttgaacagcaaacatttattacttcacagtttctgtagtcaggaatccaggtgcagcttatctgtgtgcctttggctcagcttctcctcaggttcagtcacatggtcagccagggctacagtcacctgaagacacaggactagagaattcacttcaagctaacccacatggttgctggcaagttgcaattcattgccatgtgggcctgtccgtgtgctatctgagtattctcgtggcatcacagctgtggatgttagagagagagtaagagagggacaagacagaagccatagtcttttttataacctaatctcagaagtggcatcctattgctaaattagaggcaaacaataagtttagcccgtactcaaagagagtaggcgctacaaggacatgagagtcaggagctcaggatcatactgggaacaggctacctcagtcactcatcttgnnnnnnnnnnnnnnnnnnnnnnnnnnnnnnnnnnnnnnnnnnnctgagaatacagtggtgaccagacaggctgtccctgccagcctggcactgccagtctaagttg

SEQ ID NO: 153603 - DNA, 306 bp, Homo Sapiens
cattgttaccttggaaatttcttagtgactttgaccaaagtcaggtgtgctctgaggcatgcataactacatggcttggatcttaccttcttacttactatagggatctttttcaaaggtattgagctgtttctgcaattgttttcttacatgaatttccattgcaattccttttcctttttctctgtccagatccgtaggcttccttgttcttcaagggccggaatttgatgcacatagtttaatgtacatgccactagagtgatgactgtgatttgattttgtgaagattctagacattaaata

SEQ ID NO: 153604 - DNA, 510 bp, Homo Sapiens
  misc_feature (382)..(402): n is a, c, g, or t
tttgacaaaaatatttatttttccagtggagcctccctacctccagatgaactagttggaaatggaattgttatggtactgaatctacaaatggattgcactatgttccatgcaaagttgactttcctcccttccctttgccacatccttcagagtgcggcagtaaattcagaaagtatcatcatcagttgtgcagttgaatgcaaaggctgggaatgattgatctctcccattaaataaatgtttaaagaatgatatcaaaattttgagaaaagaactgcagtgtatttaaaacccaggaataatatgtctgcttaattaagattggagatccagtgaggatcttaaaataaactatactttggattgattcagataatcnnnnnnnnnnnnnnnnnnnnnctttaaaagtggtatgtcaacatcacttcatttctacatttcagcgttctgtacatttcttaaaaggaaataagcaatgctcaatgtacaaagtaaaaacagaaaact

SEQ ID NO: 153605 - DNA, 317 bp, Homo Sapiens
atattcagggattatgagcatcccatattttcaacatcatcctgtgaagaaactagctggattaaggctatcacaaaacaataaactggcattgctgtatgtcagtttttgccaacttgacctgtggattcaatgcaatcccaatcaaaacccagcaaagtattttgtggatcctgacaaactggttctaaagtttacatggaaaggcaaaagacccagaatagctggcacaatattgaaagagaaaaaggtcagaagactgatattacccaactttaagactcactataaagctacagtaattaagatagggtggt

SEQ ID NO: 153606 - DNA, 1007 bp, Homo Sapiens
  misc_feature (563)..(914): n is a, c, g, or t
tttgagcaaagtaccggcgggacgtgggcgtcgagggtaaggatatctgcagaagtactgtcttgagcaaggagcacggcagacagagcctctgagacacgagagcctggagtgtaagaaacacagtagaggccactaagtcgagaacgcaggagctggaaggactggtaggaaatgggaggtggggacatggagggatgcagacaggtcctgcacagtcagaactgtggccccttctctgcaggaaatgggcagccttcggaagactgagcacacggaaggatatgactaaccctttaaaagggtcattctgactcctgggtgaagaacagactaggaagggctgaggaggaggcaggaggccatctactgttatatgggatgtggagtgtgacccggaaaggtcaagtgtgactctaagggctttttgtgtactgatcttttatcctgcaaccttgctaaacccatttattagttcttcttgtcttttagtggcatttattagttgttctagtgttttagtggattccttgggattttatacaaaagcgtgtcatttgtgnnnnnnnnnnnnnnnnnnnnnnnnnnnnnnnnnnnnnnnnnnnnnnnnnnnnnnnnnnnnnnnnnnnnnnnnnnnnnnnnnnnnnnnnnnnnnnnnnnnnnnnnnnnnnnnnnnnnnnnnnnnnnnnnnnnnnnnnnnnnnnnnnnnnnnnnnnnnnnnnnnnnnnnnnnnnnnnnnnnnnnnnnnnnnnnnnnnnnnnnnnnnnnnnnnnnnnnnnnnnnnnnnnnnnnnnnnnnnnnnnnnnnnnnnnnnnnnnnnnnnnnnnnnnnnnnnnnnnnnnnnnnnnnnnnnnnnnnnnnnnnnnnnnnnnnnnnnnnnnnnnnnnnnnnnnnnnnnnnnnnnnnnnnnnnnnttctagtaatgtggtgtgttacattaattgactttcagatattgaaaagacacttatcccctgcgttcagataaattccagttggtcatgaaa

SEQ ID NO: 153607 - DNA, 468 bp, Homo Sapiens
ttttttttggttttatcatgttgcccaggctgagggtagatcttggaagtaggaagactacaccctctgtatagtggaggaaggggaggagtgacaggaagtgagcccagagggataggaaggggctagaataggaatggccttttgtgctaggataaggagcttcatattatcctgaaagctatcagggaacaaggaaagattttgagtaggaaacttatatgattagatttgcatttttagaaaggtgaatctggcagcaaccttccgaagggattaaatgtgggaacagtgctgttgacaactagacaatctatgaaactgttgtaattagtaggtgagaagtgatggttctgaatgaaggcagggacagttgcaaaggaaaaagggggaaaatcaccttctaaagtggaagtagaatctgccttagctcagtgacaggtggggtgtaagtgatgatggaaaaaa

SEQ ID NO: 153608 - DNA, 508 bp, Homo Sapiens
tttttggctcctgtcctggcctgccctcatgcctcaggcatcacaaggccatcgggatggagcaagtgtgctgtgatttagaaacactctcagcccccctcggccttctgcattctcagaggcagctgctggccacctggggcgggttgctgggtaggagtcggagagctggcaccagcttcgattctttggtgggaccttgagggtgaggcctttaacctttccggcccttggtttctcctgagaggttggagaggttttgaactcgtgagaagatgaggcttcggtaatatgactcctcttttaccttaaggaaaacctacatctgggtaaactctgcaaagtttttgtcatatgattgttctatggtgaatactaaattctgtgtttgattcaaacgggtgagttgcctggcaggaaatgaaaccttcagcttgggaacatgtctttagactgagctcttgcttatcataacagccccctgaggccccctcctccccgcccagct

SEQ ID NO: 153609 - DNA, 507 bp, Homo Sapiens
  misc_feature (488)..(488): n is a, c, g, or t
tgcggccgccaacttttgaaatcaaagtgtctgtcctgagagatcccctttcaacacattgttcaggtgaggcttgagctgtcaattctctatggctttcagtcttgtggctgcgggacttggaaatatatagaatctgcccatgtggctggcaggctgtttccccattgggatgcttaagccatctcttataggggattggaccctgtacttgtggatgaacattggagagcaagaggaactcacgttatgaactagggggatctcatctaacttgtccttaacttgccatgttgacttcaaacctgttaagagaacaaagactttgaagtatccagccccagggtgcagagaggttgattgccagggagcactgcaggaatcattgcatgcttaaagcgagttatgtcagcaccctgtaggattttgttccttattaagtgtgtgccatgtggttgggtgctgtctggggcatctgtttttcattntgcctgtggtttgtgttgc

SEQ ID NO: 153610 - DNA, 559 bp, Homo Sapiens
tttttgaattcaaattaatttttaattgagcccacctactatgggcccctcaaaaaggctgacagtaccactaactgttttaagtttaaatgaaggaaaatcaaaacataacagcatttaatatttatttctaaaacatcattctgaatcaaccatttaaataaagttttgttttccactcacgttttcacattattcagcatgttaattgggtacccactattactagccaccttaccagcacagcagatgacagatgaacaaggagcaccattctcataggagttttatcacatgtgtttctaggctgaaaaggcccttctttgtacttcttgataggtggagtacaggaatgtagaagtcagaaacctaggttcaaactccagttctaagatacatagtttctgtgtgatttaggaaaaataatctctctgaacctcagtcccccatctggaaaattagtatgatacttacctcataaggctgtggggattaattaaaattatgtatgtagagcactttgcagagtatagagagtgctaaataaatggatgctggg

SEQ ID NO: 153611 - DNA, 181 bp, Homo Sapiens
ggtaaaatattacttcaaacccctttttcttgctttatttttcagtgttttattgctttatgaactgtttaaccctgaaatccctctaggttatctatactgtataaaaaagcaattacccttaaaactgtactctggcctacttttctattttgcaattaaatatctttttcacataaaa

SEQ ID NO: 153612 - DNA, 568 bp, Homo Sapiens
  misc_feature (532)..(532): n is a, c, g, or t
tagtatttgcatatatttcttttaaagtaacaaaagccctagtttaaaagattataaaagtagttctaaaagatttaaaaatccttatttttataagctttatttaatattgcttaatcatcttctcaaagatttttgagagtaaatccaaatttgaaaagtgcagactcatttttatttttcttagatggtttctaagattaagtggggaaaacagaatatgtggggatggaggaaaacattagtttatggccttaccaatttattaatgtaatatttaaaaatataccgatttcattctttacctttttgaattggtctatagattagttgacatgcatacattttgaaatgtttctttgctttggaaatttctatacctcgaatggtacaatgaatgtcaacagtttcttccactcttcctacccataatctactttttcttaagtaatatagattctaggagtcatatcagctatttaaattacagtaactcaatctcaggattatttaagtaactcaggcttaaatntattttgaataatcttgttcattcatatggttcttt

SEQ ID NO: 153613 - DNA, 102 bp, Homo Sapiens
tttaattagagagacaacaagaagaataagggaaaatgggaagaatagagtgaaattaaagcaaatcttggattcagattccattaaacaggaagtttcctt

SEQ ID NO: 153614 - DNA, 767 bp, Homo Sapiens
tttttttggcttaaacaacagacatttatttcgtacagttctagaatctgggaaattccaagatgaaggtgctggcacctttgcttcattgtgagggtcccccatcctggctcacaggctgccgcctccttactgtgtcctctcatgggctcaccccacgatctcaactaaacctgtttatctccccacaactccacctccaaataccatcacattgggggttaaggcatcaacatatgaatttgggggggatgctaatgttcagcccattatcaactcccttctctcgcccccatatcaattgcttgctgatttgtctgtcagtgaattaaaataaaaggcttcttgtctaccactgacttctgaaagtgtgaatgtttaatgtaatgggagcatatgttaggattttatttaactcataagtgaggttactggcaggatgacaaagctggttcagtgcaggtatgagaaggtgggatgtatgtggatagtgccaaaataacaccattgtaagttaccctgtaactttacagaatcagcaaacttaactgtcattatccgagtgatcagaaaaattaaaaattatacagatgatgtaggaaaggtcatataatcatatatctgacaagttttggagtatttttcctgaataataagcacattgactgtcatagtaccagcagtactttctatcagtttgctatttctcttttcactttagtttttcctttcttaatatgaatattcattttaatgtattaaaaaag

SEQ ID NO: 153615 - DNA, 599 bp, Homo Sapiens
caaaatctttttctcaagtctatttttatttatttatttttcttctccctccccacaaggtctatttttgtatcaacaggtatgggaagaaaagcttttaatgtgctcttataaaaacgacagtttggtttatttttcaatccttaagcgacgtactgtattaatgatgctgtttccttgattcacaggctggttcttcagaggaatcatccctgactgtgtcatcactctgagctctgactgcgctcccctcccccaccagtgggaccagtactcaagagagctctggagtgctcctgaagagaaattccatggggactgtacctgaccctctgagatcagctaaaacttccctgattgcagcttccggaaaagaagacgatctaggagagccacaggctgcctcacctcggcatcgaccagctctcctgtgtaagaatgccaatggcttttcaggtgcccctgcagaaccagacctcagccccagggcagctgccgaagccctgatgcaggtttgtgagcatgagaccacccaaccagatatgtcttctcctggtgtgttcaatgaagtgcagaaagcacctgccacattcaactct

SEQ ID NO: 153616 - DNA, 702 bp, Homo Sapiens
aaacgtatttatttctccgagctttcaaaggcatcatcagaagggaatcactaaaaatgtaggggaaaagaaacactcggctggagctttggtttccaagcagatccttctggaaagacgcttagggagagtctagggagcagctctgacgtcagtagctgccatcggaagtcaggtcatgttctacaaaaagcagtgacgcacgcccgacagcacccgcggggccggacagcggcttcaccagccccgcgggtccgaatcgcacgcggccgggtccgctctcccgggaggagagcccggcgtggaccagcgtgacgaccccagcgtgctgcggcctctccccgagggcccctccacaagggtccctgcgcgggccgggctcggccgttgccactcgggacagccatcccctcgagttcgcgctcgccgtccccgccttcacctcccgggttgggaggcgggcgactgcgcgcgaggtaaaggaacttgcgttccccggcgccgaggcggcagcagcgcagtgcacagcggcttctgaaggcggcgtcgacggggagctgcgcgtggctcccggtttcctggttacgtgcgcgccggcagagccaaaacctgcagccgaaactcccgcttctccgtaaggattaaagggcgggcgcactaccgggagacgtgtcaaactcagcgcgcctcatggcggccgca

SEQ ID NO: 153617 - DNA, 510 bp, Homo Sapiens
  misc_feature (51)..(51): n is a, c, g, or t
cggcctgtactcctcagcttgtgctgcccttctcgaatgactcgcgtttcntgctttcatcactacacctcccaccgctctccatcacctgctctgctcttataaggatccagttttcagaaaaatggaatagtcgtatcactgatctacgtaaacaagttgaagaattgtctgaaagaaaatacagtgtgtctaaactggaaaagtcctgtaatagtttgttcatgagcatttacacaatggagttgctgtttcatcatgggggtactgtggacaaacccagggctgctggtgagtcatgccatccttacacgtctttccttgtaaggtactttgtagtgtctgtctaaatattagaaagtttctttgtttctagattacttgaaagctaaggaaaagttgtagttctctaattatcaattagcatttcttttatactttcagtgtggatatttgggatttctttatatatttattgcaaagccctagatcttagggatttgactgaaa

SEQ ID NO: 153618 - DNA, 509 bp, Homo Sapiens
ataactgatatgtttcaaatacatgataagttatccaaattgtagaataatctcattttctaaatctacaaagtaaagaaaatactaactttactttttcgtttaaaattatgaaaaacattgaacatagactaccatttagactacgatagtctttagactatcacttcacactatcattcagaggaggtccagacttcatttgaaagggggttgacttactaaataagcagacagagagtcaggtaaaatacttacctccattattggcacatagtcaatgttttacttcccatgccctgaatccttaagaaactaggaacctagaaacaaaaacaacttttcataaccacatcaaatattgctaatttattccttttgttagattcactaatttttaacattaaaaatgacttgtacactttacaaattaaaacattagatcacaaatgaaaatatgctccagacatctataggcatctgcttttctttatactctactagataca

SEQ ID NO: 153619 - DNA, 523 bp, Homo Sapiens
tttataaatgttttcatttttattgtttcatttgatgctcttaacgctcctgtaaggcatgcagggccaagattatgatcccctgtggacaggtgaggaaaggaaactgaggcacacagaggttgtatcacttgcccaaggttacacagctgataaatggcagagccagcataacccaggttttctgctctctccccactgggccacactgtcttgaaaagctgtaactaccaagatatgcccactctgctgtcaggagttctctcggcctcaggaacaggaaccagcattgacgaggggagtgaccgcagcctctacccaccctgcagctggggagctttgctctccaaataaacagcagcctggaagtaattcatcaaagcaaacaaaacttccacagctcaatttttattccgaaaggaagaatattcattctggcttttcagtgaccacggggccacaaaggaagccaaagacaggttgacacggggtccctctgccaccaggtcccaaagggccagca

SEQ ID NO: 153620 - DNA, 585 bp, Homo Sapiens
tttattttgaaacgactatagattcacaggaattgacaaagataggatagagggccccatgtatccttcaccaagggtaacatctgacatactacagggcaatatccaaaccaggaagctggcatcagtgccatccacaatccttattcaggttctaggcaatttcaaaacctggtgggtttgtgtagcccctgccactaccatcaagaaacaaaactgtctctccacataagacctcccttgtgctgtcccaaatccctggcaacttaatctgttatccatctctttatcctgtcattttcagaatgtaacataaatagaatcatgtaatatgtgaccttttgggattggcttttttactcagtataattcccttgagatccattcaggtggttccaagcgtcagccactcaccaagcgccagccactcattcctctttattgccgagttgtgcttcatggcatggatgcaccagcctgttaaacattcgtccatttaaagacatactgggttgcttccaacctgtgctactacaaatacagctgctatgaatattcatgcacaggtttttgaatgaacctagt

SEQ ID NO: 153621 - DNA, 540 bp, Homo Sapiens
tttctatcttgaagaacagatttcattttttacacttctataaaacaaatggaaccatgacttatgttccacaatttccatagctgatttcatgaactttaacaagttttccttatttatagcagtcccaagctttattcccttagagatgtcaggacgtggagggtaattttgctgcctgccctctatgctttaaagaccaagtgaattgaaagaacagtaaatccctgccccaacacaataagtgaggtccagaagaattttacgtggggtctaaaattcaatcaactattcgtggtcgcgttattttgaagctaatgaaatggatgccaggaacctgcacagcttgccagttggtagcgccaacggaagcccatgccaaacttggctgagtttgccgccatctagtggccactcccagcgtcagtttacacctcgcaatgaacaggaagcaggcctgtggctggccaggaccagccttcagcaggccattctaggattttcccggttagctgtcgctcttggattggtccagaccag

SEQ ID NO: 153622 - DNA, 902 bp, Homo Sapiens
cacgaggttaataaatgtttattattaagaggtgtttacacaaatatgagacatttcaacataaaatataatcattaattctccatccatataaccatgatgaaactcaagtccattaatgttaagattcattttcacggtaacaatatggaacatgtcatcatcatataaaacatcctagagacctgcccaaagtgaaatttacaaagtagttattactgttactgtaaagatgaggtatagcatttgcctgttacatttattctaaactaaaaatatatacaacctcaagactttcactagcataatttcttttatgagtgagaaagtaggagtgcagaccagatttaaaagtttgaccagaaagaaatcacgaggtttttggttcttctgtcttttctttcattgccaagtccccgtatttgtccatcaacatatagcagaagagtcactagttattaaccattgtcaaaccaatgaaacaagttctttaagaaaaaaaatgggttttatactttcaacgggtgtaataatttacaaataatcatccaccaacaccacttataaataaactgaattgtttcatgtttgatatgcatgcatttgaccctagatatttattaggagttttctgtctttaagataataataaatgtataagaagagcatattttagctggtaagttcaggaatcatcaggtcttttatttctcagatttttataagcaaatacatttttaaagtgtaattttagaaagaaatgagacatacataaaattaatgtattaaaatagatttctgcactggaagctccctctgtttgctgtactgtttcccatacttttcacagttttttttcccctaacttctatgttaaatgccaccatttcagaaaaaaagaa

SEQ ID NO: 153623 - DNA, 521 bp, Homo Sapiens
ttttttcagagtgaacatgatcgttttattggttaccaaagatccttggcaaagtgcacgcatggtgaagaacaaaagtaagtcctcaacagtttcccaacttcaatgaaaacttaatgggcctagatttacagattacacataaaaaaagtttgtgcatgatgtatctgctgtgtgtgtattcatatgtgggaaataaagcaagccacagagaaaatgggtggggggcacaactgcaaaaagttatctctcctaggagatttattattgggaaatgcagaaacagagaattcagcactcttctttctggtgacaatacaatgctagaaaaaaaactaatttttttaaataatttaccatagaatctcttgtcttagactagaaggaatacaatccctgttacatgtgtatatatgtccaggtgtaacacacatttttctcttctgaaattcttgtctcaaatctctttcaatcaaaatgagttgagcttcaaacaggatcaaaggagagtcagaaccttt

SEQ ID NO: 153624 - DNA, 525 bp, Homo Sapiens
tttggatttaacaaagctgatttctttcctgcaggaattccgaaagcctttgacatatattatatacaatgcgtctccaaaaaaagaaatacaaacagcggttcctaaacatatttggccatggggcccttttgaaattgagtaacctaccaataccttgctgtacagagtttgtgaaatgccaaactagaagtgactaccattgcacttcggatcctatgtcattgatctgttgattctctctggttcccaacagatccataaaaaagaaacggcattcctggtgggaggccagagagatcaaacagtggtggaacagaatgggtacaggagccctaacctgaccctttccttgggaagtccagggcctctttctcctttgtaaactagtctttattcctacaataacctgtgatctgcccttggctgtccaaataagaataatgctctgagtatgagtggcattacaagggctcccctgtttctgtcgtgttctgaaagaccccacttgtcatacagggtctg

SEQ ID NO: 153625 - DNA, 453 bp, Homo Sapiens
  misc_feature (295)..(295): n is a, c, g, or t
tttgtttttgtaaataaagttttattggcacacaggaacattttttacatgttgtcaatgtctactgtgggggctgtaaccgccatgctgagagggttacaacagagatcccatgaggtgggaacatgtaccatctggctttttacagaaaaatatctactctaaggtgacctcctggggggcaggaggccagcaggggcttgggtggaggggaagtttcccgggaggcgcctctccgtggctgatgaagggcctgtgccgcctgcctaccctttgcgtgtatgagatgcagggnatggggccggctgcgcctcccccctcccctccccttcagggcggcaggaaagcagctgttggtgtggagacaaggccccaaggctctgcccaacccacctggctccccgtgcatggggacacctgcacgacactcctgcttccctgccgggcctggtg

SEQ ID NO: 153626 - DNA, 517 bp, Homo Sapiens
  misc_feature (215)..(224): n is a, c, g, or t
tttttagcttctcctttcttagagatctgataaatgaggtcaagggcattcatatattacaccacctttcttcttaacagaatgtaagatcttgtctttaaaagtttaaaacttgacaaataaatgtctggggtcattctttaaggataattgctgagaaatgctctatgccctctcttgttaaccaggctgaaggcatcgttttctttgaaaannnnnnnnnnctgatcatgatttgtacagttctgacattttatcttttctttcttatccttcttatttctaaattagatactctttttctttttgtagacttgtgattctagacctataatacacctatttatataactggaatttctatattagtttagaattcctgactttgtgttctgcagtatcaattctgctcttccaaatgctcagtgatgtttagtttagtatttataagctggatacaagtttacatatctttatacattcttttgggggcatagttatttattattttaatctc

SEQ ID NO: 153627 - DNA, 484 bp, Homo Sapiens
  misc_feature (44)..(102): n is a, c, g, or t
tttttgtgggggggtggtttgtttgtttgaaacagagtcttacnnnnnnnnnnnnnnnnnnnnnnnnnnnnnnnnnnnnnnnnnnnnnnnnnnnnnnnnnnngtaagtaagtaagtctcccttaggtagaagtagtgatggccttggtagccccctaattgccatcttcactagagtgccagcctattttgtatcttctctagtagtgttttgttattcttttcctaacaccctgcatgcaactaattgacacttagatttgattttgtttttgcacttgccttaagacatttttccgaagtacctttatataggtgaattctagtgtgttttccacatttatgaggcaaagtactgagctatcaggaagcagcatgtgtttggtggttataaggggagaaagacagtgcctgatattggcctcaccacctgagcatggggcctcaggatctgtctgtctggctctgcattccttgcagaggag

SEQ ID NO: 153628 - DNA, 379 bp, Homo Sapiens
cttttttcctctcgctctctcggttatcataaccttgtattccctctggaaggaaatggaaattcctttggatcatcttctaggtaaacagtttaattagctgcgtgaggtgacaaacctgctcggatgaagtcatgggagctgaacgaattggcctgaatcccaagaggggagtgttcagggcgcgcgtgtccctcggagaggctgaggtaacgctggctccttcccgggagtccctgaacgcccggctttggaatctgcagacagctcttctagcagggcgttggcacctactgactaaccgtgcaatcactcagcagctgtgatggttggtgacatgtctttcacagcccaagatagcctccctagactgagcaaa

SEQ ID NO: 153629 - DNA, 194 bp, Homo Sapiens
catcttttttatagggcactgcagcttgaggtgaactttttacagggatatctgccttttcctgaacctttggctgtggctttggaggaactggaggattattttgggcatggtaagcaacagattcagctggggcatccctcagattgtatgtagttaccaggagatggatgttagtgtgactaccctgctgc

SEQ ID NO: 153630 - DNA, 470 bp, Homo Sapiens
tttgctaattgctattttattaaacttgaaattttaggttgggaagcaaagggaaaccactgggcatcccctttgtttctagggagaaaagactaacttgtcccatctgctcacttgcttatggagctaaaagacccccagtcctagaagtgttctgttcctgaggagtggttaaagaggtgaaaagaagaggtgaattaaaagatgaaagagctttttaaatagccagcaactctctctaccatctgttttggtaagagctagcacctcttgttctctttagaccctggagggaataaaccaaaatcagtggttccaggatccttcagagccaaaagaccccaataccacagtcttgacctttgccctgcctgcttctgaaactggagaatggcatctcccagcagcctaaggcagacataggtcatacctatccctgggcagcgagctgagctcccacagactgagtt

SEQ ID NO: 153631 - DNA, 537 bp, Homo Sapiens
acacctgtaagaccatgatatcatctgatacataacctttacatcataagctttacataacttttacatacataacatcacacatagcattcaggatacacacatcagatcacctttacatgctctaacatgtaaggattaggaaagtcatcaagctcattcttatgtcaaaaaacatctgcacaatttgaacatcaacaatttttgaaatctatcaaggaattgaaattgcaagggaaattacccattccaaatactgaagatacagacatgtccaggatcagaggtgacactggctgaactggaaaagaacttgaagaaagcacgagttggtgagagcacacacatggtaaatgctatgaaagcctaaacggcagatgtggactagggtgagattcctggggacctacactccgtagtcttctgaactttccttcaaaatcttccagattctcaggtatacaatccaaataatttttttatgggtctgaattggggaggattaattaccgagaaatgtaccaagagccttctaaa

SEQ ID NO: 153632 - DNA, 495 bp, Homo Sapiens
aaaaaaatcaatttgtgaatagagttcaaacaaaaatgccttttttaatttcagcagatgctcgaggatttcttaccttgaagtcaaggttgccaatagcaacaaacttccgcaataaatatggcaaaatgcaacgcacatctttattctaatgccttgtacttttatacagtctttcatccatagattttcttatttgacagttaatatttaatatttaaaatacccgtaaaaggcacacatgtcttatcaccccctctttttgccattgagagatcctagaactcagaggttccaacacctcaagatacttgggcatagagctaaacttggaatctagaatcctgaactcattgggactcatctgtgaagaataatgaaacaagatttgtaaaaactggctgggtagtgtactaagcatttactctatatcaggaatacagttaagtgccttgtttacatttgttcatttagttgattaattttacaaaaaaa

SEQ ID NO: 153633 - DNA, 493 bp, Homo Sapiens
tagctgtgttattttgtaacaagtgttggcttctgttggaaccacctatatgtcttgagaaacaaaaccacaggaggaaaggaagaaaaaccgatcaataccgtctgtgcctgatttcctaatggattttgttcgttttttcaggggaacggttgttacttagttacaatcagactttttcaagtcacacaatacactctttatgagctggagtttcatgttacaagttggaaatgctgtgtgttgtcattcatgaaaaatactgcacttgtagccagattagcaaatcacagcaaattttgtgtcatagtgacattcataactcatatcagttagtaagctattatatcttctgttctaacaatgaatggaggtaattgatttagtctgattccttcctgaaatctaaatattagcacaatagtttctgaaattttacaatgttaaattatgatctaattcatgagaaaccacggatttcccatagggattc

SEQ ID NO: 153634 - DNA, 670 bp, Homo Sapiens
ttttttaaactaggctttattgctattgcttttttcctttgaactttattttgaaatacagagttgaaagaatagtattatgaacacttaaacttttgacctagattcactaattgttactattttgctgttatatatttgctttctcttttttctgtgttgaaaagaagttgcagatatcctgaatgatactttaccgctaagtacttaggagatacatgccaaagaaagtgggatattcgcctatagaaccacagtgatcacattagagaaattccactgccacaataatatctaatatggtgcatatttatatctccacatttgtctcagcgtccttcattttcaactcagggcagaatcctgttactccctgcatttagttgtcaagtctctttagtctcctttgatctataaccgttcctttgcccatatccccttttttttcccttccatggccagttgttttatagaatatcctacagtttggacttgtttgatttctcatgaatggattcaggttacatttaaacattttggtaagaataagacataggtgacattttgattaccttttaagagtaaaacaattcacatgtcaaactatttggatactgtctcagtccatttgtgtgggtataaaagattacccgacgccgagtcatttatc

SEQ ID NO: 153635 - DNA, 526 bp, Homo Sapiens
tttgaattttgtatgttttatttaattttaattaaacgtaaaaaggcaggacattccaaggctctctaacacgagtgtctgcagccccattcgctttgagatgtgaatgtgttaacccagggtggacaatggtgttgacttcattactagataaaaatccatgttattttgtttctcgcattgaaaggctgcttggctaaggttctgtgaagatccgatgacatttccaacactttgccttgtctgctttgctctgacaaagtgcttatgactactagatcttgctcggttatgtgagattacaattcaccggtttccatcctgtatgaaacagaagttaaacagttgtaaaagcaaaattccaggtctggtggttttcctgccaggtcatgatgaaaccatcctacttctgttgaacctcgtcccaggcaggatcggggcctgcggcctacagcctgtcttcccagcgctccagggctcgtgaccctcctcctcccctcacttcattctgcgctccaagggcact

SEQ ID NO: 153636 - DNA, 364 bp, Homo Sapiens
tttggatgtagatgtccagtgtccttgcactatttatcttccctccattgcattgcctgtgctcctttgtcaaagttgatctttgactatattcatgtggatctatttctggactctctatcctgctccactgatgtgttattccaatctttcaccactgccgtactgtctaaaactaaagcctgtagttagtcttgaagtcaggtagtgtagtgctctgacttccatcctcacttccatattgtgttgattatttctaaatctttggcctctcgatataaactttaaaatgagtgtgtcaatatccatgaaataacttgcttggattttggttgggattgcattgaatttatggatcaatttg

SEQ ID NO: 153637 - DNA, 556 bp, Homo Sapiens
  misc_feature (13)..(13): n is a, c, g, or t
  misc_feature (67)..(80): n is a, c, g, or t
  misc_feature (274)..(274): n is a, c, g, or t
cttcacccaatanattcaagtttttattcttgtttataaccggcatttccaggtccggccaggtccnnnnnnnnnnnnnnggaattgagggtttgcatcgtttttcaatataactggaagctgttttatcactttgtattttgagaaccgctccctttcccgcacacgcattgctgcctcctctcgggcttggttaatgagtctgtgcgccaagccaggtcgctccgggcagttcgcgcttccgcgcctcggcactcggatgaccgtgtcctanttcgtctctctcgtgaatgtcgctggctggtggcgcggggaaaccatggcagcattgcggctccggcgggcgggctctgcgcggggccccaccgagctttccgggagcctctcccgcagccgatgggcatctaggggcgcagaacgaagagtgggcgccgaaactggtgtaggcgctggaggccgacggggaggcctggggcggtcaggcttctcggtagagagggccgtgcacctcgcggcctgcgggctaaggcggggagccgctcctgcggcggccgca

SEQ ID NO: 153638 - DNA, 547 bp, Homo Sapiens
  misc_feature (35)..(35): n is a, c, g, or t
  misc_feature (111)..(111): n is a, c, g, or t
  misc_feature (395)..(501): n is a, c, g, or t
caagctggtgccagagtctaggagccccattgctntggcccatcctccctttcctatccctgccccagtttccttcccacccagttgatgctgcaggggccctcaactccnacagataagcctaaactttgccccaagacattgaacttcttccccttcctagactggtcttgtgaaatattcagaaacaggaaattggctttattgatgactttccttcccttcccaattcagttcaggaaacaataaactgaaccaagaataaataaaataaatagggaagagaagacaataataatcagaactatttcttgactgtgaaaagactgtaatgaaataaggaaataagatcccttaagaattctattggccaggcacagtggctgctcacaccnnnnnnnnnnnnnnnnnnnnnnnnnnnnnnnnnnnnnnnnnnnnnnnnnnnnnnnnnnnnnnnnnnnnnnnnnnnnnnnnnnnnnnnnnnnnnnnnnnnnnnnnnnnttagcctcagttattcaggaggctgaggtgggagggtcacctgggc

SEQ ID NO: 153639 - DNA, 413 bp, Homo Sapiens
tctttaaatgtacctgtgtagttttatgaggtacttctaaacaatgtaatgttaatacatattcttttatttgcttcaaactaggatgaaatacagggagaacatggttccttttaggattctgataattagggttttattttctaaactagagtttctagttggagtggaagtcctgagttccctttgcctctctgtggccttgccgttttgccgaaaacctcccatctccctagtcacccttggtctctaaaagggctcttttgaggagaactcttattctctagtcagcgggtctagcttatcctttgtactcgaaggacttcgtttatttttcctctggttgacttcatgtgttgaaaattttggcctatcaaactacgtgtattaaacaatagtttttcccattcaaa

SEQ ID NO: 153640 - DNA, 861 bp, Homo Sapiens
  misc_feature (499)..(521): n is a, c, g, or t
tttaattttttgttttactggccagcatcaggaagttgtgttcatttcatttctctgtggggcagctgcccccctcctttgctctctctcactctttccctttctctgagtctctgcttggaagggaaaactgttaagctttgtacgttccctttcacgaaaaagaaccaccgtgagcaacgtccgcgacaggcagccctggctccgcagatgagccacggccccgcttccaccttccggaggagtgctttgcttggaaggggtctccctggggccttgggtctgctttttcctgcatttcttctgaaatgctgtttcagtagaaataagcccacttgagacttttccctttcaaggccttagccacaaacgccttccgactaaccagcttggtgccgtagctcaggcagaaaattctaaagcatccgttcaagcatctgaaacaaacgaatcagccagtgaaatctcatctgttagcatctgttctcctcttagattnnnnnnnnnnnnnnnnnnnnnnngaggcttttgatggcttcaggtagaatcatgctttaaaaaaataacaaaacaaaactccactactttttagactaaggtgaccaggcaacaggtgtttgatcttctacagattaaatctctgtggaggatcccattttcttctgtctttatgcattgagcctccctaagaagaccacgcggggcacatcaggggctgagagtcctttgcttcttatataccacccacatctcccctcaaccacctgcatcgccaactggcggctcgggcacaggctttacaattattcaacctaacaacctaattctttatagctagaaataatggtctcctccttaaac

SEQ ID NO: 153641 - DNA, 362 bp, Homo Sapiens
gcaaagtcatgtacaagcagaaataaacatttagaatacagaatttgtggaataaaccaaagtagacaaaaatcaaagaatttatccctggggcattcaatgacttgatacaaggtcaccttctacttagttaactgtccttgaggagtaaggagagcgcaggggcaggagagatgtctgatcctgtctccagcaactgatagacccaggttagaagttagatgaagctgcctgccagttatcttggtagaaacttctttctgcatgtactcagataagacatcagtaccctgggtggttctctgcaaaattcaaggtctgcagagtcaccaactgaagtctattggtaaacttgcttttaa

SEQ ID NO: 153642 - DNA, 534 bp, Homo Sapiens
ttttttatgagttgtcttcatttcaatttaatttttcgaacaggaaatatatttacagagtttgaaattccaaaggcacaagaggatatacagtaaaaagttttcttcccactcttgtctctcaccaccaatttcctttctacaaaggtatttcatgaatattcagggaaatacaagcatttatatatgcatacatacatacacacacatattctttttctctcattttcatatgaagggcagactatttatacactgttctacatcttgatttctttttctgcttaacaatatgtcttgggattccctccataccagcacacaaagaggtgtctccatcatttttacagctgtactggatcccattgtatggctgtgccaaaatttgtttaaccagttcccggttgaggggcatttattttgtttcccatctgttgctattataaacaatgttgcagtgaataaccttatagatacatcattttgttcacatgggagtatatccataagccagattcatagacttggaactgc

SEQ ID NO: 153643 - DNA, 605 bp, Homo Sapiens
  misc_feature (293)..(293): n is a, c, g, or t
tttatcttctgaaggcagggcccccaggctctgcaccaactccctccctcggcgagaactgagctgtccatttccacagatgccctgcacgcccatacctctgtgccttcatccatgccatgtccttgtctgagatgctcttctttctttcctcatattcaaactttaattgattttcaaggcccggctgaatgcctttcccccaccaagcccttcccaaacagataatatgtctctatccttggaactccctgagccagtgatccacacatctctgacagcacttatcactntgtggtttgacggtcttgatgcatctcatctcttcttccagcattttaaagtcaggagatcattccctcttcatttaaatataaaccacagggcctagtacagtgcctagcagagtaggtcttgcataatctattgagtgatacattaatcaactaaaggaaaactgaaggctattaagcaagatggcgtgaggtctgccactacagaataagcttggtttccaggtaagccagctctgggttaagtagaacccatgggatatggggcagaacagtgccctatcagccatgcatggtagtgttgggcaagag

SEQ ID NO: 153644 - DNA, 583 bp, Homo Sapiens
tattttaattttttttcaatagtgctccaactgtattggcagcctattctatttagtagcaatgagtacctttcaaataaaaatacagtttcctcctgacccaccacttaaaactatctgtgttgtaaaaggaaaatgaagctcttgtcagttacctggcttgagaaatgggaaggcattactctgagggaggtgttagtgatttccctgatagtaaacagacccatagcacatctaaatgtgaaattgcaagtcgttttggcttttcctcactgttgcttcctcttcagtgtggggttataaacatgaattcatgtttatgaatggttcctactctaagggaactcactgttaagagaaaggcagataaaaactatctctaatactttgagataaacattaggaacataagatcctgcaggaacgtaagggagagaatgattttcccaagggtaacagcattttttaacagaactattgtagaaatgtagaaggtcgccgtatattatgaaaaggggccatgggtttctttttctctcaaacctaattcttaaaaattgcttataacatttgtgtgtgcaca

SEQ ID NO: 153645 - DNA, 789 bp, Homo Sapiens
tttttaaagtaatccttatttctaagaaatacatactgatgtttttacagagaaaaattatgtaataactggaatttagtaataatacagcagcagagaaaaaagtggaaaatgatacacacaaacaagatcggccatatagttattataggtaaagtggggatggatttcattactctccctatgtttgtatatgttaggcaacacaaatgtcaaacaagacagaggaagaaaggcggcaaaatcctttgcatacctgggggttttctttctttgccttaattactaactttctgcattaggttaccttcacatgctaagaacagttgaattttcaatttcctaaggcatcagcttgcccttttctttacaagaggggctggggacataaaaaaagcaaaggtgcttcctcaaaagcttcagtgcctggcagctttattcccactgacttccccttcctcccctggactttccttctctattctgccctcacagccatcttccttcaagtcaaacccagtgctgtgtggttaggctcatttagactcagttgtattggttttctaggaagagagaagatttcactacgcagcattccccagtgccatgtcccaccggaatcggtctttctctttcaatcctcacccgggatatttgaccccttccatgaaggtaaattggttctaatggttttaatgcattatacaattccattggtttcgtttttcttaaaggtaaccacaggttatttaagggctggtgtacgctcagaaaaatattcattggaaa

SEQ ID NO: 153646 - DNA, 442 bp, Homo Sapiens
ttaatacaagttttacatggcacagaagccctcataaggaaacgaagaccccaaaaagcatccagagtcactcacttgtatactgaattggacaacgaacactgttgcaaaatgtaataaggcaaaggggcttcggctagggtagttaattgggtaaagaagcgactaagaagataagggttagtttaacaaggtcagcttgtggagctctctcttggcttcaactttctgttctcgatgataagagcgttgcttttatagggagctcatctttcacatgggaatgcttcctccctgctagcgaccctgcccagtgggaaagcctccggagtagattgctggccccaggcccagccttcgagagcgtcaggctcagcgatcactccgatgcggggcagaacctgcagtcccgcgcagagcctcctcccgaggacgcaggaac

SEQ ID NO: 153647 - DNA, 118 bp, Homo Sapiens
ccaatttagggcccttatactccttttaaaaatttttaatatgctaaatttagcaaatactaaagtgttaagactcatctgacaatgtgagaatttaagcctatttcaggttaagaaa

SEQ ID NO: 153648 - DNA, 461 bp, Homo Sapiens
atgcttaatgtgtcttaagctcatttccttgttcatatttgggttgctacttggctaaatcctttcaccttagtaccctaagccagtttcctggcttgatactatttgataatgctctgctcaggaatgattatattgggtgagaaatggagccctggggttgtgtgttttggaacagtattcaagatcaaagaaagttcttagtccatggttaatctgcaaggcatttaagccacttccatagaggagcccagattgttggttaaatatattgataatgaagtcaaagctgtggttccaaccccgatttttccaagaaaaatgacgtctggttatcactttgtacacgaagtgctaaccaggtatcttgataaattgtttacagtaggtattgagaaacctcatgtggattttttaatttggttagatgtgggatcacttttgaggatgaggccagctct

SEQ ID NO: 153649 - DNA, 165 bp, Homo Sapiens
aaaaaacctggtgtgatcttttcagaagcaacagagtggtatcaaatttaaatatacataatgtctgatccagcaatttcatttccataaatttattctataaaacatacaagtatcccaaaatatataaaatgcgttctgttcctagtccatggagtttttaaa

SEQ ID NO: 153650 - DNA, 498 bp, Homo Sapiens
ttttgaattcatggctgacatttattacacaatgcagtatggatataaaggctcatcataatagaaaaagacacaagcggagtctggaggaatcacgtgtaggctccttatgcggtctccctcccaagaggggtcaaacaaaacacatccttcctccatcagtgaaaatgcagcagtttccgcgcagggaagcccattaaagacttggtgtcccggatttttacagaagctggtaatttcggcataaaacatactgttcagcacaaacccaaaaatctaagttcccagatgccaaacaagcaccaacattgcaagcagtcctttctaaggatagcagtcttaaggcctgctatgttaactctttttagcacaaatatgttctggccatttttctcatgcggttttccaaacaataaactttacagttttcaagtcaccatcacttaacacttgtcttttctctaaagtaggatgtgcaactaagttgtttagaaagct

SEQ ID NO: 153651 - DNA, 453 bp, Homo Sapiens
ttttttcttattctgtggcaagagggaaagaaatgcagtgagtaggacccagctccccgaggggagcaagacgtcttgacagatgtgctttctcactcattccttcgccgccgctccactgactcatttattcatcttattttagaaacatttacctagaatctactatgtgctggccctgttctccaggctggagattcaggaatgaacaagcagttcctggtagaactcgcattccaatgggagagacaataataaacacatttttaaattcttaaaattttgtctttgcttaaatgtcaccttttcattttcaaatttttaaaaagtaaactaacagtatagcatcactgatggtactgaggctgtggatttcattttcaaatcggaaagttagagaagtccttactgagaaagtgacatctgagcaaagatcagctgcttcctggtgtc

SEQ ID NO: 153652 - DNA, 530 bp, Homo Sapiens; identical to SEQ ID NO: 61354

SEQ ID NO: 153653 - DNA, 718 bp, Homo Sapiens
  misc_feature (403)..(411): n is a, c, g, or t
tgttaccattctgttgtatttttcttgtgatttttattttgaatcaaatattgtaaattgtgtataaatgaagatgctgaatagttctgtttccacttggcatttcaagtctgatatcaggtgtctgtacagggttttgatttctttcccttgtataactacacaacaatcctacagtgtaacatatggaatcattttgaatagacttgtgtgctataagctttcagcaggtcctctgtctctagaataagcatgttgtttattttcagataatcagaaataagtgtgctgacaagctggacacaatctgggtgtgcccagcttacctttctttctgatgtttaaattgaaggctgcagccaatggaatatgttcagctggttttccttggcttcctagattnnnnnnnnntaataaagcatagttctttattaactttaggatattgttcataaaataaataaaggcccctgcactaacatgacaacatgcctcatggtcaccctctctatatgtacttactcattaaagtgtattttatttccttatgtggaaagcacttttataaaatcacccttttgaaaagaagtgggcacagagaaccccactcctgttcttttcctctagtgccattgtccatcatcaaaagggaaactcttagttaatcagatctgtacaaataaaattccaagtccatttgcttgttttgctatctaaa

SEQ ID NO: 153654 - DNA, 706 bp, Homo Sapiens
  misc_feature (151)..(256): n is a, c, g, or t
gagacaaggcctcgctctgtcgcctaggctgaagcacagtggtgtgatcacagctcgctgcagccttggcctcctaggatcaagccatcctcctgcctcagcatccacagtagctgatgtgcaccaccagacccgtctcattttttctatnnnnnnnnnnnnnnnnnnnnnnnnnnnnnnnnnnnnnnnnnnnnnnnnnnnnnnnnnnnnnnnnnnnnnnnnnnnnnnnnnnnnnnnnnnnnnnnnnnnnnnnnnngcatgagccactgcacccggcctttctcatttttatttttaaattgacagacgtaacagtgcgcatttatcacgcacaacacaatgctttgggaatggttaaatctagctcacaaatgcattacctcacacggttgtcatttttgtggtgaggcttggttgtatgttttgtttcattcatgtttttacatccttggagtctcctctgggtccgtcctttctttgctgtcatgctggcttgcctaaggcccaccgccacctgcgtacgagcattttaaactctagagtgagtgacagcctttttatggttggtgttactatttatttcctgcctctaaacttctcgtggtccttataaacttgtcaggatgtgtgttgcgttgaattctgcatgtcctttttttgcccaccctcaggttaagctggtactaacttatccccagaggaaaca

SEQ ID NO: 153655 - DNA, 571 bp, Homo Sapiens
  misc_feature (146)..(191): n is a, c, g, or t
cctaggccagtaaagatttgttcacaccttcacagtaattggcatgtaatagacatttgatcagtagttggtatatgaaggaatagagtcctcagatgtataactcccctgaaagtgaacacaaaattgcatgtaggtgcacaatnnnnnnnnnnnnnnnnnnnnnnnnnnnnnnnnnnnnnnnnnnnnnnaattgtaagaggaatttatgatgaaaaaagtccaagaaccctgcactagtctatgctgccctagggctatctggaataattaattttcaaatattgaggcacttaagagacaaagaactaccttgtttccttggacagtaaaatgaaatgggtagaaacaaggaaggccttcttgatgaagacgtttgctgaataaaaatacttcgtattttatgtgaattgataatcatttgcatttgcctgttccaaatgcacaagttacaaagtgaaagctagttttcttcactccagctcttctcagtgtggccttagtcctttgtaaatgtggtttctctctccagtattgctgagctattagagttttctaccgcatcttaaag

SEQ ID NO: 153656 - DNA, 516 bp, Homo Sapiens
tttggttatttaattcctgttataacgctcaagggctgctactggtcttacatttaatttactgcattttattttatgagatttctgtggcttcttgttacaggactttgtatgagattttgtggagaggtcctggttaactttaaagaactccttgggttagttggctgataatcattggctttggttggctgctgagacttgtgggaggaccatttgaaagcgcctacttctccaaggtacaccaagcaaacctgatttctagaaacgaaggtggaagatctctatagtcaaatgtatctgttatttctctgcaaagctctcagccctttgcttgacaaatgtttgctgttacttcgtttcttctctcgctctgtctctcttaaagaagatataaatcaaactgcctgggtaaccttggccttataaagcttttcaactatttccagtaagaaaacagttgagaagtttctctgaagatagtctaaacaatttcagattaaaagaactaaaaat

SEQ ID NO: 153657 - DNA, 471 bp, Homo Sapiens
ataattctatacagaatcttcagatgatgggaccagcccatttagaaatcagtggatatgctgtcgatatgtaaactgaaatcttgcaggcttttcaacactgcttagctagactttctctactgagtttctacaaaaagaccagcattggaggggtaccaaatacaccgacaaaagagaaaaagcagatgggctgctaggtttctgcttttaaaaaatttcatataagaattgggtttcaagcaggaagccagaacttctgcctctggttcttaaattaacattcggtgtgtaatggacaataggcagggactcataatttgactaactcacatgctcaagcatgatcgtgtccaatttctacaggcctcctttgtaaagaaatgtgtaacaatggggggaaagtcataattctacctgaaaacatggattgtaagaggaaataaaaaaatcaaacagtatgttttaagt

SEQ ID NO: 153658 - DNA, 563 bp, Homo Sapiens
ttttcatgtttctcctgaacttttatgaccgtgtgcaaaactcctgcaaaaatagggaagacagcaagaaaaagcagccaagacaggcacagcttctgagctaagcttgcagcttgtgtatgagacacgggggcaagattatggttaccgccccccccacgcagcagcaaccccctgaccaaggacggggaagtcagtctgtcttcaaagcattaggttgtagactcgacatcagacgaagagagacacaaaggcatggggaaagagaaagggtgaggtttggctggaacctaatcaaaggtattaacttatctgaaaaaatgccatgggtgtcaggagggaggaggggtggggaatggaatggagaaagcagccaaggtcagggtgagggctgctcgcgggacacctcccgcccatgtggacggacaggccatgaacttcggggaagaagcaggaagcagacagggccggggcccaggcattccgccctctagccggtccctgagcaggggtctgtgtcatccgctcctgtgtcctcccccacagataagaatctgctagtc

SEQ ID NO: 153659 - DNA, 576 bp, Homo Sapiens
ctgttttgtatgctgcacattgcaggtctgctcatgtgcattctccctttgtcttcctttgtcatatgtgtttttgcttttttgaaagtgcagtctttattgtaccctcctccagcttgtagcaaattagaatgcttagcatttatgttcattcattattgtatttgccatgtaaaatttttattaccttagacaagcttataagctgttactacataacttatcttactgtaactcttttatttcccccgacgttgtaatttgtttgtgatgtatattgtgaaattgtattctatgttaatttaatcagcacaattcactgacatgctggactgacatgctggctgctgtttcaaagtgtaaagtttgtgtagggctgttgggacaactgcaactctgttgtcaaggtactgtgctttggttcctatagcaacactgggtgtggcccttgaattgctaagggcatttaatacatcctggagcaaattttaactgcagattttctttgtagaaattctatgtataatgcaggtacctacttggcccatggctggtaactatttgggcaattagaaa

SEQ ID NO: 153660 - DNA, 389 bp, Homo Sapiens
tttgaggcttaaatgagtcatttatttcagtgacttagcatggggtacagggttcgggggagtacgggagtcatggtttgtgatggaggtgacccacaaagcacagacagcagtccctttttctctctagcgatgctcattgtcttaaagttgacgcggtctcattggtgctaacagagtcactcagctttgtcatgaccagtgtcagcttgctctgttgttttcttgtattttttactggtctgtgtgtttatgtttaaggtgagtttcttgtacacagaatgtagatgtaatttgggtcttcttgttatccagtctaatgggtttttttaattggaatttttagcccattttaatttactgttactattgatgtggctgggtttaag

SEQ ID NO: 153661 - DNA, 632 bp, Homo Sapiens
  misc_feature (318)..(318): n is a, c, g, or t
ttttggggtgctttatattctttattatttttatgtgcaaccaactctagtgaagaacctaaaaagctacagactaaatttttataaaatctcaggacctaattataagagcccaaacaacggtttagtttcatttatcaagcggggatttttctttctgcggagacgttaattttgaaaaatatggttaagtttaaaaagttgcaatgtgtaaacggcagttccatgggatgtgaaaagattatagttactttcattaaaaaacagcacacttcgaaaaatggattgaagcctgtacaaaaagctatttaacactgnttgataaaaaataaaatactttggaattatgcacaagtttggaagctacattttaaattttcattgtcatgtctaaaacgtacacaattacctttacgttcatttcacttaccaatttattaaaaataaaactgcaacatgctttaaagaggtccatcacagggacatttacagacttctgctctgtcatgcctcactagcttgcttggaaaagcaagatgctacaaaagttacactcaacaggtaagacttaaaagttgaagaaaccctaaaggtggaatcctgtcaactgaggtagatttcttttctttttt

SEQ ID NO: 153662 - DNA, 495 bp, Homo Sapiens
ggaaagccatccatcctccttaggtttctttaatatttctcccgctcagaaacagacactacggggctatctccccggcagatgctgcccttctcaaaaagcagtttatttcctgggcctccagactttcccctggaccaacaggaccgggatttagagtaccagtcacccagaggcagcaattgtcaggataagccaggagccaacataggttgtgacacagaggactagacaggccctttgcatattttaaaatgggtccctcagtgtgggaagtacacacctcttagttagctggaacttaatcccttaaactgtcttaatatagaattcatctcgtgcattaatcttacatcatgttaaattgcacttatttctctcataaataaatatagaacaattagatgtgttataataatgtcatgtatcttattttccctcataaaatatataggtatgaaataaattcaatatattaaagtagtaatacacaaa

SEQ ID NO: 153663 - DNA, 491 bp, Homo Sapiens
tttttttaaccttgaaggagtttttattgaaacacagtacagaaaacaccaaacgtcactgacagcagtgagctcatagctgtaatggagttggccccagatgccaaaccacctcgctgaggtgtgacttcctctggagggtgacatggcaaggaaagggaaggtgttctctgtcaaattcagagaccatgtgcacctccaacaaaatcacactccctacaagttcagtgtgcccccagtggcacccgtggcacatcttgacaatgggaagggttaacggaagtagtggggacatccaacccaatggcacataccaggaatgggaatgtaggctgctgagtcttcttggagaagaagagagagctatgccacagttcagcttgtgggccctgagacaagggccacagtgtgcggagaggattccaaaggaggagaaggatggtgacatggacagtgactctggggctgcgggccacgatgtggcaaaaatg

SEQ ID NO: 153664 - DNA, 579 bp, Homo Sapiens
  misc_feature (14)..(14): n is a, c, g, or t
ctgtagcactgtanaattatccggatatcaccttacaactaagagggtgctgaaggactacaaaggattcgattatatcccattaaaaataatataatcagtgagaatcttttaaaaatgcaaggcttcaataaattgaatagcactgaattacatatggcaatttgcataaacaatactttattattgaatttgccatacaaactcgtagctgcaacaaaactctccagataatgtaaatatacttctttagtcttatgtttatctatgtgaattactgatagttttatttcagatatggcagaaagacaaaggtgcactggatgtgatattaagaaatggtggtctcataaaatgagacttagtgcttacttttggattggaacaagttcaaagtaagtaaatctcagttgtctagacttttaacaagaaagaaaatacaagtagaagtgaagtctaacacaaacaaagctattatttatttaatctctaaatattttgtaactaatcccaaaatattcaaataaaaaaataaattcagtaaacatttttaattttacttaaaatatgcaagcattt

SEQ ID NO: 153665 - DNA, 436 bp, Homo Sapiens
tgcggccgccagcggcgcggcgcggatatgggtctgcaggatggagttcttccggtctggcgtgctcctgatcatagttactctgatctgaagattttggcgttcaaggcattaagataatagcgctgagttgttcatggagtttttcatcagtatgtctgaaaccattaaatataatgacgatgatcataaaactctgtttctgaaaacactaaatgaacaacgcctggaaggagaattttgtgatattgctattgtggttgaggatgtgaaattcagagcacacagatgtgttcttgctgcctgcagcacctactttaaaaagcttttcaagaagcttgaggttgatagttcttcggtcatagaaatagattttcttcgttctgatatatttgaagaggtcctgaactacatgtacacagcaaagatttccgag

SEQ ID NO: 153666 - DNA, 816 bp, Homo Sapiens
  misc_feature (676)..(706): n is a, c, g, or t
tttctgtatcacatactgaaaatgattttattttatccatttacatttaacttgatataaacttgtccggaaaagtcaaataatatgctttatattagctcaaacatttattaagaaaaccgaattccataaataaacacagacattaagttaaaacatatcacaaattgaccagtatgtaacaagaatgctttatctacacaaaacatcctatttcacatatttgttcattcttagaaagcgcttctgttctctgggtttggatttgaccagcacatgcagaaagagctgattgtgtttctctgtacaaagttgcagggttgtagatgtccgagtgcccccatcggctgccagcaggtggccgaggggcacgagggacgacaggaccaccacaaaacaaccaagggcacagagcagcgagaagacagaaacagaaaaggaagcaaacaaaccccagtcctgaaggatccagaaaagagatgtggcttttgcttttacaaaagaaaattttgcttacacgtttattttattcttccttataaagacttatcaaaatgggtcagatcacctcttcctcgtcacatgactgctttagtctactccagccacccaatccactgtcacgttcctcctgagaagccttcccttctacactctcacacagttgtgcttaagnnnnnnnnnnnnnnnnnnnnnnnnnnnnnnngcgttatcttgcaagccaagagagggctgcacggatgtgactgggtggactgggcaagggtagcgtggtgggagaggaaagaaagacaggagcttggagagtacaaggat

SEQ ID NO: 153667 - DNA, 532 bp, Homo Sapiens
  misc_feature (34)..(34): n is a, c, g, or t
  misc_feature (61)..(61): n is a, c, g, or t
cagatggggtctcattttctggcccaggctggtncccaaacatcctggcgctcaagtgatnccccctaactcagcgtcccaaagtgctgggattacaagtatgagccactgcgcctggcccagatcacctttaatattatactggatttcaatctcagtctgattgctgtgcatagaattggtgaacacaataaattgtgtctgaactagtacacgtgtcatagaaataggagcaccatcagtgcaaggaagaagtgttcccaaccatccaaactgcaagccctcagagtgtagcaggccctgacaaatcttcctcagatctctgacagccaaaggtctccattccatgaagtgcttggaccctgccaaacaaaccttatctgagccctgctccctgctctctccttccctcagctgctgccaagagaattgacctactctgtcttccctcaggttgaacactgctgaatttaagggctccatactaatgtgacattaccgccaccatcatcgttcctttggaaagttccaa

SEQ ID NO: 153668 - DNA, 567 bp, Homo Sapiens
  misc_feature (326)..(342): n is a, c, g, or t
aaatagcatttttacttcttcctcattcttgccatttctgttcttcagtttctatgttaactgctttgccattttcaggtcaactactgtttgttgccttaaatctatctgggagctgcttcaaatccatttggaagcaaggggaggatacattataaataaatgatatgttcagagatgggcagagttggaaagacatttcagtgagacggaaggccagtaaagcttttgtctatcagcatctgatatcattacacacatattggtctgggcttagcttgcttttagaccatctggatttatcttcagctgagctaaacccaggnnnnnnnnnnnnnnnnncccatttggatttgctctgcagttcttattttgtttttcttctaacgcaaaccctgcttcaaaaattaagtgttgattttgactgatgataacaaaacaaaaatacaacctgatgtgctagctaaggcgggggggaaatgacaaaagcctcagagagcaggagccaagtgttcacttctccaggacgtttccttccctagtactggtttttcctaattcagcaaa

SEQ ID NO: 153669 - DNA, 573 bp, Homo Sapiens
gagtaaattgccacctgaggtgacaaagctgactacggtttccaatctagttgtacacggagggtcaggaatgaaagcaagaagacccaagggcccctctccaccactttccttaccagagttcagattcccaaacttttgcttcccttatattattttcttcaatggactctaattatgaaaggaatacttacaggaaagcaagcttactaaatttggttttccaagttcttactgattacatattaatcaaattattaaaccttatactttatgtgaaatggaggttaactcattaaactgataaaattccatctaagatcaaaggaacttgaatgctgctaaaggtatatttagaataaactaaagaaatcttagccaaaagaaagtgtatgtatctaatctttagagaggctttcaaatgttgctttaagctacttttattaacaaaactgcattttgaactccactgcttgacaactatggcctttgtttcttaagtcaattcttacctttctggggccttggtttaactacttcctttgttttaaggacacaaagcttgtcagttct

SEQ ID NO: 153670 - DNA, 512 bp, Homo Sapiens
tgaggctcaaaaataccttcaggatagttgtatatccagttattgattttcttaaaagatgtgtaaggaaaacagtttcaatttcaggggaaaagtaaaagtttttccctaagtcacttaaagcctttgcaacttcttttttcagttttgtaagtaatatatctatgttcttttcattatagcaagcattcaatgtgaacaactttttaattaactctgaattaccattcatacatcctaaaaataaaagctcgttattcattaaaatcaactgatcccatttttcttaaaatttccctgaaggcaaatgtctgaagcacctttcccttgtgggggtaaaaatcctaaattgctttatttttcattccctcctattcaacatgggagcagcatagagacccaaaccatgtaaacaagttcagtgaaccaaaacagccacattagcttcagtaaaattatagctagatgtgcaattttttccgccaaaccattctaatgttggagcggccgca

SEQ ID NO: 153671 - DNA, 524 bp, Homo Sapiens
tttttaaatttgcagggtatttattaaaggataggcaagttcttaaaatcttgagttacaccaatgtgctctgcagcaaatttttaaaagtttgagctggagctaaggacataaaattgttaatagcaatattatctgtgaactttgaacaattagtataaaatcttgccaactttaatttcaatcctatcttttctaaccttttctgggacctggttccatttagccagattgattatgggtttctgaattattgatggcaccactttgcatgtgctgcctcctctgatctgaaccattttcttccctcctcagaatcattccttgaccagtccctgctcaccatagtactgctcaagtgccatcttttgaagtagctccccctacatttggtactaagtggcccttttttgtgttccaatagtaacctgtacatgcccctattacagcactggttttattgatacggaagtatctacttacaagaactgtgttttaaataatttaatcccaatacctactag

SEQ ID NO: 153672 - DNA, 561 bp, Homo Sapiens
cataaaaacttttatgcaaataaatttttttatgtgtaaaacataaactgtttgctttagatagatagcagccaacctttttaaaaaactcatttctgtgttagtatataatacaaaatgaggttgagtcatttatattttgggtaaaaagtggagcattttagattttaacttcagagtgtttgtgaggaactcttgatgtaccagcaagtatatttttggtgtttcatgttacgtagcttaactcttttatccatacatatatgtgtatatcaaagtccttcccttgatcctctcagcattagcactgtttggggagttgcctttactgttggcagaattccactttccctgaggccatttggaaatctacctagtagcctgtgggataaccttaactcttagaactttcttcaaaggatggtggtgagaatggggtatactgccaggccctggcctacgggagtttgtagggcctacttttggaggcaatccaaccctgatggctgtacctatgagctatccctgtaaacacaggagacatggtgtctatattgttta

SEQ ID NO: 153673 - DNA, 526 bp, Homo Sapiens
gtaactgaataattttaaaagtaagtgaaacatttagacatgcaaaatggacttttcagaagaagaaaatggtagcttaacagttattagattattgtccagaataatttttgacttataagtctctgttgaccatttcattgcctctttttttggaatatgcatcttttaatgtgtccttcaaggcaaaggctctatcttatctatcttgtgtcttgcattttcccagggcaatgtttttcacaatttttttaaaaaacaatactgtaatcaattttcaaataaaattttccatgggaccgcagtgtatacaaatagcagtgacaataaaagataataactctcccataaatacaaagaaacagttaacctagtgctctaaagtaaaggctacagtgattttgtataacatttatatgtaattttcttgatcctacatggttgtgtttttcacagtgttatgtttctgaaatcgagatgccttttataattgatgtcaaaagaaacttgtcagccaccaggccca

SEQ ID NO: 153674 - DNA, 501 bp, Homo Sapiens
  misc_feature (243)..(280): n is a, c, g, or t
atcgtcacgcaagagtacttactgtcttcccttgtacatacattgtctgtgtttagcttttcctagtattgtgaggtttcaaataggggttccatgtaaatactctttctgctactgaaatgccggcccccttgagtatgcatcacccccacagatggttttgcctttctctatgctaacactttttgagccactgacgtgcagatgggtggttagtttcttgggcttttattttgcaatttnnnnnnnnnnnnnnnnnnnnnnnnnnnnnnnnnnnnnnttatgggttggttttgtatagttttctgtttgaatctctgagcaccaaagctgccctttgattttcacgagaactttccaaagccacttcctgagccctcctgctgctttggtgtctgatggtgatgctgcggtggcatctctgcccgtgaatttctgtatgtgtgtgctgttacctcacctgcagacatgaccctagtaaatctaacgtgcttggctaaa

SEQ ID NO: 153675 - DNA, 559 bp, Homo Sapiens
  misc_feature (470)..(493): n is a, c, g, or t
attattctttttacctaaagtagtctgtttttggaacatctttaaaccacattttaaataaaatatcaaaatagaagtctatccactgctattatatattacctttagtttcttttcatttctctttatgtgttttcttaatatggagaagaggggaaagaacattggataaaatttgttatatttgtagtaaaattgcacatgaattttgtctgtattatgtttttataaaatagccctttaaaaaccagtttgccgcatgctattgcctttacttttcatccagtaccaaatttctaagtgatctcttaactaaaatactttgttgtagtaactcaactagtctgacttctcactgttgtgtctgcgtttttatgcttttggttgggggtgccttattgagatagtgtgtttatgtatttcctagacttactatattttcataagtttctcattattctttgtgaatnnnnnnnnnnnnnnnnnnnnnnnnaatatgtaattcatatagacgctctgctgttgcccgtattcaggagttcttcagacggagaaaaga

SEQ ID NO: 153676 - DNA, 596 bp, Homo Sapiens
agttatcagttacccttgaaagaatgtatatttttaagtagtgaggacaaatgccagaatgctatttaaaaacagcctaggagtggattgagtatgaggtccggaacgaggtgaagcgggttccaggagtgagatgtatttgttttgagagtgaggttttccccttacatactagaaatcagtgctgggggtagggggagagggctggctggggagttggtggggcagcagttgattaacgaagacgtacagatctgaatttgaaaaataataggattgtgtggaagtatgatttctccatattgatgtaaagtcataaaaccactacattttagcatatgtactttttttcctcccttacctccgggggtacaaatttgttaaaagtcagcgacatgtttggctttgaatacgttcaagatttaactaaataccttttttgcagatttctgttgccttatgaaattagtttattcgtaggctatgtagttcagtagtgatttattttaaactaagctgcaagtatgatatttctaaaattaggtttgttttttcgttttcagtaatgatgtagacatggaaacagatcactactg

SEQ ID NO: 153677 - DNA, 287 bp, Homo Sapiens
tttccatgggccctctaatacacaccttaaaagtgcttccttttccattcatttcctgagttactggtgttccagtcagggttgtctaccagaactgcttcctttcctagtaggaatggagtttccacttcttcctcaccttccctatctcctctttgtctcctcggtttgctacaggaggcatgttgctcatctccatatttttctgctgcctgcagaactttctgcttttcagcttcagtgagggtctgacgtagcagcaacgtaacatccctctatgaagctga

SEQ ID NO: 153678 - DNA, 589 bp, Homo Sapiens
atttttaacagtgaaataatcaagaaatatatctttaagttaatctgcaaagtcaggctgtgttctgtaaaaggtatttcacagcattttctgtttaactgtaatctgttatcatggagatctcagtaccagagcagtgaattttttgaaaaatattgactgtctttattcaagtcagccatcttggtaagagcagttttcatccccccactgcccaaatgtaaatatagatcacctaatttttcttacagaaagatactgttaagaggcatgcacttttcatcggatggtcacttgtttcttgtttcaaagacaaatatttggatagatacccatacttgctatgagtcagtcacagtgctgacactattttaacatcatttaaaatggaaagatctacatagatttttgacattattccagaagtaacatgcaagtaagatatttttattgtcattttcttcatgttaaaggagctacttatgaaacctatttttttatggcctagagtttatgagtgctttttccttgtcttctgaaaatggaataaattggatttttgatacttaagaatttcctaaagatagct

SEQ ID NO: 153679 - DNA, 575 bp, Homo Sapiens
ttttgggaattgtattataattttaatttagctgctgtaacaagatccagaatagcagtggcttaaataagattaggtttatttctctcttacagtccaatgtaagcattccagggctaatatgtcagctccatggtgtcagggcccttgctccttattttactgctctgccatcctggtgttgccctcattcacaaggtccagtggctgactcaccaccacatccacattccagaagaagaaaagagcaagaggtggcattatagccatgaccctaaggttttacgtaacatttttgctcacatccttctgaacacaacttggtctcttggctgcaaaggcaagctgggaagttagttcttatcctgcgcggccacagaccacataaatccttcccactacagaagaagggagaatggattttggaggacaaccagggaacctctgccacagggtgtgtatgcttttattacaacactattctggtgttttctacctcactggtacaggaagaaattagagaaaactggagcaagtacaacaaactatttccagggttgggattaactttagca

SEQ ID NO: 153680 - DNA, 494 bp, Homo Sapiens
aagaattcgggcacgagggtccattctgatgttggaaatgtatacccacttcagcagcaaaatcttctggttcatgcaaaataattggaagattgctgagaaagccaatttctccatttgcaatggctggagtaaccagtaaagaaatattgcagatttccccaaatctagggcttatgggtgggattagaggaattatgtttaacaactccacagtttccaactgtactagaaagtgagctccattttgaaggaatgcatcatttcttattggtaattttgtagtgacttgagttttttgctctggaaaaatgaggtcatttctccttgatatatttaagatgccttcttttgcttgcaaggggtccacagctccagcaggaatgtaaagtacagaataaagcaacctcacatctcctttagtccctcctagtcttgtaaaactcaaggataagtatcgttcacctgggctgctttcaatcttctggttttcc

SEQ ID NO: 153681 - DNA, 515 bp, Homo Sapiens
  misc_feature (112)..(131): n is a, c, g, or t
tttataatctcaattttaaaacattttattgttgattatacatacacgtggaaaaagtacattgtatattatatataatctacatgtacatgtaatatagacatatatgcannnnnnnnnnnnnnnnnnnnattcaaccaaatatcttacactgtcatgtaaaaagtgacacttccaagcccacggggaggagtgcccttttctggggctgcctccttcccaaaactaagcacagttcctcatgattctctctcttgtccctccccaccacttccttactctcacgaattgcccattgtgcccaaggcttcagacagcacaagttggagtgtgggggtaggtgcctacatttattaggcactgattctttccctcactgaaggggtggcctgcccctccacacctgtgggtatttctagttgggtgggacgagagactgagaaaagaaataagacacagagacaaagtatagagaaacaacagtgggtccaggggaccggcgctcagcacaccaa

SEQ ID NO: 153682 - DNA, 293 bp, Homo Sapiens
ctacaaatgaactttgagatttattattaaccaacattgtccttcctgcagctcaaaagtttgccttttattaaaattcaaaaattctggaggaggcagcaactgtggtaataaaagtttaaagtgaattgttatattctgtgtttataaaactgagaaaagaaaatttgtgtacaaatatcacaaaacaacatcaaccattgaataaatgtggttcttcaatgcacgcttgaacaagaaaattttgttggttttaaaattctggcataaatatattaaagctgaccaaaaaa

SEQ ID NO: 153683 - DNA, 604 bp, Homo Sapiens
  misc_feature (509)..(525): n is a, c, g, or t
ttttttccttttgcaaagaatatgaaataaagatgttttattatgtacattagttaatgaggcacaggaaaggaatgttaagaaaagcaggaatgtttatctagttcatggtccatgataaccacagattgctgcatttgtagccacatgagtcattcaaaagtgatatgaacatgcatacataacaattcttctgcttttaatgaaacataagaaactgtcaagctttggaaattagaaacaaacatattcaatgctttttgaaaaatcaggccttatttaaaaagaaaaatgttctatcatcaaatgtattatgcatttattttttatcatttgaaataatagcttataaataacattggtccagaactaataaatgaatttttacaagagctctctctcccttaaataggtttaaatttgcttttcaaaataaacagcaaatttcctggatgtaaggaagagaaaggagtttccagaattaaaatccaattgcttttctgttctannnnnnnnnnnnnnnnncagtaagaacacaaggtgagatctatcttaacaaattgttcagtgtacactgcagtattgttgactataggtgcaatat

SEQ ID NO: 153684 - DNA, 619 bp, Homo Sapiens
  misc_feature (292)..(574): n is a, c, g, or t
tttttttccaaaaaaacttggtatatttattgaaattgcatcaactgtataaaccaatataggaaaaatggacatcactaaaatattgagccttcttattcagaagcatagtattccttctcttttcatgcagatgttcttttatggtattcgtcaataaagttttatagtttacttctaggtatttttattcgtttctcttgctattgcgaacaggttttttattattaaaatttcaaaatgcttattgcttatagataggaaaactgcctatataaactattgatatttnnnnnnnnnnnnnnnnnnnnnnnnnnnnnnnnnnnnnnnnnnnnnnnnnnnnnnnnnnnnnnnnnnnnnnnnnnnnnnnnnnnnnnnnnnnnnnnnnnnnnnnnnnnnnnnnnnnnnnnnnnnnnnnnnnnnnnnnnnnnnnnnnnnnnnnnnnnnnnnnnnnnnnnnnnnnnnnnnnnnnnnnnnnnnnnnnnnnnnnnnnnnnnnnnnnnnnnnnnnnnnnnnnnnnnnnnnnnnnnnnnnnnnnnnnnnnnnnnnnnnnnnnnnnnnnnnnnnnnnnnnnactcatacatggcatgatacatatacacaaacccattcattatgg

SEQ ID NO: 153685 - DNA, 428 bp, Homo Sapiens
tttaattaaaatgaatttatgtttttttaaaaaaatgcttcatgttttagctccttcattcttccaccaaatgtgattatgtgggggctgaagggaattcaggttaatatgttgacacacttaacaatgcagggtcatgttgcacaatacgcttcactggtttggttcagtacaccccctgacagggcctaatcatcccctgccctaaaggcagagggaaagagaggattttaattactgctctgtatgcaagtttgccagcattaaattgagacataattaggcctctgaattttaataattgtcctagctaattgggcagacaagtacgttatacagcatgccgtgattagataattagtatttccaaatgacaaaattgggctcttgattacaaattctacatgaaggaggaaaaaggtagcaag

SEQ ID NO: 153686 - DNA, 416 bp, Homo Sapiens
ttttcttttttcttccgaaggcgggcgtgggggcactagtgcaggggtactaggcgtgtgtgtgcacggatgtcagagtcaggctctgtgcaaatgcgggcacacatgaccttgacctgcagatctggggaggggaggctgtgcgggtacttcctgcctttcaactgtgagcaattaattctcttgcccagaaggaaaaaaacactccctcagctccccgcccccttctcccagtaccaaggcccttctcgaacacgtcgtcgtgtgtgtctgcaggacctggggcttcaaggcctgggagctagccagacccaggacctggacttccagcagctggtctcggaagtaccgatgttcgagtcctccagcgagactagagagcctgcgcccctgcccacagcgcgtacagccgcacc

SEQ ID NO: 153687 - DNA, 449 bp, Homo Sapiens
tttctcaccagtatgatgatgaccattttaagaaagcttgtgtggctctctcctatcattacagacctccagagctggaaaatttgatgcatttactgaactcttcctgaaagtttaatatggagtgggaatcagtttttgtcctaatttattagagaaggcttcctcttctctactccttgtgcaaacccatctctggatagctagaaaaggaacttcagaatggactatatgtgatgaccacctgtatgcactctaggctcttatctgtctctattttatgtggtgactatatctcagaagtactaccccttctgagtagtactattatttcctatgccaattttttttaagtctctgatgctgccctttttaaatttttgtcttattttttagcctctttagtattagggggtgaggtgacattcctagactctacagtagcagtt

SEQ ID NO: 153688 - DNA, 430 bp, Homo Sapiens
aaacttacatatgtagtcttcttaaacagctccctcctccctccaaacaaactaccttgctggtccagcctgaacaacatgcacaaagactttggctcccctagaacaagccattgagccttcctcttgagataggggcatcaagaataaggattcacatgtttattcacaactcaggctcctcaaggggctgggatctccccaattagactcctttgtttcactatgcccacaatctcagaggtgtttgaaattgtctgtactagggaagaaaggattttcaaaaatagccagtcacacagaacagctctggaccaagccattacccaatcccggatgggaagttgcttcacgtttctcttaagttgttacgcagcattgccatggcagcaaaagaggttaaccattaaggaagaacctgttcaactga

SEQ ID NO: 153689 - DNA, 337 bp, Homo Sapiens
ttttaagtataatagtgacatattacaaaatgtgccccaaacagcaggcttttttcagagcaccaggtggtaaggtacatctcatttttgattagatccccaagccccatctccgtgtagtccaagttttgctgtgtgacggactagatgaggtaagacaatacaatctgtgggtgttaaatctgtaacaacagccaggctgtgttccacaagattccagctctgccttcaacaccttaggagaccggcgctatttctccttccttctctttccttctgcctcttcctccctgcacagtcttggctcttgttcccattcagtgtcactctccctgag

SEQ ID NO: 153690 - DNA, 531 bp, Homo Sapiens
acagagagtgaggtgagcaggcagctaaatacagaaactgttaagggcatcagaaacacccatgggcatgtggacagctgtagaaatagggctgcaagacacctcagctagaatctaatgacttgagagcaccaggaaaagagaagggagttgacagtgtatgcagctaggaacacatccccgtcgggggtctgctctgaggaccctctataaccctaaagcagacagtacctctcccagctcagtatgatgtgctctatgattaatctaacatgaggcgactgtgttctccatcaaaggagagactgttcctgtgtgtgtgtgttgaggggtgaggggaggggggaacaccagggagacctttaaggatggggtggcatttgagcaggacctcgaaagatgaggaggcttttgacaaagggagtccagaggcagaggacagaacatagaactagatgaagagcccttcgagggcagggacggtggacctccccctccctcccagatgctggctcaggcctggcggccgca

SEQ ID NO: 153691 - DNA, 579 bp, Homo Sapiens
  misc_feature (367)..(395): n is a, c, g, or t
gactgctccaaaggatctttatacataataagatgtatatcaaatagaactcaaagaacctgttaacaaaccgtagagttcatgcaaagaattggaactgaaatgccttagggtacaactgtccttaaatagaaattttacatggaaaataatcacacataagccaaattttgcttcccagcttgggtacatgtcgtttgcaaaggcacagtttggccaatgtaggctgtgaatggttttgtcaatcctttgatttgttttgtgtagtttcttgccagatgggcaagcagacataaacaagagcattctgaaaggcccctcacattctgctggccgtccagtgccagttctgagcaggccaacagannnnnnnnnnnnnnnnnnnnnnnnnnnnnggcagaactttccatttcttaaaactaaatggaaaatttgggattttttaaaaatacatttcagattcttattggaggaaatatttctggtaatacggtcttggaagatgatttcacaacccttgatagtaggaaatggctgcttcacccaggaggcaccaagatgccccggtgtggctctact

SEQ ID NO: 153692 - DNA, 371 bp, Homo Sapiens
catttccactgtcccctttattatcagcgtgagatcatacagtccgcaggaagtattattgaagtgacttataaaaaaattaaattttctttaatcacactccattgcctgacaccccttatgtaagcagaagggagtctgaggcctcagcttctaaaatgggaaccatgctaaggataaaaaactgaagacatttagggacccttgtcctgtgaatacaagcaactacagaaaggcatgagaacagtttcttggcttgcttgacttccttctcaccttcccttggttgacccaaaaacaaatacaaagctcagtcatttaggtgggctgataattccatatcattcatattttcaatcaccaagagcaaa

SEQ ID NO: 153693 - DNA, 442 bp, Homo Sapiens; identical to SEQ ID NO: 59815

SEQ ID NO: 153694 - DNA, 880 bp, Homo Sapiens
  misc_feature (37)..(37): n is a, c, g, or t
  misc_feature (82)..(82): n is a, c, g, or t
  misc_feature (162)..(162): n is a, c, g, or t
  misc_feature (170)..(170): n is a, c, g, or t
  misc_feature (211)..(211): n is a, c, g, or t
  misc_feature (826)..(826): n is a, c, g, or t
  misc_feature (848)..(849): n is a, c, g, or t
taagaacaaaatagtgcttagtccattttttccattngagcagagttaacccatcccccgtcctgtccccaaaaagacaggnctgtgagccagtgcccagcgggagtcgtgctgcagcagactgaaaataccccaagtagcggcgagcagttgccgcgtganaaaccccncccctcttctgctgagaagatcaaaagtcttttttaccctncttcagcaaaggacctatggtttcaggcaggaggatgttaacttgcacctctgacacacggtgaacctgcagtgcttggagaaacggcacgcacacgtgaaaacatcatgcctactccaaagccttcttgttgctggcaggagggaagcttgagactttcccacgcatagtcgtgacccgcgtggccgtttctgctctcagcaacattctctagtgttccggcttcaagcagcgcttgtcaggtttgaagctagccactattctgagaacgtcagaaaagcatggaccatctcttgcttggtgttgccgttgtggcagtagcagctactacgtacctgcacgagttccagggcagaaggcatgtgcctacagcacaagcttgtaaaaaaatacttgaacagaatatgctgtacagaactaggggttaacaccgcatatgaagatgctaaaacatttgtataaatactctgtatacaagcatggagtcactcccgtagaaagggctcatccgtgaggctatgaaaaactgctgtcagcatgcccaaagagaaactacttccacagtaggaacagaaaaaaggactgtgctgtgtctaaacacgtggtgcatcaganacatagttacagttcctgcctnnctgccccagccacgacctgggagtgctgagg

SEQ ID NO: 153695 - DNA, 648 bp, Homo Sapiens
  misc_feature (260)..(317): n is a, c, g, or t
  misc_feature (510)..(510): n is a, c, g, or t
  misc_feature (614)..(614): n is a, c, g, or t
cttgtgctgtaggcacatgccttctgccctggaactcgtgcaggtacgtagtagctgctactgccacaacggcaacaccaagcaagagatggtccatgcttttctgacgttctcagaatagtggctagcttcaaacctgacaagcgctgcttgaagccggaacactagagaatgttgctgagagcagaaacggccacgcgggtcacgactatgcgtgggaaagtctcaagcttccctcctgccagcaacaagaaggcttnnnnnnnnnnnnnnnnnnnnnnnnnnnnnnnnnnnnnnnnnnnnnnnnnnnnnnnnnnaccgtgtgtcagaggctgcaagtttaacatcctcctgcctgaaaacaaataggtcctttgctgaaaagagggtaaaaaaagagctttgatcttctcagccaggagaagagggtggtgttttcacgcgggcaactgctcgccggcctacatggggttaattcaagtctgctgcgagcacgactccgcccttggnactggcctccagcaagccctgttctctttggggtacaggggaacgggatggtttagactttcctgctcagtgtgtaaaaaatgtagctaaagccactatttttnctctccttaagctgttcaataaaccggttcctca

SEQ ID NO: 153696 - DNA, 567 bp, Homo Sapiens
  misc_feature (23)..(23): n is a, c, g, or t
ttgaggtgtatagtataatgtanagtttggaaataatgattgtacttgttaattctgtattggtctttggaatcaagggtttctgaacctgagataagcagcttttttgtttcataaaagctctagtcatttttctgtgttgaaagtggaccacagtaatgttcatggatttgttggctgaagcacttccatgtggcttagaagcttagcagacacggcacctccgcctttgtgaactgtcattggccactctgcaaatcctggtggtgcagtagtttagaactgtgtagaaaagatctggttgtagaggacaggaggctgatccagaggcgtctagtcacttgcctgaatcacagctaaaaagcagcagacagaatgaggactcacagctcctgatttattttttccttttgtttaaagcccagtgtattgaactgggcagtcagcatggtatttactgttttatattgtccaggtaagaaacctggagcttattgggagcagaattacaaatataagcaatgccaaccttccctgcaccttagcattacctttaatagtgtcaaa

SEQ ID NO: 153697 - DNA, 641 bp, Homo Sapiens
tttattatacgtttagtgttctctatacaaaagaaatcagtttttttacagtgattcaaaaaaaattcagaataatttggccttttcattgctcatgcagtcagtttataagtccatgtattagacggccctccatggcccagaagtcttccctgctgaaggtcgtgtgtgacaccctcagatacgcatctgtcactgacaaagttggttaatgcaaaataactcgcaaaaaaggaaagaacatgatgtgagaggggttaaaacaaggtctggcatggagttaaatgtttaaccaatggaaaaaagatcagaccaatttgtgtgtgtgtggatatgtacgaagggatggagacgctgggaaaaaaaattccccacgggaaagaacaaattggaatggtgggggatatgggtgtgtggtgggggcggggcaggaggtcctccggggtccagcatgggtcgggagtgggagcaggacagaaggtggccacgtcacaggcgactgatgctcagctcaaggggagtgtgaagaggttggcaaagagctggggagccgggcagagggacaacactgactgaggacattgcagttgggaatcagaaaaaaaggggcagctcaggggcatctgatctgcctcattttt

SEQ ID NO: 153698 - DNA, 861 bp, Homo Sapiens
ctcctcatcggccagcccctcctccagccccctctggtggcatgccatgccaagagcaacgtgtaaaggaacagagaatatccaatgcagtcaagtccaccctgcccagactttgccactgacttctcccacccttctgtctcccccataatagtttatttggttggtctggactcacttgtggcctttgattaaattcctaaggggcctgaagaagacatttctactgcagagggttagaggcacttgagcaaggcccccacatcccaactctgggagttgtggtgggaggaggcacttctgggggataggaccagacaagataacaggagctcacatggaagcagaagctgtgacaagtttagtagtcccaaaatgggttatatcccttccccctttacatcagaatcttgtgaaatgggaaaacaacagaaggaggggatcaaagatagctgatctcacatgcttcccaggcagggcagaggtgggagtcaaacccgggtgacaggtgggtggagagccctgtttgaggttgtggctgatccctctctggtattagtttttcccctgggagcaggaagccctaggaagaggggactgcagggtccccaggggatctttcctccctcccctgcatgaggcagaggcaagctgcctgccaaccccctccctcaaggaatggccttgcccaggaatgcccaccacacataccctcttctttttttctagtcaaactcttgtttattccttggcttgcctccctccttcctcccctctcaacctttacttctgatttctatttcatggaatttgggattgaagttaaactacaacagtgccgccaacaccaagtcttgcagg

SEQ ID NO: 153699 - DNA, 555 bp, Homo Sapiens
tagatgaaaggtttgtgctccttgtcctctttcagtttttgatattggtatagaaatacacaattacagaataaagaatctcagaatagattcagacaaatgggaattcaattatgataaacatgaggaataagctttcattagtgggggatgatgtaatttatatggagaaatatagatccttcacatattcaaatgttcacatgaactaaagatttaaatataaaaacttgaaactataaaaatattgagagaaaatacaggaaatataatctcaatgtgggaaaagacttcccagaagctgtaaaggaaaacaaatgtcatttttagctcatctgattgcaaaaatataatacaatacatatataatatctgggattgttgaagatgcagcaaaatggatgcacccaaacagtataataggaatgcgtattgccacatttttataaataatctgtcatctcttacagttaaaatgcaatggcccttgacgcagttattccctcttacaggaatatatcctatacgaagccctactaccttgtctctactaaa

SEQ ID NO: 153700 - DNA, 515 bp, Homo Sapiens
ccatgtgccatgttaacctgtgttaaatgctaggaatggaaaaatgagtatgttctttttcaggagagctcttagacaacaagcaaagaatgtcaatgaaatttttaagtgctcagtgtttcaggccagagtacagagggagggacactttgctgtctttcagtcctttctttttaattgtattgattcttttcctcgggtaataaataagtccatcctagttttattaagacaaagacaggtacaagccaaattgtattcatttaatcatattcgatttcaaacaaataggttctgtgtatgtgtttgcaaatcaggtgcagcctttcgggttgcttgacaagttgcttgggcagcccttagactataaagtttctacgtcattgatttaagggtgttttaaaatgcgataggctagcttccagaccatgattagtgtcactcctgagaagtagaggtttaatatttcataactgatttcattgcagatttatgtcttccatattctctttaaa

SEQ ID NO: 153701 - DNA, 192 bp, Homo Sapiens
ggccgccaactttttccagattttagatattactacgttatggccatcttgtgtctttccaggatgggctgggagggtatgggtttgacggaatggaaccatcactgatgtagggagaacaagcccaacggataaacaaaatccacagtcattcaaaaatttcacttcatgctacagttttaaatcctttcc

SEQ ID NO: 153702 - DNA, 475 bp, Homo Sapiens
aaccattgtcataaccaagtatcgatggtgataagaactaaacagaaaacacaaataacacttagccagtctccaagggggtggtttaaggttaggtggcaagcctgaagtaatttctaaagtccctcaggaaaaaaattctgaaacttgagccacaaattaagaggcagacggcttttctccttgcaaatgacctgccacacagtccgtcactgcctctgctagctctgctacccttgggccctgtccacagcccacgtgggagaccttttcacgggatctactcggatgtctgggatctggccactaccgcaggctcgagacaacccaggtgcgtatgcgccgcgcacacggaacagcacaggctgccccggggcaggggcaggggcggggccgaggccggggcggagccaggactgggaatccccgcgccgtccggccggtgggggcggtggcctgtgtgtgggcggccgca

SEQ ID NO: 153703 - DNA, 391 bp, Homo Sapiens
ggcttaccaatgctatttcaatacaccttggatttaacaatattgcagatatgtgggataggtgcatttaatggccttggcctcctgaaacaacttcatatcaatcacaattctttagaaattcttaaagaggatactttccatggactggaaaacctggaattcctgcaagcagataacaattttatcacagtgattgaaccaagtgcctttagcaggctcaacagactcaaagtgttaattttaaatgacaatgctattgagagtcttcctgcgaacgatcttccgatttgttcctttaacccatctagatcttcgtggaaatcaattacaaacattgccttatattgattttctcgaacacattagccaaatattcgatcttcagtta

SEQ ID NO: 153704 - DNA, 788 bp, Homo Sapiens
ataaagaacactaatttatagtatagtataataaaagatatagaaaataaaaagatgatcaagataaaaacttaaacctcagtaattttaggccatttaatttttatgcaaacactcatatttgctgtaagaatcactgaaaccctccttcatagtaattacaagtaaaaataaagagaagaataattgaggccttactaggacaacaaaactttgttatagctatgtactgtttgagttttctgtagtttatgcttgctaaaatttggattacatttgaataaggataaagggcatcatacctattcattcctcttagatttctaagctgtatttcagtaaattgattctcaaagagtggtataactggatcataatatccttgtttgccactcaagaaagtgttccataacttaagataacagtggtgggaaaaatcatttaagaccttgtttcatatgctttaagatacaagaaatagagataacactgggaacatatgaaactttgtcagcatcagataatagtgttgtagcgacttgaaacattttttgtctgtgattgtgccagtcactatttgtgacttggattgaaccttgatatgactttaaattcaggttgatgttttaaaattatttctgaaatatattgagcttattgccctaaattaaaactatattctgtaattttacatgagttatgtaagttttctgaagaaataaggaggaatcctttaggcacagactgtcaatctacagattacataggagatggcacaaatggaaaaa

SEQ ID NO: 153705 - DNA, 453 bp, Homo Sapiens
ctaaagaaacattttctgggtttgtccttgatgattttctttgtagttgagaaacacaatccactggaagcttttgtggcagaacaagaattttatgaacatgaactttacaaagacttccctaggagatttaaggtttggaaattaatagatcaatcagcagcttttatcaatctataatggttctctttctttggatgtttggatgaaaatgggattaatgtaaattgaacatggaatcatttattcttacaagttaaatttgtcaaactgtaaggcacataaatgacatgaaatgtaatcatttttgaatttgggaccctacagggtgcacgttgattgaagaaaaaacaagcagatgttgcttcagcataactcatagaggcaatctaaatgttcttcaatccctgacacttctgatcgtttcccaaataaaccagttcattagttaaa

SEQ ID NO: 153706 - DNA, 735 bp, Homo Sapiens
ccttaaaaaaaatcaaatgcttatagcaatgctgagaatttcataggtacttcatgggatctaacaagtgaagatttttctaaattgctttgtggagactaagtgctttaaattatgtattattaacttaacagacactttacatcatgagttagccaaacattcatgtttcaattgacaagggaaagaaagtgaagagatgcttgctgaaggcacaagtttgaatacagaaagctggaatataaaaaactattgacttccaatagttttcatttatcagattactacactattgtaaaaattatcttcttaagacataaattttgtattggttaaagatgtcctgaaaaaattctgtacctccttggctttcactgaagttttggggcagttcttcattaatttgggttatattttaagtccttaggaaaagacagaggccaatttagacagaaagagaaagacgacaaaaaggagaccagagagaaaagacagctggtactataacctcagatttttgactcaaatatcatatcactaaatttgatggcaatcacttcctaaagagaaacagattcagaaacattgcagatcaccaaggtatccttctttgctattccagaataggtctgttacaagaaacccagccaccaaccaaacaaccccaaacaaataaaaataaacataaatccccacacctcttttgacttggtctactcaactctttcatacctc

SEQ ID NO: 153707 - DNA, 583 bp, Homo Sapiens
tttccgagagacctatgcacccaggaccaggcctggggctgccagatgtgaggccttcaaaattatttattgatgcgtggagtaaagcacaacccagagaactgggcttggctctcagctgtgtgtgtatagcacagtctcaaggctagctcttgacttctaggaaggtctttagggtcagcagggcagataattacagcaaagtctctggggtcactggaggttcacagcagacacctaggacaagcttggaggtggcatcactgctcaggaaatcggctgattggctgtagctgggcctttagaacaggcaggtgactttagctgggtctctggaaacagtcaggtgaataaagctgggtctctagaaacagccagggaactgtagctgggtctctggaaataactgagaaacagtctgtccaaggagctgctcgattgtagaagggaccacctggctaacgaaccttctggatgctggttagaaacctccagtctccagctcttgtctccaggacagctgcctggctggctttctagatgaagaggaatccaacaggaagccttccaaatggctgcttca

SEQ ID NO: 153708 - DNA, 356 bp, Homo Sapiens
ttttctatacatttccatttattttaaatcaaagcagtgtcaacaaatctacattacctatagaatataaagagaagtatgtgaaactttataaacatttaagttatactttcctgacagacaaccccatacctgctatcatgtcatctacagcactcattttcagcaatacttgttcaattagtccagcttctgtgctagtctgtacattccgaacactttttcatagaatggctgtaaacatgctccctatttctgcttgacatgttacatcacagtgctctaaaagctctgtcatgcatgttatactctcagcatcctggataataaagttcatctccagttcaaattctctg

SEQ ID NO: 153709 - DNA, 226 bp, Homo Sapiens
tcccgaatcatttataattcagaattttgaataagtttacccttggtcttttaactttattttcataattgagacattgtatttgaaaaattatatcttgtcattggaaaagtaatgagaatgtcagtgatgagaaacttataactttggatttttcttaataatgaagaatatattatacgtttatggcatttctcaggcaagtactgtagtggtaagagattgg

SEQ ID NO: 153710 - DNA, 601 bp, Homo Sapiens
  misc_feature (15)..(15): n is a, c, g, or t
acaaaccactcaagnatcctgacttgaccaccgaagcaaatcctcagtatttaggactggcaagagagaaaagtggcatcctgctgctcacgctggtgtccttcctcattttcatactcttcatcatagtccagctcttcatcatgaagctgaggaaagcacatgtgatatggaagaaagaaaacgaagtttcagaacacacactagaaagttacagatcaaggtcaaataatgaagaaacatcatctgaagagaaaaatggccaatcttcccaccctatgcgttgcatgaactacatcacaaagttgtactcagaagcaaaaacaaagaggaaggaaaatgtacaacattcaaaattagaagaaaagcacatccaagtaccagagagtattgtgtagtgctctctgcaatggaacatgtgatttcagggttgccgcagtgtcaactcagtggaccagcctgggggaaggagcttaattgctgagacattaataatgacctcttagtgcaatgcaagatggtgtcctcggataatgatctgccccggagctagggcagcaacatgaggaccaagccatgcacataaagcttgtagtttaaa

SEQ ID NO: 153711 - DNA, 502 bp, Homo Sapiens
atgggcaaaggactggaatagacatttcttgaaagaagacatacaagtggccaacaggtacagtcatatggaaaaatgttcaacattattaatcatcagggaaatgcaaatcaaaactacagtgagatactatctcacacctgctagaatgattattgtcagaaaggtgaaagataacaaatgttggtgaggatgtggagaaaggggaacccttgaacattgttggtgggaatgtaaatagccatatggaaaacagtatgtagtttcctcagaagttaaaaatagaactatattatgatctggcaatcccacttctgagcatatatttaaaggaaggctatcagggactaggggaaggggcaaatgggatgttggtcaaggggtacatagtttcagttatgcaagatgagtaagttctggagatcaatgtatataagcatatcaaatcatcaaattgtgtaccttaaatatatacaatctttaattgtcaaatatcccttaa

SEQ ID NO: 153712 - DNA, 370 bp, Homo Sapiens
ttttttatcaaaatctattgtaattttaatggtagagataaaattttaacttttgctaattaggagaatacttgctttctataaattcagtatatttttcttaaacaataatcaagtaaaaacatctaaatgtacaaagcactgatagctctgatgtattctgtggaaggataacttataacagtttaagtcacaatacacttttttaaaacccaatatattcccttctttttcaaacatcagagcctgagacccagaaaagttatgataaaatcttatccaaccagatcagaactaaggaaattttttttaccaataatgtttttgtaacctcttagcagttaccaaatgctacttacatacattcaac

SEQ ID NO: 153713 - DNA, 532 bp, Homo Sapiens
  misc_feature (58)..(58): n is a, c, g, or t
agttggacctgggtctgccagggttgcctgagacatcaggaatgagaggcgctacccncgcgggaggggctgaaggtggagtagggtagaattcagggcagggtgactggcctcaggcaagagccaagatgccacctgctcgtgtgtgcccagactgctggccacccagcctcgtgggtgagcctcatttgttcttctctgcgtcctgctttctccaggaaccacggggccctccagacctctcggaacgatcgggattccacagagccccggtgccgccgtcgggggcaattgtcccactgttgccagtggaggatgcacttggagtgccttttcccaccttgccagagtggacactgtccgtgggcgctctgcggggctggctgggacagccggctgagaagcgccaccccctcccgcctagggctgtacactttgggtttataatccacatggcagggtccagacgtccagacagcagccgaagcctctaccagccttttcctgaaacccagcagatcttccacttgtt

SEQ ID NO: 153714 - DNA, 576 bp, Homo Sapiens
tttcagtttagaaaggtttcctttgcttatcccttgaggacttctgtgctgctgcttctcctcctcttgctagttaacagaacaggggcagaagtgacaccaatgctctcggccatgcctgccttgggaagcactaccgggccccactgtttagaatcttagatggaaatgtacacaaggcattgacacacgcctgcgggagtgacccagtgcttccctcccatgggactcagggtcagcgtgggaaggcagctggcagggacaggagccccgcccgcaaggtggactgagcctcacttccacacaaaaccagagtcccatctgccccagagcgctcgctctcctccccttccttccgctcaatgcagcctgacacgcctttgaccagaactgcaacatttcaaacacaaacccagatctgttgggaaatcctaattaaaaacgttgcattcccaggtggcacaatcacatcctgcctaaaacttctggcccacatcccaccacccagatgttgaaaagaaacctttctctgcttaacaccaaaacctgcacttcaaggtttctttaggggacaaa

SEQ ID NO: 153715 - DNA, 372 bp, Homo Sapiens
  misc_feature (88)..(88): n is a, c, g, or t
cataagcacatgcaatattttcaaggagaggccacatgttaaaccacaaaacaaatcacaaaatttaaaagatttaaaatccacatcnaagtacctttctgaccacaatgaaattaaacctagaaatcaataacaagaggaacttttaaagcagcacaaataaatggaaattaaataacatgattctgaatgaccaatgggtaatgaagaaattaagaaacaaaatttaaatgtcttaaaatgagtgaaaacagaaacacaacatataaaaatgtatgggatgcagcaagagcagttttaagagggaagtatttagtaataaacacctacatcaaaaacaagaaaggtctggctgggcatggtggctcacac

SEQ ID NO: 153716 - DNA, 537 bp, Homo Sapiens
  misc_feature (520)..(520): n is a, c, g, or t
tttaatattaatataatggtttttattcctttgggcatatagccagtaatgagattgctgggtcaaatagtatttctgcctctaggtctttgaggaatcaccacactgtcttccacaacggttgaactgatttacactcccagagtgtaaaaatgttcctttttgtccacaacctcaccaacatctgtggtttcttgactttttagtaatcacccttctgactggggtgaaacaatatctcactgtggttttgatttgtatttctctaataatcagtgatgttaagcttctttccatgtgtttgttggctgcatgtctgtcttcttttgagaagtgtctgttcatatttttcccactttttaatggggttgtttgtttcctgtaaatttgcttaagttcttcttagactcactctggttattagacctttgtcccatggatagattgcaaaaactttctcccattctataggctgtctgttcactctgatgatagtttcttttgctgtgcagaggctctntagtttaattagattcc

SEQ ID NO: 153717 - DNA, 347 bp, Homo Sapiens
  misc_feature (36)..(36): n is a, c, g, or t
tttttaaatttaataatgtttttattcccaatatantccaaattatcatttcaacatgtaattgatataaagaattgccaaagagactttttatagttcttttttgcatactgtcttccaaatagggtgtgtagtttatacttagagtacatcacaactccagccagccatatttcaggtgttcagtatcctcttgggcgtggtgaataccaaatcggtcagagcaggtgtatagaggaggctagacatggcgatcaaaaagtgcagcctgcaatccagatgcttgagtttgaatattggcctcatcaccttagctgtatgacctcatcttcaatgctctgggggcc

SEQ ID NO: 153718 - DNA, 512 bp, Homo Sapiens
ttttagcatctaagttctttacttaatctgcagtaagtttttggcaaaacaatgcagtggctccgaggtgttcttgccagaataaaccttgaagccccaaacttccaagagtgaagggggctacggtgacatggcaatgctgcaaagacagcgccgcagcactggagagctgagccagcctggggccgagggggacaggaatgcaccgtgtggacaccaggctgccaagaaccatgccctgccgctggagacaggagacaggcacccacgcagctgaccaaagctcgaccaggccaacggccaccgaagatgtgccacctcatgaagcgagggcactgcttcctatctcaggccttttccttcactgataaacttcaaaccaaaccaagaggagtcatttctcaggaagaatttagtgttattaattagaactctcttaagtgagagggagcctgttggctgcttttcttatcacctttggcaaccaccctcacctgtaaaatcaagatcta

SEQ ID NO: 153719 - DNA, 142 bp, Homo Sapiens
tttggttaggttgtctcctgagaaaaatatttctcaggagcagtatgatttattttgaacaatatctgattgaacagcattctagtaatgtagaaaatttatagacatctactaaattttattctagcagataatccacatt

SEQ ID NO: 153720 - DNA, 389 bp, Homo Sapiens
ccaaaccagcaaagattcaagaaagacagggagaggaatgggggaatgaacttcttgtatctcaaactcagctttctcaccatctccaccacttctacctccgcctcaatgcgtaagtgatataggaaggtggctaggtctttcttcatttggatactgttgtcttctaattgggctactgtgaagatccgtatgctgcacttttgcccacaccttgtgctgtttcagtaggaatggtagtagcataagcatccccccatcatgcacaatccaccacacatcaatgttgccctcagaaaattgctccacattgctgggaaagaaggagatgtttttagccaccagcagtgcaagatgggcagcagttgtcactcgaactgtgcctaggg

SEQ ID NO: 153721 - DNA, 641 bp, Homo Sapiens
tttttgaacatgtgttatgtgtttttatatgacattcgagaaagctgaatgaattaggatcccttctgccaaaacaagtaaaggcaagtgtgttaaaaagcaaacaaaaaacatcaccaccacaacaccaaactatatgatttgactgtaatagattctacaaatccaataaaggtagaaatgaaaagatgagaaataaaaagacttaaaaattctcactcaaatgctattaatacaataggtaccattttattggtacttatattcctgaacatggtagttattagatattattgtactatgtcttctacttgcattatctaatttaaactcgaaacggccaaaggagctattactgtccacattttacgaatgaagatattgaagttcagagaagatgaacaacttgctagtggctgaaaagcagggattgaagcccatgactctggcccagccccagtttttgcccatgcaggtgcattgtccctctgtgcaggaccagtccactcaacaccactgggttcggggctgaagtagctgttcacagatttactcacactctctggatcggttttataaacacaaattcaggattggatgagactcaagagagtgcttaatctaagcgcttgatattacag

SEQ ID NO: 153722 - DNA, 435 bp, Homo Sapiens
aagatccacctaagctgaagattcccttgagaacaagtactgtcctgcggtttcatggcctttcttccatttgtggttcttgcgaagtggaatttaaatgacatcttatcaagatcgataaatactagtttcccagtgctggaatatagaaaatggatggacaagtaaatcccactcagcacccatagtccaggcatggggacctcaacacacctgagccccaaacatcacctttcattctggacctaccatgaaagacttctgaatccaggaagagaaactgactgggcaacatgttattcaggtacaaaaagacttggactgtaactcaaaaatgatcaaataatagtgcatgcatcaagtgcaatgggaagctcttctggagagggagagaagcttccagttaaggtgacattgaagccaagtcctgtaaga

SEQ ID NO: 153723 - DNA, 567 bp, Homo Sapiens
aaagaatactgcagactgagaattttgtaattttgggtttgtctgtggtgaattgttattacattgttaaaatagaccaagttttatcaaacttttttctgtaaaaggccacatagtattttagactttttgaaccctgtggtttctgtcacaactacacaagtttgccattgtagcatgagagcagccatagataatacctaaagaattagcatggctgcgttacaatgaaactttatctatggtctgtgaaatttaaatttcatataatttttcgtgtgttgtgaaatattaatttcttttgatttttttccaataatttttaaaatgtaaaatccatttctagcttgcaagctgtttgaaaacaagccggtgggctggatttggccagtgcatctcatggtttgctgactctgtacaatgtctttattttcatatgctctgctcctttccagttcctgaaagaatctcttgggattctctagtagttgctcattttcagaagtctaattatagcgttgactccatcctcaccccttgctcaaacagaacaaaaataagtttctt

SEQ ID NO: 153724 - DNA, 503 bp, Homo Sapiens
  misc_feature (49)..(87): n is a, c, g, or t
caatcagacctatacaagtacagaaaattctaaacatgcttcagaactnnnnnnnnnnnnnnnnnnnnnnnnnnnnnnnnnnnnnnnaaccaagttgtacgtcctgagggcatacaacttaatttctacaaaaacatactttttcaaaagggctatgagagtatcaattgacaaaagcagaacaagtagcatgattagacagagaagtcttaattgcttaacacaagataacttcagcagttttaaagtgtctgtatccattttaaatgattagtccaggggtagaaaagatgaggatggtttcatcatactttgaaaaggaaactcccactggagctaaaacaaacttacagtccaggttataagaatccaagttacatagtaaattattaactattattttcataccaagttcatgcttaggcaataagaaaatcctgtttgcagcattaattacatgtaattcagtttccaggcacatagttagaggtcacacacaggca

SEQ ID NO: 153725 - DNA, 549 bp, Homo Sapiens
gcggccgccaactcctaaaggaccactgaaggagtgtgggctgcacgctgggtgcagcaggtgagtttcctcacttgggtttcactgtcagcattttaaaaaggcaaactggttttcttcctgagaagaattcattgattcacttgtggccagtaagtcatctgggccagaggttggtggggagatgataggggtgcaagtgtcatcttcaatcacagcataactgcccttgctttcttacctctcgtttagatatttcaatgcttgctcaggtcccctgcgccctccttccttctcccttcccagccatactacttatgggatgactttctctttgtaaaatgaccgttagtcttatcaaattaatcccaaagtaataccatcaatttccccctaaaataccaacaagacccctgcttgaaactgcttgtacattagagacagagaagagtccatgagaatcaacattttctgaggactccaactgtgtgccaagagagttcccctgctggtgcctcctctgtagtaaaggaaaggtaacattcctgc

SEQ ID NO: 153726 - DNA, 567 bp, Homo Sapiens
gctgaaggagcagttaaatgtttccgtgatggacgcattcagcaaggtgcattgagactcttgggtccacacgctctgcatgtatgagcgcaggagtgtgattcccagcagaaaatacatcatgatggagcacaccatcatagccagtcccaggagaatagctcggtcctctcctgccttcagtgctgtgactgttttccttttgtccaggaggtcatggtccctgattttctggtaaatatttcttttttcatcatgtctataagatgaagaggtccggccactggtccatataaacatcttagagaatgttggtccagggtctcctttccttatggtggatgtcctggaggaatggcaaaaaaacctgtctgctttccaggtattgtttagcaaatcccagacattgcgtagactttttcagtacatttctctggaagggccccacagcgcgtgctgccctctcacaccactcgccgctttgttgctctttctctcagttctttccaacatgcccctgggtctcatgagacgacccaagagcgtactgcatacttggataggatt

SEQ ID NO: 153727 - DNA, 586 bp, Homo Sapiens
aggaattaatcgatgcaaataaacttttcacagtattacttttaatgaagatttttcgaaatgtgccttttaatccagttaatgaatgaagctatatgcagtgtttcaaatgaataagtcaaaacaccatatgttttcataataccacatgaaaaatcaagattttgcaatgtaggtacacaaaattctatatgttcttctccatttgtgattttgaaactgtttaaattggtagggggacaatcgtatagtcatcttcaatagccatttagaaatggttaatattcttgcccactggtatggtatccagagaagatatggtttccatctttgagaaaataattctctgatgagacaatttgccctctgtagatattcacatacagagaattgccaaacttcataaaagggtagtatgaagtagatgccctgatttttgtgagtataagaagtacagatgatggtttggaaactgtcacatctgtctgctgatacatgttagtagatgaaaaactgtttccttctgctcagaactggaattaagccccactcatgctaataaaaatgggtttttatagtaaaaaaa

SEQ ID NO: 153728 - DNA, 355 bp, Homo Sapiens
agaacacagctctcttgttggcctcattgtattattaatgagccttgactttttcaacaaatgttgtggagtctaaacaagcagtcggtattgaatactaatatctgagaagacctaggttttcatcaccctgaaaattttggatgatagcaaactttgaatttttatatctaaaaatatacaatattatcagtttggtacactgttgaatatttgaagcaagatttcagattttagtttaggtgtaatagaattatccattctgaagtttaatttgctttacttttagctggcatgaaacacaaaacacttgatgaaaaaatttgattatctgggcaggtgcagtggctcatac

SEQ ID NO: 153729 - DNA, 564 bp, Homo Sapiens
  misc_feature (314)..(412): n is a, c, g, or t
tttccaatcctttttctgcatctattggtgtgatcttaggtttttgatacatcagcatatttttccaattttaaattgatcttcaatcccaacttggttataatgtgttgtattttacaaacattgttgaatttgattgtaaatattttgactgagactggtgcatctaaattataaataaagttgacctataatttttcttccccaagttgtctttggttttggcatcaagatcatactagccttataaaatgtactggggaggtctatttcatgagttctggagggaaacatgtataataactgaaggtttnnnnnnnnnnnnnnnnnnnnnnnnnnnnnnnnnnnnnnnnnnnnnnnnnnnnnnnnnnnnnnnnnnnnnnnnnnnnnnnnnnnnnnnnnnnnnnnnnnnattgcccttagatcaagtttattagttattttattagttgtcttgtctttcctaacatttcatttgcttgatctataaataagtgagctaaaacttcacaatatcgtagtggattcaccagcttcttcactttctgacttacataccttgaa

SEQ ID NO: 153730 - DNA, 469 bp, Homo Sapiens
  misc_feature (235)..(235): n is a, c, g, or t
ctatcacttctcagccttttggctaagatcaagtgtaatcataagtctcctagcaagcaaaagcccaggacccaatgacttcactgcttaattttactaaacacttaaagaaccaataccagtcctattaaatctgttcaaaaaaataaaggagggaggaatatttccaaactcattctataatgaggccagtattatcttgataccaaaaccaaagacacatcaaaaaaaaganaactacagaccagtatccctgataaacattgatacaaaaattctcaacaaaaatactagcataccaaatttatcatgaccaagtgggatttatctctgggatataaggatggttcatcatatgcaaaccaatcagtatgatacatcatatcaagagaattaaggacaaaaaccatatgatttcaattgatgctgaaaagcatttgatgaaattcaacatcccttcatgattaaa

SEQ ID NO: 153731 - DNA, 540 bp, Homo Sapiens
tttttgaatcttgaatattcatgtttattgtccattttttacttcagaatgactggtgtttttaggagtgggtggagcttggaaattgagaaagggaagagaacaaggcagggaccaaacagggacatggccaagacaagacagttgtacagctgactctcaggccttcgtggaaaccatatggcaggaaggctttgggggcatttaccctttgccagctagactccagtcctgcactggattcaacactggatcccatctgatggaaacttggagaagcccatgcatgactcagcgttctccagtggggagactgcccatgttgctgactctgccttgctttgcaggcagaagcaagagactgaagactttttctctagaataaataagcccaattacttgaaaatcaagtagtacaataaacctagccaaaagtggtctctcctaaatcagcttaggtatatgccttctccaggaagatctcccttatttgctgaccccacctctacaccgctaagctgggttaggcacttcatgctt

SEQ ID NO: 153732 - DNA, 495 bp, Homo Sapiens
gatgatgctatttaaacagaagtttacgaaaggaatagaaaaagaacctctattatttgcactgtaacctgagtttatactgtaaatagaataaattcacattggctttctagatttggaaaaatctatatttatacctatgcaatacaatatctcttccaatggtaacatttctaagggaagagatattgcctctttcactgtatgctttaataaatgtaacagcccatattgaggaactctttacatgtgtaaggaagaactattcaacagtgagctatttgcatttaagatagggagttacgggtgagtaatgaactcattcgaaagattctaagatcttacttagatgacatttgaaggcaggtataaggccatttggtagggatatcctagttccagtttatcggtctttgtgcattcgcgttgagttgagatgactatttgcagataaacacacttcatctgcaaatagatttttaaatcactattaaa

SEQ ID NO: 153733 - DNA, 415 bp, Homo Sapiens
agtaaaaactgttttactcacattttttgtaaattaggattacatatagaatgccacaatttctctaggtttattcaattttcaaattattcctcattttattttaaagcattaaatagaaaagctaattggttaaattttgttatataaatcagagtcatatattctgggatttgtgttaccatgcatacttttctaggatgtcaccaaattagttgtttaaaatgtttttagattactgatttatattaagatgacccacactgcaattagattatgcctagtgggaagtattatataaaaagcagaattaagctgggcacatgtgcttgtaatctcagttataagggaggctgaggtgggagaatcgagatactcagccagcctggcaatgtagcaaagactccatctcaaa

SEQ ID NO: 153734 - DNA, 576 bp, Homo Sapiens
  misc_feature (108)..(123): n is a, c, g, or t
tttttgaaatggagtttcactcttgttgcccaagattacaccaccgcactacctgtgcactacactaccagtgcaccactgcctgggtgatagtgagattctgtctcnnnnnnnnnnnnnnnngtattaagaagctgttagtgcctaatagaaatattctaacctctttgacattttttttgcatcaatgtgttttcagactagatgtaactaatgtattggatagaaaaactttttaagatcaatattgtttccttgagcttttctgcctgttcaccttggtctttgtactttcattgtgattatgctagcagatatggcagaaaaaccaaatatgaatgattagaagctttgaaattattttaaggttttggacttttccaggatgaagagactcggcacagccttgagtgcatccaggccaatcagatctttcccaggaagcagctgatccgggaggatgagaatcttcaggttcctttccttgaacttcatggaaaaagcacagagtgtgtgggccgtgccgaggatgccatcattgccctttccaattacaaacttcacatcaagttcaag

SEQ ID NO: 153735 - DNA, 487 bp, Homo Sapiens
tttccaattcacatcgtacatttatttaaaagagtagttttgctgggtgcggtggcactctagaagccaacacaatgctttagaatggtattgtggccaaattatggtgtacccaagtgtatgtaacagtgatttatgataacagctaacagggttggaggaatgtctcaagtattagtatttagagaacccaattatagaatacacattgaaatgaaaattgaataacctgtaactggatacttaccattctcctcccacctaacatggacatactttttacattataaaccatctattagattcttttaaaggtgagattatggagatagaagagcaaggaagagccagttagtgggtcagaaaatgaaacttctgtgcttaaaatggtcataagtgatgtagctgtgagcaaaaactgctcgcatttgtcactaatttcgcttctaggtgctgagatgtgtttcccattttaagtattgtttac

SEQ ID NO: 153736 - DNA, 490 bp, Homo Sapiens
tctaacccaacctaatacagagattttgtagggacccattaacaagctcctatataattataagcagctctcacagtagggttgaaagagaatataaggaaaattagaagtactgtatttttgctattggaaatgaaatattgtttcatgcacctttgaaaaaaataacaggattttacagccttctgatgattcattcaaagcatggggaatagttcatatgtttgttaaatgaaaatcttatgtagctatttgtgtgtccctcccacttcataactacaaaaacatatatatgaatttctaaacaaagtgatattttaaagatgaattgattcaatgtgtacttaccagtttactgtgtggttttatcttcaggtacagatagtttgtggtactacttgaaaatacctttaatattattttcatcagaatttgtaatatataatccagtttgggatgatgaataaaatttttctaatctcttgaaaaa

SEQ ID NO: 153737 - DNA, 590 bp, Homo Sapiens
  misc_feature (88)..(114): n is a, c, g, or t
caagttcaagaatccccagtaaaaattctccacgaggtctttttccctttttacaaaaatagagtttttcttcccctcccaccccccnnnnnnnnnnnnnnnnnnnnnnnnnnngtctttcaataaaactttatttgcaaaaacagacaatgggctgaattttgcccatgggatgtagtttgccaatccctgctctagagcctagaaggcacgctatcacttcagaactactaaacagcaaaagagacagtaaagaagttatcttcaccaattcctaccatttaatttagttccatgtaataaaaatccacaaatatttaagggaacagttggaagaacaacttgtttggtttttaaaaaataatttcagagttatatccaactgtatctgttgagaggaacgagaaagagaaaacacagtcactgatcatggtggccagatgtccagctggccaaaaacccttgtcaaaccccctgataactcaaaggagtccactaaccattggcagaaaaagattattggaaagttctcttgggactgagcccaaataatctgaggtgaggactggatgatgagaccagcccacaaa

SEQ ID NO: 153738 - DNA, 540 bp, Homo Sapiens
  misc_feature (243)..(243): n is a, c, g, or t
tgcatgccacttctttacctcctgggaatgaatgcacagggctctgttgacaaatctgcgggaagtagaaaattttaccaagctcaaggttttaaggaatgacacgttccacatcaatcacagacatggcagaatgcttgggaaacatctgttgagcctaactccaatgagactgagatggtcagtggtacacactgggtcagcaagaaggatggttcagattctggtcccagaattccctgnctgatgtggcatagccccagctctggggagtggagccccatttagggatgtgtcccccaatagcaagctattgccagagactgattggaggcagaggatagggtgtttttaaagtgcacacaaggaagattctcaattgtattacattgtgaacacaaaaatttaggactccccgtgttgattgcagcttgtgtctgaggggagcttatttaaggaagacaacctgatagtcttactccttagaaggaactttaaagaatatttggttgatcatatagtcctgataagcaggaagaa

SEQ ID NO: 153739 - DNA, 518 bp, Homo Sapiens
cagtaattattaatactttcaaatatctatgctaaggagaatgagaaatctagcaatcttgttttagaatttctaaagacaactacactaaaataagcatatgctaaaattgcagacagatcaatattctgcataaggttaaaacagtgataaaaataataaactgaataaactgaggctcagctaatcattccatccagtcctctcagaggtatgaagtttgaccaacaagctcagagcatgatgtcaaaacaatttatccttaaacattccactgcagaaactcaataaactggatactgctttattctttaattagcacctcagtctctctagctacaaaaagctccaactagctatgctaagagattgcatctcaatctcctatcagaaggtctctcagaccttcttagcttgtctcatcataatgaatattcatgggagcaggctatttatccatatgccccagatccaactttccaccccaacatttcatctgcaccttttaacaacctttg

SEQ ID NO: 153740 - DNA, 628 bp, Homo Sapiens
  misc_feature (405)..(425): n is a, c, g, or t
tttgggtttttaggaacagaaatttatgagacctttatttcacacttaaaagttcttgtggttattttcatgattctgtaatgactatttaaataacatggctgcagtgaatatgacagtaaaattataaatggcattttggtctctttgaggatatgagcttgcagactacagcatctgcccttgtttttgtcccatcctgtggacagaggacattgaaatggtcaagaaccctgcagttactgggaactacttcagacttttgtgaattgggatgtccaaagagatgatgtagtcatttagtatgggtggaaatgatgcattctgaagaggctcacctggtcctcagcgatggggccggttttgttagttttcagtctattcccaagacttcaactcaccttnnnnnnnnnnnnnnnnnnnnnttgttaatgtattcatgtggttcagaattgagaaagtattaaaaatatgcaataaaaagtctcacttccacctctggggccctccccacaggtagccagggttattagttccttctgtatcctacagatctggctagtcctttttgatttttaaataatatgattttgggccagtcgcagtggctcatgcctataatcccagc

SEQ ID NO: 153741 - DNA, 524 bp, Homo Sapiens
tttggttttgtacacgtaaaaccaagtcatctgtgattagggataatcttacttcctcctttccaatttggatgctttttatttctttttctcgtctaactgctctagctaggatttctattacaatgttgaagaaagtgatgagtgggcattcttgccttgttcctgatcttagaggaaaaacttcatttttcactaatgattatgttagctgtgagtttttcacatattacctttattatgttgagataatttccttctattcctaggttgagtgtttttatcataaaaaggtattatgttttgtcagtacttttactgaatcagttgaaatgatgtgatttttgtcctcagttgttaatattgtatatattctatatttattgattttcatatgttgagccatccttgcatcccagagataaattccacttggtcatggtgtaagatccttttaatgtcttattgaattcatcttgctagtattttgtggaagatttttacaatattcatcagagatactg

SEQ ID NO: 153742 - DNA, 721 bp, Homo Sapiens
ggaaaagcggttgagatgaaatggtatgagcagataaacattaacagaattatcttgtcttaatgatgaattctttgggtgatttaacaggatgtgagttttaaaactccattttcaggaaatacacagaaattccttatttttctattagtgatgggtatataattggaaataatattctcaaacagtaagaaacaacagaaacaggtatgaagtctttctggattgagttttgaaattaaaaaatcagtttggagccaatggggggagaaaaaacagccttcccttttacattttctggatccttgtatgtggttcagtttttgtaggtggtttaggaatttagctaagttaatttttagatatttgaaatggtggtggacagagaaattcaaaatgaattacagctttttggcaggacaatgttcatagtccacagttcagctcaaccttcccctcccaccagggaacacaggagtttctgttatcgtgaatcattgttataaaaccagtgattaagaaagtatttcttgtgagtaattctctacaaagagaattcactttaacaagccacttttactatgagttaccctaaagtcacctcgacatcattctctatactgaactctcttgtaatgataatatacagatacaatcatacctgccaagatatgcatttatttataagcttgaatgttgagaactttgaccactgagcaaa

SEQ ID NO: 153743 - DNA, 431 bp, Homo Sapiens
tttttgtcacttttaaactctttataccccccttctctctgtgttcttttttcttcccctaggtactagtttctttattttaatttcaactgcaatcttcagttacaagattagataatttgtttgtaaaattcgacatttttcttgcctgttgtttttagggtatctaatcgtgttacccctgaaaatgaaatgcacatgttaggatatatgttgttttgtctagaaggtcacaagaatgctgagattcagacaacacaggagtttgtttttgtttatttgtttgtttcacatgacattcaggctaagaaagggtttctgttccacgaggtcatttgggaacacaggtggaacagtaggttctgtcctccttgatatatggcttcctttaccatatggacagctggggcttcctttgttactgtttttca

SEQ ID NO: 153744 - DNA, 145 bp, Homo Sapiens
gtcttggccctgacagtttaaaacccagagatctagccagagggaagtgtagtctagggagaagacattgtcccaagcctggcctctcactagcttatctgccctgaaattgctgggttcaaactctggcctatctagccaaagc

SEQ ID NO: 153745 - DNA, 441 bp, Homo Sapiens
tttaggttaaacttttttattatagtaatgtatcagagtaattgaaataacttcaccatacagatatcacatgctggagcatgacaatgcaacgctaattgcacactgtattgacatttcaagcatattttctgtaacaacatttgcattcatatacaggtagtaaagcacacggggataatgtgagtcatgattcatgttagcaaatgtattgctttcaagctaatcctcatacccagaatctgcagcaaaaccattaatattcagatgttgtagcatgtacagtagttattgtatgaactgaatagctcaggaccaagaattgctgttagcctttgaaagagaaatatcagtgttatttcattacttttgtaaggtaagccttattactaatttaggaactattggtccattgattgtacctgtagataatacagcgca

SEQ ID NO: 153746 - DNA, 509 bp, Homo Sapiens
tttatgaaaaaaagttgtgaaaatttatttaggctgattttagtgtaacattgttttttataaaataattttataaaagagtccatcaagatattatatagaaaatgcacactaaggtaatatatatacacttcataaaaatagaatacatcttggcaattgcttagagtctattaccaccatgtacagtgtattgacgtgtaatatttatgttaatttgaacacatgagatttttaaaaaaccaaacctgtcccactggtatctttaaaaattgctttcattgacaggaaaataaacaaaattctggaacgtaaaagttatgaagctaactggatgaaagtttatattaaaatttttaaagttccatgccatgtacaactgacgtgagggcaaagcagtcttttttattattattatcataagtggttcagctgatctcacaaaatcactgaaaataatatccttgttctgaatgttcaatcaagataagcaccatttgggatcaaac

SEQ ID NO: 153747 - DNA, 750 bp, Homo Sapiens
  misc_feature (193)..(193): n is a, c, g, or t
  misc_feature (280)..(305): n is a, c, g, or t
tgacgactgcacctggtctcagccccatttttaaggagacttggctcaaagaggttaacttgcatgaggtcacataggaaacagagggctccagctttgggtgggaggtgtggggtgctgtttgacagccatccctgctacttaagtgggtatgtgtatccctagaatacatgcctgaaggatgcccatgganagtctttctggagaatatttgtgtttatagcaaagccgacttggaaatatgcaatggaatgcaaaatccacatggatttctaaggtnnnnnnnnnnnnnnnnnnnnnnnnnngttttgctttgggcaagctgctgctgggacggccatgggtgacttttctcagcgatgaggggcactttggtgggggcctgagggactccaggacagccagaaaaggctgtggtgtagggtgggtaatgcattaagagaggacggggcactcacgcctcacgctgagccctgcccagggtgcgatcgtggtggctctcacagccgtaggtgccctggtcggccagtatgacaccatggatgaagaggcggtggatgtgcccatcctgggccatggacaggcgagagtcgtggggcaggggctgcccacctcgcacccagcgcacggcccccgctgcacccactcggcctgtctccacttcgagacacacgtcctggccttcctctgcccgcacatcctgcaaccgccgtaggaacagcagctctgtctctcgaacatggagccggg

SEQ ID NO: 153748 - DNA, 383 bp, Homo Sapiens
tttatatttacaaattttatttttttatcccaaaaatacatataaatgaaaacctgctcttcaaatgcagggaggcctttgcctaacattgtcatatgaaaatcagtatcagctctttaacacacaatttacatatatacatacatacacactatatgtaagcagcaaatactttgctacttacacatattcctctggtggaaaactaggacactgggaaattcccctgctttccaaccttgggaaggtaaatacaacctctctcaacaactttttaaaggatgaaatgtgtagaaacatgtaaacaacacaacctgctttagatctatacatgttattagaataaagaaagaacgctgtcacatcagtgacagtttatttct

SEQ ID NO: 153749 - DNA, 610 bp, Homo Sapiens
acagtgaaagtattgaatcctggctttcttctttcatctgttaaagaaactcaaaataaggctgttgatatatcatttcaatatatcagttttgttagcaataaataacttttaaagaatttatgttaaatgtgtttaaaattgttttcaggtatttcccctaaaactgcctttgattctggtcatctgaaaacaggaagaagagccaaagaaactgacttcttatcagagttactttgccctttcatcatttctagccaacatagaaaatgtctctaaattaatcaaaatatacaccaagcatcagtaatgtgatgatagtccattttatttttactcattctgttttgaagaatgaaagtattttagaaagtctataattgaactaccaaaagttttcttgtttttaactttattttgtaacaaagttattagtaagaaccttggtaaccaaaatatctcatcaagccaacaaaataaagtgactttttaatagtaattaaaaacatcgagacaacggatgatagatcagctcacctgtttgaagaaaacatgggacaataaactgcttgctgatggcctgaaatttttaagaaagttggcggccgca

SEQ ID NO: 153750 - DNA, 629 bp, Homo Sapiens
taattctttagttccctgtctgagattcactgattggtaagaagaaagttaaagaatctcctttgactttttttgatatagatatttaaattctatgactttatagtaaggttggggtttattttctttgctttataatagaagagcattgattattctctttgctttataatagaataccatttaaataggagttccctgagtgtgtttacaatcatttgatctggctaaactattttaatgttaatgaaattttaaaattttggaggaaaaaatttaaaaactacacaggtgcacaaagaaataaaaatcacctgctttttcactatgtagagaccattgtctactatttctcaattctgtgttacatctgtatgttaataactgtaggattagggactgagtactgtttttaacctgcttttaaaaaatttacatctacattttttcccatctaaatagtgaggaagagtatcagaattttgtaggcttgtggtgatggttaaattagataatattaatgttgggtacttaacataatatatggctcttaatactctccagatttcagatatagtctgttttaccattactgcctttttatcaaacctattctcaaaaaagtgaga

SEQ ID NO: 153751 - DNA, 567 bp, Homo Sapiens
  misc_feature (340)..(416): n is a, c, g, or t
ttttagttgccaaatagcatttatttgagtacaaaatcctggcaggcaaaagcacttgcagacccgactctctgagaacttacaaacaaaaagtgaaaagctcttagttcattttgagtcagaacaataaggaaattatgaaatctaagatgtgcaggtttacttaaaagtgataatggtttatattaactgtggcccacacagggtctctctaatctaatgaaaacaggacagtcactgaaaataaggactaatcaatggccaaatgtttcttcactatgggcaaaaatgtgatttcttcatctgggctttaagagctataaataaaacacatggccgnnnnnnnnnnnnnnnnnnnnnnnnnnnnnnnnnnnnnnnnnnnnnnnnnnnnnnnnnnnnnnnnnnnnnnnnnnnnnaactctaaacaaacacaaacatcattctgacaaatgaccttaatgtaggatctctttggacacatcttcagcaagcagtcatttaataaatgccttctgataggcagaatgtagctgctcatggctctttaagtatcatatccagaatatg

SEQ ID NO: 153752 - DNA, 519 bp, Homo Sapiens
gtaagtgagccactaagcattgaaatgttttcataatttcactggattttttttcccactttttctagatgcttgaagaattctcactggtagtgcaccattgcagactccttggagaggagattgagtatttaaagagatggggaccaaattataacctaatgaacatagatattaataataatgagtaagtgtattagttcccaaggactgccatgacagagtactacaaattgggtaccttaacaggttctggaggctggaggtctgagattaaggtgtaagcgggtgttattctttctgagggctgttagaatctgtccatgccttctcccagtgtctggtggtttgctggcaatctttggcattccttggcttgtaaatgcataaccttgatctctcccttcatgttgacatggtgtctttcattgtgcatgtctgcatccacatttcccctttttataaggacactagtcatagtggattaggggcccaccttactctagtaggacttcatct

SEQ ID NO: 153753 - DNA, 145 bp, Homo Sapiens
tttaagtgttgtttcaagtcactaccttttggagtaatttcttaggtattaatagacaatgaatataagatgtaaacttaagaagaacttatgaggccaggagtggggcacacatctgtaattacagtacttccagaggagagtt

SEQ ID NO: 153754 - DNA, 175 bp, Homo Sapiens
cctttttgttgtttctaacaccaacatagactaagatgaagtacagttaacttgggttggccaagacggctaactgaatcaatcctctcatatccctgtttttcattcaaagactatgtccttatctcaaatatttggcagcttgcacataaatatgcctccttcccacccccaa

SEQ ID NO: 153755 - DNA, 475 bp, Homo Sapiens
  misc_feature (392)..(404): n is a, c, g, or t
aaaatggactaaaaacaggcattgacggctttaggatttgtttctttgacggtttatccttacccctttcctgctactggttggttaatgaggcactgagctaggaaccctgtaagtgttcaaatgttaaaattgtgttgttgtacctttaaatataaggagaagaaattgggagagatcagattaaaatattaaatacttatatggtttagaaaagtgacagcataagggagatcaaccaggtttaagggtaaatacttaggtgaccagaagatctacagtaaacttgaggacatatcccaccaagacccacaactcagctccagctgattgtttccacaataggactgaatgcctgcccagggtgacacagatttccagtttcttgggtnnnnnnnnnnnnntgtgttttgggttttttgaggttgcttttttattatgaattttttattaaagagttggcttagaaacaaaa

SEQ ID NO: 153756 - DNA, 530 bp, Homo Sapiens
gcgatttggcattcttttaacccatttttcattccattctttctcatttaatgtcttgttacataaattttaaacataattaaatgcgtgagtcaaaatgtttaagagtattctctggtatctgaactactttgcaggatcagatataatactgtggagagtaatatcagcacttttataattatgaaaatgcttttatgtcagaagatacttaagttgaagattcatgggttacaaaaaataaacatttcaaactttaaacttattttctggaatgatacttgctctgaaataatattcaaaacacttttccgaaatgcatctagccacacaggagaatgagcatgcaaggaggtagagggtcggtggtgaaaaaattatagatttcaaagttattgtttgaaataacccaaacaagcaaaacattagtatttttatcttgaaattcttggtgaattttatgttctagcccataatatattagtttattttaacacaaaagtttcttccaaaatggacatgtccaaaaa

SEQ ID NO: 153757 - DNA, 471 bp, Homo Sapiens
  misc_feature (277)..(291): n is a, c, g, or t
tttggcaattagttaattcaagttttctactttggctcagctttagtattttgctaggaacctatctgttccatccatattttcttggcttttcctggcctgcctggcacagtctgtactgagaggacgaaggccttttccatgagtgtccttggccatgagtgggtcagggcatctccttgttggcttgggtatcagtggggagtggaatgaggacacagcttcacctctaaggactcagaagccttcttgcaaagacaaggccacccctcccttnnnnnnnnnnnnnnntccaagatgtgaataaacatggagtgttcacaccatcccacggcctgcaaccccagtgagaaggccccagccgcgtttctctttggagtggcccatccatagcattctgcctaaaaaagcagggtcctggagttccagggcttctcactgcacagggcgtgggacacacctcttgtctct

SEQ ID NO: 153758 - DNA, 524 bp, Homo Sapiens
tttttattattattttgggaacatttattacattgcagtagataatccaagcatacacttatgtcattcatgatttcccttgcagaaaattagtatattagagtgtcaccccagaccttaccaaaggtattatgtaatatatggtacatgcacattttacctttctaaattgaaaaacaaaatctgaatttagaaattcatctgaccccaggaattttaagagaggattgtcctttgttaatattatggaaataaagttgtctagactccgtcttttacgttcactaaatgtcatgcataatgcttgagtctcctccagccatttcatgtatgtatctcttatttccccaaactcattaacagtttctctaaagcagcagctaacttcagcatgcatcagtgtcttttggagggcttgttcaaacacagcttcctggctccaccctcagagtttctgattcagagggtctgggggtagggcttgagaccttgcatttttgataagttcccagggaacttacctg

SEQ ID NO: 153759 - DNA, 555 bp, Homo Sapiens
ggcacgagggaaatatttcagattcccaacctgaaactgatctgtactatccaacagcatcacaagcttgtgaataccattagctggcatcatgagcatggcagccagccagaattgagctatctgatggcctctggctccaacaatgcagtcatttacgtgcacaacctgaagactgtcatagagagcagccctgagtctccagtgaccattacagagccctaccggaccctctcagggcatacggccaagattaccagtgtggcgtggagcccacatcatgatggaaggctggtatctgcttcctatgatggtacagcccaggtgtgggatgctctccgggaagagcccctgtgcaatttccgaggacatcaaggtcgactgctttgtgtggcatggtctcctttggatccagactgcatctattcaggggcagatgacttttgtgtgcacaagtggctcacttccatgcaagatcattcccggcctcctcaaggcaaaaaaagtattgaattggagaaaaaacggctctctcaacctaaggcaaagcccaaa

SEQ ID NO: 153760 - DNA, 566 bp, Homo Sapiens
  misc_feature (16)..(16): n is a, c, g, or t
tgcatgattagttganaaagaaacacctgcgcacacacatttgaacaatgtgatacagctaaggacctggacagtcagctagcaggaagaaacatttgaacgaagggtagaccacggcctaggaggtggatgaagacacccgtccgtttgcctactgaagcaagatggggctgaggcgctcaagggcctattggctgcccagaagcctttgcagcgccgcctgaatacagcgaggatgacccagggttcaccttcagcgttgaaggcaagtcctggtataagggacgcacataggtccgcgccacatcctgacactgtttccacaggaagtgcgggataggaggggggattcattaatccaggtcggaaatacaccttgttcctcgaggattttggaaggaaattccacccgcgaagtccccttttggagatgcccttttcctttcaggtacagcatccttcattatgtacccccagggtacaatgtatccggggctcgcaacgcgtccctcaacccccagcagcgcggtcaccgcggggtccccgggcgggcgggggcggccgca

SEQ ID NO: 153761 - DNA, 559 bp, Homo Sapiens
  misc_feature (425)..(517): n is a, c, g, or t
caaaaaacttaccttatgttttaaagacttgcttgtgatgctgtatgaccctctaagtctcagttttgactgcagctgcctggtgttctgtggtccacatgcctccttttgtcttaccatacccgtggggatatgtacctcatctgcacccaatttcttgttcgcatcccctggtgaccagggcttcagtcctcaggtcaaagcatccttagttgagctcaactttcccaggcttatctccaggacacctgcaccagcctatattctgccagcagggcatgaagctttctgtttccctggtccttaccaactgccaacaatctgacagatgcaaagtttgggttgttgtgatagttaccagtgtgggttcaagtcttcactccatcactcagcagctatgtgaccacataaaagcagataagccnnnnnnnnnnnnnnnnnnnnnnnnnnnnnnnnnnnnnnnnnnnnnnnnnnnnnnnnnnnnnnnnnnnnnnnnnnnnnnnnnnnnnnnnnnnnnaagtattcagtaattactactactagtagtacaggtagtact

SEQ ID NO: 153762 - DNA, 443 bp, Homo Sapiens
  misc_feature (41)..(54): n is a, c, g, or t
  misc_feature (66)..(147): n is a, c, g, or t
aaattaaccctcactaaaggataagcttgcggccgccaacnnnnnnnnnnnnnngtagagacaggnnnnnnnnnnnnnnnnnnnnnnnnnnnnnnnnnnnnnnnnnnnnnnnnnnnnnnnnnnnnnnnnnnnnnnnnnnnnnnnnnncagcacgagccaccagtacctggcctcattcattttaaatttgtgaaattttataacatgtcacagcatggaaaaacagagaaaagaaatgaaagtacctgtagatccagtgtctccatagcctagccctatcagggttatctcttacgactttatattgttttgttttggggggttccttttgaccggttgccaggactgaggaatggggatcagaatctcttgggttctcttcttcgggtcagtctcctgtttacatttttgttcacagtatttaatttctcacccttggatat

SEQ ID NO: 153763 - DNA, 462 bp, Homo Sapiens
cattcagtgctatacttgaacaaatttattttactgctataaatggaaaactacttgttttaaactattcttaattgaaggtaataaaatacaatgaaaaccagtttaaaaatcctagctaggtaacatcttatggcaaagcttctgacaccaaggcctgtccctctttgtttgcaagggaaattaaccagggttgaggacatactaactcggtatttcagttttccttccgagaatatgaagggttgaaaagagaatcctttttctctcttcagtatttaaatgcttttcattccaagtagtcagcctatctttgaaaaactcaatccctttatattgtgtaaggaattaagtatttgacaggacttgtgtgaaaacccatttcttgaatgtaagaacaccccaagggagatagatggcactgtccctacacccatgaaatatgtcatctactgagggtca

SEQ ID NO: 153764 - DNA, 164 bp, Homo Sapiens
ttttttgaacttttaaaaataagttttattgaaatatagttcacattgccataaaactcatccttttaaaacatataaaaaacatatgccagtggtttttaatatattcatgaggtttttctgaacatcgtcaataattccagagcatttatttccatcaatac

SEQ ID NO: 153765 - DNA, 600 bp, Homo Sapiens
tttttttcaaagcaaaacgaaatggtttatttaaaaacaacgcattcagtactgtgtttggaacacaaggcaatgaggcaggcacattcacacttaacaagtacatttgaggagctgtcgaagcaaatggttgcattttcttcacaaactacagtcacaatatacacgcaattgcctctgtccttgttcaccaagaaagcagaagatatttacaagttcctcagtctagcagtgctggcttctcttgggtctctgtggccctcacattctggcagcttgtttccaagggcaggcgaggctgcctgtcacaagggaggtcagtctgatttgttaaggccctcggcttcttccaaagagcaagagaacttctgacagagttgggaaagagggaagttttcaataccagtatctcagcataaaatggcactttccaaaacaaatgcatcaagtgttgagtgacggggtgagcgggcagggaatcacggtattaacaatataagaagcatttattttccctgacacatacttcttgctcatttatttaataacttacattcgctattcttctactttttgaccttttggtttcatcattactct

SEQ ID NO: 153766 - DNA, 554 bp, Homo Sapiens
ttttttttaattgtgtactaaatttcttaattcattattgaggcaataatgaagatgtttaaaccaaggacaatccaaagaacagacacatttatagatgaatagcaaagtgaacgtgtaaatggacacacagctggcctcttccacagttggggagcgtagtcaaccgaatctccacggaacagaattcacgtacctgtctaggggccgggctatttttgcattgcaatcagctacaatgttgtaaaatagcccaaaagcccggaaggcctcagagacccgatagaatcaaaaccggaaaggagggccctcatgccggtttccatcaaaacactttcccctacagtttcctcttatccaggtgcttttgtttttgtgggatagctgtcccaagttaggattgctgtgttaaacgttatgtttatttaaaatggtaagagatactgcctgagtagcttgccaaaaagtgtagtttaggatgttgtctcatcgaataataatagttaataataaagcctagaaaaatgccccataatatttcttcaacgatttga

SEQ ID NO: 153767 - DNA, 784 bp, Homo Sapiens
agaaagagcagggaggaggaggtaatgattggtcagctgctggattgatcacaggttcatattattgctaacaggcttcagatgtgcctgatcacaagaaacacttgcgcctgggcatgactgccctcagcattccttctgggcggcagatgcagtttgtcagtttgctaacaacctgctttcatgagaacagtttgctgcttacttacacagccaccagtgatttactgagttgatcacgaccctcactctttcggcctccaacaaaagacgatcaaagaatggttgtttgcagaggttatggacaagacttgatgtccaggccgagtgtccgtatgcacaggagcctcttggtggtgcagagtgaagccagaggaggaggagtgggttgtgtccatgggctgattctccctgcaccaacaggacagaatcctaaggaatccgagcatttgaaattcaaatctggtcttacaggttgttatgtatttgtctaggtaggaggctagaatgtattgaaatggggttagcctgacatatttatatatttcatatttaggcttccatttgttcctttgtcttgggtcccaaaaatatattagaggtgggcctgtctgttctcttggacacgaggacctcaacgagtttccactgttctctgaatgtttccttcctggttttctgtgtatacaataattcctagttttctgttatttacaattttacttccactttttaaagacaaaaatgtatgtttttttagtcaatattgatatagtggaccaaa

SEQ ID NO: 153768 - DNA, 478 bp, Homo Sapiens
  misc_feature (77)..(77): n is a, c, g, or t
tcatagaaagtgaccattcttttgtaaagatttacttcaaatccctgaaagcttggaggctaatgaagaagaatcanctctggttattgtttaggctttagtaagattaccaaggaagggatctcataatgctgtagtaatagtttacatgtgcgacatgagctagtgtttgtacatgtgacagaccttgtttctggattttattaaggctggttaagtagctttttgcctctgtctcttggtttctgtctctggccccttgaggctatctgaaattttaggagttggggtaccataacttgaacttttgaaatgagtcaataagcagatacgtcagccgagtatgactttaagtctagttgaattcttttaagaaaaagtcttggctagattttctgctgggcattttttatgtacatcaatcatctcatttaattatagatcaaacttgggagagagtatctctgttttactgata

SEQ ID NO: 153769 - DNA, 491 bp, Homo Sapiens
tttctgatcattttgattaaaggtgtgtcaattttactgaaattctcaaaggaccagcttttggtttcattggtttctgttggctttctgtatttcactgcaatgatttctgctctgatttttattatttccattcttctgtttactttgggctttacttgctcctctttctctggtgtcttaaggtggaagctgaggtcagtgatttgagaagtttcttctttccaatatagcacctatacaccttttctttaagttttgctttaggtgcatcccacaaattctggtatattgtcttttccttttcattccattcaaactacttcctaatttgccttttgatttcttctttaattcaagggttactaaaaagtctattatttagattcttgatatttaggggggtttctaaggatattttgatactgatttctatcaattccattgtgatcagagaacatactctgaatgatcggaatcccttggaattt

SEQ ID NO: 153770 - DNA, 269 bp, Homo Sapiens
tttttacttcaaaatccatttacttatggaaatatacatgacaattagagtgaagtcaattatatccttttttcaatcagaaaaatacttatattataaaaaagttttaattcatgtccagaataattttttaaaattcttgagtcataattttaaaacaagttgaatgttagtacaatgtttggagaaacaagtcctaggcttttgctaactggatctgatattcttatacttcattttgaaatcactaaggaaactcaagtttaggg

SEQ ID NO: 153771 - DNA, 541 bp, Homo Sapiens
  misc_feature (78)..(78): n is a, c, g, or t
ttttctaatcaagtttacagtcacacaagtgaacttacatcttcttcttgcgatggatgaactatttccacaagcctnctggataattttctcctcatttaaccactgtaaaacacattgtagaagtaatcatagcaatgagtggctcttgttcaagccccaatgtagattaacatacttggaaatatccatcacattttaagtagaatgttacaggtttctctggactttgaacacttacagaaaattaaaagtcccccaaggaaaatgccagtgaatatattgttttaacaatggccaacagtaccaacaactccccaaattacaatacccacacactaaaattctatatatcagcttcttagccatgaggtcacctccagacatttaggactaaaagggtttgtaggttagttcttaagaagagagggctgggagattaagaaggatggaatttatacattttctgtaagagcacgttcattccaagcttcagaaagattgagaagagcaatatttagcaccaagtctctgggttaag

SEQ ID NO: 153772 - DNA, 477 bp, Homo Sapiens
ttttttagtgactctacctgggggttacctgaactggcttggtctttatctcgtgttgcaccagcacacctgggaagcccctgtaggacaccctacctcgacactgcgggacacatccccacctgagtcagctttactgaacagagctctgcaaataacccctgaaataaaaatcacagaagagaacggtgtcaccttcaacagtctataagctgatgtcgcagaggtttgaaggaaagggttaaaggggaatgtcatggttcagggtcacaggcatgggattcaaatcctgattctgtcatttactgacacgtgactcggtcaagggcttcagcatcttggtgcctccgtttcttcatcccgtccgctcggccgctgctcgctgcccggccgcccctcggaggagccgcggcgctaagtagctcctcacccagcggctggaaacgcggcataaatatgtagggactgagccgtgag

SEQ ID NO: 153773 - DNA, 695 bp, Homo Sapiens
cattgcaaatttttgtcccttacacgttgctcttgcatggcatgccactcagagcggctggaagacgggctggtcgctagtagcaaatgaggcaatcgctggggagtccttctccttttcacttcccttctttctttcagggaggatggaattcggcagtaaccaggctcagtgcttcaaggtaagataatagcctcccagattagaggtggaggatgcacctcctgcagctttttcactaggcctcagagggacagcaggccccttaggctagggagccacagcagctcagccagtgccttgcccgacattcaatcactccttcttcattttcttcctcctctccattcagcttccaggagtctccttaggacaccaaacccccacccgcagcgaagttgaggtctaaagaaaaggtgggagggcgtggagcaatggtctgacttagatttgtgtgtctcagagaagacagcaactctgagagagaaaagcccttcatatgtaaacaatctagagaaagaaggggttgggatggggaagggagtgaggaatacagagacagatccagaagaaatgagataatctgaaagaagacaggtacaagaaaaagcgagatcaaaatacaatggagcacataaaagaaaggaagaagtgaaagtaagataggagataacgcagccaggtagaggataaga

SEQ ID NO: 153774 - DNA, 486 bp, Homo Sapiens
aggccatctggtttccattcccatgttttgagccaaatggcgttcttgcaaaccttaccagtcacctcttgactgctaaacacaaccatctgtactaggtccttgttatatgggttgagtcgtgtgctccaaaaagaaatgttgaagttctaacccgtagtacctcagaatgtgaccttatttgcagatgtagttagttaagatgaggtcatacttgagtatggtgggcccttaatccagtatgactgatgtccttataagagaacatgtaaagacgtggaaacacatggggagaagactcgtgtgaagggattggagttctgctggctgttacagccaaggaacacctggaatcaccagaagccaggaagaggcaatggaatctcctttcctagaggttttggagggaatgtggtcctgccaacaccttgatattggacttccagcttgcagaactctgagagaataaatttctgttgctttaaa

SEQ ID NO: 153775 - DNA, 484 bp, Homo Sapiens
atcccctgttgcttaataaagtataaaaatagtactgacctggtaatatttaataaaacgtagcattcattcacatcataaaagtagaactgaaaagttttagttaccatggcaaaatatcttcccataaaaggaatatacagaaatgagtaatgttacacaaacggtacctgcaatggttatttagtgatccaacacttaactgtgcaccacaaaccaagttttctagatatctatatataggatatatttttaatcttaaattttactcttgaaaaacatgtgcacttcaacaaactcactaaggccactcatgctatagatacctaggattgcaattaaagaatagtattatgcaataaatcctaaagcacactccttctgattatcaacagggtaaaaccagttttctgcctaaaacattcctgagatttatggacaaaagaagtactgttgaagctggagattaatccaaatgtcatat

SEQ ID NO: 153776 - DNA, 646 bp, Homo Sapiens
ttttagttttaaacaacacacatttatcatctcacagtttctatggtcaggaatccagaaacaactgagttgtttgagctcaggttttctcatgacatcacagctattcacatggttatcaggcctcaattactcaaccacatgggattctccataggcagaatgtccctacaatgtggcattcggcttccccagactcaatgatacaagagaaaaaaggacatacaagatggaagtctcagtataacctaaagtcaggagtgaccgtcatcacttctgccaggttctgttagctacacagaccaaccctggtacagcgtgggaggagttaacataagggtgtgaataccaggaagcgggtatcactggagactatctagaaggctaattaccataatacgctttttaaagtaggaaattatagacaaatatatatgatatcctagttttgttatttttttaaaggaggagtttgcgtgtgtataaacatacatacaaaaaagactgaaagtttccacactgaacacagcaagctctgtgtagtaaggttggggatggtgaacactgaagagagcgcgtttacttaattataaatttgtttgtcttttatgtaccacaatgagcctgtgttactgttatcattaga

SEQ ID NO: 153777 - DNA, 520 bp, Homo Sapiens
tttatatgcaacaggtttattcattagaaatacacaacaagggacaactaaagccaaggattcatgacaagccagtcccccaaggctcaggagagcttcccagggtagatggagtctcatctgtgcatgccccacttgtactgcagccgaaggaccccagaaagaagcccaccctgggttttatacctgggagatcgatgagtcactgggctaaagcaccaaaggacatctgagggacaggtacagagcccaggctgttccagccaactcctccttgtcagaagatattgcattcccagcaaagtctaaagttattcttgacaactacaagtgagaatggcagaagagccgcgtcagtccacagccacccagcaaccgtcctgcaagcagctggtaatctgacatcattcctgctcctgtccacacctccctgacagctctgctttgtcccctgaggtggtccagactctagatcagagaaaagtgatcctggagatgcattaaaagaaagccatattca

SEQ ID NO: 153778 - DNA, 522 bp, Homo Sapiens
aagaaacagaaaagcagcagtataatgaaagaagattggctgaagatctatccagcctgttaactacggcttagtacttccagaatcctgagtaacaacacatgacctgtgtgatgataagagcacagaacacatgaacaaccaaaagattctaagctcagcctctttccctatagtatttacagaataattttaaatttcagtttcacctccactacttcaacgattttaccctgtaaattgctgaaggtctttgtgaactgtcgaacagcaaaaacaaaaagtagaggtatctagattataaacttcaaccaaaagtagtccttgagtaattaaaatgttacttcattatgttctttttaaaagaaaattcctcagaagtccacattctttacatgccttcaccctgttgagctaaacaggtcaaaagtataataaactcaacattatttttaacttgcgttattggtggtgccaaatgagaaaagagctgtttttgccactttgggctaaaagattaaa

SEQ ID NO: 153779 - DNA, 444 bp, Homo Sapiens
aactgtttttttgttacagaaccttctgttagtattaagtgcatactttattgtagacttcacgtatgcttagggcagtaaccagaggaacgtatcacttggagccacctgtattgagtgaccctcccatgaactgagtttgaggaggggatgggaggaactgaggtgggtgcaggtcctctgatacccttagccatgtcacttcagcaccgtcaaggactgcactggtgtgacagaagccctgggctttcatttggaaaaaaattcaggagagaagcaggttttaaaaattaactcccctcctacattcagaagggagcattgtggagtcatttgctttttaaccttattttatttactttgcagcttccagtagacaggtctatccaacagtaagaccacaagcattctgaaatcctaacccaactcttgtagattgttttg

SEQ ID NO: 153780 - DNA, 692 bp, Homo Sapiens
aaccaagtactcatcccgaaattcatactcgttggtaatatgtcggatgactccgcgttgtaccagcctgtctccgtatatcacagcttcaccacggtcggaggcaaggccgacttcaattagccagctcaccaggtcacagccacagaaagttccagcagaagtctttgcaccacaccttctttctttgacaatgtttcggatacagaggtcacggtgataatggataaattgttgacaggtcatttttatttcctctgaaacaggagaatccctgttttctgctgtgtctttattgttccataggaattcaagtcttcttttgaaaggcaggatgattaaatgtttatctaatccaaagattccaaaggaaataaatccctgaccaaagttaaacacggcacagaaaaactgtaactcaacataaagtcttccaggctcttggttgaatagccaccataaacaactggaaagattagcgaacaggccaatgatgagaagtaaacacagcaacacatgtcgggtcagttgctggtctccactctgtagatactgttcttcttccgtgggcataactatgcagactctgggtagttacagcgactcacacaatgattgtttttctcaaacgaaggaatcacaggctcactggtgcttgtgtttgcaattggctctattgatgggcggccgca

SEQ ID NO: 153781 - DNA, 709 bp, Homo Sapiens
tttcttcagataatttcccttttattcctgattagggagcaaggttaggagagatacagggttatggctttgctgtaatctaattttccgactttgaaaatagaaggttttccgggctttaaagtttgctaagaggagacagaaatggcgacagacgtcacatctgaacagtgtcctctgtcctttagaacaacgacaggtcccgaggactctcggcactgcaggaaactggatggctgctctttcattaacgtggagactcagaaaatgcaacagatggggacgcaacagatacttctccctggatttccttccctgagatatgaggggttcagaaatacagaagaaaaacctgcagtaatgaaaacagcagggcaattcccaccgcggccggaggtctccgggtaggaatgcaggcgggcatggaggggaactgactccacgcgcacctgccactcacaggtgaagctcacagacggtcatgggaggtaggggagcctttccagttcccagtcagactcagctccctgaatgcagggccccgctttacaccccgactgtgactcagaattcctggtgctctgagacaagctatgagtagcttgtcattaaatacctgaggagttgaatgcatgataataaataggatattggaactggagtaccatgtcagcatctggtttgttattttccttttctctttaaaaaa

SEQ ID NO: 153782 - DNA, 285 bp, Homo Sapiens
tttgttttcaacataaaaatgtgttaactgtctgattccacctattatggagagcacttgtttgttcagctaaaaaggaactcttgtcaggcccccttggctctgctctgtttctggtttgtgcaacaggggctcagaggcccaccaagcgtgcacacccattcactgtggttacacagacagaagcaagcggatgttgtttgcttaggggacgagaagagggcgagggaaaggaaaggctgggaagggtgttgttggttctgtgggtagaagggagacttaggg

SEQ ID NO: 153783 - DNA, 482 bp, Homo Sapiens
tgaaaccctgcagacactggctgactgggagaggtggggtctgtaagttgtcccctagtttgctaagaaaatctaaaataatatttattatatgagttaggagagagagaatgggtccgcgtggcctcctctgcagatgtactggtctgaaatgaggttctgagtcactggccaggccagatgtgctcatgtcggtgtctggtgtctgttttgtggagaaaacagtatggtgtgttttaagctatttgtgttctgatgtaatatacttttagaaggttaattggtaaggttaaggtagcattaaccacaaagatgtttggtatttaaaaaatattctctagcaaatattggaatttccaaaatatatcatttgtacagggttaattttgaaataatacttgaaaatttcattataaatatatcctactttttatcttaagttgaagatgttatttactaaattgttcttgtaccattagaaa

SEQ ID NO: 153784 - DNA, 603 bp, Homo Sapiens
  misc_feature (420)..(434): n is a, c, g, or t
tttttcgcgtttctcattgtcttgagattctgggaggaagcctctggggcttcacagaggggctccctaggggtaagtgcaggaccctttgcagagctaccaggaaagagggctgatcacacctcaggcagccgggttacaatccgcataaaaatctgagtctggggagcgtgcgacagaggcaggcagattgtttaaggcgttcgataaagtcggttgatgacagacacagatgtgtgttcccagccgcatttgtgctctggtgtgtgacaggtctgtccttgcctgctttcagctcccagggcccctttgagtctgggcagcccagtcagtccccgtccatttttggccttagcttttccttccctggctacatctgggccaggatcaagtctccagcagctgtttcactccccggcnnnnnnnnnnnnnnncaggaaagtctttccctggcaggttgggctccaggtgcacagcactgctgggctggcgcaagctgagaatccacttcaggacaagaatgtcccagggctttgctcatgagttggcctttacctgttgtcaggtagaactcccttcccagaggttttttttgcttctgtt

SEQ ID NO: 153785 - DNA, 498 bp, Homo Sapiens
tttggttatgtcctttcctgtttttggtattaggctgatgctggcttcacagaatgaattagggtatgtttcttctttctctatcttgtggaatagtgtcaaaaggattggtaccaattcttctttgaatatctggtagaattctgctgtgaatctgtctggtcctggacttttttttgttgataatttttaaattaccactttaatctcactgcttattggtctgttcagggtatctaattcttcctgatttaagctacggtatttttccgggaatttacccatctcttctagattttctagtttatgtgcataaaggtgttcatagtagccttgaatgatcttttgtatttcagttgtaatatcttctgtttcatttcttagtgaggttatttggattttctctcttcttttcttagttaatcttgctaatggtttgtcagttttatttatcttttcaaagaaccagctttttgcttcatttatcttttgtatttg

SEQ ID NO: 153786 - DNA, 468 bp, Homo Sapiens
ttttgtaatagttttatttagggaattactgggaaaataaagtcattatacccaacttgaatgtaaagctatgcttgctgatttttggagaataaaatgtctgggctaaatgttggcttttaataaagtggagctgcccattgtcattacccttgggtcttaggtaacctgggacccagaagaagctagaaataaacactacctgttctcactacagcaagtttagctttactcaggaagacaatttgaccactgggaaagcattttattaaaacgtttgtttctattggcccaaaggataatgcgtgcatcagtaggcttctcagtgcttacaggtggtgttttggcaaaaactgagtggagggatttttttaactcttctacaacctagctgtattgtttgcagatttgaatgtattcacttaatatattaaatatttaatattaaatatcaattaacttaaaaaa

SEQ ID NO: 153787 - DNA, 556 bp, Homo Sapiens
cgctgaggtttgttgaaaagacgcctcccagactcttcactcacgaagtgtgttacaaaaactctcccggcaactgtcctgaccctcaccaatcacgctacagcccccattcgattgcttgcacaaagaaaacatttaacacaggtgtgatcaacctcggtcaagatgcagagtcatcaacctcggtcaagatgcaaaaaggtggccttttctgcgaaggccacgccctctgtaaatacagttactacttggtgaaaagcgctctacttcctagctcttgttggtgagagggagagcaaagaaccagggcccggcattcttacgagaggaattcaatgtcacaggcactgcctgtttgaggagaagatcagaaacggtccgactcccagaacgcagcacccagttgctttgcacgccaggccagtcctggggaaacggtgcaacgcttgtctgggcgtcgaggaggctcccttgcggtcctccctgggcccttgccagtcccaaggagttccaaccctgctttctaaccctttaaaatctggagagggcggccgca

SEQ ID NO: 153788 - DNA, 531 bp, Homo Sapiens
agataatgcaaatgcaggatgtattgtctgtgaatttcagcatcaatctgaaaaacatgttttgataatgcctgataattcatcatctcactgattacatgtctttttttctatttgtttataatcttgtgtcttcaaatgtgtggaagatgtgcagacttatttttaggtatctgagataggaagggccaatgttggcataatttgaacccacatttcggggctaatgggcggacaccacctggaaacacttacctgcaccctctgttttgcaatcacaatgattagcatcttgctgaatgatgaccccaatgtgaagatggcatttcagtgtttatttctggatctatgagttactttagcagagttattagtagtttataaagccatatttaaacttgtacacttgattgtaagatagatttgaattgtgcactatgttgactactgtatataaatgtggaaattctgtatatttggtcttaatgctatatgtatttgatgtgtaaatgataactaatggatatgaaa

SEQ ID NO: 153789 - DNA, 575 bp, Homo Sapiens
cacatttccccctttttttctttaacatcttttggagaaagcattttaaaaggaatatgtgttcctggcctcagttcgctttttcctccttttttgagctggtttcttgtcgctaggatggtttattccaggaaattcaggtctcacgttactaggaaggctcattcctaggaagtcatgttccatgttgctaggaaggctcattcctagaagtcatgtcccacaaagattaaaaaataaattgggggaggaaagagggaaaaaggaaggaaaggagatgattctgagggctccagacttaaaggagaaaagggtcctatctcttttctcttaatgttaaatgttattttgtttgtggaatgttcactctataatatatatgttgattaagtataccattatgcatgatttgcaatattgattgacctgtggagtgccttgagcctgtgtgtccaagactctgagtgctgagtgagtgggaagtactaaggagaattgctttcttggaaactccatgtagttcgtggcttttgtgattgaaatagcatcagtaaaagtctggcattgtggaaaaa

SEQ ID NO: 153790 - DNA, 533 bp, Homo Sapiens
atcatagtataagctgcatgacacaatgagcaatcagcaagccactgcagggctatttttctaagaggaggactggcatcctcgatttattttccagtgagctgccacagtgagcaaattaactaaaaagtcgaatcctcagaagttttactgccgagggctgaggagggatttctgagttgtgttttgttctgcatggccaggccagcgtgctgctctcaaggaaagggaagcttggccgaagggacgacccggaggctgcacgggctgccatggctgaaggggggacccggaggctgcacgggctgccttctgggaacggtggcatcacggatactcgagtgatcagaacaggaaccgctgtgttcagggaccacgtcttatcagctgtgaacacttggcaggacactgccgccgcctttgatcctgagcgccccggaggccttgccaacatcacccctacgtatggatgaggaagctgtggcataaggggcagttctacacggccgcgaacagaagtacagggtttcagc

SEQ ID NO: 153791 - DNA, 364 bp, Homo Sapiens
ctcctcccctagctaatgcccacccacctattgttgtcacttgggaagaaaacagacaccttcaaggagagggctcccctggtagcccccaccccaagacagagctggatgcccctcgcttccgtagggaaagcacttctcctgcaggatggcattgctctctccccttccatggcacgtagtatgtgctcagtaaatatgtgttggatgagaaactgaaggtgtccccaggcctacaccactgccatgcccgaacactatccatgctatggtgggcaccatctctctgatgacagttctgtgtccacaacccagacccctccacacaaacccagatggggctgtgccgctgttttccagatgt

SEQ ID NO: 153792 - DNA, 702 bp, Homo Sapiens
  misc_feature (642)..(642): n is a, c, g, or t
ttttgagttttaaaagtttatttaggtctataactatattttacataacaaaattcatacatacaagtaacaaaatacacaaaatataggtgaaagcaatgttaaagtgccacacaagttttaataaattaatgactttttatttgaagcagaagaggatgaaccgccctccccccaaaaagtcaaaagacttcagttatcctgggaagaaagttctagctttggagggaagacccccccaagcccttcatctctgaagggcaggatcatagaagacagtctagaaggcccatagcatagccctgacagtcacagctgacttatcacgaagggccattcaatcaacctcctcaatgatggggccggtgctggggtccccctggtgggcttgagtgctacaactgctgcccccagggacaccaggccccccatagagcctggagaagatggggcgacagatttgctccagctccctcttctgatgctcatactcctccttctctgccggctggggttgtgctccagccaggcaaggacttcctgacactttgttttgcattttgcgcctgtgctcttcgggaatctttgtccctaaaggtttcctcttgcaaagaaccttttacatggaagacatggggcctncaacgagtttttggcagccactctgtccctctggggcctattctcgagcctgtactgctc

SEQ ID NO: 153793 - DNA, 462 bp, Homo Sapiens
accttggctaccttaaaattttgggtgtggtaaaccagaatatccaggttaactatgtatacaagtaaaatcagaaagtgttacctgtgaactggcagatctgcattaggcattagtagaaatgcaaaaccttagttaagttctgccccatacctactgaagtagaatcttcattttaagaagattccctggggattcatatacacattaaggtttcagaactactgctctaatgaaggaccaactatgagcctctattgcagaataaagctcaaaaaggatttccaacagctatttcaagcgctaggaccttaggttctgtatagttgagatcttacctacaggtaaccaggatattactacagctgagtaactgccgtatgcaactaaaaaggagatggaaagtctaatcttgcctgttatttgccatttctgggggttactaaccaggaaagttaatac

SEQ ID NO: 153794 - DNA, 223 bp, Homo Sapiens
  misc_feature (99)..(109): n is a, c, g, or t
tggtgtaagttataagcaagcacctttttctcaagacactatgtgttcagctgctgagaaaccattacaagtaataagtatatttagattccgcaccgnnnnnnnnnnngccgccttgtctccaggcaggtttctaactcaccaccaagcaagggggactgcatatcctttgtgtaggaggcttctaaagatcttctcttctcttgagactttctcctttaaa

SEQ ID NO: 153795 - DNA, 391 bp, Homo Sapiens
tgataattgttttttttaaaaacttcagatatgggttggttatttctctccaatgcttttttaatggttctgatataaagtgaagggattactgttttcattctgttgccttcagtcttagttcacttgcacatggattcacataaactgaatggtgtaatgtctgggcaaccaaaactgttggcttttgagaaaactgtcaaatactttaacatcaaactgttgcaatgcaaggtatttctttgattgttcttcacaaaatatggttaaaccaagtatatatcatgtagctagcttcagtaaattgtgttaactgaggcaaatctagtctacataattcacagtaccactattttattttaatttgtaaagccttaatatagtggtaaac

SEQ ID NO: 153796 - DNA, 411 bp, Homo Sapiens
  misc_feature (341)..(360): n is a, c, g, or t
tgttccagcaattctccagtgagacttttaatcctgattttacaatattaaaagaagcctaaggaaaggcacccaaatcccaccaccccgtcacaacttccactcttgtgcagtcctgcgcctagcgagaggcgggctccacgtacatgtcatatcctcccaactgctgtacccgagcacacaccattccctgctctggcacttcactgcgtgttcatctaggctgctgctggcatgacagtgatcacttctaatggccatatactgtattccatcaagacctatcaatgcttttataactgttctctgacagcagttcagcagttagtgagttcttcagnnnnnnnnnnnnnnnnnnnnagagatggagtttacgctattgcccaggctggaagtgcatggtgtgacctc

SEQ ID NO: 153797 - DNA, 473 bp, Homo Sapiens
gccatacaggcttagttttgaatcctggctctgcattagacccataagcaaattacttacccactctgtcttcagtagactgtgtcaggaccacagacagcacatgccaggtgcccagcagccaatgctcagcacagagaggcaggcaccccgtgaagatctcctttggcagctcctgagttggggctcttttgcagtccttttttccctgagtaaacaacaaagttctaaaattcacttaaatggcctttcttgagtgactcaattacggttattaagaatttcacaattgctattttagagcaattcagattgttttccatttcagtttgagtacagttttggacactggcctaagaatttcataggtcttacagctgttagtaacagatcaatggcttgagtgtttggagggatgtaaagcagtttcctttggactgattttcttttttggcagtttagttgatttgggg

SEQ ID NO: 153798 - DNA, 588 bp, Homo Sapiens
cacatcagaacacttgattgcacttcaactctcatgctgtgtttgccccaaataatcttaaaaattgtgactatatcgaataagttcacaatacttattaggatgtggtgaaactgaattatttgaagtaggaagacccgaagttcttcgcctatgagactggtgaagtgatttgtagccaacatgctccaacccatctattaagaaaactatggcatctattaagaaaattcaaaatcttaaacagagaaatccatatttagaaaacatggccagattaaatagggggtgggttattttcttaaatacgttttgtcaatttcacgtgaaaaatgaaaacccctagttcatgttacatattacatttctgttaagatgtatgttcctctgtttctaatagaagttgtggtggtttggaagtgaaaattgaatgtgagcacaggccatgtaaaggaaggagaaagtgtaaatgttaataacaggaaaactgaatttagctctcatgaggcagtcaaggaaatcattcattgaacatgttgggaaatacttttcatttggtgaccaaatacctacaaattcatttacaaa

SEQ ID NO: 153799 - DNA, 468 bp, Homo Sapiens
aatttttgaatggccaacttagtagaaaactaacgaggaaaacccagtcagaaatttaaaagagagatcctataactgaaatagtaatagaagggccaaataagcactccacacatccctggctgactgggaaactaggcacatgtgcagggaagaccagtgagggcctggtggaaggtgaaattgaaggtggactgagaactggctataactttgaaggtgctcccaacccacacacagagcaactggcagagggtagaagccctatagactcaaggtgtttaagcacaagctctgacctaatcactgattgagcactaagctatgtagacacagggacaaccagcaggaagtgaggctaataactacaaataagagttaaaaaactgagtggagacatcgacagctacataccacagagaagatctattcggcagtataagttaggacagttacttttgatttaaa

SEQ ID NO: 153800 - DNA, 501 bp, Homo Sapiens
tgcggccgccaacttatgaaaaatatttgaaatactttgttaagtagatcttgtatgttgttagacaataaatattgttattaaacccactcttatgacataaaattgaatgtaaacccagcccaggtctataaattcaaaatcataccaattaatttgtattcttggtgttctagtaagttccagatcctaccagatcacaggtatcattttaaatcaatccaattttgtattactataggcctatttatctttagaagtttaagggaacatggatgaagcgaagcattatagaaaactgaaggcaattttcaaactagtttatgtttttgaatctcgcctcctacatcccattctggctaattggataccaggggcctagacaaggactcaggcatggctacttttaggaagctttggtttcctaaggcaaagattcatgggatggagaatgtgaagagggagagtggtgctggtgccggcgtactgtggactgactat

SEQ ID NO: 153801 - DNA, 616 bp, Homo Sapiens
  misc_feature (144)..(144): n is a, c, g, or t
  misc_feature (172)..(172): n is a, c, g, or t
  misc_feature (473)..(473): n is a, c, g, or t
  misc_feature (475)..(475): n is a, c, g, or t
  misc_feature (478)..(478): n is a, c, g, or t
  misc_feature (480)..(481): n is a, c, g, or t
  misc_feature (485)..(485): n is a, c, g, or t
  misc_feature (487)..(487): n is a, c, g, or t
  misc_feature (490)..(490): n is a, c, g, or t
  misc_feature (494)..(494): n is a, c, g, or t
  misc_feature (496)..(497): n is a, c, g, or t
  misc_feature (500)..(500): n is a, c, g, or t
  misc_feature (502)..(502): n is a, c, g, or t
ttcatttcaaattattattaaattggcctagaaaaagggggccagcacacaagataggtgctttcatattatatttgtgttcaagtgaataagtgcccaacccagcttcctttcccagcttatcttgagcggccctcttgggtncccttccaacagcccccagatagaatcncggaatctccttgacaagtgggaaaactgcttcgcccaaggccacatacaagagaggcttggggcagagagcttccccatgggggacaggaaaatcataaaaacgagcaccacagccccgcagcccattccctacagggccaggcgttgagggagcactttccacgcctcatcccgcccaggcatggtgacaaccccatgaggtcctcttagcactccagtttctctttcatatgagcaaagcgaggctcagagaggtgaatcagcattgccaagacccgcagccaggtgggggtggggcnanggncnntgtncnccntgtncnntgnanggctcatgcttccctttttaacatcatgtccagcacctggggggtggtggtgaaaggctctatagaacacatgaagatggtgacgtgagagatgtggctgccctggatggctgg

SEQ ID NO: 153802 - DNA, 467 bp, Homo Sapiens
tttctcccagacccaacccctcagacggcttttccctaaaaggaaaagtcttcataatcctcccagaaggtcaggcccgcctcacaggccactgagccacatgtgcctccggctgcttagagcccacctccttgtaggtcctcaggtgcccagcgacctcatagtaaacggtcacggatcccacggcccgggccacagccacacccgtcttggggtcgatgtggaggatgctgttggccgaggagctccaggttcctgagaggcctggagaggaagcacaggtgtcagccccctttccatagctggacactccagtcaaagcccagctcacctggatgacaggccagcttcctcgctggctgccgctacccccatgggggctcactcagcagcctcaggagacagccacgctgcctgccccagtgccggtcatgctcctgactccagccacctggagccatcagctc

SEQ ID NO: 153803 - DNA, 454 bp, Homo Sapiens
ttttaaaggttttgctattttttaatacacttcaaatgatttttctttagtcacaaggtcattagtttttagaagtttaaagtaaaccatttttttattacaattcagacatttaaaaaattctcagaactgtcagactttttcaaccagcctttaaaaatttaattaaataattttcttcaatacaagtcagatattttaagatttttcaggagcatcagacttcttcaatcagaagaacaatgttctaaaaacatgtatgagatccatgtgtgtaatcgttcttgatataacaacattcaccttttcccaagcagagaaacctttcgtacttttccttctcctttcaggtgaatgacaaactgtaataacaatattataaacaatgtgtatatagtacatagacaatatgcatatgtacattacacacaatgtattaaaatatgttatatta

SEQ ID NO: 153804 - DNA, 297 bp, Homo Sapiens
tcccgttccgccttctctctccctctctctcgcccggccagaaagacggctcccttattattcgttcggattattattgtggatttgagttcgaggtgggtttttcttccacaccagactcctggaaaatccgatcgcctgtctcctctcggcctctccttgcctccctttccgcccctcgcctaatctcgcaggcaggagcccgcagtgcctcgcgcaggacgcccggccgggcctcgggctcccggcgccgctcgccccgcgcccgtccgccgtgttccggccttcgcggccgca

SEQ ID NO: 153805 - DNA, 368 bp, Homo Sapiens
tttttttaaattcccaccattcgaatggggtgggagctttttaagccatcctttatcatatcacatcatggctgatgtgtgtgaacattgttttaggaatgtaagaattgtctttcattaactggaataaacaaaatgagagagctccataaagccttcctcaggtgggtgttcttggactgtgtgggcaactgagccagtatgcctgcggggagctcctcaaattctaatttaaaaatccatgttgttggcactgtgtccccctgtgacctggccagactgttgagacagagaaaaacaaaagggttacttgtcagttccttgctagatgtcagaacccttcactgcagacgtgattcatggtgaga

SEQ ID NO: 153806 - DNA, 140 bp, Homo Sapiens
tttttgcttcacaaatgtcaattttattgacactagtgcacaactaaatacaataattgcaaaggaagtggaacgtgtcaaacagaaatggtgacaatgagttagaactgcagttgtttcaaggtactacactattattt

SEQ ID NO: 153807 - DNA, 123 bp, Homo Sapiens
tttttttgagggcacattttcagaatctggatatacatgttaacactgcatatttagtaattactgtcttctttgttcaaaaacagttgaaaggctgcccttgcccatgatcggggctaaaaa

SEQ ID NO: 153808 - DNA, 536 bp, Homo Sapiens
ttttaggtgtttcaaagaataatatttaatgagaaaacagtgaaagtttaatgtgacatgaggcaggagttgaattactatgaggagtgtgatcactttgttgttggaaaaatgtgtattaatatgaaagactaagaatttaaatgttgttatggtaatatataaccaaacttgccatttaaaacattttatacagttttgtggcattaaacacattcacaatcaccactatttccaaaactttttcattacccaaaacaaagctctacaatcatgaggcaaaataccatcccccagccccagggaatctccagtctactttctgtctctatgaatctccctactctcgatggcttctatcggtcacatcgtacaggatttgtccttgtgcctggcttctttccctcagcagaatgtcctcgaggtccatccatgctgttcataggtcaaaatttcattactttttatggctgagtaacatcccatcgtatggatggactgaatgtgctgacgcaggcatctgctgagacatctgg

SEQ ID NO: 153809 - DNA, 583 bp, Homo Sapiens
gcgatcattaagaatagacaagacagacagctttgttctaaatgcagtactgcctgggaggtaggagttagatgtgggtgacctcctgacatggagcaattctgtggaaagggacataggccacctgactttcacaaaccttacctcgatatcccgattaagttgcttcactatggcagttatgtttctgatatgctcctccaagaaaagcctggccaagcggtcacctccccctttgttttgcattttctgcaaactgttgacaatgtcatctttaatccgaaaggcgtgctctacgagggcggcggtggttttctcatggcagaggatcctgtcttccagctgctccacgaggcttacagatgagtatggtgccatggtcagggactggctgtgtcggggcatggttctcactcgccttagatgcatattttccatatattatacctttccttggtgacacgagaaggaaatacagtgctccgttgggccattttctttttaataattcacatcggcgcggggggtgggcgcgccgcggctgcccatgtcctcgccggcgcggctgggtgcggcggccgca

SEQ ID NO: 153810 - DNA, 315 bp, Homo Sapiens
tttgtcgatcatttcctttgttgtgcagaagctttttaacttgatgtgatcctatttgtccgtttttgctttggttgcctatgcttctggagtattacttaagaaatctttgccaagctcaatgtgctggagaatttcccggtatgattttgtggttccacatacattttaggattgttttgtctatttctgtgaagaatgtcattggtattttgatagggattgcattgaatctgtagattgctttgggtagtctgggcattttaacaatatttaaacttactgtagcaatctatagagtgagaccctgtctac

SEQ ID NO: 153811 - DNA, 482 bp, Homo Sapiens
tagtgtccccacgggttaagctgcgctgtcctgcacgggggcgtcaggaggagtctctttatcagtgaggatgagaaaagagacctgggatccgaggtgcggcagagggaatgtagctaacagtttgtgataaaagactcaaacccatgcaccttttttctcttgctgaccccccttccgttcccactgcgttcctccttccttgccttcccccctcccctgtctcttgggctccgctgggcctcgctctgctccaggtgtccctgtgctgtctccctctgaggatgctcagtggagcagggaacactggaggctgtgttagctgtcagcccttctgtgtccatcttccaaaactacgtgcccttcggtgggaggttttatcatctttagaagtcagtgatggtgcagttcatgttgcttgggggtgtggagataacacatgagtagccgaccatgtttacctggaagttctgagaattaaa

SEQ ID NO: 153812 - DNA, 441 bp, Homo Sapiens
acataacagcagagaaggctgatgaaccagattcagaaagacacagggaacactttagcttctcatcttcaatgtgaataaacctcaatcattttctttgcattatttcaaagaattcatctaattagcttagtttgggtctcatccttattaaaaagttaagggaagtagctgacaatctcaccaaagctctatacaattgcagatgagttaattctctaaaagttaactgaggtgctaccactagaaaaaaagaaatggaggcaagacagataaaatcaagagatggtcatattgatgaaacagtatgtcttaaattttcctatgctccaaaatagggaaattaacagctaccttaaattagaaataactaagtgaacagtttcctcaggtacatttagtgagcatttgtagagtcctttctgatgttggagcggccgc

SEQ ID NO: 153813 - DNA, 621 bp, Homo Sapiens
aggaaatcaaatatttttattagcccttaacataagaaaaacccaaatggcaaataaatacatgaaaatgaacatactgtccaccagattggctaattggagaaggtatgcataaatgagctcccatatattgctggtaaaaaccactatggaaaactttggcattagttagtgcaactgacaatatacatattcctatatccagccattctaaatcttaaacataaatagacaagttgacagcagtatattcataaaaagaaatacaaggagaaaagatacctttatatggaaaaaacattggtaaaaacattaaagaatcagacaaaaggatatgtaacatacgtttctgtttatagttcccaaacaggcaagattattatattttgtttagggatgtatacataactgttaaagtataaagcaaagcaaagacatcattgcccacaaagttaaaataatggtcagctttgggaagggagggcgagggatatcagtgatttggtaagcagggaacttactaagttttacaaatgttctgttttttgagttgcattatgattacatgtgtctgttgtaaaataacttgttatgctgtacattttatttttgcactgtgct

SEQ ID NO: 153814 - DNA, 475 bp, Homo Sapiens
ttttgttccaagtatccctttaatatctatgtgatttcattagcattttggctaatgaaaattaaaacttctgtatacaaatgtagatgacaaataataaatcaaaagaaatgtgtaacatatagcagaaaaagtatgtatgtgcatgtgtatatgtatggcaggagcaaacaatctactggcacagagggaattacagtacagtgtgacaaataccatgacaggcacacagagaacacatagaatggatacccagtccaatttggggagtcaaaactatgatgtccaggtgggtaggttagcttgtccaactataggtaaatgaatataatcaaatttatagacacaaaaaagctgagactcagatccccagacatagttacttcatcatggttacctacttgtgaaggtcaagagtcaactggctcccttttcactggcacagctttaattaaaacataaaacacaactttgt

SEQ ID NO: 153815 - DNA, 489 bp, Homo Sapiens
  misc_feature (198)..(198): n is a, c, g, or t
aagtataggtctccgttatggccctgagagacacgtttgtctttggtgatgggctccatggagctgctcatccaagaagatgaccgggggatggaagtccaggcggggggttgcactggaagcgtcaaaggagcgccctcttggaccaccgaacagggtctaggttttccttgggccacagaggagatttagacaccntgcaggcggatcctattggacagggccgtgccaaatttgttgcgggcgaagcactgatattccccctcatattcctccggccgcccgccactgcggaagtcaatcaccagggtcccagacctcctcctcatggacacccgggggtccttggcgatgttgaagaatctgctgtttcgtgtccagtggaagctgggggcagggttcccttttgcttcacactcaatcaggatgttatcacgggggtccacgatgtgatccttcgctgactgcttggtgatggttggcggccgc

SEQ ID NO: 153816 - DNA, 549 bp, Homo Sapiens
  misc_feature (519)..(519): n is a, c, g, or t
  misc_feature (533)..(533): n is a, c, g, or t
gcataattttgtcttttttaaaaatttccataatgaacatgtaccattttataaaaggaaagataaacagtaaaatttatgtttttaaagatatttctgggatgtttaaaagttttattatgagtttcacagagccactgtctttgcatgaaactgaggtattgcaggaaactgaatctaccattttaattttattttctgttttcttattggccaaaagtgttctcctgctaactttcagttttgggggttgaggtgagatttaaagaaataagtagtatcttatataatgataaaagttaatgaatctcttccactttgaacagtgtgagggtgtgaccaaggccttcagaagcaaggctctccatcctctgctcttcacactcccaggctcatttcagtgaaggagttgcttacaggtcccttgtgttctatcttacttttgggtggctgctttccctaaatatgtctcctatgttatgagacagaataacactatggggatgagctcagccctgngataggaagcctgngattccagccccaatt

SEQ ID NO: 153817 - DNA, 465 bp, Homo Sapiens
tttattatactgaaacagtttgtgccttcagtctcttgccttggcacctgggtaatcctccacccacagccagtgtctggggctgggagccagaagacctgggatctggaacttgctgttccattaacttgtgtgacctgggcgggtcagtttctcctccatgccccagggacagttttctcatccacagctgaatgggggcggggggagggttgttcagggtccctcggggatttccccagtctgtcattcccccagtctgtcattccccctcccatggtgctctgatggtggccaaggtggtaggttttgagtcaggctccttgatagtcacctgccccacttctatctagctcccttcctcctccttatctaatctttccagacagcactgacccaccctgctacctttcccatggcgcccacctggatctcaaagtccacacagggtggaatggggcagaa

SEQ ID NO: 153818 - DNA, 127 bp, Homo Sapiens
tagcattcagatggcatttaattccatggaatgagatgagatcacccaggttagagaggcatgtgggtggattgaggccaacatttagaggaggaggaggagcagatcaatggtgtcctggcaacct

SEQ ID NO: 153819 - DNA, 432 bp, Homo Sapiens
tttcaacttttattttaggttcgggggtacatgtgcagctttgtcacatgggtaaattgcatgccactggggtttggtgtacaaatgatttcatcacccaggtagtaagcatacacctgataggtagtttttcgattctcaccctccaccctcaattaggccctggtgtctatcattcccctctttgtgtgcatgtgtactcaatgtttagctcccacttataagtgagaacatgcagtatttgattttctgttcctgtgttaatttgctcaggataatggcctctaactgcatccatgttgctgcaaagacattatttcatctattttatggctgcatagtattccatggtgcaaatgtaaaaataaagtatctttaaatagaatcacacataaaataaggttctgtatttggtaggctgatgaaaatatt

SEQ ID NO: 153820 - DNA, 318 bp, Homo Sapiens
tttttgatgttgtcaatatttattataagcacacttataatcttaaatttgcactttatcctagcctccgtggtgcctattgtatttatgggtgagtagttggaggtgacagaatataatctttcagttgcatttaaagttttatgtttcttaaagttacagaaagttcgttcccaggactggggctaatggctcttctcctgctccttacagataatgtggcacttccattgcctagtatggaaccaatatatcacatgaatgtgcacttacctagaactagtcttatatcaggaatgaggatccagggatccttgc

SEQ ID NO: 153821 - DNA, 638 bp, Homo Sapiens
  misc_feature (552)..(552): n is a, c, g, or t
ttgaacattctgtacatgttttcatagagtatatactttctgctgtctagcttctttagctttacgtagaatgtgagggataggtatgattacattagtcgctcattttcttttattgccgatagtattccattgtataaatgtacagagtttgctcatcttttgtactgttgataaacatttgggggctaccaacttttttgttcacaagtctttaactgaatgtctttctcgtgggtaaacacttaggagtaggaatactaggacctagagtgttaactatattggaaattattcaaagggtttagcattttgcagtcctgccaacaatgtatgaaggttccacgttgctctgcctcctcctcattatgccatattgtcattcttctcatttttatccattttcctgagaattaatgatgctgagcatctctctatggttagcaccctatggttagcatatcttgattgtgaagtgtacttttcatgatagttttctctcatgtttaattagagtgtctgattttatttattgatttgtgtagattgttnttattctgatattagtccctttttggatatatgtattgcaagtaattttctcccaatctgtagcatgtgctttcactttcttaata

SEQ ID NO: 153822 - DNA, 437 bp, Homo Sapiens
gaaacccaagacattacctgttgccctaagcctagttactagagcaaacatctattttgtagggagttgaaggcctgtggatcatgaccaactcagcattccactggaggctatatgatcaaacagcaaactgtttatcatgaatgcaggatgtgggcaaacttgcgactgcacctgccaccagaaggtttgctgggggcaatcactccctgacgccgtgctccttgaggttatctgttggaacattctggagactactgttcagagaatgcggtcgtgcagcctgcaccaagtcaagcagctgactgacaacccacctctttctccctatctcctttactcaataaatacgaatggagctagaagtacagggcccttgttcactagaagcaaggagccccctgatcccttctttcaaatatactcttttgtcttta

SEQ ID NO: 153823 - DNA, 376 bp, Homo Sapiens
  misc_feature (249)..(249): n is a, c, g, or t
  misc_feature (294)..(294): n is a, c, g, or t
  misc_feature (336)..(336): n is a, c, g, or t
ttttgttatacaaaaggccatttttaactaatgatctaatctctgatccagaaacatccagtttagtaaaatacctagttaacctgggattatttcagcaggctttacaagagtttggaactcaaaagctccccacaccaggaactaaccaccaacccaaaatcaggccaacagacaaggtacctgttaaaacatagaaggagggatcacctgctcaataattacaatcaaagtggaagggaccatttntcagtactggccatgccttctggggtcaaaagtactaggattagnatagttggatacatctttcttggtgtcaggcctgtgttatgnttggaagtcccagaccgggaaacctgaagctcccatcagc

SEQ ID NO: 153824 - DNA, 635 bp, Homo Sapiens
tgtgggatgctgacgatggtcgacggggacagggcgctggcgttggagaggctgccctgagaccccacggagtttccactggccccccacggagatggggcttgggcggctttagatgagttcttgaaatagtcgattagtgcttttgaatactttacagcgtggtcccttttgagtcgaaacatccgccagtacaggagggccaggcatcggtaacataatgcagccagttgtttgtcttctggtgtggcattggggcctgagtgggtttttagtctcatagcatacctgatgagctctactgtttctgtttacatcgtataaggagatttggattccatggggccttgttccattgcatttccacactcgataaacgacaatgctgcttcagcatagttcaaagcctttccaaacttttccaccattgcatctgctttatgcttcattcgtttagcttcttgcataaaataatcggcactgcgaggcatatcatcgaagacaagtttctgcctcttgcagtccctgtggccgttggagcctggagaccacggcttcgtctgcggccgtgacttgtggaggggaatgttttcagaattgttgtgagctgctgtcgtgaggtctcccgcgtgagg

SEQ ID NO: 153825 - DNA, 636 bp, Homo Sapiens
aaggaaaaagagaatttattgtcgtcgatttacagaaaacagaatcaaaggccgtgccgtgctgggccctctggcacccggcttcacaagcacccaggcctgccaggaggagcaagtccggggccgaagtgccaaggggcagggtgtacagcagtgatggggtgggcagagagaggataggagggcacaactccagctctgaagaagagaaagaggagattggctgaggctgggcaagggtgggaggcgtccccctgggtggtgtcaggcagcctccttgtttgaaagcagtggataggcaggcagacattgggcaccaaggtggtaatcagcagaccagatgcccagcaactcctaggctcagtcatcagcctcattttactgcaagagagaatgaggcccctggctccaagctggtagagtgcagaagccacaaaagcacctaggagcgagctggttaagacggagaatgcggccagccccacccaatacccccagccccacccctggcctccccaggtcctcctgtatttgtgcaggctatgccactggcctcaatgccagctcctgagcatcctttaggatacagctccctcctccaggcagccttcctggtctaccctcaggcacagaaca

SEQ ID NO: 153826 - DNA, 383 bp, Homo Sapiens
taaccacatttgccaacatttgcaataaagtgaaattagttacaaaagaagtgtgaaaagggaattaggctgagccacagaaaattgccaaaattcaatccttttagaactccataacagccatttcctatgggtccaccttaatttttaaggaaggttagggatgaaaccattaatcttagttgtgggagggctgcagggggagtcctggaacgtcagaaagaagttgcagcatttgagcaatgcgccaaggaacttagcagtctcagccaactggccggtgctgctgaagccagagacagtgggtgcagtgagtagtgagttgtaggtggagaagtgaaatcaagtgagtgtaggcttttatgatgtttgaaagtgaaggg

SEQ ID NO: 153827 - DNA, 627 bp, Homo Sapiens
aaccgtaccataatttaatttattttggccttggcaaagctcccagcttgcttagcagtgtcctgtggatacctgaatttggaaacaatcttgaaaatgtgtatactttgagagagctgtaggtagaaattgcagtgaagaatgagacttttgcgctccttgctgctcggctgcgccccctcgtggctggatgtgatgtgctgtcttccagaatttaaagagttccaacttgaattgggcgtgcttgtttacatggagcactaatagctttcttcctgtctgtaaataagccagagacggtctctccctgttggaatttttgcccactcccctgggccagacgcagttgttttggggtctcaggtttgcttttgctgtttggatgccccagcaccttcccgcactgtgctggaggggacagcccacatcccgtgcctgctgcagtgtcaggacacgcgaggcccggctgaggacgcgcctgtttctcttagcttcctttctgattctgccagtatcatccaccactgcaaccttttcagggcagcctctttgttttcgctggtgtgttttattgttccttgggggaggagggtgttaaaagcctggacatgatcagatttcttagtc

SEQ ID NO: 153828 - DNA, 798 bp, Homo Sapiens
gggctacgactcttactattttatatatgaaatatattatttcctcaagaaggatgctgggtgcttagcgggataacagatttctgttttgcttcttatttgtaggtgtccatacagtagccaactgctttgtagttcctatggcaactggtatgagtctaactctgtgtttcttaacattacgacacaaaagaccaaaggcaaagtatattatatggccacgaatagaccagaagtcctgctttaaatccatgatcactgcaggttttgagcctgtggtgatagaaaatgttttggaaggtgacgagctgcgtacagacctgaaagcagtggaggctaaagtccaggaacttgggcctgattgcattctgtgtattcattctactacatcctgttttgctccaagggtgcctgataggtaaatgatttgtgaatattgtcctttagctgtttatcagtcttttaaataaaatatactaattctcaaatatgcttaaataacacttcacaataaataggtgaatggtctgttctaagagaatagattgaccttgtggagaaatagcattaacagcttgggaaaccaaccatttgaaatataacaaggaaaaacaattagtacagggtggggagctccctttatcacctgagtcgatgcagaccgtctctgttttcttgctctttgtcctgtttctgatctcttagcatgttttttcttattatttaatagaagtttcttttctaagctaaatgttgggtttacttcttttcattgctatcagtattaataaattaaaa

SEQ ID NO: 153829 - DNA, 598 bp, Homo Sapiens
caaaacaaaaaattctatttgccattatggcccaatgtgatgagtatgcagggatctgagtgcctaaactcgctgtggtggcacctcaacacagttgactcagagctgtctcctgctaacagtatatactaaaaacatgttaaatgatggacttccaatagtgtccagcaggttgagactctggtttctttcttcgtttgatattttctgcttcccaaatttcagagattaaaaaatacaaatggaatttgccactatttttatatgtaaagactttttttcccattataagcagaacaaatacaacgtataaatccacttaaaatagtatatttataaccacattcctcattatactacacaacaaattattttatctatactatatatgtgatatattaagctgaagtttatattctttcacctgaagtgctcttctaaaccagtctttaaatttttcattcaaaaatgcccatttcagaatggaagttagtgtaaactctatggcaatttttcaaagaactaaaaatagaattaccatttgatccagcaattccactattgggtatctaaccaaagggaaaggaattattatatt

SEQ ID NO: 153830 - DNA, 152 bp, Homo Sapiens
ttttgccttttagcacaaatttattgagtattttgctgggcgctgtgaaagatgaatgacaatcactgagacattaatgtatcctctaagaatatataagcagaataatttttgttattccttgcagggtcacacatcttacttatccaaag

SEQ ID NO: 153831 - DNA, 273 bp, Homo Sapiens
gaggtagatactatttattatttctcattttacaggtgagaaatttgaggcttggagatgaaaaataactggcttaaagatacataggtaggaagtggcagtacaagactttgaaccatgtctgaccacaatgcaatacagtttgtcttctgttctaaagcattcttattaatgtcaacccattcttaaatccttcattacacaaaaaaaatcaagtttttctctttccctctcaatggcatttaccatttgtcttgaattttggatctaatg

SEQ ID NO: 153832 - DNA, 455 bp, Homo Sapiens
  misc_feature (268)..(299): n is a, c, g, or t
tttttaaatcaaaagaatacaagctgggctcaatgactcacacctgtaagcccaacagtttgggaagaccaggcaggaggattgcttgagaacaggagttcagaatcagcctgggcaacatggcgagaccctatgtctacaaaaattttaaaatatgccagatctggtggcatgtgcccatagtcctagctactcgggaggctaaggcagcaggattgtttgttagaaggagttcgaggctgcagtcaaacttctggtcgaaatcctnnnnnnnnnnnnnnnnnnnnnnnnnnnnnnnngagtaaaaccccatctttaaaaaaatattaagaaataaaaataatatgtgaaacgttagaatatgttgaatctggtaaggataagcaattatttcttgaaactctacatatatacatgagtgttggtaaatacctgactgtatcatcagctctaga

SEQ ID NO: 153833 - DNA, 539 bp, Homo Sapiens
ataatagtgtccaggttacaggtcagggttttacttttttcaaggctgtatgaatctgcttcacttcttgagattttaagattcttgaaaaatctttcagattgacttattttctgtatttcttgtttccataatgtttgccaaattgatagtaggtaccattgacttctccagtatagtaatagattgatttcaggatgacattatcatgtaaaatctgcccaatttcaaagtcctcatccaggatagcatcttctcgtggttccagcttcccactcataggaatctcaggaggactaaagaagttgaagaatgatgcattaggaaccactcttggctggatttcaatttctccagtagcagttgtgcgactctgggtagttgtcacagtaacatcttttcctcttctccagtctatcttgcagcctttgcaatcttcaatttcccatccccaagaaaagaagggatcattgtgatctggttttgcctttattatatatgtcttcaccagcacctcatttctgaagtatgggttgggt

SEQ ID NO: 153834 - DNA, 447 bp, Homo Sapiens
ttttttccacggatatcttgtttctagtttttattgcaggatattcagttttttgctataatctccataggctcagaattgtcccttcgaagatactacaaagacaagttttttaacttgttgaatcaaaacataggtttaactcagtgagacgaatccacatattgcaaagcatttacacagctgttttgtttctagtttttattgggggatattcatttttttgctattggcctcaatgggctcagaaatgtctctttgcagattctacaaaaagaaggtttcaacttgttgaattaaaacaaagttttaactctgcaagataaatttgtacatcacaaaattatttcacagagagctggtttctgctttttattgcaagagattcacttcacaataggcctcaacgggctcagaaatgttttttcatagattctacaaaaagag

SEQ ID NO: 153835 - DNA, 421 bp, Homo Sapiens
gatactttatgcagaacaccagctttccctctgtgattccagagttttggtatgtgctaggcagagggtgcctacatgaccagcatgtcatggtaaaaaccttgagtactgggtacctctaatgagcttccctgattggtgacattttatacgtattgcacaatttggcagtggaagaatgaagtgtgttctgtgtgattccactgggagaggcctcttggacatcaccacctggtttcctatggaatttgtcccatgtaattcttccctttgctgattttgcttctgttgtactaaatcagaactgttaagtataactatacgtagagtcccttgagtctctcaggaatcattgaacctgcaggtggtcttggaaatccagcgctagtgccacactgggtagagttaagtcactaatcat

SEQ ID NO: 153836 - DNA, 435 bp, Homo Sapiens
tttcagtatttaatgttattttttaatgtgagtctttgcaaaaagcctcattataataaagtacccaaagcacgcatcagctcagatacaaggtatgaaatcaagccacaacagaaaaggaaccagtcaacaattactaggctcataacacatcagaggctcttagaacacttaagaaattagctgaaattactgcagctcatggaggatgactgagagcttccaaggctgataaaggctaatgtaatggtttggaggtaatggtgctttgtttgggcggggggtgtgtgaagcaaattatctctgctgcaccctggttcccaggatgccaatagaagtagagacagattggctcattaggaaaggctctttactgcaaaaatagtgttggctctggagccaggctcccctgcctcttgctgccatagttggggc

SEQ ID NO: 153837 - DNA, 505 bp, Homo Sapiens
  misc_feature (485)..(485): n is a, c, g, or t
gtgatttctgtcttttttgtttgttaagtttaaaaaatttatggcaatttttaaatgtacataatattagagaaacaatataacaaccccctccatatatctatcagtcagcattttgtatgcatgtatccgtatgtgcatcagccaacattttgccctttttgttacctttcacactccttttacccctgtagcatgttaaaagaagtctcagacatcctatcatgtcacttatacttcttcagtagtatctctgacagttaagaacttattttaaatataactccatttccaaatctatgaaaattgacgacaattttattgtatcatttgatagccactttatgttcaacttttcctgattgtcacagcaatgtccttttttaataggtacgtttttccagttagcatctatggtgtcatttagcttgttcttccatcatccttattttctgtaaactgaaaattagagtcgagtttaactntaatgttatttattattatt

SEQ ID NO: 153838 - DNA, 466 bp, Homo Sapiens
gaggtgcattgcatatgctgttttacttcatcctcacagtgctcccaagccattccccttctgcaggtaactatgtgaaggcaaagagaacataatttcttgatgactgcagagctagtaactggtaaatctgacatgaccctagtctgtttgagttcaaagccctagctctttcctttgtatagcacgagagcctcagagacattgcttgactctgtccctaccacctcatttccaatctttgcctcagagggcctaacctcgttttacatcatcagaaccagagctctgaatttgaccattgcccagtgtttcctcaaagagatgtttaataggcttttgagggctagcctgagaatgtaggcactattaactctcatttctataggaagatatatgtcacattccaattaagtggcttacaaattgagtatgtaacacattcaaatgcatatgacatatatgt

SEQ ID NO: 153839 - DNA, 502 bp, Homo Sapiens
aggcttttatcctcacattggttccattttgaattctagccttatttgtcagtatcagtctgtagttcagatcttccatgattatttctccacaggatgactggtctcatccatttaatattgattcttcttagcgttctactcatttgacattttctgaccttgccttaaaattctggatatatcctgttttacttccttaggccattctaaagtcctacagtatccagatgagaaacgagagaaagcataagctttggagtccaaagatcaggattttagcgtcagcactccacaccttagctatacaatctcaaagcaggtaagcttaaatccctgtttgttgttttgttttttaatctataaaatgaaggttataataatgctagcccaacctgccaaactatcattgtgaggatcaaacattatactttcaccctttgaaaaatataaaattaccctctcagtcagaattcagacaaggcatagcaaagatggctta

SEQ ID NO: 153840 - DNA, 479 bp, Homo Sapiens
ttggaaaacatggtaatatttattcatgataataaacacgtttttaatgaaagccatagatgtccaaacacaaactgaatcatgacaacccaatggtcttttttacaaaaaccatgacatatgtcccattaatttgctaaatgatatgaatgcagagaaaggatgaatcaaaaccactaaaatccttttaaacacaccatctagtttagatgtcaactctgaaaatggcattcaaaaatggtccctctcttttaaatttatctgctgagtttttgttacggtacctttaccaatttcttaaaagctttaattgttatcattcatttcaactcaaaactgctagcaatttggtttgactttccataaaggactaaattctgtcacattaatacatatgtaggtagttatacaatgtcatttgtaagtatatgggtctgaaagggccattataaatgttatataaaccatatagtatatag

SEQ ID NO: 153841 - DNA, 565 bp, Homo Sapiens
tggaaaagtttaaacatattttttgatgagggatacagaagagagggtacagtcctgattcctaagtggacgcgttactcctttctgtaaactctcattaactggcagctttaaatagatttatatatgagtagacttgattaatatttaatcacttacacatgggaaacagtttcctgcatttgattcactcattcacccgctagtacataactcgtacttactgccttcgggtaccctgctctttaacctcttctgggcctcagaacccctttgaaaatgtgatgaaaaccaataactcccttgcccaaataacaatttgcatcaagtgttagaaggttagtagagtcccagaagacaacccttagatctggaggtaaatggttatcaggttaagaagcatttctaattgtgttatcttattttgttttttaatcaacaggcttttaattctgttagcataagatcatgtacaccctcttagctcaggttagatgagtgtttaacgtttaactgctgactggtagaaatcaccctaacatcaactgtataagccaggatattg

SEQ ID NO: 153842 - DNA, 477 bp, Homo Sapiens
ttgcctttatattattttaatacctgtccggggaaaatgcaacactctgacaacagccttagaaatagcatcccatctggattgttaagaccacagcaactggcacattcgaccaagttcttagggtgaagtctcagtaggccagtccaggtgtaatctcactctggtgggttcagagcgggaagcaagatgaaaaataaggagcagatctgaataataaatcactgttactgggcaccataacacagacgagaaattttccccatcctcagcgggctcaccctcctgcacaaggaatgaactacaggacatgatctcaaacacctacagatgcatcttgcaggaagcgtgcacccttcaaggaaagatcctcttctggactcgctatgcagctcagctgaaatggatcaggtctcaaacctggtaaagatgatctttccccttgattcttgggtggggagtgggaggtgagacgga

SEQ ID NO: 153843 - DNA, 875 bp, Homo Sapiens
gaaaaaaatacattttatcatccaaggaaatgttatcagtaatattaatagctctatctccaaattaaatattgatatctttattacccatcttaaagaaattttttaaaatcctgagactcagaaaattaagtcatttaaggtttcacaccttgttactgttaacctagaccatgttacaaagtagttgatttctagtctaatttaacttttgctattatatctcccccaccaaaaaccagagaggcatgctgctttcattagtgatccacagatattcttccccaccagcttccctggatcccactcatccccaaatactctgatctcacaggttagagatctgtcactgggtgcaaaagaacaagaaaaggcactgtaaggtaaacattgatgatttcttgaaactaccagtaagtagcttatattttctgactttctttgtcttactgttgtgaaatcaactgatctagttttaaatgtaatgaaaagcaaagcaatagattctcccctagagcctgcagatggaatgcagccttgttaacatctttgatttaagcttcacagacttctgatttccaaaactgtaagataataagcttctgttgttttaagccacaaaattagtaataatttgttatagcagcaataggaaacaagtacaaaatctttattagttaatactatgaatagttattcataccagctaagagatatttggaatttattatggatcactttattatggtcactgtagtaattcacctgttgttcataaaaaccttataaacatttagtattgttttatggcaattgttattttaaacaatattatcaatgtatgttagtgttatcattattaaagttattattgt

SEQ ID NO: 153844 - DNA, 474 bp, Homo Sapiens
  misc_feature (123)..(123): n is a, c, g, or t
  misc_feature (172)..(172): n is a, c, g, or t
aattttagtacctatattaagtgtttttaatttttgtataatatttagtacctgattagcgtgtatgcaaaaaagtaatttgcttcgtttgttgaattagaaggccagctgcccttactaaanctacccacatttgctttgctcattctcttggctttgcagatagaaaatntatatcatctgcatatagtgacttataatgattattttacttctccattttactacttgtaattcttttttggtatcagttgtataatgaaatggtttgaacattcaaagtgttaagtaatcctgatcgtaactgctgtctttgcaaatggagtgttttctagtgttttaacaataaacgtaatactgactctagctttgagataaattcttttaaaaatattattcagggagaatatttgtttcctatcttcctgtgtatagtattgtaataaaatctctgttaaaaaccatcaaaaaaaa

SEQ ID NO: 153845 - DNA, 586 bp, Homo Sapiens
taggtgactggacctcttttagtttcccctaccaatttcatacataaatatgtaatattgaggaatactttggcaacatagaagaactcggtgtgtggtaacctaaacagataacggttgccaacaaggagtcaatgctgttagtattatgtggaattacctttggcaataagtagatttaggtgcttttgaactctagtgcatggcaaatccaaattctagatgctagataatgtatctgattattctacatccaagtgagaataatcaaatggcaaactcattctttaagctggtatttgccataagtaggaatcagacttgtagtttgaagctttaggcacgttttagtgatgtgtaggactttgacctatatttggtgtggcttctatcctatgaaaagggaattgagtgttttgactcgtcgtttcccacctgttgggcctgtctgtaggtataccttctaaaatcaactgacatctccattttgctacagagtagcaaaaatcaacaatttttaagcatactaatggtgtgcatttgatctgaaccttcttgatgctatcatgtttcagctgtgaatata

SEQ ID NO: 153846 - DNA, 553 bp, Homo Sapiens
gtatctattgacacaagcccacacatatctaatattctgtgtcactttattacgaacagctccaagacagctcacacaatgttgcactacagtcatgccatatttgatgatgagcttcattagatcttcctcaatagtggcaagaaaagtttcacttggatgctccatcagtggtacaactagctctaggatttttgcaacattgcagataaccatgaaatcattttgcgtactacatttagtggtaaggtatggttgcatagtcattgcatgtttaaccatgagctggggtcttattttgctgaataagaacaaagtggttatgcaagctaccaatcttccagaattcacacctttattgtcagagtcagctagagattcctcatatttaagaatgtgctcaactaggttatcaacaagttgagtacaagctttcttcacaggtttatatgaggaatcctcttcggacttcaacaagttttgaagcagttgctcaaaccagtcatatccagtatctctgcatgctgcaaccacatcggtaatgaataaaatt

SEQ ID NO: 153847 - DNA, 521 bp, Homo Sapiens
  misc_feature (30)..(30): n is a, c, g, or t
  misc_feature (236)..(259): n is a, c, g, or t
tactacccacccagactaatatcattttanaattacattctatgaaaggtaacataacttgtcgaaaccagtgtaattttacctggagagactcagtggattggctacctgaggccaccatttctttttccatcctgttataacagagcattcagctaattatctttaccttagagctttcaggaagcagaagatttctcagtggatgcagggtactcagttactcctatttagcnnnnnnnnnnnnnnnnnnnnnnnncggtagcattgggtgagcacataagccatgtgaaaccagaatgctcagaaaagaaacctgatttgtcaaaatctattgggataaaagactttttagaaaaggaacatccaatgctggccaaggatgtgaagaaagaggcctttccgtacattgctgatggagttacatatggataaaatttttctggagagcaacttggcaaagcacatgaaaggtgctttaaaaactatgcataataccctttccctcagcaatctgtcct

SEQ ID NO: 153848 - DNA, 548 bp, Homo Sapiens
tttgaatttttgaacagctttattgagatagaattcacatacaatccaccctttttaacgtgtgtacaatggcttttagtatattcagagttgtataaccattactatcaaattttagaacattctattgcccccacacaaaacccatcatcagtcactccctgtttcccctcaccctcaggcaaccattcgtctagtttctgtctctgtggatttgcctgttctggacatttcataaaaataggatcatcaactatgtgggtttttttgtgactgtcttctttcacttgctgtaatgttttttaaattcatccatgttatatagcatgtatcagtacttcactccttttaatgacagagtaatattccactgtatggatataccacaatttgttgatccactcatttgttaatgggcattttggttatttttattttttggctattatgaatagtgctatgaatatgcatacataagcttttgtgtggatgtatgttttcattctctcacatatgtatacctagaagtgggattgctgggtcatagg

SEQ ID NO: 153849 - DNA, 569 bp, Homo Sapiens
  misc_feature (149)..(257): n is a, c, g, or t
tggaagtcagttcttttattaaggaatgccaggacattatcattcttgtaaatagtattattcagtgttacttccgcctttgcccggcacctcagaaccacagagtctccttcaaacacagaaagtggagcttgcaggatcagcgaagnnnnnnnnnnnnnnnnnnnnnnnnnnnnnnnnnnnnnnnnnnnnnnnnnnnnnnnnnnnnnnnnnnnnnnnnnnnnnnnnnnnnnnnnnnnnnnnnnnnnnnnnnnnnngtgcacagggctactgagaggggagccctgggcctggcatctgtactctccagattcctgaacctcaaggatattgtctggggtttctcttagtatttctttcccaaggtaccgatggtaccattttgttttctgtggtgagtagaagcgaaatcccttgcaagtgagggtcactctctctccttggaagactgtggtccatggaggctggaggaaaataatgggcctgggtgtccttgcaaactgtccactgacaggagccaggaccagtaatatcacccacagcagcatgaagacctggaccaccaaggg

SEQ ID NO: 153850 - DNA, 515 bp, Homo Sapiens
gtccttgggcatatcacttaagttctctgaatcttctcttactcatctgttaaatggccatatttcacatgagtgtaaaatggagtaaattaggtaagtcctataaagccctgagcaaaaattctcaatcaatattagtgttgaattaagtttcacttaaagctgcctccttgcatattttaagttcaccctgacagtttttctgtacatagtaaactataacctaactggatgtgtaaacagactgtaacctactcctgtgccactcacagttttggccaatcaaaggtggccaaccattcaaaccatgttaaaataaggcaaatgctgggctgtaaccaacacttccatttctgtacctcacttctgttttttataggtcattttcctttttctgtccataaatcttctaccaggcagctgcaccggagtctctctgaggccactctggctcggaagtctgcctgattggtgaataattctttgctcaattaaactctactaaatttaaaaaa

SEQ ID NO: 153851 - DNA, 458 bp, Homo Sapiens
taaccatcctgagccttagtttccttatctataagatagggataataatacctgtgtctcagaggtgttaaggctcaaggggaaacctatgtagtatgtaacacaggacgctcacaggaggtgttcagtatatcggctatcagattttacaggaccaaccagacggggggtcataaagctgggctgaatttgaagtgaatttgccaaaaacggaggctgctctgcagaagtatcatgggccagagcatattgtttcttgcagaaaacaatatggaaggttctgtgtatgtatctagaaggttaggtttatgtatcttgcaggagtcatttgtcactttctaggatgttattccttctggctttgttttagtttctttttaaatgagtaactggccacaatcatgtatacacacattcacaatgacttttctcaacttggtcaattaaattgcctcttc

SEQ ID NO: 153852 - DNA, 580 bp, Homo Sapiens
tttgttgttcttatttattgaagaactttgttgagagcaagaaacaccatttctttcatttaatttataagtgggttttctttatccaatatgcatacatcagctacatgattccaagtgacatgttcttgatagtcaataaaatttcagctaaaataatgttagtaattagaaacagaaaattaaagaaaatagattaagataaccaggaaataaaaatagaggctgatgataacggtgtcaggaaacaagccccaagtaaatcctccagggtcttctgacagatctaaggtgtttaactaacggtttctgtcccatccctcttcaccctcaagcaaaatcctcctgaccaaatcccagtcctcactcactacaagaagttttgcccatgttctactgccacataacctgtatatttcatctgaggcatttagaagctgaggtaggtttccagtacagccttccctcttgttttctctttcaatagtatggaaaggatagatggagttaagaaaaagagtaagggaagcttgaccataaaacatttactgtaatgtgtttttattcaggctagttttca

SEQ ID NO: 153853 - DNA, 421 bp, Homo Sapiens
agcaaacagatcactatattttataaagatttccagtggtaagtatcgaaccaatttccagtggtaagtatcaaaccgaaaggtattttctaaggaaagcccttgtaaatcagaaatgtcataaatcagaatccctttcccaaaacattaactgagattttactgaatcacactaaagagaatgaccagtttggtttgtgaatgtcaggctgcaagagcacctttcgattgcagaccctactgggtttgaacagtaatatactgtgtaactggcagacaaggatacaaatgaagcttttaaaatatatcactttagaagctgaaaattggggttgtgtgaaaatttccctttttgtgaaggtcagttctcatagctaactctaattgttcctattagattccccacacctactaccaactc

SEQ ID NO: 153854 - DNA, 533 bp, Homo Sapiens
  misc_feature (119)..(145): n is a, c, g, or t
cagaagagaactatagcttcccctaaaaaacatggtaaccacctaaatccaaatgcctccacataacctccataaaactttaaaaataatgaagagatgaggctacatgggtattgctnnnnnnnnnnnnnnnnnnnnnnnnnnncctcataatccatgtctatggcataactaagaggcacagaatagtacaaacttcaaatggattgtcaactaaaggaaaaaaatcaggcttttaaaaaagaaaatttagttttattcagtcttactgaagactgtaacccaggagaatctttcagagagattcccaagcagtatttcagcccctgtatcagggggtggcagttctgcatctgctcataagttacattaaacatgctcacaagttacgttagagcaaagtgccatcaaagtttgggtgtgagagtacatcttgttactgattacagaggcatagtcactaatccctcagaatttatcttatatacaggaagagccaagggctaggctaggatcactgacctctgcttaaa

SEQ ID NO: 153855 - DNA, 280 bp, Homo Sapiens
tttactttttatttttctgtcctcacaatctgttcccatacctgtgattttcaagcaaagatttattggtttatgtctttattatctctacttctcaattatttcacaatggttgatttagctagatgtaatatctagtagcaataaccttgcattttaatatctatctggtatttaaatctttaaaataatcacatgttggctgattctttgaaaaatattcaaactacctattaatcaaaagactatgagcaaaccagatacttactgctgaagtgag

SEQ ID NO: 153856 - DNA, 532 bp, Homo Sapiens
ttttttgaatatgggaaaacatttattgattaaaataaacttcttcataagaagtctccagacttcagccatggattcatctacacgatatgtacaaaactctcatggcccaggactatgaccctttgttattcccctacactttcacaatccagtgtaaagcttaagttatcagccttccttcattcgtagccttccttctcttctctgtgtaactaagataaaacatggtttgcaaataatgttcaaagaccagtgctttatgttccttgtaaaatcaaaggtctgaggctcggcatcatttaaattgaacgctccatcctaaaatactttttggctcccccttacactttaaactattcacataagaaacatctcaaggatacacaaggaaaaccacttagccacaatgccaggagggttttgattgctggtggctttgtcaggttggaggcacctggggcagccaagggtggaggttggggagaaattttccatgtcatttccataccttttcttacagcttttgtcc

SEQ ID NO: 153857 - DNA, 400 bp, Homo Sapiens
cattttatttttttcctgcctccagttccaagggaaaacagtcttgaccctgggggaaaatcaccttgaaagtgtgtgtaaattacaaagcagctagctctataataatgagagagctctttaaaggaacagcaagttgtggctacaggtaaccaacaggaaaccaaatttttaaaaagaactgaagaattagctgtttcattgacacattgtaaaatttttccttgagtcatatgtgtacatctgttacatatgttttttgcactactcagtgggattcttaatttttcttcttagctactaactttattttcgtcagaaaactgcttttatatgtaagattttcaaaactaaagaatattccttttactgtaatataactacacaaaaacctcgtgcc

SEQ ID NO: 153858 - DNA, 458 bp, Homo Sapiens
cgtagaccatttttttaggctttcagaacaattgagcagaaagtacagagtaccagtttattttctccagactgtctttttactcttatcttctaatgtgccatttgctctagccaaagtctaattaactcatgaacccccgaccctattgagactgactccccattgtatagagtcaagagagactgtgggtgatcataaggcttggcttctctaggtatgtttatccccttcaatggatccagatgaatacttcacactggatatattcattttctgttgctgtgtaacaaattaccataaacttagctgtggctcaggagttcagatacagcattacttactgggtcctttgctcagggtcttacaaggctgtggtgtcagctgttgcttggctgcattctcatctagaggtttaattggggaagaatctgcttccaggcttatatagattgctg

SEQ ID NO: 153859 - DNA, 588 bp, Homo Sapiens
ttttaaataaatgagctttattttaggaatataagattgattcgacatttgaaaatcaaccattgtgattcaacacattataagaaaaaaacagaaaatttatataagatattcaagtagatatagaacaaagagaattttacaaaatgtaacattcttttaaaaaatctccaaaaactcagaatagaatgcaacttcctgaactcaataaggggcatttattataaatttacagctaacatcacatctagtgatgaaaaactaagacggtaagactgagagcaagacaagaatgtccactctcaccacttccattcagtattatattggagttgttaactagtacaatagggctagaaaaagaagtaaactgacataaaaattacaaagaaagcactaaaattgtctctgcaagatggcatgatatctacatttttaagattctaccaaaaataactagaatttataatgaatttagtaagatggtaaaatacaagtccaaattccaaaaattaattgtgttttcatatactagtaacaaacaactggaaataaaatttttaattctttttacaaaaataatcaaaa

SEQ ID NO: 153860 - DNA, 457 bp, Homo Sapiens
ggccacagtttagatacattttaggctcactgccctgtgggtgaagacaagctgggaaatgtggaagagtcttccacttacccatcagaggttccatttgaattcagttgtgagtctgggctgggagcgcaggaagcggttgtgttgaatgtacagcatgaggggatggtggggttcccaggtgtgccccaaacctcctgtacctatacagagatgaactctttctgcagcagcctccagtgaggaggctcaggatctcaagtcttgagggtttctgagcctgccataggccaagggacagggatttgggctgctgatgggtgacatgctgccagctacagaatggggctggctgggcactgggagcttggtgatggggtgtcacggacattcctacaggcccagcccgtgtttagaatcacagagctgagccgatgcatgtcacggagaactgcct

SEQ ID NO: 153861 - DNA, 346 bp, Homo Sapiens
tctattttgctgagtggatgaagtgagatgatgtatttagagcactcagtacagttcctgtaacataggaagtgttcagtggctataagcttttgttgtcataattaattctttgcacccaccttatgattttgttcttttttgcctttgtgcatgttgttcctctgccgtgaattcccttacttcgtttatcctggggatcacctgcttatccttcaagaactatctcaattgtcctttgtgaggctttccctgatcttcctaagattatttgcccttacctttgtgttctgttatatattatgttacttcctttaattcatgtaacacattttgtagtcatgtg

SEQ ID NO: 153862 - DNA, 477 bp, Homo Sapiens
tttcccttgaatttttaagcatctctgttttatgatctctataattttggagagaaaccaaggcagctagtgactttcttgaacaaaatttctttgcctacacgccagtttgggaggacatagtagtatctggcctatgaaggacttctggcttgtaccccaaagcaggaaagcggcacgggcaaagaccacggggtaggggctcgtgtagcggtcaggtcagttgctccttgaatggtaggagctgttgtggaatggctcatgagcagggggcctgagacacaggaatggaacaggaaagaggggagaataaaaagggagtcggagggaggctgcggggcttgggtcctctgagagatgatgcttggctgagatgtcgtggtctcgctattcctgctggacgacacctgacttccctgatggtttccagccagctctctccagtcttggtcatctaactccaaaggtctgcaagcg

SEQ ID NO: 153863 - DNA, 372 bp, Homo Sapiens
ctccttttagttgtgtagggatttgtttcatgtaatttgaatttctgcatacattttggattgttacaccttcaaagggtattaccataggacaaagagggacatttcataatgataaaagagtcactcttttaccaaagtaaacagatggaaaaagatgtacataccacacaataccatgaaaactggactggctatagaaatgtcagataaagtagatttcaggacaaagggtattaccgaggacaaagggtattaccaaggacaaagagggacatttcctaatgataaaagagtcacgcaatttaattgcgtgcatttgcagtttgccagtaattaatggccttttgaatctgcgtatcatgccattct

SEQ ID NO: 153864 - DNA, 560 bp, Homo Sapiens
tttgattcaaaaattctttataactttattctgacataggctttgtgttacatgactttgcccaattgtagcctaagtgttatgactatgtttacagtagtctaggataagctataaggctcaataggttaggtgtattaaatgcatttttgacttacaatatttttcaacttactgatgggtttgttgggaaataaccccattgtaagttgaggatcatctgtattcctcacagttttggaggccagaagtccaagatcaagtctcagacaaatttagtgtctgatgatagccggcttcctcatagacagtacctctacactcacatagtggataggcaaggcatttcctttgaccttgttttacaagagcactaatcccatcattagaactccatccccatgatgtaatcacctctcaaaggccccacttcttagtaccatcactttgagggttaggtttcaacacatgaatttgagagggacaaacatattcagaccatagcatctgcttaagtaaaaagaaattggtgagccaatgggttagaaccctttcttttc

SEQ ID NO: 153865 - DNA, 310 bp, Homo Sapiens
tttatatttacagtcagtaagtttataaatatatattacattcttacaatctacagtacattctacacgcagatggatttggaagcgggcagcggctgcagtattcaacagaacatgacacaggtaagaatggaaagaaatatgaggacgttactgaaagcaaaggattctcattgaaaaggggtgacagcttaatcacccaaccaaacaaggtaggtaagcttgcggacaggagcaggtgacttactggctgcagaaacctcagtctcaagagcaccacagttgcaggggagagggctaaggttgggag

SEQ ID NO: 153866 - DNA, 458 bp, Homo Sapiens
ttttttaactttcttattgaggtataacttatgtaccaaacggtgtgcgaatctcaagtatacagcaggaagaatttttgcatatcacacactcatgtaaccgccacccagacgggggctagaaagcaatgctaagacccagaggacccccttgtgccctcccagtcagttctaccacagattccaccccgctgtggacctctagccatagatcagtcttgccttttcttggacttcacgtaaacagagtgctatgttacgtactctgtgtaagatttccttcattcacccttatgtctgtgaaagcctgtgttgtgtgtagcagaagtgacactgtttttcattgttatggactatttcaatgtataactataccacacttattcatcgtactgttgttgaacatttggattctttctagttgtttttatcaattttattgaattatagtttacata

SEQ ID NO: 153867 - DNA, 402 bp, Homo Sapiens
cctaataggagactcctgtacctttcttcgttttacctatgtgtcgtgtctgcttacatttccttctcccctcaggctttttttgggtggttctccaacctccaatacccaggcctggcctcttcagagtaccccccattccactttccctgcctccttccttaaatagctgacaatcaaattcatgctatggtgtgaaagactacctttgacttggtattataagctggagttatatatgtatttgaaaacagagtaaatacttaagaggccaaatagatgaatggaagaattttaggaactgtgagagggggacaaggtgaagctttcctggccctgggaggaagctggctgtggtagcgtagcgctctctctctctgtctgtggcaggaggcaaagagt

SEQ ID NO: 153868 - DNA, 119 bp, Homo Sapiens
ttttgatttgtaatttaaaaaaatgtcattctaatatataccctccaagtaaatacatcctaatgaagttattaacttacctctggaagacattccggcatgttcacacctcttctctt

SEQ ID NO: 153869 - DNA, 692 bp, Homo Sapiens
tttttttaaatttcttacatctggatttattgttacataagatataaagatattatggaagtgatcactaataataaacttcgatcaagtaaataaataaagtagtaataaaaaatttagttcagtagtttttaaagatttctctaagtttcttaagctttaagtttagacatcgaaataatagaccatcaaataacagtacggattaccaacagagtggtttcataatggaagcagcatgcttcttctccagttttctgtgcttaggaagctggatgtgtgtgttctggttcctgtaaacttcctgactttttaccctttccctcagtctccccagctccccaaatgaagtccatacatgagtaggcagctataaaaatgatttatgtatataaataggttgctgttactttcttctaaagattaagtggtctagcttcagttcatagggctttcaggaaagcatggcttcatttttagtgatttcaatttaggaaaactgtgggggtggggtagggaggaaagaaagaaggaaaaatttgaaaacattattttggagattcgtagccagaaaacaatttataattcagtccaaattatagaaaataataaaaattcaaaaacattgggcaacactataatctaatagcaggtgtactgtagtttattctgaaatataatttttgtctctc

SEQ ID NO: 153870 - DNA, 541 bp, Homo Sapiens
ttttttttcagtacaataagtgtttattgaatgaatatctctctttgcatagtgggctctttggatacatttaagcaatgattccatttactacattgattataaccaacctattcagaagtgtatttgtgaatagtgtgagccctcaggacctcagtggccattgccaattttggagactggttctgtgctgtctccaggccagggtctgcatacgcttctggcgacaccactgccgtctggctgctgaccagcctgggctatttctgagctgcaggtccttaggccctcaggtgaggatactccagaagcctccacttcaccctcactggaaggaagtctctggtggaaacaagctactcctaaagctttctgagcacttgtcaggaggaataggagagaaagctttatcggaatgagtaagaccaatagtattaacccatgactcgccacaggaggcgggtgggggatggtgtcttcacagctccctcgtgccgcctcgtgccgaattcttggcctcgagggccaaattccctatagt

SEQ ID NO: 153871 - DNA, 850 bp, Homo Sapiens
agaataaggaaacttaaaatctactttctaaagattgaacaaagtgctagctgcaaattatcttgaaatcatttggctcttttctagcatgtgtgtaatcatgttttcttctgattcctgaatgaccatggtagcattagtgtttagaaattgttcaggggaaaattgagctattttccatagtggctagcaattgctacacatccttagatactcctctctcccataggataaatgttacagcacacaaaagaaattttctcaattctgatttggaaaatttcacaggtgtcattattgtatatctaagcaataattatctgaatgttttggcataaaaaattataatgttctaacttgttttataagttgaatgacttttcagtcccttgattttatattgttgagtgataatcagactgatagtagcaaatctgatcatacattactaaaatagactgctgattgtctatttaacgaagacaagtgggtaacatttaaaatatataatacaaaaattttctctaacttacctttttccagaactacttctttaagcacttttcctattaatgcctattgttgattaaaaggtggttaattctaaccatcttttagtcttcaaagtggtgctatattccatcaagagcaataaagtttttcccaggtgtcacttattgtatatgttaccaaataccatgaatttctgccatagtactactatcaagcaccttgtcttgctatttacagtttcttcatttgtatatttttagcttttctaagtggaaatgtctacataattttgatcttgacatgattgaggatttagagctcttgtctttgtcttgat

SEQ ID NO: 153872 - DNA, 480 bp, Homo Sapiens
ttttaaataaaagatgttcttttattcatttgcctgccaatccaaaaatacaaatatagttaattgtacataggaaggtattcacttgttcagagttttgagtgtgtgaattacatatatgaacatctgagaaaatcctataagcagtttaatcaactgttccactccactccaagtgagtccataggcagaattgagttatggggagagcggcctagtaataattggtttgcgtaatacaaagttctactgggtagtgatgttgtagaagttcatatagaatcagctgagctttcagaaatggtgaaagggtggtaatagtcataacttagattgtaatttttttcccataggcttttaaaaaatattcatgaggttctttttttatttcaatagtttttggggaacaggtggtttttggttacatgaataagttcttcagtggtgatttctgagattttggtgcacctgtcatgtgag

SEQ ID NO: 153873 - DNA, 527 bp, Homo Sapiens
tttgccagctacatttcttatctctattgataataactataccacctatgtctctgctttttcatgcttgagggatctctggatcaatcaacgtgcatgatggcctgaaaaagcccaatttatgggcaataaagtgaatcatcttattatcaggaacgaatatatgtttcctttattgactgctgactatgtagagcataccaacaaaattgccattcatctatccattcaacaatatttattagctattccgcactgggcagtgctctaggcttggggatagaacagtgaacaaacaaaatccttagcctaatggatattacctggaagtgtgccaggaagaataaactcacttgtgaattacaacaataagtggtttattcaggttaaaatcttgttttgtctcctgggaatttcactgaattgcatcatgtaggaggcaaactataccccaagaattaagagcaattgtgaataaatgataaaccacagagtttacatttacctcctaatacatttaactccta

SEQ ID NO: 153874 - DNA, 208 bp, Homo Sapiens
ctcttttcctctctagcccggatatgggtaaataaacgactagctgagcctatcgggcccagcatggcttgagaggcagcgggcgagctcgagcaactattatccacttcgctcgcattactcccgcgcactcgcaaaacgcggactggactcgtccccgggccgccgccgcccgccccggcgcagcctcgcgggacccagccgggct

SEQ ID NO: 153875 - DNA, 267 bp, Homo Sapiens
ccctctcaggcatatttttgggggaaaaaggaaagttctataaaaaacaacagaaaaacaagctttaaagaaattacatctatagcttaacacagactgatactaaatgtcaggctttccaaatagtggtaatttaaactggtaaaaactcaatattcaaaaaaggatggggggagagggagagtgagataattatgtaactcaaattctactttggtgtgtgtgtattggtctccggcttatagttaatacctagagatctttaga

SEQ ID NO: 153876 - DNA, 572 bp, Homo Sapiens
tctttttagggagcagacaactcattttttaattaaacttttgtatctgatatcactgtaaatttgcatgccatcattaagaactacatcacagagaatctttacccatttttctccaataataacatcttacaatactctaggataatcacaaccaggatacagtgacattgatacagtcaagagacagacattccatcacaaagatcccctgtgtcttctcctcctgggattcctgttagatgcagtatcagcattgtgaaactcctgtgttctccatgtttctttaaagaattttaaaatatatatatttgttctttgttcaactttctttggagaattccttggccttgtcttcaaacttattttgtatttcagctgtgtttgttctgctattcagcctatctactgaggttttaattttgggaaaatttcatattttcttaacatccaattattttaaaaatagtctgttattatttcatagcagcaatattctccttgccctctgaagttactacagttcatttaaagccttctgcttgttccatgagcttgttttatttcccagg

SEQ ID NO: 153877 - DNA, 675 bp, Homo Sapiens
aagaattcggcacaaggttcatttcacatttattgactgtaaactgtcttatggtctgtttttctttgagctaacttactttccacaagtgccatatgcaaatgaagtaattaatgcgaacaagaactttgtaaactctaaagcactatacaaatgtcattttccttccagtcccactgcgatgacatgaattaatgttacttcctcttccaatctatacaggagcctctaactgaactttctccttcccaaattctccttagattatatattttgcaccctgctgcccacttagtcttcttaaagccttgctataattatgcacctctcctactcaaaaactttgactgccttccagttcttgaccaaatagtatacaaagtccttgacttgtaaccaagaccttccctgatgtggcttcagattgccctttcactgtttctcactcttctcccacccaaaccctggattttcaagtagaatggtggtcaccaggggctgggggagggggagaggagagttactattcaatgagtacagagtttcagcttaggaagaggaaaagagttacacagagctagatagtggtacaacaatgtaaatctacttaatgccactaaactgtatacctaaagctggttaagatgttaagttttatattatgtgtattttatc

SEQ ID NO: 153878 - DNA, 456 bp, Homo Sapiens
tttagtgttgggtatgtcaacccatgagacaaccatgatacaaggagagtgacattttgttctgtttaggagtccatctgattgcatgtggccccatctggttcacttcagtgagagggaagcatgactattccggggtggccttttcctctttccaggttaaacaagtgtttgtggttgctgtggagcatgtgagaatgatggaaggagttcggcagtcaccactgatgattgagcacaccctgcatgcatggtcctgtgcaggatgaagctgtccctggtcagggagctgcagaaccacagctcctgcagaatgggtgaaagctgagctcatcatatggaactgtccaaggtacaacaccagcacgtggctgcttcagcatcttatccttgaggagtaggctcttatccattgccaactgcttggtccaggctagccgtctcccgtggatcacc

SEQ ID NO: 153879 - DNA, 474 bp, Homo Sapiens
  misc_feature (14)..(14): n is a, c, g, or t
cagaatatgagaanagcagcagtgtaaatgacgtaaacattaaaaaatatattagtttgtatatttcccccaggaagtctcacaggaagcacaggacacctgtgcggctgtttgggcatcctgggtacttcttgccctcaggtgaactcccatctctttagttaggaccagaatccacctggcttgtaggagaggaactacatggagaagctgcattgaggcttttattattaatacctatgactcaaggaataccagccttggggtgctttggggcctggggagggaagtgactggctctcctgctacactggagactgttagctcatttctgaatggatttcctgcagcgtggggtagtcgacagctgtgacaggaacattacctgaagtgcagggtggttacctgcacaaagtcccatttccaaaaatttctgtgtaattcaccagaaattttggatggaatgattagaaa

SEQ ID NO: 153880 - DNA, 562 bp, Homo Sapiens
ttttttccaacacaaaacagttatttattctcctgaataataaagacatcatgtttgcatatagaacagcttttgcattattgctctacatataagaatatattagggaactcataacagactgcacgttacaaacttaaggttctttggtgaagaatgaaagaaaacagtatttgagctttaacaaaaattattttatccatttttgcatttatctattgatccgttggatcctctcacatagtagggagaggtactgtgtaagtttcaccatggcaacaattgccacacccccagccatcatacaggttggccagaagagtgaatggaacagcacgttggaactgtagagtttggttaggataacactcttctggtttccttctgggtcagaatagcaggagaagtgttgatacttcctgaagttttccatgacaacattcaccagggacatggattcttcaaaattttttccacatttaggtatataggagcacttctgattgatttttattgtctcttctgtgtggtagaggaggagcttttccccggaagaagtcag

SEQ ID NO: 153881 - DNA, 290 bp, Homo Sapiens
tgggcagtaatcttaattatgatggaattatcattatgctaagtaattaactttacctagtttgttttacaactagaacctgccctaaatgttgaatatcttcctagcaagaaacagtctgtcattttacttacacgatgtctaaccaaaccataactttacataaactagtcgtttcggtcaaatagaaaaatgtgtgaatgccataaaaacaaaaattctcagttaaatgatactgggaaatagggaagacagcaaagtgagacttgggctcaggatggttcaggaaa

SEQ ID NO: 153882 - DNA, 539 bp, Homo Sapiens
  misc_feature (182)..(219): n is a, c, g, or t
cctacatttttgttgttgctgatgttgtaagtgtgagcgttggtgctattttaagtacaaggttttcttccattttgtttcctagctttttccctgaaacatagaagtgctgttgattgtgtaaccaactacattactgacttaactcattgtttatgagagactttccaggagtactcttnnnnnnnnnnnnnnnnnnnnnnnnnnnnnnnnnnnnnntcattatgttgtctccactttgtaattcttaaaatttgtattttttatctttatatacctagaataatattaaataagtggaaatattatttctcttaccctgttcctgactttaatggaaaatgcttctagtgtgcaacattaaacaagatgctatttttaaacttaaatatgtttttatcatatcaatactggatattgaattttgttaaatattcttgtagtctctaagaaaggtcatgtagttattctcatttaaccagtattaagaattcacctaaggctgggtgcggtgactcatgcctgcaatcccagcactt

SEQ ID NO: 153883 - DNA, 515 bp, Homo Sapiens
gagatatgcaaaccagacagacttagtttcataagaatgaaaaatatcttactgaaataatatctccaatgtattgagttaaatatattaaaattaattttacttgttttttagcgtggctactagatcttaaattacatgtgacttgcatatgtctatcagacactattgctatagaaaaaaaagcaccagcatgcaaagtaaatgtacatgcactgtccagagtaggaaaaagagaacccccaaaccaaaacctgtaaacaaagtaaatgcatgtccacagaggaatggtatgatacataaacataacattctgtggggtatgatgaaccaggacaccaaacattgagaatggggggaaaacatgcaaatatattttcctaaaataaagtctgaagactgcaagggcacattgagctccaaggaaaattgatacaaataataagaaatattttagtatatcatacttcagggataaacagtcctctggacattaggcctcctccttcaccacc

SEQ ID NO: 153884 - DNA, 542 bp, Homo Sapiens
agaagtataaaagaattgtcttcttatgattcagcttttgattaaaacagggcactggatagtttgagattagattgtctaacagcacgcggagtgtccttagggaagatccgtacagttaatgtgacagtgtgacagtcgaggtaagttgataggttcttaaaatcatagaaagcacctaacaagggctcctacctaatgtggcagccccaccaccatagcaagaaagtctacgctagtcttcattttaagaaatcactattatatgttcactgatgcccccctcccctctcaaatatagcacaaaattatatatactcatctggaaataagatacttatctattaagatactttaaaaaattaaataataaagattaacaaagttctataagggccattcagttgcaaatttgaactttagaactcaggttttctaattcctcgcccagtgttacttgcactgtttaggtcttttttttgaagtatgatacacctacagaaaagtggtaaatgtaaagtagatttagagattcaaaaaaa

SEQ ID NO: 153885 - DNA, 298 bp, Homo Sapiens
  misc_feature (219)..(233): n is a, c, g, or t
aacttaaaaggcaagttctattttcagactttcgaacacgtttaaacttgcaactgggttttcctttttacactgatcagtttttagtgtcgatgcacaataccttaaagatggttgacattaagaacttatgcacactgaaataatgaccaaaaggatccaagaaagatagctggatacagtagacattactctgagtgtctcacatatgtttccagnnnnnnnnnnnnnnngccactgaaagttgttattccatatggcactgaaacaaacattcagctcagtttaggtaagagtt

SEQ ID NO: 153886 - DNA, 357 bp, Homo Sapiens
taggtagtcagacgacaaagaaagcatcagccatatccatcaaacttggatcaagtgtgagttgttatttcatatatgatgtttgtaatgggtcttaaggatttgctttggaaacgtggcgtttactaggttatggtaaattaagggtgaaaaggtacattgtttgagaagtaatctttgacgtatgaacttagatgattagcaccctgtttaagaagggtctgaatgaattttatctcaataaagctgttaagaaacaaagatttggaatattaggaacaactattatagggaatatgatttataaaataataaacttagaatttttctgcgttggctgggcacagtggctcacac

SEQ ID NO: 153887 - DNA, 394 bp, Homo Sapiens
aaaaaagcttgacggggccattctttggatccctgcatttttcttccacacttcagcaactgtgaccaggacattagttgacttttttgttgaacacagaggtcagttaaaagtccaactggcttggccggatcaatataattcaacatgtcaacaggttctttgcaactttacattgctgtaaacagtgctctgatgaacatactttggaattaaatgtttgattatttccttagataaatcccttgaagtggattttcaagagaaaacttaccaacaagttaggagaaaaacatgcatcatcattaaggaagacttcctcaacagaaggattatgcattattgtgtactaaataaggaaaataaataagctattgttgtgtgcttcttcaaa

SEQ ID NO: 153888 - DNA, 219 bp, Homo Sapiens
ttttgcagacataccattattctgtgaaaatttctaactcttatgaagggtacaataaacaatgagaggagatttcgactattttgtagtatgtttggggatttaaataaatataaagatgatacttctaatttattttcagtaacatatactttgactaatttttgtatagatagtaaagttcacaaatttttcaaatacttagctcactatttaaag

SEQ ID NO: 153889 - DNA, 428 bp, Homo Sapiens
catgctttgtaataccttaaattatccacatgtatcatctggataatcatttaacccttttccatactgcccagctttattccaggaaccacctccagctattaaaaaaggtttcagaaattcagagttatttttattcaggcaaagaagtaccaagtattgtgactagttagataaggggtggggggaagacagtagatggtggatcattaggcatattataagaataaaactagttttatagtgcctcatttttacttacccattcacatattttgcttacatttcgtagcatcatttaataatttacaaagaaagttgtattacattgtttagattttgtacatacaggttagctaggtttttagtaaagtgaccttgtgaatgttttagaagggcaagggaaattatgacccctggttaggaaa

SEQ ID NO: 153890 - DNA, 324 bp, Homo Sapiens
ctaatttaataagccttcaccacacaaacctgcgatgtgcagggttctgagctgggtcccaaggacatgaggacaacttggcaggtactttctaccatcaagggcacacgacattgctgaggacagaaatagtgcaaggtggggaggtggcaggttacaagataaagaagctatagtcaattgccagttagaaagagtactgggaaaatagcaataatagctaccatagaaactgtgcaagtactaggtgaagaggcctgtgaagctaacttactgcaaggcttgaataaatagagacattcgcggccaggtgcagtggctcat

SEQ ID NO: 153891 - DNA, 548 bp, Homo Sapiens
  misc_feature (84)..(166): n is a, c, g, or t
  misc_feature (195)..(256): n is a, c, g, or t
ttttaagtaaatactgccatatgagtcagagcttgtactctctctgggcactacctatgaattttggttaaaaggaatagactnnnnnnnnnnnnnnnnnnnnnnnnnnnnnnnnnnnnnnnnnnnnnnnnnnnnnnnnnnnnnnnnnnnnnnnnnnnnnnnnnnngggtgagagtgagactgtaagaaaggacnnnnnnnnnnnnnnnnnnnnnnnnnnnnnnnnnnnnnnnnnnnnnnnnnnnnnnnnnnnnnnatatatataatttcattttttaaaggggtaggaaaaattaggggtgtaaccgccaatctgcctttccacatcaaattttttgaggtgtggggaaaggctcttttaaaatgtcttttgaaaattacatatactaacactttatttgggggaagaaggaaaatagaggactactgcattaaatagtaatcctgacaccaaaagcagagggccagccttcctttccccccagctcagggctgactctctcccgctggctgttttcctccctgtaagaggtgtgagagtggctgtt

SEQ ID NO: 153892 - DNA, 561 bp, Homo Sapiens
aaagctataatgatttgttacacatcaatttaaatcttgttttattctttcaatgaacactgtatcaaaatttttttatgaagtaatgttagtctttgtggtcaatagttattggtaatactactagtaatatgatacatggctataagatgcttagcttagtgtcagttattattctaagagtttaaatctaaaaagcttccctcttgtgctctgaaaaatgcttactcaattgctttgaaaaatgtttatccttttccacagaaattcaagatgtaaatacaacaaagccttgtcatattagctatcttttttcaaattagacagaaaaaaattcttgacactatttaatttcagtgctagtgagcagatgttttatggtgcaagagccatgttgctatttcagttatgatgtaattaatcaacaactgtctggcctgggtctacttcggtcccctttgcaggtcagttgcttggtgtttctttgtaaaccagaaaaaactgagcaaaacattcattcatgtagctgtagcaccaatttgctggcatcaatattatggt

SEQ ID NO: 153893 - DNA, 296 bp, Homo Sapiens
gcggccgccctactacctgggccgcgactacctggagacgctgatggccagccagaaggcagccgactggatccgcatcaggtgcctgggtgggctggagttggggagctgcagtcgggggcccggggtcacggagggtactttgcaggtcctgggcctgacctcgctttccacctgctctcccacagcgagatgctccttgggccagtgccccccagcttcgccttcttgccgaagcacaaggccaacgcgtacaagtagcctcaggctttcccaggggcaccctggggcgagga

SEQ ID NO: 153894 - DNA, 203 bp, Homo Sapiens
  misc_feature (16)..(16): n is a, c, g, or t
aatttattgtactctncctcgcccagggtgcccctgggaaagcctgaggctacttgtacgcgttggccttgtgcttcggcaagaaggcgaagctggggggcactggcccaaggagcatctcgctgatgcggatccagtcggctgccttctggctggccatcagcgtctccaggtagtcgcggcccaggtagtagggcggccgc

SEQ ID NO: 153895 - DNA, 456 bp, Homo Sapiens
ttttaggctctcaaatatatttatttgtcataattaagcagtaatattattttgtatgcatattccatgccttttacatctattatttccttctcatctacttatacttattgcttctactagtaaaaatcagttgaatcagctcttgaatcttatttcagaggcaagatgtacatgaagtgctaagagtgtttaccattttccccttaagtctcttcttgctagtgttaggcatatttcttgcctttcctgcccaatattcatttattactttagtcattaaatatgtattgggggactatgaagacggggtaggactctaaatgtgactctcgggccttaaccttaagaggccacacaacagtgttcagtaatagaactaggttgttttgcaaagttttgctcttctggctgcagcgtcactaattaaaacaatgaagacatagtttggttaac

SEQ ID NO: 153896 - DNA, 237 bp, Homo Sapiens
  misc_feature (116)..(126): n is a, c, g, or t
ctttccacttttcttcttttttaatgtaaagattttacatttaattactcttcatatttcctgtatcaacccaaatattgatggttgtgggtgaatatattgtaaagagagatttnnnnnnnnnnnccttatatgtatttgtgacatcaaagtggattttaattgctttagttaagatcttttgcataggaaatagaacagcatattagatgaataaataaacattaatactgaaaa

SEQ ID NO: 153897 - DNA, 469 bp, Homo Sapiens
ttttgttctacgatcaaaaccagtacacataccacattgcatttagactattactttttgacctgacaagttataaggggttttatggaaatatttcagaaaatctttctcttatctcctattcttaatgagtttgtaacacattttcttcttcaaattactttctttactaactacgcagccctttcaacatttaatctctttcttctttgtaaatatgaggaagaattatgacagaaacttgcatagccttaggtaattttaaatcaccctataatgagaaatccagtttaccacctattgaatgtttattctgtcccataatagattgtttacctcaccaatgaatttgtgtgttttccaaatgtcaatgatcaagataatcatatctatttttctatctttattcttataaaagctttttaaatggaattttaaacagaattttctaattcctttggtgtatttg

SEQ ID NO: 153898 - DNA, 466 bp, Homo Sapiens
gacagtatagagtctcataaaagctgcctttaaatatccctaggagacagggtgaaggagacccttgacagccccagcctaggcagatgggggctgtggaaagattgttctgtgtctcattccctcttaagccactcccccaccctgcccttttaaaaataattaaggatttgaggtctaggctcacatgcaggtaattagaacgttatggaagcagtgaacccacaatccacaatccccaaactcagagtgcatcccagaagaggccccaggcagagctcaggttggccctggcctttgccatcccgggaggccccctagccagcaagagtgggattgcctttcctgtggaaccactgcttccccaggcgggaagaaagagggagttctggccacctgagcctttcccttgccaatccaggtagacagaggccctgcctttggctgagctgagacacctactgtt

SEQ ID NO: 153899 - DNA, 531 bp, Homo Sapiens
gaaacatggtgattaatccaagtatttcactgtacagttgggaaactgaggaccaaggattactctcctgttaagccctgtcttattgactggtctgtgggtcattttacttactaggcattatagacacagtaactggggcctgcaagcttttcaaatacatactgaaagtttaagagaaactgaaaacacacaaattggctccaataactgtcaaaaagacaaagaaacataatggttcttgaagttcaatatgattcaagcactccaaacaccctggcagctttgcaaatgaatacgtttttctattgtctaaggtttatgtttagccatacgtatctatcgaagcaacacaaactagaatcagctattgagaaaagacaagtggaagaaaagcagcagcagagggatagttttcgaaactgaaaagagacagaaaagatacattgatcaaattccccaaacaccccaatggcttagtgagcataatctaacaagataaatgttcacaggcataaacatatcattcta

SEQ ID NO: 153900 - DNA, 447 bp, Homo Sapiens
agtgtgtatacatttatacataatatagtgtatatcgtttcaactggagataaactgaactgggttcagacactagcacatgcttaactttcccctgctccctctgtatattttaaacagtctggagctttattttattttttaaagtgcattttcaatgcagaaaaactgtaatccactgattccttggaaaacatttttgatgagaaaaatctgacagttctcagccccaagcaagagaaacctgggtttggtcatgctgggggctgacgtggcagtgccaggctcgtgcctgagtgattaatggacattctggactccgggcaccttagcagcagcagcagcacctttatgagaaggtagagatagaaaaggaagaaggaaggaaagctcagatgaggaagaatgaagtattgtgtttacgtatcaaaattgctaactttgact

SEQ ID NO: 153901 - DNA, 546 bp, Homo Sapiens
tttttctttttccccttggccacggtacattttaggaagggtgaagataaagtgaaggttgtgaaatcaagcaggcgataacatgttaagggtcaaatgtctcagttcctgaattttgatggtgcaatacaaagcataccgcttggtttgaaggcagctttgatcctgttataagatgatcaaaggctcaaaagatttttctggtcaccaccactaagtcaagggcacttctccttgtcactaggaaaggccctaagtatttacaaatttaaaataaaatagtttgtgagcttgaacaacagttaggaagcaaatagcacttcaatggccataataacctggatcctgggtagcctaaacaactcagttctacaacctaaattcacaggcagttcaggtgaacgttgggcaccattttctttccttcttggccactctgggccatcttttcacttctttttttccctcaatatcttctcttttctaaatgctcttattataaatgtgaaatatattttattttaaatgttttatttattaagattg

SEQ ID NO: 153902 - DNA, 187 bp, Homo Sapiens
gataccagagggaattaactatgatcacatcgtgctctctctgttcagcatcacacgcccacatactgcagtgtgggagtagattggtacttactgagcacttagaaacatcacgcatcaggaaccgggtcagggtgacagcatcctacggtcatatcatgaaggaagcctcccttacaagcgtaaa

SEQ ID NO: 153903 - DNA, 337 bp, Homo Sapiens
  misc_feature (78)..(78): n is a, c, g, or t
  misc_feature (103)..(120): n is a, c, g, or t
gtgtcccctggaatcccctggaaagtttctgctccagaaagctgtaccattttgggcagtgatcccttcaacccccangttcacattttagcctgtctgctcnnnnnnnnnnnnnnnnnngtctttgaggggctgtggggcttgttggacagagtcccgctctgctcaccaactacccccagcttttccagagactgtgaacagagcaagacgctggccaactagagatggtttgttttccatctcaatttttccagcaatggtggaacattcattagatgctacaattaggttgcacattcattagattcttcacttggcccggtgtgctggctca

SEQ ID NO: 153904 - DNA, 290 bp, Homo Sapiens
gtatggatatgggttgtgttccaataaaactatttgcaaaatcaggtggtaggccagagttggctgggagggccacagtttgcagacgctgatggagaggaaaggactgagcatcttatcaaaactaccccccacctcacccccacccagggcacccatttgttgactgggctcttactgaaagccagtggctgatgctgcaacactggggcagcaggaggctcatgactgtgccctgccctggccctcgctttccaccatggttaccattctgatgttggagcggtgcc

SEQ ID NO: 153905 - DNA, 556 bp, Homo Sapiens
gtttatattgattttctcaaaatcagttgtttattttcaatgacgacgcctctaccgccaccaggtcaacaaaaacgtacttgcttttgcatttccgggactctagcatttcagagcaggaattaaaggccttgccaaggcttttaagcgattgattgaaacaaaacaaaacacagaaggataaattttgaatttgctaagacaagaattcgcaccaaggcagacataagacatgaggatgtcttcctgacttgcgtccttggctcgaatcgttcttattagcccttttcaaaaggcagctgtgacctccatttctggctaatcaggccacttttgttccccccgaggcgtgggaggacaacagttaagccctaacagcctgcgaagcagctcctcgacgaacggcggcgtccccgtcgcctgggcagtgggtgtgggaggtgacagcctagtcctgagcctctggagcgggcctatactgcaccgccgtacgtgaatttcaggagcgcgcaatgccgccaccatggcggaggggagacgcgccctcagcggccgc

SEQ ID NO: 153906 - DNA, 546 bp, Homo Sapiens
aaagttaaaaatataactttattaaattatttgtccaatgaaaatcctagtttcacttttaatatcaatccctctccccaaagagaaagcataaattggttttcaaagagatgagtcatatcttctttttacagagagacaacacacaatcaagagaacatacataggtcttgagcttcagcaaaggtggtactggcctggccttcagctgtgaatggaaattaaggtggcaggagactcagggcacagggtctctgatctcagggcagcagacccctttggccactaggaaagccatctccccctacagatcctgatgctgaatgaagataaagtctaatctgaagtatggttcagctccagagtgttctgatataggaaaggggtctgaaggtgcagaaattaagtcccttattgtattggaggagaaagagaagccttcttatctttctgcaatgtctgtactctgggtgatactcaccaaaggggatcagtgctttgtccttcccactcccccaccctcatgacaagacagaacactgaatg

SEQ ID NO: 153907 - DNA, 386 bp, Homo Sapiens
ttttctttacaacaaggttttatttattcttttcttttatcccccccaaaacattaaagtttttcatctttcttttatttttaatggttttccttttggatccaaacgagcatctatattataggatatccgcctggtcaacatgcagtgctgaactgtggctttaggagagatgcaccgatactctgggtgggccagcatcagctgccattcaaacaccgtgactgcaggggtgtcaggctggcacaccacagtggatgctgccctaaggaggtgtcttgtggggcatgacttgcacgttttagaatgcaggtagcagcattttaacagcctgaggcagagcacccaatttccctcctgatctcatcttacatgctcatcctcta

SEQ ID NO: 153908 - DNA, 489 bp, Homo Sapiens
ttttaaactctcatatttttatattatcacatgctgtttttcttcaaaaggccaaactttaggcaaagcattcattcaataagtgtgcacacagaggctgaaggccctttggcaggaactaagaggtaggaatttatgactgtaagactgggctgggtgacccgataggtcccatccaagaaatgcaaactccacacgtcatatactttctttcttgggtgatttggcaaaattagactacaccatggaaaaaccaattttgttccctacatctattcaaacctttacccagatccagatgtttagaaatgagaatgtggccagcaaacgtttggggagtaacttaaagttgctaacacccattgttctcagaaattctctccttggagcaagcaactgaaatatgaaacagagcagagtcagcgatcaccccaggacaactacactgattgaacttcaaattgacacagctactgagctctgatctga

SEQ ID NO: 153909 - DNA, 214 bp, Homo Sapiens
caaaagcaaaaagttgtttaacaatattccagaatagtagatacttcaaaaaccagattacagtatatatcattttgctgcacattttagtctattttctgtatacatagtcacacattctttaccctctcccaacttatacatgctttatccccccagtcatgtgctatgtaggtataaaaaaataaagttgtatctaaacaagtgatttaaa

SEQ ID NO: 153910 - DNA, 442 bp, Homo Sapiens
gcagatgccaacacatgactaaatggttttatctcaaaagattaatccacattaaattaacataggaccaaggcctcagaattgtatagccttttgttgtgagagattccaggctttgtgactctgatagacaggctggcaattgtctcctcataagggatggtagctggttaatcagtcagtcagcctggtagacccagttattgcctacctaacagtcaatgccctcttcttctttattaagaacaccaattttgttcagggagcaatgtgctcagctccagatgatgagatatgatagatctgcttccgttccggtgaactaaattccctgtgattggttcagaggtgaggaagttacctaattccggccaatgaaatgcaagagaaggatggaaaggagctgcatgggttggaggaggaagggatgagtggcttccag

SEQ ID NO: 153911 - DNA, 428 bp, Homo Sapiens
ggcctccgttttccttttcggaatgtgggtaaagaatttaccgctaacagacgacctccaggttcgctcttggacagcaagattgagagacaaaacttaacaaagcgctgtgcaaactgaaatcccaggcttagctcgcttgtgtcttgaacacggaagtcacctagtcacccacaagatgtatgagtacagctaacccccagatgcatttgacagacggcgtgggacgcgccacttgctgattggctctcctttcccagttgaccgcgacatcccccagccccaactcccttttgatggggctgtgaccacctgccggtcccctcacccacccctcacgcccggagagtccgaggttgattcgagtactcactatgtgcttatgtaacacatgttttcattattaaaatataactagtttaccctcc

SEQ ID NO: 153912 - DNA, 511 bp, Homo Sapiens
tttgttcaccaagttggtttatttgaatatatataagtgattctagatacaaactagagaacatttgtaagttgtcaaagaagcctacaggtggtggggtagaggtggggagttctcagcactatcattttaaagttttgctctttagtattctaaattgctgtgatgttctcaattatttttaaatcccattttaaaatattttcataacgttttcatttttatatatttttgaggtaataaaatagtatctctatgagcaaatttggtttatttccatatacagtactatgaaataagaactatccgctatttctcacctttcctgtgtactatttatgattgttttcattgtgataataggtagcagaatgatgagcatccctatcacttactttagaacattgttttataagagatgaagtgaaacaaaaaacttgtttgggtaggttttgtgattgtgtgcttatctcaggctcaaaactttacataattaagcccagctggttca

SEQ ID NO: 153913 - DNA, 516 bp, Homo Sapiens
tttcaagttctattttttaatcattcatacagccataacatgcatactagtcgaatatgagccttggataagggattagggtagataagcagcagagtggagtcctgaggtgacataagggctgaccccttatccatgtcatagtgcccactgggtcacaatgccaccaggttgcctaaacctctgccacccacctgtgaacttcactttgccacagggaggcactgaactgaaaaactgccttgtaagaggtgtcgcccctctgtctactccctttcttatatcaagaggggaaaaacacgtaactacctctacccgatctggtcaccatacgcctattacctttactgttacaagtaccggatcactctccgggagaagatgctgcctcgttgttataaaaggtacttgttttcatctctatttgtagttgtttatataaaatgtaaggaaaaagtaaaagaatttgaaagaatttcccaaatggtaagaaataacaacagaatagggggtgga

SEQ ID NO: 153914 - DNA, 552 bp, Homo Sapiens
  misc_feature (202)..(218): n is a, c, g, or t
ggccaagattgaaccctaaggtaactatgggctttgggtgattatgatgtctcaatgtaggcttatcatcaattgcagtcaatgtatcactctggaggaggctgttgataatgagggaggctgttcatgtgtggggtcagggtgtacatgggaaatctctgtaccttcctctcgattttgctgtgaacctaaaactgctctnnnnnnnnnnnnnnnnngaaacattttctgggcagcacaagggcttcttgtgaaatggtttgaatattttagatatgtgggttctgttatttaataaaattacaataagatgcattcatcaatagattactagtgcattgcttattagattactgaacaactagtgcttctctgaatggattcactgaatacagacatttatttgatctgccctttgtaacccttgataatactccaaggttttgctgctacgtgtgagaacccaagataagcctcaaacttggattctctctgaaggtataatgagctaccaccccagccatttggcacatcacccatgtttgttagaaa

SEQ ID NO: 153915 - DNA, 537 bp, Homo Sapiens
tttacgtgttataccataagctaattttccttcaaggataagaagaatcaaactaaaagatttacattcttagtttatatattagtccagcagttacaattaagataatcaccataagcatgtcacttgtttctcaattggtagttgcaattctgaaatttcagtttccatgaagttcagattattctcaagtcaaccctacagttttaaatataagcctaagcttggaaacaattcaaaccatccttttgactgaaaatgtacttctaaagggatctgaaggaagagatataattaggcaaaagatttaatctctttatatcagattactacatatggtatatggacatgtttactgctctcttcctccaatcaactatttcatttagaaagtgatttgaggaaatacatatcacataagagttagcatttttctcaatatatttcttttcatacctcccgaactgcactcctttctattctaccactctgcctcattcccctccacaaaactaggccacaaacatcctcacccta

SEQ ID NO: 153916 - DNA, 435 bp, Homo Sapiens
ttttttttcactatttactgaaagtttaatgaaataaaaaatagaataataaaacaatcaaggaccaagggataatcaaaaccaagtacatttgaaaaagaacaaaatagaactttgctatactccataatgataaaataaaaatccaaaaataagatgtaacattcaaaaccttatatgcacttgactacagaaccactactatgtcaataaataactgacagaattagaaggagaatttcaaatttacaattgtagggtaacctttcaatattctgtatgagtgttagattctcatattacaagcaaagaaaaatgctaatggttttctaggatttgaacaagacaataagcaaatttgatctatgattaccttcatttgacacagaaaacatcccttctttttttcaaagcacacgttggacaatttcaaaa

SEQ ID NO: 153917 - DNA, 485 bp, Homo Sapiens
tttaactgtattcaaagggtttttattttctgaaaaaatataaaatttcatatcttacactacaaaaagcatgtacacaaaccaaatgcacataaagattcaaatgagaaaaaatacagaaatcctaatccttctttgaattaactgtgagacaggaacttgagatagcctgatgtatatcatagaataagatatgctatatagctgcttctgacatgtctgaaactaagagattttggtaaaaatactaacaaatgactgagtctaagtattctcaggctcttataaatgtaactactcacttttaaataattgactgtaaaactacagcagcctaaagagtcatagatatgttgaccactgaaacttctactgtgaatacagttcccagcctgaataaacatgacattttaccaccttcaattttctccattaacgtttagaagaaacaaacaacatttgattctgattattataaacagact

SEQ ID NO: 153918 - DNA, 573 bp, Homo Sapiens
tttgtattatttttatatattctttaaccttgctgagctagtattgactgaaatctttagaactttgcctctgggcaatgaagtaatgtttctctaccctaagatatctatttgtataatctctggctgtaatgatcactttggaagatttcctttgcatctctaattatttctttttaatggaataaggcataagggggaataaatatattgtaaccaatgttatgtaaacccatatccatacaggccaggaaagccaaatgaagtcatttccagaattctagtgtgaaaaacctatttttgaaaagtggggagatggctttgtgtagaactgggtgggttttctctgcagactaagtctagccatgagcttccagatcctttagttttatcagccttgtgcttaccccattttcataaatgctactttaacagccagtcttcgtaagtcatggttcctaggttttcctgtcacctcattgaattcatctgtggtaggatattaacgggctcattcaaccaaatgtaatgtgtgcctcagacctatttagcatggttggggggcatcagcag

SEQ ID NO: 153919 - DNA, 930 bp, Homo Sapiens
tttgtttttgttgcctacccccaatccccaacccctgcagtgctttgattatgagaaagttctgcatgacttagcataactgctcttttctaaaagcctctgcaattagatccaaagggttggggtttggaccatgccaggttttgctgaggaattgggggatcggttacagaattatgggaaggttgtttgactttcaaatcttcacttatcccctgcgatacatttggcttcatgactgtttactgtgtggcttggttgctagcgcactctatctaggttaagatattgcttcctttcttcaaattcttgccatgtgctgattaattcttctgtttttaatttttcttttccctggattaattgccatttcagagtttgcatgaaaccatataacactattgagaagtttttggggaaggctatcggtcatttgaggattttgcctaccataagcatgcatcttttctaccgggaatcacgaggactctactggactgagttcagtggctgagacaaaattacaatagccaataacagtaacagcagcagcagccacaggttatcaagctgcttctatgtgccaaaaatgatgcagagagcttcacatgcagtatctcatctaatccttgcaaagcactgaattaaaagccgttttcctcagtaggagaaatttagcaaagaaatactagctaacttgctcagagtgacacaaactacccaaacagatctattcaaataactatgcaagtataagagactggatttaactcagtagccagaactcctaagcaggacacttctacttctcatcttggaggcaaattactgaccaatgtaccttaattctaatctaatttctttttggaaaatgtgttttttagatctcttccagtcattcaattaacttgatgttctattacttcagta

SEQ ID NO: 153920 - DNA, 536 bp, Homo Sapiens
ctcttagaaattgtttataattttttatcctaaactttttgtaaatcttgtaataaactgtaaaatactagaaatgttaaatatttatcgtattatcaggttcaactttagtgcatgatgtgatggctaaagctgtatgtataaattttattcattttcagaaaatattaaggtacaagtagatatagaaataaaactttcatattcattataataatctgtcaatcacttgttctgtaccaacattagtttaatcaagaggactttttaaaatgcagcttcagtctttcttcctgaaggaagaagcaaagttttatgagagagaagagtaagtagtataaggaatacctgactggatgcctaaaggtctatatttttttatcccagtgctgccacttacggaacttggataagtcagttaacttttatgagtctgtttactcatctgtaggatgagtaatgatctacctcccaaattattttctgaataatgtaatgaatttgaaaacaatttctaattggcaagcacttgtaaa

SEQ ID NO: 153921 - DNA, 479 bp, Homo Sapiens
  misc_feature (61)..(89): n is a, c, g, or t
tgatggttaccagcagaggactgaggagcgttatcagcaccactgaatgctccagaagttnnnnnnnnnnnnnnnnnnnnnnnnnnnnncgcgatcagaggcgttttctgccagtgacccgcgaactttgccccccacccctcgtccccgctccatactatccttgatcttggccaaaaggcggagaaacagcgaacttttccctggagccagaaggacgcaaaggttcgctagcggcccagggcgggcgcgcggctggagaggcaccctcctcactctgcccgctgccgcactgggcactgggactggctccgctgcctccgcccccgaaccgggccaggacccttggcggggtaggggaacgcgcacttaaacgctcctggcctgggggccgcggggcccagtcctacccgtgcggaccccgctcccccttccacacagtcggaagaccccaaagggcctttgaagagaccgaggtt

SEQ ID NO: 153922 - DNA, 523 bp, Homo Sapiens
agagtcaaaaaagtattacaggattgcctaacacacagcagagttaagttttcatattttacatgtgcaataacattttcgttttctttcccaaagagtttgctatgcagtactgattaccagtgttcggagtctagtgtgtagggtgtgtttttcatttacttttattctttccattaaaccaaatttaatgaaataacatccttttgcttaaggctatttttaaagctgtttcattctggggtcgtggggagcgagaaagtttttaaaacttcaggggtttctgaggttgccaggaccatgagctaattggcaaagtgttgatgactcaacgctgggaaagtcaaagacagaagttaagacactttgctccccggccttaagcaattaaggagaaatcattcctgtttcaaaagtaaaatgatgaggctctcaaacagctgtacactgcagaatcagaggggtcatggagtcttgcccagaatacggtcaactctcccacagcccatggtggggggaaatt

SEQ ID NO: 153923 - DNA, 554 bp, Homo Sapiens
tttaattctgttaagattataagtgtgtaatatataaaattttaaaacaaaaatacaaaccacagacaaaatctttcagatccacattcaggatgctttgccctgctagccattcagggtgtgcacagcttacattcacagaatgttgaaagttattatcaaccaaccattgaagtagccacttcaaatggcagtcacagagcaaactgcttgtgttcagaatccattggatccccgatctatcagtcaggagtgaagacaatggcttcaaaggtgcacacttggggtcctgggtgagaggtctgggggtccaatgatgaatctgatcctatcggagtcacagcaccgtaaagttcttttaaatgagtctgagaaaaagcattttcttggatagacattatagcattattgttcaaatctagatgctcaagggattcaagaccaatgaatgctttctttgtaattgacttaatctggtttccttgtaagattagtttagtgagacttgtgagtccagcaaaggcttcactagcatcttctatggcccataaatt

SEQ ID NO: 153924 - DNA, 884 bp, Homo Sapiens
aaatgtgtaatatacatttttaaattaagttgagttgcatgtgttaatattcaggaaatgaaactttttaaaacaattatgggtaatcacaaactgcctcatatggcttaacaaaaatttttaagtcaattataaggcttcgatttgtgaataagggaacaatttgtaacgtgctctggcaagattacaagaaagttaatgaatatagaaatttttcaagtgatgaaggcaggcttatgtgaaaaactgagaatcccctaaatgctactgcttattgatattaaaaactttcaaaaatcttatagccatttatttttaaatgtctatgctgtgtcctgtctccaaattagttttgctgcttatatcccattgcttatctgatagatatgattacttggacttccagaccctctcttaattctaattatgaatgaatagacatcttcaactaaatattatacatttggttataagtatataattttcatttatattgacattgcttcctatacagtcaactctttgcatactaaaggtattaacccaaaaataactttttcataatcctgtgcaatacttagtcatataagcagttccttcatgaagttattggttcacaactatggaatggatggaaccatttagggaaattcctgccatgactgttttttccttcatcaaaaagaaagataatcatgatgaaataatcgattgattatttagtttggaaacatccaaacacaatcataattagaatcatttctctagaaaaatatttctgagattcgttctgacactaaaactgcaccaccaatgtggtctaaatacagaacactagcaagctgattatgtagttaattcctaagagaagaatcaatattaaa

SEQ ID NO: 153925 - DNA, 565 bp, Homo Sapiens
tttttacaatcagttcatgctttacaaattactctttcattttcattaccaatgtcatgaacatttctccaattaagtatttataaaatcatatcattcttttttaatagcttcaaaatattccatagtgcagatatgcataatttattcaatcctctcacctttaatggacataaggttgcttccggatttttgccacaatgaacagtgccataatagatatcactgcacaaacatttatacgtcataatatatatgagtgtgtttaaatgcttagcaaaggttaggaagaacatgcattttccacagaacagattcgcaaaagtgggatgacttatttagagtgtgcctgtttttactttaatagatatttttcggaaaggttttagtactttgccctcctccatgtgagggacaagagtgtccaatttcctttggcctcacgcacaggattttactcctgtttttatcatttttctttctaaggatgacaaatggcttttattttcatttgaatgtagttgaattcttaactaattaaactgagcatttttatttcacattt

SEQ ID NO: 153926 - DNA, 574 bp, Homo Sapiens
ttccagtccagaagaaaaaacagtagccacttatacaactataatacaaagcggtgtgtataaattaaatccttaggagatatataaagtagtagaagagttaaaaggagggagatattactttcgggggagattcaaaaaagactttaaagaaattagaaaatggcatttaaataagatttagacggcagaaatgtaggtagaggcattccaggaaaagatatagatgggaaagatgtcacagagaatgtaatgtaagtactctggattgcctggagggaggggttcagataaaggcagtgtgagaaataatgaaatgataaattggatgagattacagacaaatctgaatgctggacaaagtggtctatattttcttgagtaatgtggaaccacagaacagacatatggtatatattctgaacagaggtatggtttctattcacagctatgctttagaaaaattaatatggcagagactggagcccaaaagagaaattacaaggcaatcataatagtccagagtatttagagtggtcacagtgagaatgcaagattgattatttagtttggg

SEQ ID NO: 153927 - DNA, 913 bp, Homo Sapiens
  misc_feature (49)..(153): n is a, c, g, or t
tacacaattactaattggcttgtttgagtcactgttgagtttagaattnnnnnnnnnnnnnnnnnnnnnnnnnnnnnnnnnnnnnnnnnnnnnnnnnnnnnnnnnnnnnnnnnnnnnnnnnnnnnnnnnnnnnnnnnnnnnnnnnnnnnnnnnagacaaacattttaaattttgacctactataattcattatttcttttatgactcatgcttttgatgtcatgtctaactggtcacctaaccctagatcaccaaaagtttcacctgttttcttctaaaagttgtatcattttacatttcacatttaaatctatgatctatttgtctagaatacgactaatacagctaatattttcatagttttgcagtcagagctttctgagcaaaaattagtggcaacttgggttaaaggatgagctttttattgctataaatctcccctaagcagtgctttagctatatcccacagatttacatgcagtggttaagaaataatacagagagatatagcccttatatactttgcccagattccccccagtgataatattctccaaaacatagtataattttacaaccatgatattgacattaataaaacccattgatattatgtagatttttctggttttacttgtactcattgcatgtgtacttgtgtgtgtgtattaaatattaaacaattttgtcaccttgtaggttcctgtatccaccatcacagtcaagataccgaacagttccaataccacagagaacccttctgttgcccttttataaccaacccaccatcctctcatctcccctttccctaacctctttctctttgacatgtaaattatttagacatagggtgcttgattttcaagtgtttggagacttttctgatatctttctattggggtattctagtttg

SEQ ID NO: 153928 - DNA, 529 bp, Homo Sapiens
ttttcttgtgcaaatgctttactgagggagtactttctggagaaacctgtgagggaaccaggaaaactggataggccaaggggtcagaccaagcagagaggtggttccaggagaggcctggcctcagcccgatcccaggaacaatttgagagtgtcattcaacccagacaatgctgcacagacacgggggagctggcaattgtaccctccatggtgtcactctcctggccatgagtgacaggtggcctcttggtgggagaggtggggcagggggaaggcagctcccactagaccagggcagtatttaggggaaggaggcagattggagcagttggctgccaacacctggcctcactcagggagaggggccttgggcctggatgatatctgggtgaggtacccacaccatctgctgcaacctctgtgtatccattatgggctcacgccattcacaggcatgaattgagcacctagtatgtgggaaaacaggggaaacagagatggcacagacatggtctccatccttcgg

SEQ ID NO: 153929 - DNA, 369 bp, Homo Sapiens
ttttttactttgcacactactcttcgttttatttattgtttttggaaatggaaaatagaaaataggagacccagttgtctctttaaagttttaagctaatgatgctttggattggtaggacctgttccttacatcttacctcctagttacatcttttcctaggattcttaaaactagtatggatatgctgagcatacattctttagaaccttttggactgttttggtaaatttcgtagtcgtaggatcagcacaaagcggaacttgacacacttgtggagttttacggctgtacttggtccttctccatccctttgcttccttttcctaaaccaagtcccagacatgtcaggagaatgaattcattttt

SEQ ID NO: 153930 - DNA, 378 bp, Homo Sapiens
tttgcttggataactcttaggcaatccgtttccaggtcttcacattccataggtactccttcctaatctgtgtgtttaatccatgggttttcaaaacacatggattaaaattttacttatttgaggatcagagtgtattatggataaggtagttaaaacttattttatcaagccataccatgaaatactccaattgcagtcaatcctcacaatatttcatcttataaaatactgtttctatctgctgttaacaagaaataaggaacaaatttatgatgaaaaattatagatgtctatttaaagatgtgcagggagttacataatttaaaaaacaattatttgggtctaggaacagaagagtttgaagaccactgatgt

SEQ ID NO: 153931 - DNA, 552 bp, Homo Sapiens
ttttgatttctgttttacttctaaatatgaatgatatggtttccaagtagctacttggaaagaaaggggataggattcattgttttgctctaacatggtagaatttaaaatttcacatcatatacctggagttttaactatatgaaaaatagccaaatgtcatcactttcttggatatttcttttacgtgtatatatatgtataatataaacagaatacatctgattagtacatttcaacatttcatcagtgtgacttttatctcctattttatataaaataacaaaatatacagagagaagaaaggagacatctgttcatcatacacacaaagtaaataaaagttcatgtatggctttgcaaaggtagattatgacgtgacttccatatttatttgtttaaaagcctcttgagagaacgtgtcagtgtgcttacgagagcggccatggtggttgagtgtcgcgccgagagtccaacattagggtccccagggttctttccagtggctgcttcggcagctttcagtagacaaatgtaatttatgaccacttc

SEQ ID NO: 153932 - DNA, 477 bp, Homo Sapiens
ttttttgataatttttggttttaatgaggttaaggtcaaatcattatgacttcttaagacattttttagccacaggctttatctcttcatggggaagggagtcacagtcactgaaggaactgacaggcaggtgaaggcaaggtacagaaggaatgaacagccacgtgtaactgctatgcacatgtctcttctatataattgaatcttcactacacttcttgagcataaatagtaaaaccctgttataccgagaggatactgaaggggaggcggttagttctctttgcaggcatctagggagaaagccttccaggcagagggaactgtcaatgcaaaggccttaaggctggaatattctcgattactggagaacagcaaggcagtcgtgacctgggggaatgatctccacagaggtgcggatgagggagggaaggggagggtggattaggccatcagccttcacagcagagtgacgtg

SEQ ID NO: 153933 - DNA, 436 bp, Homo Sapiens
tttttaaattcccattctaattccagtctaacatctggcagggatactggtgggtaaccagggatggaactgctcctgtgggtggtaaacacccctctcctccctctcaaggaacgtttttccctatgtaaattaacacaaattgatttcgttaaaaagaaaggtgagttcttattagcaggatcaagcaaatgtattatcagaggaagcactaatctctgtgatgagacatcaaaaggtacataggtggatcaccaaattatcactctcattaagaaatttctggcaatcctctgcagaagaaatacctaaatataaatgtgtcatgctgattagtttttaactacataatggggagatttattcatatcttgctgctagtttttcttgcatataagcatttgttttatcagcaggtttgaatcaaactaaatct

SEQ ID NO: 153934 - DNA, 430 bp, Homo Sapiens
caaatatctggtcctttagcatttctctcttctgagcagcactagactcattaatgccatgtagtcgtacccaggttttaaacagtggtttctatggcttaggacaatgtttcctaatgttctaaaatccatatcctctttttaaaaaacagctttattgcaatataatcataatctcttttgatttgttgctctttttctctatcgccacctgtttttcttggcaagattcactgatagaaacaatctttttaaattaaaaatgtagcgattgtaaacatgatcaagatataaagtttgaaaattttaaacattacagagggtcgtacagtaaaagcaaagtctccttccatactcactgacctccccactctccacgaccccaatcttctgctctcaaagtaactactcttcagtttatgtctagatt

SEQ ID NO: 153935 - DNA, 416 bp, Homo Sapiens
aagacgataacacactaaaatttctttttaagtattttaatcatctgttgcagtagattgtattttccaaaatggctaccatacaacacaattcccattccacatgctcttcaatgtgactttgccagtccccatccagaggtagaatctatttctccatcccttttcatctgggtgggccttgtaactcctttgaccacgagaacatgggagaagtggtgctatgccagttctaggcatagcccttaactgagctggcagcttccacttcactatgctaatgcggactccaagtcttgctatggttttgtaatccaggtgtcctgaaattccctggtgactttgcaaatcacccgggttgtgaggagtgatgttgtttcatcactcatttacattttacttgccctggaattcta

SEQ ID NO: 153936 - DNA, 450 bp, Homo Sapiens
ccggagagggaaggagttttaatttggagccgagtgattcacagtgggctgtggctgaggcacaggggcagatgaggcagactccttgtatgactacagtggaggacagtcccactggaactaggggtcaggggtcagggtggggaggagaactacctacaggtatgtgaagggtgtcagccttcaagaagatctgctaggttgacccaaaggatggggactgggagccccgaagtaaaggcaagttcagatgcacttagaaaaaaaggtcgcgttcctctgtcgtctctactgcgcggtccctggctgtggaccctcctcgtcaacttccaaacacttggttcttttccaaagcctgcctttccctctgggatgttgatgaagccacttgctttgtttgctcctttccccaccccctaccccagtctgtaagtcaggaatactctttcc

SEQ ID NO: 153937 - DNA, 698 bp, Homo Sapiens
tttcttaataataaataatttattaattagaacatataagtgaatacagaagacatttaaaagtaaaaatacaaaggaataattttattcatgcagtgctttcataaaaggtgagtataatctcagtccatgagggtgtaaagtgaaatgagctggctggctggagacggacagggtgccagagactactagccagtcagagtcacagctgtattggtcgattgctgggttcctgttggcttggtctggatcatgttatttctggtgttggatttcctgtccatgctcctgaccacgtctctcacccatgtggcttgtggatcagcacagacttttaggccacgtttggtaataaaaattactgctctcaaggagccttccgtgatggtgtaggtcttgattctgctaaccggcagtcgctgggtagtgaggctcacacaggtcctcttatctgagacttcactccctacaccttccacaatgtatgcagtgagagagcagatgccaaggagggccaggatgagaagtctcatggctgaggtcctgctgagctgtgcaaggagagtgaggatcgggctctttgaggacctcttttatgcctccagtggtcagtgcacttcctgtggtgagagggggctttcgaggtgggtgtaggatcatggaaagtctttgcaatactgatgcttttatttttctta

SEQ ID NO: 153938 - DNA, 354 bp, Homo Sapiens
ataaaatacgaggaaagtagagaggtatataactgttgttggggtgaattagatagttaatgagaagaaagtcagaaaactactgaaggcaaccacggtgaaattggcttccagatcaggccctcaggccagataggtttggccttgatggaaagaccattagaaagtatccaaagctgccattatagccttaatcatatgacctatccatcctcagtttctaacttggtaaactgagtgttagattacataacttctgaaatctcttccatcttcaaagtctgaattttgccctgaatgctttttagctcacagggaactagatttcaaggacctaaccacagatatcttaaa

SEQ ID NO: 153939 - DNA, 706 bp, Homo Sapiens
ttttcaaagtgcaatcggggttcttcgtattcatggaaaaaaatcactggtttagcccgggtctgccctatttaggatgagtccaggaggcggcggaaagaaaggacgctcttcggtcagagggaggtgtttcgggccatgggagggactctggaggcctttgcttggataagcttggagatacagatgtccttctcttccctacaaggtgccttagtctccgggcttattttcggcagtgcagtggtactggggaagaaggcagagccgcgtgttgagaaggggctagggtagtagaggcgctggagcctgggcggcagggcgctgcaaaggcccaggcgaggtggatagagagcttgctggtgcgcgcgagaagcacgcctgcaggcagaggttgaagcgccgtcccagttgtgtcccagagtgaagcgggagtctttgcccgccccagccacttcgagctccactccagttcagctcccagagtcgccacttgctgcgcggttgttggggagggggttcctggtccagaacgagacgtggggggctgggggtttcctcgagaactgcaggcctggttgcccccggactgtcagagccggaggccggggagctgccagccacgtgcgcctgtggcctgctgagaggttgaaaagctgccaagggacgaaggccgagaagacaggacctaggggctgtggaagat

SEQ ID NO: 153940 - DNA, 552 bp, Homo Sapiens
tttttggcggtttaaaaatttactgtggcaaaatgtacgtaagatttaaattttaaccattttgaagttacagtttaaaggcattaaatacattcgttgtatgtaccagtcaccactatgcacctccggaactttttcatgatcccacactaatctctgtgccccttaaacaataaattcccattccctcctgccccctgtgacaaaacgtaatctttgttctactttgtctctatgaatctcactagtctaggtacctcacatcagtggattcatatagtattgtccttttgtgatttacttaatgtctgaaaggttcatccatgatgtagtatgtagaaggatttcctttttatggctgaataatattccattgtatggatataacacattttgtctatccattcatctgttgggtatttgggttgtttctaccttttgactactgtgaataatgctgcagtgaacactggtatacaaatataccctcaagcctccgctttcaattattttgtgtatatacccagaaatgcaattgctgaatcaaatgac

SEQ ID NO: 153941 - DNA, 547 bp, Homo Sapiens
tttgcttccctccagcccccaccgcccccgagaatacctggagaattgggctcaaaagtaaagggtttagaaactgtcttgctgaagtaagcagtcttttataagagcacatctatccccttggaatgttacctaaatatacaggaatctgaatctgtagaaccgataaagtagggggaaaaatctgttttccctggatacatgcatagatgaatggataaatgcatgattcatataatattaggatgctatgacacctggtgctttactctgatcagcctggctgtaatcaacatgggaaatacatggaaatagaagggaagtcatttataatgtctggaacatattgaaaactattcccaagcagagaataatttccaactctaaagaatagaaggggaagtcttgtttaaagagaaatgtctgaatgttcatcgactttttaagtctgcatttcgaatcgaaactacagaactgagcaaagcgttattcaaatactgtcattcattccaatttctcagcaaggcctatgatgcaatgttcctcg

SEQ ID NO: 153942 - DNA, 523 bp, Homo Sapiens
tttggttcttggtcattaacatgccaaaaaagaggcaaatggaaatatatttttgaaacatatatagtttttccagacaaaatagagatccacttcaaactatagctataacctctaagtaggtatgtcatggacattcaggtttattcaaatatactcataaaaagccaactgaaaaagtcaacaattcctcaagtccaatacaatcttcctccatggaaggaactagttttcagaactagtctctgaagcataaattctctgaaaagccatgacaaaaaaatgaatacttctggtaatagtttcggtatattcttgtccacctctataatgcaggagagacccttttccccatgccaaacagcagaaaatgcccatccttatctagagaatccttcaggacctaccacctctagcttcatccttgaaaaactatttcagagggaaaagcacctctaccacaggaagcaccaaattagtgtatctagcagcaacttttctgtaatgtaatttttcacctcgt

SEQ ID NO: 153943 - DNA, 524 bp, Homo Sapiens
  misc_feature (331)..(478): n is a, c, g, or t
tttagtccaaggcattttttaatgaaatataatagaaaatatcagtgtatcactcccactaaggataaaaattaaatcataacatttttatttcagttaataaatctacacacatatttactaggtcacaatgtaaattgtatttcttactggaagtcacagccaaaaaattcttaaagccactggattagaggcagagagactgaaagaagagaccagggaagaggctgctacagaaatgcagtctgggctgctaaggatgatgtgtggagatgccaaagagagcctcaagcagtagaagctggggctaggcatggtagcagctcacacnnnnnnnnnnnnnnnnnnnnnnnnnnnnnnnnnnnnnnnnnnnnnnnnnnnnnnnnnnnnnnnnnnnnnnnnnnnnnnnnnnnnnnnnnnnnnnnnnnnnnnnnnnnnnnnnnnnnnnnnnnnnnnnnnnnnnnnnnnnnnnnnnnnntatattattacttggggggctaaggtgggaggattgctttagtaca

SEQ ID NO: 153944 - DNA, 532 bp, Homo Sapiens
ctgtacctgtgaggagcagtacgtgggtactttctgtgaagaatacgatgcttgccagaggaaaccttgccaaaacaacgcgagctgtattgatgcaaatgaaaagcaagatgggagcaatttcacctgtgtttgcctttctggttatactggagagctttgccagtggaagattgattactgcatcctagacccatgcagaaatggagcaacatgcatttccagtctcagtggattcacctgccagtgtccagaaggatacttcggatctgcttgtgaagaaaaggtggacccctgcgcctcgtctccgtgccagaacaacggcacctgctatgtggacggggtacactttacctgcaactgcagcccgggcttcacagggccgacctgtgcccagcttattgacttctgtgccctcagcccctgtgctcatggcacgtgccgcagcgtgggcaccagctacaaatgcctctgtgatccaggttaccatggcctctactgtgaggaggaatataatgagtgcctctccgcc

SEQ ID NO: 153945 - DNA, 463 bp, Homo Sapiens
tttaattttttgagagataaaataatgttgatttggcagatatacaggtacaaactctgaagagtttagagtgaggaaagaaggtctctcgtgatgtgccaaacactttcaatgcctcatcctatttaatctttactataacccttcaaggatgattttgtgatccccacttgacaggtgaattaattgggcctcaagaagctatgttaatgagatagcatcgataaagcctttggctccagaaggcactcaatcaagttaatgttctttcttccttgggtaacttattccaagtcactggatcagtaaggggcaggagcagaattcaaacctggacctatctgattccagacacccctgggctttctgtctcaccgcactgcccagacactaacaagccgttgggagaactgatgaaccgaatggagaccactgctcttttgctggttaaacaaaagtggtt

SEQ ID NO: 153946 - DNA, 554 bp, Homo Sapiens
aacagcaaacctgagaaagtatgttgctttgtattaaatggttgagaccattatttgatataaaagctgaaaatttaatttttgtattttggagaattctgtggttccaagtaattgaaagaatgactaatgctgtatgtcatagaccctgctaaaatgaaataacttgttgggaacattccatgcagatttccaaaatgtattttaccttattattagagaatgaaaataaacttttaaaataatctgataactagcattcatatatttaataagtattttggttacagaagggaaggtgatactgtacattgtaactgctgagacttttttttaaccaatgtctttggtagatagcgaggcacaattattttctcttagggaggattttgaatacctattgcaggctgagccaccgctgctggctctttttactttagattgtatctgcctgatttgacaatgccaacttttttatgtaatcaccatttggtttgggactgagagctctttcattttctaccagtcaaaccactattagagtcttcatgtta

SEQ ID NO: 153947 - DNA, 484 bp, Homo Sapiens
  misc_feature (44)..(74): n is a, c, g, or t
gtcatttgcgtatttattttacatatattaacaaaacattagcnnnnnnnnnnnnnnnnnnnnnnnnnnnnnnngtaaatataaagaattggcgattctatccaccatttcatgtgataggagacatgaatctgctatctctgaaggccatcttagtttccgtatgcctccagtagtgtgtgcatctatatctggtgcttgaagagacaaacttttgtacaaggcgatccttatccaaaccaactgtttcatttggttctcaaccatagaaacactggaggacaaaaactggcagtattgttcttattgagggaagagatgtcggtctcttatataggagactttcagtactatgttgaggatatctgtgtctatgttcatcagggatgttagccagccattttcttttctagtagtttccttgactggctttggtatcagggtaatgctggccttgtaaaatgagtttgggaatattccatct

SEQ ID NO: 153948 - DNA, 476 bp, Homo Sapiens
cggaaactagggattcatgtgcagttagaatcctcttggaagactagtaggatgtgaggttggagaggtggacgacgaccagaaaattcccttgtcttgccaggcttttgacctaactatgagtttcctccgcgcatccagcctgccctgctctggcccctaaagtacagcagtaacactcagtggtgtccctgccttcctggaatgcgcgttaacaattctgattcttactcatggcaataacctacacaccacatagacgttaaatgtggttcgggtcagactctagggcaggactcactgcctgcaccttgtcttggctccaccagcttgaccttgagcaagtcacaacctgtgggtctcagtgttccttactagtaaaccgtaggtaattcctcactagtaaacagataatatttgtgcctgtctcaaagttgtgaggatttaatgaatttgtgttcctggtatacagtaaa

SEQ ID NO: 153949 - DNA, 240 bp, Homo Sapiens
ttcgattgatgcacaatttattagagcccagaaatcatggcaatccattcccacaagcacacagcacagctaaaccagctccaaggagggtccgagtgtccacaactgcaccccaggcccattgtgcctgccgctggagagtgtggggccccttggcccctaaaggtttgctgagaagtcactgacatgagacagatggattaataggagaaacggtatgcaaatttatgtgatgtgtac

SEQ ID NO: 153950 - DNA, 560 bp, Homo Sapiens
  misc_feature (72)..(72): n is a, c, g, or t
tgcggccgctgaatgccagggctatgtcaagtctgggattcttagtggacttctccacaaacacggtgcctnattaggggaaaaagtctctagaattctcctggcccagccttgaacatcttccagtaggaactgaggagagcttccgatgcaaaatgagatggaaaagaaggcagtggggtaatttaccactgaaaagatttccccattagacatttttacagcatcaaacttggtgggggagggggtttctcctggcacgattctgtttgtttcctccttttgtggcacgaacaacagcatttcatattgaaacatgaagcctctaaaattaggatggcggccagaaatttgtaatgggtgcttcacaccgttcacactcctgcttcaccctcctggctccactcagccgagggcagctccaccctgcaagaaactcgcagctcaatttggagcaagttttgcttgctgaggggaggctgctgtcaatggcaccgaatgccaagcaaggaagcagacctgattcgtttctaggcttcatcaccagctgcttctccctc

SEQ ID NO: 153951 - DNA, 525 bp, Homo Sapiens
atatataaaagtatattcctaaatagaaattaatctgcatccttcacttgctcttcccctaccccttaacacaaaaaggtttgctgtcaatagaacaaagcttttatcccagacatgtttcacatcatgcctctgagcagacccaaattctgttctccaggttgggaagaatgtaattgacctcagctggtgagctcagtgataggtcacatgaaggaagcaaggagtggtgtttgcctaatggctgctcctggactgctcagtatattaatacatttacagaaaaattgtgaacgtgtacaggagtaaccagtacagggtcctcagatcatgcattattcagccatatcacaccaggatttcagccacctgctgccttcttggagaggcaaaaatttagcatttatttgactcacaattgcccattgtccattttctcactaataactaaatacatatttagctcaaaactcatactagtcgattagaggcctctcatgagctctaaagtgaagataagagcgt

SEQ ID NO: 153952 - DNA, 392 bp, Homo Sapiens
ttttaaatcaatgcaaataattggtattgggtaggcttatcaacaaacacagcaaaatcagatactcaatatttacccaccttttagaagcatcatctacatttattggaaatattaccatacaaggggaagagaaaggcttacacctcataacaacatagcataaaaggacagagatgaagatcattaatgattttaattattttaaggaccattaaaattagagaaatatcaaagcacccacagtgttaagggtttattattacagcattttagagtttactagttcatacctttcaatcacagcaagttattagcagtgaagggatgaaccctcttaagaggatttttatttcaatgatagggtgttacggacaagacaacctaagttt

SEQ ID NO: 153953 - DNA, 433 bp, Homo Sapiens
aatactgcacatatacacagagaaaatccactgatatttatgttctttgacgcacactttcaatacatggcaccttcatcttctttattgagaaaataaactgttatgggtccataactggtatgcacagtctctgtgactctggcaaataaccaggagccaagtccatataataaagttggaataccgaggttgacgaccttgagcgccgtgaagaagcggttctgccgggccaggtcctgccagggagccttggagcagtggtacttgatgaaggggaagcagccggtgcgcaggacgtggtagttggcgccctgcaccggccagttgaagtgcgagaggccgaactggtcgttgcggacggcgctgtagggcacgcagaaggaggtctctattcggtaggcgccgctgcagcagatgccgcgtcagcacc

SEQ ID NO: 153954 - DNA, 549 bp, Homo Sapiens
tttccttaagaatcatagtaaaccttagcagtagttgggcactgcatgaaaaatgaagtttacatagtttatattatgtacataaactagtgatttacattgatttacacatgattggtgcctaatttattaatcagcacgcagcatgtaaatgtgctcaaaagaaatcaaggtttaaaataagttttccataatattcataaacattttcgctggtgtaaatgttaaacctaaacccaacgttaacaccagcttccttgccaagagaaaagtgagatgtacatgctgggtgaaaacaaattctttcctaaattttggttggcgacatttgaacagcatagctacatgcaaatgagaatagtttacttcttttctgctagtatgcacataaatgtaaactccattttgcatttagtgagatgtttacagatattatgccaaccatgatggaaaatttacatcactgaggcaaatgcagtctttggagaagaaatattctaaacatttaagcaaggaggaggcttcctaaactgcatttttgtttcttat

SEQ ID NO: 153955 - DNA, 545 bp, Homo Sapiens
ttttcttacatcagattttattatactgaaatacaagctacatttttacaaaatagaaattctttgtgagtggattgacttaattttatttctgtataagctaaatatgttgatctgttttatgaacatgtattttataaaaatggtcacaatatattttttaagttaactgatttattgagggaggaggagagagttgaccaaagtctacatgcatagacagtcctaaaagcgtatctcaaacatgaagatgtaaatttgagagttaatgatacaaatttcagcaaaaacattttacaggcagagagtgttttggtgtttataaaagctgaactccttttgaagggcttttgtacaaatacgcatgctcatatactatatgcatatataggtgtacttcattttgagaaagtccagtgtaatactagcatcaaatttacaaaacaggtttagtgttgactgactgaagaactcactacaggttttacttcaactgcttacattcaaaagtattcaatttacaaattttaggtacttactgtgta

SEQ ID NO: 153956 - DNA, 763 bp, Homo Sapiens
ttttttttaatggaaagcaagaaagaattttggcatagcctctgtacaagccttgacatctctcatatatttagatggttaaagtaaatttatggcattcttctctatcttctaggaaggatgtaataagcattctccctaacatttcagggtgaaggtcctttcttatctagttaagtgtgcatttcaaatatgcttcatggtatccaagaatataaataacaaagaggaaaactcagagccttagagtccctactggggcctagcttgcagcatggcagagatcattgtaacaactgattgcattataattgtgtgaatgactcacaagtctagcagaagtctgcacaataataggaataatgttcaggtcaaaagataacatcatgttgaaactctattaagccaatgagcaggagatggtcagcaaagtcctctggtgccctagacttggttaccatgtggagatgcaacccagctaagcttaaatgccttgtatacatggttcttacttagaaataaagacaatcttgtgcatttcaaataggcatctggtcacaacttcctttcctgtctacatctatgcatttgtttaaaagagtttaattttaagaacaattgatattatgcattatggttacttagtaatttcacatttatcaattcattttattttctcagaaactctataatatagctattaaatccatgttttacaggtaagtctacaagaagttaagtgattccatatttagtatctttt

SEQ ID NO: 153957 - DNA, 546 bp, Homo Sapiens
aaggcaaatattaaacagaaagaagacatgttcatacattgctagactgacccttacctggctgcaaaatgcagaggtgatttcttatctttgcttttggaatgaatggacacattaaagccatgtaggttatttacagaaccagggcccccctgtctacatgcataatgtagaggagtacacccatcgttgtcttcatccattaccagctctttgatctgttgcatctataggaaaaaattaatatcatacaaataactctgctattatgctaatatgatggttttcaaactattctgtaggaaaatattttccaacaagggtcaatatgtattccttggggccaaaattgtaaataacctaaaggatttgagagtaatataaatatgaatgaagttgaatgctctgtcttcatgtagtgtacattaccatattagtgtacattactgtattaaaggatctgagagatcatgccaataggaaaatgtacttaacatttttaactcagcatttttcaaatatatttgatcatggcccttccctctg

SEQ ID NO: 153958 - DNA, 586 bp, Homo Sapiens
ttttgttgcttatcatgactttatttcaggaagctgaaagcacatcgtcttgcaagactttttcccacattttacagagggggaaatgaaggtacacaggcatttaggggcacattcagtcatgtgatatatggcatccttgccagaactgactagactccaacagtccttactcccaaaactagtaccacactgatagaaaaaggaagtgtgaggctatatctatctccgcccagtcccggattctgtaaacgctgtgatcattgccatcgcttctctaaattattattgttattattgtaataactagtgggtagagttgagtgggtggtgtcagataattactaagaccccaaaattaaagtggttgagtccttacttttccacggctgctcaagatgaaaatgaaagctggcctccagggggccctgggaggaaccctaatcttgagatagagggagcccaggtggggaaggcaatggaagaagagcaggcccaaaaggcctaggaagccacacttggaaactctagatcctggattacaggaccctgagtgagagagcacagtcaaaccaacctggctcac

SEQ ID NO: 153959 - DNA, 522 bp, Homo Sapiens
gaaatgtgagcctctggctttgggcagcagttttgttacgaacgggaaagacatccccccagatgagacccagagtacccagttccagcactacccaagtttgggaataaagtagtcagtaagaaggtaattaaaagtacagcagaatcaaaaagaggaaggtttacaagctagtgcagagaaagctgaacttaaaaaaggtagttcagaagagtcattaggtgaagacccaggtttagcccctgaaccccttcccactgtcaaggccacatctcctttgatagaagaaactcccattggttccataaaggacaaagtaaaggcccttcagaagcgagtggaagatgaacagaaaggtcgaagcaagttgcccatcagtgtcaaaggcaaggaggacgtgccaaaaaagaccacccacaggccacatccagctgcgtcaccctctctgaagtcagagagacatgcgccagggtctccctcccctaaaacagaaagacactctactctttcctctgccgctaa

SEQ ID NO: 153960 - DNA, 506 bp, Homo Sapiens
ttttcatatcggtagttccatttttattctttttctttgggtggggggaacttccatactcctttctgcaatggctgtaccaatttacattctggccatccatcaatgtacaagggttcccttttctccacatccttgccatccatcccttataaaggtttatgatattatggaaagagtctggtaacacagtgagatctggaaacagatccctgaaattcagctaatcagtagaaactttatctggaaggtaatggagagcctttgaatttcttttttgataattacaaaaaatgataaaatgaaaacaaggctttcagaagattcttgggctggattgtttggagaaggtaggggcaggagaacaggagaccagttggtaggaaagtataatagtcaaagtgggaggtgatcagcatgtatatgagcatagcagctatagggcaatggcagatttgaggctcactggtatgagaaacatgagacaattcatgagattatctgag

SEQ ID NO: 153961 - DNA, 485 bp, Homo Sapiens
  misc_feature (243)..(282): n is a, c, g, or t
ttttgtctcttaagttgtgactttaatgattacagtttttgtaacctaatttggctctgggcgctttcagaggtgaagactctgtatgagtttctctggttatagaaagtctttgtatgatggctttctcagatgctggttgtggtggcaatgtgcttggtgtgtgagcaggttcactgtctcctgcagggctagaatggcagaagtttctggaagcttatcttgttccccattggtgtgcannnnnnnnnnnnnnnnnnnnnnnnnnnnnnnnnnnnnnnnctgggttgaaatgttcaggcttcaggccagtaggggaggtgtctgggggtaaaaaccagatgtagctaaagtatgtgggtagatgcaatacccaatgttggggagagatcacggccttgacaaaggtagctgggagaattctcagtgaaatgcactgtggtcttttcaggaggaagggagagagctacctcagctcctctgcc

SEQ ID NO: 153962 - DNA, 1100 bp, Homo Sapiens
ccaccatagccgcccccacttctatctccgctgtagccaccaccgctgcttctgtctccaccatagccacccccacttctgtctccaccatagccgcctcggtctccacctctgcccccacgacctctgtagcccctctctccaccgtagcctctcccccggaaatctcctcctgagggacgagagtcctctggtctaggctcattgcactgattgcaggaattccttcgagcaaagttcatatttccgcatgacggattagggcaaacccaatccccacttttggggtctccacctctcccttgaaagcctccacgacctctatatcctccacggcctcgccgcccacctccacttccacctcctctcatgaattcaggtcttctagtggcaaaggacactttaatgatgttgccatggaattcttttccatcaaaccagtcaatggctgccttagctgaaggagggtcatcaaatgacactgttgcctccccctttggctttcctgtgtccttgtctgtataaagatttatcattggttttccggtcttcttatttgtcttgataattcctatttgtttaaagaactccccaacttgatctgtagacacaccctccccaagtccttgcacaaagattgtgttgttatctgaattatcagattctgaatcagcatctgttctgggtccataatccctgtgaccaccaaaatttttgaagccaccgcggtcaccaccactgcagaggaaaaattgaagaaatgatttcttccttaagtctctaatgtgctgagccctgggctcaatctacacttaactgtcacaagtagagtgcttaggaaaacagtagcacctctaagttttcagtaaattccatttcacagagttctaaatgttgtttccatctaagtgttttcccaaggatctatttccacaagatgtcttttcaagcttattacatatctaatatactcttatttctaaatcttcccaaccccaagccaaagggatactattaaaccataacataaagctggaggcacagcatgaaaaatactaaactagagtaagtattttttccaaacggttttttctaaatag

SEQ ID NO: 153963 - DNA, 361 bp, Homo Sapiens
gccatttattcttttgctcattcaataatcattaattgagtatccactctgttaacaggtcctgcctccaaggaactcatatgagatgggaaaatcagggattacaaatgtgtctaagacctcagacacagatggctgtagggaagggtggtcaaacagacaaaatggggattaattgtgcccagcactacttccaaaatggaccgaagactgaaaaaggattgtgaaggatggcaggaagtgaagttggagtgaggtgcagaggctaggtcatggatagcagggaatattaggactttgctggggtaatgaggaagtcatgagaaggttatgggacatgacaaaaatttgtgttttgttt

SEQ ID NO: 153964 - DNA, 203 bp, Homo Sapiens
tttagaggtatggatttatatctttttttctgagatgtttctgatacctacttttctaaaaatctctaattatgtccagtggttttttaagctctagcatgagtcccttcctcataaggttcttgtcacttctatgtcaccaactagctcttctttattggaaacaattaagttcagaacaggaatgctcttttgtgctttct

SEQ ID NO: 153965 - DNA, 589 bp, Homo Sapiens
gaattgcttattaaataggcatactttatactgtggtttataatttcaaatataacttggggttatggtcctattcactaagagaatgaaagatatccatgagttaaaagaacaaaactaaaaatttcagatctaacaattgaaagaaaattgaggcagtaaatgacctcttttactcttttatgttttacaatattatcatgttatttacagttaatgctgaaataattctcaagtgcaggaatataaatgttaagtggttttatgattccaagctgatatatttcacctgttaaaaattatgctgctaaattagcattagaggccttatgtttggtaattacaagtgtctgggctattggcgcgtctctatatatgtgtgtgctttgttccagtttcttcaaattatctatgtataattgtatgaaatatttaaatagcaaagaagtcaaagaagattgttaaatattcaacaagaatcataaatacctttatatgtattttaaaagtattgggctgttctgaacatgattatgctggtctgtctgccttttagcctgactccttcactcttgtgtgtgaagtctat

SEQ ID NO: 153966 - DNA, 460 bp, Homo Sapiens
accacatagaatttctttaaattgtgggctttattttgactagtgttttaaatccaataaatgcctctattgtttgagtaaattgttcacttttagagtctggctgtaaatggctctttgctgctgctcttcacttctggccggagttcttcaagcttactagtgccccaaatagtcatttaacaagcacctatgtgttggagtgggtaaacaagtctgtgtattatgtgaagtaacaatgtcctttatctactaataagaccaaggcaaagagtacatgtagattttatttaaagtgctcttaatatcttagtatgaaaattttgtcagattagcctcttgtttatttacacaacattttaaaataatttgaatatattttaattaagatcattgaaacaaaaacaagacatcgaaaatttatttgttccaaactggattagaagtctacttacctaaa

SEQ ID NO: 153967 - DNA, 443 bp, Homo Sapiens
ggccccaacactggctaaaggagcatatgtccacagcattagttggtgttggtgacgcttcagaagtatatgcaagctccacaattttacattgcatgggccctgaaggacaaatgggaactatctgccccctcattacacccattcctgttaacctgtggggaaaagatcttttatatcaatgggggacatagatttcttttccacaaggcagttacagccagcaaagtaaagacattatgacaaaaatgggatttgttcaagatatgggcttgggaaaatcagcacaaggcatcaccgagcctattatacctacccataaaccagattctacaggacttggttattctttttagaagtggtcactatcaagtctccagatcccatccctttgacttggaaaactcagaaactggtttgggtagatcagtggctgctcccaa

SEQ ID NO: 153968 - DNA, 430 bp, Homo Sapiens
ttgcactgggctgattgtatttgcatgaacccaaggaggggaaacggcagggccagcggtaggctgagctcactggcagtagaaatcccatttgtctgtcttcacatcgactttgccaggtttcagggtctggtcctctcggacaatgctactggggaaatagcccaggcgagcagccagatctccatagtaatctccctgaacgctgcctccccagaagagccgcccacggcccttcagcttggagaagacatacaccacttggccccggtgaatggtcaggaatcggcagtcggggaccatgtagtcctgaagggccacagccatggagatagggtggctgcactcctggtccgcacacagcttccggtcagccagcttgggcataggaccacccctgacaccaggtccggagaaggcagacagcaag

SEQ ID NO: 153969 - DNA, 566 bp, Homo Sapiens
aggggtgcaagactgagccaggctgggcttgatctctgaaagggaactcacgacagatctgagggaagggttccggcccggggtgctccagggtttctaggctggtgaccgacacagaggctgagcatggctgaacccagacaccgcgagggatccagaccatgcggcggaatgcgtggccatggggaggtcccagagcagagacagagtaagccctgtacagcaggcgggctgggtcagcgagcaggacccgtgcggtatggtgaagagagacacacacgctgcgattctttgttactgtatttaacgtatcttttttctccggccatcttcatggttttctctctgatttccacagtttgaatacactgcatgtgtcaggcaggggctcatatttatcaagttttgtgtgtgctctgagctcaggtctttcattattttgggaaaattattggtaattttctcttcaaacattttttatgatttgttctttcttcttcttttgggagtcctattacatgcatatgatatcatttgatattttcccacagttcttggatgctttt

SEQ ID NO: 153970 - DNA, 319 bp, Homo Sapiens
ccacgcaggaagagtgcttaggagtaacttgtttctaacacctgtgtgttgagtgccaatgctgggtgtggtgttatgatatatattggtattcatccagcattcctgactcgtaactctcatagtccttgttccagtctttgttagaatactgggtatgttagggcttgggacaggcctgtgacctctgggtatcctttcactaatgttcgcccacctttttcacagtgggtcttaaagaccttcccatgagagggtctcaatcctaggggaaggaatgttgatgtcatgaacattccttccgccgtagtcagccaga

SEQ ID NO: 153971 - DNA, 412 bp, Homo Sapiens
tttgactcaacagtttattcccctctgattatttacagcataaagttcacggccatgttgtctataagagtataaacttaagacagtaaaacaaagtgacctataaatattaaccagttttcacacatcataatgtttaaaataataacatttgcacagcatctgacaatttacaaaggcttcaacatacatcattttgaataatccaggaagacatttgctttgaaggaacggcctaattttttttcctgtaaactttcaatccataactgtacatcctaaagcattctggcacaaatgaaatggaactgcctcttgtgggtctatttcagaagtctgttgtcagagttcagttcacaggcatcaaccagaagcctagtgaggccgtttgaaattctggcccagattaatt

SEQ ID NO: 153972 - DNA, 121 bp, Homo Sapiens
agtgtgtgttttccctccaagtgtgatatttcctgctgaattaaattatacttcagttgttgcctcaagtaaaggtgtttgacaagaagatacaataaaaccatacttttcatttaaaaaa

SEQ ID NO: 153973 - DNA, 352 bp, Homo Sapiens
ggtacttttacaagttaataaaaatacttaaatttaaactagaaacaggcaagagatatgaacagatgaaaataatgacagccaggactaaaactagttgatagatatcttttagtatgtgattccagagtttctcagaatcttgcctaagaaaatggcctcctcctaaattttactgccatagcgaggattgggaacttggactgttttcctttttggtgggcaaatgtaccttgactttttattttttagaacacgtctttattttgacagtgttcaaaaacattgctttatgaagaaatacataataaatgactttatttttcagtaaacaagataaagctgcttcttc

SEQ ID NO: 153974 - DNA, 450 bp, Homo Sapiens
aaatggcataggtttaatttttttcctcagtcatcatgaacacactttagataaaccaaagggtaattacccatattagtctatatttgtgtccatattttggccaatataagcacataaaatattgaaatattaattgcaaatgtcaacacagaaaatgaactaaattactttcatttgagtactatatccctaaaaagatgatatattactatttattaaagaaaacacattcttgtctatccttaaaactttgttaactatagacaaagctgctttgggcatattatagaacacattatatgaatatattcaacaagggaaattataaaattggtggtttggaactctctctacattgctttataatgtaaaatttgaatggagttattttaataagctatttgaaatcactattaaaagacagtgaatttctttttgctccccatt

SEQ ID NO: 153975 - DNA, 338 bp, Homo Sapiens
atatgtgttcataaattcttataccaatttaataaagaagtttcactttgataggaagcatgcaccatgaggctaaacatgaaagggcttcttttctgggtgaaatgaactttgttacaataaatcaaaattgaagctcctttgaatggaaagcactcaattgttggcctcttcactattcctgaggctactattatatttaccttgggacaagctagaggtgtgatgtgactcatacatccatatgcttgggggtggggaccaggtgccagcacagtgtcaaacttggacacataaagcgtggtctgcagtgacctggagtttttactccatatatc

SEQ ID NO: 153976 - DNA, 495 bp, Homo Sapiens
taagctcggcagtatctaataagccatactactgccacctaaaatttccaaagagaaattaaaaatatgtcagtaacagtatataatcattgcatttgaagaatcttaatgatgccttcccataaatgctatctaaaacagaaatccatacattgttttcagaaatgtagttcttttccattctggatttaaaaaaaggccactgacctaggaatgctatattctataaataaataggaaaaatgttaccaataaatttcaagttattttcacacttcttaaatctttaatcattactgtattttttatgttactttactacaaagcagactttgacatattaagtaagccaagtcttaaatctaacctatataaagtgaattagatcctaatttctaaaagaggctttaataataaggtttcaccatattcacaacatggacctggaggataaaaatattaacaacaattaataccttgaccatatttctattg

SEQ ID NO: 153977 - DNA, 492 bp, Homo Sapiens
tttcctggttttctcctcagggtttttctgctgtctttctcctgttttgccctcctggtcacgtttctctccaaactctttctgggatcttcctgttgtctccccgcgtgatgctgaatcttccgaggtttcagcctttgaggttgactcctcgttctcattcctgttttcaccaccctggggaaatgcgctcccataattctcctgcctgttgtccctactgagattcctccgagccagattctgacatccccattcctccagaatgagggacacagccatgtcctcgatcttcaccattgcctgggaatccgctgtgaatagtgcagatgccatcgcctggtctctgggactaccctcatgagggggtgcaggaatgtgggcagcaggaagagctcgtgactgtaagaggcggggtttccgagacgaatgtttgaagtgggactgggtggcctcctgatgaaagtgaaagctttaggacttcctgactgg

SEQ ID NO: 153978 - DNA, 574 bp, Homo Sapiens
tttattattatatatgctacatctgttgagtatttttaaaataccaataagaggacttgtttatttcataaaccacttcttccctctctttcaaagaaaatacattattaccatacttttccattagtctgagaatttttgctaaatatgattaagtattccaaaatataatggcgtcattattcttgacttttttagagaatatacatcttaagactgtattagttctcagagcaaggcatcatctactcccctgcacctgagagtctggccccagattccagatgtgcggacagcccatgaccgaggtgcacacagtgccctcttgaataggaaggtcagccagtgaggcggcagcataacttgcaggatggacttatatcttaccatctcttcctgctaccaaaataaaaaaataaattgaaagacaagacccaccagtctagttttgtagacctgtgaaatgtgtctttatttcttggcattagaagaaagatatttttaatccatatcgtggttttagagttgaagtgaattgatacccaattttccatcttagatctcctttatcaaa

SEQ ID NO: 153979 - DNA, 727 bp, Homo Sapiens
  misc_feature (374)..(384): n is a, c, g, or t
tttgctcaaaattgttaatcatacatttttttaaaattttcagggtacattcagtaatgtaatattcatataatttgtaaaaaatcagtgtaattggtatatccatcaccttaaatatttcttttattgtagaaacattccaattattctcttctagctattctgaaatacacgattgatgattgtaaactatagtcaccttactgatctatcagacagatcttatttttttctatcaaactgtatatctggacccattaatcaacctctcttcatatccccctgaaaattttcccctcctttttctcctaaaagtcttactactttacattttacatttaagtctatgatctaattgagttaaaattcttaannnnnnnnnnnattttaggtctggggctcatgtgcaggttaacaaaggcaaactcatgtcacggaggtctcgtgtacagaccatttcttcacccaggtactaagcacagtacctgatagttattgttcctgatcctctccctcctcccactctcttccctagatataattttaacttttattttagatttgggagtacatgtgcaggtttgttacatgggtgtaacgtaacgtgctggggtttggggtatgattgatcctgtcacccaggtattgagtgtaagcacctgatagttagaaacacccttcccctctctctccctccccgctctagttatccccagtgtctgttgtt

SEQ ID NO: 153980 - DNA, 538 bp, Homo Sapiens
aatgttttgtctacaagcaatcgtagtgcactgtggaaactcactgcttccctgttaggtaatgcaagtctaaagactactccagtttatcctctctgcctccttatcttctcaatgattgtttcatttctaaatgcccattccttttcagtcgtaccatatgtcctcatctccctttagttttctttttgctattaatagttttagcttttcagtctaatgtctgatgctgatgtcctctatttagcagggatggtgagagaaggtcagctaaatggctcatctgcagcacacagtgaaataagaggtatactgtttcctattctactatttatcactctgtagcagaaagtctttctaggtccttggttaagaatatagagaatgttactttggacctcacattgccaaattttaaaaaacactgtagagaatgattttcctctcctacccattaaggattctatcttttcctatcaagtctattacaatctagtgcagtgatcagttaattttttgaaaaaagttggcggccgca

SEQ ID NO: 153981 - DNA, 442 bp, Homo Sapiens
gttcatgcagaaaataaaatggaaatcctttttctttttgcaagaacatgaattataagcttataggaatcatttatcatccatgtttaaaaaattcccatctctcagctaaaagactacatcatatgacttaattctaataggtcaactctactgaagttaagagcattcccaaagaatgctctatataaaacttgtgtgtatgtttgcaggaatcttaatggatatgtttctagaggaaatgctcccatgagcattctctccatcatttagcagctgttaaaatgatgctcttcccaatgcccttgttccctcattgtaaacgtgctctgagttaacctggtagccagtacacagtacacagtaaatgacatttcttatctgtatgttagaactactattcaataagctaaaatattctgagcttcctcagattttctcc

SEQ ID NO: 153982 - DNA, 602 bp, Homo Sapiens
ttttgccaaactctcccttctgtaaagaaccatgatttaagctagcaacgacaaatgaagcatagttaccctcatttgatttgcggcatttcagactcaactatttttctgaaacatctattttatttcaatagagacaagaagcctgctagtttccttaatcctgcgttttaaaaacatacttctatatgaattggagaaatgaaatgtgctccatagtttatgttattccttacttttggaatgtatcctaatctcaggattcttcattactctgactacatattatatttatttccatcctaaggtttttcaaagataggcatgtggattatctagatcaacaatccctaaagggcttttaaaatgtcaattcctgggccctactccattcctgaaaatcaaaattttgaagcagaaatctgagtctccaaatcatctcccttggtatatctcaccttctatctccctttgcaatcacaagacagtgaccaggtccagtgatgatatcatgggctgtctgtcacctgcctgacagtgattcctggagactctcacccaaacaaactctcacagaaactaggcaacgtaagagacaggaa

SEQ ID NO: 153983 - DNA, 477 bp, Homo Sapiens
accagtggtgatgtcatcgtcaacaaggtcatgctcttcctcctggacttttgcttcaggccctgaggcatcaggagccgtggtgatagtctgcgcggcttctgatgtgactccaggtgatatgacgtggtctatgtactgaggtaagtaaggagcccaggcatcaatggcttccttcctgcctgcctgctcaattcttctcagttccgccagaagcagggcctgtgcggcttctctcacctccaagcatcgatcttgccatcttcgggccagcatctccagaaggggaggcctaaatttatccaatcccagtaggtctggcagcataacacagtgcatagcagctaactgactccaaccttgtttaatctgtccttgcacaatattactggaagttggaggggaaccccttgccttagaaaggtctggggtgcttggtctaggtggcctggtaggacccttcttcatatgatcacc

SEQ ID NO: 153984 - DNA, 795 bp, Homo Sapiens
  misc_feature (524)..(524): n is a, c, g, or t
  misc_feature (551)..(551): n is a, c, g, or t
  misc_feature (598)..(598): n is a, c, g, or t
  misc_feature (646)..(646): n is a, c, g, or t
  misc_feature (686)..(686): n is a, c, g, or t
  misc_feature (714)..(714): n is a, c, g, or t
  misc_feature (720)..(720): n is a, c, g, or t
  misc_feature (724)..(724): n is a, c, g, or t
  misc_feature (757)..(757): n is a, c, g, or t
  misc_feature (778)..(778): n is a, c, g, or t
tttgtttaaactactaatgttttattactaatacaaataaaaatttcacatttatacagatttgcttttcaataatgtatttacttatttattcagtgaacatttcctgaatatctaccaaccaagcctttagtcaacatctgctgcatcataaatgtcctcaaagtgtttcccaaaacagacttgataattaattggaaaatgatactggaagttatggggattaggtgcagagttttattaccttatacagcagtatttatgattacaataaaacatacaaaaatgtttttatattaatataatactaaagaagttcaatgcttgtaactattttaatgggcttctgacttaaagaaaatttacttaggtacaataacaaagtagtaattggaatcatagttaactaaaatagaaaataaacttcataggttacgatttatattaagcccaataattcaattctaatgacagtcttgtgttttacatttagccttatatgctcctttatgagttctctgcanagcatatatgaagcttgaatgaagcangtcccaaattttaattaatcttgatgaaatgcgacagattactgatntaactcaattgagagtatggggatatcatctctaaatcaaagatgacncccaaagattaccattatgctcttgagatgtactcatatnctgtcatttcagataattttgacttatnttgtgntctncatcttgtaagggattaaggctgtatttcaaantaagtttgctttcggactttnctgatgaaggaaatagt

SEQ ID NO: 153985 - DNA, 629 bp, Homo Sapiens
tttcacttttaaatataataaatacagggaagaaaacagtaaacctttgataaagagtctaaacaaaagacagtcgacattctggggtttcaatcaagtgccacatggtctctggatgaatgtctcgaggagattgtggttgagttcacaagtccccttctcaagtgtagctctctttaaatagaaacctcatactctctggtttcccctgtctcgtaaatggggttgtcaaactcggtttccacggtgatctggctgtaggggtgggagtacatcagaggcatgcggaggttggaatagtagcgacatcttgtgatgtaaatgtaggctcctcccagctgtaaggagatgattaggaccgggatgaagatagccagggccatgtttccccctttcagcgacgtctctgctgccgcttctgctacttctaaagcatgttcaaaactgtcttgattaactttacacacgggcaggggcccgttccattgggatggctgtcccatgatgctgcggatggtcacttcacccatgatctcaaagcctatggagcacatgaaagtgagggactctcctggccggtagagtcgcttgtacaggactcgggattcatgttcaggctcgcctgagtt

SEQ ID NO: 153986 - DNA, 397 bp, Homo Sapiens
tttataaacatgctgttgttattttctaacaggactgtcattccatttttattatttttcctatcagtggacctagttatttccagttttttgctataagtatttttacttgtgtttctttatggacatatgtgaagtttgtaaaatattaatatttacctaggtgtaaaattatgaggtcttcttagagtattggatccatacgctgataggtaataacaaactttccacaagatgattctatcaatttagccttccaaggagtatatgagtttctgttattccatatcttgaccaataattggcattgtgagactttatatttttgcctaaatgtaccttgttgtggttttatttatttgtttgtttttgagacagggtctcactctgtcaccca

SEQ ID NO: 153987 - DNA, 505 bp, Homo Sapiens
tttaatgccaaagagcagaaaacaacttacagatcaatgagctctagagggaagttttttccctcactttgatcttttccctgaaaatgacttcttgcttatgtttgacacaaaggaggaaattccattgaaaataagagttttcttggttttaccaagaggctgatccttttttccagtctcaggttttgcccattttgccacaaactgacaaaaattaacaaaaagaaagatactaaagccctttgagtttggcatcttgcagccccatttgttaaaacctgcaaacatttccaagtactgtaattagtacattcattattgaaacagcactttacatttaatgtgccaaacataacttggtgagcaaattaaacttacatacgttttaaaaccaaatagacaaagtattatatgtctaatctccccaaaacttcaaagctaattttttaatatttaagtttttaaaactccttattcttctctctcttgttcttcctgtctg

SEQ ID NO: 153988 - DNA, 386 bp, Homo Sapiens
tgttacgaagaggaactaactaactaaagaaagaaagaaagctgatttcaaactgaggctcctttatttattagcattatgtcttttgtcaagtttattaacatcttcagtataaatgagggcaataagtttatttcataggaatgtcatgaggatcaaactaagtaaagcagataatgtacttagcacagtgctgggtacatagttagccccatatctgtggttaatgactaaacctggaaatcaatgccgggcatggtcgctcatgcctgtaatcacacttttggaggccagggcagggtgatcgcttgagcccaggagttcaaggctgcagtgagccatgatcatgccattgcattccagcttgggtgacagaatgagactcc

SEQ ID NO: 153989 - DNA, 446 bp, Homo Sapiens
ttttttttgcagtcagcacacacacatttatacattaaatctgctgcctcatacgggtgtagttcttgatgccccaaaacaattacagtagtaacatcaaagatcactgatcacagaccaccataacatataataacgaaaaaatatgagatgttatgagaactaccaaaacgtgacacacacacacaaagtgagcacatgctgtggataaacggcgctgacagacttgctcgatgcagggttgccacagaccttcaatttgtgaaaaatatagtctctacagagcacagtaaagtgaagcgcaaaaaaacagacatgtctgcgtgctgaaaagcatgagaaaccaaacaatgtatttttacagattcaaatatgtgatacaactctgacgaataggaaatgataaaattcagagcagtggtgttacctttactcagtggggatcg

SEQ ID NO: 153990 - DNA, 585 bp, Homo Sapiens
ttttttaatctttaatttaaagtttattagagttgtggtttccttttcatgtttttgcttcataaagtgtaccatgaatctaacagcaatattatattaaatgtacatgtttgcagtaaattacaccctcatttaagaaatgtggaaaagttggggggaaagaggaaatcttaaaactgagttaagtcagcagttcagcaagtgcttacgaaagacagtcaaaatataggcaagttactttaaatgggtattatttgtccttactttcccaatgtaggcaagtgcctgtgatataacaatttagggaataatgggagaataaaaagcatattagtttcaatcagacttcctggcatatatcacagaccctaaggaattacaaagacaaaaaagcaagctctttggtttctgcatggttctttgcagactacaaggctgcccctgcaagcacttggatgaaaagaccgggattctactggaagtttgcactttccccacatcagccaagatgggtaaactgccttaacacaaaagtcacatgccccacaaaatatttccttctatctcaaaacagtattagcttct

SEQ ID NO: 153991 - DNA, 746 bp, Homo Sapiens
tttagaaaaaatgtcttattttgtaaagcagtttgaaattttaatgaattttatggtattaaacagttgcaaaaataatggaattatattcaacctatttattcctttagtgagcatgggtggatatttcagtaccatcaaccattttgcagttttcataaggtctcttcgagcaaaaattatgccctttcaagcaaactctttttaatgaagttaatccaaaggttcctagattaaatatttcaaatacatttcacttatgtgacattcttctccagggctccagtgtaccctcctattgttgtcggttccaaacccattttgaggtctctgctttttccatgagaacgtcaaaactggaggcctttcaaagtagctgctgtgaacacggaggccccacagccagcctgacagtccctccagttgctctcagagacttgcttcacatggatacacagagcaattctccagacacagacgcatctgatgccctttcccgaaaacaacatttccagaaaatatgctgaccatgaagaaacagcaggggtgagagaagtggccaaagcacttgaaacatcttaacaagcactaattaaatgtcgtgcttaaaaaatatggctgaagaaagccaaatacaataacttcttacagatggttttaggaactaacaagacctataggaaatggcgcattaagattagtgtccccgaagtctcttacaaccattagtgactggagcctcgtgc

SEQ ID NO: 153992 - DNA, 777 bp, Homo Sapiens
  misc_feature (744)..(744): n is a, c, g, or t
tttttttgctgagtaccagaggatggagctggcttgtgttgttaggggtcagcaccatataataaatggttatcttgaaaggctaggattacactcaggcagcagcccggctacacactaggagagtgacacagggactaagactgcctgagagaagagcagtcacatagtaaggaatgacccccaaatcatccactcattcaaatggttattgttgaatattcagtatgcatgatgccccagtgctgtacccaaacattttctctttctatattttgggatttaggaggggattaaatcccatgggactgtcaaaaggaatgattctggaacttatatggcatgtaataatttattaatataaatgtagatcatatagaaataaagggtaaaagcaaagaggctcaaagagacctataacatccttcctcacttttgcaagcgagtaaaaataaccacaaggccttaggttctgaagcaggctgctttcagtgggctaagagtgttgccaatttcttctctctttttcaccttctatctcatacaaagtaactcattctactggagcagatttccttcaacattcaaagaggtaagataaaacacccatgttccacctaaatggagtttctcattttgttgcagttttgggcccaagattttatcagagaggatgctgcatttactattattattttcattttgggttagttctgagctccttggattattcatctttccctnaagtttccattaattataataattttccttggg

SEQ ID NO: 153993 - DNA, 425 bp, Homo Sapiens
aaactttattattacggagaattttgaaccatcacagagcagacagcataatatcatgaaatgccatgtgtccaccacccataaccaagaaccaccaacctctgaaatcctgctccccctccccccaactgcaactactcctgcaattgtggagcaaattccagacaccatattcctaataagctttttgttttaaaattatggtcctagtaggcttttaaatcaagctgaatttgtgaggcataaggaaagggttaagaactgtattcttctcttttcttcaatagttatcgcttgtacaaaatgggccccaagaacaccgggaccctctcaacaccccagaagccaccagcatttgtgtttccttcccactgttagcggggggtatgctgtcgccacaccagagcataaaagccctgggctca

SEQ ID NO: 153994 - DNA, 491 bp, Homo Sapiens
  misc_feature (268)..(301): n is a, c, g, or t
ctacaattaaagaattttgagattgcaattacagataacaactactgtaacctatataatatccttttcctcttatttactaacagaacactgattttacttgaggaagctgagcattcagctaaaaattaaaaatctgcccatcttttctgcagtgggggtggccttgtgacacaattgtagccattgaaatgtaaggagaggtccctggcagtgatgttgaaatgtaagcagtcaagcgggttgtccaggtacagtggctcatgcnnnnnnnnnnnnnnnnnnnnnnnnnnnnnnnnnnggaatagcttcagcttgggagttcaaaaccagcctgggcaatgtagcaagactctgtctttatggaaaaaaaattgtccagcgtggtggtgcgtcagtgtagtcctagctacagccacttggcaggcagaagtgggaaggtctcttgagcccggaaaggtcaagctgcagtgagccatgatacatttaaa

SEQ ID NO: 153995 - DNA, 540 bp, Homo Sapiens
  misc_feature (18)..(18): n is a, c, g, or t
aggtgagaagctttgatntcaggcacagtccagccttctgtcaccagccaggaaggacatgaacctttctctccctcagggccatccattctagagggcagagagttggcctcatttctgagataacttaggggacagaagttcactaccctgagcccattgtgaggccatcctcacagccgtgactccttatatttctactgctgggttgggaccttggcttgtcaagactaagtagtcagcccccaccaccccaaaaacaaaaccaagcaaagaccacatacagattccatttataggaaatgtcccaaataggcaaatctataaagacagaaagtagatgagtggttgcctagggctgaggagactgaggatgactgctaaggggcataggggtttttttggggggaggtgtcaaaaatgttccaaaattgtaatagttgcacaattctgtaaatttactaaaaaacactgtataccttaaatgggtaaactgtatagttaagtgaactgtatctcaataaaacaaaaacaaaaccc

SEQ ID NO: 153996 - DNA, 102 bp, Homo Sapiens
gcttgtgaagttaaggataatttttacaggcataataatgcaatactcacaactgattttcaattttgaggatcaagatctggagaaaacatgtaaaacaag

SEQ ID NO: 153997 - DNA, 223 bp, Homo Sapiens
tagtggttttgagggtggcccgcctcctacagataagattctttgtatggtcggttgtgaggccatttaaaacttttggcttaagacttcataaatcagagttgatacattgattgtcccttttggaggctgcagttcttaaaacatgtggctgtttttcctaggaatatttaagtaccacttgataataaagtagtaccttttgctgggattatctacctgg

SEQ ID NO: 153998 - DNA, 373 bp, Homo Sapiens
tgagccactgcacctggccccaaatttcatttttaacattactattttgaaccttgacatagtagggttatatataatcatcatgctttatgttcaaaattctcacctaattaataatttgtagttaccagaaagcagaaccaaaccaaaccaaaacacacacctgttaaaacagtttaccatggcacttcctgacagactccccgttatactggctccagctagtgccatggtgctggccgtttcactcaggttgtctcggatggctcctattcgatccatgtggcttccacttgcacttcaaactgccagttattccaccaacactttcctcccctatgcttgggttgtgtcttgcttttgctactgatgt

SEQ ID NO: 153999 - DNA, 490 bp, Homo Sapiens
tagggaggtgcgcccctccgggggcccgccagccgtcagactcgaagctgtggctgtcattgcttctacaatcagtgcatgttcttcgctgacgtcagtcggagctgtcctggcactatataaggctggcgacagccccgggacagaccctgtgttccccaaggcgtcttcagcctgccccgagggacagagactggagctcaatcttggaccgtacagacgctcgccgacaacctggccggcggcaccatgaggcaggcgggacgcgcagcgctgctggccgcgctgctgctcctggtacagctgtgccctgggagcagccagaggagccccgaggcggccggggtccaggacccgagtctgcgctggagccccggggcacggaaccagggtggcggggcccgcgcgctcctcttgctgctggcggagcgcttcccgcgccgcgcggggcccggccgattgggactcgggacggcaggcgagcggccgc

SEQ ID NO: 154000 - DNA, 741 bp, Homo Sapiens
aagatgcagaaaacttttattttttgattacatggctcagatagtttcaatcaataccatcaacaacgaattttatgaaacacgtttgtctttcctgtctacatagatgccacagtagccctagtgtttaagtgttgcctctcaaacttgtcctctttccagcattctcctctctcaacctgccactcttgaaaactcacttttcttttgcattttgttctacatgtgaaaaatatggaactcaagtaagacccaaggtagatcccaagggcttcagaaataccctgtcaagggcacagaatggttagcaatagagtccctatttaaggtcaatcatcgttaataacatgaatcttaaattctaacattacttacttaacagtacctaaattctaatattcctaacttcacaaaacaaacttttctaaaacttcttaccagtaaaggatatagctcacattaatatactctaagataaccttaagaattcttcattgccttgtaattcctgccaagtgttttcatcacatccccaaggctaatcctagccatctcctgcataatttttctataatacttctgcacatacacagcaaatggtcacacgtggggcacaatacgggtcccatctttctgagttaatggcaccatgaccagagaccccttgcatttggcacagatgaagcggctggtgtccaacgatttggtgtagcagccaatcctgggaaggaatggaacaac

SEQ ID NO: 154001 - DNA, 598 bp, Homo Sapiens
cctcttttacacatctcatcctttacctttcaggccactttattgcatttcctttattctcttagtgtgaaactatagcaaatatttaatgtgtgtttctttatttagtaatatgttctcttattttcttttttccttaatttcttcttaacgcacaagtgagtttagttactagctgtctaccctactccatttccttgctattgagaattacattcttgttctgaaatcagacattatcatgtatgttctccatagaaaatattctgagatacatgcagaggtcggcctgggctaatgagcctgtaatgtgaacacatacatataactaggatttgctgaggtcagcaggttgcatcccagttaaacagcactcttgagccatcatccggaaggaatcacggtttctgcttggacttgaacttttctttaggttctccttcctggagtccaactgatatcacagtcagctatgtgaccttgtaagatttgttcatcttaaacagactgggagtaaaatagaaggcacaattttatgagaaaagatgataaaataaattttatggaaatagaactgaaatagcaaaaatataagtac

SEQ ID NO: 154002 - DNA, 468 bp, Homo Sapiens
  misc_feature (179)..(193): n is a, c, g, or t
taatgattatcattattattattattttaaagacagggtctcccttcattgccctggctgcagagcagcattgcaatcatagctgactgtaaccttgaacttttgggctcaagcaatcctcccacctcagcctcccaggtagctagggctacagatatgagctaccatgctcagttaannnnnnnnnnnnnnnatttaatagttctcagaagtttaactcaagtgttttagtgtggaatttctttggatttattctctttgggattcgttcagcttctgaagtctgcagagttatgtcttttgtcaaatttgggaaattttcagccattgcttctttgatttttcagccccacactttttcccatctcccctggaacccttatgacacagatgtgagatcattgttcatagtcccacaggtccctaaagctctgtccatcttgttttcccatgcattttctattcatt

SEQ ID NO: 154003 - DNA, 442 bp, Homo Sapiens
agaggagacttggtttcttgtggtttgcattcatcagtgtcagaagctgatctctctattcaatcttgcagttttaagtaatgcattgaacagtcacataacagaacgctgagcaggagaactaaatttctagtgtaatcagaatggcaggcactaaatgaattattttacaataagcctgtgtcctttttattaactgttcagtggagaagtttggagtctataaacttgtaataaatgtggcctgtaagaactacaaatactggaaagctctgaggatgtaatttctaatttgatgaagaaaacattctctttaattaacttggcaaggagaaggcttcaataaaaagaaaggcaactatgcctggggcggagctggagtggaaataagatggcagacattggacgtcattgaaggcctggtgatgtggttttagtccat

SEQ ID NO: 154004 - DNA, 541 bp, Homo Sapiens
  misc_feature (427)..(427): n is a, c, g, or t
ggtttaaatctttaatttttatatcatatccaggcccatgaataatcccaaaacatgtgtaaaatcagaaggaagtatcgaagtaggagaggaaaagcagcacattcacgtggatgaaagcccaaagaatctctttgtctgggtcacttttgtatacttcctctccatggcccatctcttccttgcaatgttccctcccaggtcccttccctgagcctccttaggttctgtcctgtccctgcagagcagggagattggaagcatgtggcgtaaaagtctgctgtggcctgaagggaagaaagtgggcaacggcagctcgaaggagatggatctgtttctcaggaccactaacagagtgctgtgagctagaaggctcactgggcaccattaacatggcacagcctacatgaatgagaatgggacccanaagggctttaggggctagctctcacagctgttgcaatacttcactaattggaagggaaatattcctctccagaaaaatgtctgagcaagacctctaaggcctaaggattatgct

SEQ ID NO: 154005 - DNA, 426 bp, Homo Sapiens
  misc_feature (225)..(233): n is a, c, g, or t
gctcactccctaaagaaacctattggcagcttcaacaggcaggcaataatctcttcccagaaccactgcagtcaggaataaactgttttctccaccaggctttgacaaaagggcccacaggaatcttaccaatgccaacatttcaaagcaccctatttcacgtagcatagctttctgctccccttccccaaagagaggttatggaggtactgtagcttttagggnnnnnnnnntgttaacacatcacaggtcaagttgaagtcattctctgtttaggcactaaaaatcggtgttgtcactcactgtgtattaccagtatttacttgctttcttgatttcaccaaaaccaaatttaatttaaaggaccacattaatttttcaaagggaaagagccaattaattgtacataatgtatacacacacaaa

SEQ ID NO: 154006 - DNA, 505 bp, Homo Sapiens
tttcttggaactaaatagaatatatattatttctgatatgttgagggaaatttatgttggttttgttcatattactagaaaagtcactcaatatgaatttgtgctcttgtgacgttgtgacaactcagttgtcctagaatttttattaggctgtttctaaatttcacaaatccatgaataggtgagtttacaatatatagactggaagtactttatttttaaaaatttttcccccaaaactcaccccctcttctcagtgtcaggaaaacctctttggagttctattggactaagtgtctgagtctgtgcctatgtgggttgctggaatatttatttaccaggcagaaaacattcttgaagtttttaatttgatctgtctccttgaaataaatatcatgaaaagaatatataggtacctttggtttgtgtcctttaccttgaaaagtatagcagccaatttgaaattgcctaggtctactttgtgaaattcaccacttagttctac

SEQ ID NO: 154007 - DNA, 148 bp, Homo Sapiens
ttttttttagtccatgatacagtttattgtgctggcaatcgatggagtgttccctctactctcctcctttcctcttgccctctcccaaccttacctttcctcctgtctcccactcttcttcctcatgtattccaagctgcagaggacc

SEQ ID NO: 154008 - DNA, 453 bp, Homo Sapiens
ttttgaagaaaagttttcatttatttagttaaaactgtcttatgcttccatgtgaaaagtatgggtggttttcgttttgcatagagtgttctatagcttactggttctcaatctttttagccaaggactcctgtagcagagtaaacagtgttaatacctctcattcattcgttcattcatccttcattaaataaatatttattaatccactcccatgtgaaaggtactgatctaggaactgagaatagagcaagaaacaaaacaagttcccggcttggagcttatattccaggagacagagacatgatagacatgataagcaagtaaacaaatttagagtgtggctggtagaagtaaatgctataaagaaaaatgcaggatatcaaattaatgatttttaattatcccacccataaatatggtatagctttccactgattcctttcaataagg

SEQ ID NO: 154009 - DNA, 544 bp, Homo Sapiens
tgagaccctgtactatgaagataaatgaagaaaatgattgaaatgatctcccctaaaggaaacaattttaggtttagatattattactgtaagggaaaatataatccccagactacactatactaaactcaccatctctacagaattcaaaagatatttataaggacagaaaacaccactacaagtacacactacatgaacacatgtcacattttaaaaatttcatatatgcatgttcaggatacaagaagataataaagtttacactttgccaatttctgcagacatatgatcagctctcattagagtgccgtcaaaatgagtactgtgaatagggaactcttaaaattgaattggctaaatgtagtcttaaaagctatagtcttaattggctcactcgctacttacctaagctgtatttatcagaaagttctataaataccatgtcctaaaatgtactaccagtgcagtgaatattgtggttgctttctattaaactctccatttctttgatttctctatgaccacagttggcatttactgt

SEQ ID NO: 154010 - DNA, 699 bp, Homo Sapiens
  misc_feature (108)..(119): n is a, c, g, or t
  misc_feature (371)..(382): n is a, c, g, or t
atttccaggacactttattgtaatttccactttacatattaatttaatattttagtctaggcagaaatgtttatacttatacaacagtagtccaatcctctaatctcnnnnnnnnnnnnggagcagttttaaaagaacatcaattcaggtatttatgatatgggggacaaggggcacttgtcttagctggaaaaggggctgatgcctttcagtacgagtttcactgaaattttttctgtattatttttcttgttgatgctaagtactcaaataaaagcaattgcactttttctcattctgccctctcttggtctttacattctgtctagcatttaacgcaaaaagtcagtttacattcagttaacacatannnnnnnnnnnnccatatgccccacctcccacacatccaaatggacagggattagaattaacctggcttttagctgtaacagtgctattttaaaatttttcaaccacacacttgaagggtaaaataatttaagatacaaaaccaaaggaaaccataacaattcctacacatttactatttaactgttctcaaatcatcaagtataacatggatttcttaaaaagtgaaatcgacacaaaagcgaatgcacgcttaatgtacaaactgaccgtggctctgtggggacagttctctttgaatgagctattatccagacggtggaatggaaa

SEQ ID NO: 154011 - DNA, 502 bp, Homo Sapiens
aaggaaacatttattatatttaaattttgtttttaagttgctagcatctgcctgtgtaaagccattttaaggttttgccattattaaaggaaagaaggaaactctgtaaaacaatgtgtctgttctggcagcaaaataaggacctttaggtgttctattataagtgaagatctaagattttccaagttacaactgaagaggtaatctagatattaaagtatataattgcgatttataaattaaatatgtgaactttctcctagaaatatcagcaatttggaattatattgacatatttttgtctgaatcaatgagtctgtttcaaaatttcagtctcatcagaattataatgtgtattatttcccagctcaaataagaccccttcttccttcctttgaggaagtactgggcacgtaagatttttttccataagacaagttccagcaaagagaatataaagattagtaagacatactcccagccctcaaggatctcattgtcc

SEQ ID NO: 154012 - DNA, 429 bp, Homo Sapiens
tttataagcagcagtgcagtaaacatccttctacctgcttccttgtacacatgtgaatgtttcttcgcatacatatcacgttgtccatgcagaggtattttaaagtgaatcacctgtatgatactataaagttaccaaaaaaatagaattgggctcacaggatatctgcaatttttattttagtggatcttgtcaacagctgtaaaaaatggccataaatatttgcacttctgtcagcatgacatcagtactcatttctctaaacccttgttacatgtattggaaaatctcatcagtcacttgttttttaggggaggggagtgtcttgcacagaaatctataattttaatatattcaaactcttcaatctttttagattctgcttaagaattctatccaaaggtgataaacacgtttttctttacattt

SEQ ID NO: 154013 - DNA, 689 bp, Homo Sapiens
  misc_feature (217)..(250): n is a, c, g, or t
  misc_feature (531)..(566): n is a, c, g, or t
agttttatttatattaagctattttaatatataaaatatatacatagtacaaaatccagaaggtgcagaatagtaaacaacgaaaagtcagccttctaccccattatacaatctaaactccccctcccaagagacaaccataattaacaatcttttatatagccttgtagaacatctatgcacaaagaagtaagtcgtagtataatatacacactgnnnnnnnnnnnnnnnnnnnnnnnnnnnnnnnnnncaatgtatagtatttcaaggcatgaatggaacatgctttttaaaactagttccttattatgagacatttaggtcatttccaatcatctgctattacagataatgatagagtgactaactttatacatgcatcatttaatactggagtagtcactgagcttcagagagagcgacagagggggctgggacttcgactccagtgttctatctccatattcagagccctttaaggttaagaatgtggctgggcatagtggctcatgcctgtaattgcagcacttnnnnnnnnnnnnnnnnnnnnnnnnnnnnnnnnnnnngaagcagctctttaaagaaataagacatgaaaataggtctgtcctggtatactacacataattgaaatgagtaacacctggaagaccaatattgttacgctatgttctgttaggatctttaaa

SEQ ID NO: 154014 - DNA, 500 bp, Homo Sapiens
caaaaatatcaactgcaaaagtacggttttaatttcagttaaatttaaaggtcattagacaaagtataatcaaacattgggcagacattttatattgtcatatatttagctaaactaggtcttttaagaaagttcttatttcatacacatttttatattactactttctaattattctcacctttcaatggaatatgtgtatacaatacatagatatcacttaaaatataccttataattgaattgcaaattgacaggtggattcctaaagtgaatattataatatataagcacaactgaaatttatttgcacagaagtgttaacagttgttgattctgtgaagattaccaaatcaaaagatgttagtgaattggctactgagactttttggtgtaatttattaaattcaacaccaaatctttaatgttcgtgtcgaatacttaaaatgctgaagactaaatgaataagacgtttatattatatttgaattataaatggg

SEQ ID NO: 154015 - DNA, 259 bp, Homo Sapiens
ttcccccacctcatctactctgttcctgcacagtcgcccttttctctgatgccccgggcaggtttctctctgccagctccacgcttctggagtcccccatccgtcttggggcccagctgcccactgtctgggttcagaccttctcaacactccctggcttctctgccctagttttgccttctccaatccactcttggtgggtggaagtacggttaccatggtaacttgaagacaacgcaaatctgattgtatcattaca

SEQ ID NO: 154016 - DNA, 468 bp, Homo Sapiens
  misc_feature (135)..(143): n is a, c, g, or t
ttttcaggcaagctgatttattgtcagtcctgcctggctacctcttgacaaaagcagagaaggcagccccacttataggctagagcaaggttttataggacatagaactggatcagggtgaaggaaaaagaaaannnnnnnnntcctttgtgccatgtgtctgaccgcttcctggagatgtttttcttgccagttctcttgtgcaaagtagacgtcttaaccgcatcctgggacagctggcctctggtcaaacagttacaggcaggttttgggtagcgggttttactttttggcctttggggcttagtctatgggagggggaaacagtccagttgggtggaccttatcaatggtgtatctgtaagtggctggtggcagcgacaacattcttacgctgcatgtgtattgttcagttgtcatctgtgttggggaatctagccactggcccacagagagttaaccatagct

SEQ ID NO: 154017 - DNA, 325 bp, Homo Sapiens
aaaaggcatcagaaaaatacgagaagtgaggaaaatagaggttgcttttgttacggtaggttaagatagaagaaataaagaaatatttttatacaacagcaaacgaacaatattaaatacaggcaaaagatggtagaaattctggaacagtatccttcagtaggtgagaaaggtgggatttgcagattttgaattaaaggaaggaacgtgggtagaaaaattagtatgttgctatgcacagtacatgagtgtgagtgcatgggcagaagtatagtggggttctgctgttatctgattctttcaattgtttgatgtgtaatgttaa

SEQ ID NO: 154018 - DNA, 478 bp, Homo Sapiens
catttaccatggtattttgggtaaaataggaggggagagttaaatatactggtatttgcatattattgcaaaaataaatcacataggataaagtatagcctaacaagcttggttatctagagaaaatggaaagaaatggggtgaaaatgataaaagtaatgggaagaaacatcacttttctgcctggccctttttatataattctgaactaactttgacttggttacctgtcaaatacaagcaattggatatttgtgtccccccaaaatttgtatgttgaatttgtcatttcaatatgatggtatttggtggtggggcttttgagtgtaattaagtcatgagggtggagcccttaggaatgggatttgtacccttataagaataagctatataaagtcctagctactcagaaggccgaggcaggagaattcttgagtccaggagtttggctggacaacatagcaagtcccttctcaaa

SEQ ID NO: 154019 - DNA, 398 bp, Homo Sapiens
tgcggccgccaacttttttgctcataacacttctgtgatattgagaacagggcccagatttcattcatctttgagctccctaccagtgagcagtctttggcacaaaggagatcctcaataagatgcctgctgaatggagatttttccagaaggaaatgaggcagagagtattccaggaagaggaaactgagccaagtcagttctgtaaatgctgtaggagaaaatgggcattccagctgtaggagaaaatgggcattccagcaggctgtatggatcccattttccatggaaggaaagaggccatgctgggatgagaaaagtgggtcacagcagaattaggccatgtagtgttaaatgtgataatatgtggaatggaccttattctgcaggtattatcc

SEQ ID NO: 154020 - DNA, 543 bp, Homo Sapiens
  misc_feature (430)..(450): n is a, c, g, or t
aatgagctctcacatttaatttgtattaatgggggagttatgtttgtagcctcaaacacactgtaaaaataatttcctaagatataattattcttaaatattttatatatttttttcagagatggccacaataacttttatctttattttgtggctcttttctatatagttgtatcaaaacaaccatttagggacataagtcagagtatttttactgtgctgggtacttatttcatgcattagaaaaatctactatgttgcagaatatgaattttcatgttagcttaacatatagatctttcagttcaaccttgtcaggcagggatacacgtcaagtttacacctgcagcacctactaagagcagggctgtccaccttctcttctcttctttccaccggagaggactgtattataccattcaaggggccnnnnnnnnnnnnnnnnnnnnnctttgcccttcaattcaaactctgttatgccacatttggcataaaatgcttaccattacctaaaaatgattttttaaaaaatgcttatcatta

SEQ ID NO: 154021 - DNA, 429 bp, Homo Sapiens
  misc_feature (387)..(387): n is a, c, g, or t
ttatcattttactacatgaacatcatggataacaagggattctgattcattattaatttcattaattatattttctgatatgagtctagaacttactgcaaaaacaagacaaaactaaaaaaatacaactgagaagggtgaagagaagtatgtttgttaaacagtaaaaatgaatagtatacttcttaactaggtttacaactggtggaccacacaccaggcactaatcacctggtgaggatttggcatatccaccaaaaaatgcatccgatttaaccaacatctccaccagcgctacggactcctcccaattctgacatctcttgcagacaatactatgctctctacacactgtttagaaatggaaagggtgatctgcactgtatncttgggtttgttggctatgcttcctttgatgacatatattat

SEQ ID NO: 154022 - DNA, 289 bp, Homo Sapiens
tcagtcgtatctgtacatgagacttcaatcagcgccttcgctagcccattcattcacctggcatttatagaacgctgctggtgtacagggtgaacacaacagccaaacatcttggttcctcctcagagatggccggcccagagcctggacatctgacttaccaatactctagtccgtcaaaaggacacacaccaaaggggaagggacctgctggccacaggtggggctgaaatgggttgaaatgtgttacacaactcacatctcatgggttcataactatcccccccgc

SEQ ID NO: 154023 - DNA, 696 bp, Homo Sapiens
tttgcttcaacagacctcagtatttctttttattgcattcgttgtctaacaacaataatactcattggcaagaaatttatttacactaacaaattaaatttaatcacaggtatttttagattggtcagaaaataaaagaccactgtgatattttgcttgaatgcctctgaaaaccaaagagtaaggaatgtcatttgaaactttttgaacaatctagagaagtacatattaaccaagcacaagagaacaattcagacgtggcactattgtctcttccatgcaaatgatcagacatcaaaatgtacaaattaaaagcttaggtaacatgctatccatacttatcagacttaaaattattttcaaacaattcgtgttctttactgatatacaaagaaagctgaaaagaaatcaacttcttacagtggaatagaatttattctcttttattttcagctgcccagttttgtcagtaaggtgtagcaggtgtacaagtggttgcaacaccattaaaaaatataaaagcagtagttatattaaataatgttgaagaaaacatatacatatatatttaaggaatttcactaagcactaactaaatttcatgttgttgggaggtgttatctggctggagtgcctcttaattctttttaaggtaatttaattatttcttgccaattgttctttcttggcggccgc

SEQ ID NO: 154024 - DNA, 826 bp, Homo Sapiens
tttacaggtagggtaaccttcaattccaatgcgaatgttttttaggccccgttcctttaacactgtttttgcaacatccctattctcaatatatttgaagaatctgtagagcttggagctataaagaatttgggaatattcctcccccattggtggagggtggtcttcatcccagtccacagaatcctcatccgtcagcacaacaatgtggcactctcgttctcctttcttggcacagcccaccatgatgggcaagatgagctcttcgaggtagtgatcaaactgcttatgagcaccgtcattagacagttcatggagtaaagcactcagatcttgacatcggatagtgttgaagtcaaaattaatgcagagataatcacaagtatctctaagatctgggatagagatgccatcaggacaattgatgataccggttttgtaataatccagcactgtgcgaaatacagttgcactgatgccttcagcaatctcatactctcccttctcattgggccgagtgaagttgtactctcttcctggtccaaacatccttcccagcatggtatccggatgagcagtgaaaatctgtggattcacaacaaaacgtgtgccatctacaagaagcgtcactttctctggtgcttgggaatgggaattactgccaaagcccacactactgtttccaaatctttctggagcaataaaaggttcatggttccgtttattcccactttggaagcaagaacctttgatgtcttcagcaaggggcattatgtgagggaactgaagatttgctggctgagaggcatagtcaagtgagaggtct

SEQ ID NO: 154025 - DNA, 519 bp, Homo Sapiens
tggaagatatctctccagtatgtcttatcttatgtctatttagatttgacgatttactaaagactttcacacatttattaaattgaaagattttggtatgtgtagttgataaagattggttaagtccattacaacattctttctgcaccttagattcacccacactttcccaatctttctttaattgtaaattctcaatgccatagcttccatatcttctcagtatcactttttgaaatgaatcttttataccatgctctggcaagaggtcttgggtgaaatgagaagaaacagctgggtgtctggctactgtctcatgtttcttcacattccagggctcattcctttgctctagacaggtgatcaggtctggcttagagacagcaatacccagggagaccaggtttctgtagttttctaacatcacgtccctatacagattctgctgagcagggtccagatagctccactcctccggagagaattctatggccacatccctgaatatcaacagtccct

SEQ ID NO: 154026 - DNA, 546 bp, Homo Sapiens
ttttttatgtgggtaatatttatttttaaaaagcaaggagattttttaaaagttaaaatgagaaaagacagaactaaaaatttacaaattaaatgagatggtggagaggtgaaagggtaaatcagccatattgaaaacaaactgtctgtgaacagaaattgacacttaaaaaggagaatctgataccagcagcagccacctgtgcagtgggtttggcgggcaggagcttctctgcttcctgcctgccacagtgaactcagctttgagggagcagcagagagcttcgtccttcattaaagtgtccttcacagacattttcctccctgcaggcatcgggagacagcaggcgctgcttgcatgctgacttctgagtaggagggggtctggaaggtcatccagttccaccctacctgatgcccaccccctctgtgttcctgccaataagcagtcctccccatgcctcagcacccctggcccaagtttgttacatgtttctaaaggaaccagaagaatctctaggcttttagacaaaagaatttctaagag

SEQ ID NO: 154027 - DNA, 570 bp, Homo Sapiens
cttggaaacacctgcttttaatgaaaataataatgtgaacatttccattaaagtctttcatggatgtgcaagactttgaatgaccctggcagtcaagggtgagtgtcatccacaggagagccggccagccacgggctccatgggcagttgccccgcaccgcgcccacgcaggcccactgtgcagcccccaagtcaccagagttttcgagaaccacttccaaaagacaccgtcgtgaccggagccattagcaaatatcaggatttttcaaaccacacttcaatacatccttcactttaatttataaaacaaattactgaatataaaagtctcccctctgacgagcacagcattactcacacattgtgtacaagaacggccaaactggtaaccggcacgctactggcaacacggcagtatttaggtaagtgccttcaatatttaacaaatcaaggaggctcatggaaagcagtttgcttgttaaccacttctgggatacactgggggtctcccactcaaggtggggtcccggcagccctactcacccggcaggtgtaacttcagcggccgca

SEQ ID NO: 154028 - DNA, 678 bp, Homo Sapiens
  misc_feature (53)..(79): n is a, c, g, or t
atgtagtgaattttgtggattctgtattccctgcagcaggtgccccatggtcnnnnnnnnnnnnnnnnnnnnnnnnnnnattctacatctggcttcctacttggcatacctgggtcagtattatttagtggtcagccagtgatttgttgtaagatttccctaaatctcttgcctgtacatctcccaccctttgtcaaagtgatttgtgtgtgaaggcatgccttcaaagttcagaaaatgacagccttagttttcatttcctgcttacgcagggcttcatggtgaagcagaagggagctgattatttgaatgaggtgttttcctttctaggaatttgcaaagtcttctagatccccaaaaatatgttgtagcttttcaaagctgcgtatgttttccagttttctaagaattcctcttatattttgatcaggatcttgtttcctccacctttaatcacatgcttaggtagctgagatgttgccagcagattactgttgtttttggtaatgccctagtcaaatgaaatagccaagatgctgagaatgaagattttccagggagctgctagttcagacaaaatgttgatagtaatagggatggagattttcatgcagctccaaggaggtcagtcatatccattggctgtgaagccgctggctttccatggctactgcacta

SEQ ID NO: 154029 - DNA, 779 bp, Homo Sapiens
  misc_feature (221)..(221): n is a, c, g, or t
  misc_feature (225)..(248): n is a, c, g, or t
ttaagagcacataaactcctgttttatttttattgtggcatgaatgataacataaaaccaaaaacatgaaaatatacaacttatattacactatgtgttatgaacaaaatataaatctataactctatgttatatttacataattacttattattttattaaatttcaagtgagatggtaggttgcacatactttgttttaagctccaggcatttgattgnctcnnnnnnnnnnnnnnnnnnnnnnnnacttgtaaaatccaaaatattagaaggactaagagctttagagccagtggagctatataaatactgttttagtgaaccagtgacggaaacactggggaggacaggaatcaatcaatcagtaggaaactcaacacatcgtcttcaacctgggaagttgatagttataggatactttaaaattaaatactgtaaaagcctggctaaaccaacagctatgccctacaagacaaagggatacctgaaccactttaagtggccttcatagttttccttgcagaccccgtaagttttattttattattaatttgatagacaaataccttataaacctgtttgtaaatatacagttgtttattacaattcaacaatttacccattagaatgagtgaaagtgtaattattttttatgttttaaatgtgatataagaggtttcttctgggaacagtcacagcttctggattaagaaaatatctgaagttggaccaaaaaatggttaattttctttaagtgaattaaggtaaaattctact

SEQ ID NO: 154030 - DNA, 419 bp, Homo Sapiens
  misc_feature (155)..(168): n is a, c, g, or t
  misc_feature (284)..(321): n is a, c, g, or t
ttttttttaaattacatggtgggtcttgacttttattacagaaagatatgtagtaaatattcagaacagatacacaatgttacttggacatttcagaattatcagagaacatagcataggcagataatttttgtaagggttttctgtttgtttgnnnnnnnnnnnnnnagcagcgctctgtcttctaataaaggcctgatttatgaaatgaatgaaaacagagctagtttggttgaactggacttggggtgggtgctttggctacacacctactcaaatccacnnnnnnnnnnnnnnnnnnnnnnnnnnnnnnnnnnnnnngggttctgtggtggaactttctgggctgtgaagcaatgctgttgaaaggccatttggtattagggactcctgtttgtggctcctgggatgaggtggtt

SEQ ID NO: 154031 - DNA, 603 bp, Homo Sapiens
  misc_feature (36)..(36): n is a, c, g, or t
  misc_feature (97)..(97): n is a, c, g, or t
agtcctatgtaccagactgagtttttacaaatgatntgcaggctagacataacccactgatggatatggtgaagaatgagcttcatgtaggtttaanagtgtattctgagcctgtagatgattaatcaggtttttattcaatcatataaatgtattcctttgtaatcatttttgtttaactgaggatatctagtgtctgcttcatagggtgctttgaaatataaaatgaaaacttatttatactgtttttacaacagtcaaaaaggaaacacacgaaaatcacttttctgcaactgatgaactatatagactggactcttaacctcttagtgcctcagtttttccttcggggtatactattttagatacacctacttcacaggagtactggagggatttgcaagctaacgggccaaatgcttccataggaataaggcatgcccagctaacagaaatttaagtccctcttccccacctctctcatctagaccaaaaagaagactacaatttagatccttggagacttttcctgtatgccttccaaaacttcctgctcacttagatgtaccttgtgctttgaagatttctttgatgcagtctttg

SEQ ID NO: 154032 - DNA, 484 bp, Homo Sapiens
tttagggtattttacctagataggtcttttcagtactgaacttgttcacattgctcacatcgacatgtactatccatgttattgttttaggaattactcttttctgtctatcctgttagaaagactattaaattgcactggttgacactgggttactccatttgtgttcttcatgactagcatgaggctatttttgggtgatacttactgatgacatatatgatatagaagacacaggagaaatatactgcatgaaaatcaagattcagctttagctagacaagatgaatcaataaactaaaatctaacaagatggagttctataggaaaaatgtcttaagagtttggtttaataaatcaatttcatatgtgaagggtaagccataatttaacagcactacatattgaagatttaaggttttagtgacataaagtgaatcagtgatatgtggttgtcaaaataaaaaactaaagtggtattagg

SEQ ID NO: 154033 - DNA, 339 bp, Homo Sapiens
  misc_feature (159)..(192): n is a, c, g, or t
ggctaccccacaggtagaatagcactccaggattgctggctagctatatttatacccactgctaattatatgctaaataagaggcaggttattcataaactaggaacaggaagttcctggaaccatataagataattcctgggttattgccgtgggatnnnnnnnnnnnnnnnnnnnnnnnnnnnnnnnnnncttatgcaaatgcattttaattcctattccgagctggttttggccattctttgttattgttatgttctgttttgatcagcagggttttgacaggtgcttggaaaaatcctgctgatctcctccctcacagggacatgcctactgcca

SEQ ID NO: 154034 - DNA, 507 bp, Homo Sapiens
  misc_feature (16)..(16): n is a, c, g, or t
  misc_feature (382)..(391): n is a, c, g, or t
tctgattggtagcttntgctgatttctgtggtataaatactcctacctttgaccaatttcaaactactaatatgacatcactgaacacagagttatgaaaatttgggccagctccaccataatttggctgtagccaatcttgattatctagattgactcggggggaaaaagtatcattttgtcagaaagcatttttccagtacaattgtgaccctgttacccaatcacttgagtttattttccaaaaatacaagacaactcatttagattttttatatttccagaaaatgtgtgtgagccttatatcaccagcctaatgggcattggtgtaaggaaccaaatatctatatatagcatttaaatttgaaaagtcaaaattggnnnnnnnnnncttgaatttttgctgcattaaatacttacagtgttattatggttggtatgattttggaagttgtagataatcactagaaatcataacatttattgaatctgtccaaagatcagaaa

SEQ ID NO: 154035 - DNA, 532 bp, Homo Sapiens
tttgcagtttaaaggagcacagatttattattttacagttctgtaggtcagaagtctgatacaagtctcactgtgatgatatcacagcataggcaaggctgtgtttttttctggagtatctaggggaaaatctttccttgccttttctagcttctagaggctcccagcattccttgctttgtggctccccttcgtccatcttcaaagccagcaatatcacatctctgtgacccttcttctgttttcacatatgtctgactgcagccaggaaaagttgtcaccttttaaggactcatatgattagactgggatcatcttaacctcaatcacatctctaaagtctcttttgctaagtaagacaacgtattcacaggctccaggaactaaggggtggaaatcttttggagaccattattctgcccagtataataatgctgttaaatagcttttgatgtatttatttgccacccacatatctcctttggtaaagtgcctgtccacatccttctaattacacaattactaattggct

SEQ ID NO: 154036 - DNA, 492 bp, Homo Sapiens; identical to SEQ ID NO: 119812

SEQ ID NO: 154037 - DNA, 341 bp, Homo Sapiens
gtacgataatgttcatagcacttttattcataataataaccaaaaaatcagaaacaacccaatgtccattggggataaacacatggataaacaacgtatccataaatgaagtacaggtggtaaaaagaagcaaagtattgatatatgcaacaaatgaataagctcaaaaacattatgctaagcaaaagaagccatacatatcatttaatttttaaaaattgtatataacagacaaatctcatctacagtgacagaaaacagatcaatgtcaccggccgctggaactcctagggagtactcactgcaaaggagcccttctgtcgtcttctcgcagccgtata

SEQ ID NO: 154038 - DNA, 535 bp, Homo Sapiens
  misc_feature (41)..(53): n is a, c, g, or t
ttttagagttcatcggctttacttgttaaattacaaagtcnnnnnnnnnnnnnattcttattgaaagcttccccaatatattttaagacacttttctgccctagtaagaacagtacagtaaacataaaataatctctggaatgcttctgttggtgtgaggcctccagcttcatgttccacacggagcccctccatcacacagaggcatggacaaggccgatgccggggtggctgaaccctacagatgcctctgccacaccctggagggacacttctcttctaaattaatttttatcatcagcttcttgggtgatcagtcttgagtccctctcaaagtggcttataggtaaaagggttttcttgaaggtgtcagtttcttggattctaatgttcaggtctggcctgagctcctggattagtgaatccattggcacctcggttcctttagagcgagtacgcagcgttttatcttcagcctctgcatccataaacctataaacagatgtataaagtgatttcctagtacttgtacttg

SEQ ID NO: 154039 - DNA, 761 bp, Homo Sapiens
tttactttttaaaacatgctttacttttctgactaaaaggaaatagatactcattgtggaaataagttccatttttgagcttaccactagtgtcacattttatcaaatccagaaagtccattcaaacatctgaccttctttcttctgtcttagccacagttcctatcttagtggaaggaaggccttgaatgttctctacttctcacctaaggatcatgaaagagggatagggtgaaagcctaggtgagatctggccttgctgatctcatcagaccatgctgaaggtagtgccagtaggatgttgatacgatacgagaagggggggcagtccccttttgccattctcccaaagccgcatctaaagtcccctccccccaccacccagccagcctgggaactgggcagggggccagagccagttgcttggtattcttgggcacgggggctgcaggcacagcacaaagggtaggagagagagctgagtgggggcctggtaaccatcaaaggagaaaatgggctccacaaaggtgggggtggtccattgcttcccccacctcgaaccctaatgactgaatacaaggctagcatggtggggccaaggaaccatcagaccaagcaactaggcatccatccaaaatgagtcattagtggggtggtggggagttgaagtgagggacccctttgcctttgaggcagaatggggaagctagaacacatgagttcctaccagaccctccagctctttctcagcttctcactgc

SEQ ID NO: 154040 - DNA, 419 bp, Homo Sapiens
  misc_feature (373)..(373): n is a, c, g, or t
  misc_feature (385)..(385): n is a, c, g, or t
tttttttagatttggcttctttttattgcctactaaaaatattaaaatacaataatgacagaacaatcatctataataaacatcattttacaaagggacactttaacaccaaaagatgagagagaacaatgtaatttcataatgaaacaactgaatacatttagcacttaagaaaaagaacttcattattatgattcttgcaccagtgaaaactctgttaccacacaactggagttcatacactggcatctaggagccactcttttagagcagtgtttccatctcaaaccataccattgtctagtaagctgaccatttgcttttgggaacccagatgtgaagaagtgaaggaggggagaggaagagagaacanaactaaaatgtntgcaaaatgtcccttaggaatccactgaatggtg

SEQ ID NO: 154041 - DNA, 598 bp, Homo Sapiens
tctttttagagatgagatcttgctctgttgcccaagctggtatcgaactcctcctgggctcaagcaatctcctgcccaggactccctcctaacagctggaactacaagcatgaaccactgcacccagctactggtgtattgtttcagtagtctttttaaaaaatgttaatatcttggtaaaaaatatatttatactgttctctaacctgcttttttcatcagtgtgatggaaaaatgctcatcatatattcttctgctatataactttagatgtctacactgatttcatttatgacatcacaattaaactggttaaaccaaattcatattgctcacttgtttctaattttttctctattaaaatgatatgataagcatccttgtagccaaatatttacacacattcattaaggtttacttaaaagaaattcctagacgtggagctgagtcaaagagaagggatcttttaagtatttttgcactgattgccatgaaaaggtcataccagtttatacattcatcaatatatgagtttcttttctaaatcttcttcaacatcatgtgagagacagctaaagcatagttgttcagagcccag

SEQ ID NO: 154042 - DNA, 427 bp, Homo Sapiens
aggggctttttttggaaaaggacagcatttttagcagtgtgggattttataggtctgaccatcaggccaatcacaaagtagctctggagagaagagagcagcagaagtacccagggaggaccatctttgcagtcctcacgagtctcctggttcccgctctttccttcccctggtggggatatgaaaagctacttctcaatagttaaaaagaccctttttttcctgcggttaaacacatggcactttatggctgctttaaaatgaaggggtgaaaacttttcttaactttggcagcattgaaaaccagggccattattttttcacagaacccaaggtaggtgccaggaactttctggtcagagatttcactcttctgtattttggggtgagggagaaggaagttaatcacagagtaaactgtagagga

SEQ ID NO: 154043 - DNA, 343 bp, Homo Sapiens
ccaggtctctctgctcgtatttgcttggtgctccgaaatgcacgggaacagaccagctatgggaaagctgcacagagcagttggcaatcaacatgtcctagaagggtgtgtggagtagcaaaacaagtggaacggatgaagaacttccaagctccttcgcagagttttgggccctagtgtgcagggctgctccctcatgagatggaggaaaatgtcgcccacacctacttggacctctcaccaaggacactgccctcagagataaatctgttggacggcagccaagagaccccaaattgtctcaacctccaggacacggcaagttgcaagtttccgagttggg

SEQ ID NO: 154044 - DNA, 386 bp, Homo Sapiens
caaccccctcccctcagtctcacaccctggggctttgtactggcagcgtagagccccctgagctccaagcacaggtgcccagtccctgacaggcattccaggaacctcggtggaatcaataaagtgatttctagccaggcgggcatgtccatcaccagaaggttcgattccctttgtacacaccagggggcacagcaggagctgtgagaaactgctcccaattgtttgaattattgcctcaatgaggctactttgtggtaaaacaaaagaaaacaaaacgaaaatgcaagatggagacttgaaatttaaaagctgtgtgaactcacgtgtgtgttgtgagtgcctatagcttactggaatcatcatcttcatcaccatgattatat

SEQ ID NO: 154045 - DNA, 798 bp, Homo Sapiens
atcagcaaatttgtactttaaaaatttcacattaatagaatcagactatatatactcttctgtaccttgctttttttgctacctgtgttttatgagatctttctgtatcagtatatataaaaatacctcattatttttagcggctgtgtggtattctaatgtttgaatgtgttacaaatgttcaaacactgataggctctttaggttgtttccaatattaaatcacattgtggtgaatatacttgtacatataatgagtttttattctacagtgtacctagcaatacaaattgctggatcagagggtattttttattttcagttcagtagttactgccaaattgtcctctagaaatctttgcccagtatgcttccacatataatgtatgagaatgattatttaccaaacccatgccaatactgggtactaaactttttgaagtctgatcatgtgaaagtgaataaatggtatcttgcgttttaatgaagttctaatgcattttaatgaaggtctggtacattttaatgaaggagatggaacacattttcatgtttattgattactgatatttcctgtgaaatgtgtagtcatgttctgttttctattaggtggtatgtgttttattgatttgtatgagctttttgtaagctaagaaaattggtccattgtcatgtttaataatattttcctaagttttatttatgtagttaaacttagtctttacagcttctgagattttgccttgcttagaaaggccacctttgcatttaagaataaatttaatgtatttttccagt

SEQ ID NO: 154046 - DNA, 467 bp, Homo Sapiens
tgcggccgccaacttttttcaggtggtgagccttttgttttccccacagtcccattccatgaggaatttgaatgtggaacagccaaaaaaggggcagaatcagtcacagagagagatactgaagttggtcatcaggcacatgaacatactgaacctgtatctctgtttcctgaagagtcttcaggagagattgccattgaccaagaatctcagaaaatagcctttgcaagggctacagaagtaacatttggtgaagaggtagaaaaaagtacttctgtcacatacactcccactatagttccaagttctgcatcagcatatgtttcagaggaagaagcagttaccctaataggaaatcccttggccagatgacctgttgtctaccaaagaaagctgggtagaagcaactcctagacaagttgtagagctctcagggagttcttcgattccaattacagaaagctctg

SEQ ID NO: 154047 - DNA, 475 bp, Homo Sapiens
  misc_feature (274)..(274): n is a, c, g, or t
tttttgatggtttacatgttttatttttacctggcaaaaggtagcgtagaaataagggatttaggttttgactaggatcagatgaaactgggcagcgcttcagtaattcacttcacaaacatgcagatccaacagaagttcctggaaattcagtcttcaaggagcttattgtctagtggaagacaaacagttaaaatcccatatggtagattctatgaaagtgggaggcaaaggctgctgagggagtgtggaaaggaaacacacaacacacaancccaggatgagagaggcggcttcccagagggtcgtgattatgatgtgattatccactgaatctcatcctaagggagaaggggtctgttgggcaaagcaaagcttggtgatggggaactgtgttcttagctaaagaagcactactatacattcagagaatcaagaaaaagcataatagatctaagaaattacaagtatttca

SEQ ID NO: 154048 - DNA, 664 bp, Homo Sapiens
  misc_feature (279)..(326): n is a, c, g, or t
tcagataacggtgatagtgatgatatgttgtgtctttttaaaacaaagcgggagaatacgtttttgaagaagagaatttttagaacagtttgataccgcaaattattttttcctcaattgtttgagcagcattcgagttttgaaaattcttgtagaagccaattttttgtaactgtggtgcaaatcttgtgttttcttagcctaatgaaaagtagtatagaagcaatatttcataccatgtgctatatatgtgtgcgcagatgtgtgaacataaaatcnnnnnnnnnnnnnnnnnnnnnnnnnnnnnnnnnnnnnnnnnnnnnnnngtgtgaagtggaaagcttaccttttcctatctagatttaagaacctattttagacatttgttatgttttgtgaaaagaatgttctatttgcaacaaaacatttaattcttactgtatctctggctgtttaatgaggacgtttcacattaaatggtaaaacacatggaagatgttagaatgtagtaattatttaagtaaacgttcacccacatattcctgaagtttgctttgtgcctccgagtattatttaattaaagaagtgttttatgtttgcagaatctttgtcactgtactagggatgtgggtgaatatcatttaaaaaaatttaaaacaacaaa

SEQ ID NO: 154049 - DNA, 690 bp, Homo Sapiens
attcttccagggtctttttattggctgtcaaggaccattaaatggatcaacataaaacagtgtgctacctcttgactccagtttcaaaatctcagtatatttcagtaaactatctctttagtgagagtgatgatgtttgaccataaggccttgttgagagtgacaacaatgaatgggttacacattgctgatctagatcaagaagcttgtcagatgttacagtatgctcacacattaaagttacactatgcggcaattaccctaagtttattttgtgtcagttacagcatgatggggatgccaatcacagagctctccttgcaggtaggttagcatttctattctaggtccccatattcaacagcgttcataacttggtcataagaaactaatcatggaatgaatcttggcatataaaagtcatttctcagaagattaaaaaaatacaaattagaaaaaagccccaagtgctttgccattctgatgttacccacaggccccaaaatgaattagcaagtcagcaagtccttttcacttatttttttctttctccaagaaaactgtgtacttcagggcctttgggtcagtttttaagctgacttgtctggaaaaggttatcacttggagggaaagaagttcttttccagcctggacaatatagttgagactcggtctctataaaaaatttaa

SEQ ID NO: 154050 - DNA, 466 bp, Homo Sapiens
tttgaagtacaaagcaatttattacaaaggaaaaatattattttgaaagttaagtgcaaaataaactgtacaccctgagaggattcagggtgggctgctcctaaggatgagacagcattgatcactgctggagaaactccctttatgggagtcttacatgattattcacaggaggtgggtgggaagaggtgttactagcaagcatgttctgggcggtcttctgggtgcacgtgtgcagtagctgtacatgcttgttcatacatctcatgactcattagcatcttaaatctccacccagggctgtgttttttttcactattgtgatgagcaaagggtcagtctgagaacaggtggaaatgcacgtgttctgtacagggtaaactccctattggagatagctttgcttgaatgagctggactacaatgtgaatgctagagtttattgtgttgattgtgtggtcatcac

SEQ ID NO: 154051 - DNA, 389 bp, Homo Sapiens
  misc_feature (135)..(181): n is a, c, g, or t
gctccagagatcggcgctcccaagtagcatgagacaacaggtgtgtgccacgacatccggctaatttcttaatttttctgtagggatgggatcttactatgttgcctaggctgttcttgaactcctgggctcaannnnnnnnnnnnnnnnnnnnnnnnnnnnnnnnnnnnnnnnnnnnnnngtttgttccaccatgccagcccacaggctgttttttaggactagaagacacttctctcccctgtatccttcccttcttctacatgtgcaacctcattcctgcgctacagctctctctttaccaggtggatggcacctatacacctacagcctgggcatcagcatcactgctggcgtctccccctacccaacgccagcccttacttcac

SEQ ID NO: 154052 - DNA, 546 bp, Homo Sapiens
  misc_feature (382)..(493): n is a, c, g, or t
tttggcaagcagatatttggttgtcctgttcttagtaatggtgagcttaatcagtagctgcacagggacaacctcttccctctgtctgctgtcaagttccctattaaccttatatctgatggttttatccaataataaattgtttcctgagtcagttatttcattcagaattgcaaagtgatgatttttagtttagttattccttccatgtttaatggaattcttctgtaatgaagaacttctctcaaagctgccaactagggttgccctaaagtataatatatacaagaaaaatagtaatgcttttctttttaattgtcaaatacagtaaggaatttcagtgaggatgtttgtgtgtgttttggagatggggtcttgcttnnnnnnnnnnnnnnnnnnnnnnnnnnnnnnnnnnnnnnnnnnnnnnnnnnnnnnnnnnnnnnnnnnnnnnnnnnnnnnnnnnnnnnnnnnnnnnnnnnnnnnnnnnnnnnnngtagctgggactacatacgtgtaccagcacacccagctattttttaaaaaaac

SEQ ID NO: 154053 - DNA, 600 bp, Homo Sapiens
gtcgttaacagatgttaaatgttcattcattccacaaacagtaccatgtgccatcacgtaccttaagcccctggtcatataagattccttcagacatcttgctgtctattgtctgaaggaaggtataagcaaatagcataatgtgtttatttaacaaatatatatgatgaattcatcctcactccaggcactaagaatatacaaagacatggtgactgttcttaaagagcctactatctagctaggccttaaagaagactaatataggaataattagttttgtatagactttcatgtacttttcacaaaccttaactcatggttacaataacctcataggcattgttatccttattttacaagggctaagattagagccaaaagttgttatattatttagtaaaggttagacaggtaagctgagatttgaagtcaagcactttgcaggattaactgaaatcaaggaggggatgcattctagtcaagagcagaagcaaagctaaaaggtgctcgcttcagcagcacgtatactgaaaattagaacgatgcagagaagttagcatgacccctgtgcagtgatgacacacaaattcgtggaaa

SEQ ID NO: 154054 - DNA, 640 bp, Homo Sapiens
catatttaatattttttatttgatatggagtttcttaggttttctataaattagtcagttttattagatttttcaggtacaaagtttgagttttgcttttgattttgttattctcttttctcaactgtcctaattgacagaagtatttaaatactttctttgggttacgctggtcttatttttttggcttaaatggttaactcgttcattttgtcatgtataaaatcagacaccactaagctgtcgacaccaatctgagctggccgtggctgctccctcccgtggctctgtgcacgctgtccagttctagagagcagactgcccgcatcccgtgagttagaaacaagcttttaaattgccaaacagtgtttcaatgatcttcccattgttttgcaaatattttgtttgtgctccatgtgtgctggaaaataacgcagatttctctacgtttaggggcaaacagggatcacttttcatgacagtcaacattgctgtctgccgactgccaactttgctgtgttttgagctttatagtcagtggcttatgagttcctgattgccacgcagccccctttactctatgaactgtcctgaattccatttcaggtcatcgatactgctacaccagctttcttatggt

SEQ ID NO: 154055 - DNA, 510 bp, Homo Sapiens
  misc_feature (55)..(55): n is a, c, g, or t
atgctgctacgtcacaggtggagagaagcgcaagagtccttgatggatggtatantaatggagcagccaagatgaacattgctttccccacaccccactgctccctgaagccagaccccgttgctttggagggcctggccacttctcacaggcaggagtcccttgcccacagatagagccaccagaaactgcagaagaggctaaggcgagtggtttagtggtttgatgaaagaacggatttctggacataagaaaaacataggttcaaatagctttgtcttttctctcacctgacctgttgaaaggtcagattgaaaaggttgaaaagatgcccacaacctccactttccacaagcacctctccttagaggaaagacaagggacccaagtacacacacagcatctggctgaaggtaaaacatttccccaggtttcgctttggaataaagattctttcagacacaattgaacagatggatcctaccatcatatattcttgtggcggccgca

SEQ ID NO: 154056 - DNA, 505 bp, Homo Sapiens
ttttttttatgagctccacttggcctttattacaggcagatttttaaaggcaaaaaaggagggggacaaggattggactgatacaaagttctgccgcggattctcattgatttacagaaataacattgattagtgattggctacccattgttaagccttagagtgtgggatgttgtgtccagtgaggtgttattaggttaattcatagctacttgtggcaatagcaggcagttttgacagatgaatacatagctctaaagggggagaataagatgtgattgccgtatcatttgaatgcttctctgggcctaataatttgaaagagcccacattcctcgataaaagttcttttctttccttgggattaagttagatgataaatttacaatgtttagcatgccgatttatatgtattaagtattcataaagtgttattccatgtgctgagcgaggggaacaccctcccacgtgctcccatgagccctatttctggcagatgtaaaga

SEQ ID NO: 154057 - DNA, 421 bp, Homo Sapiens
ttttatcaaacctttccagggacctacaaggccctgctcccctcactctctgagttctagcaacacaggcctcttctcaacctcctgacaccctgtttccccttgtgcctctggccttccccatatccaaggcaaggagacaaacctgccgaggggaggggacaccttcctctcccacagacctgagttccaacatgtcttccacaaaaagccatgccagatccatccccaacatccagacctaagcagaccctatgcagctgttactattgccagtgactgctgtgggcccgggtcattgttctaagaataccaccaattggcccttgtgtgctggtcacatataaagcctgacctttgactcagggagtcaaccatgaaagatcagggttaacactgggtttttttgttgttatttctt

SEQ ID NO: 154058 - DNA, 523 bp, Homo Sapiens
tttcaggtgatttcttaggctaattctcagagatggggttattgggccaaaaaagcaaactatggctttccgaagctctcattgttcccattatgtcatgcatcgcctgagatgcagtcagcagaggattctatttgagggactaaacactcccggggaaagcaggaagaaggagacgggaactaacatttgctattgagcgccaggcatcgtcctacaggcttcgaagtgaaccttggatgtgctgctgatctgacctgcccagatttgtcatcattgttattgtcttggccgcttatgaagacgttcacccagcaggacttcagaagctttgttcactcgatctcatttaatcctcacaatagtgccctaaggaagatattagtatccccattttacaaaggaggaaacaggaacctggggagattaagcgaaggcctcacagatcatgaatagaagaggctggaaacctagtctggttcaagggtgtgctctttctgctctgccatgctgtgcttcagcc

SEQ ID NO: 154059 - DNA, 487 bp, Homo Sapiens
tttttcactttcatgtatattaatttattttgttctcccaatcaccttgagaagcaaatgattacagccattttatagatgagaaactatgttcagagacagctagtaatttgcccaagatcacataaataagaagtagtaaaatctgaatttaaatttacaatttctcctttcttccccctgttcaaccccagtaggggaaggttttggccactgccttgctcctctctccttcccacctcctacctccctgtctagaaagaacctgaaggcccatctgcccatgtatgaagcagtggtggcacctcctactgcccaccccacttcacacaggcgcctggtagagcacagcaggcactccggaaacctgagcttctttcctttcttaaacttgggcgctcctggcagctaaggagctgtgggcaccccctgccggagagctgagatcgctagccacccaagtttctattaggttttgaagggaagg

SEQ ID NO: 154060 - DNA, 487 bp, Homo Sapiens
tgcggccgctgctccgcccaggccagggcagtgtgggggcggggaggaaggggacgcatagtttcctcggggctcctgtgtggccagcctaaaagtggggttttcgtcgcctgtggtgaaatatctgcgcctcttccatcctcagtaaccagtactgattttccttagcgtctcctgttatccaaagcgaccacaacctacatgacagccccactagaagctttgaggtgacattctctggaatctcgatttagctgtgcaacacttggcaaattgacttcctgttcctcggatttctcacttgtaaaacagacactgtaataccatctactttgtagggtgaatgtcaatattacatgaaatcatgggagtaaagcatttggtagatggtcactcaatgaatgtgatgattatggcaaggagttgtttttcaagggaaacttgcctgtgaaattggtttaatacatttattcatctgcctcgtgcc

SEQ ID NO: 154061 - DNA, 545 bp, Homo Sapiens
aattctagatgaaaatgatgaatttatagagaaaaacagttaataacattcagagcaataacttttgggattttatgtctacccaacaaacaataatttcgatgcattggttctgaacaagttaacatataactttacagagtttagacccttaatcaatagaaagtcatacaaattcccccagagtagtggttggcaaattgtggcccacagatcaaattctgcccatttttgtaaataaagttttatgggaacatagtcacatacattcatttatgtgttatcttattatcacttatgagctttttgcatgacaccagtagagttgagtagtggtaacagagaccacatggcttcaaagccttaaatatttatctgaccctttatagaaaaaaatttgcctccccattcctagaatatcagatgctacttaagtggtcttgttagacagtgcccttagagccctaatgtccaataagggaccctccagtcattgggaagttgagattgaccgcatttttcaccttcttgcccccggcggccgc

SEQ ID NO: 154062 - DNA, 466 bp, Homo Sapiens
tgcggccgccacagctcccggcttcccatctgtatacatttctttgcaactgtgattttgctacttctttcatcaagtggtgaaatcctttctctgcacccttaaaactgggctggcgttctgacctgccttaccaatagaatgcaatggaagtaatattttgggacttctaagcctaggcatcaggaaacctttgaagcttttgctcttatcctcttggaatgttgccatcaccatgtgaagatgccccagccagtctccttgaggatgaggagaccacatggagacagaaggccagccaaagctgtcaccaactcagcagacttttgagtaaggctatcttggaccatgcatcccaagtgacctccagatgacagcatctgcatgagtgacctaatgtgaggtcagcagacaaaccattcaattgaaaccagctcatgtttctgacccacagaattatgaacaa

SEQ ID NO: 154063 - DNA, 486 bp, Homo Sapiens
tttatcataaacagttttatttttctttacatgtacaatacagaaacatggcttatcttctgcgtttcatggtagaatgtcacctgcatgagaactgagtatattgcacttgattatgtaacacggacaggtaacattccatcaggtctagcagcaggtatccgttctaccattaaatcatcttctttggaacatggcggaccaggcagggcgtgtgcacattcaccacgtcgagtcaccaaccctgtgcaatgtagtggtaggttaatccgctcccctagggatggtttaggccaagacttttggggattgaaaaataacaatgagtctacaaaacataagaaatcaacctacatgcagtgaacattttcttttaagcagggatcatagaatctgggatctgagacaaataattattgactactttaacagtttgcttttctatgttttgtataagctcaaggaaatgagttaaacgtatcagct

SEQ ID NO: 154064 - DNA, 540 bp, Homo Sapiens
gtgggaaattattttcaattactattgttttgggttatcaataccaccactgtttattgccctgggtgtaacgaggccattttgcaactacatccagccaggctgaaaacacttactttattccgagtccatcagaattcttgaaaatcagaggatctctcaagccaccccgctgaatatactctacattaaaatctgtcaccataggaaaatattagaaagataagtggtataattaaaaacgataaaaggaccataaaaaggatcctaagtaatacagtataaatggtgtttgttattctgtgtatatagttatgctgttagtcaataaaatatatgcttagtaagaagcatctcttagaaaatatggagagcacattgagaagcaacgcttgaggggttttccaagtctatattccaagtctaaatttccacaggaaatttagagcttaaataatatggggataggactactaatagtgagtcatcttataaatgctaaacagaaattatcatcaccctgtctaatgaagagttaaa

SEQ ID NO: 154065 - DNA, 476 bp, Homo Sapiens
tttgagcacctattatgttcctttttaagcactgaggacatagcagggaacaaaacagcaataacccttctgattccactgggcaagagaatgccgtggcagtttcacccagacttcatgcggccctctgcacttcccaccgagatgccacctgcatgagtccaggctcgcctgctgggggacaaaagaccacgtagcctggtcatccccgtgagtgagtggcagcactcactgcctcaggattgatggcttcatgactgctgctccatcaccatctcactgaaacacatccaaatcctgttcatccttcaaggcccactaagacaccacctcctccatgcaggcctccatgacttccacagcatttccccactgcctgtcctataccaggttctgggctgggatcaggggacacagctggggacaagacatattaccacccacaagaaggccacaggctagagggggaggcagca

SEQ ID NO: 154066 - DNA, 529 bp, Homo Sapiens
tttgatttcctggttccgaaatgccaaatttaaatccatcagcagacacagggatggaaaatccttctttggttgacttaaattctgtattagaagaaccctttgtgggagtaacattagctgctggtctgagaagatactgggaattatatgctggtgactgactataatatactgaagggccagtagttgcaactgttagtggagccccatgaaatgtctgtgacccctgatatccatcaggcaccgagtctggtccataattctctgtgggccaacgatgacgggatgctgacttactgctatttagtttcaactcctgcatttctttcttaatggcctctacttgttggcaaatcatattcagtaaagaattccgatcttctgtccatcgaggtggtgtttcgggagaatacttgttacttttacttggtgatagtgaatatttggtaggagacggtgtataatgttttatttctgaatctgcatttcgcagagaaccatgtttatagagaggacctacctcggt

SEQ ID NO: 154067 - DNA, 469 bp, Homo Sapiens
ttttctaaagggtgaagactccggacgctttataacagcagcatggagtggccccacaagctgtaccctcttccccgtccgtaagagatgcaggggtggttctgactccctcccagccccgcctttccccaccacggcccccactctgctcccgaggtgccttgtgggtctctgctgtttcatgaagcccctgccctccatctgcacagggaccgggctgccagcccccactgtacacatgaggacccttagctggggagaaccaggcctgctgggggtggggcagtgggggctgcctcctgagcaaggccctgactctgaagctgccaccccccgagtcaccattctggagctcatgtcctcatgtcctgcaatggctcagggaaggcagtcttgcctgctgcttggatgaaacccctcaggctggtctttgccccagtcctctccctgtctcactgcagacctttcg

SEQ ID NO: 154068 - DNA, 595 bp, Homo Sapiens
  misc_feature (525)..(536): n is a, c, g, or t
ttttttttaatgctttgaaatgatttattcacctgggaaagtgatcacaacttgctgctaattaaaaccaacaatagaacagtgagtacaattgaagtccatcattgttattatcataaatatgcacccaacaaaaaacaaactaaaagaaaatacactcaaaagcacacagtgggcacattttgtctttgggtagtggaagtgtaggtaatgtcagtgtttggggtttttctttgaatttttaagctgttttagaaataagttttgttattaggaaaattatttttaaagaaatatacatctgagggaaaagagaacaaaggcatgataaataaggggtccttggttggagatgatgcatccagaacattttggataaataagctactttgagttaagggccttctcggcctcctacatcaacacagaatctcaccccaccctcctagtagacactttcctcccaaccccctatcagctacaaatactgtcagcttacacagcaggccttattattattattannnnnnnnnnnngctgacaagtccaagatggcagtcggaactctgacccataaaaccagaaggcttagatg

SEQ ID NO: 154069 - DNA, 503 bp, Homo Sapiens
tttatctgtgtaaaacttttttctttaattcctggtgaaaattcaagccaacaagcatttatgaagtgcttacaagggcaaggcggcaagataaggcctgtcaagaataagaagccgaacaggacacagcccctgatctgaatgaattcatactagagggagagacaggagcatgcaccataactataataagaatagaaagacctcgaagctgcagggaagctgctggggaggtgcaggggaggtgtgctgggaaccagggaggggagagattcattctggttgctgatgtaaaattaacaaaatgaggaagagaacattctttccccgtgtaaatctttccagagaggccaaaaaaactcttcctaaaatgtttctattgctgttgctgatctatttttatactgtactctgtatcttcctatcaaggacctgccctctcatcaaaacctaggataaagatcacctactctctgacatcaatcatgagttcaccctcgtgc

SEQ ID NO: 154070 - DNA, 531 bp, Homo Sapiens
actcaggcatgctatcgttttgcactttaattttgggataatcagttttccttgactaaaaaacacttcagtcacaagatcgacatttatggtaactcatcaaaggaagtatcaacgtacgagggagatatgtgcatgaacagggaaaaaggtggtttggaagtttgataattcttacatttttctgtctggctttatgagtgactgacagcaaaaataatagatcacttttaaagtgtctgccccattcaactgttggaattattaatgttttacattagtgtgcttcgtttttctttataaagcttagataagattcatgccctcctgagtcagtgttttattcagactttaccattttaaagtataaaggagatagcagttagctgatgtgtcaggtttgccaaactactatggagaagttttaaatttaattcgtacacctgctgttcttcaaaagttcaagtaactttaaaagatattggaagttagcttgtagttaactgtaattaaaaaaccaacacagaataa

SEQ ID NO: 154071 - DNA, 421 bp, Homo Sapiens
cagatgagagcagtgtggctcagcctacagtgagactgagagtctggagcccatctcctcgcctccattcatcgcccctgccagctccccctgctccctccagcccacatcccaactccgagaagctcagggtcctaccaagaacgatctgaaaagcactggcgtttgtgttaattaataatataaaaatctaggattagatactccagtgatttgaagtgttttactataagagatcaaataactcttttactataagagatcaaacgactaataagattaaatgaagaatgattgtgtgttcaggatctacagagctgaaaatggctgaattaccatactcagaaatatccatctcttctaacttccagaaaaaaactcaacaaaacagggtaatttgtaaccgggtgcggtggcttgt

SEQ ID NO: 154072 - DNA, 397 bp, Homo Sapiens
  misc_feature (66)..(276): n is a, c, g, or t
tgggaggaacagagtggttgtacccatttaaaccccaccaacaatgtatagaagtagtagtgctgnnnnnnnnnnnnnnnnnnnnnnnnnnnnnnnnnnnnnnnnnnnnnnnnnnnnnnnnnnnnnnnnnnnnnnnnnnnnnnnnnnnnnnnnnnnnnnnnnnnnnnnnnnnnnnnnnnnnnnnnnnnnnnnnnnnnnnnnnnnnnnnnnnnnnnnnnnnnnnnnnnnnnnnnnnnnnnnnnnnnnnnnnnnnnnnnnnnnnnnnnnnnnnnnnnntcatatgtcaatagttgttttacatttttcttctcctaatctgtagatcattgctcactctcttaatgatatgtttcaatgaacagaagtttttaattttaatgaagtctatttgatcaaa

SEQ ID NO: 154073 - DNA, 434 bp, Homo Sapiens
cggcaactaaaaagttttcctgtggtgtgtttttttagttcttttgatggctgttgttttgcattgtaaataccatgatgggggacccccatcagaacatggcttatttaataatttatttcgtatttattgagtaatattgggaaaagagaaggaccacctctttccctgaattgctattgagaattggtccatctcccagctccaggtgctgctgtctgcagcaagggcattactgcccaggtaaggagtgctagaatcaccaagcaaattgaaattggcagaaatggaggcttcagtcacacaaattagactcaaatggaactaaaacactggttatctccaggaaaacctcatttagatggaaattaatggaagaataaaatgcctacacatgaaccaacttctattaaaaagtcacaactccttgaaaa

SEQ ID NO: 154074 - DNA, 512 bp, Homo Sapiens
tgcgatgggcacaggcctctgaggagcggctgcgggagtgtagggctctgcgaggcagtgactggtggtggggaggcggcggcaaatgcccaccaggcgggactcggcccctcgccggttcaccaagaagcctggtgtccagctgctcccacactgtgagcccggcaggttccctgtccccaggctgggcccagcgggcactggggtgcctgggctcaggctgccggcattgtccctgccatgtggctccacctcaccctggcagtgacatctccccaggttcagcccttctcttgaggggctcttggcagcaggacctgggaccccacaaggagagcctgtggggagggggaaggcaagaccgccaagcaccttcgagaaacttctacaaaagaaaatgctaaggaggggggcgagtgccctggggcccccgcggcctcgggtggggccagcacggctcacagggccggtcctgggcgtctaggagagagaggtgatgttggagcggccgc

SEQ ID NO: 154075 - DNA, 540 bp, Homo Sapiens
ggctaaagtagcttaagctattaaggtttgttatgcttatgtctgcaggaagaagtagctaaaaacttgttagctgaatttaacttgggatgtgatgttcaccaaactgagcatgtgtatcgagtctatgtggccacgtttcttgggtttggtggcaatgctgctcgacagagatacgaagacagaatatttgccaacaccattcaaaagaacaggctcctgggtaaacagactggtctgactcctgatatgccgtacttggacccctgcctacccctagacattaaagatgaaatccagcaaaatggacaaaccatatacctacgagggactggagactttgacctgtgtcgagagactatccagcctttcatgaataaaacaaacgagacccagacttccctcaatggggtctaccagcccccaattcacttccagaacagtgaattctatggcttctccgaattctactactgcaccgaggatgtgttacgaatggggggagactacaatgctgctaaatttactaaagctgcaaag

SEQ ID NO: 154076 - DNA, 578 bp, Homo Sapiens
tttgaagatatggttggttcatcacaaccttttatttcacaatattaatagtaatcattatagctaccatgtattaagccttcaccatggggctgttaagtcttcattgcttagctttactaaactagataatgtgtttgcttatctcatggatttctcttaaccatcccctgagatccccctatagttcttatccctttacccccattttacagaagaggaaaactgaggctcagagaaggggagtcacttggccagtcgcacagttggaaagtggtagagccaggatgagacgctaattctgactccaaagctagttatatataataatagcacccaagtaatgtatagattaccatgttttcacatatggcaaattaaggaatcagaatgaatgatgcatgctgcccaagctggacagaggatgggccagggcacaagtgacggctgacccactgatccatggaacccccaagaaaggctctagaacaaagctctgatttcacagtgagattaaaattctgcccaaatcagggtacatgggtggaattaatcaaaaaagttagtatgtatgcctt

SEQ ID NO: 154077 - DNA, 255 bp, Homo Sapiens
gtagctttggtgccaaggagggccgatcataccctgagatatctgcatcatgctggcatcgggttgcttctccccagatttagttgtgtgccacgagtgaggtcggcctgcaggctcactgcgcctgtgcttcagccgaagtttaacccctcctgaccacgctgctttcctgtgctgggggccagaggtgaggtgttctgggctgacgaagttagaggcaccagtatctgcatggcctgggtctgtgcacacatc

SEQ ID NO: 154078 - DNA, 482 bp, Homo Sapiens
gtttgtttcttaaacttgttgccttttctctttgtattgctctcctgtaaaattcctaagagtcgacgctgcaaagaccctaagagattgtctctttcactgtttctgaagtttgaaccagcaggagagtcactggaaaatttgttagacctgggttgctgggcccaccccagagctatctcggcaggtcaaggtgggacttccgatctccgttcctaaaaagttccaggtgatgctgatgctgccggcctgcggaacacgtgctggaaccactggtcccctttctccttcacctgagtgatgagagagctgagctttcgtctcttggacaccttcacctggtctctgagtgtcaaaattgatgcccgcactgaatgcataatccaggttccatccttaacgctacagtgggtctgagtctatttgtaaatcatctatttgtgacactgagtctatttgtaagacatttctcagacatattg

SEQ ID NO: 154079 - DNA, 567 bp, Homo Sapiens
tgcggccgccaaattctttgaaaaattttccccaatgcctctaatttagaatcatattagaaataaactaagatcctataatataaaagcctatatatgtggaatcagtcatatctaggaaaatcaaataatagaataaagactgaatacattcattatttttaaggcaagtgaaatattgaggttgactgaaatgagtcactgttacttctcataaatagattaatcgtaaatttaaagttagttaaaaatagtgataaaagattttaatagcaaattataagtaagcactgattaaatggattatatcaatgttttattaaaccttgctctgaaaatagtacttatgacataaagtttgattaacatactagattcagatttgattatggatgggtgtaatcattgttacggagaggtaccgtggtgcagtagttaagaacaaggactttggagtcagacggatgacatggtaattgtggtacttaacctctgttatccttggtatctttgtctatggaatggagtaataaaagctatctcagagaattatgaatatgataatct

SEQ ID NO: 154080 - DNA, 956 bp, Homo Sapiens
  misc_feature (852)..(853): n is a, c, g, or t
  misc_feature (869)..(869): n is a, c, g, or t
  misc_feature (905)..(905): n is a, c, g, or t
caccaaaggggtgttccccccagttgccagccaagacggcaggggtaattgaactcaggagccatctacggggttggggggaagggacccacctgggccgactttccctcagttcaagaccaggccatgcatggcaggaggaggggagagggagtacaggtctttttgtaccaggggagaagacgtggaagagtaagtgccagggatgatccttctgctcagcaggagaaaatgtcttataacagtgacggggtcactgccacctgagggtcatcatggcgggcacctgggaggtcgtggggcttcggggtctggaagccatacttgggccaccttgtccacccctcagtcctgatcacagtcaccctgaggcctggcttggtccttcacttaaggatccagccttgggggtggctgcgctgcagattggttcctcccaccgcaggctgttcccttctccgggtttctaggctgaagctagtggcttcatctgtgcctttggggaagacccctgcttgcccctccccactgaggcctcaggaggcaagtgggtgggggggtccgggtgccctagagttcctgaatgtgctattcactgccctgggcctgtcatctctggttccaggggcaggagctggcgtgggaacagaggggaagagagcaggcgagcgagggagctagctgttggctgagcagagtcagcagccctgacagccgaggatgggacatgggacagagcaagtcagcgactgcaggagccaggcaggggtggagggcttcccagctctgccttctcctgcctcccaccccagcctgctgaggctgctgccagcggctgcacctccagggccnnagggtgacagtccccnatggagcccccagtcctgcccggcccaggctgctcnggggtgggtgggtaggaagcacgcacagcacattaggaagcttacgcttgg

SEQ ID NO: 154081 - DNA, 502 bp, Homo Sapiens
tttttttgtcagtcttgctagaggtttgtaattttattgatcttttcaaagaaccagccctttgtttcattggcttgctctattgtttttcggtttctaatttcatggatttctgttcttatctttattatttccttccttctgcttgctttggatttattttgctatttttttcctaggttattgaggtgagagctttgattattattattattatttgtagcgacaggttctcactatgttgcctaggctagtctcaaactcctggcctcaggcaatcctctcacattatattttagtgggattacactataaatctcattgcagtccacttaggggtaataatctaagttgtttcaggtaaaatatggtaaacttgcagcaatataactccaataaattcccccaccccaccccaccttctgagctattgccatgtatatataatcaatatataagtccaatacataagtgttatactttttctaaatagttctatgta

SEQ ID NO: 154082 - DNA, 606 bp, Homo Sapiens
tttttttcatcttcatattcgttttattataaatttaatgttttgtgattgttgaagaaatacatgcttatggaaaacatttctaaaatacataaaagtctattttaaaatgatggaaaacatgtggctgctggtcatatatcatatgtagggttagagtcgtctcaaggttagagtttcagaatctttttctctcctatttggatatacattattaaaaatctgtctctcttataccttatcagggggctggaagcagaagggcttctctatctctggaagttttctatattctccattgctggatgacctgcacagcatgtttagagaaatctgtgccatcataggtcagtgcatactgtggtaagctcagggagatggactctttctgatctgggggtccaagcaggcttactcagctggttaatcacagagctctggttggggcatccggcccccgactcatcagcatcggctggctgctcgtcccctggaatggctcctaatcccctcggcagtgactaagcaccttccagtcactgctccagtcattaatttcagcacgggcgcggcctggccgtgctgttctcctggagcgccaaggct

SEQ ID NO: 154083 - DNA, 491 bp, Homo Sapiens
tttatttatagacgttctttatttgacaaataaaaattgtatatatttatcatgtacaactcgatagtttgaaatatgtatacattgtggaatggatcagttgaactaattaacatatgtatcacctcacacactagcattttttgtggtgagaacacttaagatgtactttcaaacacttttgaactctctagaattttagcttgtccaatctcttgagagaaatgagtccatcaatacagaaaatcagcaatgggaggcaagaagagattctttgaactaacacaggaaaaaagcacatctcaatatttatttagataaagggtgtagattgtcactgctgggaaatatttgctgggttacccatgttaacgatctgaataaatttagagttggcctacagtggtgctcaaattggctcatctccagacatgaatgaacatagagctgctctctttgcttttggtgtttccccaattctctcatttttt

SEQ ID NO: 154084 - DNA, 481 bp, Homo Sapiens
aatttataaagaaaagaagtttatttagctcatggttccgagggctgggaactgtggaggggccgtatctggccttcttgctgtgtcataacatgatggaaagcatcacatggcaagatggcaagagcatgcatgtcagctcaggtctcccttcctcttcttataaagccatcagtcccatcatatgggcaccaacccccatgccatgtataacttttaactccccaaaaatgtaactactaatagtctactgttgaccagagccttactgaaacagtcgattaacacatattttttatgttatacatattagacactatattcttataataaagctagagaaaatattaagaaaatcataagagaaattatatttagtaaatataattcactatattatatggatcatcataaaggtctgtatccttgtcattttgttaagcaggctgagaaggggagaggagggagactggtcttgcca

SEQ ID NO: 154085 - DNA, 647 bp, Homo Sapiens
tgtaggcacacatgggagtagtactacgttccactagtgccaccctgcaaagtttcaataagcaaaagggctagttccctcaacaaattacttccttaggtaaaagaaagacaagtgctaaactgcaagctatggcagtgtaagtaagacagataacacaggaagcagggtttttttcaactgttaagttacagggtagctcaaatttctgccttgaaactctgtgcatgaatacagggatggctcaagcccataccaaaagttatttggaaagctagtgccctaaggcagaaataaacacaccatccctagttaatacactctaatgtgtattagagtcatggggttgggggttgggggtaatccacactcttcacatgaattaaatcaagatctctgatgaagtttgagttctttctcctttaattctctctgacaattttatgcacccagggtacaaaactacttcattttaacatcaatataacacttacatcataggactcattaatgaaaaggaaaatcctgtattttaatactatctgaatgaggcttcacagtttctaaaaaatgaaacacaccaatgtgtacataaaattgtaaatgcatcagatttggttatactaagaatttcagattcattgttg

SEQ ID NO: 154086 - DNA, 521 bp, Homo Sapiens
tttaaaacagaattaggttttaatttattggaagcaaagggcacataagctgaggaagtttgaacacaattacatgaatatctaaagagcagagcaggtgcctcttcttacctcgttctgtgtcatagaggtacacaaacttctcccacttgtaatgacccataagactcagaatagcgcccttcaaggctgggctcatctggatgacaaactgcacatctgcgtcagtggggaagctaggcgtaacaaaaggatgtgtgcagggccccacagaaggaggtcagggtgttcattgacatttggtcatagaatccaaagatggcatactcccctctctagaactgggagcagaaagcatttgtcacggaaaaactattggaggaatccaagtgatctacgtggtaattcaaatggaagggcttctcggtggtgttctggttggtgttgtaaaactggcacgaaagcggaaaaggctgtgctccctgcactgtgtttctcatgaaaagttccgctatgctgat

SEQ ID NO: 154087 - DNA, 424 bp, Homo Sapiens
agcaagggaagagggttatctctgctgtgcaggcagttgccactggtctctcattctctctgcttctcgcagtccccaagagcagccaaaataataaaccattccaaatctgcttccaagctgctactgagcagaaaacatgggctcagaaggacaaagcattctcaggacagctctgtctcttggcagagggtgttgccacatcagcccctgaccactcacaggtgacgcagtggcctgtctcctgcagcactgggtggtctgtcctgtccactgttacaaagagaggacacaacagctgatgcctggaggaccctgaacaggatcttgaaaagaatcttcagggagactaaatgacacatatgctattcacttcatatatgtgactctacagctatttacttatatattttggacactggat

SEQ ID NO: 154088 - DNA, 611 bp, Homo Sapiens
ttttatagtcgtcttagatatttattgtaatcttcaagaaataaaacaaactcaaagaacaaaaaccactttctatatagaattcacatacaaacgtgaatacctcaatagagcacatacgcatttttacacaattaatttcaataaagataattaaaacttcacaatgtgaatacacttcatagctttaaacccacacaagagctcctgtggacacatgaagagtcacaatatttgctatgcagcagtagttttcaactaaatgtcggtcactatatgaaagcattaagctgttttcaatattttcttaagaagagttccacagtgcagtcactgagaaggggccaaatgtgcctggttccaaaggaagatcttcatctgtgcatttccaatgccctttatgggaaacatggagctacagaaaaatctctgggtacacatctgccaggtggcattaggtcggacaatctctcatggtttggtgcactggcaaatgtctaaatcaactgccgtaatatggcattaaagcaatttgcatattgtggctgagtcttgagctgctcagcacagaggaatatgataatgcaacagcttgtcttcctcacggagac

SEQ ID NO: 154089 - DNA, 462 bp, Homo Sapiens
ccaggagtccaggccaggtgctgactcagttcaacagaagaattaataatgttttttaaaaaaggtgaaagaacaaatagaacatttaagccaattagaatatagaatgacctatgcaggaagcagtgtaggttatgattaaaagcttgaaccttggggtcagacagacacaggtttgaatcctagctctgtcacttttttgttgtggccttccaggcaggatacttaacctccctaaatcctggtttatttgtcgataaaatggggatggttttgggagtggtgagaactcagtgaggtaatgcatataaagaccttgcttttagccaccattattataatcactgtctcactgttgaaaaaggccagggattccccaaagtgacagtgccagagaaatatgctctgggtgctacaacagagagtacagacctcagaagcagagctcccggattccagaaa

SEQ ID NO: 154090 - DNA, 679 bp, Homo Sapiens
tctggtcagttctatgcccaaaccctaggccttcggtaagcaagacacgaaagcgagttaattctctattcaagacgcaagctgcctgtgacaggggaccagcgccaaagactctgaggttactttccccaggtgttaatcaggtcacaagcacagtggacagcctcgacagccatgacctggaaggggtacagattgacttcattgccatcatagacgatggggaccactccagcctgatgtcgggggccctgagcccaagtatcattcagaacctttcccatagctcctcccgcctcaccacgcctcgggcgtccctcccattcccagcgctgtccatgagcaccaccaacatggctatcggggacatgagttctttgctgacctccctagcggaagaaagcaaattccttgcagttatgcaataggctttaggaaaaaaagactgcaaccaacggaaatcaataggagttgaagagattaaactgactttgttttggctgtttttttagttctgtatgtattttagcaatctcatctcacctaactgagatgtgtttcaattatattccttttatggaaaaggactctgaaaaaccctaaagtattctagggagaaactgtcttccatttcagttttgaatcagtattgttacactcaaaccaccctctttttaaa

SEQ ID NO: 154091 - DNA, 503 bp, Homo Sapiens
aaattcatatggattgtatttttttcttttaaaaatggcaaaatgtttttggcaaatgtaagcaaatgacttggactgcgttgggtctcaccagctctgagccgggtcagtcatagccaggcgaggcctactgcttcctgaggtcactctgtggggctgggggaaggtggatgcccgccactgggaggtgctggccccccacctggctccccctcaggccctcagtcttgaacatggaaatggagctggtgagaggtgccaattacaaactccagcacggatcacccattagcatcactgagagaactctggggccttgaaccacatgcagactgggtgagtcgtctacacagtgacccatattgcgaaagtcagagagaggagtggtgcttccacccctccgacttgtgcgcccgcccccacccccacctggaggaagagggtggcacggggtgtgtcactagtgcttaatctggcaatgtttttcacttgtgggttttttt

SEQ ID NO: 154092 - DNA, 537 bp, Homo Sapiens
  misc_feature (403)..(431): n is a, c, g, or t
aatggggaattgaggacatctagtcagttggatagatctggattctattcttagcaattctgtgatcttgggcaatttacattgtcttttaagttatcagctgttcttaggttataaaaagatccattttgtaaattgtgtcaagcagatgtcgaccatttataataaacttatcaagatatgaagttaatttctttgctgtcattcgaaagacaaactgatagggtcagcaaactaccttaaacatgttctcattaaaacaaaaattaaaaacacagctcctatagccagacgtggtggcagatgcctgtggtcccagctaattgggagactgaggtaggaggatcctttgagcccaggagtttgcagccatcttgggcaacatagtgagacccttatctgnnnnnnnnnnnnnnnnnnnnnnnnnnnnnctagcaaagcacattttctatagaagctactcagtggacataattaaaacaaatggtagtatcttgaaaaaattaagacatttagtgtgaaccacatgtctagaaa

SEQ ID NO: 154093 - DNA, 487 bp, Homo Sapiens
caagcgaataactgtgactatttagacagcattttattttgtatttctttgtattgtttatataaatttttcactacttcaatgcattgataatataataaaattttattagtaaaaaccattgatatcctagatgatttggttggcaagatatcttacttaatttaatttactctgaactcccaatattcaggtaagaagctacgtgggtacaggaattctctgtgccttgctcacttctctaatctctgcctccaggccaggttaacccctatacccattataaaatctctgcaaatagttctgtagtgagttaatgaatgtcagaaatcaccttaatataataggtggtatatagtagttgtgctaaaatatgttaaagctttgttttgttaaatagtctatgtgaaccagtaagaattaatagcattgaataataacatttgaaaactgttcagagatagcaatgtgagcgatggctgataaa

SEQ ID NO: 154094 - DNA, 437 bp, Homo Sapiens
tttcttaatttttaagttcaggggcacatgtgaaggtttgttaaataggtaaacttgtgtcacgaagtcttgttgtacagactatttcatcgctcaggtattaggtctagtactcattagtcatttttcctgatcctctcccttctcccaccctccactctccaccctccaatagacctcagagtctgttgttcccctctatgggtccatgtgttgccatcatttagctccccttgtaagaacatgtggtatttggttttctgttcctgcgttagtttgctaaggataatgacctctagctccatccatgttcctataaaagacatgatcctgttcgtttttatggctgcacaatattccatggtgtatgggcactacattttctttatccagtccaccactgatgagcatttaggttgattccatgtctttgttat

SEQ ID NO: 154095 - DNA, 434 bp, Homo Sapiens
gacacacatctgttcttttaaaaacacttgttgaattgtttaaaaacaccttatttaaaagaacagatgtgtgtctaaagagtaaaaacagaatatcaggaaacaggattttagaagttccttggaaggaaatgtaatacagagcaaagaacattggcctttaagttgaaagacctgggtctagtccaaggctcaccacttccatccaggttgccttgggtaaatgacccacaatcttgggttaccgtttcttcttctgcaagcatgtcatcctaggtatcttccaatgtgccttccatacctaatcatctgtgattctaggtcatctgttgtgactgccaagtagattaaagctactcatcctttagtgattagaaaaaccggacttacagggcaacccatgacattttggacatcactgagagaagtattta

SEQ ID NO: 154096 - DNA, 602 bp, Homo Sapiens
  misc_feature (542)..(542): n is a, c, g, or t
  misc_feature (564)..(564): n is a, c, g, or t
tttttggcttcaacaacagatttatttctcatagttctggaggatggggagtctaagagcaaggctctagcaaagtcggtgtctgagggtccacttcctggttcagacacagccatcttcttgctgtattcttgcatagcagaaggagggccagagagctctctggggtccccttttgtaaggacattaatcccattcatgaaggctccaccctcatgaccttaattccttccaaaggtcccatctcctgatacacactaggggttagaatttcaacatttcaacatataaatttggttgggggtggagggagagcacaaacatccagtctattgccaggtgatgaaactggttttcttataaaacaataagaatttatatttgccaaagaatcagtgtgatagtatttgtgactcattcataaaaatgtttgattgtcttccatcaagaaactcctaccaagttaagttaatgagcagtggaggtggcaaagcaatacttgagaacttttatatgctgtgtcattagaacccatcatgatntgcaggcagaatataaaatctntggcgttcactacttagagtcattatcaccacatcaca

SEQ ID NO: 154097 - DNA, 646 bp, Homo Sapiens
caaaatgctcagccccaacttggacgcgcaccacactgccatgctgacccgcggtgagctacacctgtcccgcggcctgggcaccccacctgcggtcatgatgtcgtacctgaacggcctgcaccacccgggccacactcagtctcacgggccggtgctggcacccagtcgcgagcggccaccctcgtcctcatcgggctcgcaggtggccacgtcgggccagctggaagaaatcaacaccaaagaggtggtccagcgcatcacagcggagctgaagcgctacagtatccctcaggcgatctttgcgcagagggtgctgtgccggtctcaggggactctctccgacctgctccggaatccaaaaccgtggagtgaactcaaatctggcagggagaccttccgcatgatgtggaagtggcttcaggagcccgagtgccatcgcatgtccgccttacgcctggcagcgtgcatacgcaaagagcgagaaccagacaagacaggaacagttcccagaagaggtccgactggtgattactgacctgcaacgccgatcactcatcgtcatactcatggagaacaatcgtccgtcaaggagatgcagatcaccatttgccagcagctgggcctggagctcacacacgtgagc

SEQ ID NO: 154098 - DNA, 649 bp, Homo Sapiens
ccttctgccagcagaagcagcagccgcagcacctgagccgctactgccgctcactcaggacaacgctatggctgagccttggcacagccaccatctctccgccagagtcaggggaagaactgagaggcgcataccccggctgtggcggctgctgctctgggctgggaccgccttccaggtgacccagggaacgggaccggagcttcatgcctgcaaagagtctgagtaccactatgagtacacggcgtgtgacagcacgggttccaggtggagggtcgccgtgccgcataccctgggcctgcgcaccatcttgcctgaccccgtcaagggcaccgagtgctccttcttctgcaacgccggggagtttctggatatgaaggaccagtcatgtaagccatgcgctgagggccgctactccctcggcacaggcattcggtttgatgagtgggatgagctgtcccatggctttgccagcctctcatccaacatggagctggatgacagtgctgctgagtccaccgggaactgtacttcgtccaattgggtctcccggagcgactacatagcctcctacatcgacgaatgctcagtctcactgatgttacccgtcaacctgaagcatctggcaccgttacttcaattcttatat

SEQ ID NO: 154099 - DNA, 882 bp, Homo Sapiens
aatataaagagagacacagacccttttagagaaatgtatttaaaaatttataaagcgttcaaacatacactcattagaacagttctattcactcacgcatgccttcaggaaagtgttacgggccaggccatctgccctgtaggaaacaggtgggtaggacagtgaggaagcaggaaacagagggaaaacccaccacagcaacccttgtgcttgagacggcagcatgagtgatgggccaaacgaggccagagcccagcaggccgcagggaccggccccagcctgcactgcagagccgcctcgccaggtgcccagagcagtctctgtcttccagagcaacacggtgacgtaaagcgttcccagtggacagattctttccccccattttttcatcttagtttgctttgagttgctgttggaagttttcttgagggaatggtcttccccagcagatgagtcaaaaatgccgcaaagataatttaaggcataaaagagcaaaaccaagcgatgagcaaaaagcttaaagtgtacaggtttcaatttaaacaggaggtagagagcagggaaaaggaaccctccaaaaaataggtgcgtgaggaaggcagaggttaaaaaagaaagttccaagaagatattctgctggttggaaatggaagaaaccaaaagacgctgcgttgagaaggttaatgatcggcttgctcttattagaagacacgaacaaagcaaggagtagttagtagcgccgtgggccggcccgcaggagggttagcctggtcccaggtagaggccgcaacgggcggcggagagcgctgggcagccgagttagtgagaacagccgcggtggcgtttagagttggcgggacagaggcaggggggcggccgca

SEQ ID NO: 154100 - DNA, 299 bp, Homo Sapiens
  misc_feature (107)..(121): n is a, c, g, or t
cctccgtgtggttcccattgttttctgtcctgtctctatcttagtctttgtctgtcttcctcctttcctcaaatgtctcaactctctctccccaatttccccatttnnnnnnnnnnnnnnngtgccaaacttccttggaactgagccgctctggggggagaggaccttggatagaggggaggaaatgggaccatttctctttgaggaggtccctaagaggcattgcaaaagtgtggacatggagctaaattgggtccccataccacagccctcccacccgagttttgtttatttctttg

SEQ ID NO: 154101 - DNA, 514 bp, Homo Sapiens
tcaagacagatgcaattttacttaatatctctgaagcttagttttatcatctatgaatttaaggagatgagaattaatactaaatgattttttaggtccccttcagtttatgaagtactcctgcagtagaagttcatggccttgaaaaagcgtactcaaaattactctatttccacctagtggtgaaaccgtaatatttctctgaggctttacttgataaacgtgagtagtttttcagcttctcattctgtaatcacacacagctttggagcatattgtgtcatttttatttaaagacaacttcccagttaaagtttatgtacatagatgtgccttccacaaagttgattattgtatattagttcttcctaaggacagttaagtgttggtggcttagcaacaggcagttggtagagaaatggagagtactacattaaattattgcagagaatattcaaagtaatccattttcagggaactgagtcttctctaagtacatggccagatgatcaaa

SEQ ID NO: 154102 - DNA, 494 bp, Homo Sapiens
tttgcttgttttaggctgatattgcacttcttactccagttttctaaggtggaagcttcgactattgatttcaaatcttttttctttcctaatctatgcattcaatgttataagtttctgtgaagcagtgatttcattgcatcccacattttgataggttatattttcatttagttacaaataatttaaatttcccttgagatttctgctttgacttatgtgttatttggaagtgtatttttattctccaaatatttagagatttgcagctatctttatgttattaaatttaattccattgaagtttaatttcattataatcaagaccatattttatatgatgtctatgattttaattttcttgagatgtcttttatagtccagaatatagtcttggtgaatagaccatgtgaatttgtaaagaatgtgcattctgctgttgttcatgaagtattctatgaatgtaaattagattcagttgtttgatggcattg

SEQ ID NO: 154103 - DNA, 284 bp, Homo Sapiens
  misc_feature (266)..(266): n is a, c, g, or t
tgcagctctagagcaatttccaggtttctggcttggacagcttatgcggtcatgaggacttccacgaggacagcagtcccaggtggggctggttttatatgtgttgagttggggtactttggaacagccacccagcctggcctccccttgggcatcttgctcccgtgtggcctgctgcagcgacagcccaggctgtggcactgcagggactgcctctcagacctcatcggatccacctgggcatggcagacggctgggcttaaagncagggttcatctgaccct

SEQ ID NO: 154104 - DNA, 526 bp, Homo Sapiens
  misc_feature (444)..(444): n is a, c, g, or t
taatgtagattttcctgactggaatttccttcaactgttcttccttggtgatcctgatctgttggctaaatcaacatctctaagttcttaaaagccaaataaacatgacctattaatagataatttagaaatgaaaacaagccagttaaaactgaaagcataagtctagatgttgtacattattctgtaggtttatttataatgttttgctatccttacaaagagttagaaggattggaaaatgtgttgctgatttaaatatatttccctcttcctttatgtgttatctgagggcaggaagatgtactgaattagctcttgagcttaaatactatccttagaaagcttaacccacattgagtacctcctgtacattgaagcatcatggacattccatgatgcgtacatgaggaatacaaagatgttgcagtgtctgacatttangggctcaagacttgtgtcagataaacactaaaccttgacatgtaggtacaaatcatattgctgctccttgaattaagtttat

SEQ ID NO: 154105 - DNA, 456 bp, Homo Sapiens
atcccggcagacccttatcgttggtgttttccagtattacaagatcaacttctgaccctgtgaaatgtgagaagtacacatttctgttaaaataactgctttaagatctctaccactccaatcaatgtttagtgtgataggacatcaccatttcaaggccccgggtgtttccaacgtcatggaagcagctgacacttctgaaactcagccaaggacacttgatattttttaattacaatggaagtttaaacatttctttctgtgccacacaatggatggctctccttaagtgaagaaagagtcaatgagattttgcccagcacatggagctgtaatccagagagaaggaaacgtagaaatttattattaaaagaatggactgtgcagcgaaatctgtacggttctgtgcaaagaggtgttttgccagcctgaactatatttaagagactttgtaaa

SEQ ID NO: 154106 - DNA, 529 bp, Homo Sapiens
accacgcctgtagcctctgtctagagtagttcacacatggatgctgtctctctggtacttgggtgtttctcaggttccagaacatccgttcatcttaccagtccttcaaggttcagcttaaagatcagctccaccaggaagccttcctggatttcccctcttagtttccaacagaatccgtctcttccgttctctgcccaccttgagtagcagtagcttcagctgtagactctcctgtttttcccttacagtctttgttgctgcatcctctttcactgaattgttgatgtgagaccctagactctcttgttttttcgttacagtctttgttgctgcatcctctctcactgaattgttgaattgtgagaccctgtgagggtcggcaccctgtgatactggccaggaaaggtgttgttgcaaggggtatcatggcgattgttgaatgggttttgatctggattttgatgttggaaatcaagttcccaaatgttttcaaccttgggtaaaggaacatgtaatggtgtttaaa

SEQ ID NO: 154107 - DNA, 925 bp, Homo Sapiens
  misc_feature (526)..(540): n is a, c, g, or t
ttttttttggcttataaagaaatttatttctaacagttctggaggccgggaagtccaagatcaaagtagatttggtgtctgctgaaggcccactttctggctcatagatggtgccttctcactgtgtcctcagagtgtagaacaggcagggcagcatgctgggacatcttttcattagggcactagtcccattcatgaggctccatcttcatgacccaatcgccttccaaaggccccacctcctgataccctcacattggtggtcaggtttcaacgtatgaattttggggagacaccaacattcagaccatggcaccatcagaaggcaggaagatgtcattgtggtgagtggtagggtagagaggaggccaggggagcctgacctacagagacctgtggagtgaatagaacttggcacccctaggggccacatagatatggagccaataaggatactactgtatctgcataatcaaaaacagcacggatggatggctgggaagctaaggacagtcaccttaatttnnnnnnnnnnnnnnntcccttccgcaatgtccatccctgagcaagttcttggacgtggaaacttgatagacagaaagcctatgtccccaggaggaagaaccccatgactgcacacagcgaggattcctccatttcttcccagcgttactcagataactgtgtactggggaaggggaaacccagagcattagcatggcccctcctaagggagccaggtgataaatggagttctagcttaggtccagctcacccacagtccatggtcccaccgtcagtggtctccaaatgtataactgtaattgacatacttagtaattgacacaagccctttatcctgtgaggtaagagctatcatagtggggaaatccaagtggaagcctctgaaactcccccttctggc

SEQ ID NO: 154108 - DNA, 461 bp, Homo Sapiens
tttgggatggaggatgagattttatatggaaggattaaaacatatttaaccggagcagggacttacagggacaggcaagtcagtaaagggcccaggttacaaacgagttataaccgatcagaccgacgagcgcccgcgtgcagcgcctcctgccgacgcgcgcctcgcagccttcagtcaatgctgacagctgttctccaacacccagctaggggcgggagggtccgcccacttctaccagattttgcacacaaaacagtggaaagaccattctcatggctccaagccgttttctcccttcatcgcctgcaattttagggcttttcggggggtatgactgcagggattttagaggtttttttcctcattctctttttaagaggtgataaaaagcatttaaattagcggcagggcggttaacacccgcagccctagcctctccgcacttctcgtcgctcgtc

SEQ ID NO: 154109 - DNA, 567 bp, Homo Sapiens
  misc_feature (15)..(15): n is a, c, g, or t
ctcccctccctttcntgcagtgccccctgtacacagtaagatactttcattatagagagtggctgttccatggcctgggaccaaagaaagcatttattgtacgggccagtgctaggcggattggaggcggtcaataaatacttgttgaattgaattgtggagaattcattgtaaccacatcagcaaagcactgttagtatatatgctgaacaaatgtggagaaatcgctgttttacataggaaaccatggtgatttgccccagaatgtgtatccaggtttgtatcttctctgaattaacatataagattcttgtttattatttcaggcagttttcaccattcttaaaatacaaacgaggaagctagctacttagtcttttgctcattctcgatttaaaagcatttaaaatacagatgaatagcatattaaatctaacattttcattctgtgggagtatcaatattctttgaatagctagctgtcttttaaggtagctttttcatattaaaacatttgattgctctttaaaaaaatgagtgtaaagggcaaagggcaatttatttaaa

SEQ ID NO: 154110 - DNA, 181 bp, Homo Sapiens
gttattcacgatttattagggatggcggccgcgtctgtccctccagagagctcgattatccatccggccagcagcgccattaagcgcactgacggtgggaggctcgagttagaaattaggataggaatcttcgcccagttttggagcgcctgcctccccttctgtcgtcttctcgcagccg

SEQ ID NO: 154111 - DNA, 208 bp, Homo Sapiens
ggggaattatgaaataattttatttttctctgcaatttcttccatcctttccaacgatctcttaccagtttttcctgccttcaaaactggcccccatggtgaaaggccgtagagttgtgtcttaacctgggctgagtggtttgtgagaacagattacctggagcccagtgggtcttcctgcaccccttctgtcgtcttctcgcagccg

SEQ ID NO: 154112 - DNA, 185 bp, Homo Sapiens
cctctctcaatctcttttgtttttcaccccaaattcagttttccaataggtgtcatttattctgatgctctgacatcttctgaaagattctcatgcccaagctatacagaccttgcatgcttttaaaacacaatggcaacaggccccttctgtcgtcttctcgcagccgtatagtagtagtaggc

SEQ ID NO: 154113 - DNA, 240 bp, Homo Sapiens
agttgtttggttagttttctaaaacaattgctcatttttattttattttgagccagcgttctctctctgagtggacctagacgtgcattccggggctgtttctatttgcagtctgaagtcaggcctggggcttgtggctgtttttgccatctggtctggggcgaaagggcaaatctgcaaagtctctctgttgtggccagcgagggagtcccatccccttctgtcgtcttctcgcagccg

SEQ ID NO: 154114 - DNA, 162 bp, Homo Sapiens
ggcgtgcgatctgtgtgcattgcgaagcctagtactcttacaacgacaaggtgccgaaagccttcatcatcaacgacttgatgatctgcgcccgctggtcgccgcccaggtccttgaagacctcgtacactgcccgccccttctgtcgtcttctcgcagccg

SEQ ID NO: 154115 - DNA, 183 bp, Homo Sapiens
gcctactactactatacggctgcgagaagacgacagaagggggagcccgaggaggagtcggatggtgacatgggctttggtctctttgactaaatgctgtagtgtctgctcagcccctataacatactctttgtatgtacatagcactgttcatgtacatacgaatgacaccgtatggcaacc

SEQ ID NO: 154116 - DNA, 290 bp, Homo Sapiens
ggctactcattaccattctttaactgttacaatttatatcagcatataatgttaaataattacagggagcggagctcactctagtgaggatataaacgcgctgtgggaatctacagatttaaacaaataacactcacagcagggggtgagcggatgaattagcattaatatcctgcctgggagatcccagtgcactggtactgcttaaatacagatcttttctgtaacagtcaatatgacagctcccggcaatacggcccctttccccttctgtcgtcttctcgcagccg

SEQ ID NO: 154117 - DNA, 144 bp, Homo Sapiens
gtttagaacacactaaggcttggggcatcagtcatcatttactgatccctcctcactaaccttttcctgcctcttgtttacaaacagcaaatggcttcagggtttagggagcagcttttcccttctgtcgtcttctcgcagccg

SEQ ID NO: 154118 - DNA, 244 bp, Homo Sapiens
acatcgatactaccaattcattcagatcttctattttttatttacatagttgttatcttaaggtgatttccaattttatttaccatttacatttttccacaagcattgtccactttattctgtaaccttttcaactaccattttgaaatttgcttttatccatgtggttgtttgtgatgaactacaggttgctgactttcttccccttctgtcgtcttctcgcagccgtatagtagtagtaggc

SEQ ID NO: 154119 - DNA, 166 bp, Homo Sapiens
tatacggctgcgagaagacgacagaagggaaaagagacatgagacttgcgggaggggcagttttctagttcttataaagctcctggacttggggggcaataagggtcatggtgatttttaggccgagatgtgccaagattaggttttcattttaaagatcgtagca

SEQ ID NO: 154120 - DNA, 309 bp, Homo Sapiens
gcctactactatacggctgcgagaagacgacagaagggatagtcatgctcacctgggctgtgccctagccttctactgttgactgcctctggatccctcagatctgattttcttttagggcttcagactgaaccttggaatagaatctaggacaaaaaggcgcctctggagggtgtatggagccattaaatttgtgccaagtggcccttgctaaattgcagccaacaactggtggagcatctcctccattgcttccctatcacaagcagtatgctaaagtgaagctgttgaaccagattctcctcagac

SEQ ID NO: 154121 - DNA, 369 bp, Homo Sapiens
  misc_feature (33)..(33): n is a, c, g, or t
tgctggattacaggtgtgagccatggtacccangcccaagtctttttttaatgcgtagaaacattttaataaaattagcacatttatacatttgtacatcctggttttttcaagcagttttgtttcatgggtgttttccataccattaactcttttcaaatgttaatttttaagtgaccgatatccatcatgttaaggtatcatagcttacttgggttgtctctaatgttttcctattagaagtaagtgtagcgacctgctacctttatgtctgaccctgtcaatcccagccagcatgaccacacctatgtccagctgtgaagtctccatctgactgtccccttctgtcgtcttctcgcagccgtatag

SEQ ID NO: 154122 - DNA, 157 bp, Homo Sapiens
  misc_feature (147)..(147): n is a, c, g, or t
gcttcggtttgcactttgtgtctgaagatttatcctttcatgactgccttttttggcttcatttctgcttttgtaggagcaggtttagatgacaattgcaagaatctcctcttgggctcttccttcacttccccttctgtcgtcttnctcgcagccg

SEQ ID NO: 154123 - DNA, 229 bp, Homo Sapiens
tgagttcccacgcaaaatttactactacgattaacaaaaggggatgtcacaaatcagaacaataaacaagcgtagggcttatacactaaatactacgatagcactgggtcaccgtagacttagatcaaggcggcaatggcaatgccaacaacaccggcgaccacggcaggcacaccgctgaaggtagcagcaccatcattgccacccttctgtcgtcttctcgcagccg

SEQ ID NO: 154124 - DNA, 160 bp, Homo Sapiens
tgcggaagcatttttcatgacagctatatggtgaaaacagcccaaatatccaccagcagccctcccggagcagcacagtctaggattgggagctgtttcccccgaacaggctggaatggcaggctcagctgggcgcccttctgtcgtcttctcgcagccg

SEQ ID NO: 154125 - DNA, 146 bp, Homo Sapiens
gtgtgattatgcgtcttctgctttacaactaaatggaatataacgttcatacaactacccgattgtcactttaacattcctacaacgcacccaaaggatcccaactaccactcattttaaccccttctgtcgtcttctcgcagccg

SEQ ID NO: 154126 - DNA, 116 bp, Homo Sapiens
gcacacacagggcacatgatgctttgatattgaatgtattcaggaagatatctttgctctcttgcagtctgactcatccatctctagaacacccttctgtcgtcttctcgcagccg

SEQ ID NO: 154127 - DNA, 125 bp, Homo Sapiens
tttttttacggggtgtgataggtggcacggagaattttggattctcagggatgggttcgattctcatagtcccccttctgtcgtcttctcgcagccgtatagtagtagtaggcggccagctctag

SEQ ID NO: 154128 - DNA, 123 bp, Homo Sapiens
gagaagacgacagaagggactgggcggagttctcttcagaccgattcctatactctctttgacagcagtttggaattcttctagcacatctatgtaaagttttgtctgtaaacctcttgcaac

SEQ ID NO: 154129 - DNA, 257 bp, Homo Sapiens
gtgagctgctattttttcctgcaatgcactgttctttggtttgggaaatgtgctatatttgtaccgtgctttaaacatacacaatggttctaaataactacttttctttaaagttagatgtaacatcttaattaaaatgtcatccataaatcaggcacagtctgtgaggttgtgcgagcgtgaaagctccacagtctgaggcctggagaccccttctgtcgtcttctcgcagccgtatagtagtagtaggcggccgc

SEQ ID NO: 154130 - DNA, 517 bp, Homo Sapiens
  misc_feature (133)..(133): n is a, c, g, or t
ccacagcccaggccccaggacagccccaaggccaggctcccaggagcaggcgggcaaggactggcagtagggtggaactgggcaccatgaagacaagcaagcaccggccaccccgttctggcctcaggacacnttgcaccctgggggtggtctagggacttaggggaacctcatctcagccgcaggtggagcacccagtccccaaagacaggctgaccgcaccaccccagggggacgccgcagcacagcccagcaccaggtggggcagaggtgaccacggcccctctttgctccgtcatcggctggtcagctgtggtcacggtgcctcagaggacagatctctatgggggcaagtgccagatcctgagagcgcatgagacgctttcccggagccgacgaaggggactcggagctgcagcctgcacgacccctgcagcctgtgctttgcccacccctttcaatagatggaacttgcttgctcttttttattcttctcaggattcattttttatttcgc

SEQ ID NO: 154131 - DNA, 182 bp, Homo Sapiens
gtatctgtgaaacagaatttatttgatgcttaggtttctccctcacccgacgaggaccaaatgctgctgatccgtaagtaacttcgcaaggtaaactgaggggcctggcagcatctggggctcccttaaaggtcgaaatcaagtgcgctcgccccccttctgtcttcttctcgcagccgtat

SEQ ID NO: 154132 - DNA, 147 bp, Homo Sapiens
gcctactactactatacggctttgagaagacgacagaaggggacaagttcccctttcatcctttggtgctgagttttctgtaacccttggttgccagagataaagtgaaaagtgctttaggtgagatgactaaattatgcctccaag

SEQ ID NO: 154133 - DNA, 138 bp, Homo Sapiens
aggattttattttgtaagttaacaaattcagtgtaccttagggatagtttttaatgatttacattagaacaatgactctaattcttttagtacccttctgtcgtcttctcgcagccgtatagtagtagtaggcgccgc

SEQ ID NO: 154134 - DNA, 194 bp, Homo Sapiens
accaggttctaaatggctttattttttccatgactttttcctcctaatattcaatgtccttgcaagactgatggatcctagggtttgaatccacaaagaatcaaaaatgcagtttatggtctgaccaagggactgaagaaagcctgcggttgatcctggtgaccccccttctgtcgtcttctcgcagccgtata

SEQ ID NO: 154135 - DNA, 224 bp, Homo Sapiens
ctgccaggaaaaagtagctgtgcttttgcaaaagagaaaagccattgttttaagagaatacattactttttagaaaaagtttgtacaggtctgtaattttatagtgaacaaaaatttcttacgttcttgcagtttgagaggtactgtgtaccaggcaatgtttttcaaatacttgctcccttctgtcgtcttctcgcagccgtatagtagtagtagggggccgc

SEQ ID NO: 154136 - DNA, 134 bp, Homo Sapiens
ggtcttccttgcagtccagactttttctgtaaatggccagtagtaaatatgttagacttcactagccatatagtctctgttgcaacaacttaacccttctgtcgtcttctcgcagccgtatagtagtagtaggc

SEQ ID NO: 154137 - DNA, 126 bp, Homo Sapiens
cttccccctctttctcctttctttcttgatgagtacaagcctcccgggagcacagctctcatcttccattgtatgccctccttggcccttctgtcgtcttctcgcagccgtatagtagtagtaggc

SEQ ID NO: 154138 - DNA, 969 bp, Homo Sapiens
cgcggcagccattgcacacttctaacccgcggacacacgctcgggacgtgcgtgacgcaccttacgagcaaaatgatatggccagtgaatccgcacccaatcccacgagattccactggctccatgccttcaattcacctgagcatatccagttgcacacatggttttctctcgattgaaaggagattctgctcttacgttaagctacccctaacattcacgggtcttgtcgtatgaataactgctttcattggcactctgatttggtaaaagatgcatctgtagtcctcataacacaaagccttgactttatttcttatagtgtttgggacatccagccacaggcatgaagaggaggagcaaataaacagcaccctgaacccagaagttcttcttggctgcccccttctctattcttcttgtctcgctcttgggcctttcttctctttgccacatttactggcatgaaatgaatttgagatgtgagcttcagttctgagtcagactatatatcaagttgtgccagcaacaataaaggatggtttccacctgacttgttgaaaccattccacctggaattacacccactacgaatgggcaattagcagcaagagcaaaaggtgcgacctcatgagcagggagaaacaaggtggcagaatttcaaaaccaaggtcttccgtattcacttagagttactgtacatggtggtataaaggcctctcagtagaagcactttgtttagttcggctaaaaatcagagtatcttagtgttaatgtatcaactaaatctttatgatttgggtatatgatctttataaattgaattttataaatgctctcctgataaaaaaaattatacagttcattcactaagaataaaatttacaaatgaatatcccctgatttcactttgtaataaatgtactgaacctgaattactcatttagtgtatttccataaatctcacac

SEQ ID NO: 154139 - DNA, 211 bp, Homo Sapiens
ccagccaatgctctttttagtgtcagtatagcccaaatattgttgggatatactcgtactaaacaattactactaacagttttcctgatggtcaaattcaccctaacctcacagtcaaactaagcctcccacgttttcatttgccaaatccggccaccccgggtcccagggagtcctgcgtgcccttctgtcgtcttctcgcagccgtata

SEQ ID NO: 154140 - DNA, 314 bp, Homo Sapiens
aattcttaagaaaagcagtgtgccagggcctgccctcacacttggagtgacccaggaggtgctgcgtgctgcctcactgggtctcactccagccgcgctttgctcctctctgttcttgcacttgcctcagtggcctctgcagcagagcctcatgccagctcttccctcttcttgggatgcccctgttatttttccctgtagtcttggagggccggctccttggtcattattcacatgtcatctctgtgccacctcctagactgctgacttgcccccacagcaacccccttctgtcgtcttctcgcagccgtata

SEQ ID NO: 154141 - DNA, 146 bp, Homo Sapiens
ttgggtgggattcaccacttttcccatccacaggggatccttggtatcttggtcaatcttttataaatcatagggtttgatgacccttgtcctccctgggcatagacatgggtatggcttccaccatggccccaacagattcagtc

SEQ ID NO: 154142 - DNA, 174 bp, Homo Sapiens
tttattcacgggtgggcacaggcggacggctcagtagcagggtcagtccacctccgccatggcgtcagacgcattgacatgggtgggttgacccgccaagcggtcgatggtcttttgtgtcaaggccagaggcagggcctggtggccctccatgcaggagaaggtgtccccctt

SEQ ID NO: 154143 - DNA, 144 bp, Homo Sapiens
aaggggtgtatgacttgggatgggccagagaacgcctcccttgggatcttgcaggtccaggctcccgtgggtggggttatagttgggcccctatgaacattctgtagggccctctgtattaatccacggtgctcccatcagtgg

SEQ ID NO: 154144 - DNA, 176 bp, Homo Sapiens
aagggggacacctttttctgcttgggggggcaggaggccgtgccgctggccttgacacgggaagaccatggaccgtttggcgggtgaacccacccatgtcaatgtgtctgctgacatggtggagggggacggtacctgctactgagccgcccggctgttctcgacccatggataaa

SEQ ID NO: 154145 - DNA, 336 bp, Homo Sapiens
ggcatgacccattgcctccacctgaaacatgctttctgcaaggaattgggatcatatgcaggtagaagggcggctggtatgtgtttgcctgaaggatagaatgacaagacgtgcagaaagataggaatgactaagagctagtcattcttgccagcctctgacagtgtgagatctgcagcagtgtttactagttcattttctgtgaagtcagtccttgataatttgtggtacaaagaaaggaaataacaagtctgacagtaatcttcctacctttgtagagactccatcatcccttctgtcgtcttctcgcagccgtatagtagtagtaggggccgc

SEQ ID NO: 154146 - DNA, 140 bp, Homo Sapiens
cggctgcgagaagacgacagaagggatctaggctgaaaataatcgtgacaaccctaacaaaggttaaaaatcacttttagtaatctgtgtaatgagggaagaaaaatggcagtttaattatcattaaagtgttggtgccc

SEQ ID NO: 154147 - DNA, 260 bp, Homo Sapiens
tttttttactaactcagagatgcttctttgtgaaaatggaattgttagtatagagtaacatctgtcagttcttttagatcttatcatagggaataatagtttgatttttcacaaaaaggatctggaataaaggatttgcagggtgtatgttgagaagaggcagttgatgtatgcaccagctagaaatctgagacttaactatgtggtcttgaatcttttcccatgctattcttcctgctacaagtgacttttttcaagta

SEQ ID NO: 154148 - DNA, 221 bp, Homo Sapiens
gcctactactactatacggctgcgagaagacgacagaagggggagaagactcgcggtgcagcaaaagctgcccgtgacaaccgtgtctgagacgatcacctttcgacggagaccacttgagtagagacatcatgggactctatagatcttcagcagcctgtacaccaactcttggactttgcctgttgtctgagattgcaatattgcatatgccttgccag

SEQ ID NO: 154149 - DNA, 161 bp, Homo Sapiens
tactactactatatggctgcgagaagacgacagaagggtactagacagcaagataaactggagaaagagtaaaaatagaaatgaggaaattaagcaactagagtgacaatccaaataaaaagtgaggagccaaggaactggtaatgttaacatacataggt

SEQ ID NO: 154150 - DNA, 171 bp, Homo Sapiens
gtccacacaggcacttcctgtgatctccaagcctgaggctttatgcttggtgggtggggtctgcctccaccctctgtccagaccaaggaccccctcagcctgcagagcagtgctgcagcttcgggaatgtgctgtgtgagctcctttctgtcgtcttctcgcagccgtata

SEQ ID NO: 154151 - DNA, 217 bp, Homo Sapiens
tccagtgcttcttactattttcctgttagcttttacaagatggcttacctcttacttcaccaagaaagtaggggcaatctggagggaactccctttgctcctgctaggcacccttatcgctcctcaatatttagaaatgttacccataactatccttcttttcctgtctcctgttaaagcttcgctttcatccccttctgtcgtcttctcgcagccg

SEQ ID NO: 154152 - DNA, 390 bp, Homo Sapiens
  misc_feature (71)..(126): n is a, c, g, or t
aatacaaaaataataatacaaaacaataataaaacatgtagcctaccacacgcatagaacacccataggcnnnnnnnnnnnnnnnnnnnnnnnnnnnnnnnnnnnnnnnnnnnnnnnnnnnnnnnngctaccacacgtgaacacctgcacacagacatgcatgccccacgtgtgtgtacacaggcacgcccagcctgcatgcaaatggacacatatgtacacatgtgaacacccccacaaatgtgaacacattcacctgcacacatacatgcacacatgtctgcattcatacatgaatatgcacatgcacactgacatccacatgtgtgcacacatgtacacccttatccccttctgtcgtcttctcgcagccgtatagtagtagtaggc

SEQ ID NO: 154153 - DNA, 115 bp, Homo Sapiens
gcccgagactccatctcaaaaaatatatgtattatcacttgatacaaaattctgggttttagttcttacagcactttaaaatgtctactcccttctgtcgtcttctcgcagccgt

SEQ ID NO: 154154 - DNA, 156 bp, Homo Sapiens
tatacggttgctagaagacgacagaagggaaagaggaggtgatggtcacactctgtagatttgaacagctttcagaaggtgatgggataagaaaattaaccaagtctactctgactcgactgctataactttggagcaagctgcagcacccaagac

SEQ ID NO: 154155 - DNA, 240 bp, Homo Sapiens
tatacggctgcgagaagacgacagaaggggttgagaagacaaaacactgttaacttcattatacctttgacaaagtaatattatgtgacatgatgtgttttcctcaaaatattagagctgcagatttagctgattcaatttatgggacaatttgttatgtgatctaacaatttgacatataatctagaaagcagctttatgatcaaaaattgattttatatatatacatataaatctata

SEQ ID NO: 154156 - DNA, 140 bp, Homo Sapiens
tacatgctcatatactttatctttaatctttacagcccttatctgtaagtgttcttgcatttgctttaaaagatctttataaaaacttgtccccaaattgtgagcacttgcaaatcccttctgtcgtcttctcgcagccg

SEQ ID NO: 154157 - DNA, 144 bp, Homo Sapiens
ttttgttggcttttgtttacctggcgtgtgtggcagccggctcgctccctctctctgcttgctatccctgacctttctttctttttgctccttttcaaaaaaaatattaatttcccccttctgtcgtcttctcgcagccgtata

SEQ ID NO: 154158 - DNA, 306 bp, Homo Sapiens
ctgccatctctggctactcctccacttgtatcaaacttccaaatattagaatatccttgggtataatcctgtctgatcctctcttcctaagtgacttcctcttctcctgtagccttaattattgcaaatatttggaagatcctctaggccttcagcttagacctttctctggaacaccagactcaaacgtactgtaatgacctgtttgacattcatgtgggcgtcacatactgcttatccatccaaacagatttgttctatttcccttgctcagatgctcccccttctgtcgtcttctcgcagccg

SEQ ID NO: 154159 - DNA, 152 bp, Homo Sapiens
cctgcgcacgaaattaaagcctttattaaccttctttgatttgactgttatttctgaaaaggacacattcttgctgatacttgtaacaacctgttcaaagttgtggaaatcaccttctgtcgtcttctcgcagccgtatagtagtagtaggc

SEQ ID NO: 154160 - DNA, 185 bp, Homo Sapiens
ggcttttgcttctacagttctacacagtctatgctgttcttttttggttttgtattttatacataatctgcttactttgtactgtggaagaataggattgagccctctaattccactaaccccctccacacccctttccccttctgtcgtcttctcgcagccgtatagtagtagtaggcgaccaa

SEQ ID NO: 154161 - DNA, 199 bp, Homo Sapiens
ggtttgttggtgaagtttgccagttgaataatgagggttgggcacagtgggtcagggaaatagggatattgactcctgggagttctcaaactgttgtctttaagatttttttagcaccttcatgcctcttttccttatgatttccctaagtctgtgattaagacccgaggcccttctgtcgtcttctcgcagccgtata

SEQ ID NO: 154162 - DNA, 399 bp, Homo Sapiens
ctgggaactaagttgaaggaaaagcaatgtctggcaggagcaagagccctgatgacctcttgtttcccacagttctgctgttgcctgtttgggggagaggaatgtggcactcctctctccaggatggtggccttaaagtgtatgaacagtcattcctagtctccactttggtttcttctgtttgatttggaatttgggttacatcatctttgccaaccccttcttcttccacaccctttgtaaaatgggtcagaagcaggacttcttttcttcttaaactgagcaagtaggggaagtggcatacaaatcgaactattctgttttgtttacctattctctttaaagctgcccttctgtcgtcttcttgcacccgtatagtagtagtagtaggggccgata

SEQ ID NO: 154163 - DNA, 263 bp, Homo Sapiens
gcctactactactatacggctgcgagaagacgacagaagggatgatcattgctatgtacatcaaccatgatatgccagggcagagtgaagaaggatatgtagggataggtgatcagaactggtttctgattcctgattccagtgagcatttcactttgtacccaccaattaagtctttcctaaagaattcaaggactttttcccccagctcaggtattacactttgctattctatgcttactaaaggccaaattccgagattt

SEQ ID NO: 154164 - DNA, 299 bp, Homo Sapiens
gcggccgcctactactactatacggctgcgagaagacgacagaagggagtatagaagaagagggagttacagcaaaacaaaaccgtcaagaaaaagcctcatccacattacttattagctttgttccttagaacttgaaaacatccgctgaggaagacacagggagttggaaatgatggacccccttgtatgaaaacagttactggctctactaaaattcagttttaaatgttgagttgagcaagctatacactacttaaggaagaaaccttagaagtcagaatttaccctggttatac

SEQ ID NO: 154165 - DNA, 313 bp, Homo Sapiens
aatctggagccttctagagaagttttaatgaaaatagtgcagagagaaaacatgcttagcaacatgatcttagagacctgagattgccatttgtacattacgggttttcaggacacagagagaaaaccatgttgtgttgggataactgaaggaactaccctacacccgttcttctccagggcccttctgggagccagttttatggtgaatttattggatgttacttctcagagtgtatcagagattcttcacattcatggactttaatcttccccttctgtcgtcttctcgcagccgtatagtagtagtaggc

SEQ ID NO: 154166 - DNA, 192 bp, Homo Sapiens
gcggccgcctactactactatacggctgcgagaagacgacagaagggaactagcatatgttgttgtgcttggagacatgcccgtggctgcacagatagaaaaacctctggcccatttggataaaaacttgtagaaacctccagctcactcagataaaggaacaagaacgacctagcatagaaatgcctttgt

SEQ ID NO: 154167 - DNA, 129 bp, Homo Sapiens
tccctcatcttttaaaatcatttatgtgttggagtagaaaggttttatttgtgtaagtttattattcgaattgtagaaaccttatgttcccttctgtcgtcttctcgcagccgtatagtagtagtaggc

SEQ ID NO: 154168 - DNA, 225 bp, Homo Sapiens
gacttccattaatcttttaaaaaagtatttattaagctataatactcattaagaaaaagtgtacatatcataatttcacacctagatgagtttttcaaattttaaaacatctgtataactaagatcaagtacagcatcaagaataagaaacagtattatctgtagtccagatgttcccttctgtcgtcttctcgcagccgtatagtagtagtagtaggcggccgc

SEQ ID NO: 154169 - DNA, 200 bp, Homo Sapiens
ggcaccctggaggacagaccaggcttggcagtttatttcggtttcacaacccccttccagcccttggggctcccttgagcagcacatctgggtgccctggccttcaggccggggcagggtcctggggtcccagcgcagctggaggggagttccccttctgtcgtcttctcgcagccgtatagtagtagtaggcggccgct

SEQ ID NO: 154170 - DNA, 149 bp, Homo Sapiens
accaactattgtcacatacatataacgcatatagacatatggacacacagaagatacttcttacctggagttatatactagcaatattttctgctttcactcttgcccttctgtcgtcttctcgcagccgtatagtagtagtagtaggc

SEQ ID NO: 154171 - DNA, 106 bp, Homo Sapiens
gcggccgcctactactactactatacggctgcgagaagacgacagaagggagcaactttgctatttggtccagtaagtggacaccttgtgatataaatgtggaaat

SEQ ID NO: 154172 - DNA, 414 bp, Homo Sapiens
gttaattcaccctattttctgttaactcaggtctctctccgtcatttacatagcatttgagatgactgagtaaagtgtcataaaaatccaccaccattaccttaattttgagtgtagcagtgtttagggtgagaattaaaagatgaattgtgcgtctgcacttagagtagagacaaaagcattccaggcagaaggaactgcctgtgtgagggccctgaggcagcaaagaggttcctccctttatcgttcttctgcctctcggaactcttattagataacactaataaaatgacatctggattgtctggtacattatcagacatttaataaatgctagtttgatccccttccttctctatgccattctttactgtgtagaggtcaacccttctgtcgtcttctcgcagccgtata

SEQ ID NO: 154173 - DNA, 450 bp, Homo Sapiens
gcctccagtcctgcttctttgggttcagccctatgctataaaatctcaccttcctcaggccttttgcagacacatcagatcctctggctttgtatctgttcttggtgctttggacaccacctccaccccaatgcctttgtttttctccaggccctctttcttcatttattcatctgcctctgcatttctgtaactttctgagtagtgggtgctcaggttgttcacgtatcttcatcaagaagtctgtctgggataaagcagaagttgcaatgattgccttctgaatcacccctcagctgaggagcaccagcaggcaaaaccagtccactgagcttgtaagcaggtctgtggcatcagcttattcttgttgctagagagaattcggagtaggtgctacaaggtgcttcccttctgtcgtcttctcgcagccgtatagtagtagtagtaggc

SEQ ID NO: 154174 - DNA, 182 bp, Homo Sapiens
agctgaggaaaatattaagttggtgccttttgttttgctcttgtttttttctccaggaatttttcattggttggctctcctttcttgttctcattgctgtcatctcacacatcctttctaacttttttcttttgcatagcttcttaagttaggcccttctgtcgtcttctcgcaggcgtata

SEQ ID NO: 154175 - DNA, 178 bp, Homo Sapiens
tcaatcccaccttttaaaggcttctcctactgtgcccatttgtagtcttatcttttccccaggaattcctatagcacttaggtttgtatattgagtttgacccttaagtttttattgtcttgtattgtcaacttttccaggattcctcacccttctgtcgtcttctcgcagccgtata

SEQ ID NO: 154176 - DNA, 237 bp, Homo Sapiens
accagttgggcttttggtcttcctctccccatgcaaactggtaaaaggcctcaggatttttgagttgtcctcagccccctcctcttgtttcattttaatacatgttttctaataacccagtttgtctcttcttactttcagaccatcaaactccaaatggtcatgcaaccaaagtcttgaagtctcggacaatgaccccttctgtcgtcttctcgcagccgtatagtagtagtaggc

SEQ ID NO: 154177 - DNA, 660 bp, Homo Sapiens
  misc_feature (650)..(650): n is a, c, g, or t
gaatgtaaacaatgttggtttatttccaatttcatctaatcttcattgtcatctctcaatgaacagtactcataaaatgatgagaaagtttcagaacatgtatgtacatggttcagaaacagctcggctttcaaaaagctgtcagctcaggtagcacgccttggtcttgaattcggtgctacgctgacagctctccttctgaatgcaaaggcaccagtccatgatcaagtccacgccgcagacgaggagagaggagtcttctctccaaagtcatccaaagatagctgaggaaataattctatctcatttctcgattccatttcagcacagcagctgttttccacactgagacacagctggcgagcagtatctcttctgggaactgagatgccatttcaggaagaatttcactttctttagtttgcatgtaacttacgagagtgtctctcaggctccactgagggcggaagcgctcctcggtttgggtttgggggttctttagtttcaagattatcatttcgtgcagctctagcaggaaggcgtctaggccagtctgatttaggaatgtgctgaggagcttagcattttccgggctcagatccgctttgtaccttgaactgatttccccaaatggctcttggtgcaaccgnatcacccgtt

SEQ ID NO: 154178 - DNA, 425 bp, Homo Sapiens
acaagaaatgttagctcttattattgtgttctaggagtttggcacaaacaggagaggaatgaggtggaatttttgaggacaatcaaatcatgttgttgttggttaagccctctctctggtgctagcaggaggtaaggtggaccagatggccctgatgatgctggttctctatggccacatacctttggtggctctgtggtcatcttgatgctgacctgcaagattgagatagggaagtctgggtgggggatggagctgagccagaggcggaaggatggatgaggatcctccacctgcagctgctccaccagcttgtccagattaggcatccaagacagtgacaggtggcagtttgccaggaacacccagtgtccctgagtcacacccttctgtcgtcttctcgcagccgtatagtagtagtaggc

SEQ ID NO: 154179 - DNA, 178 bp, Homo Sapiens
gcctactactactatacggctgcgagaagacgacagaagggtcttttcaatactttgataactatggtcactatcactgtcttcctttggggtcccaggtatcttattcacttttaaagtcgtcttctgagacaggagaaaagagagtaaggacctctgtaagatacggttggtcaat

SEQ ID NO: 154180 - DNA, 109 bp, Homo Sapiens
cttataactgaatacttcctatggattactttattttccttgaattaacaccagaatgtattttatcccccttctgtcgtcttctcgcagccgtatagtagtagtaggc

SEQ ID NO: 154181 - DNA, 292 bp, Homo Sapiens
caaagtctgggatcacaggtgtgagttaccactcgtatgtacttcagttaattcccaaagagcccgtattctcttgcccttttctgccatctcacccacctcctttatcctttgctgtcatccatctctggtgtccgtaagaagctcactggtcccagtggtgggttggttttagatgttgaccaatgacgggtacagaggcttttagagaatgcagaccgacctcctattccattcttctccccttctgtcgtcttctcgcagccgtatagtagtagtagtaggcggccgc

SEQ ID NO: 154182 - DNA, 173 bp, Homo Sapiens
gcctactactactatacggctgcgagaagacgacagaagggaccctcaagattggtatcacaggatcacaccttcatctggcagtaggttgaggtcagtaactcagctcacatgacatttaaaaccacacaacactaccagagagagctacaggttcagatgccaatggtttc

SEQ ID NO: 154183 - DNA, 202 bp, Homo Sapiens
gacgggcagaaatggagttaggtagtttttttcctctcaatttccagctcagaaaatcagttaattgagtattcagagtgatgctcacacttgttgctcatgtgtaaccacagtgggattgtgctaattaagtaaggccttggttggtttttctaattcaccccttctgtcgtcttctcgcagccgtatagtagtcgtaggc

SEQ ID NO: 154184 - DNA, 166 bp, Homo Sapiens
tactactagggatatggttgcgagaagacgacagaaggggcaaaggcgagggttaactttaatgtgaaagcagcaaaatctggcaatcagttgcatatggcaggtaaaggagaaggggggtcatggatgtgttcttctaatgggctagaaattctccgtaggattg

SEQ ID NO: 154185 - DNA, 128 bp, Homo Sapiens
gctttcttggttaaataatattcctccatgtgtctacatgttccaaatctatatgggttcttcaatgctgttctcttccccttctgtcgtcttctcgcagccgtatagtagtagtagtaggcggccgc

SEQ ID NO: 154186 - DNA, 765 bp, Homo Sapiens
ttttttggtccatgaaggctgaatgccagagagtcactgtctagggtataccacatttaacgggcatatctgtggcataattaattgaaaagctgagatgttcctgagagactgccagggtggatgagaccccaagaccagcccagcatttagcagatgctggggactgctgggaccataaccattagatcttagcagccgtgtggcagagggaacatgtcccgggattggggaggctgttttggctgtgactgttcaggtggggcgggacgcagtatcctaggatcctctcggacatcagaccatttacctgcattcctgctgtgtggtacttcctcctctctgtgagagtgctgtgctcctctgggcactcttccttacttcccttctgtctccatctctcgtagctgactttggggcttcctttgaattgtctgcttgcagttactttatatcatcctgtaaggaggagattatcttgggttttccatcttctttccctgctcctcactctttttctctgggctttgtcggtggggagaagggtgcaggggaatccctcagaaaagaagttcagcattttagggctaaaaacaggtcccccagggatgggccttcctgccctaggaggcggtgactacttctctgggtcctaatgtgaggttggggcaggttggtagtagctgtgctcttccttctctagttccaggaagactttagaggaggttgtttgatttcatattctttattacgctggaatggaat

SEQ ID NO: 154187 - DNA, 185 bp, Homo Sapiens
gagaagacgacagaagggggaaaaaagacaggaatgtgtatgaaaaatgccaaacatatttgcatttcagatgaaaaggtctggatttaagtggccataggagaacagggacaaactcttattctctgatctgatacactgatttctgaacctggctgatcagaatcctcctttaaacagctttt

SEQ ID NO: 154188 - DNA, 199 bp, Homo Sapiens
aacagtcactgttcttttcatcctgtcaattagtaggccacttccaggttaggcattcagtaaatctttcagcttatatggagagacagcctccatatgtacaaaactacttgagtattgctaaggtaacattttagagccctgtctttgtaccttaatagcctacaagccccttctgtcgtcttctcgcagccgtata

SEQ ID NO: 154189 - DNA, 142 bp, Homo Sapiens
gtcactatgtcattttattataaataagaaaaataacccatctttccttccacaggcacagggcaccccgcgcttaccagacgcccgaggttgtagtaacagtctgggtatttcccttctgtcgtcttctcacagccgtata

SEQ ID NO: 154190 - DNA, 160 bp, Homo Sapiens
gcctactactactactgctatatggctgcgagaagacgacagaaggggtgggtctccagaggcacagggagtggcctaactggagcactggggtgtgaaaagacactgcatagaggggtatggagaagcccaatttgcctcaagtccaggacttgacttg

SEQ ID NO: 154191 - DNA, 184 bp, Homo Sapiens
ctgcatgataattttaaaatagaaaaggaaaaatacaacttgggaaaactgaaattcctaatgtctagccaaaagaaaaagcaaaataaacaatacatggaggaaaattgtgtgcagctcctatccgcacacgtcttccccttctgtcgtcttctcgcagccgtatagtagtagtagtaggcgg

SEQ ID NO: 154192 - DNA, 147 bp, Homo Sapiens
catctggccttgtattcattttaaaaatccattctgagagttagtcttttaattggtgtgtttacatgactcactttaatataattatggatatgtttggatttaggtcttcccttctgtcgtcttctcgcagccgtatagtagtag

SEQ ID NO: 154193 - DNA, 205 bp, Homo Sapiens
cacagcttgacttttaaccaccacctgaacttccagccccttactctactgagacatcctccacgctaaaatgaagttggctccttactttatgcccttcctttgctcatagctcatgggaagctggtttctccctgcctgccaccacctgccccaagtagttccatcgccagttctttcccttctgtcgtcttctcgcagccgt

SEQ ID NO: 154194 - DNA, 312 bp, Homo Sapiens
tactatacgggtgcgagaagacgacagaagggtaggtacatttggaaacactgcagtaaagggaaagaaagaaacaagaggaaaaacagaaaggatccaacagaaatgaaggagaaacaagatataccaaacccgtgtggtggccccaacatcatctataaaagctactgcacaggagggggctatggaatgttttaagtagaaaatgaagaggtatacccaaaaaagccaaacagagacacagaaaactgtttaaaaagaaaatcagaagatgctaatcaaagcatttcagctgatgaaaccctcaccttc

SEQ ID NO: 154195 - DNA, 222 bp, Homo Sapiens
gtagtgacagggtctgcctatgttgccagactggtctcaagctcctggggctcaagcaaatcctctctccttgccctcccatgctcactcttttaagaccgtagaatcattaatatctcatgggactagatcagggaaactcactgtgggaaatgcttacttaaattctgccctagttatctaatgtacttattaatagtaaatcccttctgtcgtcttctc

SEQ ID NO: 154196 - DNA, 156 bp, Homo Sapiens
gtagctatgggggtctcactttgttgtccaggctgacagaactgcatttttaattctatagaaatataattctttataggacttcctggtcaatacagtaatgtaagtttgagctcttgattcttcatcgccataattcccttctgtcgtcttctc

SEQ ID NO: 154197 - DNA, 264 bp, Homo Sapiens
aaactacaggcagtttttcaggaactccaggcagtgtaaagtcatcttctggaagttcagtgcagtctccccaggatttcctgagctttacagactcagatctgcgtaatgacagttactctcactcccaacagtcatcagcaaccaaagatgtacataaaggagagtctggaagccaggaagggggggtaaatagttttagtaccttaattggcctcccttctgtcgtcttctcgcagccgtatagtagtagtagtcggccgc

SEQ ID NO: 154198 - DNA, 373 bp, Homo Sapiens
gaacctactaactctacattttacatgatgagttcagattttaaaaggattagtttgctaataaagtgtcgtgagcaaagtgaaaaatcaaaagattacttgaagtatttacatgatgatccaaatttaaagcgacctcaacaagcaaaatttactgtttacaaaaaactgtatcacggtttacgaataggaacacatatattatatataatgggtataatgcgaatgcattttatcaatggaaagtacaaaacagcttgctgatgaaagaggaaggaaaaagctcacagtgaacttggaagcagatccttcagccccagtcaacccttctgtcgtcttctcgcagccgcccagtagtagtagtagtaggcgg

SEQ ID NO: 154199 - DNA, 156 bp, Homo Sapiens
gccttcagggctctctctccctttcagcatcaatgtcaacatgtcagggatggtctttattttgcagtttccttctgagacaaactccttgaacgtgtagacttcagtcccccttctgtcgtcttctcgcagccgtatagtagtagtagtaggcgg

SEQ ID NO: 154200 - DNA, 140 bp, Homo Sapiens
atgtttcttaacattccaagttggaattctaagtgaagttttcagtaaatatatggttatggtcaatcaaacttgagtttgattctatagtactataatacaatccagtgtcccttctgtcgtcttctcgcagccgtata

SEQ ID NO: 154201 - DNA, 251 bp, Homo Sapiens
  misc_feature (75)..(141): n is a, c, g, or t
gattagtcaggcatggcatggtggtgcaccagtttccagttactcagaaggctgaggtgactgggttgcttgaannnnnnnnnnnnnnnnnnnnnnnnnnnnnnnnnnnnnnnnnnnnnnnnnnnnnnnnnnnnnnnnnnnaccctgtctcttaaaaatcaaaaagcgaaatgacagcttttgccttttaattgttatgttagatcatttactttcccttctgcttgctcttccccttctgtcgtcttctc

SEQ ID NO: 154202 - DNA, 182 bp, Homo Sapiens
gtcactccactttttaaatagcctaagtagaaagaaaataacataaaccttaggaggttttcccattaccttcaggattaagattagcatcttaagcagtataatgatgttcagggtccatcacgtttaccccagttttaatttccagactcaccttccaaagccccttctgtcgtcttctc

SEQ ID NO: 154203 - DNA, 178 bp, Homo Sapiens
aatgttagtttttttccctttctgttgtccttgctcctgttaggacttcctgcttctaatgtgactcctgctatacttggcaaaaaatttgtcatagtgtacatgaaggttacttgtttaatattcactcctcactctccctctatcccttctgtcgtcttctcgcagccgtatagta

SEQ ID NO: 154204 - DNA, 189 bp, Homo Sapiens
gcctactactactactatacggctgcgagaagacgacagaagggtatctacctcctcaacagcaaattaaaaaccagaagacaacagagaaatgcctacaaaattcctgagaaagtatttaacatagtgctctgtagagtcaaatgatgactgaggaaaagtcgcataaagatattttcttagccaggt

SEQ ID NO: 154205 - DNA, 762 bp, Homo Sapiens
tccggccgatttggactttttaacacaggattgggacaggattcagagggacactgtggcccttctacaatcaggagcttcccctttcctctgatgacatcacctgtggctttgttctctttgttccagatgggccggacacccccatcatttcccccccagactcgtcttacctttcgggagcgaacctcaacctctcctgccactcggcctctaacccatccccgcagtattcttggcgtatcaatgggataccgcagcaacacacacaagttctctttatcgccaaaatcacgccaaataataacgggacctatgcctgttttgtctctaacttggctactggccgcaataattccatagtcaagagcatcacagtctctggtaagtggctccctggagcatcagcatcatattctggggtggagtctatctggttctcaccaaagagccaagaagacattttctttcccagtctgtgttccatgggcacaaggaaatcccaaattctatcctgagccccctcactccatctcggccaactctctcctccccggcttctctgatatctcacggctgacctcgggtccagcctggaatgtggggaggggcctcccttagccccagaaggcccccaatagtgaaagggacttcatagtccagaagaaagaagggtccttaaggtcgagttgctcctctctatcaccaatatgtccccttctgtcgtcttctcgcagccgtatagtagtagtaggcggccgc

SEQ ID NO: 154206 - DNA, 267 bp, Homo Sapiens
cgggcctgtctgttttgtttttctttaccttcccagcttccagtttcccagccagtaccaactatccaaggcgaacctcagatcccagttgcgacacaaccctcggttgttccagtccactctggtgctcatttccttccagtgggacagccgctccctactcccttgctccctcagtaccctgtctctcagattcccatatcaactcctcatgtgtctacggctcagacaggtttctcatcccccccgtcgtcttaacgcagccgt

SEQ ID NO: 154207 - DNA, 204 bp, Homo Sapiens
tactatacggctgcgagaagacgacagaaggggtttttatcaaaaatatgtagattctactacaatattttagctaaagaagaagaagtagtagtagcagtagtagtcagtatttttgaccctgacccaactctgactccattcaaggaacaacaacctgggaagaaaatgcaaagctaatgctgaccttgctttcttcctcac

SEQ ID NO: 154208 - DNA, 295 bp, Homo Sapiens
gaggtaactgcaccacctgtttactgcatcgccccagtgccagggtctgcctgaccagctggctgccctctcctgctatgagagccaacagcacaggctcactggccttgtgccttctgaggcccaagtcccagatgcttggggtcttagttctacttctcccatccccaggtcccgagggaggccctggagcccagtgttccccttatggtgtctttaggtaagcacctagagaagaggcgcagtgggaccacaccctaaccactgtcccaggaaactagtatcccaactgctg

SEQ ID NO: 154209 - DNA, 185 bp, Homo Sapiens
ctgtcacttacccccatcaccactgaattcattagcaagtcctattaacattttctttaaaatatgtctaaagtctgtttcccctgctttctttgccaccagtatagtctaacgtaacatcataccttgcctgagcaatcatagtagtctcccttctgttgtataactcgcccccgtatagtagt

SEQ ID NO: 154210 - DNA, 211 bp, Homo Sapiens
cctgtaaatgccttacttttcatttgtccatgctgtaacatacctgccatttcctcgcatgtaattttttaacactcatatctcagtgggctcttagaggtaatccaaggtaagaaccacctttttagttaggtctgatggttagaaagcttgagttgaagcgtgcccttctgtcgtcttctcgcagccgtatagtagtagtagtaggcgg

SEQ ID NO: 154211 - DNA, 551 bp, Homo Sapiens
  misc_feature (434)..(508): n is a, c, g, or t
tactcttaattttccaactttttacattttatgtttatttaaggagcgggtcttctattggatctgccctttcggttgaaaaatgcattttttacctttttccatgaagctgatttgtcaggcttcaaaatatcttaggtggttttgtatcattttcttacaggtagaatagagccactgggacattaaatgatgtacatttatattttgttttgtttagtcttattgagcgtgtttgcttttttgctctggaaaaattattaataataatttcaaaggtgtcaaaacaataaaagccattctacttctaatttcttagatttcacattaaatgctaagaggggttcagaatagaaaatgataaaggtcaacataaatatcacagcagactaaggaacaagggctacagaaagtcaagaaaccattactctggnnnnnnnnnnnnnnnnnnnnnnnnnnnnnnnnnnnnnnnnnnnnnnnnnnnnnnnnnnnnnnnnnnnnnnnnnnngtgagggatgaggagacgcctaatgccagtataggagcatatt

SEQ ID NO: 154212 - DNA, 488 bp, Homo Sapiens
tagatcatggccatgtattatttcatgacacttttgtttcatttaagtgtatgtgtgtgcgcatgcacgtgcacaccagggtggtggtggtggtcacaagtttgaaagcctttgggatgggaaaacatccctctgggtcggggggagccccgcactgagtctccccgcctggctcacctgaggcgatacgggcattcttcaacaccaaggacacgggctctggtttgggagcaggcactattttgtggggctgcttaggcctgcccccagtcaaggatacaggtttggggtgcacaaaagttaaccgtggctggggaggccgggtgacaggagacagtgccagcccacaaggggccgctgacggggcagggtgatgggtggtgatcacaaggccctgactctggctaaaggtggtggcgggggcatcgtgggtgagggtggcagaggccgtgtgggtgatgacagacgcgcgtatctgctcgcgagcc

SEQ ID NO: 154213 - DNA, 441 bp, Homo Sapiens
cgaagaggaatttgtttttatggaagcagcagtcacatgaccttatatctagcctttagattaggcctgacagagtgagcgagccctaaaaaaatgatgtttctttttgcactaagagacataagatgtttacatacatcatccagtattggaaatgagcagactcaaacacaacatgtgttggttacctgggaggtacagccccactgttcgtggtgtccatatattttacagagaccccccaaggaccattactaataggatgaaagttaaaagaaaatacagccacaccaaatcatgaacacgagtaatcaaagacagcagcttatacacatttaaaaactgtccctttcagagttgttttctttcttttctaagcagtgtctgcaaagcttcctctacatcaaatccaaaggtttccaaggtggaagctgcacctct

SEQ ID NO: 154214 - DNA, 300 bp, Homo Sapiens
gggcatatttgcataaaaattcaagttgactattctagatttgtgcttcttactttatagaagttatgccctcagtaaacattttgaaaacataaagaccaggcagaggcagggaagtaggcaggtgtgcggcctgtattggtagcagagtcctccctgagggctggatcattaagggaggtagtgggcccagggaggaggcacgggaggttaatttagaaaggtggcccaggctgggtcatggtgggcctcagaggccccactaaagaatcagacttggccaggtgtggtggctcacac

SEQ ID NO: 154215 - DNA, 300 bp, Homo Sapiens
tttttgtgaaaaccaaccaggaacatttattaaaaaactaagcaagttatccccaagagggtgaagcaccgctggctggttttgacattcgattcaggctgaaggcacggcaactcctccagcccttgctgggaaatgtcctacccaggccacgggcagtgccccagtgcagctgggtcccctaaaagcccccaaacacatgatcccaccaaaggcttgaacagagcaacttcatcaagcaggcagggaccacacctgagacacaagggcaaggaggtaaagcacaggggaccgggagtg

SEQ ID NO: 154216 - DNA, 555 bp, Homo Sapiens
ggctgcgggctcttgttggccgcacgtggcagtgcagctgaggaggaagcctggggcacgtcctgtgcgttgccaccaaggccccacccctgccccttttccttccaggttctgttactcacagaagtgtttctggtgggctctgcgggagaagacactaagggccccacaggcttgtttcatggtgttgcaagccaagctggcccctgcctgttcctgtagctctggggccaggtcagccgtggccccacctaccagaactgtgctctgctggcagctgtgcttttgccaaacccagggcctcagcgaccatgacttctgctaaaaagcaatcatgagtgcgtggctggggacagacctctctgaagtgtctcctgttgtgaggggctcactttggagccactgaagagccgactgtgccacccacttgcgagcctcagtcccttccaagctgcactggtcattgggaattgtgtaaacacctctggggataagctgaggtgactaaatgatatatttatattgtaagattaaactgactttcttggccttaaa

SEQ ID NO: 154217 - DNA, 411 bp, Homo Sapiens
  misc_feature (330)..(353): n is a, c, g, or t
  misc_feature (361)..(361): n is a, c, g, or t
agtatcgttaatataaagcagttgcacaaaaagcaaaggtgttttgacaaacaggtgtatgcatttattcctttttaggaacaatatctaaaaaaagaaccgccctctgccctcccccaaaaaagacaaagattcacacagacacatcgggatatatgtacaacgtaataaaccccatcctaaagaagcaactgggataacccccaggggatacagaatcagaattgtaaaaatcatagtgaagtttgcttgctgtaaagcctgagaattttttttccagttggttcttctgcaaggctgtgatacctgcaaagatatgtaaaatctaannnnnnnnnnnnnnnnnnnnnnnngctacagnctttagactaagcatgcaagacatacgactaagtgcaactgagtgaaatg

SEQ ID NO: 154218 - DNA, 344 bp, Homo Sapiens
ggggggggaatcacattaacacattacagaaatcaaaattaacttaccccacaaaataaattaaaacattaaatattaaccttttcagtgcaacatatacagacatcagagtaaggggttctaaaaaggttaatatttaatgttttaatttattttgtgtggtaagttaattttgatttctgtaatgtgttaatgtgattagcagttattttccttaatatctgaattatacttaaagagtagtgagcaatataagacgcaattgtgtttttcagtaatgtgcattgttattgagttgtactgtaccttatttggaaggatgaaggaatgaatctttttttcct

SEQ ID NO: 154219 - DNA, 449 bp, Homo Sapiens
cctttggatgtcttctcctctttttcttctttctctcaccaccctcctcatcttcaccttcttgttcactgccactaccctttcttctcttcttctttttggatataggtaggtcatcatcagtgtcatcattgacaaattcatcaaactctcctcccttcttagaacgccgtccaccaccaccacctcttttcttctcttttgttgcttcagtctcaccagtaaacataagaatatttttggtcttctccacatactgggcccgctgttccaaaagtttcttttgctcttccttttctctgagacgtttctcttcctgttctttaagaagtttctgccttaacagctccttttcttgctcttgcttggcccgcagctcccgctcttcttcatcttgtttgcgtgcccgggccacatggtactgggcctggctcagtaagtcagaacac

SEQ ID NO: 154220 - DNA, 399 bp, Homo Sapiens
agccttcaaaaacggatttacttgaaactgtgaggagaaacaagtgcacgggtgcaggtggcggctgccaggattgctccggtcctacctagtgggtgcctacccaggcagggcacagctcctgctgcaaggtcaccttaccagggggtgcagaggtgctcatgatcagatggcacagcgctttcctaatgcaggcaggctacatggcccccagaaacaaccaaatgcagaatcaggccaaaacccacacagccctgaccccctcgtgctctggctggtctcccggtcagcagcccctgagggccggcaggcaggccactgagctgtgggtgacacagggtagtccacggtttgcacagtctcattcccattcaaagacaggccccaaggctggggcgc

SEQ ID NO: 154221 - DNA, 315 bp, Homo Sapiens
agtaagctgtctttcagaaaatttttgaaggataaaaacatgaaggaaaaaagtggcccgtgtaggtaggattccctacacaggacttttagttgtatcacctcaagagattttgaagtttgtgatcaaggtctgtatattatcccaaactttattaagaattgttttctaattggttataacatttttcaattaatagtttcaaaacaaattgttaatacaactgtataaaatgaacataattttcctcacttgtatttttgttattgagcaagtttatcaaaataaattgtctactaaagaaactaaaaaaaa

SEQ ID NO: 154222 - DNA, 838 bp, Homo Sapiens
  misc_feature (453)..(461): n is a, c, g, or t
  misc_feature (718)..(782): n is a, c, g, or t
tttgagttaaagaggcttttaataattatgccagcaaaacaggtatagaataggactccccaagtaaaccagaatgaatggctctcaaactgtggtacttccctggatattaatagaccgaataatcatgatatataataactaaaatgttccacagaggaattggccttaattacaaagttagaaaccacagatggtgttaatacaagttcttttctctctccacccatatccttggtgtgaaacatcaaatagcccttttataattacaaagcacagcagtaattaatattgatctcagaactcagtaaaggtcaacattaatttatagaaaattttggattcaatctagtttttactctggaattgatgcagtgggcagtgtttcaccagccccaacaccatcaccatgatgacgacaggcacaaacttggaaaaattgtctgaaaaagnnnnnnnnnctaaagatatagcacacttctgtatggatcttgaatccctagtgaaatggtgccttcattatgaaaagaaacatcttttcattgggtttctaagctgaaggagtttggtttttcttttccactttaacaaatattaattagggtctacagtatgctacactctgccctaagtgacagataaagcagtggacaaacagaccaaatgattgtcaactcaattaaaaatactgtttagtcatctgtcatctttgagactnnnnnnnnnnnnnnnnnnnnnnnnnnnnnnnnnnnnnnnnnnnnnnnnnnnnnnnnnnnnnnnnncgtcacataaaaacctatacacaaatattcatggtagaattactcataatagctag

SEQ ID NO: 154223 - DNA, 652 bp, Homo Sapiens
  misc_feature (107)..(188): n is a, c, g, or t
  misc_feature (368)..(368): n is a, c, g, or t
  misc_feature (629)..(629): n is a, c, g, or t
aacttcaaaatacttgggaaagagagggaaggaagaaagaacaagatcagccatgggtcagtaactatagtagatggtaatgaagactggggttctattttttttgnnnnnnnnnnnnnnnnnnnnnnnnnnnnnnnnnnnnnnnnnnnnnnnnnnnnnnnnnnnnnnnnnnnnnnnnnnnnnnnnnnctcagcgtcgtggatacgcacccatgaacaggatccaccacgatggcccttggcttggagccgttctccctgaataacgttttcctcttcacgcccttggtatccgcaacagagacagtgcccaggacagagtcggtccagtagatgttgctgtggatccagtccacagccagcccgtcnggggcctggatgtccctgctgatgacggtgtcataggaagagacgccgtgggctctgtcaagctgggtgctgcagatcattctctgggacaggtcagaccagtagattctattgcttggcccctccgtgttcagagcgaccacgttccttaggtttgggatgaagcttgtgtacccgctccgggtccgcgtcattcttcttgacctcgtgccgtttggtgaagaaaaagtaggcgatggacccacagcctgccagccttcngtgtggggtccagatgggaaccc

SEQ ID NO: 154224 - DNA, 452 bp, Homo Sapiens
  misc_feature (69)..(208): n is a, c, g, or t
ttttcacatctatggaacactttattttaaattcttttaataatattattatttttcagctgagtctgnnnnnnnnnnnnnnnnnnnnnnnnnnnnnnnnnnnnnnnnnnnnnnnnnnnnnnnnnnnnnnnnnnnnnnnnnnnnnnnnnnnnnnnnnnnnnnnnnnnnnnnnnnnnnnnnnnnnnnnnnnnnnnnnnnnnnnnnnnnntatagggcactttagatggaaacaaatgactggatctttaactcctacctttctctcctctcttcctgtaatgttgttactgaaggcaggaagggagactccttggctaaagagcagagcaagagcctcaaagtggtctttgtgagccaccctggactactggttcagtagagggttgagtcaagcaatatttgaggacgggatataaacagtatttcttaaagttgtcaccaatttttccccc

SEQ ID NO: 154225 - DNA, 137 bp, Homo Sapiens
ttcaatctgtttattgtatgagcaacccaaacttcagtttaagtgctgttgaaattttattactagattccataaccctacaattgataaatcttataccattttaggtatttaatgagatacttagaaatactaag

SEQ ID NO: 154226 - DNA, 501 bp, Homo Sapiens
ttttcttcgcacactaataccacaaggggttcttaatagtcaaagaaacgaacatattcttaaaaacatttttaagaaaaaaatagcagtgttcctaatttctctcaattttgccaagaaaatatgagataaaaccaaaaacgctattttcttgcttcaggcacacataaaattgctttcattgataatccaaaaagcatttattttacatcacttaataaaagcatattaaaatcttctgctctgccatcctagactataaagaggtcctgcaagtgactaaatcctgggcggaggtgattaacgcacccagcaacatatttcatttccaattttccactttcaaatatcttctgtcagtatatacatttcttagatacttggcagcattttatgtcaaaaggtttccaaaaacttaaaaataaaacaagagacagttaaatgccaaatgccttttcttaaaaaaaccctccagacagtacttgacatgacttcagcatt

SEQ ID NO: 154227 - DNA, 468 bp, Homo Sapiens
cacccaggcccgcaccgctgggagtctgaggcctgagtgagtgtttggccgaggcctgcatgtccggttgaaggctgagtgtccggctgaggcctgagcgagtgtccagccaagggctgagtgtccagcacacctgccgtcttcacttccccacaggctggcgctcggctccaccccagggccagcttttcctcaccaggagcccggcttccactccccacataggaatagtccatccccagattcgccattgttcacccctcgccctgccctcctttgccttccacccccaccatccaggtggagaccctgagaaggaccctgggagctctgggaatttggagtgaccaaaggtgtgccctgtacacaggcgaggaccctgcacctggatgggggtccctgtgggtcaaattggggggaggtgctgtgggagtaaaatactgaatatatgagtttttcagttttgaa

SEQ ID NO: 154228 - DNA, 459 bp, Homo Sapiens
caaactgaacttctttattaagtgccaagggtccaggcgggcgctgccccctgcggccccctccgccgaggcctgtgcgtggcggggttcccaggagcggcagtccgtgcggcctgggggcggccccctccccgcatcgcagcggggcgtgcaaagcgtctgcggctgtagtgtgggcgctcacttcacgtgctcggcggcgtgcgaggagcagtaatacttcttgtgggcgatgaaggtggacaggctgctgaacttgatgttgcaaagacggcagtaccggtggtttccgttgggcagcggcgccggcgtgcccttgctgggagtctggacgcccttgtccgagtaggaggggggcgccggcgggggcagcacggactcaggcgcggcggcctgggacggagtgtggccgaccggcggttcctggggctcctggccgaggccttccggaggccacgg

SEQ ID NO: 154229 - DNA, 705 bp, Homo Sapiens
  misc_feature (49)..(49): n is a, c, g, or t
  misc_feature (646)..(646): n is a, c, g, or t
cagaagaaatatcctggttttccagcatgttaccccacatgttctggcnatggataaagtgaagaggcctactcaccattatccctgcagcgtgacaccttttgattgtcactgaccactcagaaggggccacggcctcctggctgtgttcctgagcccccgtcgtgcctctcccagacagcagctgtctggcccttgctgggtgagggcacaccactgccaggggtcagcctcgcacccaggccaggcagaagctgtgctctgaagctaggacagctggctgagaagtgggttcaggcgaagggtgaagccatgtgtagcagttcctgccagtgcagatctggagaggagctggcccggaaggcgtggttgtgaaagcgcccttcttatgttaggaggccttggcaaaattggatttcttcaaaaatacatgtaaaggtctgttgttgaattgtactctgcccctggaagcagatacagatggctgcctgctgctcggctttgcttttgcttttcccaccgtgttttcatctttgttcacttgaggctttccccagctggtgtgtgcaggacagttcatggtaatgttgccctctgaggccccgtacaccagaagggaggccctggaaaattttgtgcttccaancgtggccttcaattcttgcttttttgcccctcggaagcatggggcttttgagcacactt

SEQ ID NO: 154230 - DNA, 540 bp, Homo Sapiens
atataaatgaatgatgttttaatctgtactttatgggaagttgcctatttgtcagtagatgtggttaagtgagtcctctggtgcagtgacatccttttaagccatctcatagggatttaaagaaggccaataggaatatagatattggtttttctttctctgacttgaactaagtaggagaaaccaaaccataaacctattacaaactacccaggcagaggcatttacttaattcatcaactagtgcaattaaaaccctgaaaacacatgatccttgttgactctgcttggttgaagcaggaaagaatggtcttgatggtcagaaagttttaaaattaatgggcagggcctttctggaccctgttttccaaacacgttagatattccgtcttgaggggattggagtaggctacagtgagggggtaatttttggatgtatctggacttttaaaaaatgtgcctatatttatagcaccatgaatattatgtaaaatttatatatgaattaaataaatattcacctctgatttccaaaaaaaa

SEQ ID NO: 154231 - DNA, 449 bp, Homo Sapiens
tttgtgtcataaaatattttattggaaaaaaagtcaccgtcttcgcaagagggggtaggggccccagcgacatcggggacccggcctccaggccgagccgacgggttgccccggggcaatctcaggccgttgtggcctgagcccaaccgctgggtccccgacgtccagaagcgggtgtgtgcctggaggctccccggccgggagggcaggctccagacggggtgggggtgcaggcgaggagcggggcgtgaatgcgcgtggagcgctctgcgccacggagctcagggtagagactgtagcttccgccgggctggatgcgagtctcccaggttagagcccagaagcgcgctgggacctgggtctggcttttgggtctgtgtccttcctcgtttggccccaattgtccgcattcaagatcataataaaaaggtttaggaagtaaacttctt

SEQ ID NO: 154232 - DNA, 482 bp, Homo Sapiens
tcagttttaaaaatggcttttatttatataagtcattgcccattcctaatacagtgatttcctgaaaattacagtattttgtaaacataagatttacagtttaaccatacccaaagcctatttttttatttcttgacagaataaattacttttcttcaaaaaattagtcaagtgcaattttgcccaatatttaatgcatactagaattaaagcctatgaaactaagtggtaacagatgcaattatcaaacctttcatttgaacacattcactttcaaatttaacttcttatttcgccccatttaacaacattactttctttgaaaattacccaattaagcagttaacagttttccataatatggtacaggccactggcattaactaggcagttgccaagatgtcaggatgcctgcaatctaacgagatcgagaaatctacagatggcccacagcaaaccctgcaaacttccagggtgacctg

SEQ ID NO: 154233 - DNA, 466 bp, Homo Sapiens
aagcgcaggccccgaggacccgccgcactgacagtatgagccgcacagcctacacggtgggagccctgcttctcctcttggggaccctgctgccggctgctgaagggaaaaagaaagggtcccaaggtgccatccccccgccagacaaggcccagcacaatgactcagagcagactcagtcgccccagcagcctggctccaggaaaccgggggcggggcccaagggcggggcactgccatgcccggggaggaggtgctggagtccagccaagaggccctgcatgtgacggagcgcaaatacctgaagcgagactggtgcaaaacccagccgcttaagcagaccatccacgaggaaggctgcaacagtcgcaccatcatcaaccgcttctgttacggccagtgcaactctttctacatccccaggcacatccggaaggaggaaggttcctttcagtcctgctccttc

SEQ ID NO: 154234 - DNA, 355 bp, Homo Sapiens
aaaatcacacagccagggcttttaattcaaaacgaaaaatatgtcatccaggctagactgctcacattcatctgacagcaacttctctccctgcagatgagggaaggctgtgatgactttatctcgagcctgcctggtgggaacgggcttggcacaaaaggagctgcagaatcctgctgctgattggcagatgcatttctgaactcagcggggggctggacactgagcaggaccttgttgataatactgcctaagtgggcacaaagccaggggctgtggcctgccagcatgcaggcacagctcctccaccctcaggggagtctgagaccccttttgtgtttcgatgactgtggga

SEQ ID NO: 154235 - DNA, 614 bp, Homo Sapiens
  misc_feature (384)..(432): n is a, c, g, or t
ctgattcctccgtgttgtgatgtgatgctggccacgtttccaaacggcagctccactgggtcccctttggttgtaggacaggaaatgaaacattaggagctctgcttggaaaacagttcactacttagggatttttgtttcctaaaacttttattttgaggagcagtagttttctatgttttaatgacagaacttggctaatggaattcacagaggtgttgcagcgtatcactgttatgatcctgtgtttagattatccactcatgcttctcctattgtactgcaggtgtaccttaaaactgttcccagtgtacttgaacagttgcatttataaggggggaaatgtggtttaatggtgcctgatatctcaaagtcttttgtacnnnnnnnnnnnnnnnnnnnnnnnnnnnnnnnnnnnnnnnnnnnnnnnnnctcattgcagccagtgatttagatttacagtttactctggggttatttctctgtctagagcattgttgtccttcactgcagtccagttgggattattccaaaagttttttgagtcttgagcttgggctgtggccctgctgtgatcataccttgagcacgacgaagcaaccttgtttctgagg

SEQ ID NO: 154236 - DNA, 1096 bp, Homo Sapiens
  misc_feature (61)..(61): n is a, c, g, or t
  misc_feature (121)..(121): n is a, c, g, or t
tgtgaggcttccctcagcttctttccccttttcatttcccaagacccaagcctccgcttcntgggccttaaaagtaccagatttgttctttggagactctaaaaccttcatctctgcttcntgggccccccaagccccagatttgccctctgacatcccccaaaccccagcctctgcttcctggactctcagaacttgagtctctgacccttgtactcctgaaatctctgcttttgcttcctgggatcctaaaactcttggctgagtgactggggcccttaaagcctcatatttgagagcactcccaactctagtctctgcttcctggacccccgaagtctgagcctcttccttctcagcctctggaactataatttctgtcttacgggtcatcagtactcgggcctctgccattccagcctcgggccctgagatccctgaacccccgacctctgtctcctgggccccagctacctcagattctagccctgggacccctgaactcctagatgctatctcttgggtccccaatatctcagtttctgctgtcccagtcgctatctctggaacctctgaacccccaacctctttcacctggatccctgttgtatcagcttctaaccctgggacccctgaatccctagatgctatctcttgggtccccaatatcgcaccttctgctgccccagtctctattcccagaacccccaaaagtcccacctctatctcctgggctaccaatatgtcagactctgctatctctgcttctatctctctgacccctgaatccctagctgttatctcctgggtccctaatattttagcttctgtcccctcagcctctgactctggtaccctagaagcttccacctctgtctcctgggtccccagcatcctcagactgtattgtatcttctatcttcagtggccctgaatccccagatatctcctgggtcaccagtacctcagtctctgctatcgtagttcttgtctgcaaactcctgaacccccagcttctgttttctggtccccaatacctcatctctgtcctgggtctctatacccccacatatgtttccgggtctccagtccctca

SEQ ID NO: 154237 - DNA, 879 bp, Homo Sapiens
  misc_feature (11)..(11): n is a, c, g, or t
gccccgtggtncatcacatgggcacaccttgactttgatgatggacgtgttggacaggggagggttcccagagtctgtgacgatgatggggacgtcatacatcccggcctccaggtacaggatgcgcaagctgagttgggcatagtcaccgttcaggcgggtgatggtccagttcttccgcacggccgccgggacaaagggcagctcgaagacgtaggggccgatgttggggtcgacgtcagcgtcggccgccgtgatgttgatggcgttcaggttgggcttctcgcagatctgcgcctccttgggcagcagctcaggggcgttgtcgttgatgtcaatgagatagatctggagggtcccggtgccgctggccgggggtatcccattgtcagctgccaggaaggtggcctcgtagacgttgtttttggtgtagagggactcacggtccagcactgccgccgtggtgatctggccgttggtggcattgatgtgcagccagctcgctgggtctgacagctttgagtatctcacagcctgctgcatgaaccggtcagggtccacagctgaaaacgtggtcagcacggtgccggggggcacgccctcctccaggcggatcagcttgtggtttgaggggaagtagggagcctcgttgatgtccatgatggagatggtcacccctgccgtggactggaaggacatctggattccgctggccaggggcgcctggttggacaccatcactgtcagcatgaaagctctgttgagctcgtagtcgactgccttcaccacggtgaccatgccctcgttggttacgggatctgtgcggacgctgaagtgcccggatggatccccactgatgatgcggtaaacggcattcca

SEQ ID NO: 154238 - DNA, 429 bp, Homo Sapiens
tgtctgttgcacatgttgattttccttgttatgcaagcgcttgctttcagtttcaagttctacaatcctagggctcacaatcggtgacccaatacatgacagcctttcatagtctttaatgcagtctttacaggaaccttccaaatatgcaggggtgtaggaaactagtcttccaatgtcatcaggttttaccagtttaagtccggaatgaacatggttacaattaaaatcacacttcattttgacagaaagggtagaactttcttctttacaactatccgagggtcgagggcgcccggcggctgtcactgcgctggggctggcgctgcaggagcagcggggtggccgtagggcgcagctgcaggggcgccggctcatgccagccgacgtggagtctgcctcaggtggaggaaccgctccgggggcagc

SEQ ID NO: 154239 - DNA, 694 bp, Homo Sapiens
taaattcgcggccgcgtcgacattgtggtgctgtgctgcagttactgtgctgatttaagtgagatcagggtgcgctgctgtgcccggaggacaaggcgtctcatgctgcgggcggtgcgaatcatcgctgaggagaccactgccatgttgtattcctgcaggacggagcggcggcggcagcagtttattcgcgcgctgctgcagcaccaccgccctatcctgatgcacgattatgactctacccccatgtaggcgtggacttccccttcgccgcccgttgagcaaccgcaagttggacagcagcctgtggctcagcagctggacagcgacatgaacttaagcgagctgcccggggagtttattaatatcactgatgagcgtttggctcgacaggaaaccgtgtggaatataacacctaagaatatgtctgttacccatgatatgatgctttttaaggccagccggggagaagggactgtgtactctgtgtgttgggagggaggtggcaggttgaatactagggttctgtgagtttgattaaggtacggtgatcaatataagctatgtggtggtggggctatactactgaatgaaaaatgacttgaaattttctgcaattgaaaaataaacacgttgaaacataacatgcaacaggttcacgattctttattcctgggcaatgtaggagaaggtg

SEQ ID NO: 154240 - DNA, 348 bp, Homo Sapiens
cttttcgaccttagaagttgttaccttggtagactatataccaaaccagtcctgctattgcagaaacacttttttagaaccacacttttggaattaattgcttttaaaccttagtatgtagtattatgttaaatattttcaatgctgactaatttttttcttcgaggttggagtttaattttttaaatactacaaagtctcttgctgctaaggctggtaagtaagggaagtaattgatgtgaaatttataattttggcctcccaaataaagtgagattctatagcagcaattgttaatgtaaagagttctggaattggcttaagaggatcagtaaatacgcggagttg

SEQ ID NO: 154241 - DNA, 173 bp, Homo Sapiens
acctccccttttatcccccaagtagagaaaactgagagttggaggtaaatcatgcatctgatcaccctaacaggtcacaatgcagaggacaagggtgggaagcctattattactggtggcattacagtgtcaccctggcaccagtaataattatgatattataatgtcgacgc

SEQ ID NO: 154242 - DNA, 384 bp, Homo Sapiens
gtcgaccccgccatcactgatcaccagcgtcaaggttttaccacgtagatccggtgcgctgtccccccaaccatcgctgaccggtacccgcgctaacatgcgcacaccgtcgcgactcacctttggcttgccgaggtcagcatcttccagggtgtcgaagaacagttcaggctgctgccaaccagcgtcacgctcagtgctgatttgcagttcgccactctggtagccggccttaatactgtccactaacccatcagcaatcggtacctgccccatcgcttgggcaaaatcatgggtaaattgcgcgtcagacggcgtgccaagatccaggctgaatggatagtcggtcaagatacagacgttgctgcaagttgacgtcgacgc

SEQ ID NO: 154243 - DNA, 423 bp, Homo Sapiens
taaattcgcggccgcgtcgactctgttttagcacatttaaataactgtagcgcatattaaagcatcttggcctataataaaggggcaagaataaaaaatatcactaggacaagatgtgttaaaaatgtttctacaaattgatacagcagctaatacaccactttatttgcaagtttatcaacgttttcatgaaggaataaataatgggcagctacaggctttccagcgtattccttcaatacgagctcttgcgagtgaattaaatgtggctcgaggaacgatagaactcgcatatcagttgctgattagtgaaggattgctggtggctaaaggtgctaagggaacctttattgctcagtcggtgaaaaatatacaagaccaccagactaataaatatcatgttgcagatgctgccgtatcaga

SEQ ID NO: 154244 - DNA, 407 bp, Homo Sapiens
aagcagagtctcgctctgtcactacattttgttttctataaaatgggaataatagtgcctacttagtggaattacttgagaaatgagataatgcatcaacaaatcacaaatctaactttgtaccttctgaacaaattacacacacattgttcttttgtcttggctcttgccaccaagtcctcttcctttccctcagcactttaaagatgagatgaaaggaatagagaggaaattagtataaattacaattaagttcaacacactcaagatactaagatactaagagtacaccagagaacataactcactttcaaacttacaatgcaaatagcttttaaaaatacacaaagtacaggcattgaaagcatgaataaaatttaggtctggcataaaaaattttacacagc

SEQ ID NO: 154245 - DNA, 377 bp, Homo Sapiens
gcgtcgacgtgggagcctcttgttttagtttctgtctgtaggcagggatcaacaaaatggagtcgtggtcagcttttccgaaaggggggcggggcagggccttatatgcgtcgcggaagttagagtaacaatgatccaaggtttttccacccctggttgcgcaatcgatatgctgataaaatttagggagtcttgttttcagattagccttgttaaaatccccagcttcaatgaatgcagcctccggaataaatggattccagtttgcaaagagtcaaataaagttcgttcatcgatgtgtcttcttgggagggggggttatataccgctgtgattataatcgaagagaattctcttggtagataatgcggtttaca

SEQ ID NO: 154246 - DNA, 401 bp, Homo Sapiens
actctatttttagtttgtcaataaacaggaagattagcttaatgttttccatatgcctgaaatttaattagagcagttacaaactcttgctcgtagtggctattttgttatcatgtgattgtacattggctaataggatcgatggtaaggcagattacccacttgccatcagatacttacagggcacccagacctacgtcccagatatctctgtctctttctcctgcgaatgacggagatgagggccttgtcgggggtctggagtaaatcctttgtgtccgacagtatggggtgagtaatcgctgtcctggtatcttgaagctcttttcgatcataagagacgatggcagaaacattatgtacaaaataagttacaaatgatgtgaaagaacacacaatag

SEQ ID NO: 154247 - DNA, 272 bp, Homo Sapiens
gcttctgcttgtttagcgtttgagttaagttttatttggatccaaggcatgtttgttcattctcttgtttagtatgctcgtcatacttcgagttatagtgttgttggctgctctcggctacttgggttatacactggtgtatgttccgttggattagcttcttcgccgcctaaccacaatttgaattatttagagcattaaattttgtttagtatatttgtcatacatcgatttgtgactttggtcatataccgatcttttcaggtcgacgc

SEQ ID NO: 154248 - DNA, 523 bp, Homo Sapiens
gtaccttaacaatgctacaagtgaatttaattctttttttaaacttatatacaggtcaataagtataacatctagcatacaaccacaaatacttggtggaaatgactttggatactttggataattactttggaactgggtaggttttatttcttctgtagggttgggagggtacttttaagtcactacttcatgaaaattctgggccttggggcttagctgggcgtttagtcatataactagattcactgaatttgctattactgattgtctgaacttcaaagttgtggacaagccaacaagaggtaatcatacttatcaaagagtagaaaactactttctctcactacttcattgttagctcttttgcttcaatctgcagtcaagtactcaagtttgttatgaaagactccccagctcccagaaaaaagttggtgacactgtctaagctttaaatatttgagacaactggtcaggataataggtcgacgcggccgcgaatttagtagtagtaggcggccgc

SEQ ID NO: 154249 - DNA, 264 bp, Homo Sapiens
cctgagtaactcattagagagtagctgtgagtgttccctttctctcagtctgtgaggagggaacacacattacccagcctgctggaccatttgacatgttcctgttcacattccccttggcaaactagcctgtgttcttctcaaatgccccgcggcatgctagcatttcattccaattgatcgcatgtatttgtgattacattcgaatgagttaagttaacccaagctgacaatcaaaggctgctgtcaaatgtgtgtagacgc

SEQ ID NO: 154250 - DNA, 192 bp, Homo Sapiens
atccccgccaagacctttaccgtcttctctttctctatttatgttacccttattttaccaggtaagttaactgagaactcattctcatttactgcagcgacctgtggaacagttacaggggagatgaatgagacaattgtaaactggggataattaagggtcgacgcggccgcgaatttagtagtagtaggc

SEQ ID NO: 154251 - DNA, 551 bp, Homo Sapiens
gggtggggagtaggaatagggagagacacgaatgaaaaatatttaagaggcacatctgtaagggtgactaagccagggtagtgacagagaagaaaggtgaccctgaggtttccagcttacattcttgagtggtcaagatgtctttccaagagataaggaaatatgaaaaacaagtgcatgttctttttcagggcaaaaaggagagactgcagaaatgataacttcagttttttgacatattgaatttaaggtgcctttgggatatccaaatgggagtgtcacacagaatatacaagtctcaacctccaaaaagagtttcataaaatcaaataatggccttatttacatctagtgacatacactgcctggcagtgttcccagactagagaaaggcacaatcagggacacagacaatgctgcctggactgacatttggttaaacagggacagtcggcatgttcttgtaggatctctgagtcagatgtaagcagactggagtcttgccttggttccataccacaaccataccacgttcaagcttagaagtgaat

SEQ ID NO: 154252 - DNA, 475 bp, Homo Sapiens
ctagaggatcctcactgttcccaaacacggttatattctgaagtcctgggagttgggacttccacatatgaactttggggagacacatttcagttcataatataagcctctgtcatccccatagttttcaatgagtaccagagaatgacaggccgggacattgagaagagcatctgccgaaatccaggcaggaggcccagacacctgaaaggcaaagggatcttggttggttgcaggtgcagtgaagtccactgaaggtgtggtgcgaagaatgcagtccttcacccaggtcccaggagggaagaagggtgtgtgctaattcctggtgcccctcggcgggggccagaagagaaggatggggacaacccagagagccacaagaccagtgcctcccctcagggcgcctccaggctgaaaggggctcctggctctggtctctggggaccctggtgcccgttggttgggtggtgtatgg

SEQ ID NO: 154253 - DNA, 387 bp, Homo Sapiens
cgtcgaccagcagtcatgtagagtgtgccctcccccttgtttgaagaatccagcggagtgagagctgaagggtacctatgaaactcatctcacccggcgcctcattttataaaatagacactcaagaatgagagaaaggaggtgatctgtctgaattcacccagaagttaaacagcaaagctgggctaggatttggagtattcacttgctccttctttgtggcttcttttctccaaactgccttttcacaatgtgcccatatgcctctgtgttgagggtggggcaggagcagagacagagacagagacagagagggagctcagaagtgcttcctactccccactgtgcccctctcaaggactctctttgctgatgaagcgtcgacgc

SEQ ID NO: 154254 - DNA, 468 bp, Homo Sapiens
aagcacaacgtgtgtatcatccaaataggctaccctgcagtttttgtttttggggatcttattattttttggtcaaacacaagacaaggcacagataaaagtatacaaaaagtcatttaagttttctacactttcaaaaagatgttttatgaagagaaataagggaacacagaaaaagaatgagcttaatacaatgcagaattaaacatgagcctgtgcccacacacaagagtggtgtgcagggcactcctgagtagcccactgggaagcccgtgcctgcatccatactgatgaaatctcttgggcttttcagtccttctggaacagctaagaccattcaaccatgccctatcctcaggtccggtgtgcctcagaatcatggagttggcttcccaaacatacccagagctgatcccagggggccttctgtcggatatgtggcagggtcagggcagcatggctcttgct

SEQ ID NO: 154255 - DNA, 136 bp, Homo Sapiens
gatagatattcaaccatttgattataatcagatttttctattcttagtcattctttagagtgggaaagtttcagaagttgaggaagagatgaattgaaactttaagaatatatacaaggctgggcgcggtggctta

SEQ ID NO: 154256 - DNA, 414 bp, Homo Sapiens
gcctactactactaaattcgcggccgcgtcgacgataagggctctttactactttggcctgatggcaatatcattatcccattcagcaagatccatatttatgcattcacatctattaacgccgggtctgtcttcagttttccccggttatctcaaaaatgtgcctttgctgttgatttgcttggatcaggatccaagtttagtccacccagtgcattttctggaaatggcagctgagtgtctgatcctctgtagcaatgccctttcccttttggcccctatgctatttattcctgaggaaaaacatgggtcatttgtcatataaaatctcccacaatttggatgtggtgacgatatctttgtggcgacatttgtcggtccttctttcatttatttcctgtaaactggtcgacg

SEQ ID NO: 154257 - DNA, 209 bp, Homo Sapiens
atttgcgaccgcgtcgacgggatccttgcgctttgcctctcgccgggtatcacccggctgccgatgatcgggatcatcgacgtcggcaaggggagtgctggtttgatatctctgctacgcaacgctcttcccgaggaaaagcggcatttggcgatgagcttgcgtctgcgtatgacgccggagttcgccatcaaccctttggtcgacgc

SEQ ID NO: 154258 - DNA, 381 bp, Homo Sapiens
gctgccacaagccagttatccctgtggtaacttttctgacacctctagcttcaaattccgaaggtctaaaggatcgataggccacgctttcacggttcgtattcgtactggaaatcagaatcaaacgagcttttacccttttgttccacacgagatttctgttctcgttgagctcatcttaggacacctgcgttatcttttaacagatgtgccgccccagccaaactccccacctgacaatgtcttccgcccggatcggcccgccgaggcgggccttgggtccaaaaagaggggcgatgccccgcttccgattcacggaataagtaaaataacgttaaaagtagtggtatttcactttcgcctttcggctcccgtcgacgc

SEQ ID NO: 154259 - DNA, 422 bp, Homo Sapiens
cgtcgacaaatgataggttttctccctgtgaagcaaaccacttttatttcttaggccatttatccctccttctgagtatcacttataccaatcagcattttctttggttttcgatctgccttcaaactacatcctcaaattgtagcataaatatttcccagttaagtggagtggggctaaaaagaaacaaaggtgacaaaggactaattcagcttgggacatgggagaatggtaatgccatttacccacatggtgtgtagggaaagggaggtaatcaggaaattgttcagtaagctgaaaagtttggttttaggtgcactgggtttcttcacatgcatgtctggtctttgggagacagccaaataaaggatccctacagacagcaaaagattcaggcctggggctttggtgagtgtcgacgc

SEQ ID NO: 154260 - DNA, 201 bp, Homo Sapiens
gcgtcgacgccccaggttctccctgccaacccagggcatgcttctcttgaccttatccccagagctgggctccagagcaggcaggccagtgccacaaggaatctaaaaggcttgtctctaccacccagcacttctttggtgtgttagtttgagctgctccagaagcagataccaagagcaagaggtttactagggtcgacg

SEQ ID NO: 154261 - DNA, 527 bp, Homo Sapiens
gcgtcgacctcctctgggtctggtcatgatgcctggggagccaatgctgctttgctgtgttgtatcatttgggatcgacttgcctgactcttacaaaggacttgaaaccttggggtatggccctgttgggggaggtcactggcaggaccacggtaatatccaaagggcaggggcctatgtcagctccagctactccaccaccccgaatccagaaaatcctcctcctgttcttaccgtggctctccggctgtctccccaacctgcagctctaactccccaggccctgacctctatcctaacccctccctactcaccccaatgcaaaagctttcaggagaagcttgcatttcttgtttgcagcaggactctccttaaagaagcttaactttttacccccacccccaaagctttgatgagctatttaacagtaattatttaatctttccttgtggacagttctctgtgcattcacccagcctggagtgtgtgctttgtgcccttttgtgacttgatcagaaccccaagat

SEQ ID NO: 154262 - DNA, 212 bp, Homo Sapiens
ggtgaaaattttttaatttgatatattttgataaaaattgtaaacctacagatccaagaaatccaatgaacaccaagcagcataaacacaaagaaaaccacatcaaggcacatcataatcacactgttgaaaaccagtgatagaaaacttgacaatcagccatagaaaaagagacgcattacatatccaggaaaaggataaagatctgcaga

SEQ ID NO: 154263 - DNA, 405 bp, Homo Sapiens
  misc_feature (336)..(344): n is a, c, g, or t
ttttttatgtctgaaaattttattaataaaatgttgggaaaacagcaacactccctgggccaaaataaaatacaacctgcaaccagacagggtatccctccctccttcttgaaataatttccaagcctgtatattttgtaagccaagtaaagaaaagaaaaatctggaagaaaagattcaagggattaaaccggttataacactttaatatatatttgtggaactctggcccttgcagccagaatacacatttataagccataaataaagcacgcagaaaccataaattaatcggaccctagacctggatttcaccgtgtcatgattgtgaatgcnnnnnnnnnctttctcttggtcatttacaacagacccttacattattttttttcctggttttaaacaata

SEQ ID NO: 154264 - DNA, 802 bp, Homo Sapiens
gtgtgtagatgcggtcttgctatgttgcccaagctcatcttgaactcctggctttgagcactcttcctgccttgtctctcaaagtgtggggattacagccatgagcccccttgcctgaactattttaattcttcaatctcttttacatactgagatcatgagtatgtttgtgttttgaatgcttgccagcagtgaagataaacctggtgatttaattgtaatctgtaataacagatcctggacaaggaataaacttgctattggggttagcactgctgtgctggagatgcaggcagagatgagctgtaacatccatctagagtctgtcactgaatttaaggagtggtgaggaccagagggattgtttggggcaatatttctactttatgggctcagaaaagtcatgtgactatttttcagtggtgcacaaccatgtctgtgggagaacctgcctccaaacaggcccactgggctttgaaatgcctcacatgcttccatggggacatggtgggaaaacgaatgagcctgtggactcctgcccaggacaaagctcagcctgtggccaaggagaagctaacttttgtaatatggttaatatttctactttagataaggactggaggatacactgataataataaccgtgggcctgccattgggttacttacaagccctgtcttgttaaaaatcacaggtaatggctgttgttgatattttgtggaaacatcatgggaagacttggtctctcaacctgtactgtcatcaggagcctcttgatttcccaactgcagaccatgtgctg

SEQ ID NO: 154265 - DNA, 563 bp, Homo Sapiens
tttaaacttcaaaaaaagtttattcataacaaattaagaaataattttaagtcatttattccaacttaactcatgctttagaattcttactgaataagcatttaacattctattcctttggtagaaatacagtttttacaacaaacaaaaaacctaaaatattcagcaaaatcagaatccatatatcttcaaaaatttacagtttatggcattatattctccatttataaaaatggcatatgacccaactgactgaattctaaatgtaagctacagtcaccaaaagcaatgcaattacttctgaacagaatgatgataaagcaattactcctgaattgccacaaatacccatgtagggcttatattatacaattttaatttactattatataactaatttgtttttctttttagggagcaagaaacataaagtaccctagaaattctagaaagtacagctccatatgatatacaatgccccaacaataactttttgtctatttaagttatagtcttcttgctacttcttactactatgtgaacaagacacacagaatttggct

SEQ ID NO: 154266 - DNA, 479 bp, Homo Sapiens
gacttagtgagaaacaatttatttttctgatttataagcatattttacatattctggtcaatacatcaaatgtataatgtggaagttcccttaagaataccaagaccacacatgttaaactcagctacatgttgtattaggctattagacaaatgtcacttttaatatcacaacacatacatgtactttttttcattgacagaggaacatgcctttcaaaaatattttattgggtgaaactttcttattctcaggaaaacttttggttctttaatataatttattatgctctttaaaattctgtttgataaaagcattggtatattataaatacctgtaaagaaaatatagtttaaaatttcaagggaaatagtatataagttttctctttgacattttcacaaaaatccacacaggcactaagaaagactgacaaaactgttttatatctgaatattatactccaggttggaaacatt

SEQ ID NO: 154267 - DNA, 598 bp, Homo Sapiens
aatttcattccattgtggttaaggaagatactttgtatgagttcattgttttttaatttagtcagactttttttatagcctaacatataatctatcctggagaatgttccatgtgcatttgagatgaatatggattctcttgttgggtggtgtgttctttatatatttgttaggtctagttagtttattgtttaatccttctgtttcctttttgatcttctaatatgttgttatatccattattgaaagtggagtattgaagtctcaaacgattattatagaacactctatatcttccttcaattatgccagtttttacttcatacattttggagttcttattaggcacatatatgtttataatcgttacattttctccataaattgatgctttatacaactataatgtctttctctgttttataacaatttttattgtatgaaatatctttttccattctttcactattggccatatttgtgtctttgaatataaagcaagtgtcttatagacagtatgtacacatgctccgcaactttgatggggctatgtcccaataaagccattgtaagttaaaaataccataagtcaaaaatg

SEQ ID NO: 154268 - DNA, 468 bp, Homo Sapiens
cttatattaacacatattttggtattaaaatacaaaataataaattacatgtttcttgccttctttttttcttcccatttaaccacctggatctttccctggagtgtatatgtctctacttccttcttgcaattggtacaaatccattgcacagggggtgcctttgtcatttccggggtgttgccctgtctattgccgctgtgaacatcctcgtgcatctcccataggaccagagatcgctccctacctccctctggcaggacttgctgggtcagaggacctgagctttacatttaaagagaagctgccacattgacttggcttttctcatgaggtgattgatatattcccatttctcctccagacagtagcatttctgtggcagggatgtgttcagacttcagacttcgcttctttctttgcatccttcctgacttaggttttgtattctcctagttaaacaggaaa

SEQ ID NO: 154269 - DNA, 655 bp, Homo Sapiens
actgtgtacaaggctttatttggataccatggaaatgcgaaaggtagtcagataagaccactgtcctcaaggagtttccagttgagtgaggacataaaccacggaagcggactgtgggaccacagtggggagggatgaaggatgcacccgcatgtgaggctgcctggaagaggtggcatcgaacatggaccttctgagctaataggatttagacacacggcaacagagatgacaaagatagacaggcacgaggagtgaggtggaaacctggaaagagaatgcgtgttatgcagtgtgaccagagtaggagggaaggtgaagagtgacaaggaagagtggatggtgaggtttcagagatcagacttttacggggtttgagtctgatcctgaaaatgatggggagccgctggagagttctggtggggagaaggcgtggtgagacccgctggctcaaaggtgggccagttacctagagatgagttaggaaattttgtgattattcaggctgaggacaacaagagcctggagtgaggctagacatgagacagcaggaatggatgtggcaaagaaagaatccctgggactcacaggggacctagggcatgaggagaaggagcagggcatttccaggatttccagggcctgggtacctgtg

SEQ ID NO: 154270 - DNA, 535 bp, Homo Sapiens
ttttttaagaaaactgcctttattcaattaaaagttggaaaaattaactggtacagaaaaaaagtgtaatcagctggagaaaaagtgccacccatgagaactgatggctcctctgggagggaatctggatacagtgaggatttctaggaagcaaattacttcttctctggggctatgagaggcctcggtggtgcttaacactgtaggaaacgttaaatggagaattgtgggagaaatgatacctccttcaaagatacgtgttcctaacaagaaggaaaaaacaaatgcaagcgaacagtggcggtagaaccagttagtattgtgcgaacagtactttctgttttctcctaagtcagctcgtgtgtatggcattaggagtaatagagccagagtgcctggtttcctatcccagctcattcctagtgtgtggttgggaatgttttgtcaactgtccatgtcccagtttgttcatctacattatagtaatgacagtagctagttcacaggattgtaataaggtttaaattgtgttttt

SEQ ID NO: 154271 - DNA, 352 bp, Homo Sapiens
aaactgtctgtctcttttggtatcaaagttacgtagggatccgacatgaattgagaagcatctgtttttcttctattttctggaagagattgtataaaattaatgttaattcttctttaaacatttggtagaattctccaatgagaccatttaagcctgaagaggtctttcaggggaatttaaaaattacacattcagtttacttagtagctacagggctattcaaattattgttttaacgttgagtggattatagtagtttgtgcttcttgaagaattggtccatttcatcttagttgtcaaatttatgtgtgtagagttgttagtagtattcctttattatctttttggt

SEQ ID NO: 154272 - DNA, 487 bp, Homo Sapiens
caatataacccaaatttattatctcacagttctgacacgttgaaagtctgacatgtgtcccactgggctaaaacggaagccttgggaaggctgtggtgatccttctggaggctctaggggaaatcagtttccagattctaaaggttggctgcattccttggcttgtggccccttcctccatcttcaaaggcagcagcaatgcatctctgtgccttttttctgcagtcacatcttcctctgatgaactcttctacttccttttacttttaagtatccttgtgagtatactggggtcaccctgataatacaagataatctccccgtctcaaaatccttaacagaatcacatctgcaaaatctctttcgccgtataaggtaacatattcacagggtctggggaccaggacatatctttggtggtggtcgtggtgggaagggcattattcattctactacattttccttgaaccaacctttcaggatggaa

SEQ ID NO: 154273 - DNA, 442 bp, Homo Sapiens
actcaggacaactcacaccccctggttgtcttgattttttatttaaatgctgagtttaagtgcttgtgcagttggtttcttgaactgaacagcacactttatgtttattctattgcatgtcattgtctttttattctaagcaagaggtcagcaaattattgcccacaggccaaatctggctcaccctctgtttttgtaaataaagttttattggaacacagccacgtcccttactttgtgcattatttatgtctgcttttgcactacaagggcagagttgagtagttgcaacagagattggcccacaaaaccgaaaatatttactatctgaccctttacagaaaaagtttcctaatgtggttctaagttatcacttaagcctcttttggtcgtcaactttacccaatattttatccatgtacattaaacttatttactaacc

SEQ ID NO: 154274 - DNA, 482 bp, Homo Sapiens
tttcttttgttacggacacccatcatgtatggctcctcatctgagccatcaccgctcccgaaacacatggggcggcagctgctgtgcctccttctcaattcttccacccccccacaccatcagaattcggatttctctccacgtggcgtctgcctctgtccccttccaggctggagcgacgtttccacgttcggatgctgcagcctctgcacctgcctcagacagacccaccagataccacctgtctcttcgtggcatttgggagatgcgtgggcggcctgccccccgaccgccgcccctgcccaccacatgctgggacaaggttctggctggatgtcagaatggatgggggtgggggcagccctggccgtgattagttgaatgaatggggtcacaacatcccttttcctgcccctacagtttgtgttgcatatttgtgtttaaagcctattaaaataaacttgagggactttctgcgaaaa

SEQ ID NO: 154275 - DNA, 348 bp, Homo Sapiens
aagtctgtttcacgctcccagcgggctaatcggttctttcaatcctaaagcaacagaaaactgtgaaatttgaagagaaattgttagatcaaaggaaaaagcaaacattaaaggaatgaaagtactctcattatatagcaaaaatggaaagtgttcacattggggtagttcaactttttaaaacatggttaaaagaacatagtcaatttaaaaattatcaggagtgacacagaacagcagctaggccctggggatccacatcaaccaagcacctaacatacagtgaataatgaatgttaaataatcacagtacgcacccacgtcacattttctagttgattagaactt

SEQ ID NO: 154276 - DNA, 305 bp, Homo Sapiens
ctgcttagacttacttattctttgaggaaaaaaggtaatgtaggagctcattgttctctagagctgagctcttctgctaaagttcaaagttcacatcagtgtagccagagtgaagcatctttgttagcagttatgtggtcagaaaacaactagaatgggagcacacctggtgcccagattttggtttccaataaaaggaaccaggactccttagaaaatgaactgattctagaactgggatatgaactgtacaagatgagcctagagtatcttgtgccacagaaaaatgaagtactgaaattaaa

SEQ ID NO: 154277 - DNA, 424 bp, Homo Sapiens
atgagcccccgtgcccaaactgtttattaaattaaaacttgtgccacaccaggtttcctcaaagaacctctgggtccacagtgggtggggctgccatgcggttggtgccctggggcaaagcacagaactgcctcctgcacaaggccacggcccctgcagccagccgcaacttgggctctctcctggccccacgaagccccagagtcccctccccggtggcccctgcccccaatgcaggctctgcctgtacacttgctggacgagttccccagcgttcctcagcgtctcaaacatcaaaggcttcatttgaaaatgggataaaaacatctccagggcggggcggctgctaacagcagaggcctccatgggagacgctggtacagccaattccaggcgccacgtacttcaagcacccagagaactg

SEQ ID NO: 154278 - DNA, 462 bp, Homo Sapiens
  misc_feature (79)..(249): n is a, c, g, or t
ttactattttttccctttacataatctattgtttggaagcaagacactaaattcagcccatactcaaggggtgaagctnnnnnnnnnnnnnnnnnnnnnnnnnnnnnnnnnnnnnnnnnnnnnnnnnnnnnnnnnnnnnnnnnnnnnnnnnnnnnnnnnnnnnnnnnnnnnnnnnnnnnnnnnnnnnnnnnnnnnnnnnnnnnnnnnnnnnnnnnnnnnnnnnnnnnnnnnnnnnnnnnnnnnnnnnnngtttggttgttatgaatggttatttttagaagtcaacttgattaggctaagtatgcccaggtaactggtagaacattatttctaggtgtggctatgaagttttttctcctggaagagaaaaaggacatagtaggaagagatttgaatcagttgactgagtaaagaagatagccctcaccaatgtggtgggcatcatccatactgttgcatgat

SEQ ID NO: 154279 - DNA, 404 bp, Homo Sapiens
acattttgtgaaaaaaagttttgtagaagttacagctagtggtcttttccctccagagccagtgatgagtgtgggagcacttcagctctgtaaggggccagcgttctgacctttaaccacatgaactaacctgcgtcacggttgcagaaagtagcctgttaggacagcagctgctaagcgttgcctggtattttagtggggagaaggctgggactcttcatggcatcaacacttgcatgctctgaatctttgatcagagatgaggtgccatttttggcatttccaccccgtctcgtggtagcctttaaaagtggtagaagatgctgccctaattccccgaggatgattgtcattccatgcagcataatgtgccgtgaggagttttctcattccagttctttgga

SEQ ID NO: 154280 - DNA, 460 bp, Homo Sapiens
caattattgaaattgctgcctagaatcttccgctaccacagtgtattttgattggactgtttattgccttagcaaacacaatgcagtgctgtgtctttggcatcttgccaggaaagatgagccaattttctcgtgttgcttctggatgtcaaaacattctcatctgaccatgccacagaagaagtttgttgagagtgtgactgactgacataatgactgattggctgataacggcagctgacagtgattgattgagtgtaaaattatctgttctcattacttctgaaattgaattcagattggttctattggagggtttccatggagaccataacctgctatagcaagtgtttgtggatgcaatgttttattgtgatcaatacctgtttcctctgctggtccaaagaaattattaatgattatagtcaagtagaaagaggcaaccatatataagaagaaa

SEQ ID NO: 154281 - DNA, 590 bp, Homo Sapiens
ttttttctggaagtgatcatgctttatttattaaaatttattggcatttttggacaagtacaatggtttatacatatattggttgctgtaagaattacagcctttagaataaaggagtagcccgcctattctatctcactattatacttccctcctgccatgcatgtaaaatgaaggcaaaatgtagaagaaggcacaatggataagcagaggatgctcaaaaggaacttcagggattcacactgggcatctgacttagtgatcagaggttgagagttagtggatatttcaaacccatcttgtccttcatttctccttgaattgtttccttacatactgcttacatcctgtattttattctatagagaattccataaaataacattctccaagttttttaaagaacatttttatagtgtttcattattctagtataaattcactttcccttgggtttgcagtgtagatgtttgtaaactgacctttggtcttatctgtgatagttgttaactatgttaaatattgcagagtatatgatgaagctaagttttaccaatgataccaaaattttataagcctctatctttctc

SEQ ID NO: 154282 - DNA, 432 bp, Homo Sapiens
ctcacccttcaattaaaatcaaaatgactacaagacttgccatcatctctcttcaggaccactgctgggtcagaatcagaaaccttgggtgccatgaaatttttacaaaatttcaaatcaaagccaggctttgcagctagataatagatcacttgagtacgaaccacacatgtaagtgcacgtatatttgagttctcaatacaattaccctgatgggcaagaacccacaggtgagagcagaggcttggttcccctagagggccctggctggaggccccaacaccaaccagacgacaggagggccagactgctacccagtactgtacctcctgctccttcaagagcctccctaagggagaagaagatctatacttccactttgtttgctgcacatgtggcaacaagattgctaccctgatttgggacacttga

SEQ ID NO: 154283 - DNA, 399 bp, Homo Sapiens
ttttaatgcagcaatcacattttccccattggcactgctgttttcatagttcagtaaagaaacctaccatccaactgtaaaatctgactggttttgggccagttcatttagaagctacaaagaggtagtgcatgcatttcaaattagaagaagttaagcctgttaaaagttttataatcttttatatcaagcttccatctgaatggataaatgcaggaatgtcagaggcatctctgacttcatgaaaggtaagttcataattcaaactatatattattatgcatgaattaatgtgtcatattctgaaatatatgttcagaatcattacacaggactttcagagtagtccaagtagcaagttaaaatcaagtgtttcctggccgggcgcggtggcttatg

SEQ ID NO: 154284 - DNA, 230 bp, Homo Sapiens
atcaatgaacaaactgaaaatgtctttggatattatttctgtttattttttgcctcaaaattattaaatgacatgaaataagtgctcaagaagaaaaataaacaattcttcatttcctgttctctagttttccgtattacctggaaaaaagaaaatttgttggtcactttaaagataatataaacagctgaacatggtgcacaccccgactccccaccccactcccatgc

SEQ ID NO: 154285 - DNA, 511 bp, Homo Sapiens
tgccaaaagaaccatttttctttaatgtaattgtagcagttttcattactgattggaatataatggaaaaataaaacactgagaattaaaagcttaattgatagaaacacgtgtttatctatcagtaaaaagaatttggctgtgctcctcctatcaacacaaaagcaagcaaattagctatttgctccaagaggaaactccttctaattcagaagaaaaggcagagagaggccccaggcacaggccagcaccaacctaacacaggccgtttctgcgcctacccaccgccacctactggagagctaggggcagagcgcagtgcaatgttcagggtctgaagcttctgggggccaggaaactggtccatgtaaatgaagttgatgcaagacaatttgtgtatttgaggagaaaactcctaaaggattcagaaataactaaaagtcttttttaatccttataagttaacatggctcgttagaagtttaaaaaaatgcctacttgaggatttttt

SEQ ID NO: 154286 - DNA, 679 bp, Homo Sapiens
aaaatactccatacctatattgcaattttatttttatctagaaaaagaaaatattaggcttcagacccaactgtgcaaatttcatttgctttccatctcttactactacctctgtgtcataatttaacacgtaacatacaactcctatctcttaaggcagctaccatatggtgtttatgtcagactggatatatttatctaattttgtgaaattattttttagttcccaacacaattcttgaaagtaataccactgttgttactctttctccttacaatttttatgttgttgagatgtatcagttatgtattataatcatgaaattgtattggcctcaaacccaaattttctttgtagtctaggatagatttttcatgaaagctatatagttataactgtgattgtacagattgtttatttgttttacagctaacattaagcatgattccaggtttttaattatgttccagcaacactagtgtttctttataacttaaaatcataaccactttgataatttacctttggatctgaccagtgattcatttttttcttgaatatactttgtgtttgctttctcatccccgttaagtctgaaacattattgacaccccacatcacttactctgtttaaagactttacgagtagtgagtcacatgtttaggatgatcactttg

SEQ ID NO: 154287 - DNA, 466 bp, Homo Sapiens
cttggaggaaggtagtgatattttgattgtgcaggtggagaaactgagccaagaaatgttacaaattgctcaagtccagctaagaagtggcagagcagaaccagcaaccaggccaccccacccctagagcccacccataggtgtgctgttccccagcaggagacccagtggtgccctggtggtctgttagctgagtttggtgcatgactcccttcctgaagggcttggccctgagctggaagtctgtctctgcggtccaccagctggctctctgcaacagagaacaggaagacactggaatgcaccactttcttatcctttttagttccctttcctgagtttctcaacaactccagttgacagagtagatcttttgaggacacctaacccccctcactgttgttcagggtggggtcgggggaggcttcctgacacttcagcacagctgggactggggtatccatgt

SEQ ID NO: 154288 - DNA, 613 bp, Homo Sapiens
agtggcaccagaattctatattctgttctttgtaagagcaatctcttttctttttggaatatttaatcttaacagaaagctagtgataaatgctgttcttaagatttgcctttttctctcacaagaaagggttaacctaacaaattaacgatgcacacattaaggaagcgtttaacttcctcaagcaaacagtgtcaacacttctcacatgttggtaatcaacatgttcctgcctaagcttacatagtagttccctggaataattcaggctgttaaataccaggatattaaatcctttacattttcaaatactgcttttaattctgtaattcagatttttaattcagacaggcccttccatgaattattcaaattaggggggagtttctcaagagctcaggatacactggagtttctttgcctatctggtctaggaacccttggtttcacagtcaggattataatgcagaagcggaaagaggagagagagcggagttatggtttcaaaacaacgataccaatctagtggtagagaacttacacacacagtagagaaacatatactcaagagacagacaggtaagagaggaatgatgagtgacatagagagaca

SEQ ID NO: 154289 - DNA, 553 bp, Homo Sapiens
ccttgccgcccagggcggggcgatacacggcggcgcgaggccaggcaccagagcaggccggccagcttgagactacccccgtccgattctcggtggccgcgctcgcaggccccgcctcgccgaacatgtgcgctgggacgcacgggcctcgtcgccgcccgcggccccaaaaaccgaaataccagtgtgcagatcttggcccgcatttacaagactatcttgccagaaaaaaagcgtcgcagcaggtcatcaaaaattttaaatggctagagacttatcgaaagcagcgagacaggcgcgaaggtgccaccagattcgcacgcggcggccccagcgcccaggccaggcctcaactcaagcacgaggcgaaggggctccttaagcgcaaggcctcgaactctcccacccacttccaacccgaagctcgggatcaagaatcacgtactgcagccaggggcgtggaagtaattcaaggcacgcaagggccataacccgtaaagaggccaggcccgcgggaaccacacacggcacttacctgtgttctggcggcaaa

SEQ ID NO: 154290 - DNA, 870 bp, Homo Sapiens
  misc_feature (165)..(179): n is a, c, g, or t
aaaggaagaaatcatttgtataatatatttttccataacaaaaagataaaagcaaataggacttgttaaatgagaagcttttgaaaaacccagcgtgaccagcttttgatttaccccagtctgacaaggaagagagaccccacccccactccagattgtatggcnnnnnnnnnnnnnnnccttgggtgggggggtggaggagaagctgtcacatttccatcttcggttattgttagtccgcagcctagattcccaagcatcaccggtccaggggaaaaatcctaacgcagacaattaaaactgtctgaaacatgcagtattttgttggggcttttttcccagtgttaattgtctgcgttaggattttttccttgggtgggggtgtggaggagaagctgtcacatttccatcttcggttattgttagtccgcagcctagattcccaagcatcaccggtccaggggaaaaatcctaacgcagacaattaaaactgtctgaaacatgcagtattttgttggggcttttttcccagtgttaatttcatcgagactcaatcggctagggctatagattgcctctgacagtctgtccctcaaacgctccctctaaaaccgcttgttccagatttactaacaaatcctctcctctccaaacttaaattaggacaacacatttctgaaattattacatccaaaaagtcatacctccccattctctttgccttggtgtggggaatagaaagagtgaagaagagagatctattcactcttcaaacaaaaagaaattggggtagagggtcagtggaggaaagagcagtggtggacctgagtgaaaggttgaaaaaagtttttgtgacttgttcgtccttcg

SEQ ID NO: 154291 - DNA, 497 bp, Homo Sapiens
aggggagagggagggaaatcaaactgagaaataccacaatgcagaccaaattccatctgtcatgtgttccttcattaaaaaaattaaaatatctgaatcaagcataatagcatattgttagctctggggtggacacagaatttgttgtattggtctctgtactttagtgcatttattttaaaaattcatgataaaaggatgccttttctatatcttgcccattcaaataaccctcctacccatcagtccctaggaaagtccataagtagatcagtcaggtgaggcctgatcaagtggttctgatgataatgccaaggactccatttccttttgttattcccctctgcctcccttgttgtctgattcatcttgaggatccctaccacgttctctgaacagctccagttgtttccctcataattgcaaatgactgtggcacctgcaagcctcacattctcgtgtcatgctttccaggggacaagcgggtgtctctccaa

SEQ ID NO: 154292 - DNA, 429 bp, Homo Sapiens
aatattctctaagtacctaatatgtccttcagtgtcctcatctgtgcaatagaaataagagctgccttagggctgttttgaggataaaaagagttggactatagaaggtacttagacctgtgctgggcacatagtgagtgctccctaagtgtttgtcatcatcatcattaactgccaggtcccattactaactgccagaaagaaacgccatttaaacatacaactattgtgattcaaaggcagaccttgtctaactctgtttttcttaccagagagtaaatagtaatttgcttcctactttgtgccctcagattgaaatccttcagtgattcagccacattatctggcttcgtaaaaggggaatctaattctgagttgcttttacatctcttgttattccaagcatgtcagaaatattgagcattctct

SEQ ID NO: 154293 - DNA, 437 bp, Homo Sapiens
tttgggagtttttggttttttccccatatcagaggcaggccgcttctctccaccattgatcttagaggtatcatcgccttcatcttcatgcactgaactggatggtgaaggagttgcagacttgcttccaggtggagatggtgagttgtggggaacattgcttcctcccatattcaaaccaagttgagcacttagctgtgactggttaatggtagtcagctggccatgtggcatcattcctggctgctgcctgatgtctgcaggctggccccttggtctcatggctgccatctgaggatgggaactgtactgagttccttctgggtttcgtatatctggcatcacagaaatggaattagaaagcagtgttccatcctggcccagcatattggagactgtgatttcagggaaggtcatgttttgtggatgaaatggta

SEQ ID NO: 154294 - DNA, 414 bp, Homo Sapiens
cctccgcctccatttcaaggtctgccctctcatattaaattttatttagggaacctgcttgcaagtctaaaaacatacatgtaacccttaaaacttctagttatcaatatgtggtctccaataaaatgaaaaggaagcccttatattgtggcattaccaacacctaggaccaaatgtcttgtggctgagtcctcttcccacagctctcttctgcaggggaagagcatcagaaattagtaactacgacttcacttgatcactaagttctgatagctcctaccacattctgagctggtaaataatttcttagttttgactatgtgcccccaaaaatatacttacgtcaaatctgtaaattttaccactgtaacattcacaattaaaacttaagtttccatccttcttgcatattaa

SEQ ID NO: 154295 - DNA, 860 bp, Homo Sapiens
  misc_feature (455)..(463): n is a, c, g, or t
gttggtttcaattaggaggattaaatgagatcataaagataaagtgtctatataggcaatatagggtccaataaatgttgggtattattattctgccattagctgaataattttgggaaacttaatttctctaaatttttattttctcctgtggagaaaaaagaattttaatgatatacatcttacacagtcctgtgagtcttcatgacagcatgtgtaaagcaccttctgtatgccagacacagagaaaacacatacaggttcccagaactctacagggtctgttctgttgagccgtgttgcctctctgatgaatgtttcaaaataaccatagacagaatatacacgatatatatgttgtgatcaaagaccgaatgagaatttttatgggagagtcataaatgtcttaaagacaactactaaatgcttttcttaagtcaatattttgaaggccnnnnnnnnntctactgaataaatataagaaataagaaggcttctgaaatcacaccacattttttaaacattcagtgactagtaccagaacctgatggataacttaggacgtttctgtcactaacagccagagaagatcgtcgggtggtcagagctggtcctggggtgcaggatgggcatatagcaggtctcagcctttgatgttccgcctgggtctgtccaggaaactagcaggaaaaactctaatcttggtagtattttagttcctgtgagccaccaacatacaatatttgtaatcagcatttcctacacagtctgatttcctctttgtccccatggtcttctcatttctatggctattaggaatctttccagacaggaaactgctattttcatttagatgctat

SEQ ID NO: 154296 - DNA, 661 bp, Homo Sapiens
ccaaatgggcttcaagctccaatgacctccgctcgccccctcgaaatgtctggaaaacataatgggcagattttctgtcttcaaagtttccggctaaacctcttcaagttctttattgtttgggactgagacactcagccatgttaatgggtagtttcttttgtatttgccttgaaaggccaaaatatttttatattgccacagacaaagccacctatttaaaaatgaactccatgtccgtcgtttcccaccaggagactatgtaccatgtgtgtgtctctatgtattctggggtcttgaaacaggtttctcatggggatggtcattcaccacggtccagaggggcagaacaggcggcgcttgccttgcccagggggcctggggaacgtgggccctcatctcagatctgcccccagtatgtttaggacgcgagccccagaaggatctgggagtaaacttaacattcactgtgtctctgctctgcatccgccatttgtgtgtgtttctggactgtgggctgtgtgtaccttggttggtgactcagtgagaagaagcaggaatgccaaagatactgtgaatgttctgagttttgttgctgttgttgttgagaggttgtttcactggtatctattgcattgtataataaatgaccagatgaatg

SEQ ID NO: 154297 - DNA, 366 bp, Homo Sapiens
ctttcttaaagaagtgtcatataataaatatttttgacttgtgagccatataggttctgttttgactgttgtagttagaaagcagctatagatactatgtaaatgaatggcttggctttgtctcaatggaaaactgtgtttactagaagaggcagccagcccacaggctgaagtttcccagtcgctgatagaaacaattgaatatgccatttaggctaataaatggatttaacctttggcatctcatgaacaatgtcttctgacttacagaacagaaagaataaaaataccaatgcaaggttaacagtgctttgatctttgttccttagttacctattcagttttcatgagtaaatgattataaac

SEQ ID NO: 154298 - DNA, 815 bp, Homo Sapiens
  misc_feature (540)..(622): n is a, c, g, or t
  misc_feature (773)..(773): n is a, c, g, or t
  misc_feature (781)..(781): n is a, c, g, or t
tttaagttttcttctccctgtggattctcttatgtcctctgaattgccttgttcttgcttgttttggtctccatcttttatgttaggggcattcttcaggtgtttggtgatccctgagtgtctgatcatagctaaaagcaaagccttaactagctgattacaaacttgtggctatgcttgctagtatggggttcactatggagtgaattgggtggaccattgggggactctgatgtcagtgtctttagctccttctccttgggctggtcagattctccagagaaggatcatcttaccatcttcttgcagggtactagtctggcggccagttttttaggaaccagtgggaaaaaaggtctgggggagggaggtgtcagtatttggcctataaagaaccctgtgttttctgaagggtagccttattatcaactatacctgatgctccctagtccacagatcctctatttacccttctgccagggcagagtcaaggaaagtcttaaaattactcacagaggctaggtgtgttagctcatgcannnnnnnnnnnnnnnnnnnnnnnnnnnnnnnnnnnnnnnnnnnnnnnnnnnnnnnnnnnnnnnnnnnnnnnnnnnnnnnnnnncaacatctctttctctttgtgggtttatgccttttaaaaaatttcagtccattcactgatgttttagtagggtttcgggaaagaacagaagtaaatgcatagtttaatctgtcatctttacctggaagtccccccagctgaggttttatgnccgcttancacctacccaaatgtttgagaagggggcgtttag

SEQ ID NO: 154299 - DNA, 454 bp, Homo Sapiens
tcagaggcaaagtgggtgggtagaggggagctttaaaaatagaagtacaaagcaacattctggaaacatatgaccccagatggaataatgtcacattccccagtgcagataatgggctgctgctggctctgtggtgtctgtctgcagaagatttgctcagtcaaggaaattcaagtggtgagaccttttcaccatgggtggtaagagaaacctgccttcaccaaaatctctgaaggggaaagaagtggagagaaaggtttgcttcacttcggggactgcagtttgagaaataaaagggatacagagatatctgcactttgtagaaagggcaagattatttgcttatatctgaagggaggtgggtggttttgctggatgtttggtctgaaagagttacttttgataaagttaatctaattgtagttatattttctgtgtgcttttttttaattac

SEQ ID NO: 154300 - DNA, 634 bp, Homo Sapiens
ttgagtacgagtgagggactccccaacggagaagagaaccaactccacgtcttctggatgaatgtctcacatcctctaacgcctccctggcctgtgttttccaactgaaatgccttttccttaccctaagcagctcctcctccttcttcaaggaccagctgaaatgcggacgctgcctctccttcccctccgggagcagaactgcacggtgctctcctgttctcctgaacccctcggataagcccccagtcatatttctcacacttgaatcatcaagtgagctttgctctgttgttatctaacagtgtggaacagcatttcggagtgaaggagtacacagggcatgaccaaaggaaaactctcaactcacaggaaacgactagccggagacatttaacctccagactgatgtgtgagaacacagggaacagttctctagctgtggaagagaatctcaaaagcactcaacttcatccagccctcctctgcaatgacactagactagttagttttctccacttaaatttagcctttcttgattttttgaaaaataggaagtcactgaggctccaaacacaccagcaagtaggagtaaaccgaatcaattaaatgtcatgtactaaccttttatttc

SEQ ID NO: 154301 - DNA, 442 bp, Homo Sapiens
tttctctctctttttttggtggggagatggagtgggagttagagactgaagatgatgtttttgagaacttcgcaaaaccagtaataattccccaaggcagagctggtttttaatcactatcaattaactgatcaactaggacatgtttgagcaaagctgccttcacactgtgtgcccagacatctctgccgcttccttgcctgccctgaaagccaggaggcggcaggaattgagtccctcactaaacatttggaaatgaaatgaacgtttgaaaaatgcccagtaacatgggaggaacatcggaagtggtataaagggccagctcttgccacttctctcttttttcttcaccctcggaaatgcctgccagctcagtggcaggacagacatgctgggacagaggtgaacccagagccctgtccacaaatgtgaaggagcagtc

SEQ ID NO: 154302 - DNA, 682 bp, Homo Sapiens
gagttaaccaggatacatttattaaatatatccaggataaatattcccaaaaacaaatatttggtaaatatggcaaacttattctttggcaaattagcttttagcatgttggactgctttccatccctattaggagtattataaggattaaatgaagtattaccaacaaaaaggtacttagcaaaattctcagtaaacattggttataatccctccaacattcagacttaagttctgcctattctctttcctcagtattctttattcctgtccatataaccattgtccttttgtaggccttcactaccttaatgtggactatagcaatagtcacttgattggtctcttggcttgttcccctccaatcttgttctctacactactgcaagggtgatctgtctaccacatagattttgaattatcatctacagtagtaaaacagttttcatggcatacaagcttcaataatttagtctagatattccgcttgatctcttttcacctcttttccatttatcttctagcaccactgcagtgcttgtagttccttaaatatgctattctttttgaaaaagcagcaaatctctgtgcagttgcctttctaactggaatatcttcccccttcttgtgttctcacaaaattcttattcatctttcaagttcaagctcaacaccccctacc

SEQ ID NO: 154303 - DNA, 580 bp, Homo Sapiens
ttccttgctctgttaactctgactttcggtaaattgcttcagttttctaagcttccatttccttctatgtaaaaaagtgaaaataataccacatggagttgcctgtaggttaaattacatattttatgaaaatcacttagcacagctcctggcaaaaccgaataagtgctatctacgtcagcatttggcgtttgttgccctgggcataaaataccctaggacccctctttctatttcgcctggctcagaagttttgacgtggctactgaaatacaagacaaggcctgctacttactagtgctgcttttagtgaaagtgtgctaaaagtatttatagattttatagctttaataatataaaatgtcaagaacaggcagcaatttggcaagagaaattccagattgcattttacagcttctatgataaatgactgttacataagcaggaaacatacctcattgaaaatggcaactcttttggcatctatagcaaatataatgaaacatgctgtttaatatttcacttggcagaaattgtatttttaagtctttctctgcatataaatgtgctttaaactgtc

SEQ ID NO: 154304 - DNA, 303 bp, Homo Sapiens
  misc_feature (52)..(188): n is a, c, g, or t
tcctcccgcacttggcaagcagcgccgctagttctgtgggtataataaacannnnnnnnnnnnnnnnnnnnnnnnnnnnnnnnnnnnnnnnnnnnnnnnnnnnnnnnnnnnnnnnnnnnnnnnnnnnnnnnnnnnnnnnnnnnnnnnnnnnnnnnnnnnnnnnnnnnnnnnnnnnnnnnnnnnnnnnnctgggttggctcctgctattgatacagtgattccctcacaagcgccctttttactggaagctccagtgaagagagaagaaaagtcagggctttatgccatggcctttctgtcgta

SEQ ID NO: 154305 - DNA, 522 bp, Homo Sapiens
tcatgctacagagaactctttcatgaaccgataagtcatagagatgtcgcatacgtcattgttgtcttatcttaagaaatttccactaccactctaaccttcagcaaccatcaccctgagctgtcagctgccatcaacatcatggcacgaccttccaccagcaaatacattacaacttgctgatatattaaatgaccattagcattttcagcaataaaggatttcttaattaagctatgtacatttttagatgtaatgctattgacaacctaacaggctatggtatggcataaagataatttttatatgcactgggaaaccaaaaaatttgtgtgacttgctttattgcaatagttgctttattgtgatggtctggaaatgaacctgcaatttttctgagatacaaaatattaactgtactttgttttggtttgtacatatgaatctaaggtttattgacatggaatgatttgaccaaggtgatatagtggttaagcagttaagtgattaaactaactagta

SEQ ID NO: 154306 - DNA, 432 bp, Homo Sapiens
aatctgtcacatttcgtattttatttgatacctgattgtatggtgctgtctatgaccgtgggcttttctgtggccagcacagtggtgccaccttcgccttgcgtttgctgtcatccatgatcatcttccagtccgagccgttgttgctgtacccgatcttgaacttcctcatgaacaccttgttctctcggtgcttcccaccctgaatgatgatgcccctcacgatcttctcctcccccaggtctatttggagccactcattgatgtaggaatgaggtgcgggtggaagtgcccagccagagcgactggttaccaggcggatgttttcaggcatccagtttctgtccccttggttggatgatgtgatctgggagtcagaaataagtccagacaccatacccaacattccagagcaaggataatctgttatct

SEQ ID NO: 154307 - DNA, 498 bp, Homo Sapiens
gcagaaatcagatggggttatgcagcagctcagggcctttctgctggttttcatgtcctgtgtgcagataaagcctcacacctatgcagaatgaacactttccgctggcgggctgcactccattctgaacaggggaccaacaggccctcgtggagctccaggggctggcaggggagctccacagccggacccctgtgtcccgccagtggggactgcctgggggaccctatctagcaaagggatttcttctctattgaaggcggcaaggctaggagtggcgctcgggacctcaacccctctcattctgccaggcttggggacgaggtccctgccaggctgtgccgccgggtcaggcctgcctgagctcacggaaccgccaggtgggttcctgagaggcgtggttgtttgggaaactcttggacccaaaggtctgggtccctcaaggtctcagaacacctggggtgccagctcctggacagaaagtgacagcagcgtaac

SEQ ID NO: 154308 - DNA, 700 bp, Homo Sapiens
aataaaaattaaaaatagatgtagatgctatgttgctgaggctggcctcaaactcctggcctcgggtgatcctcccgccatgacctccaaaaccacagggattgtaggtgtgagcactgcacccagccttatgtttttttctacataaaaaacagcacaggattatcttccagagctaataaatatgttcaaataaccacaaccccattaaggaaaaatatcactgggcagcaaataatcaatccagaccaatatgatcacaattgctgtgaaggtgagaaaagttcatttttattatgtttccccaagagacgcactctattgttctcttgaaaacacacagctcatgtcctcctttagaacacacatcctctttaaagtaacatacaaacatgccaaaacaaggtaaaaaattacatctgaattctcacatttcaaatatatatgaaatatcaaataaaaatttatttttacaagaatttaggggaactactacatagctataaatgtaatatatatgttaactaagtatcatagataaaaaccatgctcccttcagcagcacgtgtaataatagatacaaagattgaaaggtaaaagatttaggatgaaaagaatcctctcttaaaaaggaaaacaaaattatatgtatgtgtatataacagttataatatccatcacacagctttatagaaacagc

SEQ ID NO: 154309 - DNA, 778 bp, Homo Sapiens
  misc_feature (629)..(629): n is a, c, g, or t
  misc_feature (632)..(632): n is a, c, g, or t
  misc_feature (767)..(767): n is a, c, g, or t
tttgcagaggaaaatgccaatgtggtttttattagccttgagaatgaattttatttaatacccatacaccagatttagagagtcaatttggctcttcttgcgtaaaaattctctggagggtggtggtgatgataatctgatcgcagaagctgagaagtaagtgcatctcaggaaagtgttccaactggagccaggacgctgtcttcagagaagaaaagagacacagccaaccctgagttggaggagagctcttggcaccagaggggctgccctcagaagtggaggcctagggaccctgggaccctaccaagtcctatgaccagagtcactctcctgggactcgctggagggtacagtgtggccctgggggtccgccaagcttcgagaaagactgaggtctgtgacttaggagcctctctcaggaaccaggcagagtcagtactctgtgttgtagaaaaacagaacaaaagtcttggtctgggaggagctcgctggggaggcctaggagcagaggatgttgggaaagtattggtactgtgtggttgtagctccgtaggtttctcttgaggcagtagacgagcttttcgtcacaggcaccagaggtcacatggcagaagggcccgggctcncangtgaccacgccccacgcgaatctgtatttgtaagactgtgtgcgaaatgtgcagccctttctctccagcccgcccatagcagtggtcatgcgcccaacagcacccaaatcgtgccattctctttgggttcctcgncggccccagcc

SEQ ID NO: 154310 - DNA, 475 bp, Homo Sapiens
agcattcagtgacatgtaaatttaatttcgtgtcttttaggaaaagcaaaatttgactgcgaagtctcctctggttgcattaagtaatttccagtcatggtagattttagtgatgtcttatttgaccaggtaaaacaagtcatctatttcccatctgatactctctggagccgaattgaaccaagtatcactatgtctttggcttacctcttcggggacccagggactggacccctgagccaacagacctcacgctggcttcgctggcaggagggtctgcgcctggctgtgtccacgccacactggccaacttaactctgcgcttctttgaccagtgaatggaggtagaatagatgatgtaaagcagtatgacacaaaatgttgcatttggctatggagttcgtttttctgctcatatttaaaagtgattgtgtctgataagtaggaagatcattttttaaattaattaaaaact

SEQ ID NO: 154311 - DNA, 450 bp, Homo Sapiens
caatcagcagtcattctccccagccgtcactcatagcctggacggtgggtcccgcgatctagcccttggctacgcaggaacggtgcgcccccgggtacggcgcggttcagcaggcaggcgtcaggttctaccaaggcgctgaaatgagcccatcagcgggtaggagcccttcccccgccgtcccctccccaggctcgtgaacggcgcctgatgccggcccggggcgcgagctctcgaggtcgcagtgacctcagcacctgcttggaggaaaacgtcgcgggaaccccgcttccttcccctcagctggagccagacctcaaaaaaaaccccaatcgatgcacacagaaaactcctctgggccacgcttcccgcctcgccgaggtctccccagtctgcccctcgctgacgctggcgcgcagcggctgtggcagcacccgggacagcggccgc

SEQ ID NO: 154312 - DNA, 462 bp, Homo Sapiens
cactgctactgttcacacttgacttgtggagaagcgaagggctgaggggaggtttgtgtacacccatgtatttaaaagtgactgactgactgaaatgagcacataccgacatatgcaacatactaataccttcctgattttcgagactttctaattactacaactaacctgttgtgctcacctctggaattcagaaagagagccactgcgagcactgaccacaagggctgccttaggaaggaaatgtgtgctttcaggagttcttattaggggaattttaagagcacaaaaattttattgaacccaccttagtgacaaacagaaaatgatttgttagattgtcagttggaaggggtttattatgactgctggtgaaataaacagtgaccagtttctgccaacatttatggaaataacgtttctaggttttaaatgtgagccgtaaactgaagctacttcagt

SEQ ID NO: 154313 - DNA, 445 bp, Homo Sapiens
caaatctatgtcagtagtttattctctttgaatttcgacaagacacttcgcactcttcattgtaaactggggataatctacgcttcgaggctgttacaagcattaagtaaaacaacccatgtagggcatgtgcagagtacctagcttccagcaagcactatgtagccaggtacatttggagactttacacacaccacctcactacactgggctgcctcctgcctcacctttgccttggaagacagttcaatgttaagctgctggggggagagggggcagtcatgattagttctttgttctttacttggttgcaggacacttaggactttgcccagtacccaaggaagccatgcttgggtcaggaagagagtctctgtaaagccttagactgggagtcaggagacgggtttgagtctaactcattgttgctaccgctttaggctcc

SEQ ID NO: 154314 - DNA, 199 bp, Homo Sapiens
gtataagtcctggaaaactggcagccacttgtgcttataatttctgtattctaaaagatatttaagcgcaaacaaaaaggacacacaacattgctttgcttccaaacatcacagacactgtatcaaatgctatgagccaggttggatggatggtggaaacaaaggagaaacagccagttttatttcagtctatgtaaat

SEQ ID NO: 154315 - DNA, 180 bp, Homo Sapiens
aagtcacactgcagaatagtggcttcgcaataacatccgtgtgaaagatcgaattgttttctattgctcagaggtggggtggagtgggggttgatcaggaattctgagatttgtaagcgctgctttctttaacggaaattgagctctattttgagggaaattagttttgcagacttcgtt

SEQ ID NO: 154316 - DNA, 293 bp, Homo Sapiens
tttagctttttaccattaaaactttattcacgcagaaacagttttcttttattcattgaagccccaagttgttccccctaaactttgggttaaattaggcttcagcagttattccataggtcttctcatcctatgtaacatttctataatgagaacatactctggtttaaaataaactcactccaacataactcatatctatgttgggagggcacaaaatttaaagtgtttgcagccatatgaaagtgcaaggaccacacacacactgagaaaaacataacacttcctagaca

SEQ ID NO: 154317 - DNA, 453 bp, Homo Sapiens
  misc_feature (324)..(386): n is a, c, g, or t
tttcatttcatcatttatttgtcaaatttatttgttaaaaatgtttcttacacatgaattagggggcagacagtagcaggtgttggggtacagagcgggggaagctggtcctgggataagcaatgcacccaggactccaggagtgcagaagagggacatccagcccagaccagggtgtcagggaagcgggtggctgctgaactaagccctgaatgatgaatacgttgtgctttcccccacaacatgttcacataatgaccctaaggaatagttgggaggctcttgcagcacagaagagtgggcactttagagtcacgcaggtgnnnnnnnnnnnnnnnnnnnnnnnnnnnnnnnnnnnnnnnnnnnnnnnnnnnnnnnnnnnnnnnagagtcccattttttttcatacccagaatcagagtaatcataattacctatacattgctctgaaaac

SEQ ID NO: 154318 - DNA, 479 bp, Homo Sapiens
gcctcatctattaaatttttgcctaccccaagttcatgaacattttctcttattttcttcagaattccataatttttgtgtattgtgtgaaaggctaaagtccctttcttccctcaatggatatccagtcatttcagccatttgaattgaaaatactttcctttctctatcacattaccttagcacccttatcaaaaagcaactcttaaaaaatcaatggactatttctgtgtaggtctatttctaaactctgcattctattccattgaactatctgtctatcctaatatcaacctattctgattactatgtaaaattttagaatcagctgtcaactttacaaaaatttcttctggagttttaagtgagattatgtggactctgtagatccatctggggagaagtgacagtttagcaatgtaagtcttccaatccatgagcatggtatatttctccatttatttatgtcttctttaatt

SEQ ID NO: 154319 - DNA, 365 bp, Homo Sapiens
ctctggtggatttttgtggctgggttttctgaagtctgaggaacaatgccttaagaaaaaacaaacagcaggaatcggtgggacagtttcctgtggccagccgagcctggcagtgctggcaccgcgagctggcctgacgcctcaagcacgggcaccagccgtcatctccggggccaggggctgcagcaggcggtccctgttttgctttattgctgtttaagaaaaatggaggtagttccaaaaaagtggcaaatcccgttggaggttttgaagtccaacaaattttaaacgaatccaaagtgttctcacacgtcacatacgattgagcatctccatctggtcgtgaagcatgtggtaggcacact

SEQ ID NO: 154320 - DNA, 427 bp, Homo Sapiens
tttttctgcgctttcctttctcccccacaagcttctgattcttggaaccaggctcggtgacctcacgcgagtgacttcatatccgggactttctgggaattctcagcagcactttttcgccgccacctccaaccaatcggactggctcttctgtcattcgggtcacctccgctgagatgccttccctgaccacccaagttgaaggaactgctaaccttttctcttggactttgttttttatttccttcacagtatttctcccctctaaaattatcttgtctgcttctacctatattgccttccctcttgaaacctaagttccataaactgaggcacaaattctgccttgttcatctctgttctcagcactttgaacagaacctggcatgaatgaggtgctcaataaaagttacttggatgaatcggc

SEQ ID NO: 154321 - DNA, 428 bp, Homo Sapiens
aacagttcacatcgatttattctactgagctgtttctccaaatgcttataattctcctgagaatataccagagaagcagaagggcagagggccaccaaagagatagaatgtccagcccaactttcaaagtgtgcatacctgaaggtgaacttttggcatgtggcaggattgtcgttgacgtcttccacaatgaaggttatctggatgcgattctcctgacccccatatggtctgtccttcactagaacttccagggaaatggtgggattttgtctcaattcacctgcatctcggtctatcctttgggccacttggattgtaccagtcaactgatttatcatgaaatatttgctaacagtggtaatgctgtagaggaggtggctgggaaaaccaatatcacagcggaggattctgatgttggagcggcc

SEQ ID NO: 154322 - DNA, 409 bp, Homo Sapiens
ctgtagaagtttttaaagttctgtgtcatgcaagggcctgcacttgggaacggcattctgtgaaaacataggcggtctgggctacacaggaaatgggtggtttttctgcagctccattcgatgcccctgaatacagacagctgctgtctcctctcccccgagtgtggccctgtgttgtcagccgtgtccccaagggggtccctcagaacacgctgtgtgccgtgcagtctttctgtcctgtgtgggtatctgtggagtgtgaagggtggatggctggggctttccttaaaacacatggttcttgacaatgtcagataatctggttgaacctgttggggaggagtatgtgtatggggccggttctcttcctctggtttcatgagaaacatcaacactggtaactacaaca

SEQ ID NO: 154323 - DNA, 159 bp, Homo Sapiens
tttacttagtcataatacctagatatttgcaattttaaatcctgtgttttctacttttaaatctttttcatattcataaatttttaatggttgtataatatttccttcagtggaagtaatataataatggtcttggtttgcttcatatttttcacaatt

SEQ ID NO: 154324 - DNA, 551 bp, Homo Sapiens
ctcactttgggaggtcatttcttgagcattttcccaagacatttaaaattccttatacatttctttgattcttaaagagaaaacttttcctttacaaaagacatttgatgaaagttgttaaacaacaaaacgaaaaatccacttgtgatcctgtcacttgaagaaaaccattggtcggattttggtacacaccctttcatagtattgattttatgtagtatctgcaccctctgctgctgactggttgtatgttccgtgtgtgtcgtctgcagttcccggcctgcgggcaaaggtgtggaggggctcgccagagtgggatcccgagcggcgctgtcttttgcctttgccttcctgcgcagggcctggcgatcaggtacggtccctggtgtggcgcgttgttctgcttccctaatacatcaacagactgggtttcgaactcggttcagccaccatgtgccctttggctgatcccatgtgctctctgtgcctcagtttccttgcttgtgagatgagaggctgcagaggctgtttggcttttcacatctgtgctt

SEQ ID NO: 154325 - DNA, 444 bp, Homo Sapiens
tttaatttggcaacacacatgcttctttattaaggcattaattagggagttctcgcagtgggtctaagcactatcataatgttgaagcagtggtgagcataaattatgctattttgagagatctgcaacagtggtaatgtgataggaggaaagtatctgtgattaaattggtaacagtcacaggttttgctaatactaatgtggtctgttgacaacatgcataactggaaggaaatgtcaaacgtcagcttgagaacaagaaaagctgtcgtttttttcttggctatctcagttcttgggctccttgcagggtcttccactgacctcaggccaagaacccctgcccttcacagagttttgtggaagactacacccatgaactagaaattgctgttctgagaagcaagggctgtgtggtcagatcagggtgagaaaggctgtaac

SEQ ID NO: 154326 - DNA, 502 bp, Homo Sapiens
ttgtcagatttacaagtttggatgctttattacctaaagtcaaaggggaagatacaaaagctgtttaatttaccaagcaagtgcagcacgcctatggaaagctttggccctttttgctaagctgtcagatattcgaggcagctggccagacggctgtgttttaaatccaggcttaacattttcgaggctgctgaataatgtagatccttttcagtggaacaaccttttccagagcaggtgtgggtttttgatgcgccatgtgcactgttgctggaaatttatagttgagcttctccagtgcgtcattcagggcatccagtgtctgtattttggcaacatttgcaatggcacttgttttctcgaatcctgtttttttggtatgtctttccaaggtgccaatttcttgttttttggaaattctcattcctccagcttttactgcaggaggatgtccccctttccgaggggagagcaggtcttgcacttcatttgccatagcgtg

SEQ ID NO: 154327 - DNA, 358 bp, Homo Sapiens
tttttttcttgctttctgctctatagggatatgtattgtcatcatatgagctattcctcttaagccagtatttcatactggttaccataattgggtgtttctggtttcggcatttagaattaaggtgggggaaaaaggaatcattctcctctacctgtaactttaagtttcataaatataatgtgttgagtcgtagtcatcagagaagctcaaaagtcaatgaaacgtaaggaatttgaaacatataaaggcttctttcaaaagctgctagaattaccttctgtttatctaaaaccttataattctgtacccaggtatattacctttagggattgagggcacaatgaaacatttttag

SEQ ID NO: 154328 - DNA, 489 bp, Homo Sapiens
ttttgaacaagtaagtcattggctttattctgggtcctggaagctccagtgacagtctgaaaaagagatacaacaggagtgtcggcccacagggctggtgcaggatacagtctttggctgctttggccctgggagcctaaaggacagtgaggagaaggcttcacaagaggcctagagcagggggagttacgtcccctgggaacccctcgcccccagaagaaggaggaagatggctggagagtctgctcggttccgcagccctgccccgcaggagggggctggtcatgggttactccttgcccttctcagggtactgggctctcagggccacttggtagcccccaggggctcagtctcagggtccagccgtggttcctccaagggcccctcaccctccaggtccagctcctcaaaagaggagccgctggcacctgactctctgcagctgcactcactgcaggtgtcaccatcctcccagccgcggccgca

SEQ ID NO: 154329 - DNA, 593 bp, Homo Sapiens
  misc_feature (30)..(30): n is a, c, g, or t
  misc_feature (109)..(110): n is a, c, g, or t
  misc_feature (126)..(126): n is a, c, g, or t
  misc_feature (146)..(146): n is a, c, g, or t
  misc_feature (156)..(156): n is a, c, g, or t
  misc_feature (174)..(175): n is a, c, g, or t
  misc_feature (190)..(191): n is a, c, g, or t
  misc_feature (237)..(239): n is a, c, g, or t
  misc_feature (270)..(270): n is a, c, g, or t
  misc_feature (272)..(273): n is a, c, g, or t
  misc_feature (308)..(308): n is a, c, g, or t
  misc_feature (335)..(335): n is a, c, g, or t
tatttttgatatatgattatataattgggnaattgtttacctttaacttttacctttgagattgtgtccttttgcctggtgatactaagtagaccatctcatttttttnntagttgacctcgtatnggtaccaatctcttttgaancctcatttantttatcacctgatagttnntaggctctttttttnnttcgaggtttcattttaagggttttcttataagataaagaatcaannngtcaagaacacccttcagaactcacagggcngnngcgccacgagagcccggccgagtgcatgctggagncgccgacgtctgccgaggatacacagntgctgaggcagaacgcaggttcgtcacagtgggcctccgtgggcggcgccgcacgctcgtcacagtgggcctccgccggctacgccgctgcttcagtggcttgcaggcactttcctcttggaagtggcgactgctgcggggctgagcggtgctcgcacgcgtctcgggagccaggttggcggcgcgatgaggcgcagcaaggccgatgtggagcggtacgtcgcctcggtgctgggtctcaccccgtcgcctcgacag

SEQ ID NO: 154330 - DNA, 773 bp, Homo Sapiens
tacatgttctaagataagctttttttaatttcttggttttctacatgttctaagatttgctatctattatgatttgcttacagtagatttccttgcaaccaaactataaatcagataatcaatatttcaaatgattccagattagctagcatctatttaccatcaaatgtatacttaagagttgattagctattaaaatgtacaatgtaaaaatttaaaacagcatgaattattcttcaaaattctatttccttatataatatgacatgaaatacaaagtttttaataatttattttgaggactaagaagtgttaaaagatctattagtctgttgaaataaaacacattaaatggtatacaatttatttatgtgaagaaaaagcctatttttaagtagctgactaaacctaaaaatgattgaaaatacgatgtttaatataccattaatggaaattaaattactgggaaaggaagctgatggactgtgatattcaagtgattctgagttcctttatagacctgttcaatttgagatgcttggcagggctgtcatattgaacaacccctattcattctatgtggatgatgccacatgaagttgtacagcattggcctaaattatgagacatctacatagacatccaggagttcgttggaattaaggggcaaaaaaattcaagaaagatgtcagggttataactgcaaatagaggagtcattcaaaataagaactgaagtcatgtatctgggtgacattccccatgaagagatgg

SEQ ID NO: 154331 - DNA, 327 bp, Homo Sapiens
  misc_feature (127)..(154): n is a, c, g, or t
  misc_feature (166)..(229): n is a, c, g, or t
gggtcccttggaaaacatttgttatcaccatccctttaaacctactgttttaactgcccccagtaattcagatggcctggtattcaagtccacctctatccaaaattgtgaagttgaagaaatgtgnnnnnnnnnnnnnnnnnnnnnnnnnnnngacagggtctcnnnnnnnnnnnnnnnnnnnnnnnnnnnnnnnnnnnnnnnnnnnnnnnnnnnnnnnnnnnnnnnngcccaaacaatccctccaccccagcctctgtagtagctgggaatatagatgtgcaccatgacactgggatttgacttgtttttaagttcactgattct

SEQ ID NO: 154332 - DNA, 384 bp, Homo Sapiens
aaaacacacaacataatcttctttatttaattgtttaatcagtttacattccacaactgacagattatttattttttccatgaacaagtcatttaattaattaccagacacttgtttttcttcaatcgatggaaatacaatatttctgccaattcgaaaaagaaaattgcaagatgcagtcagtttcagtgaagtccccaaatgctctctgcttcctcagtcctttcaaagtcacaggaacctggcaatttcccttttcatcccccctcccacttccctgttaaatttacctctcagaacatcacaatagtttcaagatctggtttgaatcgcctttcctgtaattaattaattatgagaaggaacagacagtacaatagatct

SEQ ID NO: 154333 - DNA, 649 bp, Homo Sapiens
  misc_feature (432)..(569): n is a, c, g, or t
  misc_feature (637)..(637): n is a, c, g, or t
aatatttgatgagatttattctgagccagatatgagtgaccatggcctgtgacacagccctctggaggtcctgagaacatgtgccaaggtggtcgggggacagcttggatttatacactttagggagccataagacaccaatccaagacatttgagaagtacattggtgagtggcttggtccagaaaggtggacaacgcaaagctggcagggcggggaggcttccaggtgtcaggtaaatttaaaggttttctggttgacaatgggttgagtttgtccaaagacctgagatgcagcagaaaggagcgtctgggttaagatatcggtgtggagagcaaggttttgtcatgcagatgaagctttagctaggaggctgcagacagaatagggtgcaaaatgttgttgtcaaagtctgtgctgctgttagtgaggnnnnnnnnnnnnnnnnnnnnnnnnnnnnnnnnnnnnnnnnnnnnnnnnnnnnnnnnnnnnnnnnnnnnnnnnnnnnnnnnnnnnnnnnnnnnnnnnnnnnnnnnnnnnnnnnnnnnnnnnnnnnnnnnnnnnnnnnnncttttcagacagagatgtctttgttaattttgcctttcttttctgaacagctgtgacttctgattagncgtggatctgtg

SEQ ID NO: 154334 - DNA, 542 bp, Homo Sapiens
atacatatgacatctagccttttatggagtaagtctgccaactccagtctaggttgtagaatgcagaatgatacagggaaatactgaactgatccagctccctccactgaatggctgtatgtgctttgacaagtcacaatctctttcaaaactagttgcctcatttataaaatgcaaacgcctgagtcccacacccaatcaaatgaaattcaaaatctctgggaatggggccccacacatagcctcccccaggtgattctaaagcatagtgaggaccgaaatcccgagattaaatgatgactaaatctcttcagctctgctattctttctataaataacatagtttgtaacactgatttttttaaaagaactgcatcctaaaaataaccttcctcctgatataatccaaacttaagttctatgtattttatacaattaaaaacaagtagctacaagttaagtcactctacagcaaatacaatctaaataaaattgtgtcaaaatatttcaaattttaattaatgacagaatgttatggtcta

SEQ ID NO: 154335 - DNA, 436 bp, Homo Sapiens
ttcagaaactatggtcattttcctggaatcaactctcattatttgggaggctgtcagtataaaatgtggcaggccattagagcctcatctgctgctccaggctactttgcagaatatgcattgggaaatgatcttcatcaagatggaggtttgcttctgaataacccttcggcattagctatgcatgagtgtaaatgtctttggccagatgtgccgttagagtgcatagtatccctgggcactggacgttatgagagtgatgtgagaaacacggtaacatacacaagcttgaaaactaaactttctaatgttatcaacagtgctacagatacagaagaagtccatataatgcttgatggcctgttacctcctgacacctattttagattcaatcctgtaatgtgtgaaacatacctctagatgaaagtcgaaatga

SEQ ID NO: 154336 - DNA, 440 bp, Homo Sapiens
atctgggtagacgtgctcatctactggagtgtacacattctggacatagtaatacctcactggttggtaaactctgtatccatctactggataatagagtggcggttgtggtgctggtggtgggagcgatggtggtattggagaatacatccggcagtggtagcggcagtattcagaatcaaagacgatagatcgagtgctccatgtgatattgggatcatgtgtgctcagccagcgaacccctaggacgacagggaagaatggagactgagtcacatcaaatgacagtgcctctcggtgatctccctggtcaactatctggtcgtgagtttcgtggacaactgggcccgatgctatggggcgcccatcaattgcttccacaagtattggcctgtccttgattcttagaggaattccattttgagcaacatattcgtgat

SEQ ID NO: 154337 - DNA, 511 bp, Homo Sapiens
  misc_feature (404)..(404): n is a, c, g, or t
agataaggctttgttcagctgatatctccccagttcccaggaacacaatactgtaactaggagctaaggttgcctcttcctcttccctcacttacttgtatgttgtataaatagacacctattttccagtttcaaagtctttcaaggtttggctatatcccccgtccccagcccctcttctctttaccttgtagcaaaatatatatagtcagtggcttggagatgcttggagaaaggttggtgaaaagtgaacgtctcctggagtaacagtgacaaggaagcagagaaagacgggaagagggtgggagagccagagcaaagaggcagagatgcgtgtgtggcttctgggctctcctggtaccaattgattcagcctggagatggtggaagagataaaggcttangaagggggatggaatttttttcccctaaattgatatttaatgggaaatcctattggacagaaacctggacatgagtcacttaattggacttgacatctgtcacagtg

SEQ ID NO: 154338 - DNA, 1000 bp, Homo Sapiens
  misc_feature (575)..(643): n is a, c, g, or t
ttttttaaattttaaattatttatttaaagtcactaggtatggggagaattggtccataaagtataaattctatgaaaacaactaaatcattctggtataataaaaagctggatggtatttacaattcacgtttcttaattatgaaataacatgctaacactttcataagatccaagaactttctagaactattatgtaaatcttttaaaaccacaaaggaacaacctatttcagaacttacatacatcatttactagaaaaccactaaagatgtttcaaatctgaaactgcctccttccttccaaactgtaagaaacagtacgctcatcttgaagctttttaaattatttaaattcattgctaatatatttataactacattaaaaagagtttacaatattggaaaaagggctattgtcataatccactttattatgtctacatacatggtagcaaacctattacaagaacaattctagccagtgtggggaacagcatagtgaatgcactgtttccaagttcggccctcagtgacacctaggaaaacatctaattggaaagcctgctgctaaannnnnnnnnnnnnnnnnnnnnnnnnnnnnnnnnnnnnnnnnnnnnnnnnnnnnnnnnnnnnnnnnnnnncacattgttgaaacaattctagaacctttcatccactgtgtacagagacagaataatattttgatatagttatcaactaaattaacaagcacttagctggggtatccgctacctaaataaaaggaagccaaaagaaacctctgttaattcaaataaaaacctgtttatagccagtccttataatacaagccccttaaaagtccaatacagattaataattaacaatatctagaaaaaaatacaggcaatttctgtaatgacatggactctagaatttcctcgaatggatccaagttaatcaactggacaccagtgtgtattgtcacattctaagtgtggtaaagaatattcactgct

SEQ ID NO: 154339 - DNA, 449 bp, Homo Sapiens
tttctgagttattttccttttctcctttttcagtctttcagcggccgtttcctagtagctcgttggtaattgaggggaactgactggggccactctctggtatcctctgaaggccaaggagtgaacagggatggctgccctgcccagaaagggaaaagactcatttctgtccttttcagttataatccctgatccctatgtgtgatgcagttagcagcagcagctcgtccagggcaaactcacaggtttcaggtgacttatgctgcttttatttatgctaaattcttcccttctcccacccaactggcaaaggacagaaaacccacctagctatgcacaaaaggttacacaagtcagagggtccgggcatgtggtctgtgtggtgcatggtggtggagggaattcatgaaaaggaatttattattgcctaagttgagagcgttaaaggg

SEQ ID NO: 154340 - DNA, 221 bp, Homo Sapiens
tacatctgtgtagagcttttctcatgaatacatttctaaatacagctttaacatgtatacacagactttatatgcacttattttaatagatttttctgcacatactaaatttatttcctctgttggtttcaatataaaaagcctcaagacacaaaaaagactgcatctatatttcaccaactctaagatgccactgatggatcattattttacatacatgt

SEQ ID NO: 154341 - DNA, 379 bp, Homo Sapiens
aaccgtttcttgtttaatttcattctttgatagttgtaatagtaattgacaccgaggaaaaaacaatctactctaaatattctacacagtaaggattaaatttcattttctatggttttactatttagtgggcattgtgatacattctaatctacacattgcccctctacccatgccttgtcttttgtcctcagaatatcttattaatcagaactttcataaacatacacaattctttgactgtttcaagagtcaggctatattttcagctcttgtcttgtttctgtgaatatggtggcagaaatcatggatttgagggtcaactggactggtgtcaagcagtcccctaccgtttattagctgaatgagcttaggaaat

SEQ ID NO: 154342 - DNA, 425 bp, Homo Sapiens
ggcaatgcaagagctcagtttattaaatgtgtgcgagtcggacagctgacggtgtcgtccttacgccggacagatggctttacatttagggaaggacaggctttcactatttaccactatttacacgtccgtttaacactgcagagacccggtacagaaacgtggggtggcggctaggggaatcagacagaccaggcgcgcgccatcagggctggaccggggcaacagatggggccgggtgaggtaatgctgtcggagctcgggaggaccatgccggtgggcacggcgccccgagttcagcacccacgtgtggtcatgttgggggccagtgcgagtcactgtccatcagcctcaggacacctccaccctccctgcgtcctcagaccctcagctccttaggactggccctggagcattggggggca

SEQ ID NO: 154343 - DNA, 548 bp, Homo Sapiens
  misc_feature (313)..(321): n is a, c, g, or t
caagaaaatattttctataaataattttttgtgtgatacaaaacctagcttgttttattaggtaacctctaaaaaactgctaggcacgtaccagttcattcattggacacatctcctcctacagacaaccatttggtccctcatccagctctcctgcaccctggaccaaatgggatatgcccaactttcaacatcctctaagtccaggatactatcattctttaagtctctcttcagttataacagacccttgacatttgaaatcaaccaataatttcctgagcactaatcactgtgtgtgaaacaccataannnnnnnnnaaatctgtaagaatgaaaagacaaataagcacaaaccacctatagcctcttgattagtaatccaaacagccttctgtccgagcaattcagcatgtaatgtggcagtcactgacaatgcacaccacagaaatcagtaataccaactacctttacagtaatgtctcagctttttatatacttcactctacacacacacatcactgttccagatgtcatgagtacagttg

SEQ ID NO: 154344 - DNA, 484 bp, Homo Sapiens
  misc_feature (291)..(299): n is a, c, g, or t
cagcttagaaactacagcctgctggggaagagaggggagtgggctcccatggtgaaatgtcctagctcgctggaatagcctcaccctagagggtaacttgttcttggggaatccagcatccggtgccatccatcacacctacggcacgtgtgacaacagacccaggtggggagttttgtctttcaaacaaaagccccttgaagcttgcaatagaatcacaggactggatgggtttcccttcttttgccccaacccccgagtcttacgttttagaacagagacattagaatnnnnnnnnntaatagtaacgattaaaaatcatcaaacaatgaacaccacgaagtctgtccatgctctccacaagcacactggggctctgggcattcccacgaagcatccacgacaaaagaagctgaaggcgtcacggaggaaggcgcatcagaccgcacaggggacggcatcaccattgatattgtttggcaaa

SEQ ID NO: 154345 - DNA, 455 bp, Homo Sapiens
cagtcatgcttcctgtaaagcctgcagtaatgtggcacagcatgtgcagggctggaaggccgaggaaggctgtgcaaggctgtgtcagcatcaaggaaggcgtccagcgtctccagagcctctacaagtgcctccatcaaaccagcttttgggaaagaatctgttaagcccattcagctaagcggcacggggtcacagggctttgagtagccttcctcggtgacgctgagtagggaactccgggatggggctccacggtggactctcggggacaggcacccggggccaccctacaaagcctcgccctccaggccacagtccagagccttcggcctgcgcagggtcctcgctgcatccagcggacggtactgagaagccatgcgctggcggtttgatgcaacgcgaccctcagggccgacccagcgagtgaccaaacatagcatgtttttgttttg

SEQ ID NO: 154346 - DNA, 597 bp, Homo Sapiens
ttttttacaaaagaaaatcacctatcttgattaagccactattagttaaggcatttgctagagctgttgaactgtctacatcctcctgacacatataaaatagcccaggactgtgtttcctcaggaagcccttcttccagttggctaggacccctggggctgcctaatcaccagacactcctttgtcccaggacaacaaagctgtgacctgcagccaccccaggggcaggttttcttggaataagagctggggaagctgcctggagcaacctgctagattgccacgaagggaaggggaggaagcacagcagattctctgccagtgtagacaccagtaaacctgtaccagttattcaaatagtcaaatacttccaggtctgtgggtcagcagccactgccctgaggcaccccaccccttgaagtttccccctccctggctatcctagacccagacccaccaactaaatgggtaacatttagcacaagaagggattccaggatgtcattcttacctccagctactctgattcagcaagccataccacttgttaaagactttgaacattatccctggctataagttacccggtctcaact

SEQ ID NO: 154347 - DNA, 883 bp, Homo Sapiens
tagcattttttaagaatacaatatattgtcattaactattgtcaccatgctgtacactcttcaaagtgctttttattagtggcattaagaaagaatagacctttaggatatttttcacttacaaaaagttactgtcttagtatatcagccatgtttcaacaatgcttagatcaaagcagaggagaaattcctaagactatggggaggagagtccaaatgtttgtctttagagtcctggtgataaggacaacaagaaaatctgtaaaacgacattagatgagatcgtccataggaaagtcttcaaagtggacattgacgtgggcttagatataaattagaacaggacctccaaagatatgaggcattctcccccggtgccacatataccaggagaagcccaggatctgagggagccaccagcaccctccctgagaaagcggggagtgtcccgttgccactgttcctactttcaggcctccatgttagatttgcggcccatatctcaaaaaggtgtgattagaataacaagaaagatttttggcagcttgcgtgaggaagatggtatctaaaatgctaagaccgataagatggagagggtacgaaattaagactccagatagtaccagacattgaaaaaacagtaatgaaatgtgattgaaaattgcagcaagtacagaatggagccccatccgagcttgaaccctgcaaacaggctctagaaagttgcataaataggcttcagaataccttgtaacatctagaaaaagctaaaggtttgtgtgcaccttaaaacaccactgccctggagtaatgaggggaccactttgtcacatgttatgaagggggatcaaataggaagaagctgacctcagagagctctctc

SEQ ID NO: 154348 - DNA, 227 bp, Homo Sapiens
gaagagtcttcacaaattttatgtcaatgtggatatagctaatgactcacatacattagcatacatatttttgataattcaataaattttattcccaagtacgtacagattttatttccaagatgatgataagaaaattggaagatgggaaatactttttagcaacatggtttttcacttgtgtatctgctaaaatcctggggtgtcacatagacacgctaaacctc

SEQ ID NO: 154349 - DNA, 377 bp, Homo Sapiens
gcagggagtgcaacatttatttcataacagaaccccttttccacagagcagctgacagggggctgcatgaaacatactttggaaattaaagtgaactctccacttgggcataatgttatgtgggcacatggattggcttaaaagggaaacaagaatacttcaacatttgatcaacagtaggcagttgctggacattttagaaaaaggagaaatccattttttgaccatggctaaacatggggaaacagcatcacattttcctgaaccaccctaatcccagcccctcaagatccaccaggtatgcaaccccaaaccccagtcacatacattaaatctacacttttatttttttgtgtgaaaatgggctttttcctcaa

SEQ ID NO: 154350 - DNA, 316 bp, Homo Sapiens
ttttttttaaccggaacctttaattttattatgtggaatgcttaatgcagagttaataggggctagagtggctaggagaggggactactgagataaataacaggagacagtaatgagttacatgtggatttggggggctgcagaacaggaaaataggggcagatatagctacatactttattcaaataccactgggaggcaaggggtaagaggcaagggcagaatgtacaggtcaggattctagtgtcttcagcctgccgacagcaacctgggtgctgggccctgtgtctcctggagccaagggttagggcctgag

SEQ ID NO: 154351 - DNA, 548 bp, Homo Sapiens
  misc_feature (449)..(462): n is a, c, g, or t
tatgttttcctgtttcctcaagtgtctgattatttttattatctgaggaatattgtatttgaaaaattgtttgtatagaaataacttgaggcctaggaagatgttttccttctctagggaggatttacgtttgtttaggccaggcaccagggaattctagcaaattggtattgctttaatccaattccagagactgagctgatttgaggctgaaatctctgtgagaactggtctgttgcagtccaatcttattactgtgctgcaattatttaggttctcatcccaacgctaggctatttcccttgatgagtcctagattctgactttttaccccactcctttgagactgtctaaaacactgatcaggctctccactaactcctccagaattaataaatgctcccaaggtagaaggagtccaaatgttgagctcacctttttggattccnnnnnnnnnnnnnngaagctacaggcccactagttctttactaccttgttatctctctagtatcttcaagcatatcttttttaaaactgttcctagtttt

SEQ ID NO: 154352 - DNA, 628 bp, Homo Sapiens
ggcacaaaaatctgcctttatttatttcacaggcttgcccgtgttgaagagtgttaagttataactccaaataatatccttcagtgggatttgatgatgatgaggataagcctgtctcttgatataaagaaactaagaataacaattgctagtcaataagaagaggtcgctcttcagctttgccttatcctctggccaatctcggcatttggctagatggatagagaatgttagattctttttgctaatttatttagaactactgttgaataaaccattcagattaaatacaaaatgcagaccaggcatgggaggtagcattgctttcaaattagaaaaagcacttagttaagtggtaataaatgaaatggattttactttttgtgaattatacttctgttgaaagtcattagctcctttcattacaaaaggcaagagcataaatcatagaactttcttcttttcccatcctaataaagacacaacttttaagactctgtcttgatcacagttttaaggaaaaagctatccttgaaagggaaagaggtcaaaaaccactactttggggtagaatagatactgtttcaaaataaataaacagttcccttttgttttactctctcagctt

SEQ ID NO: 154353 - DNA, 404 bp, Homo Sapiens
attcctaattccttgtttcctttaacgtggaacaaataagcagttcaagggtaataaatgagtcaatgagtgaataaaataactctcaatgagtcccacaagtgcgtgaaagaaagagcccaggtaagctgagaacctgatactccatctactttaatcaccatcctttccagacttaaagaaggattgcccatgcacaggtagtgactccttaaaggcacaaatcatgactgaatgtgttttcaagtccagaacagaacctgacaaaaatcaagccctggagtttgtgctcaacagatgtgtaatcctctctgtgtttccagttcttaaatctcttccttcccatcctatcactcaggagaaagcacttatgaccaaattctgtaagaatttgggcagaggtg

SEQ ID NO: 154354 - DNA, 392 bp, Homo Sapiens
cagaaatatctattttttatgtataaagaaacatgtttgagacaaaaatagttgtatataaaaggatatttcataatctcagaatagttacaaagctcactgcttgaatttggtgttaaaaattctaatggaaacatgtaaagccacatactactgaaagcacaatgcccaggaaagttgtcactcttcacttaagggagtggttgccaggggctgagaaagggaggatggggagtgcctgctaataggtatgtggtttctttgggcgatgatgagaatgttctggaattggaatagtggtgatagttgtatccctgtttgaatgtactaggaccccctgaattgtatactttgcaagggtgccttttatggttgtgaattatctcactaaa

SEQ ID NO: 154355 - DNA, 383 bp, Homo Sapiens
cagtaggagcaataggattttaataaacagaacccatcccaaagccatgactacgacagttgtacttgcaccaaaacagcatagaaaaccagagtgtggtgggaggacccgaagccggttgggggaggatgtgagtaggggcctggagggtgcagggtcattaatctgcggggagaacattgtgctttagcccagggaggggaggggtggggcaaatgcaccgaggtccccactttttcctgctgccctcggcaccctggggatgcaggcatctgggcacatttgccccttattgctgcccaccagcgttaaacgcccccgatcccaacactagcaccacaggtggttccggggcagggagaggcaggaatgggaaaattgct

SEQ ID NO: 154356 - DNA, 423 bp, Homo Sapiens
gcggcccccgcgatcccgccccgccgccctgcgccatggaggagggccctctgccgggcgggctgcccagccccgaggatgcgatggtgacggagctcttaagccccgagggtccgttcgcttcggagaacatcggcctgaaggcccccgtgaagtacgaggaggacgagttccacgtcttcaaagaagcgtacctgggcccggcggaccccaaggaacccgtcctgcacgcgttcaaccccgcgctgggcgcgtactgcaagggccaggtcaaggcgaacgtcgcggggggcgacacgaacggacggggagctcctcggggagtaccccgggatcccagagctcagcgcgctggaggacgtcgcgctcctgcaggccccgcagccgcccgcctgcaacgtgcacttcctgtcctcgctgcta

SEQ ID NO: 154357 - DNA, 701 bp, Homo Sapiens
  misc_feature (571)..(571): n is a, c, g, or t
  misc_feature (689)..(689): n is a, c, g, or t
ttcaatgcttttaagacctttaataatgcccacgtgccctaaggttggccctcttaactccctcagctctttctggctttaagccatcaccccaggtgtgcagtttatgtcagagggggccatcaggtagggaaacttatcagctgctctaagagaaaaggccgtccctgctattatcagtgggcacaggctggagctcagccagcaggggctacagtcgggttacctggagacatgatcccctggtcctctgagggcctaggcaggacatgggggaggacacggtcccccgggacagagtcctctggccaggagcagcctttcaggttgctcttgtgtgctagaaaaaaatattttctctatgtgccatgtcatgaaaaagacaaaagcactgagttaatgggatgtggaagctttagccacaggcttctctgcctgtgaagagagatttctgcatgtgaacagctggagcaggaggctgaatggcagtgcttctccagagaccacaacatccacccagtcacctgtccacctacattcacctatccagttccccaacccactcccttcncaacaacaaccagctccaactgactctggtcttgggaggtgaggttcccaccacggaagatactttaaatgaaaaaagaattgaataataaatcaggagtcaaattcatcgtcttcangccctctttcta

SEQ ID NO: 154358 - DNA, 375 bp, Homo Sapiens
cgtcagggagagttgaggctgcgctttggtctctccctcctcgctgttacatcctccttgcaagtagcggctgtaaagcttctctgcctctcctaacatgccatcctccactcctgttgcctcaatctctcttcatgcccagctaatccacctttttgggtcttcagacatatcgctgcttcattgatcctctctcctgtatagcagctctctcccctctgcctatgcacagctcttcattccagaacagttgatgtaagcctgcttcccctgtttcttcactgcctttcctctttgtaaaacatactttcacccagagtctcttgaacctatgctcctaaaattcacaaggagagcagggcacagtggctcatt

SEQ ID NO: 154359 - DNA, 422 bp, Homo Sapiens
aggaacctcacctgctgccttgtgcccctggtggcccacgcaaccctatctgggaaaggctgagggggcagggcctttcctcatttgggccccaatttgggcaaggtagccctgggctggcggggccattggacaatagccactgcaggtcaccatctgatggagaaagatccccagaggtctctgtagaaaggttgctttgatctttcaagaggggaatttccacagatagattccccatccttgcctgagtccaacttggagtcttccagacctgcagtggctattgtccaatggccccgccagcccagggctaccttgcccaaattggggcccaaatgaggaaaggccctgccccctcagcctttcccagatagggttgcgtgggccaccaggggcacaaggcagcaggtgaggttcct

SEQ ID NO: 154360 - DNA, 407 bp, Homo Sapiens
ttctgtaaaaaaggaaaataggtttaatgtttaaaagaagcattagtgtgatattattaccgaaaaacaattttgctattatcacagctcaaaaagtacccacaggaatctttcaggaaacaggttactgtccatttcacaaaacgtgaaattaggtgatcataaatacacaagaaaaacaaaacattttttgtccttagttatattgctccctcccagcctgaaattcagatgaagactaaacaacttctgcagatcacatctatctattttagcaacttaatggaaatgaaaagcaatcttcattttaaaataagtatcataacaccatttttgaaacgcaaatgaaactctcatcatataagagaatgtcagtatcaaatttttgtatcatgacaattaggtac

SEQ ID NO: 154361 - DNA, 518 bp, Homo Sapiens
gtgaggttcccttgattatcttttttttcttctgatgacaaataagatattgaaggtgttctgtgatagaatctgcagaagatgataacagttcctcctatctttgtatgagcacggtgctcctctcatcaagagttggagtctatttccccttcccttgaatcatgtgacttgctttgacagaaagaatgtagcagaagtgacgtggcaccagtccaggcctgggccttaaaaggtaccttagtttttgcttttgctcttagaagtcagctcccatgtaaaggatctcaggctagattactgaattatgagaggccacatggaggacaaccaagggtccccactgagagccagcaccatggccccggacacacgtggccaccttggaccctagagccccaatcaagcccaatcaacaccttgtagagtagaaacaaatcacccctggagagccctgcccaaattgtaaaatcgtgagcaaataaatagtggctgttgtttcaagccactaaattttg

SEQ ID NO: 154362 - DNA, 461 bp, Homo Sapiens
tatgaatcaaagcatattttaatttgctagtgcaaatggacccagaattggaagggctatgtaactacacagtatgcacaccacagccatgtcagtgtcacagatcctcttgtgcattcagctttcttaaaaacacatcaaaggctgcaaagaagctcagaaaaaactaaattgaaggacaggtggaatacaatgactctatgtgaggaacttgccaactcacatctttcaaagccagatcagcttatatagtacatgcattatagtcatatgaaatgttgtcttggtgctttcttcttggaggactatggcagcagctttaagactactaacaaagattattacacaggtcatcttatccacaggcaaactgctttgcacaactagaacattaacagttctttttaagttaagttcagatgaaactgtcacaagacagacttgatgtattttatatatac

SEQ ID NO: 154363 - DNA, 986 bp, Homo Sapiens
  misc_feature (62)..(62): n is a, c, g, or t
  misc_feature (148)..(148): n is a, c, g, or t
  misc_feature (296)..(296): n is a, c, g, or t
  misc_feature (308)..(308): n is a, c, g, or t
atactcccgggggttaccttaagatcctgacttgaggtgcggatcaaaccagctggactcancccgatgacagagtctggatcagtcctctgggaactagacgtcagctccacacactgtctgcgctgatcgggacttttctcctcgntctcaccaggtcaaagacaggtttgattactcagggcccaatagatgctataaattttcttcccttaaaacttctggtgtccagttccttaggaccctttccctgtggcacttggtgcccgaggtcccagttgtggaactctcagtgntgccatagcctntgggtccccccgcccagctaggccaggatccttgccaactggggtatttacactttctgttggacttctcttccgcttgtctggttctttactatagtagtgggtctgggcaatctccaaaagcccaaagatgctgggccatgccacccagacccgcgtgggcataggactgctccaagctgaggactgtacacttgaggaggtctaacattcccttgtacaccttccgactgatctccacatccgggatgatgtcctgccgggcatcgtcctctgactgcaccatgcggttcagcttgctcaggacaaagactcgcagctgctcgctctccagcagccggcgcacctttttcatgttgagccagccaactccctggccgtccagcacgctgtgcaccacctccttcaggaactgctggttctcactagaattgctggatcgaccctggggtgatggaggttctcttttcactgttgggctgtgtttaatgacagatgacttctgatccactaacgccctcctgtttcctttcagactggggaagggcgtggccttctctcgggcacctttggtgggcagtgtgaggtttgaaagactgaagctggtactgtggttccgatagaggctgctggcaaaagacatgatgcccccgaagccctcggtgctggtgttggaga

SEQ ID NO: 154364 - DNA, 615 bp, Homo Sapiens
ataattacagtttttattataccttgcaacgatgaaacgacatacatttttgataactctccttttgcttctccaagaatggcaaagatttacagttttatacaatgaatcctaatcatccaaaaggaaatttattacacagtaatgtgaatagaatttcatttatgaagcttattttttcattctcaaatgatataaacaatgattaaaactctccttctggatctaaacagcggacttttttttccctaaaattctcagtctcagcgttttgattcctgtgggtaaagaggaagacgtgaggtatcattcccccatactggatgagtaagatcatctattcagagtaactaagcaaaaattcttaaccagttcaactacggaaagtcttgaaatcttaaaatcacaattttggttttagtctgactgattattcagcaatccccacatttgcgaaactgtagagaggggcaagtagttaagacttcagcatcttctttactcttgattataatttaatatacttaaactttaaatatgaattgctttccctttttacactagttataaaaataagaggccctgtttacacagtttgcatttttatgaaatttg

SEQ ID NO: 154365 - DNA, 857 bp, Homo Sapiens
  misc_feature (26)..(26): n is a, c, g, or t
tagggaatttggccctcgaggccagnaattcggcacgaggggagatgcttaacacgagtttattcttgacaataagcaatacatcttgtaggcatataaaatgtgaagagcaatatgtacattaacatggaaatgtgaaaaaacaaggtacttttctcaatgaactcaaggaatagcaagaaattctatatcttcagaaaacaggatgatgagaataaatgaaaatggagctagattccaacagctttctaagataagttaacttaacttagaaagataaaagttaacatatcttatatctttgggcaatggataattattaaggaaggcatttgtgcaagtgaatggcatgatcagttttttgtgctttaggaatacaactctggagagtgaactgcagaagaggagaaaggcaagtttaagtagaagttaaaaaaattttctgagcagaaaacttaataacggcttagagatggaaaaaagatagagggcagaatcaaggatgaagtctagatttccggattgggtaaattgatgtatgattctattcactaacagggaatcctagagcaagtacagatttgggggaaattttctaccagctgtagtaagcttatgcaccaaaagtaaataacaactaaccttacaatgttataagttaattggctatttgttcctacatcaaaaacacttatattagtcaggcatggctactccagaggctgatagtaggcggatccctacagcctgggagttcaaggatgcagtgagctatgatcatgccactggactccagtttgggtgacagagcaagccctcgggcagatccagcgggacgttctcctcgccgctgtcat

SEQ ID NO: 154366 - DNA, 183 bp, Homo Sapiens
aggatgaaggtttattacctggtgacatcatcctgttggtgacaaggtggtgatacatctctaatgggacttcaggcaggctgccaagcaactaacccccatcaagtgccagaccctcccagtgttctgagagtcatctccatgctaaacagcctgcgttttatatgatttctctacccagcc

SEQ ID NO: 154367 - DNA, 579 bp, Homo Sapiens
  misc_feature (121)..(347): n is a, c, g, or t
  misc_feature (448)..(459): n is a, c, g, or t
gtagtggtggtttgtttttttacatgaagtggcccacttcttgtattaaattatttattctttctgaaaatgttcaatcagaatgtaataacacctttaaaaatgatttaaaaatgtattnnnnnnnnnnnnnnnnnnnnnnnnnnnnnnnnnnnnnnnnnnnnnnnnnnnnnnnnnnnnnnnnnnnnnnnnnnnnnnnnnnnnnnnnnnnnnnnnnnnnnnnnnnnnnnnnnnnnnnnnnnnnnnnnnnnnnnnnnnnnnnnnnnnnnnnnnnnnnnnnnnnnnnnnnnnnnnnnnnnnnnnnnnnnnnnnnnnnnnnnnnnnnnnnnnnnnnnnnnnnnnnnnnntatatatatttatttctactgaacacaatgtctatatattagatgacctagaactggtagggggttctaatccaggggattgttgataaactcagacaacnnnnnnnnnnnnacattgttactcttaaagtcttgtcattgattgtctcaatattggaaaataacatgtcaatattcagtgtaataaactggaagaaaaaatgggccaatatcccattcaattaaagacatg

SEQ ID NO: 154368 - DNA, 444 bp, Homo Sapiens
tactggtccagtcctcattccctccaccccatctccacttctgattcatgctgcccctccttggtggccacaatttagccatgtcatctggtggtgaccagctccaccaagcccctttctgagcccttcctcttgactaccaggatcaccagaatctaataagttagccattctctattgcattccagattagggttagggtagggaggactgggtgttctgaggcagcctagaaagtcattctcctttgtgaagaaggctcctgccccctcgtctcctcctctgagtggaggatggaaaactactgcctgcactgccctgtccccggatcctgccgaacatctgggcatcaggagctggagcctgtgggccttgctttattcctattattgtcctaaagtctctctgggctcttggatcatgattaaacctttgacttaagaa

SEQ ID NO: 154369 - DNA, 852 bp, Homo Sapiens
tttattgttaaataaattgtttaatttattgttttgaataggtaataatacaatggtataaaatgttacaacactcaaaagaaaccagctagtttccttgtccagagacaactgctttaccagtttcttatatgtccctccagagatagactaaggaaataaaagaaggtcagcatagtctgttatttttttatacaatgctaacattctatacacattatcttacatgttaatttgtttcaccatcaacatattttagagattaacagtatttataaggctgccttattattttttaattaagctttttattttgagatacatatagagtcacatgcagttatcttatgttttatggttgcataatactccattgtagagataaccataatttatttaatgagtctctataagggaatatataggtcatttcaaaagttttgctgttataaatgtcaatacaattaacagacttgaacatattatttcacacatttgcaaggaaatgcctgtaggataaatccttaaaagtggaactgctgaatcaaagggcatatgaaattttaatttgtcaatattgaaattttaccttcccttgaggttacaccaatatacactctcctccaactgagacttcagttctgcaatggttttatttcctcttgttctacctgcccatgttttaccttcttctgtggtctggccaaacttcccccaccttctctcttatctgccctttaagctttagttatatacaagtggcagcttcattacactttttgaactgtggcatctacttggcacaattttgtggcaacatttttccagtgaatgttcttcatttgccatttg

SEQ ID NO: 154370 - DNA, 394 bp, Homo Sapiens
tgaaagaggaaaacatacatttttaaatgtgattatctaatttttacaacactgggctattaggaataactttttaaaaattactgttctgtataaatatttgaaattcaagtacagaaaatatctgaaacaaaaagcattgttgtttggccatgatacaagtgcactgtggcagtgccgcttgctcaggacccagccctgcagcccttctgtgtgtgctccctcgttaagttcatttgctgttattacacacacaggccttcctgtctggtcgttagaaaagccgggcttccaaagcactgttgaacacaggattctgttgttagtgtggatgttcaatgagttgtattttaaatatcaaagattattaaataaagataatgtttgcttttct

SEQ ID NO: 154371 - DNA, 415 bp, Homo Sapiens
  misc_feature (297)..(311): n is a, c, g, or t
cattaagtaatagttgtcactctgttggtctcatggtcaatatcaatcagactttcatgatctctactaattattagtagagtcctgtactatgtctgtaactactaagtttaaagaaaagcacatagtcacttcatctctttttttcttagcctacgctcactccccaacccatcccaacattgacatgctatctgtggacaaatagcagttctcagaatctagtcaagttgccatcatcccccttgccttggccgttcatagtaggtatgcatatgtttgtttctgtacagtacnnnnnnnnnnnnnnnatatatatatacatctgtatgcacacatctttgataaaatagctatttgactagcagggttaaagtggcttttaattacttcgtgagtgttattggatacatct

SEQ ID NO: 154372 - DNA, 437 bp, Homo Sapiens
atttctttattttttatttttgcatatttctttaaattcccagaagtaggatttctgggtcaaggatatgaacataatttaatgcttgccaaattgcctttcaaaaaggttgtgtcaatttatacttttccttcggcagtgcaggatgaatactggtttcaccacagccttaccaacattggctatttccagttttcttcctaaattaataggtgaaaaatgggtcttgttatctaccttgcatttctttgattaccagtgaggttgaatgtctttataagcttctttcctaacaggttttttttccttattcccattgtctatttatatgctttgtccatttgtttgttggtgggaggagattgcagtctttttcttaccaatttatatgataaagaagaagggagttcaggctagttgaagctctggcctgttgt

SEQ ID NO: 154373 - DNA, 544 bp, Homo Sapiens
gggaccaatcaaaaagtatttattgaatacgaataatgtatcaggcatacttctaggatcttagtaaataaatcagcaaataaaacaaagacctgtgctcttaaagagctttcatcttagttacatagtgtgcttgattggcccattaaaaagaaaaaagaaggataaccaataaagggcaaccagagtgtaaggaacttgatgtccaagttataattcccagaatgacattttagagatagatataaaagtctttactaaaccaatgaaaatcatacagtagtatattacaagataatgtttagactatattgtgcagattttattcttggaatataatattcacttattagtagcacatttattaatattgtccatcagtaataggtcaaagaaaaaaacaacataatcatccggcagatgctctaaaatcatctcataaaatttaatatccattcctgggaaaagtctgaaatcaccccatgtttttggttgcagctttagttccagtgtccaccatgggaaagaccaacatacagcttcc

SEQ ID NO: 154374 - DNA, 738 bp, Homo Sapiens
  misc_feature (359)..(521): n is a, c, g, or t
tttgttatggttatagtttattacaataaaaggatatagaccaggatcaccaaagggaaaaatcacatagaatgaagtccacatgaaagcaggcacaaaactctgggtgttatctcccattacggtcacatagggacacacttaattcccccagcaaagatgtgtgacaagatgttcacagtattataatacaagccagggaagttcactcaagcattcatttctggggtttttatggagggtcatttacataggaatgcagggtccacataactagtcatagccatacagcccttgcaaaaagcaaacatacagtgtggcccagggcctcgggcatgcaaaatccagcattcaccatnnnnnnnnnnnnnnnnnnnnnnnnnnnnnnnnnnnnnnnnnnnnnnnnnnnnnnnnnnnnnnnnnnnnnnnnnnnnnnnnnnnnnnnnnnnnnnnnnnnnnnnnnnnnnnnnnnnnnnnnnnnnnnnnnnnnnnnnnnnnnnnnnnnnnnnnnnnnnnnnnnnttttgctggcatgccaggcttctgtgttccctttctctgagtggtcccagtgatctggcttgtggcaccatcgccctgggggccaagcctcattgtaaaggaaaactactttttttcattccaaagtcatccaatcagtgctgcagtctatttcctttgagtcaggggggtctcctcagcattgtccgtgcagtcggatgcgctgggtgagttccca

SEQ ID NO: 154375 - DNA, 298 bp, Homo Sapiens
ttttttgcaggagaccagggttttattattactcaaatcagtctcccccagcgtttggagagcagagtttttaaggacaatttggtgggttgggggaagccagtgagccaggagtgctgattggttagggatgaaatcacaaggagtcgaagctgtcttcttgcgctgagtcagttcctgggtggagggcacaagatcagatgaaccagtttaccgatctggatggtgtcagctgatccatcacatgcagggtcataatattgtcaatgattggcactaggcttggtgtgttttgctc

SEQ ID NO: 154376 - DNA, 774 bp, Homo Sapiens
  misc_feature (67)..(67): n is a, c, g, or t
  misc_feature (208)..(208): n is a, c, g, or t
tcagctctttcaacaacttcataaggccatgctcaaagatgttcatgtcaagcaaagtgtattcttntgctctacacgaacattccctttcatgttataagtaccgggcgctccacatacaatgtaatgatagtctttagtacaagtagctgctacaccttgctggcaagagccaaatttctcatggcctctcaatcgcccatcacanaagctccaatctcccccatccatatcgtcttcaatcctgagattctgactcaggacataacaccgccccaaagatgtctcgggattcctgcttcgtattaacaatgctgccttttttcatatcggtgagcacatgtcacgaccttgccccctggaccttggctctggacggtgacccccatccactgatcttccttgctttctgacgtggggtcagcatcgttatcaaactcgatccgcgtgcatggcccccgggcggtgatgtcgcagctgtacagccctcccgttctgttggctctctgcagtggaagcgcttctggccgcggggcccccacgagcaacagccgcttgtcctcgggctgcagttgccagtgcatggccagcgagaagccgaagaggctcccggggtctccatatttccggatcacgttgtcctcccgagtgtccaagttgaatgctgcgccgagccgggacaggagccccgccgacaggtagagcaagcacagctgcccggcggcggccatgggcggacgcacggggaggggagcggggacctgcagcggccgc

SEQ ID NO: 154377 - DNA, 499 bp, Homo Sapiens
gagtttatatcctttaatattttctcactttagaagtgcagtcttggaatgatataaactctgtaaacagactatcatgctacatttacagagaattatatcaaggtgtctatttttaagacaagaataaaaattatgtttttttctaataatagaaatggataagcagaattctggcttctaataatgagaacatactatcccctagtttgaaataagttagataatttaactttctcatgttatcttgaagttaatacatcatttgtattgaatgtatcagtgcactacatgaagtcgtacattggataccatcccttttatcttccacataaagtgatttagtgttttaatacacttctttccatatcctgcagttttgcatagcaaaagcagcatgcactttgaggaaaatgtaccttttaattttctgtattttaaatattatgggtacaaaatatttgtatataattatggagtacatgtgaaggttccatac

SEQ ID NO: 154378 - DNA, 875 bp, Homo Sapiens
ctacactatgttacagaacagcttataaaactaggtatgaacattaactgtgagtgtaaacagtaggactaccacttgtcaaaagttttaaacacttgaactggaactggtactggttattcatcattttcattgttttctatttcatcccccccatcaagtgagtctagctcttcaccctgtgctatttcgtcttctaagagggaggactctgcagtcttatccaggctctcctcggcatcgctgccttcaagggtctctccatctttaaagggtcctccctcatccttgtcagcagccttttcttcgctggagcccacggcattctgaagtcctgccaatgctgggaacccaggcagcgtcaatccccccagtcctggaggtagaaacatggatgggtagaagaggcccggggccattgtggacaggaggaaagggttgaaggctagcgggtttgagggcaatccagccggggcagtagcagcaccaacagatccattcgcagagtcagcagccgaaacagcatctgtgcttttctcagagtctttgttctcgtcttcattctcatttcctttctcctctccttttgaagtgctgtcttccggttctccttgactagaagcagaagtggtgtttccagtagcagctgacagagggttattcaacagcccgcccaagccaaacacgttgggcaggcccgccattcctggcagcatcaggggcagcacagcagcagggttcttcgcatcgcctccggcggtggcagctgttgccagtcctggagggaagcccatgaggcctgccagctggagcgactggagattctggagattctgaaggctcgtcaggtccattccagcaaacaggctgttcac

SEQ ID NO: 154379 - DNA, 1057 bp, Homo Sapiens
  misc_feature (857)..(865): n is a, c, g, or t
  misc_feature (980)..(1011): n is a, c, g, or t
ttttttagctatgaatggaatttattgcattttgaatacaaagacagcataacctgctggttttagatgcatcaaatcaatcctaattattaaacatttatagttagtgtcagcgtcaatgattctacatagtcactgctctttaaaatggatgtatagacgaaattaccaatacaaagaagtcagctggaaagttaaaggaaaatgggttcacctttgatttgaaaaaaagtctggttccaaaactaggagggaatgcattaatatggaagcattttagaaggtttaaaaaaatgtacagaaatactgcaagataacatgtatgatgataggtaagtagacttctctcatgtttaaataatttagcatcagtaatggtgtggaaattaatctcacatgacttctcataatactagaaatatggaaaacaatgaaatatttcaatcatttaataaaaatcaaacccataaagtcgtctcaatactcttgtccattcacacacttaaataacaaccagtcacaaaatgaatcctgaaactaagaggcaacactactgaaaaagtatcactttgttccactgtctaatgggtaacaattttcaaaaggtaaagagcaatacagtgagttcttttcaatgttttgctttggaaagccaaatatcaagacgttttatttgttgatatctttaggttacaagatgtgaagaattccctgatctctatggcactaaaatttcaattattgaatgtaatatcgaaatacagcattcagaattaatgaaagagtattttgttatgcttaagaaaaaaagaagcacatacagaaatttaaggaataattatataaatatacatacnnnnnnnnngcacaaatcctcaagcttgtaaaataagcatatattcttataagatagcaactaaatttgagaaaaagagcaagcattatattttgtcataatttataaagggaaaagtggagtnnnnnnnnnnnnnnnnnnnnnnnnnnnnnnnnaggttattcaatacaattctaagtatttcacagttgtttattttat

SEQ ID NO: 154380 - DNA, 440 bp, Homo Sapiens
ggccgccaaatttagtttatgatctaattttttctgtctcaggtcagctattgtgaggctttgtcccattttgatacttacttttcattactctcaatattcatatacttaatttaacttttcagttttcctcattctgtcagaagactgaagacacgggtaaattactaagttgctttgtccactaagtgtttttcaaagagaatcagattttgagtctcggcctgttgttgctcatgtatggctgtcctttcaggatacaggcacttccggttctgctactgccgcccaaccagctgataacctcctgggagacatagacgacctggaggactttgtgtatagtcctgcccctcaaggtgtcacagtaagatgtcggataatccgggataaaaggggaatggatcggggtctcttccccacctactatatgtacttgg

SEQ ID NO: 154381 - DNA, 285 bp, Homo Sapiens
gggtacagtcaaaataaatggaaacttgaaaggtactagtattggaaactaatttcaccacccggggctggaaggagttaggctgcgcacgcgcgcacgcacacaccagcgacctccaagcaggtgtagcccagcccgggccgtggatcgcagccgccttctgcgtgattttctcagaacctgtgcacccgcatgcatggggacatcgggtcgagatatttgtcttcgcctgggaagagcaaagcgccatcacagtgcgcccccgacgccggccttggcgcacgc

SEQ ID NO: 154382 - DNA, 416 bp, Homo Sapiens
taggccccagttgtctcgatgtaggtagaggcaccaccctccccgaggatgcgtgtggtgtggactatccccatgagctgaccactacttgatttttctttggtggccgtaacaacctttaatttgtgggcatctgcaacagttcaaaacccaccatcagataaaacataatccacaaaatctcacgctagaggcaattacctacttttagacccttttccctctttcattcctatctttttcctcctaatcgctgctctctgttttaatttcatctggagacttaccagggatttctttggctttggcttttcctctgcccattttttccatgggttaacaatgggggatcctaaaagttaaacagattgggaaaaaccttgttaagtggccttatcattattatcatgttaaag

SEQ ID NO: 154383 - DNA, 548 bp, Homo Sapiens
  misc_feature (455)..(455): n is a, c, g, or t
agtattttttccagtgctttcaactatcaatgtgtagtgatcctcaacttctctataaagaatagctgtatttcctcctttggtccttattcttagaaagcaaaagtctccgagaatgtactcttcagctttgaacaggttttcactgtctccggaaacaattttgtaccttacttcccacgctggatgtgtaatgtaaacacccatcttgacaggatgccccacataagtcttagctgcagagttctcctgcacggtgacgttgtactcgaggtgtgtaaactgcagaggagtctgttcaagtcgttggctgccatcactgtctccaaaatgttggaagagaaggagcagaagcaggagcaaagccaaatgtctccccattgcttaactgtcgggaatcagtctagccgagtcctcggccctgggctctaaagtcctcggcagctccgtgatcncctcgcggtgtagatatgtgttaagagccgggtttgaagtaccaactttgcctccccgggatcttcagcatgtccctaaccagagtgccaacg

SEQ ID NO: 154384 - DNA, 450 bp, Homo Sapiens
taaaggagcaaaaataaatcacatttatttatacatttaacaagttgcttttagtatttatattatcactagacattgcactgtgtaggaatcccatgtaatcctggcaaaatgcctgggagtcaggtatcatccacattttacagagaagaacactgaggctcagggaaatggacaacattctccatggccccaggctggtaagaaggagagctggaattcaaatccagactaggtctgtctgactccaaaatctgtatttgtttcaataaaaggagtgttgtatagtaaaaagagcaaaattatgaaactgtaaagatcccagaatatcttggaaatataattgtcatcattatatgtgttacacattatgatagtaacttccatttattgcatgcttagcagtgccaggcattgggccaaatgctttacatagttcatctgtaccgc

SEQ ID NO: 154385 - DNA, 714 bp, Homo Sapiens
ctaatccctctttagttgctatttctaggtcttctttctatccaacctttaaatcttgacgctcctgaaattttatcctagactttattttgtttccatggatcattcattcatgcttgtgccatcaatgagcagtttgatgacattgactccaaaattcctacctcccacacacatgtctctcctgagacccattgcccactgggcatctgcagtgggatatctctaacatactcaggctcaaggcatcaaaagtgaacatcttatcttcccctcctgctctgcctccccatccatttcccaaatctgttctgtctcagtgctctttttcgtagtaaatatcaccaccattccacccatctgccccagacagaaagagacagcatccttaacaccttcatttccctaatctgttacatgttttctatcaccaagtcctatctcctaatatttcttgcttttgtcctgtccttatttatcctactgcccctgtccttgtccaagcgacctacatcttcccctggaccactgtagtgtcctctcagctgttccctaggctgccacttgtaacccatcacctttcccaaactgcctcccctgtccctttcactggcttatcacatgttacctgaactctacacttcagtctctcccacctgaaaagggctgaaaatattgccacctccctatttgctatgggggttgtgtttttaa

SEQ ID NO: 154386 - DNA, 472 bp, Homo Sapiens
taaatttctcttcctcagacttccctttgtatagagcctcaaggtcagccagaggtgagagtttagggctttttcaggtctctcctgagtatatatccatagtcctccgtgtgtatatgacctgtattcccaaaaatgttttgggcttttcaaagcgcctgtggacatctcattcccttgctcttcctttttagctttttgtttagtctattgtttgtggcaactgttatccatcacctcaggcagctggcactgggcaagccctgagccaatgtggtaggagtcttctaggcagccatcagacacgttcaataacggaggttctgtgcgaatgagggcattttgctcccacagtaactaggaatgtaggttcttatttccaagattaccactgagctggagggcagggttgaaccagggaaagctacaacccacaaaggccactgttcttactgatagtcacctgtttaat

SEQ ID NO: 154387 - DNA, 563 bp, Homo Sapiens
  misc_feature (119)..(210): n is a, c, g, or t
gttttgtcatccagaccccatcaaatagccaaaaggagatgatgaggcagtatggatgcagctcctcgtaccgggtcagtagagatggcatcaatgtcctcatcacagcgatggcgagnnnnnnnnnnnnnnnnnnnnnnnnnnnnnnnnnnnnnnnnnnnnnnnnnnnnnnnnnnnnnnnnnnnnnnnnnnnnnnnnnnnnnnnnnnnntctcttgactctggcttgaaggctatcttttgtcctccctctatttctactgaacttggtttcagcaggaagcagattgagcagcccagagccagagggcaagtgacaagctgacttggctttccttgaagagcatccataaccccaccttcctccagctctggcagaggacagagctcagcaaagccagtttcccagccattccccccagccttgctaggcatcagccaagcaaaacatcaccaggggatttaagaaacactgtgcattgggcattaagagattggccattgctgccttctagtgtccctgtaaaaaaggtcagtcactccaaggcttgaagttcatggacc

SEQ ID NO: 154388 - DNA, 315 bp, Homo Sapiens
  misc_feature (190)..(210): n is a, c, g, or t
gcacgaggatttccaagattaaaatattttgtcattgaattaagacagcataaatccaaaagttaccattaaaatagaggtaactgctgtttccatttgttctgtagtgaaagaagagttaagaactactgtattttaagtcagtgggtgaaaactttggaagataatttgaaataacctgttactaacnnnnnnnnnnnnnnnnnnnnncttgaagatattaaagactgatgagcataaaaagaaataatgaaataggtacagatgctgaaactcaatactgatgaaatttgagtgaagaaatacacagttttt

SEQ ID NO: 154389 - DNA, 578 bp, Homo Sapiens
tgtagatgcgggctgcggacagctgtcagctgttctagtccaggagtctccccatcccttttggatttccttaaccctgcctaactcagtcacaagcccctccatctgtgtctcttcatttgagccacctggggggaattctgtttcctgtggggacctcgaatgatactggggtggacccattctttattgaggacctacgctggcagccatctgcctaaaggcacacactgggaggaaggagtccagacctcccagggtagcacacatccctctgggagggtccaccattcacccggcttgctttcctggccactgacacccctccccaggccccaccgcaagtctttgtacaccaccttagtggagtctcgtgtgtggccctgtgaggcagggtctggctaggccctctaagggatgtggaaacggaggcccagggaggctggggctcttccctagggtcacccaactttgcacagcagagtccagttccaaatgtggggctagctggctccagtgctgagcaacttcctctgtgctgtgtgggaggttcgtcttgctcatgtagctcacgtaga

SEQ ID NO: 154390 - DNA, 526 bp, Homo Sapiens
  misc_feature (18)..(18): n is a, c, g, or t
  misc_feature (29)..(29): n is a, c, g, or t
cattctgatgttggaganagctagtggcncagtgatagcccactgctgctgcctcaggtctttggaagaaatcaacttatgtttaaagcagcagctactgaactggaattgagaacaaaagagcagttattgaaaaagtaatattacaatcttttaaaatagggaatatacttgtgtgctaatgggagaagtcattagtaaatatttaactagcccaaatagctcacttaatataattccacaaaaaaatgaattactttattgtagaagcctgtaaggctaaattataggtagtgttacaagtttccgttagctagtcaaaaactggcattaattttacatttcctaagaatgagaactttcaagtcataaaaatacgaaactcctagagcctgtaaaataatccacttaatacaactgatgacgtgctaaatattaaactactaggttctgaatgtaaaccattatcttcctgcttttaaaaaaactaacccaagttttgctgcacttaagcattaagtcttct

SEQ ID NO: 154391 - DNA, 514 bp, Homo Sapiens
  misc_feature (43)..(43): n is a, c, g, or t
  misc_feature (68)..(123): n is a, c, g, or t
agacacagggtcttgctatgttgcccagacaggtcttgaactnctggagtcaagcaactcctggcgtnnnnnnnnnnnnnnnnnnnnnnnnnnnnnnnnnnnnnnnnnnnnnnnnnnnnnnnntgggtttgaatcccagccctgccattgacaagctgtatgacgttgaggaaggcaattttctttttgagcctcagttttttcatctctacaatggcaacaggagcctgccccttcaggactgtgagaatcaaatggagtgggactattaaggtacttgtgggaggagctccttttgggatgagctaggaggcttgggaggggaagaggagtcagctggagctggttccaacaaactcccgcaccatggtcttggagggccaattgcttctcatcatctcttcggagtatcacttaatgctgttcttcaggagtttccacaggctgtgagaagacagccttgttgtactagaagtgtgggccctcctagggtgtcctcagagctatattttat

SEQ ID NO: 154392 - DNA, 364 bp, Homo Sapiens
gagaagggaaggactgtttattttaggtatgcactagctcagtggatttgcatttaaaaagcttagcattgaataaagacagaatggggtttttataagcagacttcacaaaagtaaaacaaaagcagttaatcatatagtgcataacttgtggcttgtagctgtgtcaaaagaaaaacaaggactggctaaatccagacatttgtaaacacagttatgcttaggaagccagggaaaggagtaacagtaaaggaatttctctttcttttttccttcaaccttgctctaaaaggcgggtgtgtggagcccatttctttagccttggcttcttaaacagcgttatcttataactccttaaagtgag

SEQ ID NO: 154393 - DNA, 456 bp, Homo Sapiens
tctgtgagtttttgtttatccaaagagttgtgcaagcatcaccacaatcatgaaaacattttcgtcactccccagagagacccctgtacccctgagctgtcacccccgactcctctccagcattaatcgccaccaagccgctctctgtctctatggatttgcctctcccggacacttcctataaatggaatcacggtatttgtccattggtgtccggcttctctcactcggcactgtgtctttgaggttcagctgcgtagtgccatgcctcagcactcgtcatttttactgctgaacagtgttccactgtgtagatggagatgctgtgtttatccatcaggcaatggacacttgggttgctctcaccttcgggctgttgtgaagaatgctgctgtaaacacttgtggacagtttttgtgtagacacgctttcattgcttttgggcaaatacctagg

SEQ ID NO: 154394 - DNA, 449 bp, Homo Sapiens
atagatatatatataaaagggagtttattaaggagaattgactcacacaatcacaaggttaagtcccataataggccgtctgcaagctgaggagcaaggaagtcaatctaaatcccaaaacctcaaaagtaaggaagccaacagtgcagccttcagtctgtggtcaaaggtccaagaatcccaaagctgaaggacttggagtccgatgtttgaggacaggaaacatccagcatgggagaaagatgtagaccagaagacaaagtcagtctagtctttccacgttcttctgccttttatcctggctgtgctgatagctgattagatggtgcccacccagattgagggtgagtatggctctcccagcccaccgactcaaatgttaatctcctttggcaacaccctcacagacacacccaggaacaataatttgcatccttcaattcaatcaa

SEQ ID NO: 154395 - DNA, 584 bp, Homo Sapiens
tttgcttatatccattattttatttgattctcacaataatcctgtctttgttttataaacgagaaggcacatgcatggagagtgtctgacttgctgaagtcatccagcaagaggaaggctgaagccaagttggggttgtcaggcagggtcgtcatgcgggaccagttgtgaaagccctgaaagcaggtcacaggggctccattttattgggtcagcagcccagatacgcaaagggccaggcttctgttcgtcatctcaatcagtcattagatgcattttctcccggggaaagaaaaaaatcccccagcgtgatccagctgtgagctgttagctcacaacccttcctctgggacatgtgggtgctgcatcactgcttccattgcagataacctgctctgggaagttctgcaaatggggctgctgctgacaccacacaggtctttggtgggaggtggagctgaaggcattgtcaggaccggagcctctgcaggtatcctgttcccctaacagcaggcagcttccttgatgtaggctgcatcctgaggtgccattatcaggaagtggcaggaccatggttcaaactc

SEQ ID NO: 154396 - DNA, 642 bp, Homo Sapiens
aagggaacacgctatgggatagagactagagaaagcagtgggacaaactgctgaccagcaaaaaagccgtataaactttcttttctgtgttgaatcttcagtcacaactagcaatcaccgtatcccagctttgttcttactcctaaacatttctatcccagaagcaactcttgtgctgtcatctctctggtgagaagtgctaaaaatgaaacaagacaagacccctgggccccaaggacctggattcctggccgagggaaagtgggccagcaccacagccctggtcccccagcaagaagcaaaggggctcttgggccaccgtggcgtctgtgctgcctccacctagcactccagcgggcacagccctgagggtgccgccctgggccagcctggatcccggggtcccactcaacgccagtgcgaaggagttcccttgggatgttctggttccaaagacaggtcagtcggtccggtgaggggggtggcgagggccacaacaggccctgccggaccacgctctgctgctcccttggactcagcagctgtttttcgtggaatggaaggattaaatagccattaagaaaaatagtaatccaaatgcctagtgtctgcggttaacactgctgttgtacccaagaatta

SEQ ID NO: 154397 - DNA, 1001 bp, Homo Sapiens
gctgctattttttttgttcttgatctttgtggatttaatctatgaaaaccttcaggtccaccctctcccctttctgctcactccaagaaacttcttatgctttgtactagagtgcgtgactttcttcctcttttcccggtaatggatacttctatcacataatttgccatgaactgttggatgcctttttataaatacatcccccatccctgctcccacctgcccctttagttgttttctaacccgtaggctctctgggcacgaggcagaaagcaggccgggcacccatcctgagagggccgcgctcctctccccagcctgccctcacagcattggagcctgttacagtgcaagacatgatacaaactcaggtcagaaaaacaaaggttaaatatttcacacgtctttgttcagtgtttccactcaccgtggttgagaagcctcaccctctctttcccttgcctttgcttaggttgtgacacacatatatatatatttttttaattcttgggtacaacagcagtgttaaccgcagacactaggcatttggattactatttttcttaatggctatttaatccttccatcccacgaaaaacagctgctgagtccaagggagcagcagagcgtggtccggcagggcctgttgtggccctcgccacccccctcaccggaccgactgacctgtctttggaaccagaacatcccaagggaactccttcgcactggcgttgagtgggaccccgggatccaggaatccaggtccttggggcccaggggtcttgtcttgtttcatttttagcacttctcaccagagagatgacagcacaagagttgcttctgggatagaaatgtttaggagtaagaacaaagctgggatacggtgattgctagttgtgactgaagattcaacacagaaaagaaagtttatacggcttttttgctggtcagcagttagtccccccgctttctctagtctctatcccatagcaagttccctt

SEQ ID NO: 154398 - DNA, 335 bp, Homo Sapiens
catggcctgcccggttagtacacatgctgtacctcccctgcttcggttcatttcaacctcttttcctccaaaaccttccagccatgtccagtaaacaatttagagcaggtccttgatgtgcctggcatctaagtcccaccctgaaggagctcatgccaggcaggggagagagacagacatgtgttcaacagcgacaaacagtgcagtgaatatgtaggagcctgggcaatagggtcagagggactatggctttgctgtgagatcctggacaagccatgtaacttctgagcctcagctcctcatccatgccacctcacagggttagcgtgaggatt

SEQ ID NO: 154399 - DNA, 577 bp, Homo Sapiens
  misc_feature (504)..(504): n is a, c, g, or t
acaaagtcttaatacgaactgtttaattgttataacaagatttgagaggcaggggtaggtaagtaagtcaccaactggcgataagtcaccaactgttaatatgtgtctgcaagtttcttgtttttcacaatcactagatttacatacaattataggttatggttctccatgtacacatacagtgaaagacattttccaaataccttttgatgtagaatggaacctgagacaaaaaaatcacttaagaaatcaaatctcatataatggaaatactttaaccacagcattcacacatttgactgtggattccaaatgcttatctaaacagaggcaacgcaattaaactgccttcactcaaaatggtgtcagaaggcaactaccctatttactagccactgataagttatgacaacactatttcatagcctgtcactatatttcttttaaccccccagcagtaggatttaggatttcctcaacactaagggcttatctcaaatgctntagtgcacgaacagtaaaaaatcagagttgcaatgccacattgagaaactagataatgacttggaaataaagt

SEQ ID NO: 154400 - DNA, 661 bp, Homo Sapiens
gttaccattctgatgttggactaagaaacggtggtgaataaatcaaaataaatcaaattgtgatagtagagtagaaagtttagtaatttagtgcctttattccaattcattatacatgaacctatggttaacaacttttggaatccctccccatttggtttatctggaaaacaggaaaatcgccaactctgctatcacttttttggtcctttttggagcaaaataaagacagtcatgtaacacgtaacattttggtcaacaatcaaatgtgcatatatggtaagcctgaaagattataccactatatttttactgtaccttttctatatttagatatgtttagatacacaaatacttgccattgtgttaacattgtactcagtacagtaacacgctgtacaggtctgtgtattttctatgatgctcacatgcaatcacccaaactgcatttctcagaactctgtcattaagcaacacatgactgcacatcagctcaattttccttctttgtaatgggttataccatatgtactatttttacactaaaaacgagaagatacagaagaaaaataaacacaattttaacagccattttaactgaagtggcatttttgcatgttttcatcatttgctgtgtatctttaaatagcacaatacctta

SEQ ID NO: 154401 - DNA, 827 bp, Homo Sapiens
gtgttgagtaaactgcttttatttagaactgcctctccttttcacaagcagctgtcccaacaattgttctaccctagattctgcaatgagggctggaaccactgaggaaggtgagaagtgacagacaagtgaactattgttttgagtcctccttgttcgatgactatgaggagggaaggaggatagtttcctcttctcctacacttgaagctcctgtcagccccctttctcacatgtcctccaaaggcctctgggatgtgcaggtaggtggctacatttggttttttttcatagacacactgataagactattgttttgtatttccaaaaagtcagtacctcttaaaagaagatgacagacactcccgtatctgatatacatagcattcctggatatattactgcatttattagtgacatcgatgacattcaggtacacctaggagctgcgcagggaagtggctcatgttcctccctcatgtcccttttggacatctggggtccatgctccccttgaacactcaactggatgtgtctattctaggaaggggcaaccatcctttctgggtccaaagctcagccatacgccaagaggaaaagatttgatcagactcactcctcactgtaagctgatacagtatatctctctttagctgatctgaaacccagttgagacatgtctaatgatgatgatgatgacgaacttttccctttgtatcttaattttcttccccttcctctctgccttcatcccttgttccactctgtttccagtagaattatccagaagaaatttgttctcctctttagatagatccttcgaaccc

SEQ ID NO: 154402 - DNA, 421 bp, Homo Sapiens
gggtagatagctagaagtgatagtgctaggtcatatggtaaatatatcttcaacattttaagatactgccaaactggtttccaacgtgactgcatgtcccatcaacaatgcgtgagtgttttagtttttccacgtcattatttcacttcccccaggtgttactgtccttttttattatagcattctagtgggtaagaagtggtgtctcactgtagttttgatttgcatgtccctgctgactgatgatgctgaccatcttttcatgtattttattgtctattcctacacctttttgatgaaatggttattcaaatattttgcctattttaaaattgggttatttatctttttgttgcgtagttgtaagtgtatttcatattctggatatgagtcctgtattaaatatatgatttgaattttt

SEQ ID NO: 154403 - DNA, 534 bp, Homo Sapiens
  misc_feature (195)..(195): n is a, c, g, or t
gcgccgccgccgcacgggctgaccagcgccaagttcgagggtttgtgcttcttgagcagccgcgtgatcttctcgtcgtccgagttggggtccaggggccggttgtattcgtcgtcgtcctccgcgtccgagccgcccaccttcagcttctcggcgtccgagtcctgcttcttcttggccgacgccatctccgcncgcgtgccgcttgcgccacttggtccggcggttctggaaccagaccttcacctggctctcggtcatgcccagcgagtaggcgagacgcgcgcgctccgggcccgccaggtacttggtctgctcgaaggttttctccagcgcgaagatctgctggcccgagaaggtcgggcgcgagtgcttcttcttcccgtccttgtccaggacgccgccggccggggccgggccagccagacgcgggtccctccagggcgcgccctgcaccacgccgggccagaagatgggcgggcgccccggcagctcggccaggggcttggggtagccgcgcgccacagcggccgc

SEQ ID NO: 154404 - DNA, 448 bp, Homo Sapiens
  misc_feature (279)..(310): n is a, c, g, or t
  misc_feature (377)..(401): n is a, c, g, or t
ttagtgctttgtttatatcaccccactccctctggcatgcaaggtttctgctgagaaatctgctgattatcttacagagttggttccctcataagtgattagtctcttttgctgctttcaggattttttcattgtgatgtgacagtttgattacagtatgtcttggtgtaattcttttttattttatcctagttgaagttctttgagcttcttgaatttgtatgtccatttatttcctcaaatttgggaagtttttggttattatttcttcaaacagannnnnnnnnnnnnnnnnnnnnnnnnnnnnnnnggaattactataatgtgtatattggttggcttgatggtgtcctataagacccttagtctctcctcannnnnnnnnnnnnnnnnnnnnnnnnactccctaacttaataatttcaaatgagctgtcttcaagtttactga

SEQ ID NO: 154405 - DNA, 592 bp, Homo Sapiens
ttttttaaatttaatgttttatttgggaagaagaattgcagttcagcgtgtacatgaagaacaaagggaaggttaaagattttacaaaaaggagaaatatttctgttcctcttttcagagagttcatgggccctaggaagggttgggagccggcaggttccattgatgagccactgtgataggcatcgtgggtcccagagttgcagcagtttatctcagaagctgtaggtaaagctggtttcagggtacagtgagcagtttcagccatcaggcttgtggaagcgacgttttgcaaactgagcggtttcccctcctggctcctggcctcctgcaacttggtgaccggagatgggtagttttcacgctgtcccttgcaaggctgacatggcacatctctcttgtacacagtcttctcaacagtgttcaaattccttagaagacatgatgtgcacgcgtgcctctgtgtcctgcagtctgcgaagcccgtgctggaatcccgggtcacagtcgtggtagaggcgggcaatgaagatgctcagcttcactttgttgtactcggccactttcaccacatggtccgggctgggctccg

SEQ ID NO: 154406 - DNA, 511 bp, Homo Sapiens
  misc_feature (145)..(153): n is a, c, g, or t
caagatataacataacccaggaaacagacccagctgaggttattctcagtggattacagtatacttttgtgtgtgtaaaagcacaaagtgtatgtgtactcacttctggccatataacatttacacagggaaatggatcattgannnnnnnnnaatcaacgtgaatgaagaatgtttgtttatatatcactataaaatccagttgacctggacagtattatatgtacatatctattctaattaaatttaacaatcaaaggattggattacttttttcccccttgtaaagaggttcgagaatgtggtcaattgtatagatagcgtgttaaagccaaaacccagctctgagggccttacccattacttggatatttgctacgatccatctccctttgtgagtcaaatgttaagagaagaaacttgtatttgcagctagaggttactgtcacatcatagatttaacatttaccatcttcaaagtacaaatcttacatgtccttcaaaaggaggt

SEQ ID NO: 154407 - DNA, 898 bp, Homo Sapiens
gcaggggggtggtagttggacatcaaggactttatagccagcctgactctcctgtctcttctagcctctcgtctctcccggtcccgtgactcccagtgagacacatcaatgaaattcagactcgaatctctgtccagctcccagttcttacagaatcagatttggtcttgggagaatgatcgcagcaagggggctttagaatagttccttctcttcattctctgagagctttaaactcaaccttgagttagaaaatcacccctggccccttcctgggtggcagaatcactgctgtcaccagcatcattgcttcagcccatggctggagctgagtggcccagacctcagagggacgctgccctacaggagggcaggctggctgcctaaaaataggaggagactgggtttttggggagggcagcttaagcttgtttttctattatttatataattataaatagtgaccaattaccggaacttgcagggggcagatggaatgttgtccctggatgggcttcaaactctgcattgttgtccaagaaacaaagttaccaaccagaaagaggtggcaagggccccaaatctgttttcacttcaccatcactttacatcgagcctggtaggggaggctgggcaggggccggggggtgggagctgttgaagaagtcaggaataatcagcatttggaagactctgctaggacctcttctcaggtagaaatgcaacagccctgggtagagatgcttttatttattcatcatttgtgatttggagagaggcatcctacaccattagagaggactgtgtggtaggcagaatgtggcccccaaagacgcccacgtcctaatccctggaatgggtgaatatgttaggttacatggcaagagggaattaaagg

SEQ ID NO: 154408 - DNA, 296 bp, Homo Sapiens
  misc_feature (125)..(242): n is a, c, g, or t
ttctacaaaaataagacatttcatttattaaaattttatagagaagcatacaagactacaacaaatcactgaagtcaaggtctaaagtctttgagaagtcagatggaccggacgcagtggctcannnnnnnnnnnnnnnnnnnnnnnnnnnnnnnnnnnnnnnnnnnnnnnnnnnnnnnnnnnnnnnnnnnnnnnnnnnnnnnnnnnnnnnnnnnnnnnnnnnnnnnnnnnnnnnnnnnnnntggtggagcatctgtggtcccagctacaccagaggctgaggtgggaggattgct

SEQ ID NO: 154409 - DNA, 486 bp, Homo Sapiens
gccctttccacctccgcctccatataccctaaggttaacacctggtgcaacagggatcctctagtattctggcatccactataatgccagaatggttggtgcctgtagcataacagttgttacatgtatcaaacctctcccctgttaataacagaagatagtagcagaagctttgagcttggagttatagaggctacattacaacagctactatctgcataaatcactggacccttctaaaattccaacttcctccttttaaatgaagttcttactagctacctagtaggactgtttgtggattacatgcaatgacatgaaagtgctgattagcacacagtaggcatatcattcactttgccttactagaaaaatagtaaacactacatgaaaaaattagtaaaagatgtagtattttacaaacaagttgtgtttcaaacactcatttttgaagtcagtagtctggtaattagaatgcattttccc

SEQ ID NO: 154410 - DNA, 413 bp, Homo Sapiens
gtctcctcctttttgccgaagtttatgaagtcacttttgtcaatttggctgttagtaggctcctgccggatggagatgattgcaggagatcctgggataatgaatttgtcgggcaactcaccgggaccggattgtttggggttgcctggtccgtatttaaaggtccagctgttgctgttgacacccgcaccgactggaggggacacttctcctgcctctggttctggtgttgcactggatactgttggccactgctgatcaggccctcctggaccagcccgtagaatgccagcctcctctaggtgcacagagctgtgcatgcctgctctcagggaggcagagtaacgccagtcagggttgggctgtcgtggcttcctagagtggtcccctccaatagactgatcttccccgtc

SEQ ID NO: 154411 - DNA, 166 bp, Homo Sapiens
attagccatacccaaagtagtttacttttaagatgtccatcttccacagaatctccaaggaagtagcttgcagtagcctcatccccacggaaatgatgcagtgattttatgcacaagggtaggagcaaaatgtgaagtaatggtctacgaaactaatctcatctac

SEQ ID NO: 154412 - DNA, 410 bp, Homo Sapiens
ttttgtagggaaagaagttttattttcaagcttttaagagaatattacaaacaacagagagttttaaaaaaccctaaaaactagtttaaaaaagtacttgacagtgtccttttaatacccatggatgacgcgaccactgtgcagtgacaaccagaaactttgcaggtgaacacccagtggccttccctggcagggtccccagagcgagcaggaggggtccaggggtagtgctccctgccaggcacccttgggcccacctggctacgcgggaaggagcagggagcacaaagcactgagcatcagcctgactgcctctttggggagggttccaaacagggagggttccaagcagcaaggaatacttagattgggctctactccactccttggggcacactggtcaagctcct

SEQ ID NO: 154413 - DNA, 732 bp, Homo Sapiens
  misc_feature (415)..(469): n is a, c, g, or t
gtacaggtcggtttatttacaaatatactgatgtctcatctttttttgttggttgtttccattttctgctgttgtgggaagaggtggaaggtgagagtggagggcagggtgggggtggtggtgtggtaaacgctaataaataatttaacaatgacaagttattaaataaaatgtgtctggggatggcgggtgggtagtgagaatctgtctgtacaaggaaaacaggaatggccggtggcccatccccacacctggctgggctgggctcccatgggacccccaggtggggtcgggggaaccagcaaagaggctcattggcaatggtgccttccaagggccaaatgttggaggggtctttcctgctcccccagtccccaggccacatgtgcctgtgagtatgggtccgcaagcctcnnnnnnnnnnnnnnnnnnnnnnnnnnnnnnnnnnnnnnnnnnnnnnnnnnnnnnnccctttccccccagggcagacttagccccagagctgcaggctctccctcaccctaggtggtgcccagagctcaaggatggagccaggcaggcatcaggcaatcctccttcctgaggttccctgcgtgcaacatgaaaaggacattcagatgggggcagagtggggaatcagcctcttgctaggaggctgcagggcttcccaaaggagaagaggcttgtccctgccaggccctgctcatctgatgcagcgccagggccttccca

SEQ ID NO: 154414 - DNA, 560 bp, Homo Sapiens
  misc_feature (524)..(524): n is a, c, g, or t
gaaatttatttatttatttattttacaactctgtaggtcataagttcagcatgaatttcaccagtctaaaatcaaagtgtcagcaaggctaggttcctttctggaggctcgagggaaaatctatttccttgtacattgatcattggtagaatgtagttccttgagtctgtaagactgaaatctctgtttccttggtggctgtcagctgagggttctttccagcttcagaagccactcacatgccctagtttaagaaccccttcctcaatcatcaaagtcagcaactcttctgctttcctcttccactttcaaggactcgtgattacattgggcctacttgaataatccaggataatcccctcctctcaaggttcttaaccttaattacacctgcaaagtctcttttgccatgtaaggtaacatatttacagattctagggattatagcatggacatctttgggggaggggaggattatttggcctaccacacaatgcctgcacctcctctgttattgcctgaanatgtagccagtggcagaatagggagccagataggct

SEQ ID NO: 154415 - DNA, 544 bp, Homo Sapiens
cgaatgcttgctttatttaatgagcgctttaaaattattgataaacattttgtggaatcaacagtacctattaccaggtacactggctactttttacaaataaattccatcacttaatattttaagttttacacttaaaaataaaccagtgtgatttgaaaatttctgtattttcttaaaataatattggagacattcgttcaagatggtggatggagcacatgaatttgtctttttccccttccaaaacctcactaaaatgaaatgccaaaggaaatgaaccaataacagttaaaagaatggaagagcagcccagagcattcaagtgacttaaatgcacttctagaaagtggaaactgatggaaatgtgttgccaaagggaacagagtggggaaatggaagattagaggaagtgtgtttaaggttttgacacagaatccagaaggagacaagtgaccaggccgaaccccagaaagacagaaccagatatggggttggaaagagagattaaaactgtatagtaagccacccttcccaccaagcc

SEQ ID NO: 154416 - DNA, 254 bp, Homo Sapiens
ttttttttgtcttccaacttccccactttatttccaagaaaccagacccagggcatgaagggatttgcctcaagtcacacaaatgtcacacttggggctagaatcctggtctgagttccagcccagcattcaatctcttctttcagacccattctgcatcttgcttttcttagcatagaaagtttggttgatagtgtaaacaaaatggataccactgaagatgcagagtggcacagagctcctgcctgcccacg

SEQ ID NO: 154417 - DNA, 629 bp, Homo Sapiens
  misc_feature (15)..(15): n is a, c, g, or t
  misc_feature (40)..(40): n is a, c, g, or t
  misc_feature (185)..(185): n is a, c, g, or t
atggtaagtttattntgtgttcgttaaggtgggtgaaagntatggttctgtagacttgacaatgatgggtatttttaaatgtttctgcaaatatttagaacaatattttataagattaaaaaaaagaagaagaagaaatattttgaggtatctatatggatcatataaaggaaactcaataaacntataaagttacaactgagttgactagttatttgcagtgtgagtactaagtctcataaaataatggcttttttacaaaggcaaaagtatctacactctaaatgatattcttatcaaggcacagagagttaaatgtctaaatccctgatgtgttgaccccccaaaacggagaactacactcgtaaacaacaccaggaactaattccctattcttgaatttaaaaacaatagaaggtagaaatgtgcctttttaactcacagtaaaatcaaaaacatagacattccaccaccttcccttggtgactaacattacgactgctaaaaatatatttttaaatgtcactggtggtttaataaacatgaccaaagtgaagtctgttgaacttgaattcacagagcaataccgcactaaatattttagcactttcggcactacaccactttta

SEQ ID NO: 154418 - DNA, 698 bp, Homo Sapiens
aacgggtgatgcggttgccctagagggagaggcggcggcgtcggccgaggaggaggagggggaagcggcggcggcaaaggaaaatgcttggacagaagagatgagtactatttccactaaggcctagaattgcctactgtacaaatagtcctgatcaggcaatatacgaatggcccaaggaagccaccaaattgattttcaggttttacatgacctgcgacaaaaattccctgaagtacctgaagttgttgtatccaggtgcatgttacagaataataataacctggatgcctgctgtgctgttctctctcaggagagtacaagatatctttatggtgaaggagacttgaatttttcagatgattctggaatttctggtctacgcaatcacatgacttctctcaacttggacttgcaatcacagaacatttaccaccatggaagagaaggaagtaggatgaatggaagtaggactctaacgcacagcattagtgatggacaacttcaaggtggccagtccaatagtgaactatttcagcaggagccacagacagcaccagctcaagttcctcaaggctttaatgtttttggaatgtccagttcctctggtgcttcaaattcagcaccacatcttggatttcacttaggcagcaaaggaacatctagcctttctcaacaaactcccagatttaatccca

SEQ ID NO: 154419 - DNA, 609 bp, Homo Sapiens
  misc_feature (145)..(169): n is a, c, g, or t
  misc_feature (183)..(243): n is a, c, g, or t
gaaggtagataggtttaatggccaattagacacacctgatgacaggattagtgaaaatggaaaaatcagaggtacatgtattaacatggatgactcttacaatgttgagggaaaaaagcaaattacagaaacatatactgtatannnnnnnnnnnnnnnnnnnnnnnnnaagacaagcttttnnnnnnnnnnnnnnnnnnnnnnnnnnnnnnnnnnnnnnnnnnnnnnnnnnnnnnnnnnnnntgggctgaagcaatcctcccacctcagcctccagaatagctgggactacaggcacgcaccaccacacctggatagttttttcactttctgtagagacagggtctcgctatgttgcccaggttagtctcgaactcctagcctcaactgatcctactgcttctgcctcccaaagcactggaattacaggcatgagacaccatgcctggccagtatagtttttaaacatacaaaatatattattatttaggcatatggacatatatagtgtaagtataaataaattataaaaatatctacttctgaatggtttctaatgggggaagggagacgaacacaataggctttaacagtattgttgacaatttt

SEQ ID NO: 154420 - DNA, 651 bp, Homo Sapiens
atattaaaaaccacagttaatttaatcaggcacagaagaaaaaatcatttttacattagtctttgtagataagaaaaatttgatttacagtgcatattccaatcccaatctgggtttgtcctcaaattttgagaaatagcataaagaactattttgccaactgtgcgtcacaattctatgattgacgtgagttgcaggcactgagcgttccaacagaggcacggcaactgcagccatcacagccacagagctccccacaacatgtgaagcgtccccatctccccacacacgtgatttccagagtttcaaacacagtgtttacattcctgcgcagcaagaccatgttagccaaaaacaaacctacactgacttccgctggaaagtatttgcagaagtcatgaaatggtgtatgtttttactatcccagcaagcacttctctagggaaaaggacagttatgactatttacctgaggaaacttagaatttgtcaacttagctgttatactaaaaattatgaacttgtctctgtattatggaacaaagaaaacctccacaacttcaccatttcaaggttctaatacaagctggaatttttgtttgaacaccaattgaaacatgtccccctttcaagacttgataagtaaacttct

SEQ ID NO: 154421 - DNA, 138 bp, Homo Sapiens
aaaccatatatatataatttatttcaattaaaaaagcaataaaggcctgagacacaaagttttatatagatgacaggaagcaacctttcctgggaggttgggagtttgttgctggatccataaaaaggcccacttctc

SEQ ID NO: 154422 - DNA, 512 bp, Homo Sapiens
  misc_feature (225)..(233): n is a, c, g, or t
caatctatatatcttttatttccttgtcttgccttattgcattaactagaacttccagtatgatgctgaaacagagtgatgagaaagaacatccttgccttgtccctgatcttacgggaaaacttctagtttctcttcattaagcgtgatgttagctatagcttttttgtagatattctttatacggttgaggatgttgccctttatttctagtttactgggagnnnnnnnnnaaatcataaattggtgtgggattttgtcaaatgccttttctgcatatattgaaatgatttttcttttttagtcagttgttgtgatgaattgcattaattgatttttaaatgctgaaccagcctggcatatctgggataaattccacttggtcatggtgtataattttttaacactttattggattggatttgctagtattctgttgaggatttttgcatctatgttcatgaaagatattgatctgcgattttcttttcttgcaatgtctttgtctggtt

SEQ ID NO: 154423 - DNA, 329 bp, Homo Sapiens
cggttcaaatcatacgagatactggcggcataagtacagagggaaatggtgcaaaatatccctgtcatgaggaacaggagtccagccacgtgctgggtcaagctctcctcccagaagaaactgactgtggccacaatgcagccgcagagaaggacggctacggccatgccgaggaagccagcagtgattcttcttaaatgaagcaggtgccactcatcttgctgtatggtcttggttaaattaataggaatgtttcgcaagcggatgggctgagaaaagtggtacttgatggccgtgcatcgtgcgcaatacctttcaggatgagggtg

SEQ ID NO: 154424 - DNA, 447 bp, Homo Sapiens
gaaattttacagctgggactctgggggtgacatcacatgtcggcaggttccgtgatgcccacctgagctgcaaaaccagcaagtttttattagcgattttcaaaggggaaggagtgtaggaatagtgtgggtcacagagatcacatgcttccaaggcaataaaatatcacaaggcaaatgggagtagagcaagatcacaaggccagggcaaaattagaatcactaatgaagttccatgtcccgctgtgcatgcattgtcattgataaacatcttaacaggaaacagggttcaagagcagaggaccagtctgactagaattctccaggctggaatttcctaatcctagcaagcctgggagcgctgcaggagaccagggtgtatttcatcccttatctacaactgcataagacagacactcccagagcggtcattttagaagcctcccc

SEQ ID NO: 154425 - DNA, 472 bp, Homo Sapiens
ataatgaggtttattatcaaattctagaaaagtgaaagtacaagaaaatgcttctagttcaggcggcaggtctccagtagttcagtcagtaggtagagaaagacagttttctcatagttacagagtagaaaaactattgatgctatcaagtgcgtcaggtaccatgttctgaattcctttggccacagataaattaataaaggcttaggattctgggaaaccattatataagacccaagtaaagtaacctccctccattctttagaatttgaagccttctggaaaaagccaaagtgtagaacaaactccccagccacctacagaaatctcactaacatcttcaaactggaaatttacctagaccatttctaaggtgtaatgcatttaaggtttcccaaaaataaaatacagagcagggtaggcgtatcactgtcataagttatgtttggaaagtgtaaatgaggatgctgta

SEQ ID NO: 154426 - DNA, 551 bp, Homo Sapiens
actcaagacttcacttagccacactggcaggggtcttccttgtaagaccttcccatgccacctgtaattatccaaaaacctgggatattattcatttcagacccatcagttcagcatcaagtacagagaggacaagagaggctcatcagtccactgctgctatactccagttcctgccacatggtggcactgttgaatgccagtcctgtgcagcctcatggttatgtgcttttttgggttcaaaaccttgcaccatgtccctgcttgggtctcaagagcactactgtgacggttttccatcatatggttagctgcttttcccaaagcatgactattctaccaggatagctgagtcttgccaactttgctgaaatcatgcttgcccagtgtcagtgagtgatgattccaaattacggttgacagatcactccctctaacttcccttttggtggattttctttaggggtacttgatattttttcctgccagaggaacccagtcagccatcttaatccaagtaatttccattgatcttgaaccttcaacatcag

SEQ ID NO: 154427 - DNA, 566 bp, Homo Sapiens
agtgcactgtgagaagtcaggttcacctgtagggtatgtatgccagggtgtggcattgggtggacatcaagcacatccctcagggagtcctggggctattacctctagaagctgctccagcaactctgccagacaggatcataaacttttgcagctaaatcttggggatgaactttttcagtaattgtcaagctgtgccccacagattgctggtgattctggggcagtgatatggtttggctctgtgtccccacctgaatctcatgttgaattgtaattcccaatgttgtgggtggcagcgggggaacctggtgggaggtcatgaatcgtgggggcagttttccaccttgctgttctcgtgatggtgagtgagttatcacaagatctgatggtttaaaagtgtgtagcatttccccttctgctctctttctctcctgccaccacgtgaatacgtgcttgcttcccctttggattccaccatgattgtaagttttctgagacctcccagccatgcttcctgtacagcctgtggaactgtgagtcaattaaacctcttttcttcgtaa

SEQ ID NO: 154428 - DNA, 397 bp, Homo Sapiens
gatagtctcttcaacacatggtattgagaaaatcagatatccatgtgcaaaagggggaaactggacttttatcttacatcacatacaaaacccaactcaaaatggattaaagatttaaacataaaatctgaagctgtaaaactcctagaagaaaacataggcgaaaagctctttgacattggtcttgtcaatgatttcatggatatgacccccaaaacacaggcaacaaaaacaaaaataagcaaagttacatcaaatcacaaagcttctcacagcaaaggcaacaatcaacagagtgaaaagaaaacctatgaaatgggagaaagtatttgcaagcgatgtatgtgataagggttgacatctaaaatatgtaaggaattcataactcaatagcaaa

SEQ ID NO: 154429 - DNA, 574 bp, Homo Sapiens
  misc_feature (165)..(176): n is a, c, g, or t
tcctttataatttttatttaattgtaaatataatgcaacagaatacaatggagaaaatcatacgtaaaaccagtatcttaacagaatagttgcaatctttttcaaatattctttttctatgtttttaagtgcatataattataattaatggatacatttgcaacnnnnnnnnnnnnaaacaacatgattctttaaaaactcagacttgcctttagaagagtggatatatgtaatactatgtatacagtattttcattgctggtgtaggagtgtgataactgacggtatcatcaatgactttaaaattgctggctgcatttggacatctgcaataacccctaaattgtttttactctcatgaaggaaaaatgaattttgcaaaacagacaagcaaaggaaaaggggtcttctccatcagcaatgaggtcttacttgcttaagctatacttgtcaactaggttatgtcaggtttcatgattgaaatctcttgtggttaagtctagtgttaacctaggtaatatttatttttcaagatttatataacttgctatttcattcagagttcagtatttat

SEQ ID NO: 154430 - DNA, 854 bp, Homo Sapiens
ttaaaaactatttttaatagttctatcaagtcagatccagtgtagttcaacagaaaaaatttaacatgggggtgagatacaaaagttttggcagagctaaatgagcatagaggacagtgattcaacagcaggaagctgctaccacctctaggataggagagaccaagggagcaggtgggagtccaggagctggggccacctgcaaaagctagaaccacagaatagtcactgccactgccgctcgtgccagaggaggtagggagagaaaaaacctgacttctctgccctcttctcacctccagtctcccaccagagcctcccactgaccaaatctaactggaaaccaacaggcatgggagctgagaaatgtaatttaccggagtagctcctgtgagacagagtagggagaggaagagtgaagaatggatctgagagcaaataagcagatgaggagcacgaatcctcccaccagcattgtattcctggtacaacagaggctctccaagatcgtgcatcatcttgtaaccaaagaagatctacccacaagttcagaacagtttagcatagagtcaagtattaggaggccttgcttcttacctctatggtttcacgtcattgtatcgcctccctttggatctctcccttattttgggtggaggagcttctttggctggagcctatgctgatgggaccaacgttagagctttgatgcagagaaaaatttaaattctgcaggtacatactgttcttcctccccttctttgccatcttgtagacctgggccttttattgcagaggggaccaggcgagagagaagctaggttcagtgcatcccgtctttgctggtaaacgga

SEQ ID NO: 154431 - DNA, 547 bp, Homo Sapiens
tttataaattcttgtaatatctttagggggtttttaatcttacgcccttgttacaaaatgaaatgcacaactccttggtcaatcattgaaagtttaaattctcccctcttgatgtctttgtcatttggtaacattggtaatcttgcagcatcagatcactgtcccacagtcatctatgcactgtaacttcaaataatcaagttgttgcaagcagttactcatcttaacaatctagctaccagcctgtatgccctaccttatttgttggcacaaccttggaaagccccaaacgagatttttgtggtttttatttcaccccaacttcatcttgcagatttactgtcctacatacttctgatcttgtctcttctctatccttatgaccaacgccctcatgcatcatttcttttctatttcaggggtatgttaagtgcctcttggtcttaactttctcaaatccatcctaaaatagaaaatgattccttcctggcttagaatctttcaattgctcccaatttcaacttctgacatcatggtcccatcctct

SEQ ID NO: 154432 - DNA, 392 bp, Homo Sapiens
  misc_feature (371)..(371): n is a, c, g, or t
aaggcgtgagccaagtgtccagccttgcttcagagctttatgagtaaggtcgccatggcctcagaagtcctctaggagttctgagcctccgagcctgtggtctgcctagaggtggggaactgcacagctctgccagctctacatccagatatgtgtagtcaggataaataaaaacgcaaccactgtggtaaagtcttgggaaggttttgtgcattggaaggagcatctcatgtatggaaagattggtaaccacaggttggatgcattcctcagtagaagcatgcacctctctgacggtttaaagaggaaggcagattagagagaggtatttgaccttcagaaacagccagttaaagcagaagcccagctgngtgataataatagtagtggtt

SEQ ID NO: 154433 - DNA, 570 bp, Homo Sapiens
tttaatagtttctttagtcactataatctattcagaaattatttctatttcttgaatttttaaaatctccaaatctgaaaacttagatgagtaaatggctttctgggaaaataagaattatcaaaacgaatccccaggagacagaaaatccaagtagataaaataacaaatagcagcctgaggaagccagcaaggggcaacaatccctgcaaaaaaagaacaagtgactttggccagacctgttaaggaccagctgcctccagggctaagttaactgttccacagcctaggaaaaggaggaaagcttccaaattctccatgaagccagcattctattaccaaagcctaaccctgagagcatgatcaaagaaaactacatatccgagtgaaacatcaggaacagactccacagcaagatgccacagacaaggggaatcaacgaaaaaccaggcagtcacgtccatggaagccgaaagcaacgggatgaaacgtcacagccattccagatgtggtctttagaaacagtgaggcactggcaccaccattacttcacatcagctttttaaaaac

SEQ ID NO: 154434 - DNA, 664 bp, Homo Sapiens
atttataatatcaggctttatattatttaatattttaaatatcaggctttatgcctgaaatagctgattctcattattcaccacagttatgttctataaagtcattgcaaacactgaatctgttaatactaaattattgttcctagtggaaatacagggttaagttcctatgagcctctggccacatttttataaactgaaatgccacttgtacaggttcatttgccaacttccttgcataacaaaccagtttcattagcattgaaaacctgttcttccacaggactcttttaaaatatcactcagcaggtattttaaaaattcttccagatctgcagaacatgcctcacctgcaacttgatgtttttcactccatgtcaccttctgaaacacgcttgctgaccagcagtggctgagaagggtttaacaatgttctaatcctgtatcacgtgactggaagtttcttgggctttcagcttcacagtgctgtctgctatgtttggttggttttgttaaatgggtcgtcatctcaggaatccacaaatgtagccacttctccatagcttcatcacagattggcagtcttcttcctttttctggatggagtgtattgttaactcattcatgctgagctcacagccaacagcactacaactcatgcctg

SEQ ID NO: 154435 - DNA, 700 bp, Homo Sapiens
  misc_feature (519)..(519): n is a, c, g, or t
  misc_feature (641)..(641): n is a, c, g, or t
tttcgtgtcttattgagaaactggcttttcttcagtctactctttcctccatcctgtcttacttgtagagatttatgtctaactctaggaaactttgggtggccactctgctttccaggcttgttggcaagaggggtgctttctccccaagcacgtgaggcattctgggggctgatcagccaattgttaacagctgtgtcttcatcagtatcttggattatttcatagctacctttctcagaagccaaatgccatctcccaaccaaaatcttagatgagttactttgttttaagagtaacagatcactaggagggtccttccagggcctcattctggaaggagaaccagtgtcttggctaggaaggtcctcccagggcctcattccggaaggagaaccagtgtcttggcttaggtgtctcccaactttatgtgctagtaatttcatccaggagaacctgtgctttgctgcttgatctctttctaccttgggtcccttatgcttagcatgttcttgactnttgaattctccagcaccaagtgaaagtagacgtatccctgtgacatctggctgtagaggatcctctatagggtcttcagaatatgggctggaatgctctgctgtggaagattgagaactgangtcttgccaatgaggtgtctcagtggggaacccagctgtgtggcttgtggtgagagggg

SEQ ID NO: 154436 - DNA, 526 bp, Homo Sapiens
tcgggctcctgtgccctcggcccggacttcagactgcagggggctcccgggctccttcccagcagccctctcaggcccgtggcatcgctgggagagggcccaggccctggtcccccagtggaccccagtggtctagaggaatgtgagccccgcctgtccgcacagtgtccgcccacctatttatgacatatttaatgctgggtcccccatcgtccctggaacccgaggcctcactcctgtgcttgaaggtggctgaggccgggccagtcttcctggggatggggcctgaagcctcagggagcccctctgttcccactcctgtcatttgaacccctctgggtggggtttggatgtgcctcgcggggttggatttatgctgacctgctacttaccaggcccaggctggggtggtgtgaaccctcagtgtcctgtggcgcccccaccccggggccactctgcttctgctgtgagccccctcctcgcccaccccgccacgtggtgagggttattttaagttctcagagaa

SEQ ID NO: 154437 - DNA, 170 bp, Homo Sapiens
aatttaagatgcatgaacaattcttttatgtttaggggatgcctttgtctttaccttttactaaacttgtttttccaagctagaactctttctggaaaatgttgaccatctgttttcaatacttttatcaaatcaaggcattgtgtagttctgaatcattggtgatttga

SEQ ID NO: 154438 - DNA, 430 bp, Homo Sapiens
gagacgttagaaattttgtataaaaaggaggataaaacagttcattctctgtccagtcaatagctatggtaactatttagtatgatgaagatgccgtaagatatgaaattaatgaacaattgtcctaattttcagtaaacattattattttaaggcctctattgctcaagtctcctattgtttaaatttttatcttcctttccttttgaatgctagatttaatgactcaagtgttcacgtcagaattttccccttttatgtagccctctcaaaccccacagttcacatccacttgaaacacacataattataaaagatgagagaccaattattatcttctctccttccctgtatcctcacaggtgcctggctacttcaagagttgagctaatcacagggaagattcagtctcagttcagctgcctcattt

SEQ ID NO: 154439 - DNA, 970 bp, Homo Sapiens
tttattctttcaataaacatttattgaacatattctacatgccagacaaggggctctgatgcagagtattcagaaataaaaggagtgtactgctctcaaagggaaaacaggcaaatagaaaccacaagaatactaaattaatacttccactacaccttacacttcttagagaaatgaagataaacttaacgaagtatccagaatgataggaaaagcattgataagaatgaaaataccttttgagagaaagctgaaagatatggtaccaagaaactagagtaagagctagtactcaaaaaatgtttaatttaaaagatactaactataactcttctctatttcaacaaagaaactaaacgtagtaataattaagaataactccttgacccacagatggttaaaataatggaatggcaaaaagagaaggcaagcagttttcatttctgcaacaattttatgaaaagagcaaatcaggaaaaatagccactcatttattgacgtcagggtactggaccatatcatccttttaggttccttctaatcctgtaatttctgttgaaaaattatataaaccattccaaaaatagaaatgatttttctattactcacacatcatcttaactggctatcttggaggagctgtgtgcatgctggcatcccctctaattattaaccggatttacacgttgcattttgatattcctaaaattaagttaatgaaagcgctttaacatatttgatgtcacaacagttaggtgtttcttccatgtactgcgtgaaggtatgtattcctaaatctatttttttctctctataccagtctcttaattctctaatgatagactgatatccaaatttttaatccatgttgaccctcattcatcgtatcaaataggtaaatttaggtggagaaaaagtaatttaaaattatcaatatttgttgtttaggagatagagatctccatgatct

SEQ ID NO: 154440 - DNA, 498 bp, Homo Sapiens
ccaagggaacaggggagcttagagcaaagcagtaaaattgtcagtgaagccattaattgagaaaaataactttatgaggcttatcacatgggccattatgtcgtgcttctgcctggtttccagcccctgataggcaaggagtggaagagaagtccatgggagaacggggaatttgaaggacaataaaagttgatggtgatacatgctgagaaattatcagcacagtcaaacatttctcctgcttcgaaaacacaaaacccaaagctaagccatccccatgggcttttgacattaaccatctgtcaaaccctagcaggaactgcttaagtgaaagcattcattataaattaaaaagttaaaaagttgtgctaattaaggctgaaagggaaaccagggtaccttaagcagtgagagaagaatagctcttcgtgaatgggactcatgattgtatgtgtctattcttgtgttttttgtaaatatactaattataatcactaa

SEQ ID NO: 154441 - DNA, 442 bp, Homo Sapiens
ccaccaattatttattctttcaatcctaaaaaatacagacacttaacagtgttctatttacaatgtgcgcatccaggcaaaaatttccggacaggctaaaaagcaagaaaatgcgatccacaatcaggagaaaaatgaatcaacagaaactgattcagaaacaaacaagatgcagatgctgctcacagaagtctagaacgccaaggtgaagcccccactgggttggacattttcttattccttatgtcatttaaagcacaactcccgagattttacgtgatataaccgctagaggcctctctgtcacaggctgtattactcccaggtccccatgttggctgtgttcagattttttgttatatttgtggaaatctgagtgcatgtgacgactgctatttatgggttttgtttttatttttaaagacagggtcttgttctgtcc

SEQ ID NO: 154442 - DNA, 477 bp, Homo Sapiens
atgaaaagtaaattttattaaacatgtttacatacatgaattggaatttcatttaaaagcacaggggagtgttaagacaagtggtcaaaatagaaagatactacccaattataatcagttgatttttggccactaagacagaacggaatctagtagaagtgcaccaatgcttcagttcctcctactcagcatggtgagcagtggtcaatctgtgccctgtggaatgatgggcagataattctggcatgtgtaaataataataaataattcacttggtgcaggcagtatgtctatgaattaaaacctagtgtgtacacagtgtctacatgtgttacagccccacagtaggaatctacaccaaaatatttattagaaggaatttggtccgtactacatcacgttttccggagggtaaaaaataaagtccatctatagacatttcaccacagacccagagactgagtctggctaaaacct

SEQ ID NO: 154443 - DNA, 570 bp, Homo Sapiens
  misc_feature (325)..(348): n is a, c, g, or t
tataaatagaagatactggaatcatatcaggaaaaaaacgaagttcataggacatggagtctttgaaaaccacacctacaaagttgctcggcttagagagactggatgttaacatttctttttcatttgtatattcttcagtaattatgacatcaggtagatgatcagtagacactttctgcatgatgctgcttgtaatattagtcactggagtatatccaagaattagattagaaagagtaaacttgtccataggattgagttctatattaggcacttcttcatatttcttatttggatgcatcatgctaattaatattaaccnnnnnnnnnnnnnnnnnnnnnnnngaatttcctgaacactactctttttggttctgcatttaattaagtaattcttcagtagaagtgttctggtctgtctccaaactcctacctccctaattgcagtggacatgttttctgaataaacctcagggcccgagccgcagagctgtcaggcctggacgcgctcagtctgttgactcagtgcgggtgacccagctgggatctgtgcgagggcgcggccgc

SEQ ID NO: 154444 - DNA, 406 bp, Homo Sapiens
ttcaaaaatccttttaaaatttagcaaaatgaatacagtagtaaatacaaacaataatgcaccatgaccaagttagtttcatcccaggaatacaaggttggcttaatattttaaaatcaatcaatataatttactatactaacaggctataagacaaaacccatatcaccatctcaatagatgcagaaaaagcatttgacaaaatttaatacctattcatgaaaggaaaataaacctctcagccaattaggaatagaagggaattcctgaaactgataaagggcatccataggccaggagcagtagctcatgcctataatcccagactttgggaggacaagatgggcggattgcttgagcctaggagttcaagaccagtgtgggcaacatagcaagacccctctct

SEQ ID NO: 154445 - DNA, 423 bp, Homo Sapiens
  misc_feature (168)..(178): n is a, c, g, or t
ggccagttaacttagttttgttagcattcctaactatccttagctgtatttctcttcagcctggcctcatttctttcaggcccagcccccgggcaggttaagatggttgctgtaattaatcatgccgtgggccctaattcagactcaccacattcaaatttcaatttnnnnnnnnnnnggcggggtgtctacttaagaaatgctccgcttatgaaatgctctttgttgccgaagcagccccctttcagcctaaaggagaaagtctaggaagtgcaggaaagaagaaaggtttccagggccctcttcaaagtacttgcacatatgtgaggggactgaggatgatctgtgctccaaagcccctccagtatttcccaatcagaacaaactgaatttttaaaaatatatattaaataccatcataat

SEQ ID NO: 154446 - DNA, 486 bp, Homo Sapiens
gaatttgataacaccaataagtgccctttcgaggcctccaattggttacacactgtgaaggattggcccatggctgaactcagaggctgaactggagacttctgtgttgttatcacaggagtgaggatgtggcctgtgtgctgcttaacctggcctagaacttgctgcacctgctgttcttttgcttccaccttaacccttagtttatgctaattttctattctcctgcctcagaagtgtctccttaggaggccaagcaggctcttacctgcttcaggtgagcaggtaaccaggagggagcggaccacagttgctatcatgtctatgattagtgtttggaaacctgtgcagagcctttggctccacttggatgggatagccaagagaacagatatgtggtttttggatcatgatatgtctgaatatttgtgtaaccttatgtattaccatcagtttttatttgttaggcatggttattcttgctcg

SEQ ID NO: 154447 - DNA, 376 bp, Homo Sapiens
taaatggcaaaattcacttgactggatttttaggcatttcatgcaatagggtggtaaacacagaaccatctagaaaaagacatagaactgttaacaatgaatatcacaggagatgggctgggggagggagaaagatgagcatgaaatttaaaaatgttttacgtcctcaatcagcacactttgattttgttataataagcatgtattacttttcaaaattaaaaatactttttaagaattaatccttttaacaattagtttgttattagtctctttcacataaattttatggctgtccagttagtccagttcagaaacaggggaagatgctgactgtatttttactctcatttctgcccagatctgaatggtaaca

SEQ ID NO: 154448 - DNA, 877 bp, Homo Sapiens
tttttttggtagattaacatcgagagattttaatatggagatggggtgggaattcgaccttggaaaacacaagcgatcacgtgaataggattttggccttttctaacttagtgtgtgctctgctcttaagataaatacacacacacagagatagacatggcatttcattttcggacagtacattcacgtgttcgaaaattaaaacaacatacagagtaaactcttgccccatctctcccatctcccatgccctcagatggaccgctagtttcttgtgctcctttttacaatataagcaaataggaatttcaattcttattataacagaggagataatagcatgcaatacataccttgctgtatcttgttctcttgaatagtaaaccctggaggtgttctcatgcccttttttttggctgcacggtgttccactgcacagatgtacccactttgcggggtcccctgccgactcctccgggctgcttcagctgtgaatttcacgtgcatgagtccctttgggcatggggagatccgtcttctagcagggtccgttcccattgggattggtttggtcacacgtcgtgtggcttttggcttcttggaggatgtttgccaggttaacgctggtaggagcccttcttccttgcatctcagagggccacgttcagggtggtttgtttcccaccccacctctcagtagaggctggtccagcagttgacattttcacaaccagataggtaaatggtttctctgtcattttagtttgcgtttttctaatcagttgaacatcttttgtatatttaaaggctatttttatgtccttttctgtgttcttttcatttgcccttttaaaataattgtgtcggccgagaatgg

SEQ ID NO: 154449 - DNA, 429 bp, Homo Sapiens
gaacatgtaagccctttctaatttctcccccattctaaattacactttgataaacatctttgatttttacttttttctttgttattctagttcatctagtcattctgatgcattttataatgaaaaaaattatctcaaatccttttgattgttatagaaactatattaagtccatgaattattttgggaaatttgatgtattttacaatatccatcattgaaaaacatggattatcttcccaagaatttaaatttttatctagatatatacatgagattttggtagttttcttcaaatgaatgctacaactgaaagaaataaatgacattaacttgaaattatgactttttttagagaatgcttactatgtgacctagatttaattaaaaataaataaattacatttgagggcccggcgcggtgctcat

SEQ ID NO: 154450 - DNA, 450 bp, Homo Sapiens
  misc_feature (277)..(300): n is a, c, g, or t
caattgaatttttgtttattgattgagcaagttggtaagctagcttattaattcttaatttgtctataaaagttttggtgttttataggtacaaccatatcatctgaaaacaatgacagtttggtttctcctcttctgattcttgtatctcttatttcttgttttaatgcaccagctaggacctgcagaacaatgatgagtggaaataatgattctgggcatccctgtctgattcctaatcagaaattgaaagcttctaacatttcaccattgaacnnnnnnnnnnnnnnnnnnnnnnnngagacagggtccagggtcttgttctgttgcgggggctgaagtacagtaatacatagctcactacagcctcaacctcccagactcaggcgatcctcccagttcaacccccgaagtaactgggaccaccatgcctggctaatttttttattt

SEQ ID NO: 154451 - DNA, 490 bp, Homo Sapiens
ttccacatgttcttaagtactagagttaaacttgtctatgtgtcttttttctctccatcctttttccttcggagaaagagctggattggctggggatatggtataacgagcctgagccttctgtacgtgtctgacactagcactgtcaggcagctttcggctggggctcacccatcccataggaggcctatgtggagcattaactgtggccaaaggaggcagcgggaacaggctgcttgctatctggaaagatgacatatttgtgccatgcttgttttttcacccaggtttttccctctttgtgagatctgagctttagtggaatgtagaatgtggcaatcttaaggtcaccaatcagtttttgttcttttttcctggatctaccctcatggtcgttttcaacatagcgggttagagttcttatactgttccagttcaattccaagaattgcaaatgtttattggacccctccatcttgatgatatataa

SEQ ID NO: 154452 - DNA, 268 bp, Homo Sapiens
  misc_feature (137)..(190): n is a, c, g, or t
acgaacctcttttaatctgtaacagcctcctgcctcggttaagtccagtccagttgttttgcagaatgtcccacattctgatttgtctgtttcctcacaattaaattcagcttaaacattttctgggccagatgagnnnnnnnnnnnnnnnnnnnnnnnnnnnnnnnnnnnnnnnnnnnnnnnnnnnnnnagtccaagaattcaaggctggacacagtgagaccctgtctctacaaaaaattttaaacacgaggctgggctcggtcgt

SEQ ID NO: 154453 - DNA, 461 bp, Homo Sapiens
agaggacttgtttttattcacttcaagaccccaccttgcatttactattaatacgtgaaaaaggaagaaagtgcatcttcggatctagaaaattagagattttattaagggactcgttgtttttaaaacttttatcttaggctcaggtatacatgtgcaggtttgtaatataggtaaactcgtgtcacagaggtttgatgtacagattatttcatcacccaggtactaagccaatagttattttttctgattctccccttcctcccaccctccaccctcaagtaggctccagtgtctgttgttcccctctttgtgctcattgattctcatcattttgctcccacttataagtgagaacatgcagtatttggttttctgttcctgcgttagtattgctaaggataatggcctccagctccatccatgtcacgatctaattcctttttatggttgcattgtat

SEQ ID NO: 154454 - DNA, 262 bp, Homo Sapiens
  misc_feature (132)..(167): n is a, c, g, or t
gtacaggatgcaatggtgcaattgttttatttgttgatctggatggcatatgttcccatgcatgagtgtgtccacatgtgaaaattcactaagcttaccatttgtgtactttcctatatgtatactccaacnnnnnnnnnnnnnnnnnnnnnnnnnnnnnnnnnnnntagtgattctgaagttgcaatcacttctcaggtctctttcggccaaaacttagaggaccacttatgactgcagggaatctgggaaatgcaggttc

SEQ ID NO: 154455 - DNA, 584 bp, Homo Sapiens
  misc_feature (323)..(333): n is a, c, g, or t
gtaaccatgtattttattttatacatgtaaaagcattattctgagaaagtatctaaaggctttacctgattgccaaatgtatccatggcacaaaaaatgtaatctctgagctaaattctggtacaagtaagtaaatatgtgtcaagataaaccataaaatcaaggaattcaggtctcagataacgaaggcaactcaattccctaagaaacaattttggtcatcctccacccttccctttagttttgactctagttgtttaacaaatacttgctgaatgcttactctgccagccactgtgctgggcaatggggaaagtacagcnnnnnnnnnnngaaatttctgttaatgtgaccgatcctcatcttagtatctttactacccatcaaagtgactgctggacaatctaaatatatttgctcaatgttgaaagaagaatgtctaagacctgagtaagtgccaccaacatatataagtcataaagttcaagcaaaaattctctggctatcaaaatttccatttcttagaaaatttcatcaactctctaacataaaacaattttagactgacctctttctcttttctc

SEQ ID NO: 154456 - DNA, 398 bp, Homo Sapiens
gggttctggaccgtaccattctgtttcaggaatacgagaagattcgatggcctatgagagtcctcacagaatatttttatgaaaaggtgcgttataaaggctattatcgtattttgttctcagcggaggggttccgaaggttatgaacctttattaactaacgcaagaatggtttattcctaaaaagtagtccctaaaatgtaaaagaattaaatcctataaagagagacgtcggcccacggctgctaactcgcgagtcttaagattatagaaatggcttcaaggcgggtggtgagtgcctgagactgacacttgcggaaggatatcgcgagcacattttgtaaagaccgaagagcgcatgaagaagtaaacaaatgaagaataaaaagtgccgcctt

SEQ ID NO: 154457 - DNA, 476 bp, Homo Sapiens
agaagagcaattcttattttatttataatgaaatacgaccacaaggttacatagtagtaaattcacagtagtgattttttggtttttcagtaacaaatccgtaaatcacaaacactacccagaaatacttaaatcactttacaatcgcagggtctctgctgcaggactatttaaataaatatgctaacatttctgtgctactgtaagtaacctatcactttttaaaaataaagcccaatttttaagttaccttaagaaatatctagtaaggcttccagggtagtgaagtttgagcagtaattttcttagagcttgacctttgtttgtttgtttcttgctgttttcagagtcctaaagcaagaaagagtttaatggacttgcctgcaggacagcaggctccccagaagacagtgctgtgctaaagccatttactctagcgggagaagccagtgtcagtgagggaaaggaataaagca

SEQ ID NO: 154458 - DNA, 523 bp, Homo Sapiens
catctttttgtgcatgttttaatttattaacacaaacatttaaagtacgctttttaaaaaaataatcatgtcttggcattttttcaggtactatattcatagcctcaaaaaatagaagtggttgggtctcttctgcccctggcgtggggtgagctgcagccgcaccggggccatgtccctccctagaggcggctcctcccttccagccagcaatgttgcccaacgcgggaggccagctgtgcagaacccagcatgcaggcatctcactcccaattcagcctgggaaatcggaactgagagccccacgatgaagccctgagctgatgctgacatgacactaattcactggaaacgagggtgatgggggcacagagcctctcatgctgtgcgccctgaagcaccaccctctgggatggaaggggacttctcacgcgacgctggagagttcagacattgtcctgagggtaatggggagctgttgaagacaggtggggatgagcagcatattcagaactgtatttta

SEQ ID NO: 154459 - DNA, 454 bp, Homo Sapiens
tttttggcagtagagaaagagtttaataaatacagaaccagctaagtggaagacaggagtgtattacttaaataaataaataaagcttagagctaaggtttttaaagaatagtttggtggacaggggctagagaatggggaatgctgattggttggagatgaaatcctaggggtgtggaaaatgctccttatgctctgagtcagcttctgggtggactggttgagtcatgaatcatgggtccaggtggagtctgtaggttaccacaatgcaaatttcctttcagagatcctgatcttcctatccacccccacacctgcccttttgatgttctcttagtgatgggagtgggtcctgcccatcagggtaaccttccagtgcctgagattcagggctgatccggatgcagactatgatgtgcagttctacagccccaccctgatccagccaggcaca

SEQ ID NO: 154460 - DNA, 776 bp, Homo Sapiens
  misc_feature (77)..(105): n is a, c, g, or t
tgtaggataaaagcaaccttactctttttgtaaattgtatagactcccaaatactagaaatgatcatttaagttacnnnnnnnnnnnnnnnnnnnnnnnnnnnnnccaataagaagatgagaattaactttatgttcctaaatttgacacttaatagctatagcctccctgagatcatagagaagtgattgcctaagataagttgtatttgtttttctagttaccctaaatcctgtcaggtaataaaagaatgatcattgcaggctttgtaaactcgggtcactcactccacttggctctccatgtttttcatggtttctagggtgtgttatgaacgaacctccttcagtccaactatccagacgttcattctctctgccatttggcacggggtatacccaggatattatctaacgtttctaacaggggtgtgtaatgacattagcagcaagagctgtaagtatcaagaattttattttacaattcaatggtccacttgaactgttaaaaaggctgagtacatctctcttacaaggtagaccctctttccttggtcgtggtcagtattgtcctttccactagaagcgaggtgtgtactgcgtgcatgtttgctgagcgctcaccacgggctaggctccatgcccagttcctgtgaggagaaaacacgtttctatgtgcccggcaggtaggaggcactcacaaaatgttactttgtctttacagaattttctgaaggagagataaaaactgagttaaataaagatgatcagaatggt

SEQ ID NO: 154461 - DNA, 578 bp, Homo Sapiens
  misc_feature (38)..(38): n is a, c, g, or t
tcttcttacaacgtggtgagtggacatgacttcgttgntgaggagcctactcgggttgtcttggaggctttgttggaaggaaaggcttagtggggtagtaatatgtaggtgatactgatcccacctcatgactcagaagtgatgagggaatggtactaggagacccatgagacacagcaagatctcaacatcatggttttagcacgcagcagcacagtggttatgcaagatgaatccttccctgcatgcaagattgaactgtaaaaaccaaggccagccacaccacaggatctgaactttgtttccagaaattcttcaatttgaaatcaccttttctaaaaagtcaattcatctagttaagtcgctgaacaattacctgccaaatgctatactgtgtcatggtgatgcaagtcactaaatttctcagtttttgctgattgctaagggaaataacagtatttccacaatagggttcaaattcctgcaaaattacctaccccagttcatctctgctgaacatttggaaaccatgcactagccaacccaactgacttctgctaggtagaggcatttgtctt

SEQ ID NO: 154462 - DNA, 706 bp, Homo Sapiens
cccatgtggaatatgattgcttgagggttcttcattcttatctgcaacattctcagctacttttggaatatttttaggtactacttgattgtttatatccaattcctttccatcatttgattgaatcttttgggtctcttgcttttgttcctctaaaaactggtctgctaactttttaatattttcttcatgctgtgctctcaattccttcatctgctgtccacactgaaaactttcatattctaacctcttcacaaggtaagtattgttcttcctatagtcctgaagctggtcttcttgtcgaagaaattcctgacgaagctcagcaagttgctcctttaaatgatgtatgtctgccatctgatacgatatgttgttctgtagtttaaccttgtcatcctcgcatctcttcccgaggccctctctggcctgcagccggctgctgaggcggccgtagtcggcctccttctggtcgatctgtttcttgtgcgtgtccaccaacagcaagaggtccgaattgcgcttttccagccgcccgcgggccacttcggtgcgctggacctggccctgcagctcggccacctcctcctgaagcaggacgtggcgggaggagatgctccagtagttgaaggcgaggacgacgatcaccaccagcagcaccaccagcacgagagagggcaggcggccagcgccggttggcggccgc

SEQ ID NO: 154463 - DNA, 360 bp, Homo Sapiens
  misc_feature (150)..(158): n is a, c, g, or t
tgatagtaataattttcaagaccttcagtcattcctatgtctatgttgctatctttattttaaaacttagaaccctgatctaactcccttctcaagtgaagatactgtgtagattcaagaattataatgtagagtaataggcctttaagnnnnnnnnnaatctgttagaaataaagagcatgatttaattattgttgaattaacaattaaaatgaatccctttggagggatggcattgaataacttataatttcagtgaatcatttacgttttcattggaagacagtatctgatttcaactggtgcgttacgaagtagagccattcccacaaagtaaatgtgcagtgcccatgtttcttg

SEQ ID NO: 154464 - DNA, 164 bp, Homo Sapiens
aactttttgcgtgttctgcttctgtaaaaattgcttcagctaggctccccctgccctatttagaccacggtataaaaagaaatctatccccttcttcggggctgagagaattttgagctctagccatctctcggtcactggcaataaccgaactcctgaattag

SEQ ID NO: 154465 - DNA, 325 bp, Homo Sapiens
ttcggcacgaggcgtttgatgttttatatcatatcaataacaacgtaccgtacaaaacctgcctcccagctcgtggggcaggcagtgtggtggccaagggcagcgtagaaaaccagggctcttgtcccaaaagaggagaggaaagagggttttgcagtcaaggaaaaacagaatcaaaacccaacatgatcgaagagaagccctgaatctgcatcagagggaggggccgtgggcagtgtcgcaacttggccactgcggcggcaccagtacggggagctgtgattcctaggaggggttggggccagctcacaagtttatttattta

SEQ ID NO: 154466 - DNA, 331 bp, Homo Sapiens
ccattcttgatactcaatgttcatcactataaataacaaatacaaaaatactataatgaggtgatatccttatgggcttttgagatctgtcaggtggtttgagttttgattgccccaggatgtggtgcctaaaaactagaaaacagaaagaaatgtccttcctataattctaatagctcttttctctgtaggcagctgtcactctttactcccatcacctaagttctgcggtataatcacaatatataacttcttgaagttgcttatgaaaagactttacctttttatgaattaaatttcactggttcggtttgacacatagacttaatga

SEQ ID NO: 154467 - DNA, 557 bp, Homo Sapiens
gttcagattccttaattttacatggcaaatattgattgggttctagttagtaacagtccccatgggaagcaggaaataccaaaaattgggtgctttttgaaattctgaaagatgtggcaatcaaaatgagcccaattagcattttaccttccagaataaacaatattttcttaaattgataaatgaacaaatgaatgaataagtagataattatataagtttcaaagaactagaagggaggttcctaatagaggttaaatcatcagtattaaaaactgaaagaacaggcagtcatttggctttcataaggttaaatagttttagttcatttataaatgtctgcattagctcttcacaattaactcttcatagtatcaagagttaatgtcttgtcttccatttttgtactaaaatattaaaccagaatggcaaaaatgtctactaaaagaataaataagaataaacaataataataaagttcagcatgatttggtatatagcttatggtaaatgagaacgcattatgacttatttctaagagtagacatacagacaaa

SEQ ID NO: 154468 - DNA, 685 bp, Homo Sapiens
  misc_feature (21)..(21): n is a, c, g, or t
  misc_feature (121)..(188): n is a, c, g, or t
  misc_feature (402)..(417): n is a, c, g, or t
attttttgtaagactattttntgaatgcttaagcgcaaagaagaatgccaagtacataaatgtgcattaattcatctactcttcctgacaccaggaagtagattttaatatgatacttatnnnnnnnnnnnnnnnnnnnnnnnnnnnnnnnnnnnnnnnnnnnnnnnnnnnnnnnnnnnnnnnnnnnngtcagagttgagacccaatctagtcttctgactccagaatcgatgctgtcttattaaaagacgacggttctcaaggaacatgaaaacagccattctctcatcagttaggggcctgtttaaacaaatccaccccaaaaagctttttcttagcattctctactaatagcttgcaaactgtcttccaaaaataatttttaagtctgcatcctttacnnnnnnnnnnnnnnnnccttcaaacaattcagtgtaaggacctttttttagtagaatgtggttttggagcagaagcagacgatgagttcttggccaaatcttacatcttttaaggcctcttctataaaatcggacaactcagaagtgataaggaccagaaacacgccaggtccatgttttttacatggcccttccagacatagatcccgcctccgccaccatctctacagagtcgtctagttccttctgagatagaaaggtcatcccaacatcagaatggtaac

SEQ ID NO: 154469 - DNA, 542 bp, Homo Sapiens
  misc_feature (503)..(503): n is a, c, g, or t
tttccttttaaaaatacaaatataactttttattaaacagctaaacatagacaacattagcaaaatgctttttaaagaaatattattcacagaatatgctttaaaaaaattaacactcaagcacaatttgatcttttctcattaactcttcactaatatcaaacaggcgtaatcatttttgtaagactattttctgaatgcttaagcgcaaagaagaatgccaagtacataaatgtgcattaattcatctactcttcctgacaccaggaagtagattttaatatgatacttatcccatttctcagaattagaactgagagttagagatattaaagaacttgcccaaagccacaaacccggtgtcagagttgagacccaatctagtcttctgactccagaatcgatgctgtcttattaaaagacgacggttctcaaggaacatgaaaacagccattctctcatcagttaggggcctgtttaaacaaatccaccccaaaaagctntttcttagcattctctactaatagcttgcaaactgtctt

SEQ ID NO: 154470 - DNA, 553 bp, Homo Sapiens
taacagccttcttcattttcaccattagaacacttaacactataacataactaaccaggagtaagagttggggccgagaggagagtgcagtctggacatttgaggtgcttgctctaaagtaggttatggagctgagctgacttcaggaaaagccaactgctccaggttctctcactggggttcagagagtggagtggcctgccagagctccaggtagctgtggatgcggggagatgaacagccagcagagctaggcaaacatgaagatgtaaaaccaggttaaaatggcaacttttcagccaaggacatgatagatgcatgtcgtgtccccagggctgcacccaggagaggcctgtgtcctcctgcattgatggggctgcatcttcaggcattagaaacttgaaggcctttccttgttagttccaagttgtactgctagcacacagagcagaggcagggagggagtggcatttacaggccgtccttgaacggctgagtgggagctgcccgggtgatgctgtgaggcagggccttcctgtgctccctgaacctc

SEQ ID NO: 154471 - DNA, 352 bp, Homo Sapiens
tttgtttttgcaggtttggacgttgatcttgtttattttaaaatacccacgatgctgtgtgtgtggaaaggaggcccagggtgggaaaccgttctgtttggttgtcatctgagcccttttgccgacattgcttccttccttcctggcttcttgttcaccatggtgaccgctggatgcacaagatggctcacagtgctcatcgggcgcccgccagcttctcttgttggcccaagacaggctgttcggagcttgtcttgctgccccaaggaggatgtcagtgggaatatggttgcgccctcctttggagttgtgcgagcgttgagctcagtgcccgggtaggaacttggcgttg

SEQ ID NO: 154472 - DNA, 491 bp, Homo Sapiens
tctcttttaaatctttatcttgtagtaactgaagtggatcaataaaagtttgctttacattaatatcaagagagtctttcacctcagccattagcttcatggattcaccaacttctatcaatgcattgccaaaggtggagtcttccccgagctccttcccgtatttcagcatacagtcccccagcaagccttccgtctgcgggtatcctgtggtcttcacctgccctcggatcttcgacacagtgttcagcattcctagcttagctctggatttggctgaagatattcagtggtttttgaaagaatttctgcaacaactttattggtaacatctattttcctttccatgtcaagaaattcatcgtctagtttagttccttcagcaccacttattttttcactaaatagctggctggctttgtggaactgcttcttcagcccggccaccgacatcgcgactgcgaccggcaggggcggggtggtctcaaggc

SEQ ID NO: 154473 - DNA, 344 bp, Homo Sapiens
tagcgtgtgtaaggtttatttgggtagggaaggggacaagtgaggtaactgatccttgctttgtagacagtgcaagacaattatttgtggtgaagggactgtatgccaacaaacgttactcatgctttagttaaaactttaagtcacctaaaacagaaacaattctaaagaacactggtggaaaatagaagtgtaaatgtttcagacaaaaccaaggcattgtcagcacgatgtacattatactgcagataaaacagccacatcctaggccacagagcagatcccaagagccccaggcatgcaggagagttttaaaggaacagacggaaattttaactgtgaaa

SEQ ID NO: 154474 - DNA, 373 bp, Homo Sapiens; identical to SEQ ID NO: 119816

SEQ ID NO: 154475 - DNA, 421 bp, Homo Sapiens
gtgagccactgtgtccagccaaggaggctgtttgaactgcatgattgaaaacacatttgcaaaagtagttttagggtattttttaattgcctctggtttgaactgaatggaaaaatcttggctgatttcaatgtatagatcttcaaaagaagtttaaaaggatagtaagatctgttttaaatgtgcacgtgtgtctgaaggctggttaaggaaatcataacagggtttgggaccgattagccagccgttcttcagccccaaggtcctcaaaacactcagatttgaagatgatcccgtcttgttccgtggtctcgtccgctcctccacggtcattcttttcgaacctggccgccagtatgtgccctgagagtctatttctcttgtaaatcattgtaatattcttgactttggtttaaataaa

SEQ ID NO: 154476 - DNA, 378 bp, Homo Sapiens
tttgccatttataagatgcatctttattttacatgctgctatgaaagaaaaaactctgccaattgtaattctaagttgccgctgatggtaatggtgcatttagattccagagatgataaaaatatttaaaatgagtgtcttagaaccaaagaaatacaatatgcattgttgagttcgttgaataatgagtttgtaacattttatccagaatattttcaaaattatccattgttccatagaaattaactttgttgtaaattaataaatgtgtcaataatcatatgtgagtaacacatgcaacacgactctatagatatgcagagtttagaaatgcagaattgaaacatttatccattccagccacctcacccaaaggag

SEQ ID NO: 154477 - DNA, 466 bp, Homo Sapiens
  misc_feature (99)..(117): n is a, c, g, or t
cagatgatctttttaaatgcaaaatgccatcgacgcagaaaatcaaagaatcagcttaagttccagaaaaaagaaaaaccaaccaaatgaacaataagnnnnnnnnnnnnnnnnnnnaaaaggccttttgggattttggatgatattgcatcaaatccatacattaacctgagagacgagcgacttcttcaacattgagccttccaatcatgattttcaattcatttaggtcttctgtaatgtttcttaatataattgtatttgttgctatgcagaagtttcactgatcttttattatatctctatatatatttgatatttctgacactattgtaaatagtatctttttaatatttcattttccttttttgttgcttaaatatatataaaataagctaattttccaaactaatttttatatccagcaaccctgctaaaatttcttatccaataaaaatataaatgt

SEQ ID NO: 154478 - DNA, 671 bp, Homo Sapiens
gaaaaggaatgtgatgtttattgctgttttcccccaggaacaaagaaatctggcaggacacacacaggtacagcatggacctgctttcggagttatgcataatgattttttaagttggagtgtgtttggatgaggagggacaagaaaactgcttctgcaggggaggtggtccccactgcagcttcatctgtccctaggccacctccctgcagccaccccaggcagtcgtgcaggacgtcatgtcctggctgctttcctctgagtcacagagctcgccacagcacttcttcctccgcctcttacaggcctggccagccaggaagtcacaaccacagctaagaggttctgtgctgagcatctacagtagcccccaagtgaggccagaggtagatggtaatgggtctgaggcttggggccatttcacaggacaatcatctctatacttttcattttggttttagaactctgtgggatttctttatctcaaatgcccttatcagtctgcagatctcctgaaggctcatctggtttgctaggtcttagtctgctcaatacagatgataagatagtgggtgaaacaagaggtttggtaacataagttcctgatgacatgagttgtacacagtatatgtgcaatttctcaacacatgtttggcctaaacacttgcaaa

SEQ ID NO: 154479 - DNA, 662 bp, Homo Sapiens
  misc_feature (549)..(557): n is a, c, g, or t
acagatgactttttagccctgtttgtttcaatggggaaaacaatgacaaaaaaaacaaaccccaggcaggcacgacacttatgtaaaatgaacacagttagtacaaaaccagtaaggcatcactttgggaaggtcagcaccgaagaggtcaggcaaggctcgtccagacggggcttctgggagggagtgaccctcacccttattgagctgcgtcatgttggttctgaggaaagtgcaagtcttttgcagggtgaccgcatcaccccaccggaagctggggcggggacgctggaggtgttggtgtgtgttctaaaccctcaaggacgagaagggaaggcaaggtccatggctcacccacatgtcgaggaccaggtcctcatccattttaaaggacacagatacccccagccctagcaggaggaggcgagtgtgtaggactgtgaggatggacaactaaaaaccaaaactgagcaggaccaaaccaaaactcaactcctgcggttcttactttcaccaaaggattgattctgaccaagaggggaagggggnnnnnnnnntcttcaaaaatcaatgcatcagaaaggaagaaactcaacctcattttcaaaaggtaacctgttctccaaagtagaacaagtctcactatacacagtgtttgcaga

SEQ ID NO: 154480 - DNA, 841 bp, Homo Sapiens
ggatttctaactgccttattttaatttagttacttccgaggccctttctccaaatgtagtcactttttgaggtactgggggttaggtcttcaacataagaatttgagggaaataaaactgagcccatagcagggtaataggaaaggctttaccaagttaaagctgggattggaaataccccatttctgtgattaaaaaatgtacctttgacatttctgaaatcagtatatttctgaccttcagggtacagtttaaaaaggcatactgccctggttttaccattagtggttgaaaggatggacagtacagacttctactgggaaagaggtcttagtgttagatgcatcagcttcttgggtcaggggcaagatttttctctaagttgcctatcggaattgaatctgccttgcctgagcctctcctttcagactttcttccctctccccagccatcagtgacctttcagtcttcatcccaggtcctctttcttcctctgcctcagagcctagttaattgcttctattcagtgaaattagagttcaagagtctgggactgggattccttctcagagaatgcaggagtagaaggcaaacacatctgacttcttgcttacgtcatagaacattacaggatgctgtggactgaattgtgtcccccacgaattcgtatgttgaaaccctaactcctagtgtgattgaatttggagtaagaaagtaattaaggttaaatgatgtcatatggcatgtgaaaacacagccagaagctggccatctgcatactaccaggaactgacttgccagcctccaggactgtgagaaaataaactgttgcttaagccat

SEQ ID NO: 154481 - DNA, 513 bp, Homo Sapiens
ttttagtttttctcactttattatggaatttttacatgtacaaactaagatatttaatgaatgtgttaagttaaaaatagaatgaacacattgccagcttaggaaatagattataacaaatactctgaaagtagtttaatttttaaacaatttaacttttttaggtcagcaaaagagaacgatctgaccatcatcctaggacagctacaattacaccatcagaaaatactcattttcgggtaattcccagtgaggacaacctcatcagtgaagttgagaaggatgcttccatggaagacactgtctgtaccatagtgaagcccaaacccagagccctgggtacacagatgtagcgacccaacatctgtggcaaagcttctcgaacctcctcttgagagtactcaaatttcatctatgttagatgctgaccacctttccaacgcaaccttagcggaggcgccctgagaattcaaaccggcagctaaagtagactcgccgtcaaagaagaaaggt

SEQ ID NO: 154482 - DNA, 668 bp, Homo Sapiens
  misc_feature (392)..(425): n is a, c, g, or t
cttagaaaagccatggagtttatccctagaaaaatgaatatgcctatatgcaaaatttgtttgatggcttcataggatccaaagaccctgaagccatccatggctcatgtatttctgcttaagaaagcataatcttgttctgctctctcattttacaaatgattaatgcatcccttttcaactactccagcgctgttgctgctgcaatgttagcaaatgcaagccagagagaagcacttgaaaatcctttgatgtctaaaaaatgttcaaatagtgtggatgtttacatatctgaagttttcagcatttaagcaaattaatgatcatttcaacaaatactagcatatccggtttcccttaatagcctgtcagcagtgctgccttgtcaattnnnnnnnnnnnnnnnnnnnnnnnnnnnnnnnnnnaattcataaggagtgcttctgatgcttagtccttgaaatggaacttcaactgtctttcaaaacactggcttcaaaataggatgtgttttcctaatgaatcagaagtgggcaatgagcattgttccacaggaataatttttaatttaatttctataaaactagttgagaaatgagagcctgtccacccaccatttgtgtatcagtggccaattcattagtaaaaataaaggaggggaaaggaaa

SEQ ID NO: 154483 - DNA, 389 bp, Homo Sapiens
tctgaagatgaacgtttattagcgcacctgttcgtgccacatggaacatgtatgcagacagggatccctgcccagggggctcacaatctacacaagacacgacacatacacgcaggacacagacacggggagcggggcgtcttcacgggaaacagatggtctggggagccacgagctggggcatcggcgtgctcaaggcttgtccttctggttgtctttgcgtgggagggagaggagcgcaggacgtaacccaggacagccttccagaaagcagcagtatccagggggggactcacaggagaaagaaaacaccagagggcggtggtcccaggtacagggaggggtgggggagcatctcagagcaggcatggacgaagacagacccagag

SEQ ID NO: 154484 - DNA, 916 bp, Homo Sapiens
cctcatttgacagatgaagcatttggggctcaaaggggttaaggactgtgtgtttatagattcctcaggcgctcatggtccagagaacatcatgaatcatcttggctccataatttttggggttacagatacttagagagatggacagggggtgtagttaccacactggcctccaccatgtggctgaaggccatggcttgattagttatttcttaatacacatctgctggctgcaattgcaagccgggggtgtgagctccaggcagaggcagagggtggcaggaacttccagagacttactggcagagcatagattagctgttctcccccttgacaattgccttgggccccttgtgttccagagggatggatgatccagatgcaaaatagagtgaagatgaagatacagattggagagaaaatggactgagtccatagggaacttcctttgggatattccatgagctggctgctcactccttctctctttcccaacaaactacgatgccctcaataaactatatgtatttaccaagcaaatgtgtcacgcacactttgagactcttgcgatactagcagaattagatattctttctctgtgcccctaagataaatagatggtgaatatcactgtcagggtatttgctgtgttacctgtgtatgtttgtctctctgcctttctctgtgtgtgttcattgggagctacgattatgttgttattatcatgaatcttcgtgttcctaatgcttaacagagtgcttaaaaatggtttttcaataaagaaatgtagttttggataaagaattgaggaaatggccataacaagcttgtgtactgttatttacagggagacaaacagatccgaaaacagatctgtcgattaaaaaggctgtgacataagtctatgccagactgc

SEQ ID NO: 154485 - DNA, 585 bp, Homo Sapiens
gattcattaaatgaagagtggacgtttcttatttacccgaccagaggcagagctgcttcttagaaagatacacctgatgacacatttctggtcagagccagctctaaaaaaccaccaaccatcacatatgtcctcatggtgtcgtacgaagataaagttaccaccatccagatccgttatcagaaggaaagtcaagtttacttgttgggaactggactccgagggaaagaggactttctgtctgtgtcagatattattgactacttcaggaaaatgccacttctgctcattgatgggaaaaaccgaggttccagataccagtgcacattaacgcatgctgcagggtacccatagcaagttatagccgagcaaatgaaccgtcctcctgcctctgttgccaacacgagatcaatcagccttggtcaatggacaaacacttaggactgaactgaacccctccccatgaacacaagggttttatcctttcctttaaaaacagtgtttgaaatgaagactgtcaactatcccataatttatttattcttcttcaatgtttgtaaagtgcatgagtcatgttcacacttg

SEQ ID NO: 154486 - DNA, 604 bp, Homo Sapiens
ttaccattctgatgttggagcgccaggcccggcgcgcccgggctcctgtgacctgcgagcccgcgaattccagcggcataagataaggagcggcgagggcccaacaggactgaggtcagccagctataaatacgcctccagctccaccgcgggctcacgctggtgacctcgtgtaccctccggaggctcattccgtccatttggaaaatgcaaataattgtcaccacctcttttcttccatttcccctcattcatggtggaaaatgcttttaaaagtattcgatgacccgtatgtgaggaaagaggagataggcccctttttcaccaaatgtgactttaacctccttagtaatccaagaaatgtatcaagtttaagtcacttaacaaaagatgttcttttaaaggtgcattttaaaaaatcacttttaaaactgggtaaactgggtaaaaagaaagggggaaggaaaacaatgtgccaggcatttgtattgacacacattcttgcctgaagaggtgtttagattccagggtattcccttatattctggtataaatgtttgaattcccgtgtattttgtttcaattttttggtttatcttttaaa

SEQ ID NO: 154487 - DNA, 504 bp, Homo Sapiens
tggcatgtaagaaagtgccaactgtcgacagatgatccaaaagatttccttctaagcatctaacactgactgaggtcactgaagaccacactggcaggaatttcagggactgatgacatctccttcccttgtactcatgtttgagagagtaggtctgattcccttactgcaggcccccatgaggtctgatacggttcggctctctgtccccacgcaaatctcatctctaattgttatccccatgtgtcaagggagggacctggtgggaagtgcttgcatcatggggacggttttcccctatgctgttctcctgatactgaattctcccgagagctgatggttttaaaagtgtaacagttcccccttcacttgcgtgcttgcttgttctctcttgccaccttgtgaagaaggtacctacttcccctttgccttccgccataattgtaagtttcttgaggcctccccagccacccagaactgagtcaattaaacctcttttgtttg

SEQ ID NO: 154488 - DNA, 470 bp, Homo Sapiens
  misc_feature (97)..(97): n is a, c, g, or t
tttttagatccattcatttattccttcagccaacattttctgggattccttgtgtgctaggcctcgtgccaccatctggagatgcagagaggcgggnagacccatgtggcctttgaggggctttcaggctcgtgggggttcaggcacagacaccaccaatctgaaccaggggactgcaggatgctgggttaggggagagagggataggctggctggcctagggggtcctcaggaagtctttgggggtaaggagagaactcctgaaaggtaaggagaagccgagggctaagttacatttcgagtggatgggaaggggtgtggactgactgggctcctactcactattggggactgtgtatgctggcctggccttagagtcctcacagccagctacagtcccctgggtatctggtgccctccaagtgccagggcaagaacagggctgtggtaccactttgtctctccttccc

SEQ ID NO: 154489 - DNA, 278 bp, Homo Sapiens
aggagttactgagcaactaagaagtcacaacttttttcagttttattaatgagttgttatacttattttatagatagagaattaccattataacattgctccattgcccactcatccattcacgcatctgtccatccgtccatccacccatttgtccactccccaaatggtcatcaattgtctactgtgagccaagcaaagtgctccttactttggactctgaatccagtgctctttctacttcaccatagacacatgccccttgagtataagggagc

SEQ ID NO: 154490 - DNA, 408 bp, Homo Sapiens
ttgatatataatattgtatacattttgggggtacatgtttgatacttgtatacaatgtgtgatgatcaaatcaaggcaattggattatccatcatcttaaacacttatcttttctttgtgctgggaatattacaatttttctcttctggctaaagtatacaataaactactgttaactataatttccctactgtactactgaatactagaatttattccttccatctaactgtatttttgtgccccttaatggacttctctttatctcccttcttcccgtccagcttctggtaaccaccattctatgttctgcctccatgagatctacttttttagttctcacagtagtgattttaaatcttcagtctttagttatttcaatattttaaagtttcttcaattatatgc

SEQ ID NO: 154491 - DNA, 638 bp, Homo Sapiens
  misc_feature (413)..(427): n is a, c, g, or t
attgccgagtcatgcataacctctgtgttcaatcctttggggaactgccatactgttttcaaactggctagatcattttacattcccttttgtgtgtatgaagattccagtctctccacattctcatcagcacttatcttactttctgattctagccatcccaatgggtatgaagtggtatgtatctcattgtggttttgatttggatttccttgatgactaatgatgttatacatcttttcatgtgctaattggccgtttactgtacatttttcagaaatgcctatttataatagttcctttgctcattttaaagtacacttgtcttgttactcagttgtaagtgttctttatatattctagatacaagctccttattggatacatgatttgcaaatattttctccttaagnnnnnnnnnnnnnnnaattgcattgttttaagggcatttgtgttggaaaaatattttaaaaccttagaaataattttctgaaagcaaatattgacttatacaatagtaatagtaaatgatttcattgactgtacttccagtaaacctcttgttggaaaggtggtatgaataactattatgaaggtaaaaagaaataaaatgaaaattggatgcctgctagttaaaa

SEQ ID NO: 154492 - DNA, 570 bp, Homo Sapiens
tctatcagggcctctaatgagcactgttgcagctgggtcctatatccctttgtgtgtactagcagcatgtgtaagtagcacaggcacacacacgcagagatgaggggccatggtataaacaaaccatcactaattggttccaaaccaatgtttgcttattttttaaaaaaggtttctgtacttaattttaaggtagaagtacattaagttatgcttttcagaaagtataacaatactccatacgcctctataatgaatcaactcaagaggagttaggaaatgatccagctttcacttccagccactctgtgaaagcacattgctttttcacactgaggtcatgtgccacccactttcctccccctatttagcctctctttctgcctgtacttttagtggagaaaataagtaatcaagtgtttcagtttaaaagaccatttcttccatttcctacttcactataggctctgtatagaaataagagcaatggttaaacatattaattgaaggagtaaagtcagtcaagaggaagaggtaatgcctttaagttaaaggccggtcaaacacgat

SEQ ID NO: 154493 - DNA, 456 bp, Homo Sapiens
gcgcgcctgtggtcccagctactcaaaagaatttaagctctgataagtgctgtaacaggatgaacctgaaaatacactcagtgaaatttgacagaaaaggacaaatactgtgattctacttacatgaggcacttaaggataggcaaatttatagagacagacagtagaagttaccaggggctggggaaaacagggcatgggatgttattgcttaatggttacaagtttctttctgttttgggtgatgaaaaagttttggaaatggtagtggttgcacaatattgtaaatataattaataatgtcacttaattgtacatttataaatggtagattctatgttacatatattttacataaaaaaagtattagatctaaaactattgaattgtacactctaaaagatgaattatttgatatgtgaattctatcttaattaaactattttaggaaaccaa

SEQ ID NO: 154494 - DNA, 726 bp, Homo Sapiens
  misc_feature (614)..(662): n is a, c, g, or t
tataaaaaagtaaagaaataaagatggctactcattaagcagacagctaaactagcatggtttctatcccctaactagactccaacgaatgcaagagggataatagcatctacctcctaatacaacactaatacttattatcattagtatattaggctacagaagccaaaagcagaaattaagaaatgttatggtcagtagaatcaaatatacaaggatattggattaggttattgttgttggtctttcagagcaaagttttaaaatctgatttgagaaaaacctcccagcatgcacacacagccggactctcagaaaatgtttcctttttagtcaattcctacatggatgccatgcaaaaccactccatctatcaagctgtcagaatgaactgctaaattcttaatagtctcattcacacaaaatgtccccacagtccagtgcatctggagggtctggccttgacttgctaaatgcaggcacattcagatagccttcagaggtccccataacagcactgctgtctacaaacagggaatctatacatgtgagaggcacagagtctcgggaggttaaagaaggaagggaccaccccaaacttttcatgcttcagnnnnnnnnnnnnnnnnnnnnnnnnnnnnnnnnnnnnnnnnnnnnnnnnntgtcaccaaagtcacggccaacaacagcatcaagcttcctaactcctctagcacccaaactccc

SEQ ID NO: 154495 - DNA, 337 bp, Homo Sapiens
gcagagccttaatcttgtaaatactcattttatttttgagaggcttaatgtctccttaaatattaacctgtgtcattttgtaattatactgtaatagtgtcagaatgccattaacaaccaacccttttcgtttcttgtgtgggaaagctcataaattgtgtggtcttacccctctggaccctgtagttgtagcattgtgaaaatggagcttttggcaaaactttgtattatgctgttgactcacattgtctcatatttttcctttattcttctatattctatgaatatggtgctgtcctgtcatttaattattataatatatgtgaactgcatggaa

SEQ ID NO: 154496 - DNA, 473 bp, Homo Sapiens
catctccttgtgaatttctgtcccattttgaagtctgtccttgttctcgaccaagatccccttgatgttctgtagccaaagactgagaaaaagagttattctgaatgatgtagaggttgataagtctggtaagaaactgttggacatactccaagcagcactgcattgcagtcttttgggctgtcttcctacttcgggttgctgtcccctgagtgactacggaaggggtctggatgatggtttcttcagatcccacagtggatgctgtttctgtctcagaggatgtgctaccaattgggatggcagctgccccctggccctcactcagttctctgtcaatatcatcagttcggtctgcttgatattgtataaactcagtgaatccactctctgatgatcgactacttggtggattttctccatcttcaaacacttcagtaggattttcatgagaaactgatgatacctttttg

SEQ ID NO: 154497 - DNA, 645 bp, Homo Sapiens
tttgttttttgcttttagcatagtaaactctcctgtaatgaaaatgccacagttttggcagtgaacaaccagaggaatccccattaggattttccaacaaacagagataaatagctctttttcatgtacagaaatattggcttcaaaattagtgtactaaacacagtatatagaatgttgaataccattgttacatagtaaaaattgctttttttctgtcttagattatgttaaaaaatgcaaaccatggccgatttttttggcaattatttcttaagaccatattgcacaaaagtccttaaatacagatataagttatgctactggattaaatattacaacaactatgtggcaaatgaagcattttactttgcacatgcagtctctggagatacacgaggagactgttcataggactacaaatacactttgcttgcaagtagaatgagtcttgaataaaacaaacaatttggcaattcattgttttgtgtggtattttctccaaacttaaccatggaaaaccttgataaaaatggagacaaagaccataacggttgtgttttcacagtagcctgaggaatgctaaactgtagttctccaggaactcagtttctgatgttatttaactacttttatttcccatct

SEQ ID NO: 154498 - DNA, 779 bp, Homo Sapiens
  misc_feature (714)..(714): n is a, c, g, or t
aattattaaaaacactttattatgtataatttgtacatgcttcaatttgtgtcacttagggtgatttattttccaggttgtaatgacatctaccgagattagctagatctaattttcattctgccatgccacatacaaaaatacaattttcaaacaaagcttcccttctttacacaaaggtacacaagagtttgtcagacaaataaaataagaatacttcacacacgtatcaacaccatacaaggcattattcttcacacagtaacatctaatgtgttcttttatttttgaaacagcaggaaaagagccctttcccttcagaggaaaataaaaactttatctgttgcttaagccaaactccagggaggaaggtgtggtcctctggggaaagtagagggatggggatgtatggaggagaatggacgccccttcatattcagttcaggaggaaggaattgcaggaggttcctcggggacagtcacacagcttcccgatccttgcccctttcctcactgcacactgctcaccggcgtcacacatggggacttggccatacttcttctcatagatgggaacacgtttactcttgaggttcttcaagacttcttgcagcgcttcgatcagctccttctcgtgggaggcatcatccccgggagagtagatgtccagggctcggggctggagctcgggtgcccctgggcaccggtacccanaaaaggtggcataagagcagagggcgggccacgaaggggagcagcctcaaggggggggcttccaa

SEQ ID NO: 154499 - DNA, 905 bp, Homo Sapiens
  misc_feature (255)..(382): n is a, c, g, or t
  misc_feature (725)..(791): n is a, c, g, or t
  misc_feature (824)..(845): n is a, c, g, or t
tcattttacaaccataacttttaaaattatactggtggcgagggagatgcatcttcctagccatggcactcctggggaaaggctgacttggcttatggctgtcagtgcacagcagcgccagtatgcagaatgcctgtgcctctgctggagcagctcagtgaggcggacaccaggtcactttaactagttttggtgccaaactagttttgtgagatagctgcagaagtgctcgtttctgtctgttgccacttcacnnnnnnnnnnnnnnnnnnnnnnnnnnnnnnnnnnnnnnnnnnnnnnnnnnnnnnnnnnnnnnnnnnnnnnnnnnnnnnnnnnnnnnnnnnnnnnnnnnnnnnnnnnnnnnnnnnnnnnnnnnnnnnnncactttcatttgttttaaaatttggtgttctgtccacatagttcagaattcaaaactgcttacaggggaaaatttcctcctacctgtgtccccagtgcagccagcattagggcttttgtatttctgcagagattatgtgcatttgtgggcagctgcgcccgtgggcttccaagggggaacttgctgtgcagtgggtccttgccttgcttttctcccttagggtaactaggtgacctccacattagcatattaagaatgtcctttttttccagctacgtagactagaaatgtgaggatgtgcatttgaagtgtttcctctgttaggttgggtgcggtgcctcannnnnnnnnnnnnnnnnnnnnnnnnnnnnnnnnnnnnnnnnnnnnnnnnnnnnnnnnnnnnnnnnnntcatctctactaaaaatacaaaaactagctggnnnnnnnnnnnnnnnnnnnnnngaccgcgtatgcggccgcaagcttattccctttagttgagggttaattttagcttggcac

SEQ ID NO: 154500 - DNA, 406 bp, Homo Sapiens
tgccttggttttctttcttgatgctggaaaaataaacaaaccggtattgagtgtttaggcgagtggaaagtggctacaatccaaaattttaaatttaactctgcctcggccattcaaaagtctaataacaaaaaatgtaaacctaatttggcagtttgttaggttagacaactgacagcctcatttcattcctacaagttggttttcagtaatctcttccttccccccagtaaggttgtatgaggctcttggcaaacttcttagtgcaagcaatggttagattaatttgtgaggcagctctttaagacgttcagaggtaagaaatactggatttataaagcaaatggctgtttgggggattccaaggatttacctaattgtccaattctacgtgctctcggagacc

SEQ ID NO: 154501 - DNA, 585 bp, Homo Sapiens
cggtaccggtaaccgggccctttccacctccgcctccattcaactggaaaatcacatcaggtttaggaaataaaagtcctgttcacaaagaacagaatgagaaatggctgtttaggatagaaacccatggccacctcagggtctagtagcagtgccttactttctaggggggaacatgaaactgtccagaaagcatatgctactttccagaatcacatacacagctctctaaagggaagtcagggcaactttctagaaaatctgagttaggtctctttgaagtggttcacgtgttctttccctgatgaatatctgggaatgtcccccatgtggacctggtgttcttgtgggttgagggaaagttcttggcttagagcagtggaatatggagaaggttccacacctcaggaacaaccccatgaagccattttcttttatagctttaaaaataatgaatttgtatccgttaattatatttctgtgcaattttgttgattttgatgaaaatacaaattcaactggaagagttttagataatataaaacacaactataaacatcaatgaacagttttttagaaatcctt

SEQ ID NO: 154502 - DNA, 690 bp, Homo Sapiens
  misc_feature (22)..(22): n is a, c, g, or t
tgatggcacgacacaggtctcntgccactgaggcagcttgaacttcagtagttctgcagactgtaagtgataataatgtatgtggtctgcacagccacagtgcttatcaaccagacagcagtagcgcttcttctcttcaagcagagcctctttgcaaccatctgcaatgaatttctggatttcactctgacgagaagtaacggtctccacatactcaatttctttgtgttcatatttgagtgcgtttcggcttccttggcttttccttctgatcttcttcaactcagcttgggatttctccaaagactctaatttattcttgtgttctgtttggtatctttttagagttgcgttcatatatttcacgtcaagttctatcttcttctccagctcatggataatctctttgtggaattttttaaaattttcatcaagactctcgttgagtttcttgtgggtacttgaaatctctatgaggacatgtcccagttcagttgacacgggggacccagtggcaatctcaccgatcttggccactccatcgtagtaggcttttcctgccaggatcatagcgtttacagctttctcataatttttccccaggtttattaaatttcgcagcccaggattgaactgttccataacattccggtaggtgctctccgtgagccggttcacctcctcgggccc

SEQ ID NO: 154503 - DNA, 888 bp, Homo Sapiens
  misc_feature (63)..(84): n is a, c, g, or t
  misc_feature (859)..(859): n is a, c, g, or t
cgtgctagagctaaaattaaccctcactaacagggaataagcttgcggccgcatacgcggtcnnnnnnnnnnnnnnnnnnnnnngaggagaaagaccatttatttctccacccacagtgggactggtaggttttgaaaagagcaatcgctggcatccctttaaatcttggctgactcccaccgtggcagccaatcagcagaggcggacgtggtgagttgcctgggcaacaggcccctggttggccgaagacaattagccaccccactgcccactcccaacgaaagggaaattgactctctgctgtccactctgctttaaaatacatcggcccaaactaggcctcctcctttcgctcctgaagtcagaagcgccagcctttggctctcaaaattgggagcgatttggtggagaggatggggtagggaggatgggagaacagcgcctttatctgggacagacagaaggcctggagatgggaagggagaaggagatcagagtccagagagatgaagaggcacagacacaaaatcaggaccctctagtccccgctcgtgctggccattttttgtagaactgctcagtcatctgggggcttccaccccatgggcccacaattgcccaatcagtgggtggcagacatgggtgatgacacggaatgggtgaggcatctggggtacactgagtttcccgagtccctctttgccccccgagccctggcagggccctaagggcttgccccgcatcctccattttgcagacaaggctgtacagatgccactgagacacagatggcggatcacatggggggggtcatggggtctttctgtctcttctcttccaccctgggggcaagtacangcacgtgggtgtgcgtgatgagttcacag

SEQ ID NO: 154504 - DNA, 423 bp, Homo Sapiens
gtgagctgatggctgaagtgtaacagtacatcttcaggtaaagagagggatttctcaatctactttctgttatgtcagactataagagaaaccctttcagctgctttctagatgtacctaaattcagtcagacattttggattaagaaacctaaagtcctgatacattacatactccaaggaaatatatcagggacagacaattggctgaaacactgatacttcaatgtgacacatttttatagaacatttctaccagggggtactgaccttgatttctcctacaaggaccacactgcctttgtgtttaatgtaatgcaatttgtgtaccttctaatcatatatctgcagttcctcatttttataaaactttgatatcatgccagtaagctagatgttgaatgtatgtaagtagcatttggta

SEQ ID NO: 154505 - DNA, 378 bp, Homo Sapiens
aactggttacttttttatatatggtcaggttttatatactgataagacctacgccatgggacatctaattcagaggaagaaggtccatgtctttggggatgaattgagtctgttgactttgtttcgatgtattcaaaatatgcctgtaacactacccaataattcctgctattcagctggcattgcaaaactggaagaaggagatgaactccaacttgcaataccaagagaaaatgcacaaatatcactggatggagatgtcacattttttggtgcattgaaactgctgtgacctacttacaccatgtctgtagctattttcctccctttctttgtatctctaagaagaaagaatctaactgaaaataccaaaaaaaa

SEQ ID NO: 154506 - DNA, 449 bp, Homo Sapiens
tttttttgagatgcaattttaaatagggtggcttggacagccacctgagttgggtttaaaagctgccagctccagccgtccagctgtggggccacggtgccagacagtggtggtggttataggaccgtaggtgtttaccaaaactagacaagtccacataacaaccaactgcacaaataaggagtaaaataataaagagaaggacgtgtgaggcaggactggattgtagcccaggataaagagaagttgcgggatgacagctgtgccgtcggcccagacagaaccatctggacagaggacagaggataagggagatggttgaaaatactaccatcatatgataatgacaactaagccacaggaaaacaaggcagttttaacctcaggggaaatccctcagaaatggatggaatctaccagaagcatcatggaggcggaggggaaagggc

SEQ ID NO: 154507 - DNA, 591 bp, Homo Sapiens
aattcatgccttatttattgatccaacaagtatggattaatgcattttaacctacactgataatatatgttacttttctttgttaaaacaaaacttagctagaagtactaaatttggggtaaagattaggttatagtattgaaaccttagataaaaaacagctagataaaaaaagactcaaataatgttcttttaacattttaatacccatgttctatttgataaatattgaaatggtatattcctctcactaaccccaagattcctatatgcttcccttaacccaggaacacctatctgttccttttgctacttgccaaccatcatcgatattcaagtttaccttctgtatatttgttccagcaaagccatttgtttattttaatttaatatagtttatactacaaaactatatgttgttttcaaatataacatacctcagcccctaatctgtaaatttctcatatgcaccctgatcgaaaattactaggctaccacttgaacattggccatgaagataataggacagcgaacaatataagtaggtagaataaagatatcaaaaaagattaaaacaggtaataagaagtt

SEQ ID NO: 154508 - DNA, 438 bp, Homo Sapiens
acttgatgtgatcccatttgttcatttttgctttcattgcctatgcttgtggggtattacctaagaaatctttgcctactccaatgtcctggagacgttcctcaatgttttatttcagtagtttcatgcttgaggtcttgggtttaaacctttaatcattttgatttgatttttgtatatgatgagagataggggtctaggttctttttcctgcatatgaacattcagttttcccagcaccatttactaaagagactgtcctttccccaatgtacattcttggcacttttgtcaaaaatgagttcactgtaaatgtatagatttatttctaggttctctattctgttccagtggtctatgtatctgtttttatgccaggaccatgctgttctggttactatagctctgtagtataatctgaggtcaagtaatgtgatt

SEQ ID NO: 154509 - DNA, 593 bp, Homo Sapiens
  misc_feature (298)..(306): n is a, c, g, or t
tgtcgtccagcctcccccatgtcaccagcaaccacgtcagctacaatggcctgtatggagtggcagtatttagccagaaggatggctccagcgagttacctcgaggctacagggctcaagagaacttcagcgaggatggggacgccatcctctgggagacagagctggagaaggaggacgacccactgcgccggcccatcaccatagctcttgttgagtctaacagtattaatcacaatggaggtgagtataccccctcagcccctgctcaagaaccttccatggctccccactgtcnnnnnnnnnctccaatttaaaacttttaatttaatttaaatttaaaagtaaactttaatgtcaaagatgcaaacctgggtagggcagaaaaatcacacacaaggttgccacttcacacttggagggttgcacagcggccaggcagaggcgctcctcacttcccagacagtgtgggggccagggagaggcgctcctcacttcccagacagcgtgggggccagggagaggtgctcctcacttcccagacggtggggcggccgagcagaggtgcttcttatttttgagacggtgcggcc

SEQ ID NO: 154510 - DNA, 458 bp, Homo Sapiens
ttttaccatgatgtttaatccaactgacttttcctctggccatgcaggcaaccgggtgcagacacagcggtatcctgtgtctggtcgcagaaacacctccatcacaacattttggcagaaggcactcaaaccagaccccaacacaactggtgaccgccctcagaaacagctcaatctagtcttacaaagcacttttaataaatgacatctagatgtacttctcaaccatatcattacaaatcaaatgtgagttggggaagtgtaaaagtttacacttttgtttgaagcaaaaggactttcagagcattttccaattcatatatcttttctaaaagggagtggagccttatgttctattcttagagcagaaattctagtttttgaaagagatgcggatcagctcaattttagaacaagtatgggaaagttgaataatctttctgaacacgtttgtgcag

SEQ ID NO: 154511 - DNA, 776 bp, Homo Sapiens
  misc_feature (641)..(716): n is a, c, g, or t
caaaaacaaaacgataaactaaaccacaaaaaagacccgaaggcagaaagcctggaagaatgatcagattcccagcaagaagtcaaacaccaccgtccaaaacagaggccccaaggtctcgctgatgtgagctgggtgaggctgcccctgcctggtgtacggcttgacagcacccagggatgaagggcgccatgttggcaactattatcttatgtcacaagatgcgaagcaagtgctggcagaatgtggctgtcttcccagatgacggggaacacagccagcacacactgaagggataaggggagggtcctgtgctttgctcagggtcacggccagctctgcctccaagcagcagtggaccaaggccactcagggctctgggaaaccgagctacagtgatctgccctggggcagggtgttcaagggagacacccagcagcctccaccatatctagcacgccagcgtcaaagaaccaggaactgtgagcatgggttggtccctgatggttgagggtcttgggtggggttggaggctgccccacagaaagctggacaaagcaaggtcaacatggcattgtgcttggtcatcacaggcacttagaaagagccttagttagcctgggcaacatggtgagagccgnnnnnnnnnnnnnnnnnnnnnnnnnnnnnnnnnnnnnnnnnnnnnnnnnnnnnnnnnnnnnnnnnnnnnnnnnnnnttcagtgagccatgatgtaccactgcattctagcctggctacagagcaaggccctgtctc

SEQ ID NO: 154512 - DNA, 558 bp, Homo Sapiens
atccatggacattttatttacaaaatcttatgatcataggtttattaatgatcctcagacgttttactacaaaaaatgcttgagattataaaccacgacagaaacaaataaaaccacctcatgatagtcttggaacactaagaaaaagtcctaagactaatattaattgacttctatggtcaatggttctctgacattattgtgtgaccttaggtagtaaattagccactccacaaatttgtttacttatttaggaagagaagtagtaagaattcctttcctattaccacctcaaataattattgccaaattatatgaggaaatacacaccaaaatactttgaaggcttcgaaattcagcagaacttcaaactatcaaccaaacaatatacgagtgctccagttcctctacattctcaccaacatttggtgttgtcacttttgaatttttcttttgagaaagggtctcgtctgttgactcaggcggtgttccgtggtgcagtcctagctccctgtggtctcaattcccgggctcagcgatcctaccacctcagcctcc

SEQ ID NO: 154513 - DNA, 633 bp, Homo Sapiens
ggcctgcccggttaccccacgctacacttcctaagtcagcgtctccagtgttaggggctcccagtgacactgcataatcagtctgtgggtggggaagctttgctctagtctgtgctcgttgccctcactgtagtctgcgagggcagcaacttaaatagtaactgccgatacatgaaaatagagtaagaacttgggggaatgagtttaagtcaaatgataaacactaaccctagtcctgccagcaagaagagacaaaaacatatctggaaatgcattttctcactcaggatgcaacccatctatgccctgcagcctgaccaagcagtgctgaccactgctggacaaagaggcaggagtcagtgacatctgttttattatgtcaaggctggcaaatacctagcatgaatgttgctagttccccactgtgcctatgatagacatcactaaggaactgcacactcttcccaatccacccaaacagggcctcggagccccctgaatagactaccactccccagaaatcagagctggctggaaagtgaagcccacctgccctccctgtcctcagcctctctgcacattgtggcatcacaccaacctccaaggcaatccaaatgagaaccctgaggaaat

SEQ ID NO: 154514 - DNA, 266 bp, Homo Sapiens
ctcaatcgattcacagtttatttatccaaggacacaccctggaaaaacaaacacaaatcgcaggagcatctgtgatctcttttctaaagggggttttgggaacttcagtctttaaagggggaagacaggcaggagggggaacaaagggagggaggataggcagtgaggcagatggttacatttttgtgaggcttctgctaagcccacccccgtcccgtcccaccccacccataaatctacattttacatgtgaaaaggagtagagg

SEQ ID NO: 154515 - DNA, 600 bp, Homo Sapiens
  misc_feature (122)..(168): n is a, c, g, or t
  misc_feature (170)..(223): n is a, c, g, or t
  misc_feature (322)..(413): n is a, c, g, or t
tgaaactctagggggtggtatagtgggcaaagcttgcccttagcacactcccattttcctcttgccttgaccaagagactggttggcatttgctgactctaagcttttcctaatctctgtgnnnnnnnnnnnnnnnnnnnnnnnnnnnnnnnnnnnnnnnnnnnnnnncnnnnnnnnnnnnnnnnnnnnnnnnnnnnnnnnnnnnnnnnnnnnnnnnnnnnnntcaccaatattgtcttccttttgttcttaaacccatagttataatttcacaatcccatatcagactcatttcctctactccctctttttatgtgtttannnnnnnnnnnnnnnnnnnnnnnnnnnnnnnnnnnnnnnnnnnnnnnnnnnnnnnnnnnnnnnnnnnnnnnnnnnnnnnnnnnnnnnnnnnntatgggtggggtgggacgggacgggggtgggcttagcagagcctcacaaaaatgtaaccatctgcctcactgcctatcctccctccctttgttccccctcctgcctgtcttccccctttaaagactgaagttcccaaaaccccctttagaaaagagatcacagatgctcctgcgatttgtgtttgtt

SEQ ID NO: 154516 - DNA, 315 bp, Homo Sapiens
aggggaagagtaaattaattttattgactgatgaaaaactaaagtgataagaagtatggatagtagacaaccactgaattctgctggaattctctatttcttctttttcactttaagccaaaagaaataaaattatagaccattagggagctagttgcttttagttccttcaacaaaaactgcatagtttagcagttgcacagcattaaatatatacaactttgcaaaatcctggaagttttaaactttgtgttgacttcaaaggctaatgtaatcacctacactggtcggattcagagtttcttttcccttttc

SEQ ID NO: 154517 - DNA, 676 bp, Homo Sapiens
  misc_feature (194)..(230): n is a, c, g, or t
caaatgatcattaaattgccatctctcttatatttatcttttatttatctttccccccctcccagtggctctagtgaaagcagccttcccagaaaaggtaatgccgacatgccccattcccttacagccactgaatctatttggaaattgcaaataatttaccttccctctccccttccccctaccattggacnnnnnnnnnnnnnnnnnnnnnnnnnnnnnnnnnnnnnccaggagaaaaacaaattgtaggacacttccacccactctcacattttgactttttcaagtccttgagacctgggagttctagatacactcgagaaaccttttgttgtcatctcctgaggtcactcagcttgaagatgacttggacctccgaggaagggctgaggccaggtgccgctgagtgggccctgaggtcctctggtagacggatgacctgcaggctgggagcattgcatgccttgtgactgccttgccttttgttttggactgacgttggttaactcaatttggtgaggctccgagtctgtcaacaaataatgttgagcaaccgtatgtttaatgtccccaggcatgtggctgaaaccttttgaaggcgaagggtggaaggcgacaacctgtttgtaagtcaattctttgcaaatttttgtttcccgcagtcctctcttgg

SEQ ID NO: 154518 - DNA, 708 bp, Homo Sapiens
caacgacgatggatgcctttctctaatgtgcgcacagccaggccgctcctctgaaggcgctgagccgcctctaatcacagcgccacactggccacaggtcgctgggtataggatgaacccagctgtgaataggatgcatttcctgggaggtttctgtgaagttactgaactgccaaaaggtaagcagttttaattgatttgtgagtcttcaattaagcacagcagaatgctaattaaatattctctgttctttaaatagagaatgctttaaataattcagcacaatctttgcataaatcacaccattcagctgaggtgcctgtcagcagtcaagtgattgagagcacaaactgtcccaaagacacagcccccttccccctggagacgcgcacagcctgcagaagagatgtcacctgatgcagcgttgtggtttaaaaactcattatgggaagcatgaggctggacccaggggaccctggaggtgatgcaggggcctttggcagcctggaagctgttggaggaggggcccttggtggaagtggggacagtttgagcctccggcctccaattccctcccgctggcttctgggccgcacctccaggaatccagctagacccgcagggctctgactccagactttattaaatgtttcctctaacggttctggccattttgctgggccattaaaggctaccccagggcctcag

SEQ ID NO: 154519 - DNA, 664 bp, Homo Sapiens
  misc_feature (152)..(152): n is a, c, g, or t
caaagctattattggatctattcaggtggcctgccaagccggacaattatttcgcggcggaagggttcagtctgcagtggaaccagtcctcccccaagtgaacccagatttttcgatggcagcaccagcaacagggtatcattagaacgganctgtctcccaaatacatatttccaaacatcagtcttctgcaatgggttaatagggatgtaacctcctctctaagttgagacacatgctgtgtatgaatcctcccatcattcattatttcactttccaacaaattaagactccgcaaaccatcgttgtatgtcatcttccttagagaaatccatcccgcttgtaaaattcagtgtggaattccctcagcctagcacagctccagcaaaagcaggtcttatttagttgtaagtggaaaggaatactcttcttggcgccgcgaacgcatgcgggggcccgcccctgaggtgagcgcagctcctcgacgaagcggggcgcagccgcccgctccggagctggaaatggtgacaatccctgctaggaccggccgagggctccgtacagggacgcccgcgaggtccggcgagtcgcactgggccgcacggcgcatggtagtgcagcaggaacccggccgttttcccagccggcaggaaaacaaacaaaa

SEQ ID NO: 154520 - DNA, 675 bp, Homo Sapiens
tttttttatggtgaggcagagggagtaacctttggcgtcaacagaaaagccactaggtttcctcttcttttcttccctggtgagtgatactttttggaagatatctcagaagttttttaaaagctcatttatgaaatataacaagacacattttcaatatcatggaacttaggaggatacaaaaagcaaatataattttaatcacaacaggaggagtcttttattgttttacccccactctcgggcatcctggacacgcattaacagtctacaacggagggctcattcacgattataaaagactgtgaaagatgagtaacgatttaaggcttctctccagaggcccttccccagctccaggtttaggctgaactgcccacggggaccattttcttgctgcctaatctccccctcttctcccgccccacgcggttccacccactcgcgcgtctcgggactctgatgaacgtcctaaactccagcctggacgctctgggctctggatctgaagggcgtggaagcaccagaagtcaaggccgccttccattcttccctcaaggcctcaaccaccctccgatcccaaggttgcgtggtccgggccgcacaaccctcctctccctagctcagcgcctcctccacccccacccgatgtccccaggaagggtcagcgcgggg

SEQ ID NO: 154521 - DNA, 284 bp, Homo Sapiens
caagaaattaagtttttaaatctataaaaatgactgaatcctgtataggagcactgagaaaccagagaagaaatgctgatgtaataattcgaaagataaagtagacagcaagaccaaaatgaaaccctaggacaatggtgcaggacaaagaaataccactggagaaagaggagaattattattgtaaagtgaaatagaactcacaggagtaatcaagtagtagttctccatttggagaattagcatgctcataacttaaagatgataatgtgttgtatttgtaa

SEQ ID NO: 154522 - DNA, 406 bp, Homo Sapiens
gtatttttacaagtgtgtttattaatttattttccaataggatttaaatagaaatgctattctcaagtcatctttcttgctgggttttaatgaggaaacaggaaagggtgaaggaaatccttgtctaaggactgcactatagttgagtttgatttttattgcacacttcttcccccacctttcactgatttttgtatttataaatgaatttgcggtaaggtgagctgcacggaaggaataagaagacaaatggcgcccactagtggggaatccgcactcacaaaagcacaggatgctggaaaacagcctgctcagaatttgttagcaataattaaatatagcaatcagcaaagtatttgacttggctggacggttttcgttaatatgaattatttatttgaaatgt

SEQ ID NO: 154523 - DNA, 396 bp, Homo Sapiens
ttttgtatgtgaatctcacaatatctgttttattaagatagtaaagaagacttttttactacaatagggttttgcagtagggagagagatctggctcaattccttcacaatgcctttctgagagaagataatcctcaatcccattcttgcccaacaagcatttgttattaagtttttcaacactttcatcacttggtagggaggtctccattcaagatatgtgtcagggaacatatcaaaagcagccattcccctttccccttccccatgtttttcacttaagtataagagatggtgagctctgtgttggtagggatgttcatcttacgtgccagactgacctagcacaggtgtttgtttgtttgtttgtattggagttttgctctcgttgcctag

SEQ ID NO: 154524 - DNA, 501 bp, Homo Sapiens
  misc_feature (162)..(206): n is a, c, g, or t
agtttacctatgctctgggtagcactgactggtactaatttctgtattacttagagttttgtttacaaataccaaaaactaagtgtacttaaatattataacatttttagaaagacttattgcagaacaccagaacatcacacaaagccccttgctcagtgnnnnnnnnnnnnnnnnnnnnnnnnnnnnnnnnnnnnnnnnnnnnntttatctattaatttgtgttgcaagagaagtcccatgtgtcaagggatcaggtgccacggacttggagctgtggctcacaggtattgaatgaatgagcaatgtgcgaatgctgagtgttcaatcttttgggtagcccctgcattcatccaatctggagaaatattattttgtggtctaaggaggctaaagtagatccacctgtgcctggaggcacacacgcttctcaacagaaagcaatcgtgttctgccacctccatcattccttccctttgcagggtcgtgcctgaagttttg

SEQ ID NO: 154525 - DNA, 624 bp, Homo Sapiens
ttcacttcttaactattttactttaaggaagaagaagtctctccacagttgtttactttccacgaagctgtttcacaaatggtagaaatggaagaacaagttgtagaagatcacagggcagtgttccaggtaaagtaagacaggactttccttcaaaatatttcttgagataaattaagaatttgtcataattccttaaatatcacactattccttaaaaaatacttgtttgtatatatgtatatgtgtatttgtagggcatgtgacatggcaaatttttaatacaatgaacgatggctacaaataacatttctttgcaccatggtgaaacgttctactttatttacctcccgtcccccttattggtttttgtcatttgtccatttttagggaagagtgtcacttctgcccaccagtacttccttctaaatgttaggccaatgtatttgatagcagttaagaaaaactcttttaaagggttttggagcagttgaggaagtatcagttgttgcagaaaagagagactacttacttcaggagatggagagttactgctctgagctgtcagtggcaaagtaagggaagggtgttatatcaccacctgtagcagtaactccttaggca

SEQ ID NO: 154526 - DNA, 985 bp, Homo Sapiens
ctttgctggacttgtcttccgaaaagtatgaagagtggaagtcaaggctcagaatggcgtccttttttaccttatcaccttaacaaaaacttcaccttagctgcagggttaaacctctgggttggggctggggattttcgttgttgttgttttaaagcagcagccaaggccatgttttttaaggtggtgagttaaacggagcaagagctgcggtagccttttccacccaatctctttcttcacatcctagtcacagccaagggtagggtggatggcagtgaggataaacagcccagaaacaggattcctgcagggtgggactggcattttccatttttatctgaagttgtactttgaatgcagacacctttctctcaggccagaagcactgctcatttgtattgctggcttccagttagcctatttgcaaggattacttaggatttccagactgcaggcccagctacccagagagtgtgcctcaaagccccacctcaaagcttttatctctatgtggcggaaacacccacgaaaatgccaacggcggtatttgtaacttgccttcttccttttgggaactgctttctgcagctctctctgcgttagaggaatagctacagctgggagctgctccagccacgcaggaggagagggcacccattgagaggcgggcaccccttctgtctccctctggctatgttaactggaaactaggaaaggggttcagatcaaagtaactgctgtcttcagaaagttccattcattaactaagttagcggaaattaaatggtgtttggaggaaggtcatttcagaagcccaggccagaggctgaggtctaaaacttctaatctggacttctattgaagtttggcagtaagttaaacaggaagttgaaggctaccatatgtaaatccagttgttgcctgaaatcagtcatttcaagggagtatcttgaaaggacacagactgggaaacagcgcatga

SEQ ID NO: 154527 - DNA, 431 bp, Homo Sapiens
agaagccacagttttccacacttccataactgtaggctttatataaggcaaaagcaagatggatccactactttacatggaaagaaatagctctgcagcaaaccccagggttgtgcagttacagatcaaaatgcaatgtacatgacagatataaaaaacagtgtggaacaaaataatttaaattatggttacaatctactgaaggaaatatccacatcttattataaacacatttttagtctagggttgtaatttaaatattcgttttttttacatacacagttgagacgtaaaagcaaaataacatttaagaggagaaaactttgacagaagacagtagttttgaactgcgcgcttgatgttaagtcatgataggatcgcccccttgccgtggcaattaagagaatcaatccattggtatgtagccatcc

SEQ ID NO: 154528 - DNA, 501 bp, Homo Sapiens
cacccggcgcggcaacagtgcagagtggccacatctggtggaagaagaaaaaaatgtagttattgaattcaatcaagtgtttgcatctttcaagctatcaacaaaattccatcaagaaaggttccagttggtctcacagacgtatggatatccgaggagccacctaaagatggagaaatcaaggcatagagagattaagtgactttgccacagtcacaagctggagaggaccaggagtagagcttagagcgagcccctgactctgggcctgcgtcctgccaggagtcacgctgcctccgttcctaggagagaagacttcctgtaagatggaggtggacaccgaggagaagcggcatcgcacgcggtccaaaggggttcgagttcccgtggaaccagccatacaagagctgttcagctgtcccacccctggctgtgacggcagtggtcatgtcagtggcaaatatgcaagacacagaaggtgtatatggttgtcccttggcg

SEQ ID NO: 154529 - DNA, 749 bp, Homo Sapiens
agaataaaggcagatcatgggttaatttattttcatcaaattatgagacatgtagaaaatcggtaaactatatagctgtttttcactgaatgtaatgtcttaatttataacctctaagaatgctaaatgatatatatcatctatgtattgcaatctaattaactggatggctcttttagagaggaatttactctgatttgcttggcactagcacacattcctaggcataatagagagtaaaaagacttgcaaatgtgaagaagaaagatttacagaatctttcttctattcctaccctcctatcccctcaaacctttataatccctgatggcccagtattcctgaatctctctaccttgcctcagacctgcttactaaaatgtccattagaaaatccaagcctgtcttactgaccatcctggagcaaacatttaatttggtggcaggttagtcatattgaacattgttctaggaggcacagaaccatgagtcatcctatcattctatgaggtcttgtactgattcctaacttagatccaacaaccgtttttctgattttatttaattccctatttcctggttcataaccatggccatgtaaaagcttcaggttcttgcttgccacaagctactgttcccaagtaatggcagatgagcaagtatgtgacatcatccaactatagatgcttatgagcaaataccttggctacaaaaacctctttgctgggacagaaatatttagaaatgtc

SEQ ID NO: 154530 - DNA, 413 bp, Homo Sapiens
gtacttgactagacactccagaggctggctaatttattgtatgtgtagtagagatggggttagctgttgtttgattttatatagaccgtgacgtgtcttatgatatgagaatgggctggaactatagcctcggggtccttgccctttcctaaggacttactgtttattgatcagtaaaagtgaaacaggagcatgtttaaaataatgtagcctcattttaagtttctgcactcttacaagtcaatagatcatgggttatttaaaaatgattaatttggggtttgataagcatttcctgcctcacagatgaactcaatttgtactcacctctttccccccagcccttactactttagtgcacaccagcctgactgccaactgcccacacagcgcttctctgcctagggactttc

SEQ ID NO: 154531 - DNA, 942 bp, Homo Sapiens
  misc_feature (458)..(518): n is a, c, g, or t
tttgctagaacgaggtcacttttatttttctttttgtatgaaattggggatgcaaccagaaggaatcacacagagatatgtgacacagacccctggggcctgctcttgggagtatcaggaagaggcaagggtcacagggcaggctggggagagaaaagaggcagatgggaccaggtaggattgtctaggggtggagggagttgaggaaggacatccaggagccctggagctgggggaggagcactatcctggaggactagagtgtcaggacaggtggatctggggaaaggatatggtgtggcaagcaaagggcatgctcacacacaccaggagttgaagaaggagcaagaaaaggaaaggcgtaagcagggaggaagcaagagagacccagctagagctgctgggagcccctcactctaccccaaagtgcacaactcggcaataaatagcaatatttnnnnnnnnnnnnnnnnnnnnnnnnnnnnnnnnnnnnnnnnnnnnnnnnnnnnnnnnnnnnncttgtagagctaggagtttggtgcgagggaggagggagcacagaaatgcagtgagttcatttcttctatgcaggttctaaggcccttcattccactgctgaccctgcgctatagtgcgcaggtggggatcagcagcatggagtaggggcgcagagttgggggtctcttcccttgccaaaggcagctcaaggaaagagaaaaaaatgtaataagtaagtcctagggccaggagaactgtgcatttttagagggcaacaattgggcatcctccttgcgttggggggaggaaccagtgagggtgctgcacattttcagagtgggctgagatgaggaagcagaagtgagatgtggcccactcgttgcctgagccttctgcaaatactccgggctgtttgggatgtcatcccctaatccggaatctagg

SEQ ID NO: 154532 - DNA, 451 bp, Homo Sapiens
  misc_feature (382)..(406): n is a, c, g, or t
caaaatggaaagaaattttattaactgcttctattaagaaaacactattcgacttatgaacctttatgtgaagaaaacttgcaaaaatatctcacatcaatttttgtatgaaagtaagaagtaggattcatagtgtagattcatgttaagaatgaggcactggtaaagagaaagagaatagagttatacgttttcatttctttcctattgcaaattctctggagcattatacatgtcttaattttaatcagattttcctaaattacttacatttatagcatttctagacagcaggggttgggatgaagaaacttcaatccagcaaagtttgtatatatacattcatggaggtgacatttaagtcatttcattaggaaactcnnnnnnnnnnnnnnnnnnnnnnnnngagacggagtgttgctctgtcacccaggctagagtgcagtggcac

SEQ ID NO: 154533 - DNA, 822 bp, Homo Sapiens
  misc_feature (252)..(294): n is a, c, g, or t
  misc_feature (343)..(358): n is a, c, g, or t
taacatttctttctcttctccactctccacccccctcctaaatgttccagcccggttctctgcatgcactattagcttggaactgtgtcgaaaacttttcagagttttggctcgatgcttgcaggtttcatggtcttattcccaagagcctcctgtctcttctcataagttctggaattatctctagttacgtgcttatcacagggtatgtttcccactttgcaaatctccatttgggtggatcccaactgnnnnnnnnnnnnnnnnnnnnnnnnnnnnnnnnnnnnnnnnnnngaggcaaagtataccacattttctttttctttttgagacaccatctcannnnnnnnnnnnnnnngtaaataaataaataaagttttacatcactttttttcttgatcaaagcaatgctaggtaattaaggacattgttggcaataacagaaatgtgtctatgaaaaggttcttaagaaggtgactgtaacctcacattctcctttcattttctcccccatctctgcttctctctagggtgaacacagttggtctgggtgggattggggttgtgctgtgtggggcagaggctgttcgggattcgtgatgggaattcctaatagtgacccttgggtcccaggaacaggagacacgggccagtcaaaggcatgggaagaagctaggagaagttaggattcgagttaaatccagtgccaacagggtgaccagttgtctaggtttagccaggactgagggctccctgggatgtgagattttcaatgtccacactcagaaagttctgggcaaatggggacaagttggacacaga

SEQ ID NO: 154534 - DNA, 547 bp, Homo Sapiens
tgtggattcgttaatattttcagtttattttccagatatattaaaattctgtatagttccatccaaatattggaatttaggaatcatcccagataattttccctgtcctttatttctctgttccacccttcctttggtaagtgttcacattatttatcatttttctttctcttgcttataagctgttactctcctgtattaaaaccattcttctagttgctttacatatttacatattatgttaaaataaagactcacaaaatgctgcaaatatagtaccgtttacacataccactcaattttccccagtggtgatattttccattaacattgtacaatatcacaaccagcacattgtcattggtgaaatgtgcacatttacatgacattttatcacatgtatacatttttgtaaccactgcatgaatcagaatgcagaactcatccatcattaaaaacgtatcccttccactagtcttataatcacatacaaccctaacttctaccatccctaacagatgaatacgaacaatgttctctaaactat

SEQ ID NO: 154535 - DNA, 574 bp, Homo Sapiens
  misc_feature (370)..(384): n is a, c, g, or t
  misc_feature (479)..(521): n is a, c, g, or t
ttcaaaatcattaaataagtagtttttttcttttcttgccaaagtaccgagctaatattttcttgattgtgtttgactctttccatctcgggagtgacaggtaaaggggttcccttgcccatgttttctttgtataacacctgtgcgataagaaagcatccagaaaaacaaccatgagtaacatttcatttcttgggactttttaaggatgaggaaaaaacacagtcatccaaggagccagaagttatatgctgacaaaatgccaccgactactttagtggaagctgttgttgggatagggaatctgcaccctctagagaagcagggacttcagctgctgaggaagggctgtcagagttatccatgttannnnnnnnnnnnnnngtgagtacggtgcctcctaaacaatcacatgaggatttgagacagttagaactcagtggtgttatccacacaaactgaaaaactcattattttannnnnnnnnnnnnnnnnnnnnnnnnnnnnnnnnnnnnnnnnnnaactgtattatagaaatgggaatggtgttaggctagaagtagcccaaaggaaa

SEQ ID NO: 154536 - DNA, 822 bp, Homo Sapiens
tacttcaatcttaatacttttgtttggattttatttcatagttttctaggagggctgagctaaaacatgtcctgaacacctgctgggtgccaagcaatgtgctctgagcttcactctcttgacccatgcacaagatacctgcactagcttgccagatgagaacttcccagaaggcagttgatgttcagttttatggggtttgctgctgtgtttgttaccatgtgagtgaagacctatcatccccttaaattttggaaagatagaattgagtgttagttctatcttgaatgtatctgaatattagttaattcagcagggacggaatgttaggctagagaatgtagtaatgaagagaatctagggaactgatggaagagaaaggatatgccactgttcctggaaagctgattttacatttaaccaaagtacggtaccattttatcgcgctgacgggaggaagatctggaagaacttttctgtggctggtagagctgtccgctaaggctgcgtttttaaatccctgttcattgtgaacaaatcaaataggtctttgttgtgtttcagcttccccgagtcagcttggagggaaaatgctagcctctctctggctcaaagttgtgaaacaaagcaagaaaaacaacaaacataacattttagagtctatacagcatgactcccctctccctcctttttgccctttcccatttcaaaatgtcacaattattaaaggttacatgtttggaaggaacaggtactagtctatgtgacagaacagactattttagggtcgccatgagacctatgtgtccttggttcctatgt

SEQ ID NO: 154537 - DNA, 550 bp, Homo Sapiens
  misc_feature (540)..(540): n is a, c, g, or t
tatttctaagagctttattgagatataattccataaaacaaactgcacatattcaaagtatacaatttaaattttgacatatgtctaacatgtgaaaacaccaccacaatcaggataatgagcacatatattattcccaaatatgtccttatccactttgtaatctcacactccccattccacactgaccccaggtaaccacttatctactttttgttactattcattagtttgtgcttccagaaatgtatgttactggacatacagcatgtactttttgtccaagttatttaactcatcattttgagatttggcaatttgtgtcttttaaggaatttgcccatttcactgaagttgtagaatttatcagcagaaagtcttcataatgtttgcctactatcctttaatatccttaaaatttggagtgatgtattctcactcgtttttttgattcaatattgaaatgatgtctgatcttaccttgatattggtaatttgagtgttccttttttccttgtttgactagaggtttattaattntattgatctt

SEQ ID NO: 154538 - DNA, 379 bp, Homo Sapiens
tgttgtgtctggcccagctgcacacgacctgttccatgctgtcatgggccgtacactcagcatgaccctgaaacacctggattcttatctagctgactgctacgatgccattgctgtttttctctgtatccacattgttctccggttccgtaacattgcagcaaagagggatgttcctgccctggacaggtcactgaattctggtccttgatgcccaacaggccacgaactctcttggtcttgcatgactctgccctgaccttagactcctactgacctggtatcatcaacctttattcccattcatttgctccggagggagtagtgctgctttttgactcacctttctccaaccactgccccccaacccccacaacta

SEQ ID NO: 154539 - DNA, 509 bp, Homo Sapiens
ctgcaggagctcaacaagcagcgggagaagggccatggaaaaggggaggacagcagagggagtcaggggagggagactggagagtggattctggatcgaggaagcgaggagccggcagaggttgctgaggttcccgggatctgaggacaggagcctgtgcttcttccacaggacaaggtgagagggctcagaggggacctggagaggagagaacagccagctgtgggcagatgtggtgggtcctcaaggagaagcaggcactcagaatgttacttgcttaaggtcccagagccacctgaccctactgaacacacccagaggcacatcctggaagccagtcggcagcctgagcaggttgtggggccttgaatagaaaagccacaagctccaatgacaggaaatggtggggacccccgatctgccagcataaaatcccagagcattggcaagtgccagctgagctgccagagccaatcaccgaggcccctttctggccccgtcttccacag

SEQ ID NO: 154540 - DNA, 624 bp, Homo Sapiens
gttcttcagaattctttaataagctgcagggaaatgaataaagttactctcaaaggaaaaaggattttgatggaatttggggtgcacaaaattctgggctgaagggcctttgggagggatgggagtgggtcatctgcaaccctgatccaaggtgaccccagggcgccaggtgccctgctaggtactgctctaggtggtccacacggacaagtctctgtgatcgccatgacaaccccatggagcaggacctacctgcatccctggatgacaggcaggcggtgaggaaagctgcctggggcacatggctacggaggacacagccaggattccagcccccgatggccaggccagggcctgggctcctaaccacgagagactccaacgccactccagggtcccagcaaggcttgtgctttttacataatcattgaacttccagaaatccctctaaggaagccaacaagaatgggcacaaagacacacacagagcagaacgttcagcagcctgatttctaacgtaagaaccaggtgtcaccaaaacgtacagtcataatggccaggcacggtggctcacgcctgtaatccatcttgcccggcccttgaaaatccttttaatagagtttg

SEQ ID NO: 154541 - DNA, 269 bp, Homo Sapiens
  misc_feature (55)..(56): n is a, c, g, or t
ccgcatcccttcttgcacattgggatggagctgcgtaagactggccctgtgcctnnttcgacatgcgctcttccagccagtgtcgttccttgatgacccagctcctctgctgtcttcttgtgccgatgtgtttctcatgatgtccagcagatagtgtgtgtacccgctagggtctcaggtttttataggcccaggatggggacatggcagaccagggtggtcttggaaaatgcaacatttgggctcggaagcaggagtgtctgtcctca

SEQ ID NO: 154542 - DNA, 289 bp, Homo Sapiens
agagactaaggacgctaggtgggcagggctcttcacttgcaggtgcgcctgtgtgctgtgagttgctggggtttgtagaatgcttttggtggacagagggaaccaggttgcaatgtgagaacatttttatgaatttctgggaaactgccttaagatctattccaagagagacacctggttcttctcacctaacttgttgggtttccttttctcactctaaatattcactttaaggccgggcactgtggctcatgtctgtaatcctaatgctttgggaggctcaagcgat

SEQ ID NO: 154543 - DNA, 381 bp, Homo Sapiens
  misc_feature (369)..(369): n is a, c, g, or t
acatctggaaaggggatctttatttcttctaaaggattacagcctgcagggtggccattctgacaggccgggagacgcagcctctggcagaaacagctggcaggcacctggaaggaggcggtgttgcagcaggagcctcatgctgaattgagctggccaaacatacatattcaggttccaggaggagcaggagactgaaatcagcctcttgtccaatcaaagctatagtcacagctgtggaacggggtcagccagcgtctgcaggtggatgagctgcagtcgtttgaatctcggggccggtgcgtgtttagctgctggcgtggcgtgaggtgctgcttataatttggtgtcttattgccataaggagtnctgtgctgtcgg

SEQ ID NO: 154544 - DNA, 273 bp, Homo Sapiens
caaacactgcacttggtgaggcggcggctgtccagtttcggaggccggacagggcgaggcgggagacccctaggaagccatctttgctcttggtcatggtctccgggagcagaggctggaatcgggcttctatggtgagcgtctcctcgctagggtcagggggcaactcctcctcctcgtagctggccgcgggagttgaccctgttagcttctcagcaatgggtttgaactcctcagggctgatgtacatatccccgtcagtgtccaaggagg

SEQ ID NO: 154545 - DNA, 534 bp, Homo Sapiens
gcggccgcagccgctgccccgggccgggcgcccgcggcggcaccatgagtccccgctcgtgcctgcgttcgctgcgcctcctcgtcttcgccgtcttctcagccgccgcgagcaactggctgtacctggccaagctgtcgtcggtggggagcatctcagaggaggagacgtgcgagaaactcaagggcctgatccagaggcaggtgcagatgtgcaagcggaacctggaagtcatggactcggtgcgccgcggtgcccagctggccattgaggagtgccagtaccagttccggaaccggcgctggaactgctccacactcgactccttgcccgtcttcggcaaggtggtgacgcaaggtggcaaagcctggcatggaggagacagtggatgtcatctactgacagaaagcaggtcaggggagaggactcaaaggcgcaaggaaggaggtagcctggggcaatgctggcctgaagccatcgtgggtactcaggaccccatgagaagccctccttacctttgggggaggaaccaag

SEQ ID NO: 154546 - DNA, 647 bp, Homo Sapiens
  misc_feature (40)..(40): n is a, c, g, or t
  misc_feature (62)..(62): n is a, c, g, or t
gtgtgtcaggatggccttcctgccggcctcatgtttgtgnaggttcatgagggctctgctgnacgaggcccccctgcttctctcccgcacatcaccaaacgactgtgagaaggccacaccgtaggcgatgttgtcagagcatcctgaccactggaagccttgtgggctgaccccatgcactgtcctgtcacaggcgcacttctccagctccccactgctgcacgcccgcgtcactgcaaaggccacacctgccgaagagatggcgtacacgaaggccgcctcccgagtcccttgcgtcaccaccttgccgaagacgggcaaggagtcgagtgtggagcagttccagcgccggttccggaactggtactggcactcctcaatggccagctgggcaccgcggcgcaccgagtccatgacttccaggttccgcttgcacatctgcacctgcctctggatcaggcccttgagtttctcgcacgtctcctcctctgagatgctccccaccgacgacagcttggccaggtacagccagttgctcgcggcggctgagaagacggcgaagacgaggaggcgcagcgaacgcaggcacgagcggggactcatggtgccgccgcgggcgcccggcccggggcagcggctgcggccgc

SEQ ID NO: 154547 - DNA, 472 bp, Homo Sapiens
cgacggtctttaccagagaaaccagaaggaaagggcagtacaagttacccaaggtaaatgtggttttcccaagagcaccttgaagaaactccaagctgaatcaagaaatagaaagggcaggagaagctgagggggtaactgttagggcaattcgttcaagaatgaaagttaacggtggcactagttacatgtgtcccctctctcacagacaaagccgggaagggtggcttttggtttctccatagaaccaaagaataccccaaagaaaatgggtgatagccttagaatggcttgcaaaggtgaatggacctgaaagagaagcagaccagatcaggagctaactctgaaactgaaggatggttttaaaaagcggggaaggggttggactgaagaatatagaaggaaaccctcctttctttgacaaaggcggtagttaccagcctgctccctctcacgcattcaacaaggaagc

SEQ ID NO: 154548 - DNA, 843 bp, Homo Sapiens
cttctaatattctttcatggaggctccgtggccgtggtggagttggtttcagttttctggctgagactggatttaaaggaggtctggatctgatgaagtcgaggatgatttcatgagcactcttttttaaccgagggggaatatcaccattcaccatcacttttcgcaaggtgtatcttttgcagcgaatgtcatccattaacatctcataaggggtgagctgatattcaatgggcaaagggttgtactgccgctcttggaccttcttaagttttaccccattcctcaaatccctcatcacctgtacccagaatcgtgcccagtcagcgtttttcagctcttccaagtctgtgctagattcatcgctcttttccatttcttgaatcttcttaagattctctttcgcactcttaattttggtcagaaatgtatggagctccattgtttctgcaaacagtgcacgacatactgcctgataatgatttggtgcatctgattcagtagggagatgagcagcacacaacttcatgacatctctatatgaccgaatagctgagatttttctcttttcatcttcatctcccaggccttcttctgcagcctcatagccctcatcattgctaccgtcagcttccaccgtgttggccatgtgatcgataagctgctctaggggagggcttaattccctttcttcattctccttcaaaccatagtccagtgctttataaataataattcccaagattcaatgacctctgtttccatacacttgtgaatatcccatttacccgcactgggggcgcttcccgcgtcgtcgacgcggcgccagggtgggtaacagac

SEQ ID NO: 154549 - DNA, 464 bp, Homo Sapiens
ttttcagccaatcaagataatgatgatgatcaaggtgccccaccactgcataggaaaagtctttggcagcaacatggttaagcttaactatttgaacaagtttcacagaagatgaacattgttcaggggttttcttggctcaaactctggtttaacttaataattcttctactttgcagtgattaatggtcccctagtgcaggggcaggactgggcaatccaggtgcaactgtaattgttacactgaacagaaacatttcctttagacaaacgttcccagaggggttataaataggaaatggacattaccatgaaaagtaagcctccaagtgtctacatctagtgcaacccacttggacattagactatgaagacttagactcccccccactttcctgttacaaactgacaaaataagtacatcaatgctctcagtcattacttttcttcggtggcactttgtt

SEQ ID NO: 154550 - DNA, 564 bp, Homo Sapiens
ctttacaaataactctttatttcagggggttaatatcaattacctttaaattgcaagctactccagtgcctttaaaaattaatttgatttagaaaatgtcaatgtatctgcaactcgtcagtaatatacctgttgctcaaagcaaatgaggctggatcccgactcacagttttaattgatgtgtattattaggatgactaacgccatctgtgggcttggggttggtttgttgttgttgtttgcaaagagaagcagctgaaaaattaaataaagaaatcatgactctaaggctctcattggttcttacttaattcatgggcatttatccaaatactcaaagaagtggaatgaaatcttgaagcacaaaactcaaattattttcactccaggacaatgaggttttctcatgaccccaaatcatgattgtagaacaccaaaacaatgaaaaacagtgattatcttttacattccaaaatgagcccttaaaactcagagacaagttttaaaagtcaaggccttggatttctaagaaccagtttggggaaacacaaaaattcctcgtgc

SEQ ID NO: 154551 - DNA, 165 bp, Homo Sapiens
ttttttgagacgaatttttgttcttgttgcccagcctggagtgcaatggcaattctgatcttgcacacttattcattcattcaataaatatttcagaaactactaaataccaggtgctagtaatacaccaaggaacaaaatagataaagttatggcctcatgaaa

SEQ ID NO: 154552 - DNA, 835 bp, Homo Sapiens
aaaaaatctgtaattattaaaaattttccatttaattgttacataccaaacaattgtattagtattgttaatactaaaaactgataatagttagctaaatgggcactcatctcctactatgtcaaggtttcaagacattaaaatgctctaaaaacctagtgaaattactgtttcaattatctgttgtaatgaaaaattattttaatttctaatatatgccttttttgagccaggcattgtgctaggaactggatgtagactatagcaagatacttatgtccacattatttaataggggaaaacacaggctgtaaaaatggcaggtgaggcatttatggggaactgttgcagtacagagagagaggtgcataactcaggctgaaatggggcagagggacagagaaatttcgttagagtagaaattaggtgaataaggagcagaatagaaaaggattccaaacagtgaaaactcagaaatacttggtagcctgtatgcattaaaggatgggttttgcttgggggaaagggagggaaccaagggtagaactctgaagagttgaactaggaaaggctaggaggttttctcaaggctttggggaaaatgctgaaaatgttttagtagagtgacataaaagtttgtattttagtatgtttaccttggaaaattgtggaattggtttagagggggtagataccagagtgtgaaatactggtgaagggactattaaagtaatccacagaatttgtttaaaggatatagagggagagtcagcttagattgactcgcaggttccagatgagtgactacatttgagaggagttaatcaggctaggg

SEQ ID NO: 154553 - DNA, 726 bp, Homo Sapiens
  misc_feature (632)..(664): n is a, c, g, or t
cctactgtgcggcttgtttacaccatcatcaccacaaacatgtgagtaatgcattgtgctaagatgttacgatgcctttgtctttagacaggaatttttcagttccattatgatcttatgggaccaccatcatatatgcagtctgtcattgaccaaagtcattatacagcgtataactgtacagttgtcttcatttcatgtaacagaatgctttaccgtaaatggctatggcaatgcccctcaagtaatgagcagagtatttttggatgacagaagttgaaatttaagattacactaattaaaactaagtatttttggtataatttacaataacctatatggatttagaattatttccttattcaagggaatgggtcaagccataaaacttaactggccacgtaggtcatcggttattctatactaccttattccaaatctgccacatcttccctgctcacccccaacatggtgctagagagagattccatactaaagattagacaggtgaaaagaataaaaagaaagtcaaatgattccaccaactctttcaatgatcatatattccttgtttggaatttagtaaatgctattttaaaacccaggaaggctgggcatggttgttacacacnnnnnnnnnnnnnnnnnnnnnnnnnnnnnnnnntaggattgcctgaggctaggtgtttgagtccagcctgggaaacacagtgagaccccatctct

SEQ ID NO: 154554 - DNA, 698 bp, Homo Sapiens
atttctaagaattctttcttctttggttcaaagatttgtcttaattctgcaactttaggaagtgcaactaaaagctgagcatcgattcctctttcgtggttagcgagctgttctttatcttcgagtgagaactccttctgaaagcttgaaactttcctttgacgtgggaatccaaggaagcttaagtttttcttgttgaaatttcaaatttctgtataatcctcgttcctctaagttaaagggggaaagaaaatcacactgcaattccttatttttcctaatttaaaaaacaaaacaaaacacgttataccctcgaatccagcttttgatgtcttcgagtattttcttggagtctctttccaatgaatactactttcaaattctaagcacaaagtaaaatcccaaaagttagcccaaatagcgttgtacaaaatcaaagatcacgatgtcagcaagcaactgcatctatcagaagcgatgatgattcagaacaggataaatttagaatggtgttttccaaaaggctttttggatgtcaaattcaggaaacaggtaaaggctacatcccaaaagttcctctccaaaaagaacgccaaaatattaataaaaagagtcttctttttgaagtttttcgtcccctagtgtcctcgaggctgaacttccccaacctggcctcggtggagccatccattactggg

SEQ ID NO: 154555 - DNA, 136 bp, Homo Sapiens
ctttaagactgttgtttaccagactgggctctgtggaacacaggtgtcctgggagatggttaatcattacaaaatattggtaacaatctaaagatgcatacataagagagtggtcaaataaaccattttccattca

SEQ ID NO: 154556 - DNA, 474 bp, Homo Sapiens
tttataattaacaaatgtttaatacttgtaaaatttgacctgagagtctctatgtatgaagttttgagtaaaatgtaaaaaatctacaatggattaagaattacaggtcaagttctgcctagtgataggcagtgatcaaatgattaagttcatctattgcttttccataaacgtcattccaaaactaaatttattcatctaagtacatgaactaggagaatttatgttatttttagtaacagatttgggagtatgattataaacttacaattattacgtaattttcactgaatattatgttttgaaaagatagcattcatcctgctagcatacacattgccctgggatataacttgataaacatgccccagtaggcctttatattcccattcttcattgaaattcacagatttaagtaagtaaactcaatggttgtacacccgtttcttgtttgaggctatatagctggaactc

SEQ ID NO: 154557 - DNA, 123 bp, Homo Sapiens
ttgctcaactcaacattttaggaatttatttctgctgtctagtgctcaaaacttgcagctagaattgagggaagagagagcccttcttatattgttttatattgtttgatactcagtccctgt

SEQ ID NO: 154558 - DNA, 284 bp, Homo Sapiens
  misc_feature (72)..(132): n is a, c, g, or t
gttttcagacacacacaagagtgcttgccggttataccaaaccctactattactgcctgcagaaatcaattnnnnnnnnnnnnnnnnnnnnnnnnnnnnnnnnnnnnnnnnnnnnnnnnnnnnnnnnnnnnnaggcatttttttctgacatttggtcctgcttgaaacaacacaagaagaagaaaaacccaccatcaccaccgattcctttgcttcttttttccttttttcctaccttgtttgaaaaccgtgggcttgggactgtgaattattgcatgacattc

SEQ ID NO: 154559 - DNA, 357 bp, Homo Sapiens
tttttataatactgcggaatattttaatagtggggacacaaatgtcataattaataaagcaggtggaaagttcgcgctgtggtgcaattgtaaagaatgcttattaaatacttaaaaacaaagaaaatttacgtttctcaaaaggacagctgaaaaattccttgagctaaaatgtgttgctattcaagatgccataaaactaatgttaaaatatgatatctcatttcaatctttttgggggaaaaaatcaggctttgactcactcatacgacagatcccacgcacccacccaccaacatggcccttggcatgggcgacctgcccacgtgtcgatgcaatcgtacctatctagagccc

SEQ ID NO: 154560 - DNA, 992 bp, Homo Sapiens
ttgttctctggctgtcaatccttatttcacttgatgtccaggacaggaaggtaagacgcaggaacaaagcacatgttggttcttcctgtccaatagcgacacctttcaggtccacaggtttaatcacaactcaacagcctcctcagctggctggttcctccctgtcctgaacccctctctccaatctccaatcaggcagacagtaaagattctcatcaggtgccaaattctagttagtgcaagctactgtgttataatccttacagggacaaacccagcccttgcatgataccagctcctggtaattactgtgcatttcaaaggaaatacttagtttgacaggcaattttgattgaaagatcttttggtgaacagaaaacaaggaaataagagtccacagcacttttatgcttgctttttatttagagatttttcataggctgcagtttcacactgaataaatttgtttctgtatctacaccatgaacatacacgatgacagcaagtatttattgaacaccacctcataatatgtgctcgacccagctctcagtgctctctgcaagcctcagtccttgaagtcacccctgagaggcagaagctgtcactgttcccctggcactggggagaaaagggacatgtaggggctgttctgttgcagttttagagatccacgtggtcagcgcctcaacgctggttccatcagacagagataccggacccgtctaggattccgttgttggccgcaagtgcagaggcgttcgccatacttgttggagatgtccaaattgcagtttgcttcacagagggccaccacgataggcatgttgcaatctttacattgcccatggaggggagtattgccgtgcctgtcttgataatcgacgaaacaccctggttgaggagagtcttgattacctccatctgacaccgtctaaagccagatgaagggcaatgtgtccgtccttgtcgcaagcattaaggtcggctcc

SEQ ID NO: 154561 - DNA, 405 bp, Homo Sapiens
tttcagtctacctccaccagaacatcactttattgttaatctatcatcaacaatgtaaaactctaatagatactctatcttggtttttaaaaaggtaaaagattacactggattagctactttctatgaaagaaactacagctatcacagaagagggaaaatttgaatgacctccaaaaaaaatgcacactataagcaaaagggagtgtacattaaatcaaatgtctgttagattcattacttttgaatgcacagtgacaattctggaaactgtacatgatagaatcacagaaatgacttaaataaccggaattacattttgtgtgtgatcatcagacctttaaacaatccttgaattttccatgttatcagaagttgttaacagcatcgagacggaagtatatg

SEQ ID NO: 154562 - DNA, 448 bp, Homo Sapiens
  misc_feature (290)..(324): n is a, c, g, or t
ggttgtgtgtaatctttttattaataagcaaaagattgttcagttcataatttaaattccagcattgaaagcagcctcaagagatcacacaattcagatctccttctgtgctttccaaagataggtcccctggattccacatgattgaagtaattgcttatttctgtgattttagaccactggtttgacaaaaacaaaatgaaccacgaggggggagaaagaaaccagaaaccctatttgtaacaaagtctcaacaatgagatacaatggtattagatacacgccaacgnnnnnnnnnnnnnnnnnnnnnnnnnnnnnnnnnnntcaacaaaatacacaaataatcctagatcttgtagcgaattgttgatttattcattgtgactgcagctcctagtaatgctattatttgcaggtggtgagtgttggtatgggatggtatggagca

SEQ ID NO: 154563 - DNA, 628 bp, Homo Sapiens
ttttacaggtgggtcattttaattcattttagacaaagttttgcattgttctaaatgcaagtattcctccttggcttaaatgattgatcaaacctaattcttttggttcttattgatataaatcatactgttccttgattgtcaactagcattttaaggaattccctaaattccaccaatagaattctcaatcttattggtcctacatgcctcaaagaattaaactgaaagaaaaagttctttcggcaacaccaatatacaaaaatacagtgaaaacaggcaaaaagatgataccccctccccatttgcaaaaccaaggtgactattcatggtaggtgatgacaaagacagaggtgtaaagacaaaacccagaggtgttgtaatttagagggaagactattgttcaaatacaatgagacctttccaggagaccactcaccatttcacagaatatccctaagcttttttgacaaatgacctttcagaccaggtccagaaagtgtctttagctgaaatttcatataaagaatattccacctgttaaataagcatcttggtttactagtggccatcaatacaggtttcactattcaagacagctagtgagaaaccagaaaagttggcggcc

SEQ ID NO: 154564 - DNA, 1124 bp, Homo Sapiens
agtttttcatttatgcttgaaaaatacagcaatttggaaagtgagggaggggaagtcacccataatcttattaccattatataattattagtattaaagacagatgacgttaattaagcatctactatattcttttaataatcctgtgatgtatatattcccactttacatgtgaggaaacacatccacttaataatggagtagccaagtttgaacctaggtatatcttgagaaggtctagagaggagacctttctgttctaccttcctgttcttcttacatatatatccttttacctagttgttacacaatttgtaagtttcatctcctagttttaaaacttagcattataaaaacatttttctccccccccttatttcaagtggtgtcgtattgctctcattgtctattcataccaccatataaaggctctttgtcttggctgctggacattggtacaatgatgttgaccaaaatggatgctgccctttactgagtgactaagatgaaaaaaatcaggcttaatcagaactaatactttatgggatttggattgctacaggtttaatcatgctatctatccttgctggtgggacatttgacttagaattgtatataagtaaaatatagatgagaaattgtataatttatagctatctgaaaacaactttttttaatatttgaacactttgaaatgccttacacttccttgttaaaaatcttaaagggatattaaaattaaatggcacttaattactattagtaattcctaatataatatttaattcataaaagaaaaaagcttaatgttgaattctggcactcatcgggaagatgacattatatgttaagagataatttgtggggcatagtaactatagttaatattgcatacttgaaagttgctaggagagtacattttaagtgttcacaccacaaaatataactatgtgaggtaatgcatgtgttaattagctagatttaaccattgcataatttatatgtatttcaaaatgtgttgtacaccataaatatatacaatttgtatttatcagtttaagaagaagaagaagaaaaaggtaatttgtgggtcatttataaatagattgtataggtcagcactc

SEQ ID NO: 154565 - DNA, 692 bp, Homo Sapiens
  misc_feature (30)..(31): n is a, c, g, or t
  misc_feature (65)..(65): n is a, c, g, or t
  misc_feature (70)..(70): n is a, c, g, or t
  misc_feature (79)..(79): n is a, c, g, or t
  misc_feature (88)..(88): n is a, c, g, or t
gcgcacgcgcctctgcttcatggagcctgnnatgtaggaaatgccgacagggcgcaggagttctnggctntccaggacnatctgtcgngtgacagtagcagcgatcgtttcttgctgctgtttttgagctttcagtgaattctgctgtgctaagaggttgctctccagagtttccaactcctccaaattaatatcttgccattcatggagcgaatcttccgcatctttctcagcttcctgtggctcaccatccacgtcgtccctctcagagttgtccctcaggaggctctcggactcagcaggggcttctccctccctagttcctaccagttcctcttcgccttgttctgagggaggtttggaagtttcagggaattctgcttgaagttcctcatcactaatcacactttgcacttcaatgaaacttccatcagattcactttcttccgagtcaatttccattggttccacggcctttggaatggaaattaaatcctggcctgcagattcagtggtctgctgttcttggatggtttccagaaaattctcatgctctttagcattaaatgacaccacattttccacattatctactgccctctgaagggacacttactatgctacttgtttcttgcaaactgacagggccaatgacttcagaagcagaattcggtttacattttgtttcatca

SEQ ID NO: 154566 - DNA, 568 bp, Homo Sapiens
ggccgccaactttatttttgtttttcttgggatctgacttttgggaggctttaagtgattatgattgcacttccctccacctggaaaccacctcttccttctctgatctcaccttggcttagctctccaacacaagactctgtggtgtctgcccatgcccactactctcactgttgagaatagtattcaatatctgtttaacatatataactacttttaacaaacactgaatactcctttttactaaaggtgtaaagactgtcaagctttggattttctctgttaataatcaaagtttatagaaattttaatacttacctagatattctgcaaggtgatcaaattctggtttattggcaatgagctcttcttttgtaggaatgtttattcccatgaagcatggatatttaattggtggtgaagctactcgaatgtgtaccttggaaagaaatcattgcacacaaggtttttaagactatgcaaaattctttcattgtgcaaatacaatacaaaattgttttgcagaatattcagtaacaacatatgggtaataaattattctttctac

SEQ ID NO: 154567 - DNA, 460 bp, Homo Sapiens
tttctcttgggtagaagggaatgagcagagcagctatgcttctgggtttgttttgtttgtttttagcttatgtacaaaagcaagctctgtttttcattgaaatatcttttttcttgtatcagagatgtgttgtaaaagactcattgtgggttcagggaagaatgttttaacatgcaaggaaatgttgcaaaattagaaagaggacataattccacaaaactaaataaaactgggggaatttttaggatactctgaataaatcttattatttgcatcccactaaccccaatcaaataataatttagatttgttttatttactaaactgctaatacacacattcagaggtggtccaatgcagtcccaccatagaaacccttcccatgcttagccactgttgtcattaatctctccaaacccaaacgatggtttaaacacagtcgtcccttggtatccagagg

SEQ ID NO: 154568 - DNA, 478 bp, Homo Sapiens
ttaccattcgatgagatggaaatttcttcttaaatgtctatttctcattttgcagcaaaggcatgattatacttctataaatttttgccttacatagtcagatagaagcatgcaaagtaggcagagcctaggcatctacctgaaagaaatgccctcctgcattttcttgaacatattaactcttcctgagctccagtggcactatctctggagtccttttccggcagataattttaaagcaggcgtcacttgttattttctctctcaaattgccgtgttctttgtcttcacagtacttttgaaaatacttaaatatacatgtgtttcttatgaaactcgtttgcctcactggactttaagatctgtgaggccaattccatgcctgttttattttctactttattgcccctgttccccaggcacaaagcaataagtgcctgacatacatttggctctcaataaatacttgtcatatttg

SEQ ID NO: 154569 - DNA, 474 bp, Homo Sapiens
ctggatgttgggagcgggtgttttgctaatccaggcatagaaaacaaaataagcacagctttggagtagaaatactcatgatatacatagaggacagtatgtaaaaatttctaaatgaaaagatactttatataaagttaattaaacttagcttaaaatttgaggctactcatatttggttattctgatccacaagtaatcaaccactctaaatcagtgtgtggaccaagagaaatataatgtgcaacactaatacaatctaaatattctaatagctacattttttaaaagctttttttaaagctaggtgaaatgatttttaacagtatacttaacctatgtataaaaatatcaattcatttatatgtaataaatacacacttatatttcatattttttcatacgtattacaacatctggtgtgtattttatgcatacagcccatttcaattcaaagtagatacattttaagga

SEQ ID NO: 154570 - DNA, 742 bp, Homo Sapiens
gtaatcaaaggactttttattgcacatatttaccgaacatactctatgtacaaggcaccatgctctgcactatgggcatacaaaagtgagtaacacagtgagtaacaaaagtgaataccccattccccaaaacatatacatatgcacacaaaaagaccaaaaggaaataaacaatataacacaaaagtgaaggacatagattataaaattacaggaaatcaggtggggagaatcagcgcttctggttggaccaatcagggaagaattcttgaagaaggcagaaagtgagggagagctcaggcacacgtgcagtgagcagatccctgtgatgtgtactctttcctggccaggtaactgtgtattatgaccacagtaatgaatgaaaggatttttcaacggtaagctcaacagattttgctggctgatacccctaatgttgaacagaccaaatcaaatgcttaactctttaatttggaagtcagtgaactagttcccatgagggtgtcttcagccaaacttatgcatggggtcatggctgtgtgtttgcttgtgtttgcatgtgggtgggtgggttcatgtattcacaggactctaatttaaaaaaaacaactaaaactaacatgtgaatttgaatgagcaattattatgagccaagtactatactactttacctacatttatccacttaaagtctcagggatttaaatggctttcccaagaatcattatgtattaagtctgat

SEQ ID NO: 154571 - DNA, 481 bp, Homo Sapiens
  misc_feature (392)..(407): n is a, c, g, or t
atggaacaaagaaaattttattgctggaaaagaagggaagaataaaacatgtatgaataaaaagtatggtaatagaaaacaaaaatatcataaaaaggttatgagaattaccctcccactgtaaataaccacaaaactgaacaaaatatgaaacaacgcttctaagatattcaacaataggcaacatagtcttgtgacacttgagaagcaggaagcaaacaagatgaaacctataattttcctggctttctgccaggtggtagttttacacagctcaagaaggggattatacgttctctttattttctcctgaggtgagaagagattggaattcagggaggtcaaaatgactagaatttatgcagcagaattccagagatggtgaaactgtnnnnnnnnnnnnnnnngttggccgaactattcccagaatgagtctaggaatagttcacaaatcagagtacagaaacatcagaatggtaac

SEQ ID NO: 154572 - DNA, 377 bp, Homo Sapiens
taataaaaaaatgcttgctttatttgcttttgaagataataaaacattaatttatacacttaaaaattaatcattaggacattaaacactatgaaatgaaaataccagatttaacttattctatctttaaattaattacagacaaccacagttgctaacagtatgagttctgcagttatacagaactaagtccattagctgtgtgacccatggccaaatattttccttctctgtgcctgcatttcttcatctgcaaactggaataatgatagcaactacttcagaggactatgtgagtattaaatgaagtaatccttgtgatgagtttctcagaatgccttgcatattataaattcttaacatgtgttggcttcatc

SEQ ID NO: 154573 - DNA, 666 bp, Homo Sapiens
tttattttttaatttagttcctggtcaaacaaattcaaggcctactttagcctgcaaggtcactagcttaagacttctgacctttgccaataacaagcctgaggccttcatatgagggttggcaagtttagggtgggacgttaaaagagacaactgcccagggaacagtagtttatccattaaaagtaatagggtaatgggcaggcaggttaacagtgcgtataaaaatgtttaaacagcgactgaggcagcacaagttaacctgggacaagaagcatgtttacttgatttgaattatagaactatgtatggctccttaaactcccccttagtaggggctgcattggaggggaggggtcaagaggtctcattcctgaaaactgaaaggacaaactgcataaagccaagttgcctaggacagatgccatctttacatgataataatttcagttttagtctttttaggaaataaatacatttggttaattattgactcttcacaatagcttggaataatttctattccacaaacacaccaaagagcaatagtagccaaaaaccataaatgaacatcctgttaggaaatgacatctcattaagcaactcttagttgcttcatattttcaaatgtccaattttttagtactatcttgtactatttatgaa

SEQ ID NO: 154574 - DNA, 371 bp, Homo Sapiens
ctgcacaaaacaaatatttattttacaaaatattgttttttgcttttccagtgcagcaagcttaaacttccttaaaaacaaacctctgggaagaggaaaatgaggcaagatgctgagaaaaagtcatctcccactctgcccttctctggcaaatcgaagtgtcctcttgtgggaggcggtgggcagcgacactcccgttggacgtcagtgctctcgggcccggccaccccggagcagaactcacttagggcctggtgcccctgtgcccagttctcagaatgtcggagtgctcagttctcagaacgccggagtgccccattcataacctgcagccccgttcatagcctgcagctcccctccttcctctcctc

SEQ ID NO: 154575 - DNA, 785 bp, Homo Sapiens
ttgattgggagttctttgtggccaagacttgtcaactgatagctttaaggggaatgtatgctgattcctaattgttatcctccatccctctatcttatctcctgttgcaatcataaatgatggctggatgactactccattcctctggatgtaaaatctacattctcttgcctgaggtggatacgtttgcttgggttctgtttaaggagatggggccagcagtgtgtttcagggcctgtgaaatgtgttctctatccgggcttttgcttaatctctgttttcagtcttgcctatcagtcccactgtcgggggtacctcgtgtctgagtctagaacctttccaggttgctgtgggacagattagcctccttgttctcagtatccccctgacctccacctttgtttgctttgctccattagttaaccattttccatgtactgtcattgtctaatgaagatgaattctcttctgttggtaaccccattccttttttgtaattgtgtgcttatacaatgtttattcttcactgtatttctattggagcctcaggacaaagagcagatggtgagaatctgtgttcagtgttaagttttccttctgtaagacatgtgcaacttgtgtttttcactgaatagatcatggacttaatgcatatagagctactttgtttttcatgattgtgccttcaattatatgtagaaatataatttgtgaattgcctgatgaaattttcctaattttgaattatctttgcattcctataataaacactgttagaatggcaa

SEQ ID NO: 154576 - DNA, 470 bp, Homo Sapiens
ccttaaacattggcattttatttctttctactaggccattcctgcacatggttcaaaattcaaaagatgcaaaaaatatgagggcgaatgcccatttcccccacagcccaggttccctggctctgcttccaagggcaaacagggttaccttggggatattcccagagatcatttcgggaaaattccggtaaacaggggcacacgttgacatacatgcatttttttcttttacacagatggctacacactacacactggtgtctcctcctcttgacactgtatttcggggcgcgcagtgagctgccgcaggtgtgacagtccagggcctgcggagggctctgcggcacatgcaggtgcaaagggtgcacgtgcatagccttgtcgtgtggtcatcacgttgcatgagggcaagtatgtttgtggactaaaccccagatgtgggattcctggggcaaaaacatgaagctcta

SEQ ID NO: 154577 - DNA, 516 bp, Homo Sapiens
  misc_feature (70)..(99): n is a, c, g, or t
  misc_feature (449)..(464): n is a, c, g, or t
ggaagggattatttaagtttaagagtgccactgtactctaccctggggaacaaagtgaaaccctgattcnnnnnnnnnnnnnnnnnnnnnnnnnnnnnntccaagggctacttttgattaaaggaattatggatcaaggaattcacattgcttttatttcagaatttacgaaagaaaagacaaacctatctcagagatttgagccaatgtagcaaagtgggatgtgggagaatcagcgtgacctacagctgggcttcagacaaggaatggaggagaatggtgtgcccgtgcctgtgggtgccctgagacagccacatataggagcacctttgatcaagttcagaatggaatcaaattcttctgaatcagagcagaagtgtggggctgtggggctcctgcctccttcctctccacctcctatcccctttccctagaacagtccagattcnnnnnnnnnnnnnnnnaaaggaagaggaaatactaagagagcttctcccagtcaaatttggtaaaggg

SEQ ID NO: 154578 - DNA, 485 bp, Homo Sapiens
atcaaaaagatattttatttgtttaaatggaagatatagtttactttcttcacacagatgccagaaattttctatgaacgtaaaatctttggtgcaatcaagtgcatactgcttcccagatcctacaagaaaggagattaaggtgtagaattttacactcatcacagaaagttttcagagactaactggcatcaccaaccaaaacacaacatgctatcaccacaactatttttaaatgtcttaagtagtagtttccattggacggcaggtgtgtaagcaggagccaagagtgaaacacgctcttgctcctcttcctagcaagagagcaaagactgtgaggtttggtgtattcatccagagagagtgttttaaatggggctatgacagagaaggtagacaagaggtgttgggcagccctggacaccctcagaaaatatcccttcttcatgaatttattttctatgttcagttttacactaaaaggt

SEQ ID NO: 154579 - DNA, 580 bp, Homo Sapiens
  misc_feature (103)..(234): n is a, c, g, or t
aaaataaaagttttctaattcattgttcagacttaaaaaaataagtaagtcttgcctttctcatttgattgctactaccagtactttaaaattcattctgctnnnnnnnnnnnnnnnnnnnnnnnnnnnnnnnnnnnnnnnnnnnnnnnnnnnnnnnnnnnnnnnnnnnnnnnnnnnnnnnnnnnnnnnnnnnnnnnnnnnnnnnnnnnnnnnnnnnnnnnnnnnnnnnnnnnnaaaatgataataattgttttgaattagaagtttgttctcaagggtgaagataacttctgattgttgaatcatggcttatgaaccatttagcagaaagcactcaccgtcacttaaagaatttctgaaaccctaaggattgtcttactgtggtcaaatttatcttttaatagcaaaaaagcagaatatacatataatggaaaatgagcctaggtaacacactttacattaagttatagatagatttaacaataattcttaactcgggttataaaccacctcgagacttaggtaaaatctcatcttaagaacacatgcattcagatagacccatgagagacaaagtttt

SEQ ID NO: 154580 - DNA, 166 bp, Homo Sapiens
ttttttgataggaacaaaatgtttattttcttaatggtgaaactttgctttgtatgaaattcacattgaattatgaaagtgtacaataattgggacttcccttacatatttacaggtaaatctacttatacacattagtttaggcaacctttaattatttagagct

SEQ ID NO: 154581 - DNA, 719 bp, Homo Sapiens
ttataataaagtctgtttattacagcaattaacagagcagcgtttgccggcatgcttttcagtggcaaccagaaaagtgcttactccaggtgcatagattcgggaaaccatgcaacttgagccaaaatgaagccaattagaggcttagtaaatgggttccagccaccccaggaaacttaaccatccacgagtcagttcagccgaggtagaacctcagtgcaggaatttagcatgatatagattgctactttacagaattaatccagacctgtcgccagggttgtggtcttgaggacgtgaaatgtatccgcccaacacagccacccaggtgctgggttcaaatctcgataaactacataggggtatataggtggggaacgttagcaccattgactctcaggggtactcttgccactgccatggaggtggggacataaggagaggactagaagctgggccagagggaacagacagagaaagaacagaaatcctttcattagaccctgtcttcaagagcctggattgaaatgtggccgtcttgagtaggggtgaggaggaatctacttttcagcctggagaatatatgctattttgctttaggcagaaagactggacaaagacatgaagccatttgttccggttctttggtggagggacagaagaaagggaagtacgggtttcaattccccagtgaatctgattgctaattaaccaaattt

SEQ ID NO: 154582 - DNA, 580 bp, Homo Sapiens
ttcttcttgtctttctctcttgtggcctgcgtgaaggcaggaatgctttgattgcagctggcacagggattgtcatcttgggacacgtagaaaatatttttcacaactttaaaggtctcctagatggtatgacttgcaacctaagggcaaagagcttttccatacattttccacttttgaaaaaatatattgaggcaattcagtggatttatggccttgccactccactaagtgtatttgatgaccttgtttcttggaaccagaccctggcagtctctcttttcagtcccagccatgtcctggaggcacagctaaatgacagcaaaggggaagtcctgagcgtcttgtaccagatggcaacaaccacagaggtgttgtcctccctgggtcagaagctacttgcctttgcagggctttcgctcgtcctgcttggcactggcctcttcatgaagcgatttttgggcccttgtggttggaagtatgaaaacatctacatcaccagacaatttgttcagtttgatgaaagggagagacatcaacagaggccctgtgtgctcccgctccaacatcagaatggtaa

SEQ ID NO: 154583 - DNA, 519 bp, Homo Sapiens
tttcccatttggccaggggaagattagtttattctgcttagctcaaaccagaactaatggcctaaagtgtttctccatatttgggcaaagccacctggtcgttggcaggggaaccgctttctgtgcgtgggccgcaaaggcagacaaagccttcaacctccccccgctctgcgcatctgttgctgtttgtcattcatcaagtggagcaggtgcaggagctcagtttcctctggatgcaacttctgagccaggcccaccttcctaaagggaccacaggacaagccgagggggctccctgcagggcttcagaactgcagggtatggtgcggctgcagtcctctgacatattagattagaggatgcagcagtaacaaatatccatcccaatctcagtggtttaacacaatgaaagtttgtttttcatgcacacaaagtccaacatgaacaggtgactctccttggcggctttcttccgcagtgagagagggatccaggaggctgtttctatctagaattttt

SEQ ID NO: 154584 - DNA, 588 bp, Homo Sapiens
cttaccaagacgtaataatgtctgaaaagtttcagctttgctaagttaatagcagctagagagaagaaagaacaaaatgaagagctcgttaacttctcatttttaaaagtaagcctcattcagataccttctcagtcaagaggccacctctaatgcagatgaggaccactcagaggcacatccatctatctggaatcaagtccgctgggcggtctctcctccaatcaccaggaaaaaatgtgggagcagcacagccccagtgagccccatgagctggagttggcttgcacaggcgattcccgccccagggtcagcagctgtaacctggctatggtgggagtatactgacatcacaggaattggcagatgctacaaatcaggaattttttccccccagagagccagcattaaacatttcagctctgcacagagctgtgacctccactgggactagtctcaggttggtcccagagaaccacctgggggggtctcccactagctgagggtgtaaattcaataaacccacagatgcattttgcaaatttcactgaagttatcattaagtgacttgtaataagccctttcagt

SEQ ID NO: 154585 - DNA, 724 bp, Homo Sapiens
tttttcagggcaggatatgccgtttattgatttaattatttcatcagttctgtatacatatttattgaataaacatttcaaaaataagggataggaaaaaagtcatttggaagtagaaaagaatgtttcaaattacttatctaaaatggcttcttacagttgtcatatattcttttaaggacttgagatgtgtatttcagagtaatgtgtcataaatcagcgtgatttttagaaaatatattctgtatcatccttcaacaatacctcagataacttctttggtactttactcaggtaaatctctacatgaagctaatagcaaaaggctactatttctggtaattctgataaaagtttctatgtcttaatttctatataatctaagtggttacaagcagctatctaaaattacgtaaaacaagctgtgcaatactggctcatcgctaattaacagaataatgtcggacaaatcacttatcagttttctaatatgcataatgcgagttagtacagcacttcattgcaagatcagaaatgaaagcatttttacataagagacactacagaaataatgcgaactgtaatgctattatgacggtttgcctagtggtgaatgattaaacatttaaaaagtttactttcatcttagatcattccatcggaaagaggtcgaaaatgtacagtaggcatgcacaaaggataccgcctggaaagaaggtggagg

SEQ ID NO: 154586 - DNA, 795 bp, Homo Sapiens
ttgatagtgtccttagatgcacaaaagagtttttaattttgatgaagtctaatgtatctctttttttccatgtgttgcttgtgcttttggcatcttatctaagaatccattgccaaatccatggttgtgaagattttctcctgtttgttctaagttttagctcttacatttaagtctttgattcattttgagttaatttgtatgtatggtgtggttagtggccaaacatcattctcttgcatgtggttatccagttgtcccagctgttgaagagggaaaaaacttttttgaggcaacaatatgttatatcacttaaatgtccttcaatgatgcagggccagggttgccggagtggagatttttgggaaaaggggcagtaagatcctgagggtgtgagctgataagacagtggttgctgtgatgttctgaagaaacaaagcccactgctcttctgccagcagccacctgaggcatggcaggagagtggggacagtgatgagaggagaggtggctcttggcagcaacaaggtcaaactgtgctgaggcagcagcaatggtgtctgtggccaccagggggcagagcagaggtgggtaccaagcaggagtacattaaatggccaccacggtgccccatgtaggcagagggccctctgctaggagaagaaaaggacttaaaggacatgggtttcagcatttccattgttgggtgcttgaagccaaaaattatttttgttacttttttcttgtcctccccggggatggcacggccttccccctccaacatcagaatggtaa

SEQ ID NO: 154587 - DNA, 817 bp, Homo Sapiens
  misc_feature (329)..(344): n is a, c, g, or t
  misc_feature (538)..(547): n is a, c, g, or t
cttcaacttctaagttccagggtacatgtgcaggatgtgcaagtttgttacataggtaaacgtgtgccatggtggtttgcagcacagatcaacccatcacctaggtattaagctcagcatccattagctattcttcctgatgctctcccttgtttttcattttagttttctatttctaagtaaagtgtgtttatcaataactagctcatttttccatttatgtttaccagaaatgcataatcagcagagctttggggacaacataaaataagtgtcatactaacaccaaataaccataacgataacaacagcaatggtattctaaagtnnnnnnnnnnnnnnnnttcaaaaagtgttgtcatactttagagtatttgtttcagttgtgttgaaagagaactcatttgcattataaaatgttaaaaatgaagtagtgtagagtccataaatatcacttccaagggctcagtgtcacttagatctagattcacaggtcaactcaatttcatgaaaaaatatacttgtgtgtattataacnnnnnnnnnngttggtatagttaaattttctacggcagaagaggagatggggcatgggcatttgttcatgcgtgtcagcacggtctgaggagctgagctgactttctggttaacaggcaaggtgtgctctgcagtgagaacgtggataattcatgacaccctctgtcaggccttcagatcaaacttatctaaaagctttcaactcattgcatgctaaccaaccatctatctaaccacaaatgtgcttcacaaggaaactagttcggaaaggagatagtct

SEQ ID NO: 154588 - DNA, 677 bp, Homo Sapiens
ttttaaagtgcttccaaatactttatttccttctcacaacaaccctgcaaggtgagcggaacaagtgtcattgtctctgcttctcagttggcggaactgcagcttgggagaagtgccttgcccagggtgacagaaccagtgggagtagagccaggatgccaatgcggggcttcagcctccagatctgcaattcccatccttgggccatggcttctctccatgcacatggtaattcatctccaccttgtcttgctgagagctttgaaatttgcattgggatcccactcctattcactcattgaacggacatgttgactctcagctctatcaggagttctgtcatgtttgacacagctctatcaggagctgtgctaggtgctgggttcagagcagtgaaaacactgatatggtaacatgattcttgcttcatgcttcagcatcattgcttgagagcaatctgctgtttgcagcttggtgctttgggaaatctgtagtgttgacagcttccaagggtttaagaagacataactctcatgaagaatcacagatgttatcctgaggataatccgttcaatcatcaaaggttttattcttatactctgtgacaagtaaaaggctaagatttcatgtgactccctttaggtggggctactgtgccccagcaaaatccaacatca

SEQ ID NO: 154589 - DNA, 733 bp, Homo Sapiens
ctatagggaatttggccctcgaggccaagaattcggcacgaggcggcacgaggcaaaatcccttgcctggtttgtaaacccaaatggcatggttagcaggagctcagaccccttgtggatgagactctgggtttgcccagtagtaagcaatggaaagtagcagagattcttgccaagggggaggagagtttagaatgagtagtagagaagggaagcaatagatatcagtggtggctttgggagcagctgcgacagcaggggttgtagtttgttccactaatatttctgttatgtttcccccagaatcctggaatggctgttcccaggcttttttcaaagcaagtggatctgagcggggcaaagggtgaaggcaggggacactgtggtatgcattcactcccccaggtactgggttgtcggcagctgatatttcccaactgagacctgctacaggaattgcttgaggctaaagagagccactctcctcaaggccacatcctcctccctaatgagagctacacccaataacccatcatggggataaaaggactcaaccctctttgcttcagtttggaacatctctgaagggccattccagcttcatagctcccagcgcatttgtcagagaactctgttgcaaccacatcacagtccagctcccccctgcctatgtattgcttccttcacacagatgttgatcccaggaacacttcctaatacacccgctttcagc

SEQ ID NO: 154590 - DNA, 422 bp, Homo Sapiens
ggccgccaactttctcaaaaatgatgtgaattttctatgtattcgaggttttttcatgtgtcaacaaaccacgctcacaattatttttgagacaggcttctctcccaaggcctaattgctggtatttagggtatgtcaggctaccgtgaatcaacgccctcaagcctcctaaatgcccccttttctagttgtgagggtctgtgaggcactgctttaagctatacccttgatttgatctttactatgagtccatggcttcctggcagtgctctggatttgatctttgctcacaggctgttacttaatttgggattcttttgctagctggagaggatagaggcgagaaaacattttttgttgttgttttcaactaacccagtgtttctgaaatatgctacgtttaattaaattttgttgcctct

SEQ ID NO: 154591 - DNA, 229 bp, Homo Sapiens
aaaaataatataattgaacaacatatttcatagtaaagcatccaattatagtttactcagaattgagagcagaaatggagagggggaaatatattttctgtagaattaccatgccatgaaatactatatatttattacgacaggactgacaaatttgtctttaagcttcattgtagcaaaagctaatatggaaactggttaggtacaatacttacagtgcctgtattgt

SEQ ID NO: 154592 - DNA, 707 bp, Homo Sapiens
  misc_feature (653)..(661): n is a, c, g, or t
taaattggagagacttccatctttattttttttctacttacaaaaataatgcaggctctttgtgaaaaatttaaacattacagaaatatataatggagacagtgaaagtccatcataatctactatccctccctgagataaccaatattaacaagtttggtatttatagcctcattttttagtatgcatatactaacatatatatatgttttaacaaaaatataaataatcattaacataaaaaagtattatacaatttgcttttttcccccattcaagatatcttgtatactcttccacatcagtacatatagattaacctcattctttctggcaggtacaaggaatttcatcttattgatgtacaccaatcccctactcataggtacctggataacttcaaaatttcactcttatgaataacaccaaaaaattcaattagatacaccttcgtgcagtatgagtgtctgcacagaataagatgccagaattataactgctgaatcaaaaggtatgaatatgcaaaattttctaatagatattaccaaattgtcctctaagaaagttggattaatgtatgttttcaccagtagtgtaagggtatgattgcatctatatcttcacatcttcatgtatctttatttttttaagcnnnnnnnnnttttttaatagattattttactctggtcacaacatcagaatggtaa

SEQ ID NO: 154593 - DNA, 658 bp, Homo Sapiens
aagttagttaagagaaatttccttgaggcgctaaagtccaatgacttcggaaaattgcaggctattttgatccaaaggcaaatagatgtggacactgtttttgaagtcgaagatgagaatatggttttggcatcttataaacaaggttactggttgcctagctataaattgaagtcttcctgggccacaggcctccatctctctgtcttgtttggccatgtggaatgtcttctggtgctactggaccacaatgctacaatcaactgtagacccaatgggaaaacccctcttcacgtggcttgtgaaatggccaatgtggattgtgttaagatcctctgtgatcgtggggcaaagctcaattgctactccttaagtggacacacagctttgcacttttgtacaactccaagttccattctctgtgccaagcaattggtttggagaggtaagcctttctgggtggccaacattgttgtctgcttgtacactcatggtttcaagactttgtgacccctacctaccccagatgatgtagtaagcataaagatgcaattatgcctagtacagaaggccctaaaaaatacatagttctgttgattcaggtaattcaatgatgatcacattaaaatcttattatctaatagcaggaagttcattc

SEQ ID NO: 154594 - DNA, 369 bp, Homo Sapiens
atgacttaatcattgtatttaagtggcactttttaattttcacacttaaagaaactcatataagtgggaaagaagacagctgtgaaaggtagagaagaaccatggctctagacagagctgtactaataggagagaagagattgaaaatgtgagcccaggtcccaaggagcacagaggcatggtcagaaggttggtaggaacaggacagaggcagccaggcctgaggtgtttggcagatctgaggagggcagggatagagggtgaggggaggagtggggccagaatgaggcttgagggattcaatggagggcgaaagtgctgggaagggaggagggatggaaagaaaggagaagtatgcagtggtttggg

SEQ ID NO: 154595 - DNA, 573 bp, Homo Sapiens
agcttggctaaggtgaaaagggacttgctggagaggtacagcagaatgggatgggattagaaaacaacaatctattaggaaagatgaaaggaaggaattccccagtgttcacgctgagaagtcttcatattggaccagtgtgagggggtcttttatactgaggttttaaaaacctgacttcattttgtcctgaatgtagaagtgaagaaggacactagtttcaggcacctgggatggtggaaaagtttattcaactgaggctttccatgcattgggttgaatagctgagggaagctgaagactcttatctgaaaatatgatctgaaaatatttattgtataggaagacagaatgcctgatttctgaagttttcttgatggcccaactaaagaagaaaggcaccaaatcctcactttaacaggtaaatggagatcctgagggctggatacccaagagccaccattttacggattcctcagatttaaaaatgtctcagatagatatttccaaattctatttctattagcctctgtggataaagagttcctgaaactctggttttactttttttgg

SEQ ID NO: 154596 - DNA, 590 bp, Homo Sapiens
  misc_feature (274)..(283): n is a, c, g, or t
  misc_feature (554)..(554): n is a, c, g, or t
ttttatcatttacgtctatttcatgaggtagtttgcatgtccttgaatggaatctcgttaccatgaaagcttttttagcattgatttcataacagtcttaatttaatagctccgtcattactgagaagctctgggagtggggccctggctttccaggtcactgaccttttaattacaaaccttgttctgatggccaggttatcgactggacagctcccagcttgcccccaggatgaaaacgaaaataactgtgtttcctcccccatctccaggnnnnnnnnnnttgtaacctcttgtgtttctaaaattaattttctccttcagctttactttataattaattctttaatgtgtcttagtgaagccagaagtcttttcacaaagcttttcttcctagagcttgggtccagcagatagcttggggggagggcacggaaatcttgccagctcccaccccttgcttgcgtgtggcccatttcctcatcctcagaaactcctgcggctgagctggaaggaatacaattggctctgtgaggggctgtctggcccttctnattttttgttaacgagacatggattgtggcatcaag

SEQ ID NO: 154597 - DNA, 618 bp, Homo Sapiens
  misc_feature (302)..(311): n is a, c, g, or t
tttttgtggctttaatatctggtattttaaacaaacttagaacttcaccagatgtgggtttttagatttgagacacaacactttctagctgcttccagccatagtaaaatcataaaaacaaagctacccagaacagagtttgcttgcttcttggatatgcagacttaatgtcatgaagatgccaatttcccaccagatcactagaaaaattaatgcaatcctatgaaaaatatttactttttagacaaggtgattttaaagttcatttgaaagaataagtaataatgctagaaaaattcagnnnnnnnnnntgagccaccaccagatattaaagccacaataattaaaactgtgtggtacttatgcctaatcagccaggtcaatggatcagcatagaacattcagaaaataagcacaaatacatatgagaatccagtatgtgacaaagtggcatttcaaatcagtgaggaaaagatggattctcaatcaactatgtttgaacagttatagcaattcaaatgaagcatgtcattgatttgttaaatttgaatattcactttcaaatatataaatgcagtctataatgtaacttgaagtggaaatcaccttgtgtgcatt

SEQ ID NO: 154598 - DNA, 458 bp, Homo Sapiens
  misc_feature (17)..(17): n is a, c, g, or t
cagtcttaaagaaaaanaaagaaaagacacagaaagaaattcaagacagcttctgtggacagcagtgaatggcaatacccattctggattccacgacataggctttctcttagcttctgtttaatgatagcttttgccaagttcaccatcttatgtaaactaaaggaacacgaaattcactctagccttaggaaagctgaggggatgggattattaggaaaagaaagtgtgtgccagtaaccctgaggccttcagtgagtaatcctggccaagcccagggcagccagggatgtattattgctattccattctgaacaatggatgactgacatttgcaagagcttgccaattattttaataactaactcttcagggtggagagggccaaggagatgggtgttcctcattccacacacatgtgaacacttgagggagctccccaccccagagctatagga

SEQ ID NO: 154599 - DNA, 764 bp, Homo Sapiens
ggcctgcctcccagggagtcaacatagatgttccccatgaacagggatttgactttggaggccaacctggcctggcctctgccctttatctcacactccctatccttggcccactgccagtccctgccttgtggcaaaggggccccaaaagaaaagctgcccttccccaaatgtaaggacccaggtacactttcacccgtggaaagcagtgtctgtcgagagtctgtttcctattaatacttatcaaagccatgtgcgagggaggtggtcagctgtcaatatgccttagtatgtttatatgagtttgttttgttctaaaatacccaaacagttctggtcaagcggggctatgcccgtctggcccaaaacacagtccgttattaacgagatggccctggcaggcgggaacaaatctgcctccatgcactgcttcctgtagtcttttagaaagtaactccaggacatcgaagtgcccagatttgactcctaagttctaggagactgtagcgcagggtctgtcaaccttagcactattggcatttggggctgggtaattctttcttgtgggggccgtcttgggtactgtaggaagctgagcagcattcctggcctccatccacaagatacctgtagcagtgtcctgccaacggtaacaatcaagtatgtcatcagacattgcccaatgtccccagggggcaacacccctctcttggacttcagggtcaagagaatctctgctggctaccccaggacttctcattata

SEQ ID NO: 154600 - DNA, 815 bp, Homo Sapiens
  misc_feature (689)..(689): n is a, c, g, or t
  misc_feature (696)..(704): n is a, c, g, or t
aaactttctatttactcccaagcattttcaagagtaaaatgtcacatcctccattaataatccattccaatgttgaattgtttaggtatcaaaaagatctctattgtgctgcaatttaaatccaattctttttattttgacctaggttcaaatagagaactacagaacaatatgctactgtgatatctattatcacccatcagtttcctcttctgaaagctgaaaatacctaaatacttctgccacaaaacacaacaaattagctattatgctcctcatcattggaagaaaagggaattgcatgcaagatatcattgagtgaaggtattgaaaaaaatattagaaagcagagtcaggtcagaggtggagttttctgaggggctgtgttgagaagaatggaagagggagaagtccccacatcaggggacagagggtgtgatggggcttgcagaggaaccaggacaaaaccaagtggagccagggctgggcagatgtgctaatatgtgatcatctggctaagtctgtctaatttttagaagacagtagtcttgcatggtctctacacatattaaaaggggggctgatgtggctcttgtttttgattctaaaatttccccagagattacactgtacattttttaaatgccagaaacaattatccaaaatttaagaagtgaggaaactgtgcntagtctnnnnnnnnngttcaatgtggtaggaaaggaaatgacgtttaacaggttagagggagggtggcagtgaatagagaggatcttttttggggggaagatcagtaaagaattatagcacactct

SEQ ID NO: 154601 - DNA, 601 bp, Homo Sapiens
  misc_feature (188)..(197): n is a, c, g, or t
gcacgaggggattcagatacctatgctttgtctttgtattaagcatgtctttattctgatgtttgacatcttggggctttgctgaccctagagaaactgcccctcccatggctagagatggtaagggactcacttgtgagcatgccttttgtataccaaccaaccaatccagagtctattttccaacnnnnnnnnnnacagggcccttccagggttctcacgctccaggccactattccccagcccttacaccccactgacaagcccactgaaattattcacagtagccaattctaggcctgcttcctaccctgcctcgaccattccttccctcagaaacacagcaaatgctcctgcctacattttcccctccctgactctgccttctgaccaccctgaggcctccactcctggccctgcctggtatgacccgccctctctacttgggaactgtgagtaacaattattctttcgatagcaatcagatcctgatctcctggcctcaccatatgtgaatataaataagatctacatttgaaagccggctacatgctccctaggcttcaaacttgcaaactctaggcccagcgcaggagctcat

SEQ ID NO: 154602 - DNA, 466 bp, Homo Sapiens
tttattcatgtgttttatttattttctccatcacactctaaatgcatgttcactgacatgctgacatagaaatacaattttgatcttgagaatacaatatccgacttatcaactaattcatcaaaccagcatagaaatagcgaacgccgaaggtccattgttgaaaaagaccacattagatttactagcaacaaagtcaacaaactgcaaacactccaaaaattggaaaatcatggaactaggctgtttgtctttctaccataaagtagtaggtatatatttatgtgtgtgtgtgtctatcacagtctagtgatacatttcctgctactgataatctagcaattaatgatattaatacaatcttccatggaatttctcttcaagttttaccatctcacatgaagaactaaaaccaaaataacagagtaaatcctcagttcctgggagttggcgaccgctccaacat

SEQ ID NO: 154603 - DNA, 390 bp, Homo Sapiens
  misc_feature (148)..(331): n is a, c, g, or t
gaattctctttcctgagccagagacagaggaaggaggtggcctggtctttggggagctccctatctggctacagaaagagcatatagagaagtcaaggaggaatggtgtcaattctgatacctaagtttatggtgtgctcaccacatnnnnnnnnnnnnnnnnnnnnnnnnnnnnnnnnnnnnnnnnnnnnnnnnnnnnnnnnnnnnnnnnnnnnnnnnnnnnnnnnnnnnnnnnnnnnnnnnnnnnnnnnnnnnnnnnnnnnnnnnnnnnnnnnnnnnnnnnnnnnnnnnnnnnnnnnnnnnnnnnnnnnnnnnnnnnnnnnnnnnnnnnccccactgagtatctccctaaatcaattccgtggtctccacaagcatgtttttcaaaaa

SEQ ID NO: 154604 - DNA, 634 bp, Homo Sapiens
cagagactcagcgaggtgatgtcacttccagcgcgtctgtgtggttcaagtccttggctcttacaccctccgtatgccacctctaatggattctcccatttgactctcacgtgtcatggaagtggtttgcaggctgaaactcttgagtgcacagacttagaagtaatgtaaaacactttgaattttacaacagtgattggtccattactgttggcagcttgggagttgtgagcatttcaacattctgagttgaaattcaacctgagaagcgaggtttctgggtgcaaacaatatatagtgcttgcccagaatacctgtttactcagtggagttgggttgttttctctacagaagacctaagagataaactaggtgtgaactggttttcttgccccagttggttccagaactgcctccagagttatttctaatatgtgaatctttgcctgtaagtgacttcttgttgtccacggtgtaaactccaaactatgtcatggcctacaagtcttctgggatgaaccatatgataggccttcctatatccatcccattcctctccctttgtgtagcagccacatggtttacaaagacaagccctccagcttcaaaggtagctcagattggtctaagccaa

SEQ ID NO: 154605 - DNA, 539 bp, Homo Sapiens
  misc_feature (25)..(25): n is a, c, g, or t
  misc_feature (44)..(44): n is a, c, g, or t
  misc_feature (62)..(62): n is a, c, g, or t
  misc_feature (84)..(84): n is a, c, g, or t
  misc_feature (98)..(98): n is a, c, g, or t
cccaagaattcggcacgaggagtcnctttattcattctttatgngatgaattatgtatatanaatttatgtatataccacattnttgtttattcatcncgttgatggacattgatggacatccattgatggatattgatgacattttgtttattcatccattaatgggcacaataaccaaaaagacatttccttttggttattgtgagtagtagtgctataaacatgcatgtacatgcatttgtttgagtacctgtttcaattcttttggatctacacctagaagtggaattgcagggttatcggtaactctaggcttaggtttttgagagacctccaaactgtttttcacaacagctgtaccatgttatattccgaacagcaacatataaagtatctgatttctctacatcctattacagccatcctagtaaatgtaaagtagcatctcattctccttttgacagagcaatatgtgatcagcttaattcctctaaagtcaaatttcagtagtaaaataaagttgatgatgaagatgtc

SEQ ID NO: 154606 - DNA, 712 bp, Homo Sapiens
tgaatgggcatttcaaaactttatttacaacaacaggtgggaaagacaggattttgctcatgggtcatagtttgctgagtctgcttctagagacttgaaaaagcaaaacgtattgcattggccaagacaaaagtgaggttcaggtggctggagaggaggcaagaaatgagttgggtttggggttaaaaagtgacttaagctctgagtagaggaaggaaaggagagaggacattgttggcagagggacagaggcccagaggggagactgagagccttctagccacaatggaatgaccagaatgtgggtaattagactatattagcttcaaagtgacccacttaactctttccccttacaccttccctgcaccaaattaatagacatttatcagaacagcctgtttcaggaagtaaaagatcaggggccaagcagcaggtatgtgtgttggggagaggggtctctgaattatttcttttgccattgttgagttccagggtccaatagtagaagcagcatcagtgaagagtcctgagactttggactcactattatgtgttcagcattgttctagtgccttagattgttacatttaatactaccaactctgtgtggtatgtactattagccccatattagagaagccaaggtgataatgcttatctaacccacatgtaccacaaaaacgattctctaaggaaaaaaagttggcgg

SEQ ID NO: 154607 - DNA, 538 bp, Homo Sapiens
atatacacatttcttttaatgtgtcagcatagcaaatattttccaaatgtccacaacgtctgaggcattgttgtaagcaatgggaatgctatggtaaataagatgccatatacaaattacattctagtgtgggagagagacagcaagtaagaaagacacttgatagagctgcagagtgttgagtactgtgaagaacacgaagcgcgatgtgaacgtggagatgaaggcatgtgctgtggtcatggaaggccttttgggggaagtgactttcaagcagagacctgattgatatgatgccatgaagggcagtttagggaagggagcagcaagtcaagaggccctgaggctggagtgtctcagggccagcaagaaggtcagagtgcctggatgatagttggctagtgggtgagtggtaggagttgaggctggatcatagccagttagagggtgagtggtaggagatgaggttggatgatagtcagctagggggtgagtggtgggaggtgaggttggagggataaccgggcaggccatgtct

SEQ ID NO: 154608 - DNA, 649 bp, Homo Sapiens
  misc_feature (105)..(114): n is a, c, g, or t
ataaaacttttttaaagcttaaactaatctaattatcacatcacttagaagtataatcagttaattgaaatgaaaatataaatttgttatatagctttgaagcannnnnnnnnncagcctcaagctggtgaagaacaatggctctgatcacaaaacttcattttgtaaaacagcaaagaaagtatataaagactcatatttttcagaagtacttactcttggataaggaaggccactggtagtgttgaaagccggtaaaagtttgtaacctaactgctttgccatttggagaagttcatcattgtaccactgcatatattcacctttttctttcagcatgattgccagggagtgcccacccaaaagacccccaagaactctgatgtttgtttcaaagactgatacgactacatcgttatctaaattaacatctcttaaaacttttctcactgcatcttcaaattctttagttttatttaaaaccacaagagtgtccaaagaatcaatcagtgtcagagaaaattttcccaaggcatcatcaacgtcaccgcgacttggctcttggcctctaactcgacctctacaggttaaaggcatgagttcatcagcagggtaagcatgttcctgcaaggaaaactttagtaagtta

SEQ ID NO: 154609 - DNA, 629 bp, Homo Sapiens
ccaagttcaatattttgtttaaatttcaaataaaagatgctattattacctatcacctattttacagacgagaaaactgaggtatataaaggctaaataacttgtcctagtcatcctcctaataagccacagagctataggtttggaggggaatttgaacccaatccatataaccctatggccttctctcttagctgctacacaataaggcctttctcccaaataaaacaaagtacaaatacatttcaacacccactctcagcacataagtatcatgaagagtatgaaaaaagtccttgtcctcaggaattaaccaccatgaatagacaagcaaaatgaatgacaaggtgtgagcttggggatgatgccccaggcccagctggtgggagctctttgagacaggtgtctttcatctttgcattgctggcacctagcacagagcctggctccatacgtgtctattccatgaacagcttgagcttttctttgaaggatggattagattcttcctgccagagggtagtctaggagcctttgcaagaagggaggatggctgagccaaggtgtgttgtgcgtgaggaacagaaaagcagcagcagatatgtccatctggaacagatcttcacttg

SEQ ID NO: 154610 - DNA, 628 bp, Homo Sapiens
taaggaatgtggagatttatttacatcaaattcagataaagaggtaacagcggactagaagaagcaagcagagcatgacttaaggagtctatctatgactgtatctgtggaactgcccttagccacaatgaaagaccagcaaaaccagccttcagcataaccctcctgcctggtaggagatgggaaggccagacttcacccctcaagatcgccctcccacgcgcattttccacctcgcagctaagaattcagtccagacttccgatcatggcgccacgcacgtcaccttctcccctcgccgccagcaaaatcccacccacgtcggctgaccccgcagcggggtgtaagggcgggagggatcccgtctcctatactggtcgcttgtacaaaccagatccaaaaaacgcactacacaaatccttggaaactgcggtaccaacgggatcttctcaattccttgagtgcaaaatgatcccactctctatcccgacacaactctaactccattttcctttcacgtgccctaaaaagccctcaaggcccccagccttggtgaatccaggccctctctcggggtgggcaccgcgctgtacggacagacgcgcgcacgcagcgggacgcctcgtgc

SEQ ID NO: 154611 - DNA, 609 bp, Homo Sapiens
tgttggagcgggaatcgggacagctgacctgctgcgagtcatcagtctgcagaactttacagttcaagtcacacccacactttgtaattcaaacaggtatcctcaaaggactttttctatgaagtaagcacttcctctttaaatgtcctatgctttttttcccccgtctacttaatatgttccacagtggactgtgttttcaggatggtcttgcgagcaaagcgaactacaaacgttgctattatttcgttttgaaaatgatatttttggtggcaaacgtgataggagaggtcatctcctaaaaagttctaactcaaaagtgtgcaaactggataaaattcaccaaccaatagaagagtggccttgcctttcctgaggagagtcatccagtctcacactcgggcagtgggggctactttaatctcaaatacaccacgatccagctgtgtgatgggggcgggttccccttcccagccttgttttcctccctacagcctgtcagtaactccactttccatcagaagcgttaccatcagctcaaacgtaaccattgtgtagtgtcccactgtacacaacagtgacacccccactaccccacctctcccaggg

SEQ ID NO: 154612 - DNA, 666 bp, Homo Sapiens
atggattagccattctttattcctttactttcctaataaacttgctttcaccttatggattcgcctcaaattctttcttgtgcaagatccaagaaccctctcttagagtctgagatccggacccctttccagtagcaaaaggtcttagactgaagtactgactccacagtcgttgttaagaatcctagttgtttaatagaggcggtcttgggctcttgctgggccgcggtgtgttctgggaagtgtagtcacctgagtctccagttccttgtctctgggccgtgtgtgcacgccagcgaagcactgtgggagtcgtagtaggggaggaaaaccctataccctctggcgtgcggcgcaggagtttgggggaatgtagtcgccagagctctgcgttgtcttccggctttgggcgtggccacgatgcactctgggagtcgtagtaggggaagaacgtcctccgctcttttgcgcacggtcgctagaggttctgggaagtgtagttgcctgaagctcgtgttctttgtctttcgatgatgtgcgcttggcctcaaagcaccctgggagttgcagtggggcggggaaagccatatgctctctcgcgcggggtcgcggttgtttctgggaagtgtggtggcctgagttccacgttcttcgtttctccgctag

SEQ ID NO: 154613 - DNA, 643 bp, Homo Sapiens
ttaccattctgtgttcgtttggacagatggtgaaagatatttttagattctgaaatggtaacttcctattcttggtaggaagcttcatcccccttttccttcagcctaaagtgggccagatgcccctcgactcactggctatccccccattcagaatccacttacaagaaactaatacttctcttctttgttaagcataaactgagtttccctcaaatagggcaaaaatggccatgggtgtggggtcccaggggagtagctagaattgctaaggatcccctcagctctatggtttcttggatatggataaaaggactagctatttctactatctcccatttgcaaaatgaggaggctgggatgagataagtttgtagggataacaatctaatagctcttaggttgaatgtggcttgtggaagtgttttgtgtggcttgcatagtattttaaaaacccagagtcgtagcttccctttaaaaaaattggatctagcagtatcaatcctgtaacaatttagaaagagtctatgtgctctaatttgtccatctttccctttgatcatatctgtactatttcacttagacatgaaagccctaatttacagttctataacaattattttattaaacactgactttgtgc

SEQ ID NO: 154614 - DNA, 418 bp, Homo Sapiens
tagattgaaaatgagtatttttatttacatgtgatggaatcgagcctctcacttcccggcccaagtcatgcccacggttaccctgtgtcaccctgggctagacagtgagctctgggagggcagtgggctgcctgctgtcggacgaccgtgcctagacagggcacaacgaagagattcaagtaataaaggggcagagggagaggtagcagctgccgtccggcacagggctgcccctcagaatgtgacactaatatggcactgggaccatcggcagctcctccgcccttcccatcacagccccggaagtcccattgtacctccattggaacgagagcccatcagtcccgccagcctgcagggaagagtctgatgcccctcgtgacatcaccgagctctcccgactccctagtggcctgct

SEQ ID NO: 154615 - DNA, 457 bp, Homo Sapiens
gaatccttgttgctttatttactcactgaatgattacggacaggtcacctcacccccgtgttgcagtttcttttgaagcgtgatgataacactatctttacaatgtttgtggcagtctttaatgttattccaaaatatcgccagctcttcccatcccagaattatggtaggattacatgtctgctatcacactcctgggtggccatgtgacgtctcaaagactagtgaatggaaatgacatgtatagtttttgaggcagaacgtttaattcccagcaaaagaccctcaaaggctgtctttccctcggccttcatgagtgacaatttaccagttgtggctgctttattggtctaatcctagaataagaacagcccttgaagtgagcaggccagtgatcaatcaggcatttaataggcactttataaatactcattttacttcaatattattatttttg

SEQ ID NO: 154616 - DNA, 485 bp, Homo Sapiens
acaagcaaggggatattttctttagaaaagtgttacacgttttaaaaatactaaaatgaattcaactgcaccaaatctcatgtggttgcaaatgtttgttaaagatttgttttctgtaagtagacttagatattccagagatgaagcagacatctttctgatgatccgaattgccaacacatttccaaagtaaaaggcgacatcagtggcttcccatttctgaaatctctgaaaaactaaacacctcaagtttgtttcacatcattaatgaataactctggaataagggggagtagggtgtgcctgcagaagagacacaactttcacttgacctttcacacatccgtatttctaaagtgaggcattaatcctaaaaggcctctcatcggagtttgtctcctcagatggggcaaatggtgtgttaatatatctgtcatataagtgctaattaagtatttgttaaatgaatgaatgtcttccattaa

SEQ ID NO: 154617 - DNA, 397 bp, Homo Sapiens
aggtcaaacttttctctacctatttattagctatttgtatttcttttttcataatttgccagctcatgttctttgctcatttttgtattaggttagtaatattatttcttattgacttgcaaaaactttttaaatataaatttggacattttgttgcaatctttttagcagtttaatttttgtcttttaattttcttaatggtgttttggatacaatgtcttttctattaatgtcttacatctgtctgtttatacatttgaatatcacaaccgtaagtttttggatataatttaagagtcagcttagatgattcttggggttctagatagagcaagattaatatttaaactgaacatggaggcggaggtggaaagggcccggttaccggcctcgtgc

SEQ ID NO: 154618 - DNA, 263 bp, Homo Sapiens
cagaaattgaggcacaaagaggttaagtaattgccagaggtccactcagctagtaagtggcattttggctccagagttcatgatcttaagcatattctctgttgctttattggaagactaaaccttttaagatagatattctataattcagtgggcttcctaaatacaaatggagaaaacagatgtggattcacctttcctaaacgctttgcctctctttaaattcttcaactgagtgatcctctctgggatcgctcatattc

SEQ ID NO: 154619 - DNA, 665 bp, Homo Sapiens
taactcttacttaggcaattttaatttcttttaagtagtaaaataggtaagaccaccaaattaaatacttcttgcaaaaacaaaattgacaaaatgtatggctcatttacattgtaaatctacaattaagatgggaaataaaccaattctggacacctgaaccggtgagacgagttgaattgtgtcctccaaaattcatgtgttgaaattcaaactcccagcatcccagaatgtgacctgatttggagatggggccttggctgagacagtcaacttaaaatgaaatcattagggtgggccttaatccagtaggactggtgtccttataaagaggggaaatttggagacacacacacacagggagagcgccgcatgaagatgaaggcagaaactggggagatgctttcacaagccaaagactgcccaggcttgtgagcaaaaacaacctccagaagctggaagagagccttgcacagatttcctcccagagcccctagaaggaacccaccctgccaacaccttgatttggaacttgcagcctccaaaactgtgagatgataaatttctgttgtttaagccacccagttggtggtactttgttacagcagccttagaaactaatgcaagtaaataaaacaccagaaagattttccttttccctgtat

SEQ ID NO: 154620 - DNA, 532 bp, Homo Sapiens
tgagccattgtgcctggcctcttcataatttcttaacaaagggtctcaaattttcaatttgcactgggctccacaaattacgtagctgggcctgctcagcagctctggttcctgggcccaggactgttttctgagggattgtctgggagagactggggaacctaggtgggacgtgggctcgggtgcatccttggacaagtcctgtagtccctgcgcatcaatgtccttgtgcatgaaacagggatcatggtgcctgctccacccagacaggagaggacatagatctgaggcttttcccaactgcagtaggcgccctggtggtggagagtctgcagatctggcagtggagagtccctgccctggaagccaggctggagctgctttttcagagatgccagatgcctctcgcactcagaccccctggtcaggctgtcagaaggcagtcactgactgttgaggagagacgctgctattcacagggatgggcagatgcctccctgggccagacggacaaagcatgcccaggctcctg

SEQ ID NO: 154621 - DNA, 577 bp, Homo Sapiens
attacaggacttctcagagcctttaatatgctaatatactttgtgatcctctaagagaagactataatacacataaatcatttcccaaatcaatttcgtcgtacacttgttgcctcactgcctctttcaagaactagaacataatggaacactgctgtggaaaaaagataccaaatgtcacatgaggaaagacgacatctggcttgacttccaaaacatacacacgcacaaacttgcacatgcaggaattctctggtccagcctgactgcattgtaacttttttctttggccgccattcagcttcctggatgcacagggataaccagtgttaagtgccttcacctggggttctatgcccagggcaacagtcagtggtgactcagggtttggtgtttccacactccacaggggctgctctgtgctccgtgccactcaagatgaagcaagtgccacaacacctgtgctccctgaaccctggatgagcagctgtgatgtgtgcagtgtgcaatcccctgccccacagaattccattgctccaattgaaagttcatctgctgccgggcacgcagtggctca

SEQ ID NO: 154622 - DNA, 690 bp, Homo Sapiens
  misc_feature (53)..(63): n is a, c, g, or t
tactcttttttctctatgtatgcatggaaagggaacatggtagaaataatccnnnnnnnnnnnatgggggtagataatagatgaaatatggcacagaacccccacttcagcacgtgaatgagacacagaaggcagttctctcactgaagaaggggccaagggcctccccctcatcagctcagccccttctcacactgcagagtccctcgggaccgccccaggacctgggggctatgtggcacactccttgaaaatcatttggtacttgtcacttcctgatgcctattgcagtagatgttggagccacacagataaataagtaccattccctgcccttggataactcagtctagaggagagacagaaggttaaacaaccatctggaatgtagtcagctgggtgctaaggtagaatctgagggagaagaataaactctattagagtggccgttatcaaacaaaagataagtgttgacaaggatacagagaaaagggcccccttacacactggtagtgggaatataaatgagtgcagccactatgaaaaacagtatggaggttcctcaaagaatgaaaaataaaactaccatctgatccagcaatccctgggttgctgggtatatatatcaggatcaggagatcctgatttcaattgagatcagtgaactcccttatttcttgcagcattatt

SEQ ID NO: 154623 - DNA, 845 bp, Homo Sapiens
atccttgcattgtgcatgattgcatgtgcagagagggaaagatttctttaatacacacagcaagctaatgacagatctggaactaggaagtttgtcttcagcatcctcagtccaggaccccttccttatgagacaggaaggagcatagagaatggggatgggaagagatagtgaggtttcaggtccccaagaaagacctcatgctcctgggtggtaatagagccactgggaagcaacaaatctttttccccacattcccagaccctgaggagctctttgtccctacagataactactatgaggtggtacagctgcgcactcatcatccagccttgcttcccttccaagttaaaaaccccctggcccagatggcactacactgggagctccccactgaggaggtcccagtgggagacagacatctcctttgatgtgaagaagggcttcactattcaccaggcccaggcttccttggctggctccctcttatgcatggccagcctaggtggcatgagacaaatctctaccaagtacattctggtctatatcaattgcacatgggtctagggctctgggtgggcagggaaggggaggatatggggagatataccttcttcaggaacctctggtttcggctctgtggattatggagctctaaacaacatcagcttttgatgactctctatgtagtcagccgttttgtccagccagccgatcagccatggaaccagctgataccagctcagcctttctatccattgacctattcacaatcaagtcaaactgttccatgcatgaatcctccatcagtcaatcattccatcacctacccatactccattaat

SEQ ID NO: 154624 - DNA, 323 bp, Homo Sapiens
ttttttaccaatgaaacatccaaggtttatttagaaatgtaaatgttttagcatatttgaatgaggcaatgggagtgttgagattgatacaactgaaagcaacagaatactgtataacattttgactatagttactaacaaagtattctattcttgaaattcactgagagtagatgttaattgtactcgccacaaaaaagataagtatgtgaagtaatgcatatgttaattagcttgatccagtcattctacaatgtatacatatttcaaaacactatgttgtataccataactatatatagttttatttgccaattaaaata

SEQ ID NO: 154625 - DNA, 515 bp, Homo Sapiens
aaggaaagaaaaaaaagaatgaagaccagtcctttgaacaccttcagctttacaaaacaacctctttgcgttgtcttcttttatctccttttgccttggacaggtgagaacttgtcacaggctggcctcggccctcagcctggtgtctgggagccctgaatggctgggagcgggggaggggtcagcagtgatctcttttagggctaattgtgtaggtcggggtggcgggaggtatggaggtggtggtggtgaagcctctgggtttccagacttaggaagtaaaactacaggctacgcagttacacctgaatttcagataaacaatcatttcttttagtgtaaatatgtcccaaatattttatactaacagaaattatttgccgcttatctgaaattcaagtgtaactgggcggcccgtattttatcaggcagtcctcgccaaaagacactttcaaggagatttgggactgagcagagtgtgctaaggagacctgagatgatgcctgtgggcgccg

SEQ ID NO: 154626 - DNA, 503 bp, Homo Sapiens
aagcagagatctttgttttattcccgatacattccaaatacctaaaactatgcctgctacatagtaagtactcaataaatacttgttgaatgaggaattgggtgagtggaatattatcctggctgaggattccagagttcttggctctgtagcactcagacaatgccagtgagaggaactggtcctaagaagatggaagctggccttttccagtgacttcttcttagaaggctcctctgggcttctccagagagtccaaatgtgaatagcccatctctagggttccacctcttactcttgggacatgagttgtcggagcacaccttgtaagcgttggagaactggggaggtgacttgcaaaaggggccgggcctgccccactcccacctggcactgcccaaacaagccatcctgaatacagacttccaggtgagagcagagcctgcgttcaaatagacagcctcccaggcgcctcggagcaagtggcttctcctgtggtctcg

SEQ ID NO: 154627 - DNA, 589 bp, Homo Sapiens
aagtttaagatatttattgaacatgtcctcaattgcaatataaacattataacattttttaaaaattctttttaatacattctgaattaaacaaaaatttcaaatcataccttttatgaagttagggaagtgctaatgaggtagaatggcagttgaagccaaaacatctgaatttatgtaaataattttacccacattagttttttgttaaaggaaacaataattctcaccatatactatttactgcagtgaagtatttcagaaacgtgtgcataatacataattaattttctaatggtaatacattctacaaattattacaattgtggtttcttgaagagagcagtatttcaaatgaagaaacttggaatttctcatgaggggatgatcatgaggatgatcatgaggggatgtcaaatccatgtgggttgttcagtttctggccggggctccgacagctgggcatccggccgcagtccctctctcaggatccctccaccctccgcctcccaacagttcgggcttttgtgtacgctgtggctgctgcttctgctgccgaagcttggcattggagacacctcgtcctcct

SEQ ID NO: 154628 - DNA, 691 bp, Homo Sapiens
ggccgccaacttttttgttgattagaattatatagataaaaaatgttttattgcagtttagtcttggcattagaatttatcctaaactttatttttttatgtagaaagcatatttgttactaattttttagttaaataatatcatgagaatttctagcaagatgtaatgatataatagcatgggagtatgatggagaagcttggctttccttttccttctgattcagaaatcgatcgttatttgaagcagtgatgcaaattctcaaaacattttatatacttaatttcaatttgttgcatcaaaaattcctcagtacctgccatgcataggcactggagatacaccaaaggtatagaggcaatcacacatggtccagtggatacatgtgtagtagggaagtcaggcacataaacagtttacagtcagcatggtaagtgtccaagtttgattacacagaggtggtggtggtagaacagaaggcctccttaaaagtctggagtcatcattaaaagatgattagaagtttacttagtggatattccatgcaaaggggcaacataggctaaaacacgggtctataaaagagcatggtgtgtttggaaaacaagagcaagctcagttttgctggtgtgtgaagttcagagagggggaagtggtcgtagttgaggctagggagagaagaattccctg

SEQ ID NO: 154629 - DNA, 645 bp, Homo Sapiens
gagccttcaccatcttgttctaaactgccccaataaagccactaagaagtcatttataaaagaacacaggaaatatttcaggaacatagagaactgggagtggcaaacaagatttaaatcagatcagagtcatacatacaccaatttttttgctagggttctcaagcagctgtcatgtttcttgttagtgagtgtccttaactattatttaatatatttgctgatcataagtagagtagatgaatagtaaacatttaattctgacatttgcagtagatatagccacatctttcaacatttttagttttccgtatatttggttttccatatatttctgagaatgtaacacatttgtgcatttgtttgcttgatgacaatactttcagagtttttccataagaaagtctctgtagcaaatcaagcaaaaacagaaaattaaagagaagggaagtgaatccctctctcctcatattgtttaatttccatgaactgcctggatttactattttaggtcccagaaagttgtagctgctttcaaagttgttcacaaaaatttgaaatattagtatccgtctctaaatttaaagaagcagtgaagattttttggtatcaaataatcacaaattgaaattttatctgaatttc

SEQ ID NO: 154630 - DNA, 756 bp, Homo Sapiens
gaaactggtcctgctgtatttttaaacaattgagcaaacatggaaagatcagattccaccccaaactccacatttctgggttctcttacaaaaatcacaagagtttgcattctcacataccatcaactggccgaagcagaataggggcacccctgtagtcgggggtggatgtcccagttttgcagtcacacactccaatatttgccctaagcagagggtcactgacattgaccacagtacttgctttgttttccttatggttaaaaacagtttccctcctcgtccctggggcactggggttgcagtgggcctgtgtttaatcaaggtacatgcgggagtctattttgaagctgaagagaaagttggcggttgaatagcagtggggcttgaggtgaaccccaggaagaagagagaatagtagtggggtttgaggtgaagcccatgctgactaggagggctctgaaacacaggtggagggaggaaggcgaggggtcccagaccactgctcaggaaggttctagtgatgaaggagccaagatcagaccaggccttagaaggcagagaagatgccttcatttttattcagaattgaaataatcaacagcttaacttctttggcccaatttctgggtgtggcaactttaaggggcaaccttaaaggggcctcaggtttgggcagtggaagactcaaatggagaacccgaacaccccattctctgcactcagaccaggacagctttcatccatccgctcagg

SEQ ID NO: 154631 - DNA, 518 bp, Homo Sapiens
caaaattacatattttcattttattgtgtttcttattttaatctctttgcttctttaatattcataatttaagtgaaattagaaatcactgtccacaatctgcacctcagaatttttgtcttcaaaccaaaatattcttggatatgtcgttttctgttgcattttaattcagaatcatagtagcatttttttctgattaattatatgggattttcatttgtttgcctttgagctttaggataatttttttacatatactcttttttgatcatatattgaaatttgagcaccagtgtatcacttatgtttttacactttccatttcaatgtttttctgtcgacacttttattaagctaacgctttgattttatccattttgtgtaagaactctgatcatcatagtttttatctgtggttcccttttcagacttgtgattccgggaggcaatagtgttcatttattgtcccccttttaaaccattgaggaataaaggacaaaaacaatagttatcagcct

SEQ ID NO: 154632 - DNA, 636 bp, Homo Sapiens
  misc_feature (280)..(546): n is a, c, g, or t
  misc_feature (626)..(626): n is a, c, g, or t
cgaggacacaggtgaaaactgaggtttagagagggtaaataacttgcccaaaatctggaaaagtttgccaacccctggtcttactcctcattaaggtttcccttcctctccaccattcccaaatctgagtattccagaagagctactgtttttttaatgatatggtaaattaatttctaaagggattaaaatgaatacctacctgttgtaatgaaaataaatgtataacataaagcaatctgcaaaataactgttttgcaggcctaagacttatgcagannnnnnnnnnnnnnnnnnnnnnnnnnnnnnnnnnnnnnnnnnnnnnnnnnnnnnnnnnnnnnnnnnnnnnnnnnnnnnnnnnnnnnnnnnnnnnnnnnnnnnnnnnnnnnnnnnnnnnnnnnnnnnnnnnnnnnnnnnnnnnnnnnnnnnnnnnnnnnnnnnnnnnnnnnnnnnnnnnnnnnnnnnnnnnnnnnnnnnnnnnnnnnnnnnnnnnnnnnnnnnnnnnnnnnnnnnnnnnnnnnnnnnnnnnnnnnnnnnnnnnnnnnnacaaaacaaaagaattctgtaagaacttctaacaggtacattcctgtaagcattacccaccactggactaggcactgggnagcctgtaaa

SEQ ID NO: 154633 - DNA, 500 bp, Homo Sapiens
  misc_feature (206)..(457): n is a, c, g, or t
gaatcatgtacagtcgtgctgtttattgttttctagggcatgtctttccagcacaaaatgatggtaaattttctgggtgcagagacagctcttactgtattttacaggctacccagtgcctagtccagtggtgggtaatgcttacaggaatgtacctgttagaagttcttacagaattcttttgttttgttttgttttctgacagnnnnnnnnnnnnnnnnnnnnnnnnnnnnnnnnnnnnnnnnnnnnnnnnnnnnnnnnnnnnnnnnnnnnnnnnnnnnnnnnnnnnnnnnnnnnnnnnnnnnnnnnnnnnnnnnnnnnnnnnnnnnnnnnnnnnnnnnnnnnnnnnnnnnnnnnnnnnnnnnnnnnnnnnnnnnnnnnnnnnnnnnnnnnnnnnnnnnnnnnnnnnnnnnnnnnnnnnnnnnnnnnnnnnnnnnnnnnnnnnnnnnnnnnnnnntctgcataagtcttaggcctgcaaaacagttattttgcagatt

SEQ ID NO: 154634 - DNA, 941 bp, Homo Sapiens
tccccatagtcttaagctggcagtttgaaggtatctaaattaatgttaagaaacttgtgaactgaagagagtaagaagtatgtgtattttaggtaagttactgggaactgagacttactggtttggaaattggagagtaggacgaggagagctgtttaatgtgtttgtggatgggggtttgagaggtatatagagaatggtttggaaataaagtgagaggaatttttactagaggtaggaaaaggtactatgatggagtccgaatgagagttatttgctaaggaaatgaagttgatcttcactaaggaagtttcaataaagccagagaaaatgggtccctcattgattatgagaaagctgttagttactatagctagagttatgataatgatcatgcattatacaagtctgttttcatgtataggatgtctgcttttctgggacaaattagcacaattgtggaatgacagcttttctggtcaaggcaagtggatgctggggagttattattttgaggaaaagaaaatttcaagcttttcaccattattctttttaaactatcagaaatatttatcacacatactatctattttcttgggctcttgttacaatgtagtttacctttacttttcaaatggtccttagatcaaattatttgattttgtactccacaaagacacatattattccttgcttttatagaattttgagactttggcccacacaaatttcttagaagacaataaaccaggtaaaaacactaacttgcaattttaggtgtcttttttatttcttttacatttgcatccgtagcaaccatttaaccttgtagaccttatgaggccctcaataatactgtatttctaaaattagacaacataccccccaaactcatgtttctgtttccctacttatctcttaccctcgtgccgaattcttgg

SEQ ID NO: 154635 - DNA, 469 bp, Homo Sapiens
caggatgggttttttatttaaggtacaactttccaggaagttggagagctccagaggactgcgtccatcgccctctccagcctcatttaattcaacaaactgtgcctgtggccctactatgtgcgccgtccctgtactaggaaaaaggtcaaagattaactagagaacccagagtaccagcgggtcccacaaaaggtgacaaattgaggcccaaaaataggactgtacttgggagctcagagcaggtgaggctgactgggggcattcaggacggcttcctggaggagaatatacgttatctccgagaaggaagagcagagagaaaaggaacggcaacccaggcaaaggaaggaggtgcatgaaggatgaaggcttggaggtgcgaacctgtgatgaaaataggcgaccttgtgtgtccttgcaggaaagggaggcagtggcaggagcctgccggctggcaggaaaggtt

SEQ ID NO: 154636 - DNA, 520 bp, Homo Sapiens
ttctttctccatctgtagtttttggatgaagacttgaaggtagctgggaaatacaaaggaaatgattatagccaatactctccctggtcatgtgacaccatcggctcctacattggaaccaaagatgcaaaacccaaagatgttgtggcagcagggagtgtggaaatgatggtatgtgtaatagctaagcaataattaatacaaattaagataaaccaaataaatttttacccattaccatttaggcacaaataattcagctttgcttaagagtttcagaccatattctatactctgcagttgagttatctttaaacagtataggtttttgattcatttaggtgtaaataaaaatattttaatacttaccgagacagagcatttattatatttctgtgcaaatagcaatttctcaacaattgtttataacccagattaaattattttacataattaattaagatcttggacttcttcaccaaataagttaaaattctttgtcacggagaatggcatgaac

SEQ ID NO: 154637 - DNA, 490 bp, Homo Sapiens
gtaaatggaaatagacaaaatgggaatcagcagagatatggaggacagaatacaatgaggaggccttgaccgtcagtagcagagagggcagcagaagcctaattcccaaattctttagatggttttctgatttccaaattagtttcccttttaaatttattgtgtcaggttcagcttatgaggcctcaatacttttcagtcttaattgtatattgaaaatactttttgtttactaaatgctttttacattaattcagtgtgcacttcgtaaggataatgatgatttgagttagtttagtattcaacagcttcctctattcctttatatgatctctgtatttaatggctgtggcataaagtttccaactaagtttaagtatcaagttttctttgtgctgttttctgcaaatattgaaggatgacctggattgtcctagaactttgttccaacagattacatgtgttcataatgaatagactgctcaaagat

SEQ ID NO: 154638 - DNA, 726 bp, Homo Sapiens
  misc_feature (56)..(589): n is a, c, g, or t
gcaggtgacttctgggaagcttaggctgcaggtctgcaaggtttttgttagtgttnnnnnnnnnnnnnnnnnnnnnnnnnnnnnnnnnnnnnnnnnnnnnnnnnnnnnnnnnnnnnnnnnnnnnnnnnnnnnnnnnnnnnnnnnnnnnnnnnnnnnnnnnnnnnnnnnnnnnnnnnnnnnnnnnnnnnnnnnnnnnnnnnnnnnnnnnnnnnnnnnnnnnnnnnnnnnnnnnnnnnnnnnnnnnnnnnnnnnnnnnnnnnnnnnnnnnnnnnnnnnnnnnnnnnnnnnnnnnnnnnnnnnnnnnnnnnnnnnnnnnnnnnnnnnnnnnnnnnnnnnnnnnnnnnnnnnnnnnnnnnnnnnnnnnnnnnnnnnnnnnnnnnnnnnnnnnnnnnnnnnnnnnnnnnnnnnnnnnnnnnnnnnnnnnnnnnnnnnnnnnnnnnnnnnnnnnnnnnnnnnnnnnnnnnnnnnnnnnnnnnnnnnnnnnnnnnnnnnnnnnnnnnnnnnnnnnnnnnnnnnnnnnnnnnnnnnnnnnnnnnnnnnnnnnnnnnnnnnnnnnnnnnnnnnnnnnnnnnnnnnnnnnnnnnnnnnntttttaaggcagcaagtgaggtgaaaggcagggccatgagattggagttgtaagctacggactcagcaaaatcaggctgctggtggtaggatgtctataacaagtgcagtgagctcactcatgggctcacagggtgg

SEQ ID NO: 154639 - DNA, 699 bp, Homo Sapiens
agctaaaaaccacatattctttttgacacttaagttccacttgtagaactccaaggacatcaatacagatgagcacagatccattttttagcaagcagacggccacactgggattgctgcggggtagcaagttagccaggggaagcttcatgtggctccccagcacagggcagaactgcacgtcacattatgatccagcgtggaaaacaattatgtatgaacacaaacttctgggggaagagccaccagatgttacaggtatacacgtttcctcctctcatcccaaaacctcccccatttgggtgcttgctgggtactaggccccaaggaacagaggtaaaaacagcaagaggggccctgggccaggggccaggagctgggagagggagggaagttgggcaaggatcaaaaggacacatgtaattgctgcagaatgcaagtaaagcggcactgtcagaggctgcctgtagtggctagggggaaagcagagcctgattcaagaaacagaagaatccagaggacccagataactgggaatggagggaggggttcaacagacctttgctgtggcctgggacacagagctgcagggtccgagagctggggcatgtgggtgatgtccctgcgcaaacagggcaggaaggggcgggtgggtccagaggacacgagggagaacggccctgcgctctgaaacattcg

SEQ ID NO: 154640 - DNA, 290 bp, Homo Sapiens
  misc_feature (277)..(277): n is a, c, g, or t
acagattggttgaccaaaaggccattttatttctactttataaaaatagatgaaaggagacttgaaattattttgcctcttacatcactgggtttgggttctggaagtccctggagggtgcgcctgtagcccagacttcacaggtagacatggaggtcatgcaggtcacatggctggttgacacctgtaaagctatgatggccaagcagaactttgccgggtatctctggtcctattccctcccccgggtcatctgcctccctcctggaattgattnattaagtgctgtc

SEQ ID NO: 154641 - DNA, 694 bp, Homo Sapiens
gggcagcaggtggaggaacaaattgtggtacacccgtcttcttttgatgacccaattgatttcacatcaccttctgtactttctccagttccccaagtatcttctgccattgaggccagatctgcccatctatacactatcaggagaaactggaggcttctatttttcatgttcaccctgttgagagaacccacagtctggtgggagagacagatacacaagtcagccatcccagcatctgtcttgtgtgatgttctatgaaagagaggctgtgtgctaccccaggaacaaggaagatgcaggatagcaatgaaagaaggcttctcaaatatgccacagctggatgcagaacagggaatggggagtgagtatctgtcagacagaagtggaaggagagcattccagacagggtatggaatctccttcctcaagggcaaggactttggagtatctgggatgttgatggtctggtgtgaccaaaactcagtgggagatgaggctgaagggtaagccagggcttgatcatggaaggaagtcttagtgtgtgtgccgaagggtatgggctcaaatttgagggcactaaacaggcacggaaggttccaagcctggaactcacagctgcagctcactctggtgggtttattcatggggccctgctcaaatcttccctagcaaagctgctttctctctagat

SEQ ID NO: 154642 - DNA, 435 bp, Homo Sapiens
cacttttacatatttcttattttaatgaaagtcatatactcacaataacacctattccaagccaatgccacagtacttattctattttctcccctatatctttaaactaaattctcattctgctcaaagaagcaggagttgcctctattgcctcatgcaagaaaaatatttcacaaataattaacacaaagtacaaatatataatcatattgttattatcttttgagatatttctactagattcattcttacttgatatttctgtttccctgtttttaatgtttttgatgtagcttaactgtaaaatctcagacagttctgggtgtaaaagctatccttcccacaggatatgcgttgtccttacttatcccaatgcagaaacacatctgacatcttattctttatctctcagttcagaggaaagggttctgaatg

SEQ ID NO: 154643 - DNA, 401 bp, Homo Sapiens
ccctggcatccataccctccaggtgaacctgacttctcacagtgcacttcccactcaggtctggagcagtttcactttagctggaaactggcatcagaactggtctatcaggggccatccacatgccctttcacagacatcggcagggtggacccacagaccagatgccagcattgttatgagaacagcctccctcacctcctccataacacacacccgtgccccacccggaaccttccacatagctgtcctggtggcactgggcctgccattgagctggcgcaatgagagttgtgagcacagggcagatcgggggttatttttaaacgtccttgctgggaggcagtggtgaccttaaagtaggttgtctctttttcctggcatttcagttttattgtaaa

SEQ ID NO: 154644 - DNA, 716 bp, Homo Sapiens
gatctgtttatagttatatgtcaggagatacttgtgggtaattgggatgagacatgaagagaattgactcatcaaaggagttatagggctttcaggcaaagcttaacagacttatcaagtaaggaagaaggagagtctgcctctgctgacggtaacaggaatggctccaaatgttgttagcgctcctatacagcctcatccaattctcagcttcccagccactcctaaccatgccctcactctcacatacgacacctcacgaggttgtgaattcaactgttgtaaattggcagcccataggatcaaactgtgaaattgtttttatcggagccctgtgcctgcaagacatgagagattctcttaacaaggtcacagaaagtgcttgagcttccttatgtgccttgagcaaagaatgtaggaattggatctgaccatcatctttccttatgctacccagaagcagccacgcccctgtatcttccttgatttcctcccatcatttatgctttcacaaaacagtgtccactcagtttcccaaaaccttgctgcaatgagcaccgcattctaagtaacgacaggcagtatttcaattcattgtttctgggctacaagccatgaattggtaaattatcactatttaatatttttattgctttttgtcccaaccgggcctaattccccagtttacctatgctctgggtagcactgactggtac

SEQ ID NO: 154645 - DNA, 529 bp, Homo Sapiens
tgggggttgatgattgtataatttaaatgtttaaagtgcaacaacatagcttatcaagaccaagcagatcctctgtgacctagcaaaagcagggcagaaggaatggtgtagggctggtagtttcggggacaggtgaagccatgtggtttccagagcccacaatggaaagaaatctgctcattttctttttgacgggcagtgcctcagcatttttctgtgcctctgaacccatccaactgtgtccaaggcgcaggcctcgtttgcctctcttcagcttgaatattaagccctcattggagcagatggagctggtatttctgtaacacaggattgccctcaggggaatctcttgctccgcaaatgagaagcaacatctggagaagggtacctgcatgctcttgcttgtccacatcttgcgggcacattcccgctagcagcaagcacaccagggctgtggtgatgatctgcatgtcttctggtctggcttgggccttcctggagcagctttgatgagcctggtgaagctaag

SEQ ID NO: 154646 - DNA, 295 bp, Homo Sapiens
ggagggattcggggttgtctcatcaatttgggcctgaggaaaattcaggtggaagacaattaaataactaaccacctccgcaaggtgcagaactcaaacccaagtctccctcccacgccctgggctccagggaagcccttgggtgtcgttgttgaaacaggacgaggcgtgaccccgggtctgcgttgtttggcgtgggttctcactatgttgcttaagctggtctagaactcaagccagtctctcacttcagcctcttgagtcgttgggattacagaagccaccatgtccaact

SEQ ID NO: 154647 - DNA, 417 bp, Homo Sapiens
  misc_feature (48)..(48): n is a, c, g, or t
gttaatatcttaagatttggaggtaaacggaaatggagaatcagcaantatacttcaaccttattgtaaacagacaaaacactaacaataaaaagttttgaagttaaaaggacgtaagttccaccttctatcctttgtagagatataaaaacaaaacaaaacaaactctgactagacaggctacccgctacacactcaaatcgacctccgcgaccggagggggaagcgcaactggttatggcaacccccctgccaccccggcccataacgcttcaccacgttctgtgccacggccggaagtgacgcataacctgcgacgccagtgcctgccgcccacggccgcaggagtcgggcttcggtcgcaccagagacagcggactttcctccgatggttgcagcagagggatcatgacgggg

SEQ ID NO: 154648 - DNA, 310 bp, Homo Sapiens
catgccagctttctgttggttactaatgcatggaaaatatttttccatcctttcactgtaaatctcgttgtgcctttggatttaagtcacctgtagatagcatgtagttaggtcatgtttttaaaatccattctgccaatctctctttcagttggtggattaaatacatttacattcaaaatgatttttgattaggaacaacttctgtcactttgctgtttgttttctataaatttcaatctttttcccctaaattcctccaatagtgttttgtatttgattgattttgctagtattccatttgaattcc

SEQ ID NO: 154649 - DNA, 428 bp, Homo Sapiens
taattactgccactgggtttgtcgtgagccatcgcacctggcgaacctacctatatctttctttgaatgtgctcagaccaagggtcttatcttaaaggaatatcagaccagagcaccagacctatgggtgagaaacaccttttttaccccagcacacattttcccatccatccattcatccatctccaacaaataaccttacacagcttccccactctgaaaggtagataccatatctgtctactttatctccaaatcatagtccatagccagcagagcgtaaccaccaaaggaatatttgttcaataaataagtgaacagttataaaatgcccactatattggcatagtcatacatatatgatgaagcacagtccctgccttcttgatactcacagttgtttttcaggatagctttgtaccccatca

SEQ ID NO: 154650 - DNA, 283 bp, Homo Sapiens
gctcctgaactctgggtggccagctcttgccatcttcttcctctctgatccagttgcttagaaatgcaacagaaatcaccaggcatgaacctgtttactggagcctgtttactggagcctggtgcatcatataggtatactgtggtctcatgatgtaataggaggtctccctgttccctagacccagatcagaagggcttcatgcacataggcattcatcatctatagccaagtagccctagagaaggtgcccagcaagccttgctataaagagggagggctg

SEQ ID NO: 154651 - DNA, 343 bp, Homo Sapiens
catggcccttatggggaacagatcttatctttaaatgtattcagatgtgcttttccaaagtttcgagactggagaatatgctgagaatatgctgggttctgtgttcagggctgaagaggatgtgacggtgagtaaaactcagtcctgtctatgtgggggagacagacaggtaaacgggtaatatgggggcaggtttcatattaagggatgccttgaaaggacccctcactcagcctaggggtcctagagaaggtgaccactgaaccaagcttaaaggatgagcagaaattgagtgaacatggaggcggaggtggaaagggcccggtaccagagtaccggatcc

SEQ ID NO: 154652 - DNA, 526 bp, Homo Sapiens; identical to SEQ ID NO: 60965
  misc_feature (462)..(462): n is a, c, g, or t

SEQ ID NO: 154653 - DNA, 522 bp, Homo Sapiens
  misc_feature (51)..(119): n is a, c, g, or t
  misc_feature (145)..(145): n is a, c, g, or t
  misc_feature (451)..(459): n is a, c, g, or t
ctttgctctgtccaagctggaatgcagtgatgtgatcatggctcactgcannnnnnnnnnnnnnnnnnnnnnnnnnnnnnnnnnnnnnnnnnnnnnnnnnnnnnnnnnnnnnnnnnnnnaccatcaagccttgctattatttttnagacttttcttaatttcatccaacaaagtagttgctgtaggagctgagtgttagaaggaaagatgctgaagaaatgaaatcaagcagggtgtatactgtcatgaataggcatacagtagtttttatacttttgttctttggagtaccaatgttaggttttacaaaagtaatttgatgaggggaaggagggttgtgtatttattttactttctgatgtttgcttaaataatactgtgtacgtattcagcttgctgtaattctgtaattacgctattgcgtttggctaactcctttttggaaatgtcnnnnnnnnngtccaaggcatgtgttagtttttactaattgctctgaatgtgtctatttagatttctgaattg

SEQ ID NO: 154654 - DNA, 340 bp, Homo Sapiens
acatcgacagttgtattagagaaaagcttaaagacaaggaaaaattaaggaaatgaggcacaaaacgtagagtagatacaaccaacaaaaccaaattggattctttgagaagattagtacacttgagaaagccctggtacactagtcagagaaaagagagcagggacaaattacaatgtcagaatctacgaacccttcagacataaaaacttgaggctgtctcaaaagtcagtgggaaacgttaaatgcaattgacaaattactaggaaaaaactgctatcagaagaaatagaacatgttactagctcctgtctttcagaaatcttacctatatcttgtc

SEQ ID NO: 154655 - DNA, 520 bp, Homo Sapiens
gactcctgaactgccattctgattagacacaattttaatggaatttttggatttaatgatagttgataatcaccttatgtatttgcacaatctctttataattaaaaactcgctaagcttcacttgctactatctactatatagaattagagacattccattggattctaagcatcagacactcctggatctcaaaatgaccttttctaaataagcacaagatttatttttgtcctagcactgttgataacactctgaaatatgttattgaactggaattgtttctttatgcttgcattccaaaaccaactgaaacagattgtagtttcactttaaattctaggcctgttctatattatgtgaaggaattctctgtaacgctgatactatgttgctaatttgtgtacttacaggcactttagaaaatgtttagactgcaacatgcactataacattgaactcagtcacatgaagtggttaacacttgcacactgactgacagatatgaaagctgtatact

SEQ ID NO: 154656 - DNA, 556 bp, Homo Sapiens
aacttcacatttagttattagaggaagaaaagtcatttagggtagggtgtaagttgatgtttttattataaatcatgggaaacaaagaaataacccattcaccgctctcatcacttgggcacaccacccgctcagcattttgatgttaaaatacattttaaaggttcttttccttctttcacagaggaaataatagaggaaatggcttaaactgaggccagaagcattatggtggatgtgagtaaatctctgcattattaagagagattaaaaattgggatgggtaccttattgaggtcctgaaatctatacttgaaaaccttaaagcatcagagagctgccattttccgtgatttcggtaaaaagcagctcaggttatccttcctttgaggccattctagggggtcccacaaatctttttaagcaaaataaaaatattaataattattaaagttgttttcacattgttgaggtatattgcattaagaatggaatttgtttttccatcataaaagtagcacatactaattctaggttttgaaaatacaaatataaa

SEQ ID NO: 154657 - DNA, 500 bp, Homo Sapiens
ctagcttaataatatattctcgtttgtccacacttggatatatggcttctaggagatcatttatggcttggctttgtttatcatttacatcaggaaggttgtcatccatctggagacttggtgggcagtagaattttttatgggtaattaaatttggtaatcctctgaagagactgcggcataacttacattcaaaaatagtgtccacatcttttaataatatatgcttaagttgtttagttcctgatcgaaagcactcaattatttgttgaataccagatttggatgtctgtagtggttgctgtaacaaaggaggatctccaggttccaggatataaactggttcacagcatccgtgatgatggtggtcagtctgacagtatttgtcccttaaaggcattttcagtggactcgacctactttgctttcactgtaagaagctcttcattgcggcgtggtcaactcttagggcgggccggcgggcgggcggaaggaaggaa

SEQ ID NO: 154658 - DNA, 334 bp, Homo Sapiens
agcagtcttatctttattaaaaaatggatggatatagcagcgcttacaaaacagttcatcaaaggcattgtacactggcacctgataatgtggagagggcagccccttgcccacctggctatgggctctgcacaacgctggcccgcaaccacctggtccacttggtacaacggagcccagaacacctgcaaggagagccacgccaccgtggccctccacagcttaaagcttttgttgatgggggagtcccttaggtcacgtagcaccttccatagcagcatcgggagcacgcactggtgtatggaggtggctggcgtacttgacccacttattt

SEQ ID NO: 154659 - DNA, 414 bp, Homo Sapiens
aagcgagaggatatgcttgctcagatgttttattctggcatttgagtgaggcaaggtaggacccaagagtcagatttaaaaattatttacttctcatactgaccttggtgccaagttcatcgagggaacctgagtggagtgtagcaaccataatggatctacagccacagaatccacagccctgaaaggaatcctggtggtcatctggcacatccacttatttcagagctgggaaatggggagagtccattgacctgcttagagccataaaaatagaggtggtggagtcaggactcaccttctggccttggctcttggtcccatatttgttccccctatagctgtatcagatggaggtatgagtgaagatttggattcccgcaaggatttattaaactttagggatatttcttt

SEQ ID NO: 154660 - DNA, 381 bp, Homo Sapiens
gttggatcagtagttatttaattaaagatagttactgacattcaaaagttgggtttcacatacaaattaggattcctgacttctttaaaaatgggaggatatggcagggccacttggcagcaacccagtgacatgggggcgggggtgcagtgtttcatctgtacttgagagcaccagagcccccacaaggcctggccacatcaacatgagtttggcaatctgctgtacaagtgaaagatgtgggctggggagtcggatggcctgtgtggagtcctggctctggcactgactagcggcaacaccttgagccaatcacttatccatgccaaagttgctttgtctgtaaaatcagaacccttcagaggattcttggaagggctg

SEQ ID NO: 154661 - DNA, 335 bp, Homo Sapiens
agttacaaacactatttatagtatagctaatatgttaacttcatcgcagtgtctacaaagttgtggatcccagtcttggtgccaaatgcatataaaaagctcaaaagctattatgactataccatgcaaatttatatccagaaaaccttgggaaggagactgcagctctttggagccccatggggtctctgcctttgatatttgggtacctcaactatgcatcaaaaaagttttaaatcacttttctcccagaaagaattaatgtcacagttctgaatagtataaattatacacttaaatagaccattgactgtttttgtccacatccatttaca

SEQ ID NO: 154662 - DNA, 431 bp, Homo Sapiens
tccagggcaaacaggcagaatttttattagcaactaaatgatttatggcacacgtaccccgccgtcacaattacggcgtttcggagcatccagggggtgaaaacattaaacatttataaaaataagcctttgttttttttactccgcaaggcttttgttttccccaccccaaatctctcaagatatacgtattttttccttgagctatattaaaataaagaaaaacattccccaaatccagggcggggtaatgcggtggggaattaggatctgggcttggaatattggtgggtaaagagggtggagaggaagcgatggggcctcgggcgtgggagggcttaactaggaacacacaagacctctgcgtaaggctcaagggcgctctgcgcccccacacacggcccccttcccccgcctgggcttccagcagc

SEQ ID NO: 154663 - DNA, 528 bp, Homo Sapiens
gattttgatagttcattttaatcaatatatagtttcccctgagttcctggggacaaatctcaatcatggagccctcagaagcggttgatgattgtcaggggtcagtggacctggggtcagtctaccaggtgacaggaccctatgcatgactgtttccatgtggcatgacagctgcatgtggagatatcgaatttcccgtgaggctgacctcccacttattcttcaggatgagctgagctgtattccatgaggattgtttgctgtgggtttcagtcatcctgtaggaatgtgtgagcatctgcagatgaatgaacgttctaatttctttatgtctggatggccaccataacccctgagaatgagacaaatgagctctcatctccatcttttaggtgaacaaactgaggctcagacgaggttagactcgtttcctaagccacacaggtttaacgttcatagacaggactgcagtcttctggttcaaatttccttccactacagctttctgattacatctcagaaacttgg

SEQ ID NO: 154664 - DNA, 193 bp, Homo Sapiens
catttctccactctcatctgcctccctctcccccaatgagccacagtgttactattattgtcccaaatccccaagctttcccatcccaggacctttgcacaggcagtttcctctgccttgtcctggctttttaaatgacagccttcttctcagtttaactactttcctgctgggtggggtggctcaagccctt

SEQ ID NO: 154665 - DNA, 374 bp, Homo Sapiens
gtcttattaacaaaataggactaataaaaggggctcttgatgaaagatatctttcaaaataccacagcagatatcatatttaatagtgaaagctatagaagttacatcatttctgtgcctcagtttttttcatatataaaacagggataacaaccagcctactttacagggtcattgggaggattcaactatttaatatgtgcaaagcatacagaacaatgcatttgtggcacatggcaagcattcaaatgctgcttattattttattacaatcattgtcttcatgattatttccactaaaatcagaaacaaagaatgcaatatcattgtatctattaaacattgtactacaggtcctaattcattgagagaaa

SEQ ID NO: 154666 - DNA, 388 bp, Homo Sapiens
  misc_feature (361)..(361): n is a, c, g, or t
acgaattcaggagtcctttattagccggcagccgagagacagctagcgctcgaaattctcttggccccgaagaaggagctagattttcttttatactttggtttagacaggggagagggggggtctagttgaaacaatcttacagaagtaaagtaggcaaaaagttaaaaggataagcggttacaggaaagtaaacagttccaggtgcagaggctttaagtctatcctaaggtgatggacgccgggctttgggcgttatcaaccggacacaaacgcaggggctctgggtgctattaaccgggcgaattcctggggaactgcggatatagcttgccacagtatcttattcagttaattgcanttcttggatgtgctggggagtccagct

SEQ ID NO: 154667 - DNA, 412 bp, Homo Sapiens
  misc_feature (354)..(356): n is a, c, g, or t
  misc_feature (364)..(364): n is a, c, g, or t
  misc_feature (380)..(380): n is a, c, g, or t
  misc_feature (386)..(386): n is a, c, g, or t
  misc_feature (402)..(402): n is a, c, g, or t
ctggactttttatatagactcataccatatgaggtcttctatgtctggcttatttcacttaacacagccctttcaaggttcattcatgttgtggcatatattcctttttatgtctgcatgatattttattgtatggctgtactacatactgtttatccactcattagttgatggatatttgggttgtttttactttttggctattatcagtagtgctgctatgaacgttcatgtgcaagtttttgtttggacatatggttttgtttgagtgtttgcttagaagtggaattaatgggttccatggcgcctgtgtttaactttttgaggaactaccagtgccaggactttttcccnnngtgctgcntcgttttgttttgccngctgcnctctttgagggctccnggttttccct

SEQ ID NO: 154668 - DNA, 639 bp, Homo Sapiens
  misc_feature (69)..(69): n is a, c, g, or t
  misc_feature (139)..(140): n is a, c, g, or t
  misc_feature (191)..(191): n is a, c, g, or t
  misc_feature (289)..(289): n is a, c, g, or t
gaatttagatgtttctgaccaattcccccgaaaaagtagcctgtttctccctgctcaaagagaaatganatagaagagatctgagtcagatgtaccatccccagagtcgactgccattgaagcgttatgttgcacaaannaacctttttctgaatagaacctaaaagtgaatcccagtgccccaagatccnattcatgcagtaaaagagatgttggactggggctagagttgcctaagcttttcgaatatgaagtctccttttaacaaccaataacaaatgtcagcccnctccctcaatgtaatagtagttatatataataactataaatttagtggtgtttctagaggcatttatatttttattcatggaaatttcatgcatatgaaaagggatacatttatgggcaagccatcagtgttgggggagtatttggtgtctttggagtgatggcccctttcacagagtccacgggcttcctggtggcctttttagagaacccctgaactgggtctttccatcttggatctctcctactttataactctaatttaagataaaatatcaggacataatctattgcaatctgctaactgaagacccttcatagaggaagttaacacttattcagtctgcattt

SEQ ID NO: 154669 - DNA, 568 bp, Homo Sapiens
  misc_feature (527)..(527): n is a, c, g, or t
tcagaattgctttggttatttgggatcttttgtggatccacagaaattgtatgatttttttctatttctgtgaagaatgctgatgagattttgatagggattgcattgaatctatatattgctttgggtagtatggacactttaacaacattaattcttccaatctatgagcatggaatatcgttttatttatttgtgtcctcttcaatgtatttcatcaatgttttgtggttttcagtgtgcaggctatactgatgcactttcatcttcttggtcaaatgtattcttaagtgttttatgttatcataaatgggattgttttcttgatttctcagctaggttgttatttgtgaataaaatggccatggatttttgtatattaattttatatcctgcaactttactgaattcatttattagatctaataggttttttttggtggagtctttggagttttctacacataggatcatatgatgtgcaaagagagatcattttacttcttcctttccaatttagatatctntaatttcttttcttgtctaattgctctctcttgatagtact

SEQ ID NO: 154670 - DNA, 781 bp, Homo Sapiens
  misc_feature (61)..(122): n is a, c, g, or t
gtgcctagctaaaattaaccctcaactaaagggaataagcttgcggccgcatacgcggtcnnnnnnnnnnnnnnnnnnnnnnnnnnnnnnnnnnnnnnnnnnnnnnnnnnnnnnnnnnnnnnaaaggttagagaatccaagtttattagaaacactccaacaaaaaacaaaggtgagaagagagggcccagcccacctccactcctccctttcctccagaacagaataccagtttgtatccggcaaactggctccttccccagggttggtcccagtggggatttacatggcactgccaaagcaggacgggaaccctagtcctcagggcactgcaggatgtcataggtcacgtagcccacttggtccacctggttcaactcactccgggaactcacgcgccagtagaagcggtcctggcagaaataggctttctctcggtactggaagacgtcgtgcgtgtccaaaggcaccccggggaacatccggtccacctcgctggcgctccggggatccaccatctgcgccttcacgtcgaacctccagaggcgccgcccgctgaacagcagcatcttccccctgccactccggagggccccggtcacctgggccacgtcggcgcccaggcccagcttgtccagacgcctcgggcccagcaccgacgcgcctgtgtacacccacacctggcgcccagagaagaagaaaagcttctttgagagcggctcctcaaagaccgagttcagcttggggggcagcgcgggcccctgtcggcgattagggaggg

SEQ ID NO: 154671 - DNA, 475 bp, Homo Sapiens
tttccaccaaatagttaacagctttattggagatattcctagagcaagcatgtgcttcccaacatagctaaatctatgaggcaaagagagagatgggagcagaggcacaataccaaagatgcattttgaatataatggaatacaaatcaggtgttaataaaatactcagctttaaggttcatcagtggctaagttacagtgggtcaaaattatcaaggttcttcagtgaaattatatgaaatgcttctcaagaatctaccccataacttatagacattcagacatttccttctacagcttgcaaaaatggaagagtctcttgaatatgcatgcatactacttgccattgtatgttttgatttatttcatggtattctaatttcaatactttaagaaatactgcatactgttttcattgtctggcaaatacactttcaaatgaaaacatttttaatttagaaaggaaggggcttgg

SEQ ID NO: 154672 - DNA, 505 bp, Homo Sapiens
  misc_feature (21)..(21): n is a, c, g, or t
  misc_feature (37)..(37): n is a, c, g, or t
ggcctctgctctcatgcgttntgctcgtcgggctggngggcacgttcccgaaggctgcacagactgcctctggggaatatcatggggtttgtactccttgtccttagtgtctgtggtcaggtttggcttctgcaaacaccttaggctgtctccggacaggaataagttgtaggggttgagaattcgttcataatgccctctgatatgtgagcccactgctttgccaggagcaaaccccatcttggtagcaattttggtccattttctatccttgcaaacaactgcaaatccaccttcttctgcaactaacttattaagctgaaataagtccaagatcttcctctccacatgtggaattttcagagtacttccctgtaactcccagtactttgcaatctggtccaagaaattcaattttacacgagtttgggcctccaattcattcagtctctggatacgtggcgtaaaatgaagtttatcaacatcacatgcaaatggtggctgc

SEQ ID NO: 154673 - DNA, 308 bp, Homo Sapiens
gcataaattgttcacccctaaaataacacccctgctcgtcaggaatgggggctgatgtccagcctgtgccttgcatattaaaacatagcatgcctataatcctcccagaagtgtccctttaactgatacccacaaatgtcccatagtagccctgaatgaagaacctctgagacctctcttctgtgtcagtttagtgtatggtgtaatataagagtttgattttattcttttgcatatatatatgtatatcgtttcccaacaccattcattgaggaaactatcttttttcattgtttattattggcacc

SEQ ID NO: 154674 - DNA, 500 bp, Homo Sapiens
ttttttttatttccaaccagtagtttattattcacaaactgtgattcaccagtcctattttttaagccagcatcacgctctaatcatattcctaggttacaagcccagttatttgtgcataataaaaactgaatccattaagatgatacattaggcttttcttccctatgtcatctctttagggagacatttgattataaaacctacaaaatattgaacctacatattactttggatcccgaaaccaaagaggtttcctatgaaaatgaaacagttatccaaggattctttcacctgaaaaacggagtccaaatctggggcaggcaaataatgaaaccctcagacctatgcaagtgacactattccatccagacatgaagaaactttaatgcggctcactagatttatgttcggaaatatgggctattgttgaactctctctcgaataactctcagatacatttttctcctgtgctctgagaagctacattactgcagaa

SEQ ID NO: 154675 - DNA, 551 bp, Homo Sapiens
acagggtccactcatgaagatggtggtggtgccaaaccacatagctgagaaaggatagcttcccaaagaatacccgggtaactgttcccagagagaaggggaagagatgatggaaaccaatataagatgaccacggtctataaatgttgttttataaaactcctgatttcaagtagaattagttaattctataattctttactttcctgtgtagacgctacatgttcctcgtgtttgttttatctttggtcctggacctagggagggcatttctggctctgatgccaatactggattatgtgaaaacttttcaactattgactggatgaagctatctaacaaagcattaaccaccaccagaaagtgaccatttctccctcccttggcagtggcctcacagcttatcagaatgtagactatcatggtagtgagggatggacagactggaagaggatttaggataggaagcaatgagagggctggaactatataaatttttatgaaaaaaaatctccagttgagtttacatattcccaatcccagaatgatat

SEQ ID NO: 154676 - DNA, 386 bp, Homo Sapiens
  misc_feature (45)..(45): n is a, c, g, or t
  misc_feature (56)..(56): n is a, c, g, or t
agagcaattttatggattaactctatcaaagtgaagcacatgaanaatgggcctanagtcacaatatattaatcaggatataaaaaattaaattttcacagaggttttcagggatgtttgtttgttaacaatgacctatatgtaataatgttatttgttaataaattcacacaacacaaagcagtaattaactaatgaattttcatttttctttccccaatattaaaaagggataattatactatcattataatttgataatgtctatatctgctaattagggcacataatatcctgcaaactactactataaaatgtgggaaatcctagaactataattaatactgtaattaaaatccccccaaaggccaggcatggtggctcat

SEQ ID NO: 154677 - DNA, 717 bp, Homo Sapiens
atcagaacagtgcaaatgatatttaattttaaaagtaattataatggcttgaattcaaagtcattcaaatgaacactgtcaagtaatttcacttgatgtgtatatatttcatcaccactgtttacattacccttctttaagtataaccatcaattcttcaatttctttttatcagtttccctcccaagtccccaaattaagaatgccaaatagtcttgaaaacccagagctccatattttaatgttttcttaagaacacatttgtgaactcacaaaagtgttcctctttcaactttgacaatgcagttcttactttaagtaaacaaacctgtcctaaaatcccaacaagtaattctgagaacttaaacaccttgacagtgtcccttaaaaatgctatgacagtaaagtgccaataggcatggcaatgacctcttagatgggatcatttaactcctcggaactgagaaatgccagcaccaaggattacactgagattcaattttactgaaggctacatttagtttacccactttccacaacctattatattcattatgttagaatgaaatgtaaatgttttgtgtagccctcaaacttacactaagttttgagagagatgtactttaaaaaagcacggggtaatatataaaatcagtggcagaaagtttcattaagcaccaggaactaatttttgtcaccccatactcattttgtaga

SEQ ID NO: 154678 - DNA, 369 bp, Homo Sapiens
aatttgaaggactcacactgtaatcaagaccatgtggtcctggcatatggatagacacgcaggaccagtggaatagaattgggagtccagaaataaaccctcacatttatgatcaactgactttcaacaaaagtactaagacaattcataagggaagaacagtcttttccacaaatggtactaggatctacatgcaaaagaatgaatttcaatccctacctcaagccatacataaaaatgaattccaaatggatcataggccaaaatgtaagagctaaaactgtgaaagtcttacaagaaagcataggagtaagtcttcatgaccttgggtgaggcaaagctttctcagatatgtcacagaaagtacaa

SEQ ID NO: 154679 - DNA, 470 bp, Homo Sapiens
catgcccagcctccctcgttatttttatctttggacctgcagtttaaaagatgcctaccctgtaagtgatggttggttcatttcctcacaagcaacagtgccagcagagtcacgtgcaacgtgatgttttggttgactaggaaaggcagatttttggtaaatttgggaattattgaggttctaagctagggccttaaatagttcagctgtgtcagctctgagaaggagctcggaaacggagagcagcctcctggcccacatcagcatggctggtttctacccacgaaggccctgttcctgtgatgtagtaagtcagggggcatcccacatcccctgccatgggtcagtcccctcagcgcggtggaggggaagctctagggctggttggttcagcaaactgcgtgtctaggggaccagtcatcagagtctgggaggtaccagaaaataaagccattttattataaaaaaaa

SEQ ID NO: 154680 - DNA, 502 bp, Homo Sapiens
ctaaaagtgaagtaattttaatatttcgtaacctgattttttcattccacaatctaagtatttttctgtgccctgttaatttttaactatgtatcaaatacaactggcattttagagctggaattttagagagtatgtaagctaacctcatcctatatatgaaaaactgatgcccaaagaagtgaaatgacttaaaagtcacacagccgggcaggaaaccgtggcccagactcccagtccagtttctccccaggcctcccatcccatattcccttaggctacagatttacatgaatgagaagaggcaaaatgcccagcatagaaatgcgggagtcctcccgcccttccccaggcgtagctgacggacactggaggctccatgctattgctggcagcactggtacccagagaaagagaaattacccactgctacagatcacagctggagaagccgaactccagcctctctttctcttcccctcctagaacctgccctgagcaa

SEQ ID NO: 154681 - DNA, 308 bp, Homo Sapiens
ggctgatgaatatttattttattttatgggttataatcgaacactgtcattatttattttgttgctccagtggttccagctctgggcattaggagcttaaacaggttggctcctgtatcctttcaacatgcctcattatttttagtgctttcttgctttatgatgcttactttttaatctaggctcatcttgtactttctttgccccaaccatggaattgatcttttctccaaagaactctgattccttttattggaaaatggacttaggaaccaagatcttggcattgagtagtctcattgctactg

SEQ ID NO: 154682 - DNA, 549 bp, Homo Sapiens
gccacaacccattagagttttatcagccagaggtaaggaatcacacaaatgctgaagagttctgagttgtgtgctattacagaaatcccaggaactcaaacgacattttggacacatttttgtctccactaactttgcttacaaccattgacttggccaaatgatacaggcacacagcgacaccatggactccttctccagttgctgggccaaactttccttttcaagaaaccttttcaatttgaagaccgtgtaacatggcagagcacactcaggaatttgaggtgacctaggtatatattcctgtggttttggggacaagtagtgacttatttcatggctgttctcatggacatccagctgagcagggcacacccgtggagactccttcttacctagaatcagtacttttgtatattctatgagaacaaacacaattccaaacacatttagaggtgcacaaaagatattactttaaatgcactggtttatattcagtacatagctcattaacacaggaaaagaaatatttctctacacaaaggcaat

SEQ ID NO: 154683 - DNA, 438 bp, Homo Sapiens
  misc_feature (367)..(376): n is a, c, g, or t
catcatggagctccatatttattctctttcaattacattctgtgcaaattatcttcatgtaaaagttacaccgatttttctagctgcctcttcttcaaattcaacctgtgttctttcggccaagaccccaaattttgcaattagaataatttaattcacaattccgcgtgtgacttataaagctggggagagtatggctttgttctttagcttcataggtttactactgtcagtgttaaaatatttttcttacagcttaaagccaaaacagactgaaaaagagtcccattcctatgcactttcagtttcattgaaaagatgacatttacgtggttgtgatatttaatttatcacagagggtcatgannnnnnnnnncctgacataccatgatatagtaaacttgaacttcatgaatgaaagcctctgcaaccatttaa

SEQ ID NO: 154684 - DNA, 1007 bp, Homo Sapiens
caagttttcaaaagtgcccattttatgctgctgtgtggtttgttaaatctaaatgatttttaaacttttctcatagaaacttaactttggcaataaacattttttaaggtctctcctcttccttccccaacaatgtagttttctagatgagatttcagtatgattttatcagctatttcttatatatcataatctggcaatttctgaaaccagtcagaaaagacatatatttccatgcctttttaaagaattatttttacctgttttatattcacagttggtgtcctgtcactttgttttaaaataagctagaaccaggatgcttccttattggaaaggctttgccagtccttaaggtacaatgagtgatgctgcaacttgcaaatgtaccagcatttaaaatttcttttcctgggaatcaaggtaactcacacgactacttgcagtacaaattttttgcttctctttcgacatgaaatgtacttggtgggttttccttccttttattaaactaaaactgtgtggaaaaggttgatttttcttaatagattctggattccactcacagggagatgggattcctttcttgtccaaacaaagggagttgctctaaagcgagcatcagttaaaatgtaggggaaaatgtattctgtatgtagtgtagataatactttgtgaatggacaacagttacatagtgtcttggtagcaccagccagtgtttcccagcccagagtttactgacttgtaattctctatccaggacatcaggagtgagggatggaaaaggggataaaaggcctggagccacactctatatggctgaggaaggagctagggaaagagatagacacaatggggtgaaaacaattttgccgcccctgcctggaaactgctggtggggaaatgatggtgaagggtgtttgcttgaactcatgagacggtccaaatctcataaactagccttctcaaaatcccagcaatataaagcactgtttttcttcagtc

SEQ ID NO: 154685 - DNA, 549 bp, Homo Sapiens
tttgtctttttgtcccatttggtggaagaatctgtgatccctccttagggtctgcttctctttctctctctccctctcctttttgcaatggctcgttcattataacccgtgggggatttagaatctgtggatcatgtaatgcatttcctgattgccgccaactttttatcttctttgctgttgattttaattgtgaatatctgaaaaagtatagtgctcaacaagtcagaagttgaaaatcatgtttggtatatgtgatagacctgtccatggctcctgaaagttgaagccaaagggctaccttctgagtcaaaatgtgccctgagaaccaggtcctttccctggtgcaaccagggccttcccctactcataagctgagaaagacctggggtctgaggaagaactgctgacccagagcaactccaaagtggtatctcaagcatctctggaaggtagtggggagaggcttatatgttgaagttattccattgctctcagcataagactatgtgaggggagggaaagtaccgctgtaagctctgtacgaaa

SEQ ID NO: 154686 - DNA, 362 bp, Homo Sapiens
tttatcctttttcttttccttttcatttggttctctgattcaaaggaaataaccaacaatcactacgtagggacatttaagtcatctaaacaattgcttgggaagggagtttggacttttcatttgaactccattacatagaatagggccctgagtactttgattatgctcattcattgttcattcatacaggtgataagtggttatcagccaccatctttatgccaatctgaataggaaatgcattgacattgagctcagggtgggtaaggtgagagtcatctcttaagtgatctccgttgtctctggctgaaccccacatggccattcctgcctcctccatttctgttcacttggactta

SEQ ID NO: 154687 - DNA, 398 bp, Homo Sapiens
tagttttttatatcacagaccatgctgaaccaagagacacagcagatgttcctgggagacacagcccttgtcacaagaagaagagaatgtaaagccaagcataggctggaggatgaaacttgggtggctctgcagctggctgaacaactacattcgaagacctgtggtcaaccgacagaaaggtttgaaacagcgtgccacgtggttctgccttctcataaaacatgttaagacttggacaaagacacacgaaggcttagttatcaaatgtgcaagctgtatgaggttggaaagccttattaacatcgtagatgacagaatcaagatttaaaacaaggctatgaaaccaaccagataacatttaatagggtggatgtaaagttttacatgaggttatt

SEQ ID NO: 154688 - DNA, 469 bp, Homo Sapiens
taggtcctgccttattttagcacaaactttggtggtggtttgtcattggtaaatcagtgcctactgaggacctgacatattgaaggtactgagcagactcatactgaacttctctgggaagaatttactaccacacttaagatctggttataatatttttgaactcataacacagtcctatggcatggaccttgaggatactgcaacagtgggtctcaagaacaactgtatttttaaaataaccaaattaagaggagtatggcaatggtcaatggtggctcgaggattttttgctttctataaagttcatgacaaccaggaaaagacttgccattatatcttatacacagacactgaagattaggctgtttctataggtttatattatatctatatctgttattttgtataaaaggtgtgttaaaccagaagaaaaaaggacaattgtcatagtatttaggaagatcct

SEQ ID NO: 154689 - DNA, 274 bp, Homo Sapiens
agaattactcattgtgttatgattacaaagctttttctaggtgaccactgattaaagccaaagtaatcagcaattcaaaaatggctttccagagacaggaacaaagtaaaaggagctactaacatttttattacaatccagaagaaatatggtctactagaaagcttctactaatcacaacacttatgtcttcctttcaggacagtcttcagataaccagaagggaaagaacattgttcaaaggtgtggtagaaatctcagttacagggagaag

SEQ ID NO: 154690 - DNA, 511 bp, Homo Sapiens
tgaaatgatttatttcttttataaatttttaatcaaaacaataaaacaacatgcttaattattaggtggtagttacacaggggctattgtttctgtgtattatttgtatttagtaaaggtttaaaggcataaaatagaagaaaatttggaaaaatatttggggtgaatgagacaattcaggaacaaatacagaaaactatattatcatatagcaaaaagctatttaaaatagagataagcaaactatagctcacaggccaaatgtggccttctgattattttttgtaaataaagttttattggaacacaacaatgtccatttgcttataggtagaatttctcaacctcagaactactgacattctggatgagactttttttggggggtgggggcagttgtactatgcattgtaggacgcttagcaggatccctggcttctgctcaccagacgccagcagcacccacccttcatactgaaaaccaaaaatgactctggacattgccaaatgc

SEQ ID NO: 154691 - DNA, 310 bp, Homo Sapiens
  misc_feature (200)..(200): n is a, c, g, or t
  misc_feature (208)..(208): n is a, c, g, or t
  misc_feature (211)..(211): n is a, c, g, or t
  misc_feature (215)..(217): n is a, c, g, or t
  misc_feature (219)..(219): n is a, c, g, or t
  misc_feature (222)..(223): n is a, c, g, or t
  misc_feature (225)..(227): n is a, c, g, or t
  misc_feature (229)..(229): n is a, c, g, or t
  misc_feature (234)..(238): n is a, c, g, or t
  misc_feature (249)..(249): n is a, c, g, or t
  misc_feature (263)..(263): n is a, c, g, or t
ttaaagatgaggcagaatttattcttattgtgggtaagttcaagagtcaggatggagaccacagagaggcagatccccaggaccctgagagggaccacacactagagtgaggggccacacttttgcaagtgccaggcccacggtgcctccatgactgtgaggatccagagcccagaaattgggtaagagtggggtggggntggggagnaanacannntnccnncnnnanatcannnnnagaccatgttncccacttccatatnaaagaagaacacctcggctttttagtaatataatatatataggtgta

SEQ ID NO: 154692 - DNA, 470 bp, Homo Sapiens
tttttttagttttgagggttattttatttctaaagccatatgtagtcaagtgccatcatatgacaaatggtaagtgcagcagtcgtaaggcatggcctaggcacttgggagcccacgacaaacagctgtcctgagagctccctgggaggagtaccaacatccgatccccattatgcagctctggaccccattagcctcccagctccagtatcctgcccattcccaaatgacccgatagacacagtaactggtcccgtgttgcgacacgattaggatttttgcataagagttcaagttaaacagatgtgagtcatcttattctttggttccatagcatttggctatgcaaatttcatattctcttggcttcgtttttctccagtgcccaacaccaaatagtggaagcagaaagaaatgtcaatggctgcaagggcacggggggaaccatcactcctatatgccttccactg

SEQ ID NO: 154693 - DNA, 511 bp, Homo Sapiens
ctccagtcctacatttctgaattgacttctagcacatcaaaaatatttcagtcattatcagtctcattaactgaaatgccaaatgctaaatgcagtgttctttcacactgttttaattttcttgggaaattgagtccagtggatgttaatggagtgggttgcccatccctgaaatgtcttattttcaagtgcctggcctgggaaagaaggggaagaaacaattgcattatatccaaagatacactataaaaatagagtttttaccaaaaaaagatgtttgttctcatctcagtaggcctcatttgggcaagtgacccacaggtcttttggcgagtttgctatttgcctgttgaaatacttgtttcaacttagagaacagttatgatgtgaccatagcatggcacaactaaaaatctaagcctgaaacctgaaaaaagagatatgacaagggaaattaatcaggctatacataagtattgtatttatttgaataaaaataaaaagagcaacc

SEQ ID NO: 154694 - DNA, 324 bp, Homo Sapiens
  misc_feature (252)..(269): n is a, c, g, or t
tttgtctttaatgggtatttattggatacatggtgattaaagggctgtcaaaaagttctgcacagaattgaaatgtaattcacagaaatcaatttggtaatcaaactcaagtctacagccagaaaaatatttttccatactggacagccagtgtttgcatatcaagtgagtggcaatagctcatttggcagtgaggggaaaagaggaaaggaattaatgtgccaggcaccgtacttcagactggataagacnnnnnnnnnnnnnnnnnnaatgtataagacaagattccttccctctagaagcttctagagcacttagagagag

SEQ ID NO: 154695 - DNA, 616 bp, Homo Sapiens
ctcaggcaatctgtagagctcttgagccctaataccagtgtctgggaggcgcgtaaacgcttccatttttatccttccactgcagaaaatgcccagtttagtctgggagacactcagacccctcgggacaagggtggctagagagaggtccaagctgccctgggtgggtggggagtcaaggcaggccaaagcttcagatttagacagtaaccaccaaatccgacctgggctgcaggtccaaggcctcttcctctttcctgcatgctccgctctgccgctggcccatcttccaatgcaacccctacaactaccaaagcaaaaaggcctgtcccaactccatcctcacggcccgatccccaaccctcaggggatgccgcttcgtgtctcctctttattttacaacgcggccctccttgcagccctcacgaaaagttctgcagtggggtcccccagcgtggggcccttctcgagacccttaaagagaaggctcgtttggtggaccatacccgggcagcgcgggcccgggcctggactggttctacttgtgttctgaggtccctgaccaccgccttgggtccagccctcgtccagggggcggcggtgcaggggagaccgc

SEQ ID NO: 154696 - DNA, 350 bp, Homo Sapiens
tttgtcttaagcaactagttatatgatggcgcaggaacctggataaagattaaagtagaaatggggacattaaagagttaggctttaggtgttttagaccagaggtgcctggaagatatccagatatagatgttcattgacagatacacatacagatccagagctcagagacccctgagctagagtagagagacagaaattacagggtacatttagagagcaaagaaggcatagtggttgaaatacagtattcaccaagagacaagaatggaaaataaacccagaataccttcctagaactagatcacagtgacaggctctgacactggggttttattttctgcaaagtc

SEQ ID NO: 154697 - DNA, 187 bp, Homo Sapiens
gtgacaattatccaaatatccctagaaatcttatttggcttcagataggctaagaaatttacttgtcctcctgatgacttgaactcacaggaggcggatgggctacaggcggaacagacacgctagataaaattcttaccgacgtggtacaaaatgataggaatttgggggtgattgatctttcatt

SEQ ID NO: 154698 - DNA, 678 bp, Homo Sapiens
  misc_feature (24)..(24): n is a, c, g, or t
  misc_feature (143)..(143): n is a, c, g, or t
  misc_feature (162)..(162): n is a, c, g, or t
  misc_feature (164)..(164): n is a, c, g, or t
cgccaggccccctggaagctaganattgatcatgacatttaaggatgggcattagaatcctcctggaggagtgcattgcctggacacgcacagcagaattataatagaaatgtgatgttagagaactacagaacctggttctncctgggtattgctgccttnangccagacctgatcattttctgggaggaaggaaaggagtcctggaatatgaagagacatgagatgtggaagaatccccaggtaggtgagagtgaatacagacaacatggatgagaggtcgaaagtcaaggagaagccagtccttaaagtgattctggaagctgtgttccaaaagaagtagtttctggagagactaatttttatttttattctttaattttctctcacacaggggcatcttcggtcttacacttttaaaatttctaagaattcttctttcccttcagtaatcttccttcaagtttacagtgacagccaaagtaccgttcatggcatacaagagagtgcacaatctttttgtttgtttgtttttgtggacacacagatatctgcatgattttaagatactccatgttaaactatcttataagttctctctttccatcatctctgaaatgtgtgagagtagtagtttctgtatctttggggtttttttgttcatttttctgtacattt

SEQ ID NO: 154699 - DNA, 336 bp, Homo Sapiens
gattaaaatatcagctttattaccaaggatgactgtgctgcaggaggcggctcagtgtgaagaactacgggtttcctgatgttgaagctcagaattagccacactgaccttctcagtcatgcatgatgccaggaaaatcacaggcttccattctacagtgaagggcttggaggagcaggcagtgatcattctggaggctgaaagtctgagatcaggaagccagtatggtcggtttctgatgatgcttctcttcctggcttgtgggcagctgcctttatgctgtgtgctcacatgacctgtagtccccagctacttggaggcagtggagggaagatg

SEQ ID NO: 154700 - DNA, 374 bp, Homo Sapiens
gtttttcaataataatgcttccccatgtaaaggttgtgcttgccaattagctgcctcccaatgattaaaaaattgttttattatgagcctataatatcatttatgttactcaattactaaacaggtcggtgccatgaacactgttgacaatgtatttaggtcagctggcataatacatgtaaatgcacaatttatttattctttatgtttcagatttccttttaagccaccttttttcaatagctgtagtagatgaatctatctattatgctaaattaaattttgcaaagaatacggcataatagaccacttaccttagatatccttcatcaggattatatatttagtagggttcaggtgacttcatttacctt

SEQ ID NO: 154701 - DNA, 248 bp, Homo Sapiens
tgacccactttccctagccagttggaacaatttaatccacgattttaaaactcaaacattttacttagctgttcaaatatggctattatttaacaaatcatttaatttatatatatggggaaaactattccttagatcattttgaaaattgtgtttcaaaacttgtgtgcctggttactttcaatacgtagtgtaaccaagcacattactggaattggggggaagctaattttgaagtaatcttcaaa

SEQ ID NO: 154702 - DNA, 698 bp, Homo Sapiens
  misc_feature (267)..(268): n is a, c, g, or t
  misc_feature (312)..(312): n is a, c, g, or t
  misc_feature (491)..(491): n is a, c, g, or t
gttgtttgtttttaacatagcaggacttctttggtgatattttttaatattggagaaaaccttaaagagccttaagattgctaactagaaattcaagagaggcttcacatacgtttttacgttgctgctcacttttcagggggagggtttgttggtctgatagctcaaatcctgtatttcagaaattaaaatttacatttttttcagcctacctccatatgcatttttgtaagggtggggtaagagtttagagaatgcttttttctnnagcacaagatttagattaggctcctgtggggtgtactcacattnggagccactaggaatcctgagaaagaggagtggacatactcagaggagtataggccatttgactcggcattgggaagctggagccacacctggtcattttctgtgagatcgatgatggcactccctgaagcctgatcccggtaagcctttggtgtattcatcataggtgtacattacangggtgccattcttataccaggcctacccaaacatgagtccctttcacatgcacgtggtatgaaaaatagtatattccctgtatctgacaggtaaagattccagccttggggcataatggctgtgccctgtatacaaaatttaatcaaatggtatggaggtcctattgctgggtaagctttgggaagataacgggtaaagccgcccag

SEQ ID NO: 154703 - DNA, 372 bp, Homo Sapiens
acttgttttaaataacttccctcacaatcagaccttaatttttatatttttttaaagtagctaacatagcagtaggcacttaagcatttagtcaatgatattggtagaaatagtaaaatacatcctttaaatatatatctaagcatatattttaaaaggagcaaaaataaaaccaaagtgttagtaaattttgatttattagatattttagaaaaataatagaattctgaagttttaaaaatgtcagtaattaatttattttcattttcagaaatatatgcatgcagttatgttttatttgattgttgacttaggctatgtctgtatacagtaaccaaataaactctttcactattaaagagatttcttact

SEQ ID NO: 154704 - DNA, 570 bp, Homo Sapiens
ttgttttacaatatatttaccaattttattatccactgaaagagcatagcttcccccagaatcactttgatttaaaccaaataacacagtgaatgacaggcaccctgcacctatatctgctaccttccttactctgataacctcctaccagcaccatttatgtcctctggccagggaacgactcagtggcacaaaggaaagagaagaaatgttacaggctgatgctgtcggggcaaatagccctggcacccagccggacttactgtctaaaagtattaaccgtaatttcaaagacaaaccacacccctttctttttcccttatgggcctaagagatttgtaatgtactttggaaaattaacttctaaggcagagtggaagccaacctcaagtcctgccacttggactctgtgtcttctcttcgaggaagcagcattgtgcacccagcgggggcagatgctgaggcttgccttaacatctcagcagctacaaaatgaaatccactgatacagaaccccttgctgtgagcagtgaggagagagagctgtaaacagacacaaattgagatttt

SEQ ID NO: 154705 - DNA, 217 bp, Homo Sapiens
gaggagtgctcaggaataggattagtgtcttataaaaacgatcccagagagctctcagctccctttcaccatgtgtggccatggcacgagggtggtcgcctgcaaccttgaagaaggcctcaccggaagctgcttgcactggcaccctggtctcgagcttccagcccccagaactgtaagaaataaatgcttgctgtggccggacacggtgggtgat

SEQ ID NO: 154706 - DNA, 251 bp, Homo Sapiens
aaaagtagtcgtaagaagttgtattattagacccaagtgacagatcaactcactgagaagtagattaagttgcccaatgtcccagggggaataaagagagttggcagttgagctcttgtccctcaattccaaattcagagtctttttcataccactctgccatcatgtcggtttcattttttcaggatgggttatgaaggacatgatacccattttcttggcagggagagagtgtggtttaagaaagtctt

SEQ ID NO: 154707 - DNA, 416 bp, Homo Sapiens
taggatccttcttccaactggccactctccctgtgaatcattttagcagtgcctttgtaacaatattttcaaagcatcttccaagtcccctagttctatgaactttgccaccaaatgagtgaagaataggcaaggagagaggaaaaaattgctgacagcgatttggaaatcagcaacaatgggaaagggaaatatgtcacatgaaagtttgaaagacctagaataaaatgagctatttggaaatttgccctggtggggtgaagattcccagcatgtcaggcaagataaaggtccaccttgtgtaattacacaactgtttcctaatgtcctgtaaaggacagaaacaccaacagtcttcccacctctacaggcaaaaaagaaaaaggagctcccctgcttacaggcccctcaggatg

SEQ ID NO: 154708 - DNA, 596 bp, Homo Sapiens
tctgagttgtttctctcttcttccagttccatctccagttgagacaccttgtcctccatctgcttgaccagcctgctgcggtcatctttgaggtgactcttggcttccagctcatactccaggtccttcagcgtctgctccagaagctgcctttttgtgagtgcttcatcctgagctctctggtagtcccgtaactcttcctccatcagacgcatctcatcctgcattttcatggctgtcagtcgggacttttctgcctccagcgttttctccttcaactgtctttgcatttctgcgagcttcctgcggtttttctccttatactcatccagctggttctggagctccagggttgaggtacgggaggcctcaacaatgtctgccatctccttctgcagtttctcaatggttttgcccaggtgccaccgctcattctccatctcgttcttcaaccttcttagctgctccttctgctcactctcctctttgagcttctcagacaactgcttctgctcctgggtagtctgactcagatttccctgagcagcctccagttcattctccagggcccttctggctgacacagcttctttttc

SEQ ID NO: 154709 - DNA, 257 bp, Homo Sapiens
agtaggtgggtttcaggtttattacagatttattgggggaggcccaaggagaagacctatcatcatgtcacgggagctcacgttccataccaggaaaggagtgttcctgtcaccaggtgaagggggaagggtcctgggacctcggcagtgggaggcctcggggaggggtgtcatcagagtcttgaatggacccagacgctctcttcccgccagtgcaggatgcgtaggagcagagaggaagcagctttgctgggaac

SEQ ID NO: 154710 - DNA, 421 bp, Homo Sapiens
aaaaagctaagaaaactgagaactaacattaaaaaaattaaatttagaataagaatgatttctttaatttgtcctttttttctttggtctaaaacattattaaatttttgtaaatattttgatttaatgtgtcttagatcctcattattttaatacaggaaaagaaaagatttagtaatttcttaccatgctaatatgtaaagttcatgccatccaggcatttaagagcgatcctcatcccttcagcaatatgtatttgagttcacactatttctgttttacagcagttttgaaaaacacatactatgccaccaattgtcatattatttttagatgatgtaacatagccatcaaaattaatattatgtaatgcctaatacttagtatgtaaatgtcacgagatcatttttacattaaacgt

SEQ ID NO: 154711 - DNA, 501 bp, Homo Sapiens
ggcatcaatgctccattttattatgagaatttgccatttaaaatagaaacctcagcagaaacgaatttcaccatgcatcttctatgtacttaacacggtcttggatggtgagggtgaaaaacaattcaagtagcttgaattgttccctactgttcaactggagaataaacaaaattaaataccaaatacaatataagtagctgcttagcatgtaaccttagcagatgcctaatcaacatttcttaaaacttagtgttataaaggctgggaactattaaaatggaaaatactcagtatcaacagtaaatgctacaggcggtaggaagagtccatttcactatggattgactgacttacttaatagaggaaataggtttgagacatgacttgagtcagcagagcatagtatttggactactctggaatagaacatctgcatgtgaatcagatggcaggaaactggaataagagtaacatgacaaaactttgttctcgaatgtt

SEQ ID NO: 154712 - DNA, 543 bp, Homo Sapiens
agtcttctaaattttatttagaataaaaccagcatggtagaaatacatcagtgatacaagtgaaaaagaacttgattccttaataaaatgacttacaagtgcaaaaatggaccccatatgtgctctgctttacttacacccaactctaacctgcgagcatattaggaaaaaagaagcaagtgcatccaataaaattatttgtaacttaatttgtatgaggcggggcaaggttgcttttgatccaagtctggtattttcttggttaacagggtgtagattccaggcttttgtggcaacaccacattcatgacctccagagactaatagcgtggaagacacctttacaagatcaagggggcccctgagtcacccttacaggaatccttctggcctttggcatcctcctgcacagaccatgtctttggtgataaaagggtcgccgttgtagtaactttggctgttgcaaagttttcgacttaggacagtaacagtgacttctcgcagggtgtcagaaggtgctaatgaatctggatcggtggctcc

SEQ ID NO: 154713 - DNA, 241 bp, Homo Sapiens
atacctttatcatttatctatatttaacaatttagaaaaatgtcgaaatcttcagttataaccacaagatgaaactgaaaactcagggtatctgcacattaccatctttaatcttagtatagaaatataagtcaaggccactggtatccagggctgaactaaaacatgccagtttattcttagaaaaacagatcatcatgaatactactggaaattattaggctgggcacacattatggag

SEQ ID NO: 154714 - DNA, 829 bp, Homo Sapiens
  misc_feature (94)..(132): n is a, c, g, or t
  misc_feature (134)..(134): n is a, c, g, or t
caactggataaaaagtaattttgcaaagtctattaagctcccatttgtttgtggaggtgttggctagttgttctagaaccttgagtaactgacnnnnnnnnnnnnnnnnnnnnnnnnnnnnnnnnnnnnnnntnccacaacaggcattcattacaaaccagaaattttctaaaagcaccgagactcttcggagttaatgctttcggccaagatcatggatggggaggacacagggctttaccatcagcacttctcttggtacctcactatcaacaggatgatggcccataggagcaaaggcaccagttttcatgcactgcccagtttacccattttggcaaatccttcctcctggcctcctgactatgacaccacccagatgtccatattttctgccaggaaaagcctgctggggacaaagcttcttacttcatgtttatcttctctccatttcagaaaatgtcccgtcttacattgcaacttgttgaaagcaggaaagtgattttatagtaagactaatttacattaaagtgaaaatgacattattttgaggggtaccacttcaagtaatttgtttatattttaataatatattgagagtcttggtggctcaggcctgttttcctggcacataaggaggcaaagctgggtgtttgagaccagcctggacaatataggaaggcctcatctatataacaacaacaacaacaaaaaagaatatgatagagacattcattgagcattacattttttgagcattatatattctgtgtcctgtgtctccatccaaattttagattcaaaatatattattactgtaatgttaacc

SEQ ID NO: 154715 - DNA, 434 bp, Homo Sapiens
tttcatgctgccagttcagtttatttcggtttctccttttctgcaggcatcaggtacattatagacaggaaaattgcatttcagaaacagcacctgtcagagctaggcaggcaacacccccagcccccgtcagcaccaaatgcttttaattaactttggacacttccgtgcctcgcactttatttctgaatgttattgaaagttgtcagaacttgtctcactttttttcttttattattaatgtgtaaatacaatgcctcaggagtgttactaaaacacagaatctaatcccaggagattaatttatgaacgcagcatagggtgaagttgcatcctggagactgcaaattgatgttggtaagagccacaagcatcggcctctccaaacccacggggatccagaaggccgaggggagtggaggcaaggagggatg

SEQ ID NO: 154716 - DNA, 463 bp, Homo Sapiens
tttacttcttagggatgataaaaaaatatttacagttaaatagctggatctagtacaatgaaatataaagaaagggctaatgagtatttaggatagagaaatctcatgccattagagagatcagaaaagttttcattaaggagtagacatttcagatgggtcctaaaggagaagattgaggactctgcaagtggaaagggaggtggaacaggtagaagaaatactgtggagggaggaaaatcaaggacatatttaagaagaatgtgtctacgttggatgaagcttaggatacaaacaagggaaaatgagactagagagagccacgatatcattggcaaaagacttggattgttgtgtttactgctcatgcttcatttgatggagagtcacagaatgtttcagcttgtatggcaccaggaatagaagtgggccttgagtaaatccagcagcagtatctggaacc

SEQ ID NO: 154717 - DNA, 402 bp, Homo Sapiens
tgcatttaaagtaactttggaaaaaatgaattaagaacttttcccttcctaattaaaaaacagcgaattgactacctaataaagccagtaattgtgactagggagcattatcattgcctagcagagtttcccaaatcgtggctccgaagccctgtggctctctttcagcacattatgcaagtctttggcacgaagtagaaaggaataagggtggaattcaaagttcatatatagtagtaaggatttagaaaagagatgaagatacacactcaaggaaaattaatataaaatggatgtcagctgggagaggaataagtacgtactcaggaataaatcacttttatagctctgctttaaagctctattactttctgttacaatgtattttcaagtgttatgttg

SEQ ID NO: 154718 - DNA, 1194 bp, Homo Sapiens
  misc_feature (65)..(65): n is a, c, g, or t
  misc_feature (102)..(519): n is a, c, g, or t
  misc_feature (544)..(561): n is a, c, g, or t
tttttatgtctgtcggttcgccactctgactgaggtcgatttgtgatgtcgtcaggggcggagcntatggaaaacgccacaacgcgccttttacgttctgcnnnnnnnnnnnnnnnnnnnnnnnnnnnnnnnnnnnnnnnnnnnnnnnnnnnnnnnnnnnnnnnnnnnnnnnnnnnnnnnnnnnnnnnnnnnnnnnnnnnnnnnnnnnnnnnnnnnnnnnnnnnnnnnnnnnnnnnnnnnnnnnnnnnnnnnnnnnnnnnnnnnnnnnnnnnnnnnnnnnnnnnnnnnnnnnnnnnnnnnnnnnnnnnnnnnnnnnnnnnnnnnnnnnnnnnnnnnnnnnnnnnnnnnnnnnnnnnnnnnnnnnnnnnnnnnnnnnnnnnnnnnnnnnnnnnnnnnnnnnnnnnnnnnnnnnnnnnnnnnnnnnnnnnnnnnnnnnnnnnnnnnnnnnnnnnnnnnnnnnnnnnnnnnnnnnnnnnnnnnnnnnnnnnnnnnnnnnnnnnnnnnnnnnnnnnnnnnnnnaagaattcggcacgaggcgcggtcnnnnnnnnnnnnnnnnnnaatcctttttcttatgtaaaaagtgcacaaaagttcggcagtctttgcaagtgtcagcagtgtttcctggggcgggggaactgggaggggccccaggcctggcacccagcttgcgactgaaggtggcctcgtattgcttagaaacgtatgtttcagtttaaataccagacagtaaaaatagagctcgaggaccacccgcactgttgccaaatcattgccagaatgaacagctttaataaataaaaaatcgaaatatttacttctcgataaaaatcccagtaaaaccatttacctttctttgcattatatataatatacatttataacgggcctggctgcgggcggcggggccgagggcagcggaggggtcaggacacctcgatgacctccacgctgcccgagaagctcgcctgcttgcccagggcggccagctcctcgccgcgcgcgcgcccctccaccatgccctcctcgaactccatctggcagctgcggcgcttgaactgcgtctccggggccggctcctcgggccagccggtccgcgcgtcccggggctcagccctcgctgcctcccgccgccgcaggtcgctgccgccgcctggtcccggggcgcccgcccggccgaagggcggccgc

SEQ ID NO: 154719 - DNA, 518 bp, Homo Sapiens
  misc_feature (54)..(86): n is a, c, g, or t
tttgttttttaacatgctacatcactgttgaaaacaaacaaaaatatttcaaannnnnnnnnnnnnnnnnnnnnnnnnnnnnnnnnatgaaaagctattgactagcagcaatgattctaaagttatcttagcaccaagaccatggaggtgaaggggaagggattggtaggggatgaagggactggtggaaccaagaaagggctataacatgttcagtgttgatgacatttccactatggttctcaacggtggcatgaggcctcagagacaacataaaccaagaaggaaggaagccaccacagttttataatgtctgaaccaagcaggctgaagacattggggccttgcctgtggccagataacaccaccctctgccaaccaagagatgaagctctcagcagaactgaccacatgtatataattcagatcttcctccctcccccaaaatgacctgcatccacgtgataggatctctgcatataaaatatgcataaatcagatgtaggaacatgaacaga

SEQ ID NO: 154720 - DNA, 367 bp, Homo Sapiens
  misc_feature (131)..(144): n is a, c, g, or t
cttccttttgagaaatgcaacaagctctccagtggtcatctcctgatctgttggccttactggccctcaaatttcctattcatgcattacatatttatttatttactttgagacagagtgagactctgccnnnnnnnnnnnnnngtaatttagcaatgttgcaagttgtaagatcaatacaaaaatcaatattatttctatatactgtcaatgaaacactggaaattgaaaatcttaaaacataatacagccaaatgtggtggctcatggctataatcctgtactttgggaggctgctgttggaggattgtttgaggctgggagttcaagctcagcctgggaaacatagtgagacccttgtctctac

SEQ ID NO: 154721 - DNA, 724 bp, Homo Sapiens
taaccccaaacgcagtgcaatcaagatagttgactttggcagttcttgtcagttggggcagaggatataccagtatattcagagtcgcttttatcggtctccagaggtgctactgggaatgccttatgaccttgccattgatatgtggtccctcgggtgtattttggttgaaatgcacactggagaacctctgttcagtggtgccaatgaggtagatcagatgaataaaatagtggaagttctgggtattccacctgctcatattcttgaccaagcaccaaaagcaagaaagttctttgagaagttgccagatggcacttggaacttagagaagaccaaagatggaaaacgggagtacaaaccaccaggaacccgtaaacttcataacattcttggagtggaaacaggaggacctggtgggcgacgtgctggggagtcaggtcatacggtcgctgactacttgaagttcaaagacctcattttaaggatgcttgattatgaccccaaaactcgaattcaaccttattatgctctgcagcacagtttcttcaagaaaacagctgatgaaggtacaaatacaagtaatagtgtatctacaagccccgccatggagcagtctcagtcttcgggcaccacctccagtacatcgtcaagctcaggtggctcatcggggacaagcaacagtgggagagcccgggcggatccgacgcaccagcatcggcac

SEQ ID NO: 154722 - DNA, 472 bp, Homo Sapiens
cagggtggggtgtgggaccaccactcttgttggcctgtcaagtagaccctaggacagaaaatggaaagaaggaaatggctcggtgctctcaactagcagagagaattgaggagaggtaagggttccttctgcaggccagcctgggactccacagcgccagcaggagtgacttggccacaagacattccagccccagggactttgcaggcttcattccctgtctgtgtcttttccttctggtgtgttttacagacttctgatggggaagcttcaaacttgagcaggccagagatgtccttaccaaattggaaaggaaggtgaaactgttcctttctttagccaaagaacccttctcaaagacgcctccagaaatggacaaaatggccttcccttcgttcctttccaggcaataatgacatcattagtgatgcaattctatttgtctttctctttcctctctgtcctttttttt

SEQ ID NO: 154723 - DNA, 535 bp, Homo Sapiens
gtaacattaaagtttatttatcaggattgaaggaaatgatttaagaaggatatagctgttaaatgcaaatgaactgtcattacaaatgaacctttttggtacctgttgggagattttgggatttttagaagttaggccagtcacatctccagcttcttttgctgcagaaatatgcaactgaactcctcatggaggggtcatcaccacaaaggtcatggaagggtcattatttctcttgttggcattttattgcagcccattttaaatgtttgtacagaaatatttttcattctgtgaaaatttatttggagttctgtatgaaactggaagaactctggatacttttatatgttctcttttaattaaaaaaatgattagaattatccttacactaaagtgttaaactggaatggttgacaagatattcaggatctcagtctacacattgaggggttggggaaaatgtaatgttgtccttagtttattttcctttctaaaaaaataccccacgaaagggattctgatcagttctctg

SEQ ID NO: 154724 - DNA, 528 bp, Homo Sapiens
  misc_feature (244)..(244): n is a, c, g, or t
gcagctccctgataactccagatgagttaaggtttctacagagactctggaagtcagttaggtgctatgcaaatggagggtgttactgagcagaactagtagttggtgctccatcctctgctcccaaacaccttgcgagaagctccacgagggcactgattttatttggccttgagtgctcccctgtgttcctaaaggctgagattgtcccctgttcacttggtttctcctacagatcatggcnacagtgtcagacacatagcagccatcagaaattgcactgaaatagaaatgatatgaaatgacatgcatactgttaggtgtggggtatgtcacactggccttttaggtacccagtgcacatcctgaaagaaacatgggtacaactttgccctgtagacaatgcagagtaaggctacttagttttatgaatccagttcaggaattctactaattcctggataaactccctttcgaaaaagggtctaggacacaaaacgtccttcactttcttatcttttcttttct

SEQ ID NO: 154725 - DNA, 533 bp, Homo Sapiens
ttatttattttatttatatatccaagagaaagtaggttctctctttagaacagaattaaattagttcatctagctataaatcaacggaaagggaaagctgcgaacatattacaaaggcacttgtcaatgagtcagaaaacggaaaagagtccaattacttttatcgaatataatctaaagctatagatatattggttaacgttgtctaaatagatccaaatgagtatgagttggcctgttgtgttctaattgttcagccaaatttccaaaagtctttaaaagatgtagggaacaggaacggggggagcctaataacaacacagcaacatattgcttccatgtgtaattatacatttcacatctctatacagtcatcagtctacacttagtgacattttaaatcaattattttaaaccttcctttcccctcctttgccaaaaaaagggggggaggggtatcaaatacaacgcaccttcattatcaatgcaggagcagacagctttatttagtcagtcattgttagaaagccttc

SEQ ID NO: 154726 - DNA, 255 bp, Homo Sapiens
gggagagatccattaataaatgttttcttgaaactaagtaagggtctaattaacaactattaaaatctaggtagaggatgtaagaatactttaatattcttcttgagttttctctgtttgaacattttcacaataaaatgggtggaaaaactaaagagccaattattaaaaaaccatattgagtttagaaagtaaaactttgaaaacattagctaaatataagcctcataagaagtttaatctgctgtagtatgg

SEQ ID NO: 154727 - DNA, 469 bp, Homo Sapiens
  misc_feature (434)..(434): n is a, c, g, or t
gcctttgttagatacacaggcacgccacagtaccaggcaattaccattaccagctcacgttcctctccttattcggaaagaggactaactttctagctcattacagacaccccttcccctttcttctctgctttcttttacatgcccaccttatctaaaaaaatcaaatgtttagccaaccgggattcatttagattgtacgacccaaccccagccaatgtggaaagggtacaggggcaggacttgtgtcaggaataaaggctctcgtgcccctttgttcaggtgtgctctcatggcgactggccaaggaggcacccctctgcgcagaagtaaaattgctttgctaagactcctttgttcgagtgttcaatttccttaggattttgaatgttattcctaacaagtctgagtgtgggaatgagggaagaccctgngctgggttttgcacacattgggtttagaatgcctt

SEQ ID NO: 154728 - DNA, 335 bp, Homo Sapiens
  misc_feature (102)..(102): n is a, c, g, or t
ctcatctttttttaagtgatttgttccaaatgaagccatttattgacttgatgttcacaaatatcatttgaagaaataacaggaattggggttagatgatanattctagggaatctaggtgatttggaggatttcatttgttttgcattacagctagttgctctcactaaaggtaaatttccggtgaaataactcaggtttagctagctgtgtgcccagaatcactgttccttcatacatgtgtcctctccttaaattcattactttcaaatgatgttcaaagcattgactattttcattcaaagaaactacattcggccgggcacggtggctca

SEQ ID NO: 154729 - DNA, 836 bp, Homo Sapiens
  misc_feature (377)..(385): n is a, c, g, or t
ggagctcggcaccgtcagcccacaaggacttgggtgggtggatgctgttccttttgtcattcggtctgtggttaccaagcacctgctgtgtgccaaacagaatgcaagggctctgccctcccggtgctcacatttagagccctgagaccctgtcagagagtgatgagggtcatgtgattggggaaggctgatctagcactcagagaaggccccttggagaggcttgactgagaaacagaccaaaggtagatgtagctggagggtgtcagggagaggagtggcaccgggtgagacttgtggcagggcccggtctacagcaggactgccccagggcaatgtgacaagcttagcttcactcagtgaagccactgggggannnnnnnnnggggcagaagcatgatggacagaatggtttaaatggggtctgctggctgctgcatagagctgaacaggaagggcggagatgggtgtagggagcccagggaagccggccgctaaagtcagccaggtgagagctgtgagtggccagagccaggtatagctgtggggatagcgagaagtggagggacctgggctagggggcagggggacaggaagagtcccggatgcctgtccagaggagtccttggggcctgagactcaaacatcttccaacctagagattgctggactctgccactgaccatggggcaggcctgacttaaatgtggtttcttctctaagaaagtatgggcagtctaggacttggaggctagcccggggcccggcagagggcctctggcatgcagtagtgccaaggacctgctggctctaacctgccccctcgagtgccagct

SEQ ID NO: 154730 - DNA, 488 bp, Homo Sapiens
aattagtctgtgttttggaaagaattctgcagctgaactatacattgtttctaagaaggagaaggtgccttaactttccaagaaaatttactgcagggaataagagagtcccctgtgactaaagcaacagattagattattcagttgaataatcagacataatgaaaggatcaacaggtctgctcggatgaatcagggggttagaggcgcatttgtcaaggccacataattgttcatgggtttcaaaaatgattccaaaatgcagatgaatgtttttacctatcaagaacctacaagtgtacaggttgcttacttaacaggaagtccctacaacggactaatctgaatgcatttaggtcttcttatcacggtacgttgaggcacacagtacacatgatattgttaaaacaccccttctagaatcattactattatttcaaatgggaaagatctaaagagaagagactgctacccactacctagatcta

SEQ ID NO: 154731 - DNA, 533 bp, Homo Sapiens
tttaaaatttttttagccagttgctatcaaaaagcaaccttttgggttggtgaaggcaagagagttcttaaattactccactatgtagttatggccttcagcctaaggagataaggtacatttattgtgctgtctctcatcattggaaattttacaacataccatatacttaaaactagtaggcagacagaatttaaaagactcattttcgcagtatgcattctttccccattcttgcagagtaaaggggtaaagaaaaaaggtaaaaacctgaaaacccaccataacacagcttaatcgttaagagcacacaatatttgtttctatccctaattccgaagggcacatggtccatctttgtccacagacaaggcagcattcttggggatctcctggaaattcctgccacctttttctctccttctcaaccaggctgcaacattgaaagatggactgtactgggaggggcggagggagaggaaaaagggaaagcgatatgttcaaccaagccttctgattctgcctctagactg

SEQ ID NO: 154732 - DNA, 418 bp, Homo Sapiens
  misc_feature (156)..(185): n is a, c, g, or t
tttggtattcattttagggatttattacagttgggaattttaaatctttttaaccagtttctctaaagttctttatctgggtgtttatggtatatcagatattaaaactttagagagaagactttaacaatagtatgtgcactcacttgctcacgnnnnnnnnnnnnnnnnnnnnnnnnnnnnnnaaggaacacagataaaactgattactcggttaacatcaactacttttgttaataactgtatgattctatctgcatgacctcatcatactatcgagggagctaactcaaggctagagttgtgaattttctttgagtgatgtcattgagtttccatgactggtgtagtttttaattcacgaactttataaatcggtacccttttctcgttttaagagtgtatcagtcagggtcca

SEQ ID NO: 154733 - DNA, 459 bp, Homo Sapiens
tagcatttattggatatttattaagtgataaattaccaaggtatttttatccactccagtcttcctctcagactgttagctccttgaggtcagattttagatctagctcacctctgggtcctcagctcccagcacagggcttggcactgagggacatgaggaaatgtttaaattgaaggaaatggggaagggttggcccaccttcagccaggagctgatgggatcaggagtccagtgcattgccgaatatcaagaaactgactcgaaggctgtgggcgttggactgtgagctgcagaggtattccagcattgctgactggacaaggagtggcttgctgttgctgttgtctcctgaaggatggggagcatttcacgcctccaagaaggagctccatggctcagtaccagaagatcaagctgcagataggcgcagggcttgcttgtcttccctgccgcgcg

SEQ ID NO: 154734 - DNA, 618 bp, Homo Sapiens
ttatttttaaaaatcttgttaatgtacaggcattggcacattttaaaaacaaactacataaacagatctttcctataacctaggaaagtggaatgtcagaagtcaacaaaatgtgataaacttaaagtgctaaaacagaaggcacttcacaaaatctgttcactgaaacagttatatatcctcgtttacatccttcactttacaagtggcagtgaacgtctgtttggatagaaggacatacagaaatacaggcagtttagtggcagtaaaaatataagacaagtaatgagtccttggccaacttgtttttgatgacctgtagtgtcctttaactttcctccttaagaagaaaaaacagaaggattcacaattagaagaaaagttgaaatccagaatatagttacttttgggagtggggacgtttgtggatattaaatcacttatcccctaaagcaatcagagccctttgtttttatggttgaagttttgtgaagtaaagaaagtattagggaagaacacttcagaatcagtgaacagattttgtgaagtgccttctgttttagcactttaagtttatcacatctttgttgacttctgacatgccacttcctaggctta

SEQ ID NO: 154735 - DNA, 601 bp, Homo Sapiens
gtgttaataacataactttattataataacagtaataataagaacagtggtttttgcattgcattttacagtttacaatgaactttcatatactttaggtcatttgacctgcacagtactgtaatgtagatgttgatatccttatttcataaatgcagttagtgagaatcaggacatttaagtaatttttcaaaaatcacactagtgactggtaggactcacactcagatattctgacatttacaagaagcaactttaagaagcaaccaaacctgttggttaattattgtcagaaagggtgacttgatattggttttgacaagaataaaataatcactttgaaaacattcttcagtcgcagatgagcaatgccaaaggattatgttctgctggtaaactcattcatttacctggagctcatacactctgtagctgatccatctaactgagcccattacgatgcagtgggagaagtgccacacaaaagctactttatagtcaaggcaacggcacataaaaattgatcccctgtgctctgtggcacagaaacactattgtttcaaccaagtaattacctgcgcacttgaataaaagtgaggct

SEQ ID NO: 154736 - DNA, 496 bp, Homo Sapiens
  misc_feature (320)..(421): n is a, c, g, or t
ttgctaccacccagggattttctgctatttaaaaggtgaatttcttttctggtactaaactgtagctgcttaacttagtaaaggctgtgtttggccaggcctgtgccagaggctcacctggagtgctccacccactggcaggcaagtcctattcctattcacccaggatccccaaggctgggctgggatataaatgttgggataggaaagaaatatttcctttttagaggaaagcaagaagaaacattgcctgaaaggtgattttctagtcatttccaattagtacagaaatgttactgcctctgggtgcagtggttcannnnnnnnnnnnnnnnnnnnnnnnnnnnnnnnnnnnnnnnnnnnnnnnnnnnnnnnnnnnnnnnnnnnnnnnnnnnnnnnnnnnnnnnnnnnnnnnnnnnnnttacctgggcatggtggcacacacctttattctcagctactcaggtggctgaggtgggaggatcccttgagccca

SEQ ID NO: 154737 - DNA, 225 bp, Homo Sapiens
caacaatccttggacaggaaggccaactgtgcttaacagaagagcaaaatgctcccaacttgtattcattacgttatggtagaacaaatgatccaaaatgtcttattcttagagaagcaagagacttaaaggtatagctgtcggctgcctcaaaacacttaaaccttgtatttagaaagggcctaagaaatcacctgattcggccaggaacccggtggctcacac

SEQ ID NO: 154738 - DNA, 181 bp, Homo Sapiens
atttctgttcatgcggaatgattggttcagaactgttcctttcccttccatgatgtccttgacacagaaggttatgcctggctcccagtcaggcttcatacttttggtccatgtaagtgctacccgttgctgggggaggagtcatggtttatttggaaatgtcagttgcaatcatggttct

SEQ ID NO: 154739 - DNA, 507 bp, Homo Sapiens
ttcaaaagatttgaagtatgtctgattttctagggatttaagagcatcctctgtaaggactacttctagttcaggtttgtctttgctcagatgatctatagccacgttaacactattctctggtatgctttgaatcttttccacactttcacgttctctctttaagctgaataattcctgttagctgattcattttaaaattggtttctttaagtacatttttcatgaaggtcatttcttcattagcggtttctacttgctgttccaaggccagcttttcagctataaccacatccaattgatgttttaaactgtctgcttcttctgagagggaatgagcattcattgatgtcttctgtccaatatttgccaattcctgttgaagtttttcaatcacttcattgagctgctctatttcttcttctctatttctcttcacacattcttgatcactcatcaaacattctatttgggtttcaagatcccttatcagttcatttttttctt

SEQ ID NO: 154740 - DNA, 422 bp, Homo Sapiens
atacattgcttttgttgcagtgtgataaatggtgtcgtttttgcagcaagtagcatttttgcttcctcagatgggaccggaaagttcagagatttttattagttaaggtagcaatgtgccatgcttctttctttcttcatacacttcctttatttgctgaagcctttcttccagtagcttcctagagtatttgcaaggtacattttgtatctattttgcctttacacttgattatttgattgggtttagaatcctgagaaaaagtaaatttttccttagaatttgaagagaagtctcaggacaacagcttttcaacaagtccagacagcaacttgctctggattgcagccagaggaagagggctccaggaacaaggcctgagtggagttcatcagaagggggtccgcaggcaaagtgaagca

SEQ ID NO: 154741 - DNA, 518 bp, Homo Sapiens
tttttttcagagtcatcatataatgcttatgcaaatctcaactttccataagcattcttgatgactctgaaaataaaccaacctaatgttaccttataattaataagggcttaaacaattcatatactacaactaacttattagaagcctcttaaaccctgatttgtcttgaaaaaatgtttccagtaacattggccaagtacaattctgatcaatgtttttgaaacaatgagtgtttgtagacaacggaattttaacagcatggccattctttaattttggtggagttttttaggtcttctggaaggaaattggcttatgatcttgtttttattttatttatctgagccattaagtttcattagatctatgcatactaaagaatatcagtcttctttcctaatatgaaggagtcataggtagaagatacttttaattctctgaattttccagcgcctaatgccaaatgcttaagcctagctctttgtctgagcattgtagacctgtctcgcgccgat

SEQ ID NO: 154742 - DNA, 474 bp, Homo Sapiens
  misc_feature (131)..(171): n is a, c, g, or t
ttgtttaaataagtttttacttctccctcaataagatatttgaaactgtttttatatttcatattaaaaataaacctaagagtccagagaaacttgccaccagttctggagccatgagcaattctctcctnnnnnnnnnnnnnnnnnnnnnnnnnnnnnnnnnnnnnnnnnctttgatcttgatctttagtgggtcccccctccatggcccccaggtgaacagatctccgctttggcactctcttcactcttcttgacagttctccccaactcccaagcaattccagacgttcctatggggctgtgattgacaaagctattggcaggtgccacctacgtgagccacatcttttcctggagccacgcaggaagaagctttgtcctccacacacagagctgggatgaagcaggggcaaaggggaaagaggtgacaggcactggtggcctggagtgcttcctgctgctctccggagc

SEQ ID NO: 154743 - DNA, 181 bp, Homo Sapiens
gccagtagtacttatcaccgtctaaaatacttcataatttacttgtttattgtttgcccctctccaatagaatgtaagctccttggggcagggacctttgtcctttgtcttgttcactgctgtgtcccatgtgtaaacttgtctggcacagaagaggtgctcgataaatatttgttgagtg

SEQ ID NO: 154744 - DNA, 435 bp, Homo Sapiens
  misc_feature (300)..(345): n is a, c, g, or t
  misc_feature (368)..(368): n is a, c, g, or t
tgctgttaaagtatattttatttttattttctatattttccaaagtgaacacaatgattttatactcagacaaaaatacatattaagttacttgtttcatgcatcacaacgtaatggtcatttgtgtgagaactttagatgacagagtccaggtcagcaatcctgccagattttatccccaaaagaccatctcctcactaactgtcctcatcaactgattctgcgtttatagtttatgttaatgtgaattccagacttccttgctgggcaaagccataaaaaaagtcagaagtccagcannnnnnnnnnnnnnnnnnnnnnnnnnnnnnnnnnnnnnnnnnnnnnactttcagaaggcagtccttcangtcgtccggtgtggaccaggacctgcttgctgctgggacacagggacctgttcacacgtcacactgg

SEQ ID NO: 154745 - DNA, 468 bp, Homo Sapiens
  misc_feature (396)..(396): n is a, c, g, or t
gaggttttcttatttttactggtttataataatcttaaaaaccccatcacacccataaaccaccacaggtgaggtgagagagatggagaatgaatgctacagtatgtggatagaatggggaatccaggtattccctagggtagtgtaggatggagacagggagtgtggagaggaggccctggcttggacccttattgctggctgggggttggcttgcagaggggagagggactcaggctgaactccgaaagaaggaacatctcacaccaaaggcgagggcagttgggggcagggggatcacagtacattttccatgcagactaagggtgggagtgagagcttcagaggcttgcacccctacacaggaagagatgggtttgaggttgtttgacttanagcccccaagttggtgtctggtccagtttcctaaaatagcagctcacctttcagggagaggtattggggagg

SEQ ID NO: 154746 - DNA, 394 bp, Homo Sapiens
ccaaagtgagtttattgacattccttgaagatggtgtgatggaagagaaagcgcggcctgagtatcacgtgacatttctcttgctgatgtaagcaaaatcagcccaataacgtggacttctcctgctattgactagaacagacttttgaacaaaattgttgtagacatttccttggataaattggaagctgcaggaagtaggctaaaggaacaatatttactctatatactacctctaggcaccttttttcctactagaacaaagggactacatgtcactaacaggaaaataacactttctcttttcttttggaccttatgatggctggaacatccatcccagatttttatgatatagtaatggcgtagttttaataatgaacactgaagtacg

SEQ ID NO: 154747 - DNA, 437 bp, Homo Sapiens
  misc_feature (305)..(365): n is a, c, g, or t
gccattatcgttattaacgttttattgttgcatcatctatgagtatttatgatggaggaaactgatttagactaggggcacattgaattctttggagggacttcagggaggtatcttaagagccgtgagagagtctcagggggcagtgaagactccctcactgctggaacaatgctgtgggctcaccctaggccttcaggaggggagagagatgtgcaaggaggaactccatggtggttcttcttttgctagtgtttgtgctacttccccacttctaaacaggtgcatagtactccagagcaccnnnnnnnnnnnnnnnnnnnnnnnnnnnnnnnnnnnnnnnnnnnnnnnnnnnnnnnnnnnnnccttttctcctcaaaaccaagtggtggatgggtaaggaactatactatcttttgtgtgttctaactttgccg

SEQ ID NO: 154748 - DNA, 469 bp, Homo Sapiens
  misc_feature (290)..(323): n is a, c, g, or t
cttctgttgttgaaacagaggattttggcagcctggttcattttctcttgtatatcaggttctttgggttcactattttctttttaataagatcatgatatttcagtgtttacctatagctcacccaccatttaggttttatttccagtgctctcatgcttccctaaatcctgtacgaaagatgctatgtcaggaggcgcggtgactcaggcctgttgtcctggcacataagaaggcgaggtcaggtgtttgagactagactgagcaacataggaagctctcatctattnnnnnnnnnnnnnnnnnnnnnnnnnnnnnnnnnnatgctatgtccttggctattcgagccacagctttgtgcattgacacacatccagcatcagcaagctttttctaaatgagaacaagcgtcattcctttgtccatttgtcagacttgtcacatatgtctctatgggattatagttttt

SEQ ID NO: 154749 - DNA, 534 bp, Homo Sapiens
  misc_feature (91)..(92): n is a, c, g, or t
  misc_feature (117)..(216): n is a, c, g, or t
ctggaagtcagtaagacctgcacctttttatttcaagatcttctgccctggtcctaacgacgttgaccatccttgtggcaggtcatataanntcactctgggctctcatatttcttnnnnnnnnnnnnnnnnnnnnnnnnnnnnnnnnnnnnnnnnnnnnnnnnnnnnnnnnnnnnnnnnnnnnnnnnnnnnnnnnnnnnnnnnnnnnnnnnnnnnaagacacttggcaaacttttctctcctataataaacatatacaactcaagcttatttcggaaaaagatattggtgatgttgtttaaagtatgagatagggcatggagctgccacctatgtaccagctattccagatgaccaagccctgctagaataaagactgacttttcattgtgacctctgaaggatgtgcagctcagctttcacctatccccacgttcacccaagccaaaaagaagaattgttcattcaaactggaaatgatctccagcttggaaatgagacttctcatgagcttattctaagatcagagtctga

SEQ ID NO: 154750 - DNA, 432 bp, Homo Sapiens
gaataatcctagagaaccataaaaaagtacagatttacagctgaggaagctagttctccccacagcttttatagactccctcattaagagcttccaggtatgcagagaatgtcacagcttcaggaattggaatcagttaaccacatctggatgctggatcaactatagtagggaaacggggagaggaaggaagggtactaagatctcaggtaaacaattacaagcctcaatgtctgttccatctccaaacggaattactattttaaaactgaattgggaaaaaggcatcctgaactattcatgctcaaagagtatgtggagaatgactataatgagataggaaggggaggacttcatctggcttggaggttagagacttctgaccaacataggaacagctgctgaaatgggatgaaagaggttaataagaaa

SEQ ID NO: 154751 - DNA, 568 bp, Homo Sapiens
cttataaaatggaaaactttaattgtttaaagaaaaggcacaagtaaacatttcaggttatcatacaatgttacaataaaaaattccaatagcaaaatgaaacacattataactttgcttcttggtagtatactgaatgtattattctatcatctcctctttggagtaaaaagaagggataggcagatcaatggatgtgatgtaaaaacttggatcataaatagcatccactatacctttaaccagaaattaaacttcagtagaattaaaattaatttttaaaacttagttttgttaataatagagcagcagtaactttcaagctaaaactcattgttttagtaagtaaataactgatttcatgaaatgttcgctgtcaatgtctggtatgttaatatacattaatcaagctggtcatgaaacagttttaccaaaatataattcatatacttattttactttaaacctgaatattacagtacattatataaaagataaatgagaataaggaactaaattatttcttacgatgtcagaaataatatacttaaaaaggtgtagaccttat

SEQ ID NO: 154752 - DNA, 487 bp, Homo Sapiens
ggccaggcaaagcctcctcaactcaactgtagcttcctcctcttacctcgcagtaagctgatgactacttctgtgccttcttctaccttcccggaagttccaggtccatttagttcgagttgtaaatattgactgaacacattgtgttagtccagtctcttgtgattgcagatgaaataccacaggtcaaacaaattcatttaagagtaggtgcagtgggaggcgagcttattgagaggatgcttgggtggcacgaaagaatggaaccagtgtacccttcaacatccatgtctttgttgctcagtctcctaacctcctcaacccttgcatctgcttggaaaggcccatgctgtctccttggcatcttgaggcaggtcctttcctctgtttagattgtcctcccatccctcctcctgtccactttggtttggttaacttttagttattcttcaggattcagctgagatgtgtccatctcctggacctt

SEQ ID NO: 154753 - DNA, 325 bp, Homo Sapiens
gactcataatgtatctagcagtatattctaaaattcctgaaagtatagggtttttctggttatctctcgctattgattcctgaattaattgctttacggttaaagaagattatttctacgttactaatctaaaatttgttggcttgctttaagactctcataaatattccatgtgtgcagttgaaaagaatctgtatttcacaattatattatatatggtcattaagtaagcttgttggtaaattttctatgtctttatagacttctatgtttccttcattcatcagttccttagaaaggtgtatttagatctcccactatgatg

SEQ ID NO: 154754 - DNA, 524 bp, Homo Sapiens
tttgtacttaacgactttaattgaagcagcacacagccacatgggaaatatcatttagaggccaatcatctctttcccagaaaagctctggggacaggggcaggggagggagagagggagctgagaagccttgatgtgcaagttcaatttctacaggtgaacaccagcggcctcggcaatgctaggttgttaggaattcggccttacttcttttcatctctgtagtttactaggtggctctcaaaggcgcatgactgcagtgccccactgcacggacgcagcatagggcatgacagggttcattggagaagctggctcccgcatggctgccgggccatcctttttcagctggaaaaaaccactagcgctcactaacctgccgtgctcaccatgaacttccacttgaccacataggcatccccctcatggaactgcccgatgctttgtttggggagcctgctatagtcgaattccaggatgtgccatacatcctcggaaatattggtgatctcaaactgctctct

SEQ ID NO: 154755 - DNA, 481 bp, Homo Sapiens
aatattaaatgtaattgactctacgaggtaaaactgagttttatgttcccctatttcctatttatgcaatagatttaaaaagtttttttacgactaattatacaattcaaaaattgcctgtgttgaaaagcatgaaagtacatgaaattgtactaccctggaaaccccaggaagtgtttagtttggaaagccagggccacctgctagtgggtgagtcatgggcacaggctcgcacctgccaccgcagacgccacacaggctgctgagcctttccaagcgaaatgccccacgtgcgccaacggccacctcggccgtcgccccacgcttggcccgcagccagaggaagcccagcaacttctgctctttcttaatttctagaaaagagtgaagagaggccttttcaaagttcgcaggatcgggcctttttgtgctccactttggaacaaatcggaagctagggccttccaggagcgccaccgcc

SEQ ID NO: 154756 - DNA, 598 bp, Homo Sapiens
ttttttttaatatgggagtcttttactcttttacgtggagtaacgacttgagtacagcacattaattttataactattttaggagcaggggaggactcttgagtttttccagagataattaaaaatgggggaaaaaagaaacctgaaatacacaaaaagcaagctgaagccaccaggggtttctgaataacatcttcccggttcaacaattttaagaattccataatgcgaaagcaacccccacacattctctcccacataaacatgttttttatttaagccacactcagcgacggcagcacaatgtcttgcctgcacttctgtagttgcttcatccagagagaatgtcttcttcacaaacgcgttcttccgtgaggagacttggttggtgatggtgcattggtttggaggcagcactaaggagaagcggaagagcatccctactctggtgagacggcggaggacactagagaaggctcttctgcggcaagttgttcactcaggctctggtgctcgggagagaaggtgggttcagttaatttgctgctgcctgccacgattgggttttgattttaccggcgcggggggtgggcgcgcc

SEQ ID NO: 154757 - DNA, 475 bp, Homo Sapiens
ccaggaaaacattctcttactttatttgcatctcagcaaaggttctcatgtggcacctgactggcatcaaaccaaagttcgtaggccaacaaagatgggccactcacaagcttcccatttgtagatctcagtgcctatgagtatctgacacctgttcctctcttcagtctcttagggaggcttaaatctgtctcaggtgtgctaagagtgccagcccaaggtggtcaaaagtccacaaaactgcagtctttgctgggatagtaagccaagcagtgcctggacagcagagttcttttcttgggcaacagataaccagacaggactctaatcgtgctcttattcaacattcttctgtctctgcctagactggaataaaaagccaatctctctcgtggcacagggaaggagatacaagctcgtttacatgtgatagatctaacaaaggcatctaccgaagtctggtctggatagacgg

SEQ ID NO: 154758 - DNA, 460 bp, Homo Sapiens
gcctcacctttttgatggccggattcccgtgctgcttttcctagctatctgagggacttaggattcggacagtgcttctcagatgagctccctgtgtagcaggagcagggagcctgggcctgggtgttcctcctgggtctcagccagggatgcgggcatccagggtcagtccaccctgcccggtcaggaggttgtctctggaagcctctcttgacttgtgcccagtgccgtgggaccaggagccaccaaccaactcgttctcaggggcacaactgtgtgctggcagttggaggagaaagttaagtagtagatgatgtgggtgagtttgagaaaggcttgtgtggactaatggatttgtgaatgtgagtcatttcaaaaactaacgaaaaagttttgaatctttgataatgaaacacttcactgtttttcaaaggggacgcttataagaatatttgatact

SEQ ID NO: 154759 - DNA, 557 bp, Homo Sapiens
  misc_feature (82)..(82): n is a, c, g, or t
ttcagatagattagtgcatagttctcatgcagataaacactgctatgcatttacactgttggaaagcagagtgaattgagcncaagttgtcacatttgtgtaaatcattttgtcagcctataatagcaccatgtaatggatttgcattaaacattaaattgatttcaaaattggtgacacagtattcactacagttaagtgctatggaatagcttcaatgttacctgctatatatcaaagcaattttcatcccactgcttttttattggaaaaaataaaaggaaaacatacacgacgctaattagacgaatgcacagccttggacgtggagaaggcagagcgggtttactgtcaaacagtaaatacatgcattgacttcaagacagaattggccttggaagcctttttgaatgaaagctgagccggtgggcagtgcagctttctgagactgtctttggacagatctcgaagggtgggttttgaggtgccactgaagctctccttacattactatggtggttgtgttttagatttgttctatagagaactgctaccag

SEQ ID NO: 154760 - DNA, 354 bp, Homo Sapiens
  misc_feature (232)..(232): n is a, c, g, or t
taaagatgacatcttaattttgcattgaacattaatgtagcggatataatttgatgattatacttcattagatttaatttctaggccaagatgttactttttaaagtgcagtttaaggttcaggcatgcattctggctcatagtggttgaaagtaatttaaattagtgggaaagtagcatgcttgcatcacatagagtgagattggtattcatttacctatgttgcgccagntttgtgttgcagtttaccacttcaatatagccctgcatttaaagttcctttttaagatttgtggattttatttttattaagaacatagatatataaagtactgtagtttacatatctatgtt

SEQ ID NO: 154761 - DNA, 638 bp, Homo Sapiens
  misc_feature (297)..(306): n is a, c, g, or t
ttttttgtgcacaactacagtttaatttcatgatcagcagccctgataacaaactcaatgaaacattctacttatggcctcagtataaacacttgatatcgcctattaggataattaatgcaggtgatcactgtcagaataaatgataagcaaagacattgccagttaagactcatctatcagattacagtgtttctatacacacatgatcctcagttctcggtgactttttaaaaacctccctctaaaaccaaaatattggctaaatgaaagaaatctgatatcttatagcttttnnnnnnnnnnggtactttgcctcacattgtactgatctctttggtaattgagagatgtggcacctaaataaccataaaatgaggactgctgacagtgatgatgtaaccctaaccaactctaggagcaagatataggtctaggaagaaaggaaaaactcactgactaaataagcacattctggattaacaaaagacagcctcaagtgcttaataataccaatgttattgcgttttggatctggtagcctaaagtctcaactcataatgagtcaatgtctggctcaataagacacacactgaaagaaaatcacagtattgcctccaatgcaatagttactacat

SEQ ID NO: 154762 - DNA, 459 bp, Homo Sapiens
ttgtaaggttaacagccagattccattctgacctcagatgctgtgtactttttaatttcattttttatattctgccatcttgactcttctctaaaacagaatgaaaatgtctgcatgctgagcaaaatgcttacgccaagcctgtttttctctgcagagtaaacaggatgttttcagcagacttggctctaatagccatctctaagattagggaacaattgagtctttatgtagaaaagatccattttttccccatcctcagagttaaaattcaacatttaaagctttatcggttattgttttagatttgagatttttgtttttaagtatctataagatctttagaagtgagataaatttttcgctggttaaaaaaaatcaaactttcctctgcagtgtttttgccaagttttgtcacacttcatgtgtatgcattaactatacttcttagtgttactg

SEQ ID NO: 154763 - DNA, 512 bp, Homo Sapiens
ggtgggccaatcgctgctcggtattccaggcgctttctcaggtttctgctgatcttgcagcgcccagaaatggaccgagcggacccgccgccgcacgcaccctgctccactccaagctcttaagggctcctggcgcgccgcgtagccttggcgaggtccgcgctggggtgcggagagcgaagggaactggagagccatgtagatccaggctctcgcccgcccgcctccttcgggatcgaatcaagggctcccatagtgttaggagggggcgagagtgctgtttatcgtcatttgcctcggagcttcgagagagggtggtattttgcttttccgccccgcatcctccggaactccctgcgccggagagaggacggcgtctccaggttgctggcaaccggtgagaatgggggtagggaaggaacattttcgccgtagctgctccgtaaagcgattgtccaactgagaggggcgtcggacgagtggaccagggcggcgagtttgcccggcgcgtc

SEQ ID NO: 154764 - DNA, 419 bp, Homo Sapiens
ttatataataaggttttatttttcatgggtgtctgcaagtcaactgggtgtcagctgatctaggatatgtttagcttagtggttctgcttctagcagcaggtacagctaggcctcttgtgggttggactcaggtccaccccacatgtgtttactctgattcccaggatgaacaaccaacagtgacccaggggaagccattttcgtaataatgcaaaatcaagaaagggggtgtccaaatgcaaaaccacatttaaagctcctttttgtgtcatatctaccaatgtccattggccaaaaaatgtcacacagccaacatcaaatcaaggattggggaagaatacttctcctgtggacataaagaatagttttgaacaacaatctaccacagtaggagagatacaatatgacatagagccct

SEQ ID NO: 154765 - DNA, 510 bp, Homo Sapiens
tttttaatgtagaaatactttattgctgaaaaatgctaatgatcatctgagccatcagtgagtcatagctttttgttggtggagaatcttgccttgatattgatggtttctaatagaccagggtggtggttgctgaaggatggagtggctgtggcaatttcttaaaataagacaacaatgaagtttgctgcatccatgtactcttctttccatgaacaatttctctgtatcatgcaatgctgtttacccacagtacaacttctttcaaaattggagtcagtcctttcaaaccctaccactgctttatcaactaagtttctgtcatagtttaagtcctttgttgtcatttcaacgttgttcgcagcatcttcaccaggagtagatctcatctcaagaaaccactttctttgttcatccctatgaagcaactcctcatccatttaaatttgatcatgagatagcagcaatctagtcacattttcagggttcacttctaattaagttctcttg

SEQ ID NO: 154766 - DNA, 518 bp, Homo Sapiens
  misc_feature (299)..(345): n is a, c, g, or t
acgctcaggatttttattctcggcagaagcacaagtcattgctgcgtctcactcccttcccaggcatccatgcctgaaacaggcgagccgcccgagggaggcagaggacccagtgcctctgaggataagctcccacatgggagtggactggtcggggaagccagtttgtttggggtctggcttccaggaaaggaccggctccatgcgtgtcaggtgcactgaggagtggatatcggagagtccaggcaggcgggcagctgcagagccggccaaggttccctgcacagaaaccatcttannnnnnnnnnnnnnnnnnnnnnnnnnnnnnnnnnnnnnnnnnnnnnntccctggcttccggccccggctctgccccgaatgcggtggcatcttagaatgaaggcacagatcgattccctcaactaatggtgaaaacgatgcagccactgaaagacgagattcctgggctctcactgagcagatgggcctccctcctccctccagcagcctgcttcgacag

SEQ ID NO: 154767 - DNA, 465 bp, Homo Sapiens
ttttttgttttcaagtaactaataacattaaagtgcaattttgtcttttggatctgaacaaaagttctgtcatttttaaaaaataaagtagggccacagctttatagccattttctcatctaaaaccccacaattattaacacagatcaaactgcagttttggaagagagcctttggacggggaaactactgaacagtgatgaatggccatacctaattcattgtttggaaattgatgtggaggactgtgtttcaccgaggtggaaagggacctcccagaggctccgaggctgcaggtcttcagccaggtgacagcactgcacctgcttgtgtgcaccctgatggcaacagcagggaagtccacagtcacgatgatagagacagccacagctgccaatcagaagactcgctctttctggttttcatggactgcgttttgcacatcgagctcactgtttagagctg

SEQ ID NO: 154768 - DNA, 816 bp, Homo Sapiens
  misc_feature (172)..(183): n is a, c, g, or t
  misc_feature (765)..(773): n is a, c, g, or t
attattattattttttagctgtagctgaaggcatttttcggatgtggagaggagaatggaaatcgcagaaccaaatcagtttgccctgccatatttggctgtggtctgtcattgggcatttttgatgtgcttttttggattcaggaagagctgattgtcctccgagggttgnnnnnnnnnnnncagtttcagaaacctgaatccagggccttataattctcctcattatctatcttcttctcccttccctcgcccaagggagtgggggaaacacttttcactgcagagtttgctttaaagttttcccatcttgcgtgcattagcccgtgagattaagattattttctcagtttaatccaactcctgctgagaagctgtgtgagatttaggctgtggggtttttttcttgcacgcttttgggtggggttgcatttttcaaccgtaacccaggggtgtgttttcagttatgttcgttctgtttcaggcaggtttatagcacgggacagtacaagggggcttctgatttttaaggtatttttagaagtccatccctgagtgaggggttcatacactcagtcttcctctggaaagtggggaggggtccactgggccttggtagaaaccctccaggttagtgttcggggcgggtcttcaagtgagagggggtggtgaatcggcttcccagtgggatgacacgcaaaatttggccatcgagggtgtgtcgcgtttcaagaggaagggggaattctctgggggcagccacannnnnnnnncaaagagggtgtgggaagacctgtcacggcaacgcatgggagg

SEQ ID NO: 154769 - DNA, 298 bp, Homo Sapiens
ccacagggtttgtcaaagggtatcctcattggcttgccagggcataagagagtttgactgagaaggcattagtgggctgtgtaatgactaactttgtaccactttctcaattagcaacatcagagatatcagagcaaatggtagatctttacagtgatgcagttaggagtttgttaactgccttttggaagtcagtgtaagaataagtagtgttgatgggttcagtacgagttgtttccttaactgttttagtcagccagccacagcaacacccagaaacacatgaattagggatctg

SEQ ID NO: 154770 - DNA, 546 bp, Homo Sapiens
ctggataaaatgttttatttttcaaataaattataatagattttctctctctcaattatttctgtaataattttatctttttattaaaactaaatatatattaaatacatttcaccttttctcaaattacagactatggtataactgtaattgtcattagcaaccaaagtctatttccagaaatttaaacttgatatagagaaaaattccacgtatcaagcgcttcgtacctgacttggtgctgaggttgaactgttgtattaatgtgttcctggctctagaggccactcctagcttttaaagcaaagtggaacccttagggtcaggcttggctgccagagaaatttctggagggggatgacttgggttttgctttacacaggccagttctttcctgggctagggtggaatctctgggaacagaggactgagatacatactgtgtttaggcatttgtttggagcagcagggaggaccctatttttaatctcacatttctatcagtaattgcttccctattagaacaaagagaaaatgggcagctct

SEQ ID NO: 154771 - DNA, 901 bp, Homo Sapiens
agatacatattaaacatttattacatctcatgttttattttgtggaaagtttgtgataccatgtactaaaatacatcagtcaagggatatggttattatacctaaaggctttatatattttcatgggttttctagttcatgttttaaatattgcaaaatctgtgagatttatgaagactctttcatagggaaaatccactttaaacatctctacagtttcgctaggtatcttcaaatagaatagaatttcagtgtgataaattagactccttagttccatagctgacgtatagctggcatatcccattgatgttctaatatgtgatatgttcaaatatgtgataacacattttgatttcttataatgcttagtcccatatggtcctaaactattacgacctttgtcatgcttgggatttgtggaaatttcacagtggtaagggttgtgacattacacgctgaattactaaaatcacgcagcgcaaagtgacttgcacatgaaaagtgcaccttggtgctgaatttcctatttttttctacttgaaagtgtatggtcttatttataaagtaaagtatttatatgctttacataacaaagtctcttcttttaccacatttataaattagctgagtcatatttaacaaaaagactggtctaactttctaagtttaagtcaattttaaaatctgaaattgtatatgatgaaaatgagacccaattcagtatcaaaaacaggtggccaaagtcacaagggaattatgcggaaagggtagatatgatgtaaagaaagacatgtgttatcttccaaaatactatcactactaataaaaagccattgcacaagccaaaaaaatatattaatctgttttgaagaatgtgtctgataataatgagattcaa

SEQ ID NO: 154772 - DNA, 389 bp, Homo Sapiens
tttcaattgtttttgctatgaaatgctaaagtatttttgaccatcaaaacagattacctccactggcttacctttatccacacacttatttaatctcctgacatctcttcgtacactatgtggtctctttgtttaacaggttagacctacttaaatttagggacattatccttttattaaataatatgtgagcttgcttggtgtagaaatgaagcgtactaatttatagttctgagagtccctttcattacaatgaatatttatgataacagtgacatattttgctctaccaatctatttaacccttctgtgacttaacagtcctaataaaaatcatattctacaaattttatctgtactgaattcattgattaggtttgtctttgatt

SEQ ID NO: 154773 - DNA, 440 bp, Homo Sapiens
cactatgaaaaactgtcttcaggaattgtttatttggtccgttgatctagtgaggctgagttcttaaatctttcacccccaagttaaaaattggagcaacaaaacaaaactccagcaaggcataaataagatattaaagtgcatatatacaataccagaaaagtttagattgggaacagcaaaaatttctagtgcaaaaactgcttttgccagcaaagctccctctctggaatcaaagggctacagtaaaagttaaaattggaacaggtttaagcaatgtctgtctttagtcacaagttaatatatgtgcatgcaccaatggcccaaactatgttcagtcttgcaaaagaagacagttcagaaacagtcagaatttcccaatctgagggcagtgctttttccatgtttcccatgaacaagttcctcagatgtgtcatcag

SEQ ID NO: 154774 - DNA, 456 bp, Homo Sapiens
tcttttttactctggaaaggccaaggagggctgttcagagggccagctgtggtccatctgaaggtgacaatttgccaatttgttttacaggaaggctgccatgggcctcacaatagcagtccctgcttccgcctttctgtcatcttccaactaaagaggccaggaaatggccgagtcagctcctgctgcagcacctcctagaatcagaaaaggcctttccgagaatcttgctgaaccctgagggtgaggagtgtcagattttgcagcggggggaagctggcagtggagcctccacttctaagtaacctttgcttcggaaacctgccaactctctgcctggagacttgcctttgatcacgacttgtcacctttcaggagatgttccactttctaagcaggtgaaaaatgaacctgattaaaaatagggaactggactcttcacagagtccccctgta

SEQ ID NO: 154775 - DNA, 368 bp, Homo Sapiens
ttatttggctaaattattgatcctacttcagagggaaagtgtaccaggcagttttggtgggtggtgctgaagtctggggagtgagtttagtcttcagactattcttggcgacatcaccagtgttgcaagcaccaccattcccagttaggcactttttgtccctggtaagacttgacctttatctggaacactccttttgtccctagagtggggacctaaggctcagcaaaagggcagaatcaggaaagcctttatggtgtggctaaaggagtggccagagccttgggactcctttgctgccttctccctggttccagttgtctttagattttcacggctcttactgctgttacttaacagtattttcc

SEQ ID NO: 154776 - DNA, 286 bp, Homo Sapiens
  misc_feature (59)..(81): n is a, c, g, or t
gtgccaagctaaaattaaccctcactgaaagggaataagcttgcggccgcatacgcggnnnnnnnnnnnnnnnnnnnnnnnatataaattcatgtttatatatgacaattgaggagagttaaagaacaagataattctggatggaaaaatcagtttgcctgggcatctgtaaacctttgggcaagtgaattccctcttctctctcagttcaccctttggtgacctccaccgtggctgcagacttcaggtggtcctcacgcattcacagaactgtctgcttaggtta

SEQ ID NO: 154777 - DNA, 429 bp, Homo Sapiens
agtaaatctctgaatcaaagagattttttggagtcatcatttctccaatgagtgtcttttagatggtaagctcatcccagcctcatttttactcacatttccccccaccccgacatgcaaacagtaagtgatttcaaatacctagagaggtatttttcaaatcctttgctgttttcatagttagatagctgactgtagctacagaaagctctgctgaggtcaatattggttgttgatttcatgccggtgtctgctggactctcaggctaccttgcacaagggtttctcttcctgtgcaatggtttgtactgtgaacctcttatctgaaatgatcatcagtccttgtgtggtttgtaaagaaactagttcattttgaaatagctcaagagaaaagaagcactcattcttaggaacaagagtgctcgctaa

SEQ ID NO: 154778 - DNA, 179 bp, Homo Sapiens
ttaaaagtttttacttacttgatgtaatatctttttgtacttaaaatttttactttaagggagccttttaaattctaacttttaattatttcttaggctcacaggaaagggtgaggcttttctgagtgagaaacagtaacttctcagaagaaaggtgttgcagataaagagaatagagg

SEQ ID NO: 154779 - DNA, 563 bp, Homo Sapiens
aatctttgttcacaacttcaggtagaggaatgcatggcagtcagaggggccttgcaaggaggggcctttgagcctcagttctcatgtattggggggtgggggtgggtacatattgtatttggtatttgtgttccagttatatttatgtcttttcatatttagttctggtgtggtgtctggaaatgtttcaactgttttaatatattgtctgattgggtaaatgtgattgaccacttgctgtctctgttgtattttggtatgagttttgatagctctataaaatgttttggaaatctttccatcttgttgcattatctagaaaagaatatagcatatagctatagatataggcttttccttgaaagcttgaaaaaaattcgccagtaaaataatctagcttaaagtgataaactaacaaacaaatataacaacaactgaaaaggcactctaaattgtggctggcttccctttctgtctgctattgtatgaagaatactgatgtttacctgtatttgctttgctgtactaaaatgtaatgaaaaataaaagattaataaatgaaa

SEQ ID NO: 154780 - DNA, 714 bp, Homo Sapiens
agaaatataaactttttccaaaaccaactttaggttttgtttgttttccacttttcttagttcttcattttgatgatttctaaactcatttttattttctcattgcttctaagttatttgggttcactcaacctctcttcttctaacttcttaagctaaaagtttagatcatttgtttttgttctttcttacttagtgataaatatacttaaagctataaatttctctcagagaaatgatttcgttgtgtcccacaggttttgacatgcggtgcttttattttgttcaagtccaagtatttcatatttttccctgtgatttccgctttaaccaaaggattattcatttgtatgctttttagtttccaggcatatgggattttcctaaagctatccttttgttatcgacgtctaattttatagcattatggccagagagtatagtctacgaggtgatgttgactctttggaatttattgagcctcctttgtcacccaagttcaatgttgacttttgtgaatgttccatgttttctttaaaataatacgcattctgtatttattaggtgtgaaatatatttgtattagttcaagcttactaattgtgtaattcaaacctaccatttgttttctttttgttggtttaattgattagtttcacagagaaatatgttaaaattaccaactataataaatgatgtatctaattaatccta

SEQ ID NO: 154781 - DNA, 512 bp, Homo Sapiens
tttttcaacatttatctttttatttttaagtgtacagttaggtggcattaagtacattgacgttgttgtacagccataaccctatctccagaatattccgacttttttgttgttgttgtacatctataaacttcccatagaatattctttgtgaaaaggtagaatttcacagagttgatgaaatataaattaaggagttgaaggatcttacaaagtgggatttttgaaatagataacttattgctccattaacatgagcattcagggctcagtgttgttcatggttgtgcctgattctcatttcccttggtggtaaaggcctgcatgggacatagatataactggtcacctgctcataacaaaaggaagattgaagggagtgagaactgtgggtaggctagcatgcagtctatcctagtttccttcttctctatgcaccaggtatcatcttatctctagcttcttttttcctctcaccctccaattcacactaccctatccaagctatgtct

SEQ ID NO: 154782 - DNA, 519 bp, Homo Sapiens
gtgcagacaggaaagatgtgttttgaaatacctatgatcaattctggaagttgaacttcctgcttgagctcatccccttcacatgtacagtttagggagaaaaagaaaaggtgccacaaaggatattataagcataagaattcatgacaaaacaaccacttcagacacaggcaaaatcgcagggtaaggaagaagcatgaatatttccaacttgggaccacacacttattttaattttcctcattcagaatgtccaccagagcttgaagcagccggtcgtctctgtgcttgtaaggtttagtgttataaaaaacatcaacatagtcattatacagactgtcttcagagtctttaagctgggaaggtttgttcagcttttccaggggtttgtagaagtttttcataagggatgttgagctttggagcttggggacttctttggtgattggcttggcggtgaagttttaactgaaagcactttgcaagaagtccaagaagggcccttggaaaggggctccc

SEQ ID NO: 154783 - DNA, 479 bp, Homo Sapiens
aggttcaacagtacaggatttattcaggatttttatctgggtctgtctgactttaaaacacatactcttctcctagcatattctgcctcacaggtgcttagtctttgcctttgtagcatttacagtacagctggagacccatgatgattacatataaagttcagttagaaaagatgggtagttactttattagtgttcatctgtggagtatcagaatagcagtcagccaactctgtctcatatcatccttcattacttttccccatctccctactcaaagacttgcctctattaagaattttgtcattcttctgtgaaagggtagtgtaagttatataagccctcagcgatacatgcacaaagatgttctagttaggggctaatttggcaagagaaacagtttattaatgtttttgaaaagataagtcatattcatacttaataccattttgtatttgtggtaatattttaatattgga

SEQ ID NO: 154784 - DNA, 589 bp, Homo Sapiens
accattcccagtgcaccggcgtacataacttgaagtaataccacccacaatgcaggtccagtcaggacgctcagtggaactcctcttatggcttgctagtgggatacatagagcactggttacacattccctattttcgacatttaaggaaccactccagccaacagcaaattgcatttcttcctttcctttatcactatatttccattttggcactagaaatacagctttttgctctcgagctatcaccataagatcattggttggagataaggataaaacacaatcttggagccaggaagttttttgtgttttgcaagtatttccttcttcttcaggttcttgtggttcattttcttcccatgctccccaaccatcatcttcccagtctgttgatttactggggtccctccgcaaggcgccgctgaggatctcctcccgcaggtgaggaaagaggaagtcccgggcggcctggaggtcctggaagtagcagaactggacaatggagcaggccatggctccagggaaccccactacggcactcaccttacctcaccacgccctgccccctccaccccactgcggccgc

SEQ ID NO: 154785 - DNA, 537 bp, Homo Sapiens
cctccattgagacagccactttcacaaacaggttgtccacagtgagtccctatgtatcctttctggcatagacagtgatcgtcactgcagctacctccatttcatacagcgaatattgcagtgttgtatggatctggagccacaggaaggagctatctgaccagatgggcaagtgcacatatttggcctcgaacaaaatccatccccacaggaatgccggcaaatggggacaatacactgatttccgccaggtaaggttttccatccagggcaacagtaagcattataacgtgatccacagacattgggtcctttaagcgcgtcgtgtcctccaccgcctcttctcttggcccgactggctctggtttccttcacgttcccagcctccaaattggcgtccgccccatggctcgtgtaggacgctaaaagcacggtaaatcccagggcgatctccagcagacgccctcgacgcatgatgccgagccgccaccggctcccgccgcctcttgccgcgcccggggctcggtctgcggccgc

SEQ ID NO: 154786 - DNA, 878 bp, Homo Sapiens
ttagagagatttttatgttggattattctcctatggggattccccgggccaaatggcaaattgttttcacaattgcccccaaggtttggtatgttaggcaggcaatacaaataattgcaaaggcagattatccctgtaatcttttatgggtctggaaaaaaagcaaccagggaaaggaactcaactgcccagtaatcaataatactaagggtaggggcattcaagtatgtaatcagactgagaaggtctcagcagaattcatctttaggggcataaatggcatttaaactcaaagattgttcaaataaaaatctgaatttgaaaaaaaacaagcagttttctttattgtaaacaaagcagccagtcctttactcagcagggtatacaccacttgctgcagaagtaatttggaaaaataagatttgggctgaaatctttttcacagcagggtaagctaagttagaaatggccaatgtatgcttttactctggtttggttaataggatcctagtgtaagtattcccaagtttacataagccaggtgactgtagattttccatgtagaaagaacccaagcatattcagtcatggcctctagcgggtagatgggcattgggccattgataacttacatttgatatggatacacattatttgactgagaaactcacaatgcacagactccactcactgaccagccccaccctggccaattctgctaagttcttcagaacagctgagtgacaaaggtcttttctggcgtgagaattgtttacagcaggaagctggagcccaaatctgccctctgtgttaccctctccgctctcctgtttctgtataggtatagctgagaatgctttttacatttttcagtggtt

SEQ ID NO: 154787 - DNA, 664 bp, Homo Sapiens
  misc_feature (424)..(619): n is a, c, g, or t
gcacaaccctaagctcatgcattttaacaaaatcggtgccaagagccctcaaagcgactgtcttggaagcggcagccagctcaggacccagaattcttcccaattagtccttacctgggcagagaactgcaggaggtggtcacaagccacacccagaccaggatgggcgaatcctgcaaccgcaccccaggggctcacggccagtaggcggctcacatttccctgtcatcccaagaaactcaaagcccacctcgcttaattcatgatgacagagctttactatacgcccccaaaaacgctccccaaagagacacttctacttttctatctagaaaataacattttaaaaaatgaaaatattttacaggaaataacatttgtacatactcataacagtctcaaagagaaaacgattcctctaccnnnnnnnnnnnnnnnnnnnnnnnnnnnnnnnnnnnnnnnnnnnnnnnnnnnnnnnnnnnnnnnnnnnnnnnnnnnnnnnnnnnnnnnnnnnnnnnnnnnnnnnnnnnnnnnnnnnnnnnnnnnnnnnnnnnnnnnnnnnnnnnnnnnnnnnnnnnnnnnnnnnnnnnnnnnnnnnnnnnnnnnnnnnnnnnnnnnngacggtgggccccggggaccccacgacccccttctcaggttccaa

SEQ ID NO: 154788 - DNA, 610 bp, Homo Sapiens
  misc_feature (421)..(430): n is a, c, g, or t
aagcaacattctgcgtgggatgcggtttgtactctgattcacagctaaagcagtgttagtagtaaaccaaaaatattgctttcacttagtgcgtaggttttaccggggatttaatcctcatgtgaagatttaatttgtcatgtgacccattaacatatatgtatgtaagccctgaactgtgtatttagaaagcaattttagtaaattgaactattttttagacctggaaacgtagcaaaattgagacttctagttcagcatgaaataaccactctaagagcccaggaaaaacatggccttcaacctgctctgcttgttccttgggccagaatgccttcagaaaacggtgagttttaaagtataagcatttttaaagaacattaccttaattttttaaaatcatgaactttttattgaaagnnnnnnnnnnctgaaaacagcagcttggtcacattatgacagatgtgttttttattgctgcaaaatagttaatgtagttaaatataagcacttagaggagcaatgcctggcacacagtgaatgttacatattagctgagctgttactgttattccttaataattaagttctgataattattcagcctgaa

SEQ ID NO: 154789 - DNA, 471 bp, Homo Sapiens
aaagatgacaaattctgggggatttggcatttaaagaccagagccaaattatcccaagagcatacattcttttggttttcctaactttgtgaaaaaaattgatgcagctgtttttaacccacgtttttataggacctacttctttgtagataaccagtattggaggtatgatgaaaggagacagatgatggaccctggttatcccaaactgattaccaagaacttccaaggaatcgggcctaaaattgatgcagtcttctactctaaaaacaaatactactatttcttccaaggatctaaccaatttgaatatgacttcctactccaacgtatcaccaaaacactgaaaagcaatagctggtttggttgttagaaatggtgtaattaatggtttttggttagttcacttcagcttaataagtatttattgcatatttgctatgtcctccagtgtaccactacttagagata

SEQ ID NO: 154790 - DNA, 397 bp, Homo Sapiens
ttagctgagcatagaggtatgcatcttagtcccaccctacttgggaggctggggtgggaggatcacttgagcccaggagacagaatttgctgtgagccaagatcattgccactgcattccagcctgggtaacacagtaagaccctttctcaaaacaaaacaaaatatcatatatgcattaatttacttgcatggtgaagtccaacatgtcaaaaatgaaatgatgagctgtattgtccctatgtctacccagtctactactttgtgttttaaggttcataagactttttgagtgctatgtgtcagtagtctatttacagagttcatccaaagaatttattgaattaaaggatggttctaatggaaatctattgtgttttgttattacatgcacacct

SEQ ID NO: 154791 - DNA, 547 bp, Homo Sapiens
taggctcactgctaccttttacagagttcacgggattttacgtaactaacccgcagtgtggatttaccaaaagatcacagcactagcggagacttccagaaactgtctcatgctttctgacctccagggaaagttgtacccacgacatcctcaaccactggtaccatggaagacctgtccctgcccatttctcaaaaatgcacagctcttccctgcctggagcacatgaagtcccatctccctgtccccagacctttaggctctgttgaagttctggcattgcttatgagacccttcctgtccaaggaaggtctaagtcaactcctccattggactggagatgaggctcactggtgacatcctgtgtcgactcagtaataaatagtcacttgggaggcgatgtttatgcaggtgtggatgttgagttttactatgggaatcattccagcctgacaaaatgtgttttaaggaataggtagataactgggacttcctctgttattctaacaagtcgaagcttcctaattaaactgtccatggatctcaa

SEQ ID NO: 154792 - DNA, 214 bp, Homo Sapiens
gcaatccttccttccatctcggccctctgaagtgctgggattataggcgtgacgacagcgcccggccaaaattttttaaaaataaggaaagttcaagtttactttagataccatagttcaggatttaaactcctgtccttactttggaatgtcattttagatacttatgtgattgactgaggaaaaagacattgtaactgatcttatccccttt

SEQ ID NO: 154793 - DNA, 478 bp, Homo Sapiens
tagctttattctctcttttatttttctcgcttcttttctcctgctcttcaaaaaagtgagtggttgaaccacctaggtgatctctgctgctaaacttctattattgatttttgtttgcttcctctctgccccttgtttcctcatcccgtttttttccctcttcttcactccttccgttacagcttttctcttgcctcaggtacccagtgcagtcctgatctccagctctccagcggcttagaacagacacagaatgggccgggaccagggacccaccagagacgtctgtagttaatagctggcgctcttccactaataaagttttattgaaataaagcatttaaaaaggcgcccgtcattcttcccccagcgaccaatcgaagagtagaatgcctgcgtccctcactggagcttcagcggtcggaacgcgggggtggggcatgtcctgccgaaatttgcgtccttagagcggaagtac

SEQ ID NO: 154794 - DNA, 578 bp, Homo Sapiens
gcaaattcatttttatcatctttaagtggtggagtggccatttcagcttgaaatatttcactgtctttataatttcattccatgcatgtgttttgtgtttgtgacggtgtggtggtatttagtctatagaagaacatgtggagcaggtcaaccaaaactgcatagcagaagattgccacatcaaggttgaagctgatctgggctatccaggtggaaaggcgaaagtcatccataaggaatctgatatgatcatggcattttctgttaataaggcaaattgtaatgaaattgttttggcttcaacacatgatgttcaagaacttgatgttacttctctactggcctgtcagtcatacatatggatcggagaagaatatgacagagaatccaaaagttcagatgatgttgattatcgtggttccactacaactctttatcaacccagtgcaacatcctattcagcaagtcaggtgcatccaccttcatctctgccatggctgggcactggacagactagcactggagctagtgtgcttatgaaaaggaatctacttaatgttaagagaatgacttcacac

SEQ ID NO: 154795 - DNA, 553 bp, Homo Sapiens
ggaaagggagcaggctttgcaggaacccaggtggcaccccttctcgtccctgccacttgttctttttttggccctgggatggtccccaaacttctctgaagtggtgctgaaaactgtgttgatagcacggacctcactgagctgttaggagtagctgtcgacactgtgtacccgaggttctttccagtggaaaccaggttagccttcgattccttttctttcatctgtggttggtcacccttttgagagctctgaccccaaaagaagtgtttttcagattggcccaagttcctccacgttgggccccccaagacagactgactgagaagggagtggagctgtgggcctcctgattccttcccaggctatgtcccttccagagtggtccaggtgggacgctgactaccagaggcctggccctctgttctgaggcccagttagccatggccttcatctgctcacattctgtgggattgggttgtgtaattttcgttgtatctctctgtcctcattaaatctgaattcctccaaggacaagaaggctgctgctgct

SEQ ID NO: 154796 - DNA, 496 bp, Homo Sapiens
  misc_feature (75)..(98): n is a, c, g, or t
tcttaagccagcgcaccggacaaacgcccggggtccggggcccggggcaaaagcgcccagcccggcccctcccannnnnnnnnnnnnnnnnnnnnnnnttcccagtcaccctggagggaaaacgcgccgaggggagacgcgcggagggctcgcccgggaccgggctgcaggccgcgcccccaccgccttctccgcggttcctcacccgccgcacatccacgcaggttcaaccccagcgcggggcgaacgcgcgtcccggccccaggcttcccacccgctgaagccaatgggtcgcacggctccggcgccacgtcctcgggggcgaggccctcagggaagggaccctgctctaagtccctccgaacagtggactgggtgcagggggagtccgagcccccccgatcctcggctggcccgcctcctggctgccagtttgtggggtcccggcgtcccgatccgcggcctctgtttagacggaaggcgccaggacgcagag

SEQ ID NO: 154797 - DNA, 508 bp, Homo Sapiens
tttaactcgttatatttaagcaacatagtttaataattgctataaattcttcacaggacaatagattttcttttcccccaaattaaatgatagcttttctatttggctaaaatcctagactagaaaacaagtgtttcaatagaaaataaaaactgaaataaaacaagttattcccaggggaaattcatatgaattttttcaaaaacaaagtataaacaatgttttcctaggtgacaaaactcaaatatgatggcaaccttgacagttgtttattgtgtgtatagtttttactaagagaataaagtaggtagaattttacttcagtgcccagttaatctgttcaattatttaatctcaaaatcaaggctggttggtaagctcatgttgttacagagaatctaataaaactaagcataacaacagtgggcacctcagacctactgaggcagagcacgcacatcacgacctccaacgctctcccttcctctgctcccagctgccagccaag

SEQ ID NO: 154798 - DNA, 550 bp, Homo Sapiens
caattcataattacatttattataaatacataaattattctcccaaattatttcacttatatttaaatcaagtacaaattattttattttaaaatatgttatggtcacgtgatttaaaagttgggataaacatggcttgaggccccctcccctctcatcggggtagctgatagggaggtgtttctttctgaaatgtaacagaacatgcatcatcattgtatcatttttcacctacaaagatagtattagtgtcttttaccttagaagcaatcttaccttagaaggcccagtagtttgtaataagtagtaaatcatcatcaagcttccttatatattagtcttgacagatatatttaattacctattctatcacctatggctattcccagtactcctctaggtctttgttttctcattggtaaaatgaggaagttggatttcatcagcttgcctccatgattctatcatggagaatcatgatagaacataaaaataatgaagatgatattctaaggttcaaatatttttacaataattgctacaataattt

SEQ ID NO: 154799 - DNA, 413 bp, Homo Sapiens
atgtaaatcctcagttcttcacctttgcactgtctgccacttagtttggttatatagtcattaacttgaatttggtctgtatagtctagactttaaatttaaagttttctacaaggggagaaaagtgttaaaatttttaaaatatgttttccaggacacttcacttccaagtcaggtaggtagttcaatctagttgttagccaaggactcaaggactgaattgttttaacataaggcttttcctgttctgggagccgcacttcattaaaattcttctaaaacttgtatgtttagagttaagcaagactttttttcttcctctccatgagttgtgaaatttaatgcacaacgctgatgtggctaacaagtttattttaagaattgtttagaaatgctgtggcacagggttctta

SEQ ID NO: 154800 - DNA, 437 bp, Homo Sapiens
  misc_feature (268)..(268): n is a, c, g, or t
  misc_feature (287)..(287): n is a, c, g, or t
  misc_feature (303)..(303): n is a, c, g, or t
  misc_feature (358)..(359): n is a, c, g, or t
cttttgtaaaggcataggaaaaaaagactggcaggaaaccttccaagatattaacagtgttacccatgaacactttcctcttctcctccttttctatgccttccatgtacttatgtatgctcctgtaatgcttttaaagggaaaattacaattataaaaatccagaggtgggtggacagtcccacagaggtggtcaagactctgtgctaagagtgtcagtgcaagggttaaacatgtgaccccggaaaagaaaactatttagcaaggncaactcccacagtgggagnactacagtggactagngacagggataggctctctgaaaagaaatggaagcaggtgaagggttcagaaatgnnaaggttgggttgaaaatctatttcacatgagccacccacataatggttacacaccaagagaggttaccctatttccaa

SEQ ID NO: 154801 - DNA, 244 bp, Homo Sapiens
tctttgtggaaatgtcacattggaagtccagaccttttcaaacagccagcgctcctttaggtgtctgtgttccaagacatttgtgaaatagaaaaatggttttaagctacacttcaaatgggctcttttttcaaagaggagactgtctgagcacataaaccctctgtaacaacggctctgtacagagttcctcattcagcagtccttgtacagtgtcttcgtgcatgtaatgctgctctaacag

SEQ ID NO: 154802 - DNA, 651 bp, Homo Sapiens
  misc_feature (410)..(410): n is a, c, g, or t
tttttccaaacacaagtaaagttctttaataaaactgtgatgacagacatgaagcactcagaggaattaccaggaaccgaaaagattctagattgagccccagatgaaagatactgtaacatcggtgggaggtctgaggttttttggagacttcaggatcaagaagtttgcaggaattttctaacactatgattgagtctcttttgttcttgcttcatttccctttctctttgtttattctcttttcttctcgtaactttttaatttttttcaaaactgcaaattcactattgccacccactgccacaccagctgcaaaacctctgagtaacataaatctctctagccaaagatgatgagtgtgtttcaatgatttcctcattaaaggtgctgaagtaatattgacgcgnatatgatgaaatcagtgattgggaacacttttttctcagaaattctgtgagacagctttgaaatgttagaatgaaattttgctgtatcaattactgactgaagtcagccactgaaatgagtgtttctgcagactgtgtttgggctgctagcaatggtgccatgggaatggacctcccatttagtggctttaaaacttcaccacaatgtagtcattaaacagctaattcctttatcttctct

SEQ ID NO: 154803 - DNA, 583 bp, Homo Sapiens
  misc_feature (381)..(381): n is a, c, g, or t
  misc_feature (562)..(562): n is a, c, g, or t
aaaataattaacactgtgttgattttcttatacataaatcttgttctatatttctttagctagagtccaaggagtgggatcactgggttaaattgtgtgaatgttgttgaagaccttgatttaaaaatgtccagccccctcccctataaatcttatacatttcaatctcataaatacccaccactaatgtattaaggagcctgtgttactacactcacaaccattcaatattaccatttcgttaaatttgccaacttgatagataaaaatagtaacttttatttagctattagtgaagtagaatatatatgtttccttggcaaattttactctatcttttgtcaattgtctatttgtgtccttaacttattttttcattanggtgtctgtgttatttgtatccttagcttattttctcattagggtgtctgtgtttttcttactaatttgaaggaattttttttacattaggtgtactaatcctaagttactgtttcttaagttagttgaaaatatgttttccatgtgattttaagttttaattttagtgtgtgatatattntatacacaaagttttttacaa

SEQ ID NO: 154804 - DNA, 557 bp, Homo Sapiens
  misc_feature (44)..(76): n is a, c, g, or t
agcacagcacttggcacatcatgagtgttcgatccatgtggccnnnnnnnnnnnnnnnnnnnnnnnnnnnnnnnnntccaccctcaaatcggcgctgcagttcctttcttcagaatggcgccctcaacgaggcactggggtcccaagtaccaagagcgagctggggacccagactgtttgttgcccgtctggtgtgcgtttttcttccagcctcagcacttggtgctaagtctcacaggcagtgaactctgtgggccacacagaagctaggccctttcctgaaaacacaaagccttgcataggaagctgggcaggaggagccagcaggaggtcccgggagagggtccagtggcttcacgccgttcctctgggctcccgactcagtggcagctcactgagggcttcactgcatggcagtcctgcctagaggccctggtggcccctcctccggccggtgcttgccgtgatgcgggagctcggtgttgtcgcggtagtcgcggcccttggagtgctgtaggtgcagcaccgccgggctcttgactggcagcggcggccgc

SEQ ID NO: 154805 - DNA, 245 bp, Homo Sapiens
accgtgtttattgtctgtgtccacaatggaatgtaaggtctctgaaggagggattcttgtctgttttgtagtgatatttcctcgacacctacaacagggcctgacacagagctgactagttcataaatgaagcagacatgtaaaggcatgtgcgtaaaaagttctcagaggcatattcctatcctggtgagtcaaaaagctgcaggcagggagatggaactcttatgagattcacatactgtgag

SEQ ID NO: 154806 - DNA, 397 bp, Homo Sapiens
ataagcatctaacgtagcagttttaaatttcaaattagcaccaccagaaggaccatcatatgttctgctgagttggcaggcacaaagcagttaaaaagcacgctagcaacatgacaaaatcaagtgaaaatagtcctacagctgtgctagtgtattctaaagctcaaacctaggattcggcctatggaagactcaataaatgaggttggcttatttgttctctgtttaatattatccccttggcgggctaatgtccaataaaatatatttgtctaaacccttgaagacgaagagggcttcctacgcatgccaatggaccctggtctgaggatgtaaatctttcccttattctgaggggttcaaaccccactggtagaaatacctcgcgctttatgca

SEQ ID NO: 154807 - DNA, 379 bp, Homo Sapiens
  misc_feature (197)..(205): n is a, c, g, or t
tttctgctttgctatttaagtcctctatgaccttgtttgtttacatgatctataaggcagagctatgagaattcctcaataattgtaactatgccctttaatttttaatttctaataaatttcattatgcatttttatgtcatttggtacagttttattgtgcattatacttgttattaatatgaaattctcttaannnnnnnnnacttgctttaaattctttgtccagtgttaatattgctactcctgatttctggagaggcagtgtagtgtctttgaacatgcctcagtcagacttaaatctaaattcaaatcatggttccataatttatttactagtttttagcaatccctctgagctttagtcttctcatctata

SEQ ID NO: 154808 - DNA, 569 bp, Homo Sapiens
ttttacaaacaaagtgtgggtatatttggcaggtttgaggcaagcagaaaggagggtttgggtactctataaaaaaagatctgaaattcaaacatctgataaggccacaatgaagagatttccagcagtgggtgttgcaggatgctggcacccaaatcgccgcaggcttgcaaaggtgctatgcaaggtgaggaggcaggtgaggcaggcagtgcctctcacaggtccatgtctgggcctcctgaggatgtcttcagcggcactgagtcaaatccatcaggagtcctcttggaggtaaatgatttgatcttcccaaagagtgacttcttgctggtaaagatgaggtcgtcctctacatcctcgccttccatgatggcgcagctgtcagctgctggcaggtcacagtccttgagagtagcattcatcaccagcttggagtacttgtactctagtttttgattctttttccaaaagtagcaggtcaagacggtgagcaggatggcagtacaggtgcctgcagagatgcccactttcagccagaaatctatggttttgcagatggtgactct

SEQ ID NO: 154809 - DNA, 455 bp, Homo Sapiens
aggtatttatttttattgatatgatatttgtacatatttatggggtgcacgtggtattttgttacatgcacagagtgtataacgatcaaggcagggtatttggggtatcatcaccttgagtatttaccatttctatgtgtcgggaacactgtaagtcctcttttctagctattttgacatacacaatacattgttgttaactacagtcaccttactctgctctcaaagactaaacttatttcttctatctaactgtatatttgtacccattatggtattattttcttaaaaggagattacagatggtaaactaccagatgaagagagttccattaattgttttttactttaatggccggacactgtggcttatgtctgcaatcccaacatttttgtaggtcgaggtgggaggattgcctgaggccaggggtccgagacccacctgagcagcatga

SEQ ID NO: 154810 - DNA, 406 bp, Homo Sapiens
ttttttttccaatcatagcgatttatttggaaatataccttcacaagttaaatcagaccacagcgctactgggcattatttataatggcaaactattgcaaacaatttaaaacctatcatagacatcatagaaactattctaataaattgatacatttatataatagaataatccgcaaccttgaagggaatgaaggaaggaataaagagagagggaaaggaagaaaagaacggagagagggaaggagggacagacaggtgtttaaattggggatgtgcaagcaatattgcctacttcattgccttcacattatttaaaagcatgtggtcaagaaacactattataataagcacttcagaaataacttctaaaattacttttccaaaatatgaatccatactatac

SEQ ID NO: 154811 - DNA, 901 bp, Homo Sapiens
  misc_feature (44)..(99): n is a, c, g, or t
  misc_feature (171)..(180): n is a, c, g, or t
  misc_feature (274)..(326): n is a, c, g, or t
  misc_feature (431)..(595): n is a, c, g, or t
aattaattattatttatttttgagacagggtctcactctgtcannnnnnnnnnnnnnnnnnnnnnnnnnnnnnnnnnnnnnnnnnnnnnnnnnnnnnnncttaggtgatcctcccacctcagcctcctgagtagctaggactacaggcatgcgtcaccacatctggctaannnnnnnnnngagacagagttttgctctcgttgcccaagcttgagtgtaatggcatggtcttggctcactgcactcagctcacctctgctcccaagttcaagcnnnnnnnnnnnnnnnnnnnnnnnnnnnnnnnnnnnnnnnnnnnnnnnnnnnnnaattccgcgaagtttttttggtattttaagaaaagattgggtccaacatgttgggcaagctggtctcaaacacctgacttcaggcctcgtgccgaattcttgggnnnnnnnnnnnnnnnnnnnnnnnnnnnnnnnnnnnnnnnnnnnnnnnnnnnnnnnnnnnnnnnnnnnnnnnnnnnnnnnnnnnnnnnnnnnnnnnnnnnnnnnnnnnnnnnnnnnnnnnnnnnnnnnnnnnnnnnnnnnnnnnnnnnnnnnnnnnnnnnnnnnnnattaaaatgtcgtttgggcctcaacggccccgccttttccaagtccgggaaaaaccttggtcgtgtgccaaacctggcattttaattggaatcccgggcaaaacccccccgggggaagaaaggcggtttttgccgtaatttgggggcttctttctcggtttcctccgggcaattgaactccgctggggccccgttcctttctgttggcgggaacgggttcaatccacccaagggggaataggttcccacaaccgggataaccggaaaaaatttgcaaaggagaagggcagacttaaggcctttggg

SEQ ID NO: 154812 - DNA, 388 bp, Homo Sapiens
  misc_feature (338)..(338): n is a, c, g, or t
atctcatttattcttcatagaaatgccatgaggtagatgctgtcttcattttcattttgtacagggaaacaaggtacagaaaggtttataaccaaacaactagtaagtagaaaagacaagatttgaacaaagtagtctgacttcccagtacatcctcttaatttatccttattgcctgagaaaaagcttattagtcccttcagaacagaaaaagtggtccctggcactaaactcttgaggaaatctatcaagtaggaggatacagaatgtccttattgccagataaagtccagtgttgtgctatatgtaatggagagtcaccagagggtttttagcangggagacgcacagttggatttcaagggtctaatctgatccacatcagaat

SEQ ID NO: 154813 - DNA, 196 bp, Homo Sapiens
gtacaacttttaatttctaagacatttaaaaagtcacactaaaagtatctcatagaaacaaagactaacaatttgtaaacaaaacaatctgtaaacaaaaatcaattactagtgtgtccaaatgttatttttaaaagttaacattataccagttttttcaagtttaaaaagtcggtgctgcatctatgttcacatt

SEQ ID NO: 154814 - DNA, 514 bp, Homo Sapiens
tacccagtcttgagtaaatctttattagcagcatgagaacagactaatatatgggcgaagcatcacaatgactgatatgatttggctgtgtccccacccaaatctcagtttgaattgtgtctcccagaattcccatgtgttgtgggagggacccaggggaaggtaattgaatcatgggggccggtctttcccatgctgttctcatgatagtgactaagtctcatgagatctggtgggtttatcaggggtttccgcttttgcttcttccttgtttttctcttgcttgcttccctgtaagaagtgcctttcaccttctgccgtgattttgaggtctccccattcatatggaactgtaagtccaattaaatctctttttgttcccagtttcagatatgtctttatcagcagcatgaaaatgtatgaatacaataaattggtaccagtagagtggggcattgctgaaaagatccccaaaaatgtgttaacaactttggtactgggtaacaggcagagg

SEQ ID NO: 154815 - DNA, 329 bp, Homo Sapiens
tcaagtcactgaaaaaagttacttttacttttccatttaaattaaaggcttttattcgaccacacaagttaaacctgctcataaagtctatcatgagtctcaattgctttttaaatatatcaaaattggatcctaagtagaattcatatatatatagttttgactagtactgtaactgaatgtaaatcattgcaggacaggaacatacaatggatttgtatcaacttcaccagggaagggtgctagcttcttctgactaggaccataattagttaatggatatgaggtcaaagcatttcataaaaattactgagctcctcctgttcccc

SEQ ID NO: 154816 - DNA, 327 bp, Homo Sapiens
  misc_feature (103)..(103): n is a, c, g, or t
agttatgtggaggaaatgcagttttgttttctgtagatctgttggttgtaaaccatctataaaactaaagctaaaaatgctcatattcagagctgggatcaanaactggtatttaacctttgcatcttcttataattatccttctaagaatataacagaatgtggaagtgtctggactttgagtcttttcaactgagccttctctcaaatctgacaccccctcagaatgcacaaacataagcagaaaaggcaaacaagcttaccttcttttgtgaaaacgtattcattctgtatttttttaaatattcaattcccctaaaaaggggg

SEQ ID NO: 154817 - DNA, 507 bp, Homo Sapiens
  misc_feature (434)..(434): n is a, c, g, or t
  misc_feature (478)..(478): n is a, c, g, or t
tttccaatcacctttctggttttaatggtactttttggccacggaggtccattaggtagagaccattaggtaaagagactcaagagtgtggagtggagtgtggggggttgtgggaggaggtggaaatagttgcaaaaatatctctctgtacacaaaacttagatgtcatagtggattttcccagaacatagcattcacattattgaaaacagcaagattcacttttcctaaaacacaaagccaagaacattaaaataaatatggacattctagagtcctgaaggcctagagaacacatccatagtctggactttagagcagcttagaggcagaagttctgagtcactgaggtccaaggtggagtccagaggaggctgggccccttgagatgaagtccacacagcaggtggaggcttttcaagtctttcagattnacagcagcaacttcaggaggctcaggccaggtttggaggatggnaaagggaagagaaccattgaagaaacaga

SEQ ID NO: 154818 - DNA, 465 bp, Homo Sapiens
acttttagataaggctgtggggagagtccctggccttttgagcatcctgcttgggcacacggggaataacctttctccagcttccagtgtgaactgagaaagagaaagggaaaccctgtctttggagaagctgggatcttcccagcaccagaaacttctgcaggcccctgcctggcccacggctaacctttgggtgggactggagtttcctgaacagggaacaagggagccttccgcagagctctgatgggcaggcctccgagggcctgtgctgtgtgctgttaggatagcttggtgttgtctataccccattagtaagttttgtctgagtgtgtcctcgctgttcattgtctaatttggtaacatttattttggtcctgaccccttctgctgctgctgggtttaagcttcagtgcaggtggaatgacattcaaataaagaaacactttctatcacccaaaaaaa

SEQ ID NO: 154819 - DNA, 510 bp, Homo Sapiens
tttgtcgttgaaatttggattcaattgcctgttgcacttttacattaagtgttgcttaaataaacaaaaatagagcataaattcaatattctactgtctaaacattttaaagcaatggttatgccatcataaacaagtaaaatgcacctaatttgggtcttttgacacctcttgttttaagtttcctgtatgataaagttcttcacagtttaaaatattgtgaagaaatatatttaactatattcacatacatattatgtacatgtactatgtctttgttgtacccataaactttgaatacgtgtgtatcagtaggataccccacacatatggcaggaaccctgaataatatggttggtgtggactgaaatgatttcccagaaaggcttagaaataagaaaagaatattattatgaataattgtaataacagaaattttaccttatttacatagtgcctatctcccaagaggtaaatatgctttacagacattttttagtaactctgtga

SEQ ID NO: 154820 - DNA, 206 bp, Homo Sapiens
agattacattttaagcttagaaattaggtaagttatagaaggtagttctgagggttctgtatctcttaattgcttatacctttaaatgggagcagagaccaccttcgaaagattaaaataggcaggaatggcagcctgccctccaaaacaacaagtagactaggaatgttagatagaattttatagcatcattaattgtcccttat

SEQ ID NO: 154821 - DNA, 171 bp, Homo Sapiens
caaggactaatgtttgggaatagattgaaataaaaaattctccgaaacagccctggatgaacgcttcaaggggctcacacaacctgttccaggacttggtgaccattgtttgtgtccatgttcaattgagttcaaatttaatatttaacttttcctccacaggggctcacc

SEQ ID NO: 154822 - DNA, 491 bp, Homo Sapiens
atccagcgtgaattgatttttaatagcaaaatggcattttacacagaagcagctacattcatggatgaaaacaaaaatccaagtgacgctcctttgttgaatccatgtaaaaatctgatttttaatctacagagaaatttctacccacacattcggtatcccctgggggtaatgacatggaaaacaaacatcttttctggtctgttaaagtaaaacaatgggtccctggatagactctcaagagggcctttgatggaatggaaccagtccccccaccccgaaagcatccccccaactcaatatgtcaccatttacaccagcacagccctcacattgggtccacagcacaacctattaagaaaggattataacacctgttcggattgggaggccaattcctcagctctaagatcctgctcatagcaagcttgatgttcagtagactccaaagcagactgaatgagggaggggtcgaagagaatgtgcctgct

SEQ ID NO: 154823 - DNA, 494 bp, Homo Sapiens
caggtttaataggttagttttatttcttatataccaacataaaaacctatctattcaaggtaaagcaaatgtttttccaggtctcactttaaactgtcttataggagtaacagtgacccagggcactggttttcagtttgcttttttcagaggtgcctccagttccagagggtactcagctcccctttcaaccagagagactcccttttaatctagtttctatattggggttacacataagagtttatataacaaaaaataattccacatctaaaaacacaataatccaaaactgttcgcctagtccgacctgctcactgtgctgccaagacataaccaaggttagggaggagaagtggctgtcttgggtcacacagcagttagaagccaagcccagcccacaatcccagtcaacagtcccccaattcttgccagagacagacagaagttttctccatcctttaaagagaaacattcagcttatggctgggagt

SEQ ID NO: 154824 - DNA, 171 bp, Homo Sapiens
ttttccccaggctgctctatttgtgcctgtagcttgatttttcaggctgtctttcattttgaaagaattttaccaaagacaagttttagctgtctgcccaactagtttttccttttctcctccctcaactggatcataacttatgactctgaggctgagggagaagaaaaa

SEQ ID NO: 154825 - DNA, 358 bp, Homo Sapiens
gtattaaatacattatatgtattttatcatcatccaacaggggaagtccaaccagcaaacccttctgttgtagatgtggcaacatgtggcaaaagccttgaaccaacacccactcttagcaccaccaaatccacttctgggtttttatctgaaggcaattaccaaggatacacagtcagcactgtttttatagcaaaaccctggaaataactgaagaggctgacaatggatagagccatacaatggaattccatggaagctatggaaaatgaaggcataccctatatttacgcataaagatataaagacttgtccaagctattttctgtaccaaatcaatatttgcatgcatatataa

SEQ ID NO: 154826 - DNA, 394 bp, Homo Sapiens
ttttttttccccaaaggaagtgtacaatgagtggcagaaaatccaagtcaaccacagtttccttgttcatgctgcaaagggatgggtcggggcagggtccaagaataggaagggaaaactcaggtgaggtctgggaacgggcgtgggaacaaaggtgaaacgagccagcctgggagacgcgagctgcctcaggaagggctcaaagtaggcccagaatctctcaagggtgagtccaggtgagggacacgttacctagcgccgctggcggggagcttgggattcgcccgggcgtggttcccgccagtgcctcttcagcgcgcagcggcctactgggtgtcagcgcgcaaagtcgcagcttaatcctcgctcccgctggattaattagggcctcttc

SEQ ID NO: 154827 - DNA, 524 bp, Homo Sapiens
aagtgttattaaaaacctttgtctaatcaaactataattgtttcagagattcagataggagacttcaaatgagatctacctattaaacaaaaatgagaggtttgagttagacattcaattcctgatatagatgatctcttatttggtgcatctttttcaggagataaaagcgatacagaaaaacgagagcggtggctacacactgatggggctgtgatgtgctgggctgaacgcaatgacagcatcgaaggcagccagttgccgcagatgtactgagcagatgagagtggtactgctttgagaacccaccaaaatctgaacagtaaaaccaggacagcgagtgaagaagtgagtacagggctgagtgcaatggacaacaggctcacagtcaatgaatcacatggagcactgtggtaactttcacaaggctaaatgtctaaatcttaaatactgccaagggtctaaaattccagctaccctcaacagtaagtggtctccagacttgcaagttacagaataatgcg

SEQ ID NO: 154828 - DNA, 355 bp, Homo Sapiens
cttatttagccatataattttgatatttgaaaaaaatcttcctgtcctattttttcaatgctaccatgctgacctgttcttccttacctctttgctacatatcttcatcaccatccctccaaaagtagatgttctccaatattcaatcttagccctcttactttggtgcaacttccccttaaagctgttgtataattctatgctagtgatacttgccctatgtatccagcagactttactgtgagatctgagtagatgtcatgcttttccttcagtattcctaacctggtcagttgattgcatttcggggccatactaaagatctgggaagtaatcctagttttcctgtctcttc

SEQ ID NO: 154829 - DNA, 193 bp, Homo Sapiens
tttgcaagtatctttattcttttattattcattttattttcatataaattaacatcctagaaaaattgaaatagaaacactaaatacagtattgcacatagcgatctttgttaaatgccctattatttcattggagaatggtaatatacacactggagggactgaaggggacaggaagactacaaaacaatag

SEQ ID NO: 154830 - DNA, 545 bp, Homo Sapiens
agtgaaggactttagagtttgtgttcttcaaacactgtcttctaggttattaaatcagcaagccagacaccagataataagacgtcctctttcttgttcatttgttgcccaagaatgatttgagaaactgaggaagcttgagtagattctgcagggcaagtttgccaaataagcaaaatgaaccatgcagggatgaagctccgatttgggtcttgctcactccacactcccatcaggttgctgggcttctgagaaagcacctaatcttctcacctgtgatcttcaaagaggaagcctcatcgcttgacgcactttgccaggttccagaagaaagaaaataaaacagcaacacagaaagtattaaattggaggacagcacacagagatccaaatttgatcaataattctccaaatttagctggtaaaagatccagatacttgcttttccaagctccttgcagtcagaagtgatctggcttcatgggactcagtccaaccacttttgggtacttattgaaatatttgcagatgaagtgatacaatgc

SEQ ID NO: 154831 - DNA, 281 bp, Homo Sapiens
aagctaattgcctcctccacccccaccacacctgatgcagtccagaggcaaatttctttgttaatccacttatttgtgttatttttatgtatttatacttatagtacgtagcatatctaagctcatgtctgtcttaggaattggaattttagcaggcagagagatcatcaccttaactctgtggtgttcaatcttttagcttccctgggccacatcacaagaagaaaaattgtcttgggccatacataaaatacaccaacactaatgatagctgatgagct

SEQ ID NO: 154832 - DNA, 450 bp, Homo Sapiens
tagatttattattttttaatttacaggatagagatatttttcaaagactcccaatttccatgtgacatgcaccccttccccagattccacattactcataccatcttcagcaagccacaagttctggtatgtctgtttctcttaccagcatttagaaagaatatcaaactagacacactttgcaactacagacttacgactcataggtgcagtcagcatgcaattgctagaacgcagttttaggtgggtaggccttgagtgagattccaaccacattttaagtcttagtcctagatctactaagctgtggtttaccagttcttgatttacgaagatactgaaccaacgtcctccagacaaataagttattattaaaatactgtctaattaaagatgcgctcctataatgaaacacctatagaataattaaaggaaaggacccatgagatt

SEQ ID NO: 154833 - DNA, 542 bp, Homo Sapiens
  misc_feature (111)..(124): n is a, c, g, or t
ttttcattttattgattctcagaagcagaaagcatcactttaaaagttcgtttgttcatgcaaactatatttgcattcttacattagttaagctaagcagcaaaaagaaannnnnnnnnnnnnntcacatttagcccatgtcatttaattgtcagtttctttgacataaagcgcatcttctccacatgggcttcacgtggtttggagatgggtgggggaaaacaatcaggtttcttcaggctgaggaggacttgctcaggccgattccaaacattgtgctcgttcaatgcgtagaaatgatttgcatgatggcatgccgtgatcagaagtcatgcatgagatccatacaccacaggacactactaatctagtcccttgcactgggtcagcctttggacaggacccagccctgcaccgttcactgtatttggagaaaatggtaagagttccataccggctacaattctttgagttcttaaaagtccttcatacaccttctgggtagggaaacaaccaactaattgactaacaccaccaacaac

SEQ ID NO: 154834 - DNA, 451 bp, Homo Sapiens
gggcctcttttcctttccaattcaggaaaaggctttaagtgcctggtatcttgttctatggcacagatctcttgggcatgaggagaaggaaagcacttaaaaccagtttcaggattcactgatgggatttccttccctttctaagtttgttcacgttttccttttctaaaacggaaccaggaaactagactgtattgggttttaagctttcctttggacaaagctgaattaaatgtgtggtgtcactaatactccacatctgacaattcagtaccaactgccagcctgtgctaggctgagtagttgggaccacgccctgccacaggctgggaatcagtcacacccagaaagcctgcctgaacaggttttctgctggtatagctagggtgacagagtctctaactgtctagtcccctttagttagggatgctagaatatttattgccatgct

SEQ ID NO: 154835 - DNA, 448 bp, Homo Sapiens
tttatttgaagagatttattctcagccaaatatgagtgaccacagccatgacatagctcttgggaggtcctgagaacatgtgcccaaggtggttggggcgcagcttggttttatatattttagggaggcatgaggcagcaatcaaatacatttaagaaatacattggtttggttcagaaaggcgggacagctcaaaagcaaggtggggagggggccttccaggctataggtaaatttaaacattttctggttggcacttggttgagttgtctaaagacctgggatcaatagaaaggaaatgttcaggttaagatgaaagattgtggagaccaaggttctttttaagtcttatagtggctccccttggagacaatagatgacaaatgtttcctaatcagacctttaaaaaggtgctaagactcttacttcatctcttcagggttgggag

SEQ ID NO: 154836 - DNA, 487 bp, Homo Sapiens
aaggcacagctttcccagtgtttgtgttccttgcttgcgccctgttttaatgttgtagttacaggtgtccagcagggaggaatgcagcccctgtgggcgcttgggggagctgctgggaatccaagttcaaggagcagctgttttctgttttctgttgccccacagcgccacctcctggccccttggtggtgatgattttgaagtcagcaggttctggtgggccgtgtgaactccagcagctctgggctgagctgtggaaacactgcgtcctttgaaataatacagcttcctgagcccaccccagtccctaaagactgcctctggggttgagattctgagatgcttgacagcatggcttttcccggtgttatgtgtcgtttctatccttaagcctggtaggggtggactggaggctggaccaagctccactggctgcaggaggacccttctgtgggctccaggctggccgtgtgcgtgtggggaggtg

SEQ ID NO: 154837 - DNA, 503 bp, Homo Sapiens
cccagggagttaattcttatgtttgatgataaatcatctttgagttattaaatattttggtgattgcttagatacaagaattgccaagaattagtgatacatttttgatgtttattttcagatgatttaaccttccactctgagtttattaattgcttgcaagtatgtggattacagcgtgggtataataaacttgattttgctaactttagagtgttgcatattacggtagacagagcactggctttatgaagctggtattcaccaaggtttgaatctgagctcatctgtttactctgtggccttggacaagtcacattctacgtcttccttatccataaagtgggaattacttttgctttattggtttgttcagagaatgcgaggcaatgttagtagtacacccagcagtgattaccaggggaatggtggggtcaaccctgccattcatcgcttgcccctgcgttggaaatgccataaccaggtccagttcctgtaggagt

SEQ ID NO: 154838 - DNA, 423 bp, Homo Sapiens
tttctttagccttgatttcctgatgagataggacatacatcatggtttcttaaagttgaccccgcctcctttgagaattggcaagaatgacgactcaggcttggctaacattacctaggctttgctttgctttactgttgaaccagcaataagcagtgcaaagaaaaacatgaggtcaagggtactacaggtgaaggagtttcctgggtgcctttatttctcttagaggtgggtccaaaatttggtgctctcagcagcctctaaggaataggataactctcctagtcacaggagcctcaaacagcatgcagcactttaggtgggtggggggtaagtagtgcagaatacaccaggtctcatctgttatctgggctccatatttgtaatttgttgtaggaggcatagctctataaccaaatttcc

SEQ ID NO: 154839 - DNA, 502 bp, Homo Sapiens
ccccatccttcagttcagctcagacactaactttcctctgaaggcctactgatccccacaattagtccagcaagctaaaagtgagtctggcaaggtgcctaagatacatttaaggggttgctcattctcagggtcatgcaagtgccaacgctgcattcacacaccctgagagtgggtggcttcttaaattttgcctcctcagtgacttgcttacctcttcctagtcccagcctttccttagcagtcctaggcctcctctaaactcccaaagagcttgatttgcacatctctaagggtgttctcttcctagcctgcactgtagttattgaagtacagacttcattttctccccactaagttccttgagggcggcaccacgcctgacccacactggatccctggtgcctctccccgaatctcacacacagcccacgtgtatttgttacagctctttaggttaggactgtctgctcacctgaaaccatgctcaaaggactttcgt

SEQ ID NO: 154840 - DNA, 317 bp, Homo Sapiens
  misc_feature (226)..(234): n is a, c, g, or t
ttgacacatattgccatttattttgttgaggttaaacatataattttaacgtattcaaacttattaatggacatttaaaaagctgaaaaagtgaagagctgtaccatgttgtggattattttaatgttataaaatttcaaaggaatgccacattttaataaaacattttaagaagttgacatacttttattagaatcatgcaaatattagagaaaggttaatggcnnnnnnnnnagtagacattactgagaaaactggctcattatatcacaaaaagtgaaacttggatctcatatataaaggtgtatttcactgaa

SEQ ID NO: 154841 - DNA, 539 bp, Homo Sapiens
agggtgcaagctagttgaatagatatgttgtgcaggtgttcaagaaataatcttcactcctttgcttgcacagaggtgatgaggcttctcccccatttcagcatcttcagggagatcaggccgaagcctcttcagacatcaaggcatctttcatagcaggtaagaatcatctagaatctcttacttgcttttgctttgaagcatttttcttgaggcacacaggcttacccttccacagcctctgtgtgggagttgcctctggtttgatataagtcagaggaatcttggtccccgtaccactgccctctctggagaaaactactcccggggcctcttggaagggctctggatgggctttatggtgggtcttgaaggaagggtccatagcaaggtgccctaatgaccggctgaggctgcgagccctgggtccttccgttctcccctcactggcacataccagagttgaccgcgtctcaggtgttggcgatttgccttttcaagattccagtgtgataaatctgttcattccctttctttcc

SEQ ID NO: 154842 - DNA, 318 bp, Homo Sapiens
tcaagaaagttatatagtggtctaggtggaagggcagtgaaggtgtctggcggtaggtggagggaatgccatcagtccttataacagagattgaggaggggcggctgggtctgctaaaagatggcaaaacagagtaggtagcccttgtgtctagtaaaaaggaaatggacttacccgctacctgaagcattaccctgggctcggcaagggtgagaggggttcccgagtctggcctcttcagtcgtcatccagttggaggagctggagggcaccttcgccatccggggaggggacgccatgtggagacacagcggccgc

SEQ ID NO: 154843 - DNA, 441 bp, Homo Sapiens
agtatctcatgtaatttattgaatacagaaagtgaaaaacagaatggttgtatgggtacttgaagaagtatggtttctactgaatgagtactgcttttgtacatcctaaagggaccactcgtgtgtataagattacagacatttactgataagaaatgtttcctgagaagaggtgagacagagtccctgccaggtaaggaaagggccccgagggatagaaatccatctgcattaacaaaattcctaagtcagaaaagctaactgacaagaaacttaaccaaaactgcaattttgaaggaaaatggacactagtgagattaccaaaagtagagcaaaaatagcaggcagctcacttttacacagaacaagttgttctaaacaagttctaacagtcagcaaaaaataacaaaatacagatcttcatgaaaggattccttttcc

SEQ ID NO: 154844 - DNA, 464 bp, Homo Sapiens
tttgtggttttcgtttctcccctgtccacccccctactcccatttcaccccacattatatattacttttaaaaacactatcaaaccacccagaagataaagtcacactggacttgggagaggcacaattcttttgtatactgttgacaaacagccctggaatcacaagttatacagagaaaacataagtgagcattacaagcacgaacaggaacaggtaaacaaccagacagaggagctgacactgcataggaaaaacacagtccagtcagcattgaaagaacgcagcaacggcaccagtgggagggtctgttttcccctccccgctttcctttcgtttgtttttggcttaaaatttctgctttgaaaaattaaccaccaatcattttaagaagcttggacttgttttggccctactgcaatgccattacagtcgagaatatactgtaaacaaccttgaggggg

SEQ ID NO: 154845 - DNA, 464 bp, Homo Sapiens
taattttttaacagctttattggcatataattcacaattctcatttaaaatgtacaatttattgatttttagtgtattggtagagtagtgcatgcatcaccacaattttagaatgcttttattattctaaaaagaaaccacatacctcttagctgttgcccccaaaacctccatcccagccatccctcaacaaccactaatctattttctgtctctgtagatttgcctgttctggacatttcatataaatggaaatctaccttttgacttatgaataatgctgctgtgcacatttatgtacaaattttgtgcggacatatggtttaatttctcttaggtacatacctagtgatcatactccccatttgaggtaatgccaggctgttttccaaagctgctgtgtaccactttacatagccactagcagtgtcttctaacacttatttgtctttttgattatagcc

SEQ ID NO: 154846 - DNA, 380 bp, Homo Sapiens
gttaatttataaagaaaaaaggtttaattggttcacagttccacaggctgtacaggaagcatggctggggagtcctcaggaaacttacatcatggaggaaggcaaagaggaagccagcacgtctaggtaatgtcttcattgttgcagttacgttaatgaggttttacttgatctctcaagtcacctgtttggctctcttccaagtgtacttttctttcattcctgctctgaagctttttaataaacttccactcttgctctgaagcttgcccgggtctctccttctgccttatgccccttggtcaaattctttcttctgaggagacttgaggttgctgcagacccatgcagattcgctgctgctaacaactgcattctag

SEQ ID NO: 154847 - DNA, 905 bp, Homo Sapiens
actcatggctaaagtttattacagtgacacagtaagtgtacacagttggatcatacaggaaaaagacataagcagaatctggaggaatccatgtgcaggcttctttaggatctctccctcccatgaagattcacacagagcacatttttatacgagggatgtttctgcctagggactcagtatgcaaggttttcattgggagtttggtcatatagacatcctttacctggcatgtaccaaaattccatactcccagaaggaaagcaggtgtttagcataaatcatcttgtttgaacagtctaggtacagtgaaccacctttattagtgaacagtgagaatacccctaaatccacgtgttcagataagggccaaccatgcaagtaggccactctaaaagataccagcctcaggccagatataactttttctgcacacccccaattcaagattcattttggccaaaaagcagcatctctcaacatatatatgtagatacctatggtagagttgaaaagattgtggatcacttataccttatccaagtagttatgattgctttccttataaaccttcattgaaagcagctgtatgaaaggaataggaattttgggaaacacatcttttaaaattcaaatcagatcatggaactcctctgctcaaaactgaaatggttcaccattcatttagtgaaaaccaaaatccttacaacaacctacaaatccctacatgatctggcccctctggcctcattattcctttcctcctcttccttcaggtccaacaaccctgaacaatttgcatttcttcagaggccagacacagtcctgcttcagggcttttgctcttcctaatcctctacctagaatgctcttcccatacctatattgctcactcccacatttcc

SEQ ID NO: 154848 - DNA, 851 bp, Homo Sapiens
gactccacatactttattataaaatactgcccaacttgacagttctggaatccagtgggggaatataaaggtgaaagcaggagagacccctctgactggaaccttttacctcccagaagccttgtatgcaaaaccagtgggcattcatttgtatgttattttgcatcccgtttgcctcccagccttcagcaggcccccgaccctcccctggccagtttccaccctgactgccccctggctggctcccattgagcactgtggggctctccccaccattaggtgacagatcaggaacaatccaggctcaggctctttatctgtgctctgcctcccacctggcaggtccactggccaggcttttccagggtcccttctctcccaggtctgccctactatttgtcctccccttccccctcagctggtagctcgataagaatcaataggtccactccagagcaaagaacacagccaaatgtgtcataccaggccctgccagaaaaacgagctgctggagctgacaaacttgaaggccaaacacctaagggttccccccaacacttcattcagcagggatggtcattcagcttcagggggcaggcagcatgaaagcctccctacctccatccttctcacacagaggctggggagagcatcttggaggatgcagtcccctggggccaggcttctaatccagacagcccttacaaggggggacaggggaaggactggcttggagaaaagtcctagaaaagaggggaggggcactggccaccagggctgggtcgctgctatgatggtcctaggagtgcctgcctgtcctctcaggccccatgcgatgtaggacacattac

SEQ ID NO: 154849 - DNA, 500 bp, Homo Sapiens
ttttttgacaaacaacccttttaataattagataagaatgaatctccattagccgtttggggccatattaatggggacctgtttgtatgttttttgtgtgtttattttcctgtaagaggttataatatttgtgctccttgcgcttgcatatgctgttacttcagacttgcttaccaagtgtttggtgaatgaacttataacttgaccctcttaattaacagggatttaatatctggggcacctgactctataggctgatggcatgctgggcaacaatgaaattggtgattttaagagaaatgtagccagctcataggctggcattcctgagcactgactgtgcctgcacttgccctgagatcaccactacatttgcccatttgccatcagaaccaccatgaggtgggcagccatgacccccccacagatggggtctctctacataggaggcatcacactggactcaaccttgccatggtccctcatcctccatcctccct

SEQ ID NO: 154850 - DNA, 595 bp, Homo Sapiens
aggaatgttatttttcacagggcttccaagtgactgtggaaaatcttgggaggctttgctttggactttgttatccatttagggactggctgttctgaattgttctctgtgctaggccttatctaaaccgcttgccttaaatctttgaccttcatttaaattgctgacactttccccatgtgaaactgtatcataatttcttctgtcttctttaggctagcagcatttccctttcttattcccagaagagctcagagaagcttatttttttagatgagtgatgcataaaaaggaatgtggctgcacaattctaattatttcataaagttctgaggtatttttagggtgttgcaaagtgctaataaaaaataatcatattcatggacatacagagtggaataatagacactggagactccacaaagtgggagggcagtgagggatgagaaattacctgttgggtacatcgtatactactcaggtgacagtcacactaaaagcccagactccaccactgtgcaatatatacatgtaacaaaaatgtaccctttaaatctataaaaaataaatcctttctagcccagtttgctaaggg

SEQ ID NO: 154851 - DNA, 452 bp, Homo Sapiens
actgtaacgtaggtatcttttattggctgtattgaggcttaatgcatccattttaggtgtacaatttgatgagttttgacaaaagtatagtcttgtaaccacaatcacgatgttcatgacacagaatattcccatcaccccaggaagaagttcctgcctttttcagaccatcctcccctcttggcccctggctatatgttttgcctttactagaatttcatataaatgaaatttatgtaagatgtaatttttgtctggcttctttcactgagcacagtgcttctgaaattcgttcatgtcatcagtggtttgctcttttctctgctaaccagttgatgaatatttaggttgtttatgactattatgaataaagcgtgtagaaacatacatgtacaattatttgtgtgaacgtgttttcatttctcctgaggaaatacctaacactggaattg

SEQ ID NO: 154852 - DNA, 792 bp, Homo Sapiens
  misc_feature (624)..(624): n is a, c, g, or t
tttgcttataacagtgtgcttatttattatacataataaatataattttagtacttaataaacgttagctttcattaaactggaaaatcgggtggccctttcatggctacaagctaatttcaaagcaggctgagtcatctttagatcagtcattctgtttaaaagatggcaaatgtatgcctgtctaacactattcacctttctggcagacttacctcagtccctcaggaagccaccagtgcactggtgttcacacaaggcaaaacaaattatttgctactctttttctcattctagctctcacacccaatttcaagcaaacctagactaggatgagatgaggagacagctaggattaggtatgtaatggaaggtcaaagaggatcagaggtagttagcccaggactcaagcctcaagcaagcttgagttacttggagatttcagacaaggctgccatttgaatcttcctcaacctgctgaccactgggcagagcctcaccttatggaactgtggagggtatattcgggcagccccatggttcaacaggagctggtagcagatctcaggctgggcagcagggcgcacggaggtgaccttcagcacgtactggatggcagcacangccgttgatatccatgagattgggcttcggcgccagcttccagcatcatgtgcatgagcacgtggtcacagttccaggctgccttgtggaggggagatttaaagtcgtcatctcgggcattgacttcggctttgtagtcaagcagcatgcggcagacccagtggtgct

SEQ ID NO: 154853 - DNA, 534 bp, Homo Sapiens
aaagacggggtttcaccgttttaggatggagtttttaatagggggtgttgcacattccttagaataactcacaggctccttagcttcctcttttggggttctgtacatatttgtttcaggggtacagaatgaatcacatggctacagcagagcactcttgcatgactcttgcttactcattaaagaaactcgtacatgaatcaaggctttccttatggtctcaggctgttcttcattccctgaaatggtcagaacacccatcaagtatcttggaagaatgcatatctttaaaggccataaagaaagaacgtttggttaaaaggaaaaactgctctgccgcccacttgtctgagttctcctttcttcatctttaatcaatatgtacatctgttcacttgatgttttaatactagttgaggtaaattcagcttcatcatgtttttccacagaggggaaaaaagtaaccctgacttttcctctgggccttttcaaatatctacatgtagtggtggaatgagcggaggacaggaaaga

SEQ ID NO: 154854 - DNA, 736 bp, Homo Sapiens
agcttagtatatagatagtaaaataaagacgatgcccttttattgctacaattctatcacttttacaagctctagaatggtggaatgggcgaacaacactatcactgagatcaaacatgtattctactttgggttttaaaaggcagaaatgacgaattaaataggttagccactcacaagctggccttaagcaaaaatactggaaaaacagaaaatagcaggcatctgccagaaataaattaggtcttgggaatgatcttgtatctgaactaggatccccataccctttctggtactctgaatttattttaaaggcatttctagataccttctcttttaggcaagggcctgtcctgtagcaaatggagttacctccaagactgttgtatctctgttactcctgaagcctcagaaattttagtcattatcatttgatggctgagaaacaacctggctggcgatagatgctgaactacttcctttttacagtttttgttcttttaatttacctcaataagtcctgcccctccaaacaataagttaaaagtatgctgagttagaatgttaatggatttggttccattaatccctaaaccataggagtggcaaagtggttgagagagaaacaattttatttttggcctttttattattattctagcattttagggcttccactcttttatttttagatggttaactcatagataatacctatttgccctcgttccgaatt

SEQ ID NO: 154855 - DNA, 507 bp, Homo Sapiens
actaaaactcttttttggatggctgtgcatttggaatccacagtattacaatgatttctctcagcagatacaagtgatgtaagtctcatttgttgaaagtgtgtggtgccagcttaagacttaaggggaaaatcacagcactttgaaaaagatgtaaatgttcaattggtaaaaaaggggaaaaaaccgtgctaaaacatgtgcctatttccattatgcttaatttactattcaaaacaagtttttcctaataagctctattgtttctttctgttttgtaaaatttaatatgtgtgagacaaaaaccagattcagaatgtgaatgaagtctgtttagcgaaagattgtgggagcttacagttcaagaaggcctcaaattaaaagaaacatcatcttctatcaccaaaaagatacaaagaagcaagtttcttgggtcatttctaggaccagttcctagattgccaacttcctccatcctcagagctcctcatggatgaattcacacac

SEQ ID NO: 154856 - DNA, 395 bp, Homo Sapiens
  misc_feature (358)..(358): n is a, c, g, or t
  misc_feature (363)..(363): n is a, c, g, or t
ggccagaaacaactttaaaaagtcatggtttaacaaaattagaagctctcatatatgcaaatgaaaattccaaattttggcctcttgtgaaaaatacagaagacaggagatactgggtctgtgtcctggaggcagcacctgaggggacatctgtcatggcctcagatccaggcgcaccaccatccccctaccctcacacctgtgtcatggcctcagatccaggtgcatcaccatccccctaccctcatacctgtgtcatggcctgggctccaggtgcactgccatccccctacccctcacacctgctccccaggactccatcttcctgaaacatatgccactcctgcctctctcctgngttgngtaaaccaagagactcaagagacagctgccat

SEQ ID NO: 154857 - DNA, 354 bp, Homo Sapiens
ttccattacaatttcattctgttgtcctgctctgacctggccagaaccctggtcttcgaacattggctgcaaacatagatgctcagaaagtgtaactgttgaatgactcacttgctgaaaatgaatttaatattttcaaagcaaacagctaagaaagccaacaaagttgctttaaacttgtttaaaagttgtaaaaatcaccctggtttgcacccaagtcactgctaaggggcccaatggcaggaaacatgcattggtgggcacactgctttctgaccattcatcccgataactcaggaactcactgcaaacacgcaatcaagtggagaagacggaactggctgaaaattaatt

SEQ ID NO: 154858 - DNA, 404 bp, Homo Sapiens
ggcttaaaacatctttttcttgggaagtccaatctgagtccatgagccctccatgttatagttataccatctagaatttatggtgtccagcattgctggggaagagcaggcatacaggggaggctcgtcagtgagtgactgccgaatctcagaagtacattcttcctgctcattgttcattggtcagttcttacgcacatggccctagaagctgcaggggagcctgcacgatgtacttttcaaaactatatacccaaaaaaagggaaatgaagtagaatttggtaagcatatagggttgtctctactacacaggtatacttaatcttcatttagtatatattagtaaagccattttggtatgctcccctgaaattgagaaaatgaatttctccagtgacaatat

SEQ ID NO: 154859 - DNA, 409 bp, Homo Sapiens
gttttcgagcaaaagtgtttatttttcttcttctgatatacaatctattggggattccgtgtccactgatcaccatgtataatgaagtgattcatcaggcaaggtgggactggtgatggcatcccccacttcactcaaggaacaggtcaagggggcccagtacagataacagaaatctcttacgatagcatcgtgccctgtgagaagattctgcataatcacctagaaaattcaattctaactgaattgatggaataatagatttgaaccaaaataatttacccttttctaataagtacagaaactatacaattcacagctgggcagtcccaagcagtctgctttccagtgggaggtggaggaggctggggccttcccctcccaccaagggctgtgttgtgcccactgg

SEQ ID NO: 154860 - DNA, 337 bp, Homo Sapiens
ttttgatggagaatgtttaaaccatagcgtttgtattttaagtacactatgatgtatagtttgcagtattgactgacacgtggactggcttgagcctttgcccatggctctaccaagttaacaagtagtactgaagggaattgtctcgaggcaactcctcgtagctcgtggcttttataattgaaatagcatcaatatattcccaccctgtggaaagacataaacgtgtgtggacctggttatgtctgaccttgtgctgttcacaacatgccttgagagagaaatacttctgaattgaggcctctcacacgatgggtacagcaagtgctaataaact

SEQ ID NO: 154861 - DNA, 556 bp, Homo Sapiens
  misc_feature (32)..(32): n is a, c, g, or t
  misc_feature (42)..(42): n is a, c, g, or t
actggttcccaaaggagaagggcttctctttncaggcacagnttgtgagaggtttaaataggagccagaatagtctccattggctttaaatctcagactggaagagtatttctttgggctgaggctctccatcatgttttgggaatcgttctcaacagaatgcaccacagagtcttcctctaagctaccattttgtaaatctagctccttttgtatgtagctatgctcttccataatcttgctggaatcgaaatgttgcacatcaccaactccatcttccttgggcacctctctcttggtatcctcctcctccatcaggatcttctgctgaatctcaaaggataaactgggatcagtgccagccttgtctgctgcttttcaatcccgactcttccctcagcttctttcctgactcagcagggatggcccatggctgttccagcgattgctgaagagagtgggatgttgggaacacattaacacaggtttctccttttccccaagcatgaaggtgaggttcctttccatttcctttcctgctctctctggcctctgc

SEQ ID NO: 154862 - DNA, 447 bp, Homo Sapiens
gtagagacaagtgttttctagtatactaaacctatagtggtaaaagtgaaaaagataaatgtttttgttgtttgagcagagaaatgttttggacttaagatgttaaacacacagaaaatctttcaaaccattcttcttcaaagctttctctgtggctgggggcgagaggaattctggaaagaatagtcgtacccattttggtggaacttcctgaacgtttacacgaggcatgatttttgagagatttattggcttgccagctttgagtgtagttgctagttccttgagcaaatgtatatcctgtgtcatagcataaaatattaattggaattccagcaaatatccagatagttgggaggggaatagacatggcagccttttttgcttaaggatgatgacaattctgtcaacaaaaagctagcctctagcatcctgcaagttggagtt

SEQ ID NO: 154863 - DNA, 400 bp, Homo Sapiens
ttaggtaatctcatcaataagagtgttttcttggaaaggaaccagtgagcagtgtttgtgatggagcaaagcacggggtatttacactgtggaggaaactgctgctatgataataacagctaaaaacctaaaaaagattagtttggctgctaaagcattcctttcccagctataattatctctggcttttgtgaagttgctagcacagcaactaaacaattgctttacagagttagattagtggtgcaatttcttctctttcatctccccttccctccccacccctccaccaaattatggcactactttctgttctggaaagagattcctcacagcagtaaaatcaacactaatgtttattgctctactccaggatgtttttgttttgtttctcgtcatt

SEQ ID NO: 154864 - DNA, 477 bp, Homo Sapiens
agtaaatttttttgagtatatttgaggtttataacatgatgttgtgggatacatacagataatagttactatagtgacacaaattaacttatctgacatctcacattgttactttttcatgacaagagcagctaaaatttacttaacaaaaattcctaatacagtacagttttagtaactatagtcttcaccttgcacgttagtgcaatgtgcacatggataaaggacctatgtgttgtcaattaatgatgataagcaccttttcatatacctgttggccatttttatgtcttctttggagaaatgtttattcagatcctttgctcatttaaaaaagttctgctattgagttgtaagggttctttatacattttagatattaatcccttatcagatatgtggcttgcaagtatattatcctagtccataggttgcgctttcattttgttgattgtttcctttgttgtatagaagttt

SEQ ID NO: 154865 - DNA, 472 bp, Homo Sapiens
cctataaatacttcaaatagttaagtgaaatgtgcagcctttgaaaactggagaggaagccgttgggagcccccccgcccagccggcctggaagagcaggcagagaatatgctggcgcgctcttaaagcgggagacgagcttcgccctgcccaagccagatgggtgcagcgaggctgcgggcgtgactccggaagactcaaaccgttaaggtgaccggagcaatttgaaaaaggaaacaaacttccctcgagccgtgcccgcgtggctctggggcggacggttgcgttcgaaagggcatttttcaaaagaagggtttcaggaacgcaggggtgtgggccccccgggaggcgcgcggccggggcagctgcaaagcgccaccagcccgctttgtactgcgccaagcgcggccccagagtttcgcggcggccagagtttaggccacaccctctttgcagtgagacccgcggccgc

SEQ ID NO: 154866 - DNA, 471 bp, Homo Sapiens
  misc_feature (432)..(432): n is a, c, g, or t
ccaccacacccagcctctagctgtttttaagtagcacatcgatcagtcgcttctgttatagccatttcatcagttagtagagtcacctaaagaggagtgaaatttaggcattagctcctctaccctcaagtctaggaagtgacctggggtccttgctgtaaattatatattaatgtgaattcctattcccaggtgagtgttcttcaaaactttatcctcaggaaggtctatactgcccttacatattgaatatttgtccagaatgttctagataacagatagtccagaaattactacaatttcaaatgtaatctttattatttatacagcaaacttgtattacaagcagatccaagagagaccagtgggaatgatttgaaaacaatgtatgttgctcattacacttaaggaacttgatgaaattcatatcanactagcaatgaaagcattagcaacagagctggtggacat

SEQ ID NO: 154867 - DNA, 461 bp, Homo Sapiens
  misc_feature (385)..(385): n is a, c, g, or t
tacgtttgtaaataaagttttattggcacagcagcgctcgttcattcatatgccattgacatctgctgttgccctacacagcagggtggggacctgctcttcacgggagagctagttgtttaaagcagtggtccccaaccttctgtggtcccccgtggttgctgaggcacaggctgtatggctgcagtgccaagaatatttcctgcctgacccttcatcggagaagcgtgcccacctgtgctctagattccccatgactgacatttagccactctcctctgtcactctccggggacgtgcacacaccgttggcatgaactgcagacgccacgctctgcggccaagagcctcagtgtgcatctgcagtaggaggacgtcagtgagngaccgccccgtccctgctgcgctggtgctgactgtgcctgcagttgactgtgcctggagtctacaacccaggtcgg

SEQ ID NO: 154868 - DNA, 466 bp, Homo Sapiens
acacaattccaaaaagaaatatatccactgcttttagaagtaggtgtaaatgtgtagataaaacatgagattatcaggactaacagaaccataattattattaaagcaaatacttacatgtgccatgcactgtcctggtactttacatgtaatcctctcaacaatcctatgaagtaggaactattattatcacctctgtttcatatacgaggaacttaggtataaagtgagtaaatatcttgcccaagatcacatagttaagtggcagagccaggatttaaattcaggaagtatttgctcttaaccactaaactatgctgcatataggatgctccaaggaaaaatgtaatctatggaactgtggaactactacaggagattgactgtagtatcttttatcaagggatgtaagattacaaagccctctgttgcttatgcactttctatactggaactatcaatggac

SEQ ID NO: 154869 - DNA, 550 bp, Homo Sapiens
  misc_feature (528)..(528): n is a, c, g, or t
agagatctatattcttgagtaaagaaaaaatccatctttctttcctagaggggaagagtttcagagctgggcttggcaacagcctgactatcagaggctgaattaaacaaatagatacctccctggagtgaatggtgcgtttctcctgtttggggaaccgtgcttttatggggcagtttgcgttctgtcttggtctccggatgtgtgtatctgtgggtggatgtctgcatgtaaatggaagtgtatacctgtgtgggtgtgtacaaaattcccatgtgaatctcagctttgtggggatctccagttcttgagcccagtagatgccatttgaagaaaaaaatcacttgaaaatgagacagaaagaatagaaactaaatcctagctctaaaggcaccaggctgattaaaaatgaaaagtaaagtcttttccgattttgaaccccccttcccattttgcaaagttaaccacaactaagtttcacgagtgcgtcattcggaaaattcattcggaaaattagacaggaattanagggggattctctgcatcatct

SEQ ID NO: 154870 - DNA, 463 bp, Homo Sapiens
gaccctggaaacaatacacaatttgcccattcattaatttattaattcactcaacagacttgtacatctgccataagtctgacaccatcctagttatcagggatgtagatagtcaaaagaagatgtaaacctaacctcatgcatctgtgaatctccccatctaaaaagacacagccttgtaaagaagcttgtgtgaaagtgctaacgacagacatgccaagtgttaaggggatgcaggagaggcgtggtaaaatgggttgggaggcagctcagatgtctaaaggggtcaggcagacaatgcagataagtgaaagagggccagttgatgcagagtggggacatctggaaagcacccgccccatctaaaggaggcagcctctgagagtctggggatcagggatagaagggagatgtacttttcactgtacatccttttgtattttttaaattttgttacttaatt

SEQ ID NO: 154871 - DNA, 577 bp, Homo Sapiens
ggtttaattctcagaaaggaaggactgggacttattgctagtgaatcaccatttctcctgttacacccttgagctcctgctttagctcccatctcctccatgggggaacccagctgttctttcactgtagaagtgaagcttgaacaaagatgtcatgtggccagaatcatcttttagtctcaccactccacactgatggtcacatagaggtgtgagttgggaagttgttaaatacaagagggtttgagcttctggagaagaggaaaatgtaaaaatattttttcctttaagaaagataaaaaggtaagcctaaaccttggcggccaccgaagtcagctgttacgcatgtgtagttaaatttcactgtaaatatttcataagggttcttagaatggagccaggttgacatcacagccccaactgtaccaaaggaaccatttcattaaaataagccaacatttccaaagaaacacgaatgtctatggcagagttaacataaggtcagaaaatcctctggaagaaatttcggtatcaatgtttataatctctgcatttatggatttgcagtttgtgcaaa

SEQ ID NO: 154872 - DNA, 494 bp, Homo Sapiens
  misc_feature (348)..(358): n is a, c, g, or t
taatgtctgtctttcacatacttccaaacattacataaattattttacctagtgcatacaactttcaaaaactgtatttggcaattaacagacccctgacaattattaacaggggttttacatcccggagtttgagtgtctgcgggagaaccgtccctgcaggaggcactccccctccacctgcgacccgggctgggagaacgcgcggagggctcccttgagcggtctccgccagcgaggctttcctcccggtcggtgttgacagtgtggcatttctgttatctaatttctggttttgactgaaagcgaagtgagttttctcatcagtggagttgtaatatttctgcnnnnnnnnnnngatcacagccctccgatgagccgggcactatgcgaagtctccggctgcctgcgggccgctgtggacgccccggcgggggtcaggaccgacccccatctgcgcggcgaacgagcccggacgccctggccgcggccgc

SEQ ID NO: 154873 - DNA, 273 bp, Homo Sapiens
  misc_feature (184)..(218): n is a, c, g, or t
attctgctgcacactcaagttcaggaaccaccggtatagaccattaccttagtggatttacctgtagagtttattggatcctgaaaccaatcaattacttagaactaggcaaagatgaaagtatagccaactattcttggctatatatatatattcaagtgggccgggcgtgatggctcacacnnnnnnnnnnnnnnnnnnnnnnnnnnnnnnnnnnnagatcaccgagcccaagagttcaagacaatcctgccaacggcgaaactctgtctc

SEQ ID NO: 154874 - DNA, 672 bp, Homo Sapiens
  misc_feature (517)..(517): n is a, c, g, or t
gacagccccacctccttgagctttatttacctaaatttaaaggtatttcttaacccgagtgtgtgttgggctttttttctgggtcctgtggcaggatgggtcctctcttcctgcagttcaactggtgtggggaggggctgctcacttcagcatcacctccactggatagtggtcactgatggcttgggccagttggtcactcaggccataggcagcctggaagttaaagggaagagccgagtcgggaacaacggcgcctcggagcagcatccctgcaaccacgatcctgtcataggcacagtgcgtgggtgtagctgtggtgtcagcgctgtcggggatcagccactggaaggtggggcttgtccacaggcggatggatgaccactgggagggtctcacatagctgcagcccgcattgaagtcgcccatcaacatgacgtcctccaagccccatttctgcttggacatccaggtagacgtcatagagagcgttgatctcggctactgcgtcccccanggccgcatgcaggggaacaatggcaaactccctgacctctgtgaaccgggagaagaacctgacaatggctggctctcggtttgaggtgtcttcccgcagggctcgcagccatcatcgtagtagtagctgtccaccgcagacacctggtcggcctg

SEQ ID NO: 154875 - DNA, 434 bp, Homo Sapiens
tctcacattttttcactcttttcaccattgctcttttgggttttgtcttggtaatccaatacattctccaaagaaactttagccaatgtgccaccatccctctcttcctgtttcctgccttttttgttgtagttgctttgcttccttctgcctgtccttttcctcaagttatttccggacttcagcttctttatatcttagtttaaggctctcagagagtctttcagcttcttcaatggcttttttgatgttttcagttccaagtattgaatggacgtaatcctcttagtgcttattttctctggtttaacttctgtcttcttattgaggtcttttagtgaagaactcaggtagagttctttaggaactaaagccacagcaggcatggtgaattatctttacttttccacgttcacgatagatgctatatttcc

SEQ ID NO: 154876 - DNA, 451 bp, Homo Sapiens
cagcttagagccgtaatgagctgcctttgcacaaaggcagcaaaagtggtttccctacagagttatcttctcaattatttatacttgcaacactttcacataatggcagttttaaaatcaaacaaacaaagcaaactgtacaataaaggaaggaggcaagaaggtgcagggaccttttcctttcttttttgaacaccagaagggatgggcaagccacataaagtcaatgaatttggttcctggaaaagtctcaggggccttgcaatgaggcgacatcaaagcatttggagattgccaccttggtgagagattaaacatgctctgcatacctgctttgcttttaatctgtcatatctaaatatatgaaggaatgcaaactttatttcttctgtttgtaagtttgtctttgaaaattcctaatcagaagacttgctactcaccccccactcct

SEQ ID NO: 154877 - DNA, 575 bp, Homo Sapiens
tccgtgagcatgggaaaatatttctgagcgttggttgatggagagccgtgatttttttagttaagatcattttaagttatgatgcttccgaatgagcagtgcagaagacacatgaatggtctgttcctgagcgtcagggaaggcatgttgtgtcacatagttgaagtcagtggtcacagacggatgcctcaagagcccataggaatgagatgttttgcttgcggtgaggtcatcttgctgcttcaacacaaatgccaggctccccgagctaggccaacttgtggataagcccagccagagcacagaatcgagtttaaatccagccttccaccccatgctcacaagtggtgtactttagaaatagttacttcccagtagcaccaacatacttcccagtagcaccaacatgaaaatcaggcaaactgttgttgtttagtcccagacacacctggtagtgtttctcttctctgtggatctcctttcctcaaagccctggttcttcacctctcatctctcccgcccaggctgtgcctgccctcccaaagtgctgggattacaggcatgagcaccgcacc

SEQ ID NO: 154878 - DNA, 607 bp, Homo Sapiens
tttatttttcatttttgtagagacagggtcttcatatgtgcccaggctgatctggaactcctggcctcatatgaccctcctgcctgggctcccaaagtgctgggattacaagcaagagtcactgcacctggtcatgaagtagtgattctgaggttacaggggtgccattcccaaagacgtttatcccttcgtgtccctatctctggggtcaagaagaaagtgacatgtatttatttgtcttcagtctgctaaggaacattcatggagaactttgacttggaatatgctgttgtggtcaggaggctatttggtgtgtccatcagtaggatttagaattcaacatgaggctgttccacgtgtctctttcttggaaactctgtgctgaagtgacagtaataaagagggacacgtggctagcagggccgggaaaatccacggcattggaatttgctttgcatatggtaagaaaggagacagctccatgctaaaggccaaatagaaatgttgaccacagacaccaacactcttatttcccatggacaggctgccatgtctgacggatgatcaaagttactcgtagacatgctaggtttcttgtttgttttgt

SEQ ID NO: 154879 - DNA, 378 bp, Homo Sapiens
tatgacctctggacacagattttggcctcatataggaatgccaccattacatatgtcctcatttgacattactctctaacttaacatgagcatcttagttttgtggtcttcagtttttaaagggatgctctgaaaacactgttctgcagtgcactgtgcaacctttttcactcctgggtttagctgacctcttcttgtgctaaactaactaggaaaataaactaggactgattatcagtctctttacctaaatcttccttttcttcccacactgtaatcatgattatttccccagacagtctctatttctctacattgcactgccatagactaccctattagcccccctaaatgtagctcttttggtttgactttagt

SEQ ID NO: 154880 - DNA, 929 bp, Homo Sapiens
  misc_feature (648)..(657): n is a, c, g, or t
tcatcaatacataagcattttatttttaaagcaactctctgatcagctaataccaactggtacccttttctcatgaaaggtagagtcattttcctactgcgtctcctggcctaaggatgcactgtgtaggacataccactggaaataaggaaaaaataccaagaagacactcagaagatcaacagacccgacccttgggagaggtcaaggcgtatacaatgaccaactcttttcttcccttagtttaatcagtaaaacaagtgtaatttatatttaccggatctaggaagcacaaagcactactgaattagtcttttgaaagcatggatattgtttgaagacagaactaaaaactgcaaggaggattctttcagagggagggaatcctctacggagtcttgattttcttttctaaataaggagtgggaatgaggatgaaagtgtagatgaaatacaaaagaaaacactatccatgaaaaacagtattctaggaaataaaggcactggcagagaaaatggaaatagaagacacatccctatctggagataatctaataatacatgtacaaatggacctcagtgataacatatgtaaaccacagattataactttacagaaacattgatattagaattccaccccccccnnnnnnnnnnaactaacaggcacaaacttttcctgggttagcaagttcaactctagtctttttcctgctaagtcaagtagagtgggacatcaatgagaagttcattttaaacctctgaaaatcaaacgccaaaggcaaggttgagttcacacggactcttaactgactctaaaccgcaaggacctagtcctctttgtcaattgcgaccttgcaaaaagctctcagtcgtctgttgggatggtggtgatgatggtaagtgcgatgctgagaagctttgcatct

SEQ ID NO: 154881 - DNA, 766 bp, Homo Sapiens
gcggccgccgccgcccagaccggacgacaggccacctcgtcggcgtccgcccgagtccccgcctcgccgccaacgccacaaccaccgcgcacggccccctgactccgtccagtattgatcgggagagccggagcgagctcttcggggagcagcgatgcgaccctccgggacggccggggcagcgctcctggcgctgctggctgcgctctgcccggcgagtcgggctctggaggaaaagaaagtttgccaaggcacgagtaacaagctcacgcagttgggcacttttgaagatcattttctcagcctccagaggatgttcaataactgtgaggtggtccttgggaatttggaaattacctatgtgcagaggaattatgatctttccttcttaaagaccatccaggaggtggctggttatgtcctcattgccctcaacacagtggagcgaattcctttggaaaacctgcagatcatcagaggaaatatgtactacgaaaattcctatgccttagcagtcttatctaactatgatgcaaataaaaccggactgaaggagctgcccatgagaaattacaggaaattctgcatggcgccgtgcggttcagcaacaaccctgccctgtgcaacgtggagagcatccagtgggcggacatagtcagcagtgactttctccagcacatgtcgatggacttccagaaccacctgggcagctgcccaaagtgtgatccaagctgtccccatgggagctgctggggtgcagagagag

SEQ ID NO: 154882 - DNA, 225 bp, Homo Sapiens
ggggcatccctcaatcaattggaaacaggagccagcggataaatatttcagcctcctgttcagtcagacaattctgggaagcattatatatccaacctccgtaatacctttctattgatttttcttctgtctctctaccatctttcccactcctgcatcctggagccaaacgccaaataaactactgcactcaagttttttttctctgaagatctgctctcaggg

SEQ ID NO: 154883 - DNA, 697 bp, Homo Sapiens
tagagtgagaaaccagaaaatatttttataggcaacacttggattaagggcagaatgtgtgcaggctttgggcttgggcatggacttgattcttcttccatttgattctttcttccttctgaaaaacagtagttgaggaagctaagcttgaagtcaacttcaaagggaagtgaccagagccaggcaaatatctgatgccttctgtcttattcttggctcccacagctttgtctctggcctcgggaccctgagtcagcccatccccaggtggtatgtcctggtcctcttccatgtgtacaccaggggataacaggatgaagacagggaaaagatggaggttttccctacttggggtagagaatcactgaccagttccattggcctctataatcatgaggtccacactgactccatggagaggcatagggatagcaagattggtttagcaaacataggtctctctcctttctgctccatcaaatccccagaattactttcctacacatcagatgcctctgcgcaattaccctggattaccacagccaagggctctaggtggccagtggtggcatagagacagatcagatgctccagcactcaaggttcatgagattcaaaaccgattttcttccactccaaacatacactcttttctcttgggcagctataaatagggttttgctaatagaggaagaag

SEQ ID NO: 154884 - DNA, 217 bp, Homo Sapiens
ttgagggggccgtgtcttcctgaggtgcggcagtttatcaatggcggaggttactaaaatctctcggggaattttgttgtctcttgttggcacgtttacagtattatctatgttttctttttctttaaccatcaaaataaaattatactgagctagctgtgcatttcgtattttcttatttagtgtacaactgtgatccaagtcaacgtcaccccca

SEQ ID NO: 154885 - DNA, 340 bp, Homo Sapiens
taatgaattttctttattatctgtaagtcttatccatgcttgtctctacttacataaatgaggtttgctatgttttatcagatcttaggcataatttattgttgtgaaacactgaacaaattagcagtatattaccctccacaactccctgtgaggtgagttgcacagatttagggatgagaaacgaggcacagagagttcaaggatttgtcttaaaaacaaaacttaagatttcccagcctgttagttgacctctttagtacagggcattttattccgacataattatattttattctgacataattatgccctctggctcagataagaacttgcttta

SEQ ID NO: 154886 - DNA, 244 bp, Homo Sapiens
ttaattttttaaaaggaattttgttttaatttttagaaatgcatacaaattagtgctcatttgacaacacagtattagaaattcacacacctggaaactgagaaatgtgaagcctgactgtgggctttggtcctaaaaaagtgctaagcagtccttgccaccaaagtacaacttcccccctcacgccccacccccatttccaatcctaacaaatttgcagaaagggaggctcacatttatgctg

SEQ ID NO: 154887 - DNA, 352 bp, Homo Sapiens
cagcttagcacttcctcacaaagttgtgtcatcttagcagaagtgggcaaaaagcagcttcacttggcctcaggtcacttacgtttcctaccctgtagctttgagtagaaactaggttattaggtcataaattgacttgattcttagaattcttccagaagagattcccatttagcaagccataaaatagggctcatttctatgaatccagaaggctaattcagggggaagttgcagatttgttaaatggcccagcccagggctgagcaacaggttagtagtttagttccccagcgtctcccagatgcctcacttctctcttggatccctcccttttgttcataggaccaaa

SEQ ID NO: 154888 - DNA, 470 bp, Homo Sapiens
tctcactgggttagtagagccttgctccctgttctggtacctctttgttctctctgcttgttgatgacaatctgaacactgtccttcaatggaggtcaaagccctaaacaagatcctttctcctcctcaggggaagagctcctcattgttgggagagaggcctgttctcagcataaggaagagaatccattctttcttatgcacaatttctgctatttatctcgcatttggtaaaaattcagactgtgctgtctgccacaccgctgctattggttagccctcttctctttttttgtactcaaggcaacttccctacctttttcaccgaaatactgatctcaggggaagggaggggttactgctgtatcagccacaacctttgcaatccatagattctccatcaggtataaccaagtgttttaaaatcagtccaagaagcgaggtattttgtaccttattttcatcattta

SEQ ID NO: 154889 - DNA, 547 bp, Homo Sapiens
  misc_feature (22)..(22): n is a, c, g, or t
ttccaaggtctttaggtaacanaatggactaatgttaacctgagctaatcaataatcattggatacctagataatttctaagtaagttagaatactgtgactttgattataaagtataatattaagtttatatatgtttgcttcttatttttctatgctatagtgaggctatacctttgagttgtgtcaatacaggagttcattttttgccactttaagggaatgtaaaagtgccttatgtcactatggaaatttcagtaatgtgtgttcatgagttttgctagtctgctaaaatgattatatgggacgatttccaattgtccatatcctccctcctcctaattttctctatgaaatataaattagtttctctggttaattattataatttaaatgggtggttgagattatgccaggagcattaatgaaaaagaaatacagtggtttttgtttttcaaatcaaaacagggtagctttgtatcaaagcagtggttcttgaactttttggtctcacaatccctttatactcttacaacttatttgacga

SEQ ID NO: 154890 - DNA, 327 bp, Homo Sapiens
gtgttaaagagggaaaattctttattctagaagatattgggagtcatagatttttctgtgctgttattccagtgtctacactagactgcagaaccatgattctccctcgcaattatgctcctattaataaggtcttcacttctagccttacagcaagtgtgtggcatggtgcagagccttggagctcagggctgcacacctgaagttaccctttagtaggggtcccctagagtgaatgacagttttgtggctgaaacctacacaaagaggaagaggaatgaggcaggaagacccgtacctaaccataccctcttgatgcagaaagtc

SEQ ID NO: 154891 - DNA, 319 bp, Homo Sapiens
ccagggtttgtggtccaggcaacctgtcacatcagtgtgttccaaacatggcacccagatctcaaaagcttcttcaacgctcccatggtttgggatacacctcaagttttaacttacgtacttcaagtttcttttattcaattagatacaaaccgtctgacttttggcttctgaaacaggaaagtcaattttgttgttttcactgtaccatgcttttttatctcagaatcttgatgaactctgaaatgacccctgatgggggcatgcctctatttatgctgaataagagccattttacattttactacaggttgagtgc

SEQ ID NO: 154892 - DNA, 326 bp, Homo Sapiens
tatcatataagcaggttaatgtgttcagcacagaagtagtcagccatgtaaaatctcagcattgcagttgataaatcatgaatactgtaaaagtgctgagatccttctttttataacctacttcacgtttcttttttattctagcactaacgtgattgaaaatcctccaaattttggcactagagttaaagggataagttgaattagcattctggaaagatatgaagatttaggaaaatcgttaaatataaaaagaacaaggaaaaatttagcttaaaagatgaacccaaagattgaaatggtcagttaagctgctatagttaaac

SEQ ID NO: 154893 - DNA, 557 bp, Homo Sapiens
tatgtcaatcattctttactttttggtttgtggttttgcttggaaaggctttccccttctgagatgatgaaacatttcttccctagaattgtgcttgtcatctttgatccctctggaatttactctggtctaaatggttttctgcatggctcccagtcatcccagtgctgctggatggagtgatctgtctcctccctcttctgtgaaatactgtcctcatcagacactcagtgtccaccctcgttacatggagttgtttgccttccccctttccagacctaaactgttttatttactagagccctataatatgtttcaacatgtgggtcttactcccttctcttttattatttatctaggaaccaaggcatgtcttcacgtactaagctccttttgtccctttagtgtatattaatcttggagtttggctaccttacagcattttctaatactgacactcctgattctcttgggttttctgggtatataatgatattatctataaatgatcattaacataccttatttaaaaaactacagacagtcttactgtgctt

SEQ ID NO: 154894 - DNA, 468 bp, Homo Sapiens
tttcattttcccaaaagcaccctcattcttgatgttaaatgcagtctctctctaaagttagagcaggtgataacacagttgtgctaattgcagtcaggaactaaggtgatggtggatttgggactgatagaagcaggtggcttgacatgatacatcttgctgggcagggctcctttccctcatttgaccttcagaatcttcctaggacttgaatgtattttccttcctccagaagcaaaggtacagtgagatggaaagagaagggtcccagcagctggagtgcacccagcattctctccttcctcttcagttactaatcctggctggtgaagggcatgtctggtaaagtttgcccctgtctttcttcttctcaccctgttcttccaaaacaaaggaatatcctaatggaagtgtcattttgggttttccatttggggtcaaatgccattgagctttcttgtgattctc

SEQ ID NO: 154895 - DNA, 285 bp, Homo Sapiens
  misc_feature (93)..(93): n is a, c, g, or t
aatagcttgatgaatttgtcccctcatgtgggtgagctgtcaaaccttactcatctggagctcattgggtaattaccgtggagacacttcctncttgaacctagaagggatgtcagtccctataaagcggaactgtctgattgttgaggagaacttgctcaatactcttcctctccctgtaacagaacgtttacagacgtgcttagacaaatgttgacttaaagaaaagagacccgtgtttcaaaatcatttttaaaagtatgctcggccgggcgtggtgctcat

SEQ ID NO: 154896 - DNA, 297 bp, Homo Sapiens
atgttaaaatacacaaaaatgtaccatcctaaccatgtttaagtgtgcaattcagtggtgtgaagtacattcacattgttatgtagccatcactactatccatcccctgaacttttaaaaaagtcatcccaaacagaaagtctatacccattaaacactaactctctattctcccctaccaccagcccctggaaactactttctgtctccatgaatttacctattctaggttcttcacatacatagaatcatatatttgtgcttctgtgactggcttatttcacttagtataatgtt

SEQ ID NO: 154897 - DNA, 448 bp, Homo Sapiens
ctagatagaaaataagctcttattattcctaacgaaaattttattttactcatatcagtaggataaactctttaaaaataactgaataaatatgagagtcaactacctactttcacgcttattttttctgtttttcaatttcctgactcacttaacacagggaaaacggcaagaaaagatgaatttcttgaaaactgcgtgaaggtcctgagccaggccctcggttatttggtttccatctcttctctgctccaagcctgagggtggcagctggcgccaggcgctgctcttgggacttgcagctgcagcctcctggccaatcatctcttacttcctgtctcggaacgaatggcagacactcttcaaggcctgactcctgaagactcacgtgctaggagcacagagggggctctgaccaccaggcctcatttgacaagtgctgactgtg

SEQ ID NO: 154898 - DNA, 360 bp, Homo Sapiens
tttaagaaaataatttatactggagagaaattctacaaatgtgaagaatatggcaaagcctttaaccagtcttcaactcttactaggcattaaaaattcatactgtacagaaaccctacgagggtgaaaaacatggcaaagcctttaacaagccctcaattcttaacagacataacataattcatactggaaagaaactctgcaaaccagaaagatctggcaatgcttttgacaacacctcaaacttttctaaccataaaagaaattatactggtgagaaatcttagaaatctgaagaatgagacaaagcctttaaatggttgtcacacttgattgtaggccaggtgtggtgtcttacac

SEQ ID NO: 154899 - DNA, 524 bp, Homo Sapiens
ttaaaaaaatatttaatggatgtcagaaaacattttgaacagagatataatctttaaggacaacacaggagaagaggggagcagctaatatttccccatatgtggtctgctgggtgtcattgttaaagacagaataaaaggaagaatcaatttcagaaaagtctttctctatagaggaggcaatacatgtttttcacacaactaagatgatagctacacagtacatatggcattaaaacagctcagtattttgtaaaaaatagtttagtaatctacttaatataattccttaggagttataaactagtgccctaaattttggagataatcattgacttctacaaaatttcagaataaactaccacctatttcagcatcaactcagatttacatacctcattttcaatgtagctgttgagaagatcttggcctagttgtctacataggctactctggatcggtagatcaatacttttgacttttccttttttaagtgtctgatttaatcggtcttgtttgtctga

SEQ ID NO: 154900 - DNA, 387 bp, Homo Sapiens
  misc_feature (19)..(19): n is a, c, g, or t
caaggtcagaatgcctgcncatgtgcataaaccaacatgcccataaaagcctgataggaggcagcagtgccccataaaaggtcacacccagccagaatccagcaacgttggaacagcgtctgttatggagaagaaatatgtgtctgacagcagcaacagcagcagcagagaaagatggattggggattaatcatggtaagatactgagcaaaagagacaacaaattctgccaagcatgaatccttctctactcacaggtttcacaaaatacactcttcaaagtacaagctggttggccaaggtcaggttgatctttgctaggctaaagaagcagctgcggagtgtttcccacggcagatggagaacacctaaggattttttactgtt

SEQ ID NO: 154901 - DNA, 445 bp, Homo Sapiens
agctttgtcagtcctttattctctctagaggaggtgctcagtatatcacagcagtggctgatgtcgggtgcttgccacagctcagcactgctctaataactcatcctaaccacaccaagccttgctgagacctctgagcaatcccaccaggagatacagtgaggtccagccactcaggccacacagcgaacaggaggcagggctggtatgggtgcaggtgccaaccccgactgtgccgcctctcggctaagcacctgtgcagtgactgagtgggctcgcaaacagagggctctgcaggtggagcaccccaggcaagtccccaccatcagccccattctgcaggcgcggccccggggccagggatgggagggtcttgccgggcatccagcgaggagactgcatattccctgcccaatctggcttcacggcggcggaactgacgcca

SEQ ID NO: 154902 - DNA, 332 bp, Homo Sapiens
ccccagtaaatgaggtcattttattaggaactttaaaatacaattcaacagaaatgtggtaatgaagatttttttattgccactggagatttttaaaagttaagttgcccttatctaaatttttatcttttatagacaataaagagaaaatacaaattttccttctgacataaggataatcaaactcccaagtgttatcacttccagtggctgtttaattgcttgctttaggctttcttatacattcctggaggtcagcaatgcagctcaacaaccatctgtggccacactttcagtatcatcaagccagtccacaaggccaacaggtggtc

SEQ ID NO: 154903 - DNA, 190 bp, Homo Sapiens
  misc_feature (97)..(97): n is a, c, g, or t
tgatctgcaattcaactcatgcaattactgcgtttatttccttgtaaactcctcagctaaaacttcttgcaaccacaaacactcaaatgggtgacangggcttaatcctttccaaccacaaggacctttgatccctgtgacagagcccaaggatctcgctcccgcgggcggggaggtgccggacgcgtgg

SEQ ID NO: 154904 - DNA, 365 bp, Homo Sapiens
  misc_feature (334)..(334): n is a, c, g, or t
  misc_feature (336)..(336): n is a, c, g, or t
tggcaacctagttttccctctcacctttaactgacgttttgtcctcaataattacacaaggacctagagtacctataggacaaaaagtatagaataaaaatatgcctttagtcatttggtttttcttaaaaagttgagattcttaatctgacttacatgttactttatccgtatgtctttgttagtggagaccgctaaactaatgatgtttgaaaacagttcctctgttttagattggaagatagcactctagagtggacatacggaaagactgtgactttattttgtaatgggagggaagaaattttctcagagcaaactttctatttttaancngtggaataacagtgactttttaaatggtg

SEQ ID NO: 154905 - DNA, 305 bp, Homo Sapiens
  misc_feature (41)..(41): n is a, c, g, or t
  misc_feature (60)..(60): n is a, c, g, or t
  misc_feature (86)..(86): n is a, c, g, or t
tctctcccgcccccgtttcttcctcctgagaccactgctgncttcaaacgcaagtaaccnaaacctgctcccaaacccatggcaanactgacccggagcctaacccagccctgccccgagcctgaccctgatgctcgagactagaccccagactggacccggtcccaaagtgggacaacaaagaccacagcggggaccacccaggtcccccagagagaaaacccgcgtcggactccagggagctcatggtaaccccttgtcctggggcagcttcattttactttggcaaggaccgcagtgttcgc

SEQ ID NO: 154906 - DNA, 162 bp, Homo Sapiens
ataagttctattttactgtcttgaattagtatttcagtgttttcattttagacattcagactaaaaatacaccgtttagaaaaaacaatttttgaaaaagagattttttttccctgcaggtagttgagttggaacaacatgttctaccgtggatttgtactt

SEQ ID NO: 154907 - DNA, 414 bp, Homo Sapiens
  misc_feature (373)..(373): n is a, c, g, or t
  misc_feature (390)..(390): n is a, c, g, or t
gaagatataaaacaagtatgatcttgcctttgaaatcataaatgtttggggtacctgttctttgccagttaagatacatatcttattatctttgtttttttcaagtctatgctcctgtttgaagcttttcctgtaatttaggttgtctgtgaaatacctataacatataattcctatagagtatgccacattttttttctaactcatttcaaatgaaattctctcagattctagtttttgagcttgtccactagatctgaaaataaagcatccttttcctgagtccacttgaactaattgtgaatttgttacttaatttactggcatcttggggaaacaaggtttgctgtggcaggaaggctgtttgagagtnagccgttgagctacccngggtttgtggtgacatgcataggg

SEQ ID NO: 154908 - DNA, 238 bp, Homo Sapiens
acatacgaagcatcaagccatgatgcttcgtatggcaggtcaagaaatccctgaggagggacgggaagtggagtaattttcagaggacgatgatgaagatgattctgatgactctgaagcagaaaagcaatcacaaaagcagcataaagaggaatcccattctgatggcacatccactgcttcttcacagcagcaggctccgccgcagtctgttcctccttctcagatacaagcacct

SEQ ID NO: 154909 - DNA, 195 bp, Homo Sapiens
tagatagatggatagacagatagatagcttttaaaggtagatttttccaataaaagtaatatatgtttatggtaagttttcaaatagtataaacatgtctcctcccaatttttccagttctgaatggagaataatggaccattgttatatttctattacacaaatttctttcttgggcaaactttatataaccag

SEQ ID NO: 154910 - DNA, 249 bp, Homo Sapiens
ctgaaaccatccctctccaagtgttggcgtttccctcccaggctggaatcaactccagggttaaaattaatttctcttccgctcacaacaatggtacagcctctccccaagtacatcctgtctttgtgcagaacacactgccttgccgcgctgcagcccagagccccagagctgggatgatttacccagccagaggccacagcagtactgtgaatcctctgggacctgttcaattccctagtcaagaga

SEQ ID NO: 154911 - DNA, 871 bp, Homo Sapiens
  misc_feature (62)..(62): n is a, c, g, or t
  misc_feature (76)..(77): n is a, c, g, or t
atccctgggggttcatggtcaaggtataaaaccctgcagagaagtcaggcttgtctgatccncaactctccctttnntcagcctggtcacaagtcagtttcccagatgcagcattgcaggtttctacttttccgccggtctcctggggaacaaaacgttaagtgtgtgcggcctgtgcagggaggacagagggaaggagaggccggagccctcaggatcgagtgatcttgtcgggaggcatgaaccccgtgtccccgagggtcctgagcgcaactcggccgttgggtcggatcaccaggtgggtgatgctgccattattgagggagagccggagccagccttcaggaggaaactgcagtgctctgcacacgatgtagcggatgacgttggcgtgacagatgaagatctcgtaactgtcctcctcctgcctggcatctgcgcggtggatgtagttccggaaggcggcctcgatccgggctccgtcttcgtaatacacagcttccggcttccaatgagacacgggcgggtctggctcgatgggggcgccttcccgcagcagatctgtgctgactttgcagacgcctggcaggtgccggctgatgatatcggtggtctctatggcgcgcgtcatagacgaatggacgattttattaaacttcaaccccaagcttgccaggcggagcccagtgagttcagcctgctcccgacccagcggggtcagagtgcggtccttctccagggagccatccacgtggtactgggaatgcctgatgaggaagatgtgccgcgtggccttggctttgtagtggtccagcttggacgccagctcttcttccccagattccacgttcctcttccgcacgtgatcaga

SEQ ID NO: 154912 - DNA, 334 bp, Homo Sapiens
  misc_feature (52)..(52): n is a, c, g, or t
cctttccctacttttaagtatcatcgtgaactcgtgtttttaagtatatttncaggggtttcagtataccgcagtcattattctttctgatgctcaggggcagggaagggacagtatctttttgatagaaggaaacaccaggactgcctcagtggaccttgttttggaatgtccatcatttgtaggaatgatggagtctcacttcctaatggttcagaaccattagaggtgcttccctaggtgcccaatacgacctatcactgttagagtataatgcatttctttggctatttatctggttaaagcaactcctttatccacagaaaaggaggtt

SEQ ID NO: 154913 - DNA, 428 bp, Homo Sapiens
  misc_feature (80)..(80): n is a, c, g, or t
gtaaccaatctattcggtactcaaaaagggaaataaacaaaggaacccaaaccaccacccaacctctcaaaataaaatanttactgaaactcatgaaatgaattttcacatgtctccaagtttcctgacttaggaagaagtaaataatgagatatgggggatgttcatcttgtagtatttctagacaggctgaaagcaggaaatccttgcaatcttctgaccgagctgcatctctcaagactgccaggtcaaaaggagccagaaattctccaagatgtgagccttgtctctttcaaatcttgtggagggaaggaggagggcacagaattctatctttgacagtgcttactctgggcaaagatatttctcaaacattgtgaatccagtggcataggttattttgatgtggtctccactttttcattgca

SEQ ID NO: 154914 - DNA, 261 bp, Homo Sapiens
cacagatctgtttctgaagtctctgttttataccattggttatttttatctgttaataggcaactgccacactgttttaattgttataaatttcttataaagtttgatatcttatcctataaatcatatttgtcatagatattcttgacacttttcttgtacaaataaatgttagaaacagcttgttttgtaaatagctttttgtgattttggttagaattgcatttaatcttagatcaatttcaggagaattgacattgc

SEQ ID NO: 154915 - DNA, 209 bp, Homo Sapiens
  misc_feature (90)..(90): n is a, c, g, or t
tttggtttgaaaagaaagtccagggttttggtttgaaaagaaagtccaggaaacaggagaaatagctttaacgtacattatgtttttttnctttgtttttgagacgggatctcactctttctctaaggccaccatggttccctgcggcctctacctcctgggtgcaagcggtgttcctgcctcggtctcctgagtggttgggacaacag

SEQ ID NO: 154916 - DNA, 397 bp, Homo Sapiens
  misc_feature (44)..(44): n is a, c, g, or t
  misc_feature (369)..(369): n is a, c, g, or t
caacaatatatttttaaatgtggagtcctaattaggaaaaagantcaggctggtgggaccaaggaaaagcaaagagaaagcacataagctgtaagtctgcctttcttcatggtccaggacacataatcctcctgcgtaaataagtcacaatcttcctgcgcccagctatcatcagaccctcggctgatagaaaaatgcaaattagctcactgcaaccttggcattatcagtactgcacatagctctctccagaaaacagcacgaacaccatcctataaaatccacagcaagcctttgtctccttacagtcagctcccttctttctgacttgcccactgctttcttgcaacgcaatttcatacttgtgantcttatgcctcagccatccaagtagctg

SEQ ID NO: 154917 - DNA, 322 bp, Homo Sapiens
ccctgggttctgggcatggccacgggaaggcttccgcctcttctggatgttcagtcttttgatggtatttcccttctgtatgtcatcccacatatttgaggaaatctaagtctagttgataaccatagggggtctccacaaagtaagggtctttctgttccttgtcctggtctccactgagaatatcacctgcttttcctgaggcactgccgttaacctttgtggtgtgagccatgctggcttgagtccaatgagagatccagaaaggagtgaggagtcatgcaaattttatgcatcaagttcttaaaggcattcaaccttc

SEQ ID NO: 154918 - DNA, 300 bp, Homo Sapiens
  misc_feature (46)..(46): n is a, c, g, or t
  misc_feature (67)..(67): n is a, c, g, or t
  misc_feature (73)..(73): n is a, c, g, or t
  misc_feature (94)..(94): n is a, c, g, or t
aatttttttgtagagatgaggtcccactgttttgcctaggctagtntcaaactgccaggctcaagcnatcctnttgcttcagcctcccaaagtnttgggattacaggcatgagccactgcacctggcctagcggatttttgaagcattaatctgttctgttactttccagctaaaaaccaacaagtgtctgaggacacagtttaaactccaagatgatagggtcctgcctcacctgggctcccacctaccctcatgacctcctttttgtgaaatgctgaagggctctgcagctgggtggt

SEQ ID NO: 154919 - DNA, 306 bp, Homo Sapiens
cgcacccggcccattaagtggatttttaatctcacacgagctcaaggcacagctgaagaccttttaaattctgtgaaagatagtggatattcatagctagtttttaattccagacccttaatttctcttatctgtaagtcagccttgttgacttctgtctaacatttagcacctttacaaaattattcaagtcagtaaaatatatatataaaaaacctatttggctttgttttcaagatttgctcatttaacctttaataatcctcttttaaaatggggatgatgatgtaacagaatccctgtaac

SEQ ID NO: 154920 - DNA, 260 bp, Homo Sapiens
  misc_feature (41)..(41): n is a, c, g, or t
  misc_feature (58)..(58): n is a, c, g, or t
  misc_feature (83)..(83): n is a, c, g, or t
acacgtgggcataggcagcaatgttgtcgcagaagcagccncagtccccaatggactnacaggagcaggtgtcgtaaatgcanacatccagatatggctcggggtccacctgcaaaggcagcctcaggtggcccaggcctatggccaggtgtcaggaactctggctcttagtctgggtgcaaatgttctgatggtcaatttaaggataagggggtccaggtagaaggaaaaatgtagctcaatggtcttaaagagggaat

SEQ ID NO: 154921 - DNA, 277 bp, Homo Sapiens
  misc_feature (88)..(88): n is a, c, g, or t
  misc_feature (118)..(118): n is a, c, g, or t
  misc_feature (140)..(140): n is a, c, g, or t
cttactcgctgtaaacttgccagcctgtacagacttgtagacttgtttggatgggcacacctggcaaatacctatatctcagtaagantaagtaaggagcaagaccacattataatanttcccagaggcctatctttttntgaagctacagcctccaatttggtgaaagtcaatataataggagaagtggttgaccagggaagtaccaatttgaaaattgaccatacaggattcagtccccatgctgcaatctattcaacacgtcctgatgttaagt

SEQ ID NO: 154922 - DNA, 252 bp, Homo Sapiens
  misc_feature (71)..(71): n is a, c, g, or t
tcgcctgcttctgccactctgcaccatcaatataaataataactaattcacaataatcagtcatgaaagantaaaatggaaaacatgccaaatgcaggcccctgctttgttatcactgcatgccatacacataaagttctctgtcacgtgactacaggagcatctccattcctgtgcctcgtcctcaggtatcagtcgcaaagccacttgcgggcttgaagtcagcccacagtccttcttggaagtcaacag

SEQ ID NO: 154923 - DNA, 285 bp, Homo Sapiens
  misc_feature (75)..(75): n is a, c, g, or t
ggataaaattgtttccccccctgttgtaataatgctttaattacaaacaccctttcacctggataatcatccagnaaaagtatgatatagccataggacctcatgtggctgtgttatgggaaacaaaagtgtccggataatttttatttaaaagcaggatagttcgatgctaaaaaaggaatgagctatcaagccgtaaaaagacacagagaaaagttgcatgcatattactaagtgaaagaagccaatataaaaaggctacatagtatgtaattcaaactttat

SEQ ID NO: 154924 - DNA, 246 bp, Homo Sapiens
cattcacagaagtaacaaggttgtggtctcactgtccctgacattttacacccatccctgaaccaatcacaatggtatttcaaggtgtagtacctgactgctgcattagagcatgaggatgatgaggacggggttgtgtttgtctttgcatcctttgtctggagcatggtgtctggcacatgatgcatacttactaatcttgtttctctttatatctcattatttatttctcagtgtcctttgcta

SEQ ID NO: 154925 - DNA, 302 bp, Homo Sapiens
  misc_feature (11)..(11): n is a, c, g, or t
gaaggtttgtntttttaagtgggtcagaaattggaactttaaaatgttggtttcagcaattttggtttatctgttctttactttcatctacaaataatttgaaacttttatctctctgttgtttgttcatcatcccatcaatccgtcggtccattgtgtagcatccactgcaacacacctttctcttagatttaattttttgttcactggagatttgagggctcatcaccaaatccagaggtccaggtttcccagtacactcacggatttcttgggaggaaactgtttttaggattgccatt

SEQ ID NO: 154926 - DNA, 217 bp, Homo Sapiens
ttttacttcagaaacgtgaaattgagtccaagttgtttggggatccagatgagttcccacttgctcacctcttggagcctttccgacagtattatctccaagccgagcactccctgccagcgctcatccagatcaggcatgattgggatcagtacctggtgcatccgatcatcccaaagggcaactttcgtttccccaaggattggggtccttcccc

SEQ ID NO: 154927 - DNA, 307 bp, Homo Sapiens
agtcaagggggcttgctgcgaaccaccttcccaagttacttccatcccactttccccattctgcatagcaatactgtgatttatttgtgctctagattgatactggaaattttcaaatgtgtatttgtcagatcttctttgacgcatcttaaatagcctggcaccacggttactgagatgggataattcttccaacatgatgtctctggggatgctgacctttttgcccaggtccatgccatcaacatcatttccatggacttccttcatgatggctgttgcttgctgttttctctgcttcatcata

SEQ ID NO: 154928 - DNA, 267 bp, Homo Sapiens
actcataaagaaacatggtccaaagtattaacaatagaattagggaaattaaacattcagccccttctcattactcacttaaatctcaaacactccctttcccctacattaaaaacactttctggccttgcctccctctgcaggataccttctggtctggtttcatcttcttgtctctctcagggttaccctttacccgcctctggttggtagaggatcattaagccccacttaattctattgtgctgtgacttcaaccaattctac

SEQ ID NO: 154929 - DNA, 337 bp, Homo Sapiens
  misc_feature (218)..(218): n is a, c, g, or t
  misc_feature (231)..(231): n is a, c, g, or t
ccaggggtcaaaggggctggctcaccttgttgcatgcaggtccaaggcaggttgtactgaccaataaagtcatttcgggatttccagtcataatccattaccacaaaacgcagcatggcaagttcaggcaccagcacccggaaacatagtgtctgcccccagtatggattaaaaccattgttctccacatagttggtctcctgccgtgctgtgtctanacgaacgccaaanatctgcactttcaccagtggatccacaatggacccctctttggtcttgtccactttggggagttgctgaccgctgatcacctgtagtcagggctctggaatctcac

SEQ ID NO: 154930 - DNA, 659 bp, Homo Sapiens
gagacatcaatatagagggtcgcatgtatgaacattgagggcccagatctcaatgtggaaggtccggagggaggcttgaaaggtcccaaattcaagatgcctgacatgaatatcaaagctcccaagatctccatgcctgacattgacttaaacttgaaaggccccaaggtgaaaggtgatgtggatatttctcttcccaaacttgaaggggatctgaaagggccagaggttgatatcaaaggccctaaagtggacatcaatgccccagatgtggatgttcatggtccagactggcatctgaagatgcccaaagtgaaaatgcccaagttcagcatgcctggcttcaaaggagaaggccctgaagtcgatgttaccctccctaaagctgacattgacatttctggtcccaatgtagacgttgatgttccagacgtgaatatggaaggtccagatgcaaagctgaagggccccaagttcaacgatgcctgagatgaacatcaaagcccccaagatctccatgcctgactttgacctgaacttgaagggcaccataatgacgggtgatgtggtggtgtctttgcccaaaggggaaggtgatctaaaaggcccgaggtggacatcaagggcccaaaggggacattgacctcctgacatttcat

SEQ ID NO: 154931 - DNA, 314 bp, Homo Sapiens
  misc_feature (33)..(33): n is a, c, g, or t
aaagtatcaacgtcctaatctcatgggcacctnttgggtctttccatttttcccttcatttgctaagtggcatgcttttaattttttaagatgaaactttttcccagcaaagtcttttccccacagtgatgctctgaaagccaggacacctagcacaggaccctgggcatagtatgcactcagtacatgtggagcatgttgatcaggaacaaaaggagtagcaaaggtcagttcctgcaaaggtgagtagataatacaggtatgactgaaaggctgcaactcaggggtaaacatttttacatttcatttccagg

SEQ ID NO: 154932 - DNA, 935 bp, Homo Sapiens
cccccccatggggggcttttcttcccatgggttaaacccttttccccccttcagcccccccgaagggccccagacctccagactgggttagggaggtccccccttccaggatgggcctcggggggacatcccagggcccgcggccacccagggccggcggaagtggttagtactccccggttgtacaccatccttgctgaggcccaggggcagacaccttccacttgttttctgggcactgaccaggcagttacgcgcagccaagtccttatgcaccaaagcggttgttggacaggtgctccatgcccagggctacctgggtgcatagggccaccttctgcttggtgctgaggggctgtgacttcaatttttcatccttgctcttggaaatcctcaggaactgcttgaggtctcccagatccacatattccagcaccatgtagtggggctcagcctcccggcacagccccaggagccgcaccacgttggcgtggttcagcttcccaaacatctccaactccctccggaagtccagctgctgctgctcatccttgctctgcaggctcttcacaagtaccagggtctctgccactccctcctccaagccctgagcctttgccaggaacacctccccaaactcactcttccccagcgtggtgatgggctgcaggctagaccgtgggaagtgcatcttattacttgtgctgtggcgtttgttggtggccgcggggccggagcccaagctggtcaaggccacttcttcttggatctctgctgagggctgcccgttctgcaaaggcccaccgttgaggcattccatctctggctcctcgccctcgggctgcttctgcagccgcttggctttgcagcgcttcttgcagtagaacatgaggcccagcacggcaatatcccgagaatccggaccggtccagcct

SEQ ID NO: 154933 - DNA, 415 bp, Homo Sapiens
acccactggcagtccacgcatggtgagaagtgatagctatccttttgaaagaacaacgcacgctctggaaaaagctttttgctaccaggaccgtagggcaatgggggttgaatgggaacctcagggcctttgtagatgaaaacaggccgtgaatggagccacagagcagaggctgcagcctggtcagcagagcttcagccaacagcaggtttccaggggacaatgcctgggccaggcctagggcctataaggtgtgagtggagcatttcagagtgctgtgggcgggctcctgttttcaccacggcctgcctgggccaaggcccgtctccgggccaggcgtgacttgcagggaggggaaagcttcatggagcagaggccatcagctagtgcctctggctcctctgctagttcgttc

SEQ ID NO: 154934 - DNA, 590 bp, Homo Sapiens
aaacaagttattttaaaacttattggaatattcaaatattaaccaaagtagaaaaatataatacacatccatgtgcccatcacagaacttcactgattatcatcatttagccagtcttgaagaagcaagtgctaattacaatcacaaatgaaacaagattcagacttcatgaagagcactgcgctataataaaagaagaaatgagcacatacattcttttactgacagtcaaatggtgaaggtgggcagaatcattatgtgatgcaacatggcaaaagtatacagacagtgcatccagaggaaggcaccttgctgaatgactagaatggaagtaggagacattttgcaggcccccttcatcctgcagggagaaccagaaccacagcagctctatttgcctattcctctttaaattacaaagttaaaatttgggagtagtagaaaatcaattggttatcttatagagtctcctagaatatttcattggcattgagaaggtggaaaatgcaaattatatacttttaaaatgtaatttttgcttttcacatatgcttaaagcctaaaacctcttaataaacttcttctgaaat

SEQ ID NO: 154935 - DNA, 168 bp, Homo Sapiens
gctacagctgcgtcaccacccctccctcacaccttaacttcccctcaggggccttctgcccgctttgtggtacccctagcgggcccgagagggccctgagtttggaaccggcgatccatggtaaccggagcccaacccagggactgatgggaaggcacttttgtccgt

SEQ ID NO: 154936 - DNA, 510 bp, Homo Sapiens
  misc_feature (356)..(356): n is a, c, g, or t
  misc_feature (368)..(368): n is a, c, g, or t
  misc_feature (418)..(418): n is a, c, g, or t
  misc_feature (422)..(422): n is a, c, g, or t
  misc_feature (461)..(469): n is a, c, g, or t
aaatagatcatttaaatatttctataactattgagaacttgaattcaaatgtagaaattcttcaaaaagaaatctctagacccaggtattttcactagagacttctgctagaggtttaagaaatcattaacatcaattctatacaatctcttctggaaaagagaagaggaaacacttcccaattctttaccctcaaactagtattaccttgatactaaaaccaacaaagtaccaacagtatcaaaacaaagtaaacttcagactgatatcccttgcgaatataaacacaaaattcccaaacaaaattgcaaaaatagatttcaataatatattaattatttaccatgaccaaatgnggttttcttccngggatgcaaggctgtttcaatattcaaatacatcatattacatgttaagnggcnaaataaggaaaatcacataatcatataaattggtacagnnnnnnnnntttgaaagaattcaatacccattcatggtaagaactctcag

SEQ ID NO: 154937 - DNA, 393 bp, Homo Sapiens
ctaagatcggagttttgcagaggttgattaaagcaaccatacccaagaaatagctagcatcaagaatgagatttatccaatgttgggtcaagaacattgcttcgacatggaaattaacatggaacattgcttttcgtgatactgttaatttcatactatgttgaaactagttgagtagacatagttaagagataaacataattcttcacgatagtagttttctattaagaaaaatgtcctgctgggcacagtggcatgtacctgttgtctcagctatgtgggaagatcacttgaggccaggagttcaaggctatagtgtgctatgatcatgcctgtgaatagccactgcacttgagcctcttgggaaacataacaagaccccatctgtaaatt

SEQ ID NO: 154938 - DNA, 117 bp, Homo Sapiens
tggcagtgaccaacctcaactcaaaaggtaagtatattttgtgttcctaagaatccagaaagttcaaaatttctattaagaagttgctgctggccaggcacaggggctaacacctat

SEQ ID NO: 154939 - DNA, 485 bp, Homo Sapiens
  misc_feature (42)..(42): n is a, c, g, or t
caatgatgtagtgttttgttgttggttatcacttttaacagntttcttagtggaccactgtgctcagtaatgtgggatgacttgtaagaagtgacttagtcttattgggggaagaggaaaacaaccgtgattgatttggcaaatgaggattaagcatcctgaggtcaaatactacacaggttgccaaccagcccctattaaacgttgaatgttccatataccattacagctctgaacttaacagaggtgggagaattcacttgtgatccataatgatagttttgggtagggagtagtttttagtagaactaagaacagtttagataggtagagaagagggggtaaaaacacaggtaagtagagaagtcaggaatagtgattgttttggagcataattattatgtaggagaatagtgaaaactcacagcctaccacttcagaaatgagacttttgtccatgtagtttaatgtctcataaattcttt

SEQ ID NO: 154940 - DNA, 266 bp, Homo Sapiens
tgagccaccgtgcccggccagaatgtgaaatttctaatgagaccacagaaggatggactcttacccaagggctgagcacatgagaggagggaagagtgcatgtgcctagaaacaaacttggttgattagggaggctttaaactgacagaggagaaaagtcctcagaagaactagaaaacaatggccatggatgacagtcttcttacttatgggccaggtgacaaggtaaataaattgagcctgaaacagcagagcccctcgtgccg

SEQ ID NO: 154941 - DNA, 173 bp, Homo Sapiens
ggtggttactcaaaacaatttattaaaagccatttaaactgggtttctattgctttgagcaacaagtgtctaaacgaatatatagagacaaaaacaaacaatctacatgaagaaaatgggaggcaagtcacttcctcaaaggatggagaatatttgggcattctgaattggct

SEQ ID NO: 154942 - DNA, 296 bp, Homo Sapiens
atgcttaccttctttaaatacacataaggaatcttctttattttcactataaatctgttataatggaaactctgattttatatttctctgtaatggagtcaactatcacctggcctatgcaggcaagtgcaaagaggtgacagtttttatttgtgccataaccacacacagctttaaatgtttttactataacatattttagaaagctaacaagctagagagagcggtgaagggctctctcagcatgttcctctctgtctgtgtgttagttttgctttactttttcctttaatctg

SEQ ID NO: 154943 - DNA, 273 bp, Homo Sapiens
  misc_feature (215)..(215): n is a, c, g, or t
  misc_feature (229)..(229): n is a, c, g, or t
ggcctatggcgaccattggctttactttctctcttaaattgtgaagtccttgtttagattttttggggctcacctgacccttgacacctagtacactgtcctgtaccccataggataccaataataatatgtagtgcagtgataatcttcctccctgccgcctaaccaaaatgggaaacaggcaggcatagtgttgactctcatccataagggantcaggcaagctccntacacagagcaggtgtttaaaaagaatgggcaatgaaatatttt

SEQ ID NO: 154944 - DNA, 351 bp, Homo Sapiens
  misc_feature (222)..(222): n is a, c, g, or t
  misc_feature (225)..(225): n is a, c, g, or t
  misc_feature (249)..(249): n is a, c, g, or t
  misc_feature (260)..(260): n is a, c, g, or t
  misc_feature (263)..(263): n is a, c, g, or t
  misc_feature (289)..(290): n is a, c, g, or t
  misc_feature (320)..(320): n is a, c, g, or t
cctttaagcacaggactacaacatatagaaacttagattagtgactgaatacgatagattcagggcatcttgaagtgcatgatttggctgaagtatagagttcataaaggctattgatggaagataaaaagttgataagaaacatgggacagatgacagaagcctgaaatgccaagtatgaactgcagactagttatgaaatgcatgcttttgttgtgaggnagnaaaaacaggaggggaggtataggntgatctttttnccnccaaggtggaaaatactggttaacannatattgtccactgctatgtagggctacccntatttcattcacccccggtaattttctaagg

SEQ ID NO: 154945 - DNA, 367 bp, Homo Sapiens
  misc_feature (17)..(17): n is a, c, g, or t
  misc_feature (66)..(119): n is a, c, g, or t
cctggaagactcctttnctctcttggtcgtcgtcgtcctctgattgaatttaggttgtgatttaannnnnnnnnnnnnnnnnnnnnnnnnnnnnnnnnnnnnnnnnnnnnnnnnnnnnngttattcctctggagtaagcagaagttatgcctacaagactaatttggcctgtttagttgacttgaagcatacagtgaactgctcatagtagaaagtgaagaggatggagtggttgaacttgaagttgatactggcctataacgctggtaagtctcatcatacgttctggagtacttttgtttatattcatcttctctagatgtttctgactccttcttttcttcttgtttctctttatcttgtttct

SEQ ID NO: 154946 - DNA, 366 bp, Homo Sapiens
cttagactcccttagggtggtaattggggtgggggtgagtagagctcttcctttgtatttagcttaataggtgtgattaattttatgtatttttgcttgtctgtttgcttcacattttgataggacagataacatctcccagctatttgtgtaaggtgcagggcattagtatactttaagattgagagttttaattttaaaaacagtaataataaatgcaggtagactagctgtgcttttgatgcaatgatactgactctttgaagccaagagttttgcgataatggattcaatgtggaacagagcaagccgaaagttagctttctcaggcaagagaaactgcagataaattaaccaagaactttc

SEQ ID NO: 154947 - DNA, 341 bp, Homo Sapiens
  misc_feature (293)..(293): n is a, c, g, or t
ggaaaaaccattcctagctcacggtgccacatgccatagtttgctgacccctgaattcaacctttctgcttttctgcaagctgcctctctctcgaaatgttttgacatctagcttgctgacacctttgattcaagcctggcgcagggggactggctgagctcacctgagtcttaaaggggccgcccacagagccaggcagcgactacagatccctcttatactccctcactgctgctgggaagagctggagggaaacaggaagcagtaatctcactgcaggaaggggcaactntagacatccgggaagcatcccgacagtcccgttcctttcggggagccg

SEQ ID NO: 154948 - DNA, 257 bp, Homo Sapiens
  misc_feature (99)..(99): n is a, c, g, or t
tactatggatagtgtagggcaagaagtgaattcttacactggaatgataaaaggaacctgcttcctgagtttcttaaaattgtgtctggaactcagatntgcactgcctagtatagtagctgctggccactgctctgttgagcacttaagctctggctagaacatgtaaaatacatatcagattttaaaacttaaaatgggaagcagactaaaatagctaatcaattttttatcttgggccaggcacagtggctcat

SEQ ID NO: 154949 - DNA, 471 bp, Homo Sapiens
  misc_feature (89)..(89): n is a, c, g, or t
  misc_feature (317)..(317): n is a, c, g, or t
  misc_feature (386)..(386): n is a, c, g, or t
  misc_feature (413)..(413): n is a, c, g, or t
  misc_feature (417)..(417): n is a, c, g, or t
aaatgtgttgccagtctcagaggaaactgtaaaataagtggagttttcgttgtcctggctttcttttctgcttctttttattgattttnaaattagcctaccccaatatcttccagggaatttttaaaaagttatctttctctctttcttgaggttcctcatatactctcactcacacgcacattttcacgagagcgaagtctacctttaactgaaatgaatgactgctgaatggtcaggaactccaagtccacatggaattcttgctcttcggtcccagactctcccttctgtgtcccccttaggcaggtgagcantctgtagtttgtagccacagctccacctggtttgggttttcttcctgtcattgccttattccagttaancattacctagactagttgctaagctgnaaantcatgttgtggaatttcatattggataacatagttacttttcttgttttttaaa

SEQ ID NO: 154950 - DNA, 317 bp, Homo Sapiens
cacaggacagccgtgcacaggcgtagtagtccccaatagactcgatgatgctggcgaccacggcactgagcatgccgatgacaccggccgcagacacggtgggcagtccccactgaactgtgggaggaaaacaaccatgaatgctcctagagaggcaggcgaaagtgaccaggaccagttacccaaagtcattctgaacgctgcaagactctacaagatccacttggattctgaagctcatggaaactgttcattttaaaatcttaagcaccagatgcctgggacagttgctaagtcagatgaaggcggccataatg

SEQ ID NO: 154951 - DNA, 450 bp, Homo Sapiens
  misc_feature (75)..(136): n is a, c, g, or t
caaagcggtgaggtaaagagaatactgaatgaggctcgggatcctgagttttagtttttaggctgctacaaactnnnnnnnnnnnnnnnnnnnnnnnnnnnnnnnnnnnnnnnnnnnnnnnnnnnnnnnnnnnnnnggaaagagcagaattccactccctcttgcttttacttgtgttgctttctctgctaagccagcaactccagttcccttcctttgcctatccccaccttattttcacctactgcaagctggaaaatgagatgcctcagtttgttagacctgggtggggtgtgatgcagaactggaggggttcctttctaattgctgtcctctggggttcttatccatttttgttatttaggggctttctttgctttctggctcaccactgagatggttgaaattgccacataaatgacccctggctcaagctagcacattgtccac

SEQ ID NO: 154952 - DNA, 207 bp, Homo Sapiens
ttgcaatggattttggtccattgatcataatgacatgtgacatctatttcaacacttagtatgtggcaaacatggtgctttgtatgtattatcacttttactgcctacatcaacaacattatgatgtaggtggttctgttccctcagttttggagaacaggaaatggaggcacagaaagatgacataactagtctgaggatgtaggg

SEQ ID NO: 154953 - DNA, 195 bp, Homo Sapiens
ctaacttctacccccagtccagcaagttatcctttaagaaatctcctaggaattctggagtttgaaaacaattgctctatgttattcctgcttccagtctctaagtaacaagggcatttaaaagcatagtctcttaaggtccactatagtggttctttatttaaggaataactcagctgggtgcagtggctcacg

SEQ ID NO: 154954 - DNA, 260 bp, Homo Sapiens
  misc_feature (75)..(75): n is a, c, g, or t
ccgggaagggaaggtcccgggacacgtcaagtatttcgtgcaagtccgtaggagtagggggctgcgtggcgatanagaggcggcgtggatctgtagggcagctggcagctggcattgccactcacctgggactccccgagggtcgagttctcaatccccagccggtgggagttgaacatctcccgcacgttggggaaagtttgctgctgggccgcgaacgtgtggccggggaggtggttcaggtccccgctgtggttgag

SEQ ID NO: 154955 - DNA, 261 bp, Homo Sapiens
  misc_feature (23)..(23): n is a, c, g, or t
ccaccttgagggacaaaagcagnggagtttggttttggtttagctaacttgcttgggtccgaacataggagtggtcagtatttatgttttcagtttggtgttaggtttgagcagattgcaacggccaaagttaatcactttctggcaatctcatttctcctctgttcacttgggttctgttaaatactaggaaaagactttctcagaagcatcagcctgtgttctggtattggcctttcaagcttctgcaatgtccctact

SEQ ID NO: 154956 - DNA, 1054 bp, Homo Sapiens
  misc_feature (62)..(62): n is a, c, g, or t
  misc_feature (209)..(209): n is a, c, g, or t
tagatagctgaagctgtttccagtatttttctttcagaactctgaagacaccctatagaaanttctgaggggaaagaatggtttctcacaaggccaagaggaatattatccaaaagcgaaacttgagtctgtatttcactgagtttggtattttcccgaggtgcagaaaggggaatctttggcttgatagggctaggtggctttttctnttcaggaacagtaaccgtgaaagaaagttctggctgctccgactgcttgaatcttggcagaaaatgggtagagatatgctggggtttaacccgggggctgcaccctcgtttggcttttcctcttttattcagggccacataccactcccgccctgttttttcagttctatgtattgctgaggcataggtattatagctattttcttgaaaacgctccctgaacttgcagtcatctgtgaacttggcacttgcatggagttttcctttttttgacatcgctaaaaatttgttgctgaaaactcctcgtattcctacaatcccctgagacacagcaaatatttccaaaacacttaacatattggcttcgtgggatccattgactttgccatccgggtagatctgcagatggaaaccgatgcccactctgcagtagaggctgccggtccggcgccccgaggggctccactggaaactgctctgctccaagccacttccttggctgcccagagaagctgcgggggaggaggaggcagaagaggaagacatagcgctactgctgctctgtctgctgctggagcctctagggttcctatcagtggcagcgggtccgggttgccctttgggggcgagacgcttctccccgtgagcccaggcgctgaggatcaggtggctgaagaagaggaggaggaggaaggacaagctcattcttccagccgcgggggtcctaagtgcatcttgtagggctgattctgggctctgtagcccctgtgcggctgcgtgcctctggcgctgcccgcctcgccgcaccgggtggacatagcctcggggaagagaaggggagaggg

SEQ ID NO: 154957 - DNA, 914 bp, Homo Sapiens
  misc_feature (76)..(76): n is a, c, g, or t
gctggttaggtgttttttcaaaatggaaaaatgccattttacccccaaaagcccacattaaataaggcacacccanttagcttttcaacaatggggagccccttaagtccaggaaaagacattttcccaagtaccatttgaaacttttgcacttcagtttctttcgcagctccctttgctgggtgaggttgccaacatctagcccttgtcgatgaggtggtctccatggccatagaacagctccttatactcatccagccagacctcggcaacccccaccaagttccgctccactgtcttcatccggtctttggggaaggaatatggattgtcatttctgaatatatggcccactcgggagcagggaatgatctcaatttcaccaccacacatccacaccttgaatgagagctccatattttccccaccccaaacatcaaggccagggtcgtatgttccaagtttcaaaaaagtaacttttgtcaatagaaaacaatccaccagccatgacagggcaccttattgtatcagtttctttaattctgttttttgcaatgacatctggaggaattgttctccaaccaaagttcatgggccacacaaaagatgcctctttgaaagttatccactgtcatgtaactcatatccttatcattgatgacttcgattactggacaggccactttctttctacttaaataaactctttccagaagaggttccaaccaaccaacgttacattccacatgagaatctaaaaatgtcaacacatcacctgttgcattctgtgctcctgccagcctggcccttattaagccatgtctctctttgaggcgaagaatccgaacttttggaaactgggacatgtatttatccaaattatcttttagatagtctttggtgctgaagtcatc

SEQ ID NO: 154958 - DNA, 427 bp, Homo Sapiens
  misc_feature (15)..(15): n is a, c, g, or t
ttactcctctctggncgggcagccctggaaaaccttgagtgccgttcacaccaggcggaccacgctcaccgggtccaccctcatcaccaggatagcctcggtagccgtcttctccaggaataccctttggcccgatgctgccgatgggcccgcggtctcccctctgcccagagcacttgcagggaaccccacagcaagctttctcggcaatgttgtcaagctgctccgctagttcataatccaagtccagcaagttaagcctcaggggcctgtcatacataaaccctcgcccaaactccagatgcattagccgctccaagttgaccactcgttcaaggcccaccaggatcaaggcacggactccttcttggcggaggttctcagatgctctgtgtaaatcagccagatctccgtctgctccatcagt

SEQ ID NO: 154959 - DNA, 327 bp, Homo Sapiens
tcttttattggaaacatcagggaaaaatttggaggagaaataacagaaaatatcactctggcagattcatggtccaaaataagcagatgaattggggaacagctcaaataggtcctttgggggattagaagggagggggaaaaacaaaagatatgatttaataaataaaattggtttctgagttttcatttgtaatcaagtatatgccagacctcattttaaaagctctgggctagcaaatgtgcatgtgaacgcacataagctagatccaagagttatccccaaattgctaaacctttttaggtaaggccagaaccacaaatatcg

SEQ ID NO: 154960 - DNA, 322 bp, Homo Sapiens
ggtaaacggggccttgggtctgcaagccacgtatcatgactccaacagccagctttcctggcctgataacaaattgcctaggacctgccactggctctcgcctccctccacctcactctggcagctccctctgccccatgcatggctttgctttggccagagccctggaaccaaagccctttacctggaggggacattgagactattggcgcatcctcctgggaggcccagagagggtaagagccttgccttgaggccacacaggccactggaggtgtgcagagcctggagccccactcttctgagttttgtttttccaatt

SEQ ID NO: 154961 - DNA, 827 bp, Homo Sapiens
  misc_feature (51)..(51): n is a, c, g, or t
  misc_feature (56)..(56): n is a, c, g, or t
aaaccaccaaaaatcggaaacagaagaaaattaaaaaacccaccctgcccntaaantgagtaatttccagaatgcagtatccctatgttctacagcaggtcaggaagatggctataaacagagtccaggagggtctggctggcttcctggctcttgactccaataatttcgaatagccggtctagtttgtcctcagcctggggaatctcttcaatcacccgcagctcctcaggatttagaaagtggagcatgtcatcaaagataggctgcaagtcacaggggtccaggcgtacctgccgcaacactgtgtccttcttttctttggtaataaaggaaccgttcctgctcagcgcggaggagccgctggatgtagagtcacagcggagaaggggctccgactcatccacgaagaagcccttgttcttgtcctgtggggaaggctccaccgtcaggagagcggaattctcaagtttcgcgttggggctggggatggggctcgggctaagcgggctggggctcatcgggagagctagtttgtcagtttccagctgggtggtgtcttccatcagcccacgaatcttctccacaacatcgtttctccggtgctggcgcagggcgctaattagctgggcgaggctggcctcggggccccggatggtccagtgctgcagagctgcgtaggcccgctcgtggtcggctgtgtacccattggagaaagcagcaacctccctctcactggcattgcaaagaaactgatagatatctttccactggcttcccacttgggctgctacaagcttcaggatatcgataccatggccattgca

SEQ ID NO: 154962 - DNA, 705 bp, Homo Sapiens
caacaaatcattctgtttattgatcctcagaattgaaacctatatccactatttgtcagtgattttcccaggctgttgagttctgatttaggcaaaagggaaaaaccatgtatgactgtaagggaagtgagaactcagtaaattcttataagcacacaagcagatttcaattaaataacagatattagggtgcggcaatattattaataatcacagccagtaactacagagaacataatatatgtcaggcactattctaagctgtttccatttactcatttaatactcaccataatcctaccaggtaagtactattattatcgctaatttacagatgaggatatcagtaagtttggcacagagaagctaagcagcatgttcaagatcacccagctagtggggtttcaacctgggtagtctagctcaagtctacgctcttaaacactaatctttctttataaagataaaagactaccttgagaaagagggtatctttggactgtgctctgtttatcacatgaggacacttgctctaaatattgtttaaatacttgttcccactaaaatggggaccctccctgatatgttcaaatgcccaatgttcccctaggtcctaacatccagagaattactgtgtttttaaattctcaggagcttttgcagtgctaataagagtggaaaaagtggaactctgtgacccaaaac

SEQ ID NO: 154963 - DNA, 396 bp, Homo Sapiens
ccagtggagacctagcaccctatgacttatgagtgaaaattactaagctacttcatattgtattttcattcccagaacgcagatatactttatgtcatctttcctacaattgtaagtcatctttttaaatgtccatttttcttggtgattgatatttcctccattgatttattaattacacagatgtttgaatgcttgaccacaggtcaatcccctgtgttaggtgcattaaacgtggtaatgaacgagtgaaagtgttcgccttcatacagcttacggttttaggtagtcatggaaatcggtgatggttcacaacaaaatgattttggtgaaaagaaatacctgttatatgatttaaagaatcaaagcataaagacataatcggaaacttggatg

SEQ ID NO: 154964 - DNA, 267 bp, Homo Sapiens
  misc_feature (231)..(231): n is a, c, g, or t
  misc_feature (248)..(248): n is a, c, g, or t
ctgagagtctggaatctgaaccctagatgaatctactgaagaatgctcaagatgatggataccaagctgagtgagtctaggggagaagagaggcctgaacaaaagagctggggccttcaaagaggtgtatgagaggtgaggttagtagtgccaggctttcctatcttttccttctagtttgctagaaacaagtacaactttagggtgtggggggaaggcaggtagacatgnagaaatggaaatacagntcattctgctagacatttt

SEQ ID NO: 154965 - DNA, 470 bp, Homo Sapiens
tgtaggcaattacagtgacattcccaataagagggtgccctacattaattcctaacactggtggttagcagcccaaagtaacccaaaccaaaataaagacctttcacatttcatataaaattagaaaaaaagtaacgagataaataaatacactaaagtttaagtattttaactttttaacttacatggctaaagtagcatttatgaatacctataatagtcaaaggcctaatttatcttaactagatattctgaagacaaaaattctaggagcaaaattaaattccatccgatcttgaaaacttacaaattgttaatcatataaggctttttttccccaaatgctatcaaattcataagtcatttttttaaagacacttaaagggatcatatgcagtgactatcatagaagtcaaaaacaaatgggtgaagcccttttctggttacccattagaaagtgcttcttcata

SEQ ID NO: 154966 - DNA, 449 bp, Homo Sapiens
  misc_feature (428)..(428): n is a, c, g, or t
ctcgccttcattccaactgaaggctgctgccttgcctcctttccctttaggagcttctgcccagaacgggcttgcaagtagcttgccagctgaggtccatagcctcaccctcagtcccccagaacaagccgcccagcctatgcagccgctgccagagtccctggcctccctccacccctcggtatcccctggctctcctccgccaccccttcccaatcacaagtacaacaccacttctacctcatactccccacttgcaagcctgcccctcaaagcagatactaaaggtttttgcaatatcagtttgtttgaggacttgcctctgcaagggcctcagtcacctcaaaagctcaacccaggttttgatctggctaagggaaatgctggtaaagtaaacctgcccaaggagctgcctgcagatgctgtgnaacctaacaatacctgcctct

SEQ ID NO: 154967 - DNA, 275 bp, Homo Sapiens
ctgcaccctttttgggtctcccacaaacactaaggtcagtgaatccttgcctgttgcatttaggaggtcaagcagaaatgaccgtttgtctgattcttccacccaaactactttctgtgtgatgttttcagaggtagagccaactcttcctacagccaagaagatatattcatctaagaaattacgagccagcatctgtatttccttaggaaaagtagcactaaacatcatagtgtggcggacaccctttggaggcatagtatcttctcgtgccg

SEQ ID NO: 154968 - DNA, 312 bp, Homo Sapiens
  misc_feature (37)..(37): n is a, c, g, or t
  misc_feature (159)..(159): n is a, c, g, or t
cagcaccccgttgatttgtccttttggaaaggcccanaaaaaattctctgcctgtgaataaaacatctccgccatctaaagttgcattttcatctttcatctctactatattgagctgaagtttttctaatgcttctttcatcatgtcaacccataaanatttgcacatttcgcctcctgtccgtcaacttggactgatctgcggctcccagcggaggcggcgagaaggcgacgggaggctggggtttctggacggtctttgggcaggacttgaggagccgctgtttctcttgcctaatgtacgcgcacgag

SEQ ID NO: 154969 - DNA, 878 bp, Homo Sapiens
  misc_feature (87)..(87): n is a, c, g, or t
  misc_feature (594)..(594): n is a, c, g, or t
tgaggaatgccgcattcctccagccctgtaactcttcaaaagctatttagaaaacggtcttggatgaagtagggatcggcttcggangtatactgttcactgaagtcaaccaaggcgtcccgtccatatggctgccggcgtcccgtcacggggatgttacacagctgagcatagtcatctgaatccttcagggggcagagggcgcactgcatgccccaggcctctccatacagacagcagcactcagtgtacgttgtctgcttgcccacaagaggccggctacacacgtattcatcactcagatgttcccagcacaaatcttggtagacatcagtttcttctatttgttcgtttgactcagccggtcgtatacatcttttttctgacgcatccaggaccatggggtgagtacagaagcagttgtaagagccctctgtattaacacactggccatcaatacaactactggggtcttgacattcatccatatcaaagcactgcagtttcacaggatcatagtacgtcccttgcttacagtagcattcatacccaggccgagtgttcaaacagaaaccatttttgcagatttcttgntccaaaaagtaggcattcatctgcatctttatagttctcaccaccagcttcagaagatgattctccaagcaggcacaaaacctttccctttgggacacatttcagtgaactcagcagttcccaagaccgggcaggggaagatttcgcagttatctccccatcccgcgcctgatgtacagcagcattcttgtttcgtgacattgggggccaacacattatcacagagactggcgtcattgagattatagtagcattctttcttttcttctttgggttgatctaca

SEQ ID NO: 154970 - DNA, 495 bp, Homo Sapiens
  misc_feature (62)..(77): n is a, c, g, or t
gtgccatagctaaaattaaccctcactacaagggaataagcttgcggccgcatacgcggtcnnnnnnnnnnnnnnnnagtaatcttttagaattgaaattatcataaatgatcgagaataatcatcacatagtttaagattgtatatgttgagtagtttaaaacaatctttgcattttacagtaagaatcaaagtcccttcagtgtgcctttgtcagctaatatgtgaccagcaatgacaaccttgggagtatttattaaatattatgctatgaatataggcaacacagaacagggtttgcagtatagcgtcttgatgctaaattctcatatacctctacacgagaaatatggaggagaaaaacaagcatttacatatattcttcgtcactttgaagatgcatggcctgaactcgactgcttgtgtttgtttacatatcaggcatacccaggcatctcctgcagccagaggttccattgctgtctttgctcagtc

SEQ ID NO: 154971 - DNA, 614 bp, Homo Sapiens
  misc_feature (438)..(438): n is a, c, g, or t
  misc_feature (577)..(577): n is a, c, g, or t
accacatcttctggggctaggttggaactgggcatcttggaggcagagcccacccagagctgcactcagacctgctgtatcttccagtgaccagcagagcttaatcaggaagcttcagaagagaggtagtcccagtgacgtagttacacctatagtgacacagcattctaaagtgaatgactccaacgaattaggtggtctgactaccagtggctctgcagaggtccacaaggcgattacaatttccagtcccctaaccacagacctgactgcagagctgtctggtgggccaaagaatgtatcagtgcaacctgaaatatcagagggtcttgctactacgcccagcactcaacaagtaaaaagttctgagaaaacccagattgctgtcccccagccagtggctccctcctacagttatgctacccctaccccccaggnctctttccagagcacctcagcaccatacccagttataaaggaactggtggtatctgctggagagagtgtccagataaccctgcctaagaatgaagttcaattaaatgcatatggttcttccaggaaccaccttaaaggnggaacctacaactacggcttggcagttgtttacttat

SEQ ID NO: 154972 - DNA, 317 bp, Homo Sapiens
  misc_feature (265)..(265): n is a, c, g, or t
cttagttaggacaccatattggcagttgtggggctgccaggttatttctctccagtcacacgtcctgttgtccgaacaactaaggcaaggcacaatcccactggcctttcatgtccccagatggacatctttttagttcagactgtaaaatggcttcaatgtagtcagaagaaataggctgtaacccacaggtttcctctggatgaatcagcaaaccacaatcctgcacaaaaccacatgctgtgaaggcctcaaacaagggcanacttgggcggtcttctctatagatggtgagtttgtacgtgatcagagtctca

SEQ ID NO: 154973 - DNA, 372 bp, Homo Sapiens
  misc_feature (236)..(236): n is a, c, g, or t
aactggtctggtttgggaattttgcaggtaaccctgaaaactgctttttttatttggaagttctttagacttcaaaactcttaggctgttgtcgaacttccatgacatgctttcgtcttagttctcgttctcttcgcttattatattccagctggttagtgagctcagtttgatgctgtaatctgatcaactcacagcgcatcttctgaattgtgttgaggtggcggaactccagntcttgcatagattcatgctgtcggagtagcatggcatgctctaagtccttctgagtctgtcttttgtttaactcctccctgacaaggtcctgctctaagttatgacgcccaagtaacattcttctcttgaagcgac

SEQ ID NO: 154974 - DNA, 346 bp, Homo Sapiens
  misc_feature (234)..(234): n is a, c, g, or t
  misc_feature (295)..(295): n is a, c, g, or t
ttaccacccattttttatatatgttgtgtgttctagtgctttggttcattcctaacttggaggaagatcttaagtaaggttagagtaaggatatagatgatgaacttattcaatgcaggagttgctctcatcctttgagaccataagatttttcttagttgagtcttcaagtagctattgcttcttatttatgtgctttcttcttacttcattttgtgtacctctttatatgtnaggtgctcccactctttcccggcttttagaagctggtcctacacagttcaccacaactttngcttccttcactactgttgccagtgagcctccaagttaaactttgtggcca

SEQ ID NO: 154975 - DNA, 349 bp, Homo Sapiens
  misc_feature (30)..(30): n is a, c, g, or t
ccatcaaactggaatattggataagcaggntgatgagatatataaggcagatgggaagaaaacatggaattagagtttttaaatccacaggatatcatgatgaagggttttaagcagatacttcataactagtgccatactaatttagttagaaattaaatcatgttttggaattgaaagccaaaggcaaaaagagctctcctgtgctgaatggcactgcccgagtacaggaatggaaggagcattcactgcaggaggcctcagcacatcactcggtggtgataaagccactcagccagtcagggatggaggagggggcccccctgccagcatcaggaccagacctctg

SEQ ID NO: 154976 - DNA, 469 bp, Homo Sapiens
gctccctgtgacttctgtcccagctggaatgtgaggaaggctgcctggaggaagtggccactttgattctgggggatgagtgggatagcatcttggcaaagaatgatgtttcctgtgggattaccagcagttctgggcagctggaaggtttggatgcaggaaggtgggatgcaagccccttgccaggctcagctgcaggcattcgccctttgtgtgttaacactgtagctctaatcgtgcctggtgttctgaagcaggctcctcttccctgctgctgtgctgccatcccctgctcactccgcactcgcatgcattgcgggattcagcacttaagccctagtgtgtaaaatgaacttggatcttcccttcctgggcagactgtgaaccctcagcacaggggctctgtcttagtcagctctgtggcctggtacacaattggtgctcattaaacacgtgttgaattactggc

SEQ ID NO: 154977 - DNA, 353 bp, Homo Sapiens
  misc_feature (306)..(306): n is a, c, g, or t
  misc_feature (337)..(337): n is a, c, g, or t
ccaaaccccagggtagccatggccgggtaaagcaagggccatttagattaggaaggtttttaagatccgcaatgtggagcagcagccactgcacaggaggaggtgacaaaccatttccaacagcaacacagccactaaaacacaaaaagggggattgggcggaaagtgagagccagcagcaaaaactacattttgcaacttgttggtgtggatctattggctgatctatgcctttcaactagaaaattctaataattggcaagtcacgttgtttttcaggtccagagtagtttctttctgtctgcntttaaatgggaacagactcataccacacttncaattagggtcaagcc

SEQ ID NO: 154978 - DNA, 342 bp, Homo Sapiens
gaaaagccatattgcggatcctcatagggatggtatttgtactaataatcagagatgtaatgaaaaagatcaccattcctttagcctgcaaaatcttcaatataccgtgtgatgatattcgaaaagcaagacagcacatggaagttgaacttccttatcggtatattacctatggaatggttggtttctccatcacattttttgttccttacatatttttctttattggtatctcttgaatggagaagtattgtttatgataagaaaggagggtatcagttactgatacccaaaaatatattccaggtaaaagccaggtcagaatttaggctttttgcaggg

SEQ ID NO: 154979 - DNA, 886 bp, Homo Sapiens
  misc_feature (45)..(64): n is a, c, g, or t
  misc_feature (81)..(297): n is a, c, g, or t
  misc_feature (666)..(666): n is a, c, g, or t
  misc_feature (692)..(692): n is a, c, g, or t
  misc_feature (722)..(722): n is a, c, g, or t
  misc_feature (814)..(814): n is a, c, g, or t
  misc_feature (821)..(821): n is a, c, g, or t
  misc_feature (834)..(834): n is a, c, g, or t
  misc_feature (850)..(850): n is a, c, g, or t
aaccctcaactaaagggaataagcttgcggccgcatacgcggtcnnnnnnnnnnnnnnnnnnnngagatggagtctcactnnnnnnnnnnnnnnnnnnnnnnnnnnnnnnnnnnnnnnnnnnnnnnnnnnnnnnnnnnnnnnnnnnnnnnnnnnnnnnnnnnnnnnnnnnnnnnnnnnnnnnnnnnnnnnnnnnnnnnnnnnnnnnnnnnnnnnnnnnnnnnnnnnnnnnnnnnnnnnnnnnnnnnnnnnnnnnnnnnnnnnnnnnnnnnnnnnnnnnnnnnnnnnnnnnnnnnnnnctcccaaagtgtcagatgattttaacaactatgcttccatgacttgctgggctagatgatatgactgtaaaatgcctaacccatggtttagcatcaagtaagcaaattgtaaatggtagcgctgctctgcctatgactagtcttgtgctttaaactcaaatatttgttggcctactgaagtcaccacacagagaaagatgcttttcattctcagtaaagaactttgggagataactggggcaggcagcaagagaacagatgtcatatgtctagcatcagcaaactcatcggaactgatgggcagctcactttgcttagaacctgcaccagcatacacacggggctgcttcccagtcacactgctcctgngaaggtaggggggctgctgttctgcnattagcgtggttctttacctcctattactngactgccagagtcatttgtgctcagttaggtagatgaccattcctgttcatcccctatttcctttgctcactaatgtgtttacattcactancctacanatgtgatttatancgacttttcctttganatggagtggaggatcctccctcgtgcgatttctggc

SEQ ID NO: 154980 - DNA, 878 bp, Homo Sapiens
  misc_feature (644)..(644): n is a, c, g, or t
cagctatgaagatttttgtaacaactaaaaactcaaaaaaccaaggcatagaggaagctttaaaaaatcgcaattttactgtagaaaaaatgagtgctgaaattaatgagataattcgtgtgttacaactcacctcttgggatgaagatgcctgggccagcaaggacactgaagccatgaagagagcattggcctccatagactccaaactgaaccaggccaaaggttggctccgtgaccctagtgcctccccaggggatgctggtgagcaggccatcagacagatcttagatgaagctggaaaagttggtgaactctgtgcaggcaaagaacgcagggagattctgggaacttgcaaaatgctagggcagatgactgatcaagtggctgacctccgtgccagaggacaaggttcctcaccggtggccatgcagaaagctcagcaggtatctcagggtctggatgtgctcacagcaaaagtggaaaatgcagctcgcaagctggaagccatgaccaactcaaagcagagcattgcaaagaagatcgatgctgctcagaactggcttgcagatccaaatggtggaccggaaggagaagagcagattcgaggtgctttggctgaagctcggaaaatagcagatttnttgtgatgatcctaaagaaagagatgacattctacgttcccttggggaaatatctgctctgacttctaattagcagatctacgaagaacgggggaaagggagattctcccagaggctcgaggcttggcccaaccaggtgggcaccgggcccttgcaaaacctgcagaacaaaacccaaccggggctgggggccaacagcagaccgggccaaagcaactgtgacacctttgaggg

SEQ ID NO: 154981 - DNA, 373 bp, Homo Sapiens
tgggcccaccagggatgcccagtttaatttccacagtgtacagatgaggcccttgggaacatggggcaagagtcccctggggaggcacagcctgttcccaccatgatgacagtcccctctgagcagaggacaccaatatattaggattatggcaaggaggctgggcaaggcggagctgcctagatgtcgccatgtagcctggttaccccgacctctccctagggtgggcccaaagatacacattcggagattctcttcctttgtcaggcaggcacaggcaatcttggcaaccgaggatggctgggcagggcgaattgcagagcgcgttagtgttacggctgtcattactattaactatgttcagaaggctgga

SEQ ID NO: 154982 - DNA, 268 bp, Homo Sapiens
  misc_feature (87)..(87): n is a, c, g, or t
  misc_feature (250)..(250): n is a, c, g, or t
ggagacaaggtctcactgttttgcccaagctgaagttcagtggctcagtcatggctcactgcagcctcaacctcctgagctcaagtnatcctcccacctcagccttccaagtagttggaagtacgagtgtatgccacaatgcctggctaattttggtatttttttgtagagacaaggtttcaccatgttgctcaggctgttcttgaactcctgagctcaagtaatctgcccacctcagcctcccaaagtnttgggattacaggcgtga

SEQ ID NO: 154983 - DNA, 282 bp, Homo Sapiens
  misc_feature (163)..(163): n is a, c, g, or t
  misc_feature (190)..(190): n is a, c, g, or t
cggcacgagaacatttatctccagtcagcacacttgatgttcacagttagacatttaaacaagagctcatcctttcgtagtagatataaaagtaatttgtaaagggaagattgttttaggaacctgggcgatgctgcaaacacagagtagcctgatgcatttntaaggaaggtgaatcttcgtgtctttnagcatcaagccaataggaaggtactggggaacggtatttacatttgacaaaagaaattactggttagctatagcaacagattggacaatttt

SEQ ID NO: 154984 - DNA, 298 bp, Homo Sapiens
ctccttatctctgtgcttcttttgctgtgtaggcttgctttcttcgcatagaaggcacaggaccagtggcctctgtacctcacagcttcaagagcagataggagggagctcttccctttgccccggttgaaaaacttcctgggagatgactctgtcctgccctgtggggtagtgggtcctgtgattggtcagcttcctttatcagaaaaggctgtgtctggtgaaagcagtcacaccagcttccctatagccccgcattaaaagctgagttggagagagggagggagagggccctgtg

SEQ ID NO: 154985 - DNA, 335 bp, Homo Sapiens
  misc_feature (312)..(312): n is a, c, g, or t
atgccatggtagggactttggaatttaattcaggtgatgtgggagtccctgccagatggatggagggtgaaataatgcttaagccctcagccttactccatctgccttgttcaggagtgactcctaggaggaggtggcaggaactggcacctctgatcctcagctctaaaagggtctgatgctttcacacctcaagagatttgcacaggccgttcccctgcctgggagcaccctcccatggctccttcttggagaagtgtgccagttcattctgtaatcaagaggaacgatgcttttgcttgagcacttgtntacaatgccactttgtaatgtat

SEQ ID NO: 154986 - DNA, 292 bp, Homo Sapiens
atgtgctctcccactttcatccaaagctaatctggatttatcttcacagggacttacatcaaacttctgaagtgatgttcccctggacatcaaagtaaataaaccttgccataatgtgtgccccaatgccaaaaacttgtcatggactggtcatgcagctagctgcatccttctgaagtatttcagttaccccattggaaagcctttcatacttcagcttgggttcctcttcgctctcttcttcctcagactcatctgtagattcttcaagggacccagtttcctgctcctc

SEQ ID NO: 154987 - DNA, 452 bp, Homo Sapiens
aaacccaatgctgctgctgctctagcttgctttgcccatgagtgcctggggaggcacaagttcgatctgttgtgttaactggctggtgcttgaatctggtgcgagcctgctgctgataacaagtgctttggctggatgacttgctgcagttgtttttcttctttgactactggtgctgccatagtctgttggtttacagtcttaactgcaggctctacctgaacgagtactcacaggttccagaggcttctcagtatcctgagatggtttttgagccaaagttgcagtttctgttgaaggaaatttctctgcttctggttgaattggtggtggaactgactgtggctgaattggtgctggtggctgaggtggtggtgggggaggaggaagatccttcttttccgtcttttcaggctttacaactactttttcagtgaccttttcggcctttt

SEQ ID NO: 154988 - DNA, 354 bp, Homo Sapiens
aactagagctcggttttccatctctggagttttcctctgcccagattgtcacccgacttggcgacagcgggggagtcgaggagcagagactcggcatggattctgcgtaagcgttctttaagatctgtgttttgtgctagggcggatgacagggcgttcttcagaccaatgacctgagcagacggggaggaggaggcatcctgctccatcagctgcttcagtttctctctctccgctgacatgatattaaaagctgaccttaaagtgaagtaaactttatgggcaatatgacacagatcttcttgcattttagaaaactctgatgaggtttcagagccatcagaataatttttc

SEQ ID NO: 154989 - DNA, 917 bp, Homo Sapiens
  misc_feature (118)..(118): n is a, c, g, or t
  misc_feature (282)..(282): n is a, c, g, or t
  misc_feature (306)..(306): n is a, c, g, or t
gactcgtatggtttttcccggaagcactatttggtccctcctatggaatatgctctgttcacattgtgaggactttcgattcccatctaatgctttataacccagtctttcattactntaaagaaactccttagtggtcccatgcgcgaaatacttccattactctcgacatatgacccaagattaactgacttatcttaatatactgcaaactcaatattagcatgttaaataattatccatgcctgctggtgatatgtgataaactaggtgtattccacntactggaaggtctagaccaaaatnacacctcaaaattgacactaccagcattaaaccaattattgcctgagcaataaaatgccacataatctaccgcttggaaattattatagatccatttaaatctttttgggctgcttggatcattgccaacagcggcacccgagatggaatacccacaagtctcttcagttccccagcctaccaggcagcactgtttaacttatggccccacaaccatactactaatgaaaccgtaacaatcttttgtgtttactaagagaattctccagaaaaagtgcccccctctctaatcaactttgatgcttacaaaaattaaaaaacaaaatttactcaactacataaacctattaaggcattttagaaattcatgtccagaataatggaaaattttcaagctctcaaaatcctgctatgtttatagggcaattcttagatttgtggaaatgtacactgcactgagagaagagtgtattacctataagctgctctgtggcaaaatggtagcttatttctaaggtcttcttagtttgatttgatcaagaccaataggtctgagcttcaagtgatcaagttctattatgtcctacatacagtgacaggcttccatgatg

SEQ ID NO: 154990 - DNA, 580 bp, Homo Sapiens
  misc_feature (85)..(85): n is a, c, g, or t
agaatatcagtccccaagatagaagagtaggtatgaagcaattctgactcaacatgtccgtaaaatgttaggtatccaaagaggncggcaagcagatacatgagaaacatagcaaaaaatgaaatcttggacacattcatcattcttctacggctgcggtctttcagttcttcatagatgggaagaacagcaggatgacagacaaatgaaaagatcagaattggcacagcatagacagtctgtgagttgaaaataaaatagtgaggtctgcaagagtcattttcagtcacgttatgtgacaaagcaggtacaagagctgttggctgtgttaaggtggtgtttattgtttcgttaattatcaaagcagcttccacaggacacggaacctgaaatttcttgcaaatgaccacaatcagaaagaacaccatacacaacaaggaaaggccactggtatatcccaaatatcctaaatttctaaacagcgacaaaggaagaatgaccaccaatgacaccaacagaaccaaatagttcccgttcagataccacatccagtctatgttcaatgttcggaaggaagtaa

SEQ ID NO: 154991 - DNA, 413 bp, Homo Sapiens
  misc_feature (331)..(331): n is a, c, g, or t
ctacaaccagtcaagcaacaaatgtttattgagcagctattatgtgccaggcactccactgagcatttggaatacaaagatgaattgaataggatccctgggatagacagataaatagggaacacaataaactgtggtaagttgtgctagaggggagaacaggtcctgtagaggccttggggagggtcagctaataaaagatgctgtggacaggccactcatttatccgcataggtgtgcatacatctcacaactcccgtttgccactcacagacaactttgtaaaggtggtcctggtcttgaagttatccaggagagaaagataggtttnaaccaagggagagacaatttcaggaggggaattcattttaattccaaaaagttatttctggtagttgggaatttgacaatag

SEQ ID NO: 154992 - DNA, 495 bp, Homo Sapiens
  misc_feature (445)..(445): n is a, c, g, or t
tgtccatcccccttcgtggtgcaggagtagaacgtcctgccattgtaggtgaatggtaagacacatggctctccatttgagttgccaccgtaagtctgggttacagctgtctcttggcagctgactccgttgcccaggcacgtgcaaagcatttgcttatttccttgtgtcttcagccactgcatccccacagagtagaccacaccactgtctgtgacacagtggccatagggaggaggctgggggtgaggctgcggttggtaaacagctgcacgaacatcggtgaaggggccagatccgctcgatgtggtctgcacagaggtgtgcctctcacacttccactctcctcggccgttgcctgtgcagatgcactggagcaggtttcctcgattatccttcttgctccaggtgtctccaattctataggatgtccttgtgtcctgancgttgcatctatttctagaagtgcaagtgatgcgtccgctgccttctccc

SEQ ID NO: 154993 - DNA, 461 bp, Homo Sapiens
caccgctcataaccgacagcgagtccaggatcacagttgacagtctggacgagttctttaccctgatggcgtacaacccagttagggtcattttgggatgtccctttggggtccagaggaatcatctggaatcggcggaaatcggtctcactgatgtcaacattctcaggacagatgtcatcgatgtctggcacactgtcatggtcaaaatcatctttgcaggcatcacctcgaccatcgccgtcagagtccttctggtcgggattgggcacgagtctgcagttgtccttgtcatcaggaatgccatcgttgtcatcatcgtggtcacaggcatctcccttgccatctttgtcatggtcagcctggttggcattgggcacatagggacagttgtccagattgttctggtggccatcttcatcaatatcctgattgttgtcacaggtatctccaatgcggtc

SEQ ID NO: 154994 - DNA, 529 bp, Homo Sapiens
ggaacatttggcaggatttggagacattttggttgtccacatctgagataatatcattggcatctactgaagcagatgctaagcatcctacgatgcacaggacagccccccacaacaaaggatttatcctccaaaatgttaacagtgtcactgagaaactctattcatgaggatattctgctctcccaacaatggccccccaccccgcccatcagccccaatccattggaaatcagtgctacacagtttaggtcacaatgcagagacttatgcgagatcccctgaaaaacttttgagaccccagaaatcttttttaaaatggtgaatttcattaaagagatagaaaaggagaagattagaactgacaataaaggaaagtaagtatgggcaacaagggtgaaccaaaaaagggatcaaaggaggctgaggcgctgagtgacagcagcgggaaatcaatgctgcccctcagtggacgcagcccatttgtaaagagatgataaacccatgaaaaataacaggcacaaaaaat

SEQ ID NO: 154995 - DNA, 575 bp, Homo Sapiens
ttttttttcatagagcaatgggggagacagttttattccaatgcatttacagtatttacagacaataaatatttctaatactttccatatgttcactattacagaatcctgcaatatgtccttggaaggtctctgctgaaaatttcaatgcctccgtgaatcgagctccagcgacgttgtggaggtgtcagacaggtggtccccttctagcccactcccagtcactccagagtctaaccaggcagagcgagttcgccgttttttcttttcctgctccttgcgtttcccgggcttgcctttctttttcttcccaggtgtcttgagcggctgctctttgtacgtctccaccttgttagtttcctgagttaggtatctgccctcatcatcagacccaaatcggacggggtggttctttgtgttgggagagggcttggagttaggggacacctccgaggtagctctgatttcaagctgtgtgatttcctggatcagatggtgaggaagaatcgcgccgtaatcttggatgacttccccttgtcatgaggagctgtgttcaacacagctctttgaggcgg

SEQ ID NO: 154996 - DNA, 464 bp, Homo Sapiens
  misc_feature (413)..(413): n is a, c, g, or t
tttgatttggggtaaagtttaatggaaaagccgtggaaacgttgagtttacaaacaggacttcccgtgcaactgtccagccagacctggggcagctcctggggaccctgcccccttcacacacacccatcccatccatggtgcctgagaggccttcatcttcagttccctccaccagatcagttgggcatgttgggggcagagatggagggttgttgaatcacactaggctctgtaagctgagaagacgatcctgcacagggtggcgtaagccagtccctcctgccagggcaccagctcccgccacctgggatccgctcccggacctcggccgcccgagcctcccgactcgcccgcccaccggcctcgctttccagtgcctgctgtctctttccggggcgcagggacccccangcggcgccacgacccggagctgggtcggaggccatgctggggctcgggcca

SEQ ID NO: 154997 - DNA, 426 bp, Homo Sapiens
  misc_feature (272)..(273): n is a, c, g, or t
  misc_feature (275)..(275): n is a, c, g, or t
tttcctttcaaatgaagaggttttattggaagttgcatagagaacacagtcagtcacgagagcagaaggagcaggttccaggattctggggagataagggtccaagctgagaactcccctgagaagtctgtatgcagacagccccgggtgatcctggctgtccaagggctgagggcgggttgggaagggccctcatcaccccaggggccagctccccacatagcagttgagtagcacccaaagaacccggatcttcactcaaggtggctggnnanaagagccacagcccaggccaccaaagccaccagagcccctgtgtggcaaggatcatgatgcgagggtggtgagttggttgctgttctcagcaggatcctgggtgtaaatggccatgcctgtccagcacggtttatggggctgagcatgtga

SEQ ID NO: 154998 - DNA, 431 bp, Homo Sapiens
tttttttcaaattaaaatgttacatgggaaaatcagattacaaagttgcatacaagtatgtaaatacaaaaataaaggagaatggaaaaggaaagaagacaagagatgcaccaacaaatccacccattcaaatagtccaggaagaaaccaggtcaaatcgccaatcactggagatcattagtctaacagaattgttaggacaggaacaagactgttatttccttattttctatgaggaaatgtattaactaaaatccatggtatcctatatccccagtatctgttatgtaatataaattctcacattacagataaactgatagtagttgctgcctccaagttgcccatagcagagaaggaagtagacagaatatctggtcagagtcccatgacttaatttccttgtgtcagacttagtatcctttcaagat

SEQ ID NO: 154999 - DNA, 148 bp, Homo Sapiens
tttacatttttaaaaagtgattttatttctatatactagtaatgaatgtttgaaaatttaaaaaccactaccattgacaacagtagaaaatatataaaatatttggtataaatataaaatatgtccaggatctgtatgctgaaagtgg

SEQ ID NO: 155000 - DNA, 370 bp, Homo Sapiens
  misc_feature (15)..(15): n is a, c, g, or t
  misc_feature (207)..(207): n is a, c, g, or t
cactgccgggaccancctgaaaaaacaggtcccagatagggattaaaaggcggctgctgatgcattggtggctaagcttggtgcaactgaaaacattggcacgggttgtaatggggcaccaggcatcatggcattggctagttgcatttgctgggccaacatggccatgttcttctgctgaatcaagttattgcgtccatttatctnccaactgcgtttttaaatgtgggggtggatgaagatatttgcagttctccctggagcaacggcctttcaatgaatcaaagcaggcgattactcgtccattttcaacttggcagcttttcgaaggatgtgcaaatttacattccgtgtctgcccgtgagcaaag

SEQ ID NO: 155001 - DNA, 331 bp, Homo Sapiens
gggaaagagccatagtgtccctagggtgggtagagatgccagaagagggcgttctgagttttcatcttctctaccttgaaaaattttccatttgttctctggctgcgttccaaatcgaacgaagacttaaggtttttagtttacctaactgattgaatacacttttaaaatgaattcatgtgtgtttactagtttatcagtcatgtggatgcaataccgcagcccctgtcgcaaggcgcgttgggaagtgggttgagggtgtggtggagacaagaaacgcatgcctgatggtgtcctggttcaaccgctgctcagccgggtggccttggac

SEQ ID NO: 155002 - DNA, 308 bp, Homo Sapiens
tgcggatccagctgcaagaccgtgtaaataagctccaggaggaagcccaggaggctgatgcctgccaggtggagctggcactgaaggtggaacagttgaaggctgagctggtggtcttcaaggggctcatgagtaacaacctgtcggagctggacaccaagatccaggagaaagccatgaaggtggatatggacatctgccgccgcatcgacatcaccgccaagctctgcgattgtggctcagcagcgcaactgcgaggacatgatccagatgttccagaagctggtcccatccatgggggggcggaa

SEQ ID NO: 155003 - DNA, 283 bp, Homo Sapiens
  misc_feature (124)..(124): n is a, c, g, or t
  misc_feature (231)..(231): n is a, c, g, or t
  misc_feature (248)..(248): n is a, c, g, or t
tcctgactttcctggctgcagagtagagagggagaattgtggggtgggggatgagggcaataatcaaagcagggagaccagttagaaggatgccgccaagattcagaccaaatcaacattggtnggaatagaaatggaaagatggggttggatcaggacaggttttggaagcagagctcttggaatatggatttgggagggtgaaggaaagagaaaaaacaggactgactnctcggctttgggcatgnaccaccagggatgggttggccatgctgtttatttg

SEQ ID NO: 155004 - DNA, 352 bp, Homo Sapiens
  misc_feature (25)..(25): n is a, c, g, or t
  misc_feature (318)..(318): n is a, c, g, or t
gaatgtgcccagggaagtaactgtncccccattctccttccccctttccctcatagatacttctgtacccaaatccgtattgcttatgtaacttgcaagcaggtcaaaaagatacctgaattttaaatactctgtgggggccagaccatctgatccctgcagccatttctatgatcccctggctgatccttttctatggagggaacttctcctcacctaacccatgctagattgctttctttcagtaccagagtctctgagaaaaggaaaaggcattctgactttgcagttaggatgttgcactgggagtctggactnggcatggtagagcttggtccaggcaaaggcaaag

SEQ ID NO: 155005 - DNA, 310 bp, Homo Sapiens
caataattttaataatagctagttcttacaatagtgttatgtaccagggatgttctaagcatatggtagaaagcaaagagttttggtccatcctgtctccaccctgcatgtgtatccctggagacttatttgacttctctgagcctccttgtctataaaatgggaatcttgagtcaaagactctatctcatagtgtaatggaaagattaatttagaagcctataacatgccaacccttgtttatagcaaatactagatactccatatttgctcttctttcctacagactcacagtttaaacatataacaa

SEQ ID NO: 155006 - DNA, 140 bp, Homo Sapiens; identical to SEQ ID NO: 119821

SEQ ID NO: 155007 - DNA, 381 bp, Homo Sapiens
  misc_feature (287)..(287): n is a, c, g, or t
  misc_feature (303)..(303): n is a, c, g, or t
  misc_feature (361)..(361): n is a, c, g, or t
agaagagagcggccatctcggatcataatctccttggtgctgattaactgacgagatatatgattccagttctgcatgtaccatcttgaggcacagcagccactgctcgttgtaaatgccaaggcatttggctttgggacgtgacaactcaatccagaaggatggtgtgaactcggttgggtcccgtgactcgagctcctaccagtggctggccgcggattggaagccagcctgctgtcgctctgtggggggggacacgtctttccactgcttagagcgagagcagngcaaactgcgcaggcnaccctccagaaaggtaatggtggcagaacccacagtggagtcgacctaggcctttctncagcagtcccagtcggcatt

SEQ ID NO: 155008 - DNA, 299 bp, Homo Sapiens
  misc_feature (42)..(42): n is a, c, g, or t
  misc_feature (44)..(44): n is a, c, g, or t
  misc_feature (47)..(47): n is a, c, g, or t
  misc_feature (49)..(49): n is a, c, g, or t
  misc_feature (53)..(53): n is a, c, g, or t
ggacagtaggtatcttttgggctaataaacggccctgagaantnctntnccanttaaaaaaatgcagattgattttgtgccgagcagaccctgttttaaaaaatacatacgtgggaatttttttggtttattacatgtggaagaaatataaactactatcttttttgtcttcttgctgacagcatggctttggggaataaatatttgaaaataatcctaatacctttgttagttatagtctgtcattctaaataatgtatttcatccctttagcaaacttgaaacacaggcaagtgtaa

SEQ ID NO: 155009 - DNA, 301 bp, Homo Sapiens
gagcaggcccttctcaggtcctgggatagagggtcattcctgggggaaggtgcagcccctcatctttcagtgtgggtgcaacagtcaacctccttctcctctgtccagcctgttctcctggggctttgctgctggagcctggatggggcgggtgggtcatcagggcagtgagccagacagaaagccccccgacctgtcagcctcttcagcctcctcagcctcctccactgccaccaccaggcctgaggtgggcaaggaacagggcacacaggctgggggcaggggctgggcggggggtggt

SEQ ID NO: 155010 - DNA, 294 bp, Homo Sapiens
tacttttttaacctatcctatatatttttaatatgtgccataaataaatgagagatcattttttagttatgtgaatatatgtcttagttatttttggaagctatactcaggtaatcaagtgaaaataaaatgatttacctaaaggaaaagaaacagaaattaggattggatgtctgtattaaataatctaggatctttgacatagcctgaaatatctaatagtttcaaaatacactgaaattcggattagggcaaatttttacaatatggttttattgggactatcatccacag

SEQ ID NO: 155011 - DNA, 291 bp, Homo Sapiens
  misc_feature (111)..(111): n is a, c, g, or t
cagaggaaagagctttttataaaaataatatagtctactaatgtaccgtgagccttttaggaaatgtcaataattttactcatttgcaaagcagtctagatttacccaggngtaaagcaaagccagccaatcactgatatgtctggggggaaagaaccccctgcctttcctgatctttcaccctctgtccattaaagcgctgtccctaacatgtccaggggatacctctgcccttgtttataaatattccctaagtcagggacaacatcaactcaccatacacccacagct

SEQ ID NO: 155012 - DNA, 139 bp, Homo Sapiens
gtgcacagctcagttattgctgaaagttcaataggaaaatagattataattggaccaaatgtcactattttggggggggaaaaaaggataatcactgtgttaagtgggaaatggagatctcatttatctctgaggtagg

SEQ ID NO: 155013 - DNA, 182 bp, Homo Sapiens
ttgtagttttaagtatcttgtagggagataactttaaaaagaaattatgcttttcctcagaatttcacccactagttttgtagcctctagtggtgactcttgcctgatggttttcttggtggtgatcttctaatttcacgattctacatttatcactttatattacactaaggtaagacagt

SEQ ID NO: 155014 - DNA, 281 bp, Homo Sapiens
  misc_feature (237)..(237): n is a, c, g, or t
gctgggtggcctggcttcaggggaagacaggagccaggacacacgtcagcccagcaggtgtggggggtgctgcagccctcggcagtggggtcaggccctgggggatgtttccaatggtgggcagcctggccaggccggagaagacatgttcacgggcatctatcagatgcccctttgaggaggctgagttatttgagggctgctgcaaagtacgctaggctcaaattctcttttccncagccagagccctggccacacggactcagaggggccaccggggt

SEQ ID NO: 155015 - DNA, 309 bp, Homo Sapiens
accactagcctagccttcaagagatttgattccaatatgacatgcactttttagggtacttgctatttcttctaccaataaggtagtgcaattaatgtctgtatttttattttagacttcacagacacttgaactataaaagtcattgatttaaattttgaaacatgatttcttgatccaacaatacattgtttaatcttttcctctagttctatggctaagtatttatttatatttaatttagcaactcacttctttggtggtgatacacaactgaaccaacatggcaactaatttcctaacttaaac

SEQ ID NO: 155016 - DNA, 360 bp, Homo Sapiens
  misc_feature (39)..(39): n is a, c, g, or t
cctgccaaactctatctcagaactgatccagaccccacnagccaagcatttgtgggacccgcacactttgctctggagctttctagtagcctggattaaatcgacccctgtgcttcatgcctttgccaccaggagaaccagtgcaactgaagtttccactgcctgctgctctcctgtggcatccacatcctgaataggcaggagggtgcagcccacctggtgcacagggaggaggaggaacgtcccctctgagataccacaggtcagcagaccacctcttcccagaccagctggggagggcagggaggcggggtctggaggagctgcgggaatcatctagagctttccaaccaaagggat

SEQ ID NO: 155017 - DNA, 333 bp, Homo Sapiens
  misc_feature (291)..(291): n is a, c, g, or t
  misc_feature (312)..(312): n is a, c, g, or t
gggccatgagggtgcacagcctggttgcactcacttggcaccaacagaggttggctgatatgacactcaagatgggcctggagtctaaggggccctgggggtgtgagagagcctatgggttaggagatctgtgcatggaaccaccagccttctgaggagccctgagccacagctccttcccacccgcccagggctcccaagaggcttgaagtctgtccccttctgcgagctgcttgcctctcttggtcaccctaagagcaccaaccgagtcaggctgggtttagaggaagncactttggccggtgccagggntgggaactgggaaggttggta

SEQ ID NO: 155018 - DNA, 779 bp, Homo Sapiens
gtcttcttgtcgtacttgaccagattgttcttgtccagcatcagggcagctgtatgaaccagatctagtcggcgctggtccagcaggggatctcccttgaggtcatcatgagagatgccatagagggttggggatcgcagcattcggatatagaggtaggcatagcccagccagttcaccgcatccttggcattctggacatttcctagcacgatttctgcattgagcatgtcaggaagctttgaaaccatctggctttcaataggaagttgttgattgaggagggacaggtagtactgtagctccccatgagatgtgatgagtatgccttcacccttggtgtcatactggggtcttccggcacgtcccagcatctgcagaatgtccagtgctcccagttctgtccaacgccccttctctggactgtacacctgggtgcctttgatgatgactgtatgtgcagggagattcacaccccaagctagagttgctgtggaaactaaaacctgaatatgtttatcagcaaaaagatcctccacgagtgttcggtcaaccctggtcatgcctgcgtgatgaatagcaaagccataaggcagaagatccttcagctctaggttcttgcactgctcagcttctgttcgcagacttctgtggaggctgaccctccctcagaacagacccagagttcctcttctagcacatgtcccggatgcctggctgtctttccagtctcttccgggagtgacaacaccagcactacgaagggggatgacacggga

SEQ ID NO: 155019 - DNA, 359 bp, Homo Sapiens
atagtgagcagtacataaattacccattctaaggtattttgctatagcagcaggaacagcgtaagacagatgaggaacccaatcagatatcaagggtgatcagatattgaggatggaggattctgtctaaactggattcgtgctacaattggacagagacaaacacagaagctcaaaagttgacccctagttgaaaaaaatctcagaagagcctaacgtgtggtcatggagagaatctttgtcaggccccagatcaaggacagcatgtggtgggtgagatccacactcttagggagaggagatgctttgaatgacctaattctttattgctgggagaaggaggacccagggtagaagga

SEQ ID NO: 155020 - DNA, 192 bp, Homo Sapiens
ctttcatcagaatccttggaaaaccagattttactatgctgtaaatatcaaggatatttaggtaaaagactaagagttaaaagagctattagacattatccaaatcagtggtttctaatattttctcctcagaccttttgaagtgtattcacttccaattcaacccaatgcctggttttcaaatagtttctc

SEQ ID NO: 155021 - DNA, 270 bp, Homo Sapiens
agtctttttcagtcaaggaaaaagaaaccattttcaatcaattccacagggagtataccaattcaaaagcacgtcttcttagccccctctctaaaatatctcccataatcatctacttgtctccatgtatactgctacccacagtccaaacccccatgatcttcctcctggactctgcaatagcctcttaactaacacagctgctgaccaagattctctccttaaccaaactctagtcaggcttttctgagcccttctccacaaggcctc

SEQ ID NO: 155022 - DNA, 343 bp, Homo Sapiens
attatctgagttgcagctcatttttgaatttcttcgttgtccaatgtctttatagctttattgaaaagtgtttcttaattggtctttcctgctgatgagtcagaacataggtgtattcaaagagcccttttttataactagcactcagctcacttaatcgtatcttccttatgttatagtttggatcttcttagtaattctataaatagaacttttcctacaaagttttcactactgagatgaaacattggggtagttcaaatacaggagactaacctcaatatatacatgtagttttttctgtctccattattactattttttttaaggtgttgagaggcat

SEQ ID NO: 155023 - DNA, 278 bp, Homo Sapiens
  misc_feature (38)..(38): n is a, c, g, or t
acacatgtggggaaagaggaatggtgggaagaaggaanagtaggtccaagggggttaggaaagcacaatcaatcccggctgctgcgggggatgaaatgaggcaggaagggagagatggcggcacaggcatggcctgcccaacacctctgtagcagctccaggccacactggatgtggatggacggtgactcatgtgcctggaactcctgaggatgagaaggcaaaggggcccttgttagctctgtcctggggaaagactggatgttgggccgtctgcc

SEQ ID NO: 155024 - DNA, 383 bp, Homo Sapiens
  misc_feature (338)..(338): n is a, c, g, or t
  misc_feature (363)..(363): n is a, c, g, or t
gacagaaccacttaggaaggaaagaactcccggtctccagggtggtatttcagtgtctgtgataatgtcacgcaacacctcttcggggaccagtgcccaggatctaattggaagcgggattggggcaactagggcccatgtggccagagctcagtttagccagtgccgggcggccacagattacactgaccaatctcctcccttggctctgcaagcctcccacccagccttctctggcttaacccttgttggcgaaaactcttccacagtggcctccttggggacccagaacccggaggaaggggcatgaggcaggaagtggggccgatgtctgcaanccagaccacttcgtggaattgggtnttgaccaaattccttttttt

SEQ ID NO: 155025 - DNA, 331 bp, Homo Sapiens
  misc_feature (173)..(181): n is a, c, g, or t
  misc_feature (285)..(285): n is a, c, g, or t
atgaagtccatagataggatttgctttgggagtagatgatttcttcttattttggtgtaaacatcaatttggatggcaattagaatgtctttagcctctttaaaaagcccttctggggcaaacctttgcaagtcactcagctggcatgtaatgagatttttatttgcatggcnnnnnnnnnctaagtctctctagaagaacataaggacattctgaacatgcaaggaatacagttattctcacatcaaggatccattttaattttggtatcctcaattttatggncattttccctttaatttttattcacattaatcctaggcattaattt

SEQ ID NO: 155026 - DNA, 322 bp, Homo Sapiens
  misc_feature (163)..(163): n is a, c, g, or t
aaattttacaataaataaagattgcactgtaattggcatttaaagtactgtatgcagaatatagtataaataaaccaaaaacaaaataatgtttgtttccccatgactttggtatgggaatattataagctagtacaggatactgcatcttagacaataaagntcaagcacaaaatagctatgatcaagaaaaaccaagtagcaaaaatatacaaaaacagaagcaggggggatacactgtgtctgttgcacccttttggaatatatttgcacctccaactcttaaatgtccctgaggtactcgaacattatggacttcaat

SEQ ID NO: 155027 - DNA, 331 bp, Homo Sapiens
cctcgcacacctacgtggtggtatcaagttctttctaaccacacgatattcaggccagtaatagtttagtgcacataatttctcatttgccaagtgtttgtaattttccccggaaatctgaaaccttagatgttatctgagtacctccctgctgggaatagctttgaaggtcttaggcctctccaaacaggattcctctcttgatatgtgtcaaacacccaggagccaggttctgcaacctcactttctaaccatctccctgggaactcaacatacatagcgatgatgtttccacccattaaatgttagggtttcttttgtaaggcaccaa

SEQ ID NO: 155028 - DNA, 302 bp, Homo Sapiens
  misc_feature (22)..(22): n is a, c, g, or t
  misc_feature (48)..(48): n is a, c, g, or t
  misc_feature (168)..(168): n is a, c, g, or t
  misc_feature (247)..(247): n is a, c, g, or t
  misc_feature (258)..(258): n is a, c, g, or t
aacatgaccagagcccagaagnagtgtgtgatgagccatcttgtcatnagagtagaaaggctcagaggaccgggcggatatcatgtggaaggagccatgggaagcagggggctctgtccgtatgctgaacagggtagggggtccaggaaagccccctaggcggcgganagaagtgctacgtcttaaagtgggtggctcaggccggagggccaagcggctcagtgcagccccaagctctccggtgccnacggtgccctnccaaggcaatccccattggacgcaagtccccactgcttacagac

SEQ ID NO: 155029 - DNA, 366 bp, Homo Sapiens
  misc_feature (88)..(88): n is a, c, g, or t
aagttttattccatctgatggtcgaagtagttcactggataatccctggtttacttagtgctgaaaacacttgtccccgttcaatccnaagtatcatcatcagacttttctagtcccttacacattacataattcaaaatatgtgtcagtaattgaagaagctcctcctaacatctctcttggctttcaagtaaagagaagtcatcactaaagcccatatcatttgtgatgctgctttctctgtcagagtgcacagaaaacgatttagtagactctactggggatggtgtgctaggcagactgtctggcacttgacttccactatcactcatttcacatgagtcaattccactgaggtctaaactc

SEQ ID NO: 155030 - DNA, 165 bp, Homo Sapiens
  misc_feature (137)..(137): n is a, c, g, or t
gatgtggctcgccacccacagctattaggaaggccttctaccctgcagtaccatgccatctccacagggaaagactcaaagtccagcctcagtgctgcccggcccttcagccacggccatggtacttgtgcacaggnctggggcagccttgatgggtaggaggag

SEQ ID NO: 155031 - DNA, 399 bp, Homo Sapiens
ggattcaatgtgttattgtggaattaattgatttcagtgatacacagccttcctgtcacttacgatgcccactggcggggaagttttgtgtgctttatgcaatattaagtcccattggtcacactcagtgttcattcttctctttccagccaaaccactgaggccagttatatctacttcctaatgtgattttgacttaagttgtttgaattctgtctctttggaatcttctaactgtaaagcacgctctaagactccataacacaccgtatttatattctttattacttggtccatgtaaaaactgcaggaaattaagatgaagaagaaaaagtaaggctgggtgtggtggttcatggttgtaatcccagtgctttgggagccacttgggaggatcat

SEQ ID NO: 155032 - DNA, 446 bp, Homo Sapiens
accatcctgcatccgtcccactcactgcatctccaagctggcctttacaaattccacacctgaaacactggatgtgaaaatagagattgagggtctcgatgatcattgcggctcctttacccaaaggaagcccacaggaagagcacagcttctttccacttatagacttccgcctttcactgggagactcgatctgatggttaatgcttttatccagcgggagggtttttggcttcacatcttctgaactgtgcgttggatttgatgtctgctgattctgggatggatcctgagcaagctgtgggtttgttccacagtgtggggccccagcctcggtatccagctgatggtcttcatggactccttttgatacagggttcccagaatgagccaaggccccttcagttaggctgcccttctcctccagtcgatcactttccctagtc

SEQ ID NO: 155033 - DNA, 280 bp, Homo Sapiens
taggcttggaagacggggatgtgctccaggtcacagcggatcagctccagctcagtcaggttcgccatcttcttgaggctgttgaggacgatgagcttggtgccctcattgttgatggacagcttctgcaggtgcacgcccacatctgtgaccacctgtggcagcttgcttaggttgctcttgagccgcagcaccttgaggcgtttgagctcccgcagcccgtcgatgacgatgtagcggttgatctccgcgctcaggttgctcgtcttccgcagcctac

SEQ ID NO: 155034 - DNA, 294 bp, Homo Sapiens
  misc_feature (67)..(67): n is a, c, g, or t
aacataatagtaactaccttaccactgaatttctgtagtaagacgttttaaatccaactttgtcttnatgggaatattttatatcttgcacgaaggagccactggtacttagacacctaaaattactagaaccattaagactgaggtgaagaatttgtatagccttccaccattacaaagaaggagtgatagatacttgtcctcctggcaatatcaaatgccgtttctttgaagttgtttttcagccctggtttgatgtaatggttcatcaggaggagttctaggttatctttg

SEQ ID NO: 155035 - DNA, 287 bp, Homo Sapiens
tctatcaccctggaatattgaaagaaattcagtaaaacaagatgtgtctcatagttaaggagagacataaaaataaaaatgtcatttaacagtttgaatttaggatttactgttaatcagaaacaccgaggaggcttagctcaccttttaattgagaatgtgggaaggaaagagagtaaacacattaactttagtagcagaagtgctgctaaaagaaatacgtgaaaggaaatgtaacagacaaattggcttttatcccttttgataccaatatatgtgtatacaag

SEQ ID NO: 155036 - DNA, 1062 bp, Homo Sapiens
  misc_feature (43)..(43): n is a, c, g, or t
  misc_feature (885)..(885): n is a, c, g, or t
  misc_feature (894)..(894): n is a, c, g, or t
gaggtctcgctgaacagaaaagggctgggtgctgtcggtgggnccgaatgaggccccccagtggactcctcagggttccacgccaagggctcataggcttctccccgagaggccccgagcgccatgccagggagcccctcagggcccggcttggagttcagctttgggagtttgttttgattcttttgccgcctctctgagcactcatggcataaaggctgggtgttcacagacatgaagaaggggcagttgggcgtttcacattttacatccatgagagaaagctggggcacggaaggttccatgggattctgggcgtgcccctctctcctcccctgctcgctgttttcctgccatttcttgtactcatgctgaacaagttcaaagtaatcatctaccagattgatttcttttggtaagttagcttcatccaactttgcggcattgatgagatgagttgtgccatggtcccagccttggacggggatttctatcaccattaagtactcttttaagagcttctccttcatctcattttcaggatctgtcaaaaagtgaacttttaagtcttcaaatcttccccggtctctgttaacaagtggaacagctcggatttcaggcccactgtccttcagggtcaccaagggtacaaaatgatggctgtcatagccgagaacaatggggtatctgtagcattcctgggcaggccagtggagaggcaagtaaattccacccactttcaaaggggcgaaattggaacctgattccaaacttcttagcattttgtctgttcaaagaaagagaaaggaaaatgaggcccttaggtgactttcatcaaattccattgaactctgttacctgaactttggcagtgtggttttctcncaggagccnaaggcataaggctgaaagcatttaagtacagatccgtgatctgcaggcatctcacccgagtatcatagcaaagccccgtttcaacaaattcctgagatttgagagactccagttgccagcggaatttaaagttgcgtgtgatcccgggaatccggaccggtccagcct

SEQ ID NO: 155037 - DNA, 1641 bp, Homo Sapiens
  misc_feature (110)..(110): n is a, c, g, or t
  misc_feature (209)..(209): n is a, c, g, or t
tccacacggggtgggcaaaaaccattaggtggggaaatttcattctccagacccttgctgggcccccagggggcttgttctttaacccggagggccagtggtggtagtgnccagtgtgggtctgtactgggagggctggctgccacacggtcacatcggagccattgccaaaggcttgaattgcatttttaagacatgtattgtcctgnaagaaattcaaaaatttcaagcactcttctaggtcgttcccactgttgctgcagtcacaccatggggccacactgaggctactggagtctatgtagttgggggtcatgactgtgccaataagccccgagtaggcgaggaggcagtcagcgtagttttcctttagacagctgctgacagaccttgactctggctggcagttggtaaaaaaatccgcaaggcgagatctgcagatgtaattcgtcttgcaggagtcctgcaaattcaaacagttgggcttctccctctcttcataggagcacacaggcacgatggtctgtcgcctccgctctgtgcaggcgatgtcccggcagggaagcagaagagcatttcggtagctgtgcttggcccgggaccttgtcaaagaactgccggaggggcttgtgggcacttgcggcggttgcagacatcattggacacgctggtggtgcacggggtgatgtacgccgacctgtacttcttgcaaatgtcgtcgaggttgcaggccttcgctgcatccaggcagttgttccctttgggaatgtgctccactgatatgaatgggaccacccggaatatatctgacaatctgctgttaactggttcatatggggaatcctccagcagatcatttccctgcaggctctggtacatgctccagtaaatgcgcaggcagttcttgtccttcttcataccccgcttgcagcggcagttgtagagcgacttctgcttcagggcctccatggcgctgcggcactcatccttggcctccaggccggatgccaggctgaagttggtctccttgcccgccacgcactgccttagcgtgcggtacttggtgctgcagctctgctccttcaggcactgatcactggctttcacgcaatccaggcggtctccgccgctcacttcggccgacaggagcaagtccaagagcggcagcgcgaagtacagggtcgccaggaacatggtgccggcgcggggctggtccccgcccccccaaaaaaatcccgagccgccgctgggtcttgccgagggagctcagcgtgcagcgatccccggacagctgtgctgctctggccgcccaaagttcagctccatccagtgaaagaggaaactccgggtctggcagcagccaccgccgccggcgactcagctccgggatggcgagggcgggaggcggttccgcttttaggggttcaggtccgacccaacctggactcaaccgaccgcgtccagctgcggcgaggagccagtttgtttatttacttatttattctttcagggcaatggtgtccccgccccctccttccctttccgggctcactttatctgcgcgaagtctacactgggtcgggagaccggtctaggagccagccggcagtgctcgggatctttgctgatgtccaagttcat

SEQ ID NO: 155038 - DNA, 1113 bp, Homo Sapiens
  misc_feature (259)..(259): n is a, c, g, or t
ttgtctggcaaacatttattgactgctttctctgcatagaacaaccggccagcccctggactccagaggcccaccatcattgttaagagacctacatgcatgaaccaatcacacacgtgctatgagaatagagaaaagaaataagtaattctcacagacactgacaaactggaaaaaacttctttcatcccaggtactttatggctgggatcaaagggggtgacttcacttgtttgcaccaggaaacaaaagggcaaanaggaagtgttggcatcagttttccatctgcacatataaccccccattcctttcatgaattgcatgagataggtttcattttctcctggtggcctgtctggagccggctcctcatagagtctagatagaagaccctcctctcccgagcccatccccctccagaaggctcgcagccctctgaatcctggtcgaagctggacagcgaaggaattcacagcctgccagtttggggatcccagtcgaccagggtcgtcgatggctcttcctccggcccctcctccgagtctgtgtgctcctgcgccagggggtctaagtcttggagctgaggggtgtatgagtactgtaacgtttgcgggcccaagactgccaacgctgcctgcgactccaataatgttccttgtgtggacacctcctcctgcaaactgagctcctgctcttcaggccccgcacaaatgtcagtggttctgacatcatattcatattcaatgactgttttatccgggggtattgttctgctgagggactcttgctgggtgagagaagtaccttccgtgttttcttcagagtcacaaaaaatttccatcaaatgcgaagcataccctaaatgtttcacctcctcttcctcctgagggggcctcaggttcccgctgggctgaggatcattaaggctggatacatcactgctttttcccagtaaactcatatcctgatgagaaattttagaatcatccgagatattgagggtgataaagttaatcacgattttttcagcaggcacaaagaatcttttgtcaaattcatttccataaatcaaaatcaaatttgcatcccgggaatccggaccggtccagcctc

SEQ ID NO: 155039 - DNA, 916 bp, Homo Sapiens
  misc_feature (156)..(174): n is a, c, g, or t
aatttttctccccctggttagtggacccccaccgatgttaaattggaggttagagggaacagtttggccaaaaggtaataagattttgccccttaatccccaggccagtatgaggattcaattttgggggcctttgtctttggtaacctgtctttnnnnnnnnnnnnnnnnnnntgcttgcttggtataacataatccagattccctagagcagatgtggtacagcaatgagcaaatccaccctcagatctgaagtgtcttccagtctggccctgacccagccattctctgcccttccttctccctttagggtagcccaaatcccattgccacacaacatctcaacttaccatccctttcctctatccccatcccctctgtctgcgtcacagaaagtctgtgtgttctgaagagttcagccttcctctaaccaaacccacactttctttaccaccgtgattctcagagccagcaagaaagaaatgttccaaaaggaaacctccatctcagccatttgcccggagccgaaggttgtgggctccaggcttctcagtgaggtttgttgcttgtgtgtttcccgaggagcgggcagtcaggcagtggtggttctctctcccctctctctgtcgcacgtggggtctcagctacatttacgagacttcaccaccatgttggagagctgctccactttgggggtcctcccaacatagtacaggatggtcaggggctccaggtcctggggcacgcagcaaggcgaggcagatgcttcagggttcagagtgttgtacagtcccagcaccgtgctgtgggttgtgtctgcactgcggaggtatgggcaagggcctgagcagaagttggcatagtagcccttaggttcatggacccacttccagcccagatcctgtcggaagtcaat

SEQ ID NO: 155040 - DNA, 988 bp, Homo Sapiens
atgggcagaggacaattttgtccaacaaaaaatggcttccccttgaaggaaaattaacccttcaaagagtgggcccttgttccttccatggcaggccattgggcccaagttggccttcccacccacaggggaaaatttccctgcaaggtggctacctcctaaaaggcccaccgaaaaaacattccacgtcaattattccagggggctgtcatatattatgaaaagcagctccacgaagcctccatttcttttgaggaaatggttttatcccctcattatcacaatgttcatttccgagcaaaacaacagcaagatgctggagtttttgaatttgcactaaattttgtgcataaagtaaccccctgggtggcataaaagatctttgctttttctcttccatttaaaatgagtaccacattattcacatcaacggagaagtaccctggtattacagctggaccagtgatgaagctgtactgtgttcttcctacgattgactttccttctctccattgagcagtcacatcgctgggatcaagtaagccttcaaaaatatgctcccagagatacaagccaatggcagctttgccccagatttgtacactgagatctgtttttcctttcgtggatttatctaatatttgaaggctagttttaaatctgtgttgttgctcatttttttcatctccttcccaaggattccattcttcactttccaaagtggactgttctcggccgcgtctctcccgcgcgggggccgcccccttcctgaggccccgcggggacccggccggcgcctggcggcggcgcccgaagaagacgtggtaggcagcgtagagggagaataggcagtacagggcgataagaaacgagcagagccgcttccgcgtcagccgcatcccactcgggcttccagtcaggcatccaccgccatggagcgggcggaaagagaatccgcgacaccggcggcgtccgaggcaggcccagc

SEQ ID NO: 155041 - DNA, 609 bp, Homo Sapiens
gagctcggcacccattcatttgcaggagggattactggtgtcagccactgcgccaggcctgtttttttctttagatggtcattggtagctcatgaatatttggctgtagtgccaagtgaatacaggtgttttggatgtggtttgtgtctgtatagttacatcatttctttctctggattgggctctttggatgttacacattataagagtatagacatcgaatcatttggagatctgttttggtcacatagtctgtttgttacctttatattgtagccctcagaatgctgaaagcaaagcaaagttgcatgtctaggcaacctaggccctggaaatgaaggcaggtgttcctggcctctggtgtgtcttcataatgttaggggtggtagagaatggagctagaaagaatctactctttactatgtcttactcttcagggttcattccaggccttgaagtcggtaactaagtcctaaaaatgttgggaattgtgcaaggaaagggcaggggccctggaattgggtacatgaataccctccacttggggaacctcccttccccaaaacgccagtggggtttaccttaacaagccccaggaaacttccggcc

SEQ ID NO: 155042 - DNA, 953 bp, Homo Sapiens
  misc_feature (704)..(704): n is a, c, g, or t
  misc_feature (728)..(728): n is a, c, g, or t
  misc_feature (772)..(772): n is a, c, g, or t
tgtggctcgaagaagaaagaaatttttgtcttggggcccaaatacagtcctcttgagtttttacgaagggtaccattaggcttctcagctccaccagatggcctcccccaagtcccccacatggcatactgtgctctggaaaacctgtatcttctgatgggaagggaactggaatatctagaggaggtacctccaggaaatgtgctaggaataggaggccttcaagattttgtgctgaaatctgcaacactgtgtagcctgccatcctgcccaccatttataccactcaacttcgaagccactcctattgtgagagttgctgttgaaccaaaacatccaagtgaaatgcctcagctcgtaaaaggaatgaaactgttaaaccaggctgatccctgtgtccagattttaattcaggaaacgggagagcacgttttagtcacagcaggagaagtccaccttcagcgatgcctggatgacttaaaagaaaggtttgcaaagattcatatcagtgtatctgaacctattattccattcagagaaacaatcacaaaacccccaaaagttgacatggtcaatgaagaaataggcaaacagcaaaaagttgcagtcatacaccaaatgaaagaagatcaaagcaaaatccctgaaggaatccaagttgactctgacgggctaatcaccataacaactcccaataaacttgnccacgctcagtgttcgagccatgnccccttccagaagaagtcacccagattctggaagaaaatagtgnatttgattcgtttctatggagcagttgacatcctcttttgaatgagggtgaaaatactcacatgattcatcagaagacccaagagaaaattttgggattcaaagggaaaactggagcaacacctaacagggagaagatggaggaacattgttgaccaaatctggtcatttgcccaagaaaa

SEQ ID NO: 155043 - DNA, 1469 bp, Homo Sapiens
  misc_feature (826)..(834): n is a, c, g, or t
  misc_feature (865)..(919): n is a, c, g, or t
  misc_feature (933)..(944): n is a, c, g, or t
  misc_feature (953)..(980): n is a, c, g, or t
  misc_feature (1008)..(1022): n is a, c, g, or t
  misc_feature (1025)..(1039): n is a, c, g, or t
  misc_feature (1056)..(1069): n is a, c, g, or t
  misc_feature (1128)..(1128): n is a, c, g, or t
  misc_feature (1154)..(1154): n is a, c, g, or t
  misc_feature (1166)..(1166): n is a, c, g, or t
  misc_feature (1201)..(1220): n is a, c, g, or t
  misc_feature (1256)..(1256): n is a, c, g, or t
  misc_feature (1416)..(1416): n is a, c, g, or t
ggctggaccggtccggacttcagggatgccgagagctaggctcattgtggagggggcgggcgtataggctgaggcaccgcccagagctcgctgagacagagactgagaacgcccccggccagattccccccggagagacccgggtagggacagggacagagagacgcctctacgggcagaggccctgggaggcaaagacccccaggagagatttacccaccccagacggaaagcgcggctcagagtcggacgaggggagactgtcagaggacaacgccccctaggtctcctgggagaccccgaagcgaccccgggggcagcccgggccgtgtccgggcgagggtgacctatccttggttgagagcgatggggacacaagccctgcagggcttcctctttctcctcttcctcccgctgctgcagccgcgtggggcctcggctgggagcctgcacagtccaggcctgtccgaatgcttccaggtgaatggggctgactaccgccggccaccagaaccgcactggcccgcgcggggcgggccgcccgtgcctcttctgggaccagacgcagcaacacagctacagcagcgccagcgacccccacggccgctgggggctgggcgcgcacaacttctgccgtaacccagacggtgacgtgcagccgtggtgctacgtggctgagacagaggagggcatctactgggcgctactgcgacatcccctcctgtcacatgccaggctacctgggatgctttgtggactcatggtgcacccccaggccctcagcgggcccaagaggaacctcccacaaaagttccccgggccccannnnnnnnnctaaacctttttttgcccccctttaaaaaannnnnnnnnnnnnnnnnnnnnnnnnnnnnnnnnnnnnnnnnnnnnnnnnnnnnnncgacccctctaatnnnnnnnnnnnncccccggtnnnnnnnnnnnnnnnnnnnnnnnnnnnngggggagggagggtttgagtttattaannnnnnnnnnnnnnngannnnnnnnnnnnnnnctccttttatatatctnnnnnnnnnnnnnnaggattagtttctttcctgtcgcgcagcatagataaaagatatacacatgtagacgggntcccgagcaacaaacaaatataatanccctctccttcnctcgaaccggccgggcgcccggaccccgcgacctnnnnnnnnnnnnnnnnnnnnaatcgaagagccagcgcagcggcctcgcgccgggantagagaaagatgaagaaatcaaacaccacgcccccacccacatctttctcccctttgaatatacgagaagggaaagaagaacactccccacaaactactaacccgcacacgaacgaagacccaggggtggtggctgaacgtgctgtgcctgtaattactngaaaacaataaacccatgctataagaagatcgacaatctgaacaccaaaccaa

SEQ ID NO: 155044 - DNA, 1128 bp, Homo Sapiens
  misc_feature (134)..(134): n is a, c, g, or t
tttatttggtttgggaatggcttccatttttaaaccttgaaattgtgtaaaggttcttgggttgaagccccaccaaagggcaggtgtcttggcccaagtggggcatccaagggaaggctgtgatcccgtagganccagcacccttcccagaattcaccatcatgggggcaggatggggtgtctgcccttcctctgtcccacaccggtagtcaaaggacagggctttggcccatagctccccctgttgattcccaaagaaatttggcaggagccacaaaatagccagggtctagtcgttgggctgagctaaacacatcttgatgggcgctgtgaccattggagctttgcaggagacccatttcgttggacagccttccagccatcaacatcttgatgaaaggtagaggtgatcttatggacactgtattctgcagagctgcggcagctggctgaatgcccatagcagaaacactgggtacagccctcagggttccccccatccagattatagtaacctgatcgacacctatcacagcgttctccagtaacagctggcttgcagacacagcggcccgcgtcacagggccctgcgatgccagctgggtcacagtcacacttggagtctagcagtctctggtcttgggtgcaccccgcatccgtgagcatgtggaagcctggcagacatcggtcgcatctggctcctgtcacacctggtttacagctgcaccgtccagagttgtcacatcgagcactaagagaacctttggagttacaattgcagggcaaacagcggtccctttctctgtgccggtaaaagccattcttgcacttctcgcagtgaatgccatcagtgttgtcattgcagttgaggcagcggaatccattaccagtttgtctgtgaagttcccgatcaaagatacactgcctggacttcccattgcaatcacagacttccctcctggaggtggcccgggctgcgggcaggaggagcgagaagcagaggcagcagcccagccagagcgcaggcatggcggtgccgggccgctcagtctctgtctccgctgcaggggtcgctgcccggcgcctcggttggtggttctcactctgcgatccggaaaattccggacc

SEQ ID NO: 155045 - DNA, 1325 bp, Homo Sapiens
gattaaaaactttcccaaagccaaaatgaaaagaacccaatgtttcacctttaacgtgggggaaaagttggcaaaaaagaacccccaggagggacaccccaaaccttcttctgtgtcctctgtggaacctggcttttttctcttgtcctcagagaaagaaacaaatgccgatatcctctgtttaaaatatgaaagtaccttacaccaataacccctaacagcctggggtctcagtggaactaacttaagtgaaagaaaattaagacaggcatagaattaggcctttgttttgaggctttaggggagcagagctccattgtggcatctggagtttcacctgaggcctacaggggtttcaaatggttgcatttaaggtcagaatctttgtgttgggaaatgctggcgactgagccttgacagctgagcacgggttgcctcatccctctcatgctgtctatttcttaatctaacaactgggcaatgcgttaaactggcttttttgacttcccagaacaatatctaattagcaaatatcacaatttcagtgacattcagcaggatgcaaattccagacactgcaatcatgaacactgtgaagacagtcttctccgtgggccgggacacaaagcagtccacagtgttgggacaaggccaggcgttgcacttcaccagccgctgcatggagaagccgtcgtacatgacatagaagacgtacatgaaggcggcttcgaagatgacccggaagaagatgctgcttgtgtaggtccaccacagggagccttcgatgcggaccttctgggttttgatctcctcgatgtccttaaattcactctttatctcccccttgatgaacttcctcttcttctcatgtctccggtaggccacgtgcatggccactaggagcgctggcgtggacacgaagatcagctgcagggcccatagccggatgtgggagatggggaagtagtgatcgtagcacacgttcttgcagcctggctgcagggtgttgcagacaaagtcggcctgctcatctccccacacctcctttgcagccacaacgaggatcataatgcgaaaaatgaagaggacggtgagccagatctttccaatgctggtggagtgtttgttcacaccccccaggatcgtctgcagcgtgccccaatccatcttctactctgggcggtttgctctgcgtcgggaggaagcgcggcggggccggggcgggggtctcggcgttggggtctctgcgctggggctcctgcgctcctaggcgggtcctgggccgggcgccgccgaggggctccgagtcggggagaggagcgcgc

SEQ ID NO: 155046 - DNA, 964 bp, Homo Sapiens
  misc_feature (68)..(68): n is a, c, g, or t
cccacccgtcactattggagatccgcgggttagtttttgtccgataaaagtttattccaaactcgagnctttttgcggggggagacctctggggttccccgggtgtgatgtcttgtagggggatccccaagggttgtttggagggggtcccccccggtgtgccatatgggcgcggcaagcagtgtgttccaggcgcccggagaaaaccttcgataccacacccccgggaggatagggggcgcccacgttgtaaggagttttgttttccttggggcccttgttgggttggttttccgggttgaagcattccacgtgccgccagcccccagtgggcccatgcttttttgcccatcggcttccaatattgggatatggaatgggtggaatttccacccaagttcaggaggaatacagcccaggtgttacaattttctcataggcctcttgaattcgccggcagctgtcctgaaggttgtaaagattgacattcacatcgcctaggtctgcaaccatgagggactggaaggggagggcccccgtgctaggattgactgtccgaagcatcactgattcttcccggatgcggcgaggtccgaatctcgccccaggccggttggaggtcccagtatccaggggcaccccgatgaaggcagcgtccagcccctcgggggaggtctgcaccggcaggcgcatcatggagcagacgcccaccggccgggccacgaactcggggctggggggctggttccggggcgcatcggaagcctggcggctctggcggcgccccggatgaaagagccctgcggcaggacgcgcgcccacgccgggccccgggccccgggcgcacccggacgccagcagcctcagcattgccgcgcgcggccaagacctcaccgaccagaccgcccgcgaggccgccgcgatctggctggtcccgaacggcgaggcgagtgtgcacgcgcca

SEQ ID NO: 155047 - DNA, 738 bp, Homo Sapiens
aaagcagccggagtcacgcacgtgcagagctgggcatgggagagaaacgggctggggagtgaggccaggagtgggattcagctgcagcagggcgccccctccaaactgcagctggtctggcttactgttttgccgttcaaaaaggtcgcgaatccgtgggactgagcacggggacctcacccgctagccagcgtctgctgcacttgatcaggtggggccttggtgggcggctgcctttcctatacagtttgtcttgtcaccctggttttcccaactggggccaggtctcttctccagcctccacctgcctgtctgatccaagagctgagacacggccaccccagcaaccaagtcactcctctgttcaccttaagtgacacacaacccgggaacaggaggacagaaccgttggcattatcaggattcgtgttttgtgggggtgggagtggagaagtagggtggtcttgtgagttgtgcagggtgaagaccgcttccctgagacaggggcagtggtgctgatggaatgtgggggaggcccacatttgagcaaagctgccctgcccttgtcccctggcctggcttcctggtaaggagtttcagccgcctccgcaggaacccccaaagtgcagattccggagcagacacatccgggcggagagactcagcagacaagtgctgcagttgcacggtgggacccggggcctcgtgcgttttttgctgtgagtggggtggggttga

SEQ ID NO: 155048 - DNA, 865 bp, Homo Sapiens
  misc_feature (756)..(756): n is a, c, g, or t
  misc_feature (759)..(759): n is a, c, g, or t
aggttttaaagcaggaaacagcagttgttgaaaacgtccccattttgggactttatcagattccagctgagggtggaggccggattgtactgtatggggactccaattgcttggatgacagtcaccgacagaaggactgcttttggcttctggatgccctcctccagtacacatcgtatggggtgacaccgcctagcctcagtcactctgggaaccgccagcgccctcccagtggagcaggctcagtcactccagagaggatggaaggaaaccatcttcatcggtactccaaggttctggaggcccatttgggagacccaaaacctcggcctctaccagcctgtccacgcttgtcttgggccaagccacagcctttaaacgagacggcgcccagtaacctttggaaacatcagaagctactctccattgacctggacaaggtggtgttacccaactttcgatcgaatcgccctcaagtgaggcccttgtcccctggagagagcggcgcctgggacattcctggagggatcatgcctggccgctacaaccaggaggtgggccagaccattcctgtctttgccttcctgggagccatgggtggtcctggccttctttgtggtacaaatcaacaaggccaagagcaggccgaaagcggaggaagcccaagggtgaagcgccccgcagctcatgcagcaggttcacccgccaaagaccccttcggtgtgaccggcagccctggctgaccgtgagggccanaanagagccttcacggaacggcgcctggtgggtggagccgaagctggtggtggggcggctgggttttaaaaagggatcccaggttttccccagcttgccagggttttga

SEQ ID NO: 155049 - DNA, 879 bp, Homo Sapiens
  misc_feature (66)..(66): n is a, c, g, or t
  misc_feature (161)..(161): n is a, c, g, or t
gtcggaaacaccaaaacagggattgatggacacagcaggttagcgggggacccaggtagttgagcnatgttcccacacgtagttcgcccagccagtagatgatggggttgcagccgctgacaaactgcagatgcttggcccttggtggacttctcggccancgaggaagacaacgaagctgggccggcacgaaggacatggccacgatgatgaagatggcgatgacgacatccgtgccctgcagcaggtaatccagggagaggctggcgctggtcttattcatggggtggttggtgacggtgatgccgtaagccgccgggttgcccttgctcttgggcaggttggcacgcaggatggcgttgttgaggctgttgaggtaggtgggcatgctgtgatagcccttgttgttgtagaaaacctgggcagccctgcgcaccgcgatcttccgcaccatgggtggggccctggtgccaaatgaggctgggatggacttcaggacgtttccaaaggtgatggccccataccggtgcagtcggaagcggtcggaggtgaagagcaggtactcagagacattgtggccggtgatgtcggtcagtatgtcgcctgtgaccatccgcatctggggcgggtgccctgcccacacttctggggcaggagaagccggtgccctgcgcagagcaggtgcagcgtacgggctcccgtaccaggcgcggcagggagggtgccgacgtccacattttacctggcccagcggtgggcggcagggagacgttccaggcctgcaggtcctcatccggggacgctggcgagtcagatggggcgggcgagggtgggggtggcacgaaattggacagtggcagcccctgtgtgaaggactcc

SEQ ID NO: 155050 - DNA, 1712 bp, Homo Sapiens
  misc_feature (18)..(18): n is a, c, g, or t
  misc_feature (97)..(97): n is a, c, g, or t
  misc_feature (99)..(99): n is a, c, g, or t
  misc_feature (255)..(255): n is a, c, g, or t
  misc_feature (273)..(273): n is a, c, g, or t
  misc_feature (316)..(316): n is a, c, g, or t
  misc_feature (322)..(322): n is a, c, g, or t
  misc_feature (713)..(725): n is a, c, g, or t
  misc_feature (847)..(855): n is a, c, g, or t
cccgggcgcacatgtgtngtgtgaccacagggggtcgtaacagagcgggcggatgatgcagggggcacaacccggaggcggttgcgtaccccgtcgncnttgcatagtgtataacgcgaccgcgccagcgagctccccagcgcggagtgcgacccctcactagcacagagtgggcgggcgatgtcgccgtgcattgttctgtggtggcctcaggccatcgagagcgcatgtaggcgcaagccgcaggcgcgcgcngcgtacataaactagcanaaagagacgctgtcggacgcgcagacagcgtgatgcgtgagcntcgctnctctaagggacagatgaaggacactatagcggggtgggccggaacaaacagaacgcgctgctcgtggtctttgtccgagcaacggagagcggggggatgggcggtcagagcactcccgggcgcgggtgtgtgtttttcggtacgccgcaccgttagggcgggggcgtcatgttggggataacagccaaggggtagagtcaatcggtctgggcggacggagggccaaacggcacaccggcgttttctgttccttgttccccgccgcctcttttttgtctctcgcccgacaaggaaaaggagtatatgtgggttatttattgccgggggggaggcgacgtgggggaaaaggcctgtcttgcgtccgtcgttttataaggagacacgaggttgnnnnnnnnnnnnncttcgaaatttctttgaatgcgccgcaacggcggggtagtttctctcccccacaggggggtgttcccccaaagtcgcccctttttgtgttcggtgtgttgcgccaggggggtgtttgggggnnnnnnnnngtgccaaatttcccccaagttttgctctttgggagaggcccttttgggggtggtttttcaattttttgttccccccccgaaaaggttttcccggggtgtttcccgggtcgcctttagggattcgccccccttgggtcgggaaagttcccttcggaacccttcccacaatttgggggaatctatggcattttggcttatccattccctttgcctggggaaatttttcccttcgcttttttttatggtgcctaaagtacccagtttgacttttttgcgaattttcctcttcaactgagcaggagtgctgcaagccacaggagtactcggtgtctttagcttttcattctgctctgggtctgatcttttatcaccaacaagagtggaattttgctttggcatcacatggtagtaagacggggcatatttggaggagctacaacctcttttctttatagattcctgaatttcttcacagagctgctcaaagtcttcatcaagttcttctttaattatggcataggcagtatctcttaaagcacaggctctatgcgtaataagacgatctccaggatctctatctggattgtattctaaggcattactacagattagatcaatatctctcaaatagtctttcacagtcagatacttgtgtagatcaattttactgattacagatgaaaggtccattggttgctttattacagtgacataatcaggaacctcatcagggtcaacaggcttagtaaacactcggaatcgcttgtcaatagcaagcctatgtgtaacatttcttaagaaaatcctcagttctctaaatgtatcttcttctggtgaatatagtcgtttcacttctt

SEQ ID NO: 155051 - DNA, 1397 bp, Homo Sapiens
  misc_feature (42)..(42): n is a, c, g, or t
  misc_feature (984)..(1019): n is a, c, g, or t
  misc_feature (1096)..(1159): n is a, c, g, or t
  misc_feature (1187)..(1207): n is a, c, g, or t
  misc_feature (1263)..(1263): n is a, c, g, or t
gagatcccctgatgcggtggcatgaagacatgccaagggtgnggcctgatgggggagtggccacagactggatggacacagagtgcccagaggccaagcggctaaaggtagaggagccaggcatgggggctgaggaggctgtggattgccgtcagtggactcaacaccatctggttgctgctgacatccgcgtggcacccagccatggcactgacaccaccacagggcgacgcagatgctgatggcatggatgtcaatgtgcgtggcccagattctcatccgaaaccgctctacagacttggatgcccgcatggcagatggctcaacggcactgatcctggcggcccgcctggcagtagagggcatggtggaagagctcatcgccagccatgctgatgtcaatgctgtggatgagcttgggaaatcagccttacactgggctgcggctgtgaacaacgtggaagccactttggccctgctcaaaaatggagccaataaggacatgcaggatagcaaggaggagacccccctattcctggccgcccgcgagggcagctatgaggctgccaagctgctgttggaccactttgccaaccgtgagatcaccgaccacctggacaggctgccgcgggacgtagcccaggagagactgcaccaggacatcgtgcgcttgctggatcaacccagtgggccccgcagcccccccggtccccacggcctggggcctctgctctgtcctccaggggccttcctccctggcctcaaagcggcacagtcggggtccaagaagagcaggaggccccccgggaaggcggggctgcggccgcaccgggccccggggcgggcccagacgctccacgcaggcctgccccggcccccccgcctgcccgctccgtacccactgtctccctcccgactcccctggccaccccccctagcgccttcaaccgcccgttcccctctcaccccagacccgaccgtccnnnnnnnnnnnnnnnnnnnnnnnnnnnnnnnnnnnnttctaatcctaccctatccccccctacaaactcaacacccgctcccctcccgccgcgctgttttttctaatcctcannnnnnnnnnnnnnnnnnnnnnnnnnnnnnnnnnnnnnnnnnnnnnnnnnnnnnnnnnnnnnnnttctccgcccatcccctagtaaccgcannnnnnnnnnnnnnnnnnnnnttggcaactccgtccccgccgttacctcccgctcagtgctgcccctaccccttgtncaagtcggatctgcgtatccccgcctgccgccactcgcccaacccgaccaccgccagctcatcgtagcgcccggcgcttaagcgcgcgcaccgaagaccaccccccgacgccgccctatagatcctgaacgccg

SEQ ID NO: 155052 - DNA, 880 bp, Homo Sapiens
  misc_feature (66)..(125): n is a, c, g, or t
aaaaggggttttccgttttgtgtcccgtgccccctttggggggccaaaaaccccaagcccaaatcnnnnnnnnnnnnnnnnnnnnnnnnnnnnnnnnnnnnnnnnnnnnnnnnnnnnnnnnnnnntggagggctttattaagagggaaacacttgtgaaggccaagaacggaaggaaaacttgagggtgttatggagggaaacttgaaagcatccaggaggaaattgaggcggtatggaggaaaactggggcggtatggaggaaacttggggcgtatggaggaaacttggggcgtacaaaaggaaattgaggcgtatggaggaaactggggcgtatggaggaaactgaggcatatggaggaaactgtggggcgtacagagaaaattgaggcgtatggaggaaactgtggggtgtatggaagaaactggggggcgtatggaggaaattgaggcatatggaggaaactgtggggtgtatggaggaaactgggcatatggaggaaactgtggggcgtatggaagaaactgtggggcgtatggaggaaactgtggggcgtatggaggaaactgtggggcgtatggaggaaactggggggcgtatggaggaaattgaggcatatggaggaaactgtggggtgtatggaggaaactgggcatatggaggaaactgtggggcgtatggaggaaactgtggggtgtatggaggaaaccggggcgtatggaggaaactggggcatacggaggaaactgtggggcgtacggaggaaattgaggcatatggaggaaactggggcatacggaggaaacgcgggtgtacggagcaaactgtgaggcatacggaggagacgctgtgaggcatacgcccaggtatgcaggtccgg

SEQ ID NO: 155053 - DNA, 884 bp, Homo Sapiens
  misc_feature (45)..(77): n is a, c, g, or t
  misc_feature (86)..(306): n is a, c, g, or t
ttgctgctggctgggttctgctgaaagccccttggcgctggaaannnnnnnnnnnnnnnnnnnnnnnnnnnnnnnnngagcccgcnnnnnnnnnnnnnnnnnnnnnnnnnnnnnnnnnnnnnnnnnnnnnnnnnnnnnnnnnnnnnnnnnnnnnnnnnnnnnnnnnnnnnnnnnnnnnnnnnnnnnnnnnnnnnnnnnnnnnnnnnnnnnnnnnnnnnnnnnnnnnnnnnnnnnnnnnnnnnnnnnnnnnnnnnnnnnnnnnnnnnnnnnnnnnnnnnnnnnnnnnnnnnnnnnnnnnnnnnnnnncaggtaggatggctgttgaacggacgcctgcctggacgccctgggcactcattggagtcatggtacttatcatgggtgtctgctgcagtgtctggtgtgaaaacctttgagtggaggtcagtccatgtccataggtgggggcctgctggtgcacatagccactgggccgctgttgcaggtggcgggtaggatctacaagagtaggattggtagaagggtgggtgctctggtaaggctggctggagtagctggggggcaccatggtacctgcagggcctgtgtgttgctgctatcccacatgagacacatgaggagtatagccctgggaagtctgcaaaccgtaggaagagctgggagtcatctgatggacagatgactgtcccaacatgccctgactctgtatctttgcctggagctgttggcgaaggcgctgtccttggggcaccgcaggttgctgctgccggtacacagaggtcttataagaggagggttctaaacccatgacgccagtcatggttgtgggcagcactccagggtaagttggtcgggtgggcagcttctgcattggtaagcgcaca

SEQ ID NO: 155054 - DNA, 1038 bp, Homo Sapiens
  misc_feature (166)..(166): n is a, c, g, or t
agctggtaacgtgttggcagcccaacaacttggttacatgtctgtggtgacctgaatgcggtcgggtacaccgggtgctgttcatgcggctggccacgttcacggtattgccccagatgtcgtactgaggctttcgtgcccctatcaccccggcccaccacggggnccgatgttgagcccgatcttcatctggaagttgttgaaggagtgctcattgatgtacttcatctggtccatcagcttcatggcaaagtcggccagtgccttgatgtgggtcttgcccaccttgtcgtaggtagagtcgttgaggccggaggcagccatgtaggtgctgccgatggtcttgatcttttccagctgccggaaccgctcctcgctgatgatctcatcaaagtcagcgatgatctcgttgagtagccgcaggcactcgacaccctcgttgtttgcctccagctccacgtagaactcggagaagttggcgatggaggcgaacatgaccgccacacactcacaggactgatagtagagttcatcattgcggcgctcgcgggccaggaagtgggcggccacgtccttgggcaggatgttgtgcagcagcctccggttgtatgcctgtagctcctccatctcctctttctcctctgttgcctgtagtttccagaggaagtctaggcgggcagtggactccacctgctgggcgtgcaggtacagggccagcgcaaacaccagcagaatcacaggggtcatatatttgagggccaccctccctgcagctggacagtccagcccatcaaaggtctcattggaagaagccaagccatggacgccaagcagtaggtcatagttgtcaaagatggtggctgggggacccagcagaagcagcaccaaatagatgagccccaagacaaagatcatggccaacttcccgatgctgctgatgtgcaggaagacagagctggccaagagactcagcagcatgttcccgatgaagtactcaggaaagctgcaggtgggcatggtgccctcacacaggggagc

SEQ ID NO: 155055 - DNA, 950 bp, Homo Sapiens
  misc_feature (34)..(36): n is a, c, g, or t
  misc_feature (205)..(205): n is a, c, g, or t
cggaactgctggtgctgctccagttccccccaannntgccccggctggcacgcacgctgccagaggagctcccacagtcagagctgaatcgggagcagaactgtcccacacatttcttcctcaggcttctggtagtaaccttctgcttctctctgggcagcaggtaaactgcttgcaatttcggcatctgctttacaaacctccntagtgctttcctgtatacaccagcttcttacattgatgtcactgctcagctcagacctctcaaagtcactgcacacaagcttttagatcacttctgttcagggaggctttgagacttggagcaaacaccccttttcttgttctttctacatgttcgacttttactccaatttaaattttgtaaatttccttctcttttctcctgaagctttttcttcctataaggatcttcttgctctacgaaaggtatgtcctgtttctcagaaaacatgtcttctctagatgttttgtgaatcttcttttctgaagaaggctttgtgtccaccttcttcaaattttcacaatgatctacttcattcttgacaggtacttgctggttattcccattatttttcctggaaatttctggcaagtctggctggtggtactgaggtgagtttcttggtaaatggttttcaggtagtttcttggaggtcttcagtggacagagctcccgttccttgaactcggctgtgttctctgaagttttaatgtcagtttccttaggaaacatacatgtctgtattccctccttcatactacattctgaagaaggattactgaaaacaattgtgtttttcagtgtgttttcttctttattcagtaagtttttgggaagggttaaattcttctgcaggttgacatttatgccacttgcatatctgaggctgatccagttctcacgcatggcatcagtgcaaatgtcc

SEQ ID NO: 155056 - DNA, 986 bp, Homo Sapiens
  misc_feature (20)..(20): n is a, c, g, or t
  misc_feature (971)..(971): n is a, c, g, or t
cgctggggagtggacgtatntagcgatcgcgcgggaagaggtgtgttacaaaggcgaagaggggcgagagagggccaggagtctgtagtggaccgcgggggatttcagtaaagaggggtagggaggcctcgccctcattgtcccgaaggcggccctttagagcgtccccgactcccgggccccgggctggtgtttccggtgccgtgtgttgagggaggaaattccttcaaggggatgggaggaggggttccccggtgtgtcagtgtaggacttgaaggcccggggccccagcccggaatgtcagaggaacccgtggcggaaacaacccggcgatgccaggccttccacgttcgggcttcggggcgcagggtcagcaggcatcacctggcccgtgtagccgtcgctgttgcagacccatacttcaggggagggctccgggcagctgttcagggtgggagccgcacaggagaactgcatgccactgcgggttttcatgatggggatggccttcaggaactcagggtctagacagcttttgctggatgccagcttcctcttggcctcatcgaaggcctgttcaaaaccaaggcgggcgtcagggtgagggaactcaaaaatgtaggagtcggtgccctcgggccgagtggcgcacagctccagcttggttggcgggaaggaaagcgcgtagcacagcgcctgcttctccgacaggtcccggtgcatggcaggtgagaggtcccgcagtgcatcgtccaggctctggtgggggaaaccaaggctctcagagagcttgctcatttggcccagggtggtgaggtcctcatcaaggcggctgatggccttctggatgttctcccgattggtggcttgggatgcccctttgatgatgtctgcgtcttccagcggcagcttccacagcatcttgtacttgctggcggtgtcaatgacactggctgccgcatccctgaatntccggaccggtccag

SEQ ID NO: 155057 - DNA, 712 bp, Homo Sapiens
  misc_feature (328)..(341): n is a, c, g, or t
ggatctcttcattcatttattcatccatttctctaataaacatcagtagaacccattaaatttcagacactgctgagaaacagaggacatagagatgaataaaacacagttcctcccctggagaaactcacaaccaagtagcaaggatagacatatctataaataatgacagccattaaataagggctacatccaaatatatacaagtttatgtgtaagcaaggaagggtggtcacgttgacctgagttatgggtgaggggtgataggtgggaggtgggggctgccagacagacaccaggggaaggctcaccaggcagaggggaatgnnnnnnnnnnnnnnaatgaaacaagaaccagcccattgtctcacctggctgaggagttgggtttccaagggagaggaaggtaaggagagaagaaatctggactcagactcagagggctgtgaatgtccagctatgaggtttggaggcccttggaggatgttggcaggagagggcatgatcatcccaacctgaaaaaggaggcacaggactgtgtggcaggggaggagggcaaaaggtgttgagccaagctggatggttaggacaggagagacctgacaggggagggaaagcagtctcagaaggacctggggcttctctcagtgtttgaaatgaggccaggtgctgatgatgttgtacaaagcctgcccaggagacaaggttcggg

SEQ ID NO: 155058 - DNA, 1035 bp, Homo Sapiens
  misc_feature (58)..(58): n is a, c, g, or t
  misc_feature (71)..(71): n is a, c, g, or t
  misc_feature (75)..(75): n is a, c, g, or t
  misc_feature (79)..(79): n is a, c, g, or t
  misc_feature (91)..(91): n is a, c, g, or t
  misc_feature (228)..(243): n is a, c, g, or t
cgccttggcaggcctcgagagggtcacgctccttgttgggcacaaacaccccaagacnatgatcccgggtngagnttgngcccccattagncaggaggcctttcaagagggatagagggggggacgggtccccttgaacccccggatctcggggtgtgtacaggggaacccttgagggggccacaggcttttcaaacattggccaacgggaccgagacccctgtcttnnnnnnnnnnnnnnnngaattccagggattggggtggggtagtggggctggagaccttgaggtgtcctggcttggtaatcttgagggggggcgccagaggcctgggatctgcagctgtgtcttcccaggccaggccctgccccgtccccactgggaggtctgggggctccgccagtctcgcctgcccgcggctcccaggcggggcgctgcgtcagcggaacccgcgccgggattagcgccctggcgcccgcctgcgccccgggctctgtcgggcgaggctggggtcaccgccccattggggcctcttccgccggcccttagcctggatcccaggccggaccccgcgtggtgcccgcagcctcagtgatgacccatgtcctccatgcccacgcggccccagacgcccagcacgaagctctcgatgtcgcactcattgacgccgcgcacgatgcggaagtggcccctctcgccccaggctgggccccaggagttggccgcagtccagtatttgagcgtccttccatctggcagcgtctcctctccccatcctgtgatcttgactgagtgggtcccatgccggcggtatctctctggcctcccaaggctcactggcgtgtggctgtagatgcctcccttgtataggaagaagtcctcatgcacctccatgagggcttggacagggccattctccatcagctccttcatgatctccttgtcgttggagccgaggcggtagacaggagtgacctggtagatgtcattgttattaacatagctgttggggcagtgggcagtggcctggcgcttg

SEQ ID NO: 155059 - DNA, 1009 bp, Homo Sapiens
  misc_feature (50)..(50): n is a, c, g, or t
agctggcacctgcttctccgtggccaacagctcctctccggccaggcccncagcagcccatgaaccagaaagcaaatttcaccagagacacccatggaagccctacgagaaacgccttccccccaagaacaaggccagggggccgcgtgtgccccaaccgctgcatgcaccgtccagcagcgtatagttgagctgcagatgcagcacggccgcagggttgctgctgtccagggtgaccacagcaccgacggaggcctggggctggaccacaacggagttggcggagctgcggtggccccgggcagcccagtccgagttgttgggcaccttcacggtgaggcgcgctctgaggccagccgctcgatggggatctgggcgccggcctgtgtctggaacgccatcgaggccaccttggtggagacggtgtagttgctgatatagccaaagggaaagggattggagtccaccagaaagatgagctgcaccacgtcactgaggttggccggggccctgctgaaagcccgccagcgtcaggggctcctcgttgagcacgcgggagcgcgtgacgatgggcgtgagggcagaggtcaggttgtaggcctgggacgccaccatccgcgatggtgactcggctcccagctctgagcgctgtggtgcccgcacgtctgagctggccaggtggatgaggtctcctgtgatgttgaggatgctgtctccgatggcggtgggcgtcacggtgcccgcggtggtctctgcctgcaggatgcgcatcatggcctccagcttgtgcagcgtctgcttcaggcacgagcggcatacgagctccctgctgggccccatgcactgggccagcgcagcagcgatctgctggatgtcatccacagtgtggaccctcagggacaccagagtctccgtgatgttcttgcgtatctgggctcggcgctgccgctcgtgcttgggctctgccgccacgtccagggcccgctcgtactcgttcagcacagtgacc

SEQ ID NO: 155060 - DNA, 1061 bp, Homo Sapiens
  misc_feature (213)..(213): n is a, c, g, or t
gggattttcccaattggagagagagggggttataccttaattcctccggtgtttccccccagaatggatgtaaaaaccggaaggctttaagaagggctaaaagtgccattctcccctagttataaaaaaatgctgggatttcaagccccaccgtggttgcagtacagggtgctgtgttccctgggtttccaccagggtggaacaattgaaagncccacctttctcatttaattgttagcagccagccagccattggagggccgggtcatttcctggcaggggtaaagatgaaaaaaagttcaaggaagggcaaaaggaaatatcccttgtgggtcttacttttaggccttttatgtagtttttttcttaaaaataccctcaggccagtcccaagcatagcctgtccctgaagtgccaattccagcacccccgtgggccaccctagacaccttggccagatctggacactcagggctgagattcaactaggaggcagaccacggaagcaagtttggaggggacagtccctgacagaggctagagcatcatccaagtggaggagatgagacagagggaagggagagggaggcctaaggatttccccagagggggaggtgcatgactgggcagggaaagcagcctgctcgcctggcgggtgccaccatctctctcatcggtgggccctcagaccttgccccattgcttagggagacaatgactggccacagacacacccccacacacatttccagggtagacagaaggtaaaaaacaaaggtggttgctcccagcactgcctggtctgggagctccaactatcagagtccagtgaacaagccattatgggcagcttggtccgtagaggtggctggtggtgtggagtacttgggtgggtaacgaatgaagagccggtcctcctctttcttcacccagcgcaggagtttggtcactaccaagattgcacctgccttggtcaccagagggctgaggcaggtatagagctcgaatttggaggtcacccaggccagtagtgtctccttctcagccacgtgtaaatgagg

SEQ ID NO: 155061 - DNA, 1032 bp, Homo Sapiens
ttttctcagttcactgatatcaaaagaaaggactttggcattatgttcctgcaccaccttgtatctattttcttgattaccttttcatatgtcaacaatatggcccgagtaggaacgctggtcctttgtcttcatgattcagctgatgctcttctggaggctgccaaaatggcaaattatgccaagtttcagaaaatgtgtgatctcctgtttgttatgtttgccgtggtttttatcaccacacgactgggtatatttcctctctgggtgttaaataccacattatttgaaagctgggagatcgttggaccttacccttcctggtgggtttttaacctactgctattgctagtacaagggttgaactgcttctggtcttacttgattgtgaaaatagcttgcaaagctgtttcaagaggcaaggtgtccaaggatgatcgaagtgatattgagtctagctcagatgaggaggactcagaacctccgggaaagaatccccacactgcgacaaccaccaatgggaccagtggtaccaacgggtatctcctgactggctcctgctccatggatgattaattactcaaaactacaagtcccaagcaaagtgaactatttgttcctggaagtatttaataagttgcaaatgcagttcctttcataatatctcagcaccagaaacaaaaattaagattatcaaagcattttgaatagtgcactgccatgtgtcctgtctgtgaatgaagaagaattaccattctctctttgtaggcatgctgtatgtaattgacacaagggaaacagtatttgcatttgtactgtcttagaaatattatttattttttttgtatttgtaaatctgtggaacaaaagaggttttcctcactccttttactcactgggctcatggacagtgaaggagatgctccatctgcttctccccctttctcttgctgtagtccaatgtgctatgagcatcagcttactttgtcccttagagcaagcaaaacccagtgcaagagtctcgttcagctc

SEQ ID NO: 155062 - DNA, 1003 bp, Homo Sapiens
  misc_feature (28)..(28): n is a, c, g, or t
  misc_feature (39)..(40): n is a, c, g, or t
  misc_feature (224)..(224): n is a, c, g, or t
atcacctcgcacattgggatcggcctcntcattggcctnntgtacttggggatcgggaacgaagccaagaaggtcttgagcaactccggcttcctcttcttctccatgctgttcctcatgttcgcggccctcatgcctactgttctgacatttcccctggagatgggagtctttcttcgggaacacctgaactactggtacagcctgaaggcctactacctggncaagaccatggcagacgtgccctttcagatcatgttcccagtggcctactgcagcatcgtgtactggatgacgtcgcagccgtccgacgccgtgcgctttgtgctgtttgccgcgctgggcaccatgacctccctggtggcacagtccctgggcctgctgatcggagccgcctccacgtccctgcaggtggccactttcgtgggcccagtgacagccatcccggtgctcctgttctcggggttcttcgtcagcttcgacaccatccccacgtacctacagtggatgtcctacatctcctatgtcaggtatgggttcgaaggggtcatcctctccatctatggcttagaccgggaagatctgcactgtgacatcgacgagacgtgccacttccagaagtcggaggccatcctgcgggagctggacgtggaaaatgccaagctgtacctggacttcatcgtactcgggattttcttcatctccctccgcctcattgcctattttgtcctcaggtacaaaatccgggcagagaggtaaaacacctgaatgccaggaaacaggaagattagacactgtggccgagggcacatctagaatcgaggaggcaagcctgtgcccgaccgacgacacagagactcttctgatccaacccctagaaccgcgttggggtttgtgggtgtctcgtgctcagccactctgccccagctggggttgggatcttctctccaattccccctttctagcctttaactagggaagatgtacgccaagattggggggg

SEQ ID NO: 155063 - DNA, 1337 bp, Homo Sapiens
agagtggactataaacagcgctattacaccattgaaaatctggatcccagctctcactatgtgattaccctgaaagcatttaataagcgtgggtgaaggcatccccctgtatgagagtgctgtgaccaggcctcacacagggccagatcccactcccatgatgccaccagtgggagttcaggcttccattctgagtcatgacaccatcaggattacgtgggcagacaactcgctgcccaagcaccagaagattacagactcccgatactacaccgtccgatggaaaaccaacatcccagcaaacaccaagtacaagaatgcaaatgcaaccactttgagttatttggtgactggtttaaagccgaatacactctatgaattctctgtgatggtgaccaaaggtcgaagatcaagtacatggagtatgacagcccatgggaccacctttgaattagttccgacttctccacccaaggatgtgactgttgtgagtaaagaggggaaacctaagaccataattgtgaattggcagcctccctccgaagccaatggcaaaattacaggttacatcatatattacagtacagatgtgaatgcagagatacatgactgggttattgagcctgttgtgggaaacagactgactcaccagatacaagagttaactcttgacacaccatactacttcaaaatccaggcacggaactcaaagggcatgggacccatgtctgaagctgtccaattcagaacacctaaagcctcagggtctggagggaaaggaagccggctgccagacctaggatccgactacaaacctccaatgagcggcagtaacagccctcatgggagccccacctctcctctggacagtaatatgctgctggtcataattgtttctgttggcgtcatcaccatcgtggtggttgtgattatcgctgtcttttgtaccccgtcgtaccacctctcaccagaaaaagaaaacgagcctgcctgccaatcagtgaatggctctcataagtacaaaggggaattcccaaagatgtgaaaccctccaagatctctggattccattcatggagagactgggacctgaaaacccattgaataaagtcttccagaaacccaaaccccccatcaatgaactgaatactcccaaatttccctccgcaacctcttccaagaatattcaacccgcaaggtttgaacaaatccttccagtggggaacaagcgcaaataatttctcaatcccagaagagggccgagagaattttccactttaccagcgaaggggccgcattgtggaagttccacagaagagggaccaagcgcaattgtt

SEQ ID NO: 155064 - DNA, 1221 bp, Homo Sapiens
cccccatggaagtttccatttgtttccccggaaactttgccgggggtttcaacccggcatttggggggaaacgcttttaatggcgggcccagcaggcttgccgttgatgccttgggggcagccaggagactccttcctggggagtatgtttgtagaacatcccgggtttcttgtagcactcgggcagcggattccttcatctcttgggtatactggatatccatcatgaagttgtgcacgtgcttctctgccttgttaaactccagcttccgggccaccacggccaccagcagggctgtgcagcagacacccatgactccagtgcacaggcagacgatcttgccccacatggtgcccggcaccacgtcaccatagccgatggtcaggaaatgtgatggggatcagcccaaattgtgtctgaaaggtgcccagtgggcattaacagcctgcctctcgggccacggacagcacccaggcggtggtcagccagaggtcaagcgtgaggccgagcagcaggcggccagggtgcgtgttcatgtcaagcttggccacgaaccagtggcggaagcggacttgattgagagcgccgatgctgcggtaggaagcgttgagcaggacgccgctgcgcaggagcacggcgcggggcaccaggtagagacgcagcagcatggccagggacagcagcgcttccccttggcccaggaatcccggccagggctgcggggaggtcagcggcgcccctaaatcctgcacgcacggcgggccccgcacgggcgccgggtgcagcccacacaccaccagctccagcacgatctgcgccgcctgccgcccggtcagcgccacgcgccagtcccgcagcccgttgtcggtcatgaacagctggacctctttggcatgaaaggccacgatgaggcagaggagtaagaaggtggaaatgctgatcgtgcatttaaccaggaacaggtagagcgcccacgagcaccccccgaaccacagcatctctgcatgcagcaccatgagtccaatgccagttcctgccagcaccagtgcccagccggccagagacttctcctgctccagcaagcgctttcggcgtctcaaggcccccaggccaagcaccagatccccgcccatggcccccggggtcttggggctcagccagcttcctgcccagggtcccccacctcgcagcacgcacagggcagccactgtggcttgcag

SEQ ID NO: 155065 - DNA, 1198 bp, Homo Sapiens
  misc_feature (43)..(43): n is a, c, g, or t
  misc_feature (48)..(52): n is a, c, g, or t
  misc_feature (69)..(69): n is a, c, g, or t
  misc_feature (81)..(81): n is a, c, g, or t
  misc_feature (87)..(87): n is a, c, g, or t
  misc_feature (144)..(144): n is a, c, g, or t
  misc_feature (152)..(154): n is a, c, g, or t
  misc_feature (160)..(161): n is a, c, g, or t
  misc_feature (189)..(189): n is a, c, g, or t
  misc_feature (216)..(216): n is a, c, g, or t
  misc_feature (231)..(231): n is a, c, g, or t
  misc_feature (248)..(248): n is a, c, g, or t
ttggttcaatcctgggagcttacttactgacaccatacattanttagnnnnngatacgtgtagctccanggaagtgctcangagagncagtccatttcctggtgaggtgtagctatcttcacaatgaaaaccagccgtgttctnctgttctnnngggatnngtatctctcctgggaagaggcgagagcntagatcataggcccacaccgagagcanggctgtaccccagcntgaccatttcccactcnttgacatctgcttggcagagaagatacctggagataattttgtgaaaagtgtagcggaagtctcggttccggtaagcatagacaatgggattgacaactgaattggcatgtgacagaaagaatggccatattcattgcccacttgggcttatttttaccctgagctggctggaaaagagtgacacagttaacagcatgcacaggtaaccagcacagggcaaaaatccccacaatcatggccagtgacttggctgcatggatctcccgctggagggtggtcctcgagtggtccatcagctcagtgcgctgaagctgcctgcaggccaccaggaagatcttaatgtagatcaccagcattataagcagtgggggcagaacacacccaaagaaattgaaatataccatgtagctcatggggaccacattctcaaagagacacttcacaaggcagcagctttcattcgtggttgcatcccagggttctgtgcagttgttggtggcactgtctttactgttccaccccaggaatggagtcaatccgatgccaaaggcaaggacccagaggacagcaatgacccctcttgctcgggtccccgtgaccaaacttttatacctgagcgggacacagatggccaggtatctgtcgactgccacggccagaaggctgaagatggagctctgcgtgagcaccagcacgaagcaggcgaggaagaggcagccgtagaagtcagtgcagaagcccaggctgatggtgatggcaaaggggatggcgaagagccccacggccacgtcggccgcagccagggacaccaggaagtagttggtgggcgtctgcagagtgttcgccgtgcccaccgcggcgcacaccagcacgttgcccgccaccgaaagcgcggcgatgaccagctccagcgccacgtacagcgcgtcctggtctccagcagcaggcc

SEQ ID NO: 155066 - DNA, 1106 bp, Homo Sapiens
  misc_feature (45)..(135): n is a, c, g, or t
  misc_feature (144)..(152): n is a, c, g, or t
  misc_feature (184)..(192): n is a, c, g, or t
tttgggccccccgggtgtctttgttttccccggccaagggcccannnnnnnnnnnnnnnnnnnnnnnnnnnnnnnnnnnnnnnnnnnnnnnnnnnnnnnnnnnnnnnnnnnnnnnnnnnnnnnnnnnnnnnnnnnaaaaaaggnnnnnnnnnaagagcccggttttcgttgggggctgggcaannnnnnnnnagggcaagggagggggccccaggcctgtggggcggtttcgggggggtccaggcaccgggtcgggcccccacgggctgtgggccctgcaggctctggccacacacgtggtgatgcttctcccagtccccgatgctggcagaaggacccgcagtagcgtgccgcgttgcagccgctgcacgtctcactggctttccgcccgcagttccagcagctctcgctggagtcctcctgctggttgatgaccgtcagggcgtcctcggaggcctgccgcttcgcctcggccagggcccgctccatcttggcacgctccgtggtgatgagctcgtgcgctttgcgctccgcgtccgacacggctttctgcagctccgacatggcctgccgcttcacctcattcacggcctcttcagccttcctccagatgtcctcaggcacgtagccggtgagggtcctcggcaggaactcgcgaggcacgtctagctgaggcccttcgggaccggcggagctgctgcggggccgggccgcggcgggagcggggcccttctttgtgtcctcggcgtcgctgtagcgccgcgcccagtggttgagctcctcgcggtcggcctcctggcacctgcgcagcaccgtgagcgagcgccgcgtcttctccaccatgtccatgatgcagttcaggaggttgttgaggtgcttccactcttctgcccactcacgctctgtgagcttgtggtcgatcacttcttcctgccgggacccaggcaccacaagcggccgatggcgctctcgtagctcccgggggtctgggtggcggtaggcatctcggaagtggtgggccatggctatgtcctccaggcggtagtgcggcggcggtgtgggctgcggtggcccgttgctggggctgtagcgctgggcagggttca

SEQ ID NO: 155067 - DNA, 440 bp, Homo Sapiens
  misc_feature (107)..(107): n is a, c, g, or t
  misc_feature (111)..(111): n is a, c, g, or t
  misc_feature (121)..(121): n is a, c, g, or t
  misc_feature (133)..(133): n is a, c, g, or t
gggggccccggatattttttggggaaaaagtttgttttccacccccctttccttccttgcccctgggcccgcaagagggcatttgaggccttcagctctcccagttntccntccaggtttntgcgggcaaggnccacgggccagagtgcgctgcttccgctcctcatcccgctccacctctgcatctctcagctgcttgggcagctgcctccgcctctcttcaccagcctcatcacggccctgcaggtcacgctcatgctgagtcttgagagcctgcacagtcacctccagacgcagcttggcatcctcggccgctgtcagctcatcctccagttctgtcacctgtgctcgcagatcattggctgcctgttctgctacccggcaggctcgttccagctcatgcacgctcttgccgacgtcatccttaggaatcccggcgg

SEQ ID NO: 155068 - DNA, 969 bp, Homo Sapiens
  misc_feature (12)..(12): n is a, c, g, or t
  misc_feature (30)..(30): n is a, c, g, or t
  misc_feature (144)..(144): n is a, c, g, or t
  misc_feature (263)..(263): n is a, c, g, or t
  misc_feature (282)..(282): n is a, c, g, or t
  misc_feature (288)..(288): n is a, c, g, or t
  misc_feature (650)..(650): n is a, c, g, or t
  misc_feature (959)..(959): n is a, c, g, or t
tgggggttgggnccccccaacccctccccnccttttgtttcagtcacccacccagtgtgccagtattatgttttaaaatgcacataaaaaaagaccagaaggaaatgtacacaagtgttaatagcagttcccgctgagtgtaanaatcataggtgataattttccttctttatgcttttcctcattttctaatcttctagtgtgatgttgtattactttttatcatcagaaagaaagatttaaaaatgtaatcaaaggaatcntagcccacacctccacttntacacncaggagcccacaagcttctctggtctcttctgtctctccaaaacatctacccaaatccagtccctacaaagggcaaaactccagaggaggtagagaaatatgcatatttacttctttccttgtccaggctctaaaggccaagttcaaggctttgccaccatggaccaggtaggaggcagggtgtctcctgttctctcgcaaaccgcgaaagatgtccaggatgtgctttcccacataccaacagatggtctcaaaagttggggattctgaagaggtctgctgtggtcagccgcttctcaatctcataggctttgagctgcatctcgatgttaaggctgtgtaagaagttccctccaaaggcnaagtcagtccacaggcgtcagcacagcatggatccaccctgtgggaatgaaaagtgtctgtccttgcttcacggaacacttgtagcacttgtccacctggtccccaaagaacatctcattctgattagaggaactgctccagcactcaaagagagtcagattggcatttgttgggcggatcaggtagaagatcttttcacccttgagtacatggtaccagacagaggtgccaccaaagtcaatgtgaaagtctgtatagctatctcgcacactcatgaggcagtacttctgtacattgggtctctcaanagacacattc

SEQ ID NO: 155069 - DNA, 559 bp, Homo Sapiens
  misc_feature (45)..(101): n is a, c, g, or t
accaaaaaactttttatttccccgcccccctggtcccccttttannnnnnnnnnnnnnnnnnnnnnnnnnnnnnnnnnnnnnnnnnnnnnnnnnnnnnnnntccaaatggagtggggtttaccaaaagggaaccctttgccccttttggaagcgtttgaaaccttggctggtttttcagggaggcccccggggttgccccggattggttggcggggaattcgggcctggaagccagaagagggaggtatctggttcaaagtaccccccaagggcaggaggcctagcagccaaaggaagaacaccaatcactgagtcacatcaatcatacagtacacagacgataacatcaaatttgccaaagaggccgcttcatgatatgtgctgtttacagaaaacaataggctagttcccctagagaactgctaaaaaacaaaagggcatccatcctggctaccacggagccagcaatactagtcaatccaccacattaactatagggatcagcattcagtacccaaatataaagttattattaacattatatcagcatgggtggcc

SEQ ID NO: 155070 - DNA, 538 bp, Homo Sapiens
ggtaccatcgcgacgtgtatctgaaagacggtcaggccaggtacccaaggccagatagctcttccctcaacccaccccccaataaataagcacaaagcctggccactgtagtctcagcccccaggaattcccagacaggccacagggagctcccagaaccctggcgacagctacactggccccatattctctttccttattgacctgggagctgcctgtaaggagggcagactcacgtcacaggattgcagagaaggtcccaaagtgacctctcttccttgactgacaggtcccagccctagatcctcagtctgaagctgtggggccctccttcccagtgtggacatggtggggccctcatccttcctcccacccactgggcttgctgtcctgtctatcctgctgtcccatcctgtcctgtcctgggagcccaggctgaggaccggggtgcaggcaggaagggtccatccccatgtgcagagtccagctgggcagctaatcatcggagtagcggttccctggataacacgttcgcgag

SEQ ID NO: 155071 - DNA, 862 bp, Homo Sapiens
gggctcaatggctagggggaaaatctggagggcattctttggaggagccctgaccagtttggacatttgcttctgacccacgttggggggcagggaggccctagccattttgggatgtgctgaaaaagccccctacaaaggagaaaccctgctggcccagaaattgggggctgccccgggccctgaaggaggcctgtgcccctaggctggggggttgcctgttgaccaaggccagttgttcctgccattccaacttgcagcacaggtttctcctgtttgcaaaacaaaaattccctaaaggaaccaaaccatgccctcgcacctggccagcattggcttcccggcttccagtgggagtcccctgattataggcagtcgtatctacaagcttaaggaagagagacgttcgacactgattgtatgcttagctaacgctaactcaagttcagaggtggagctgggaaggtgcaggaaccccatctttctctggcccccaggggctcaccagggtgggggtagaggggaagctgtccagctgtttggagcagggatgggcacaggaagccctatgaacatccctccagctggcactgcagcttccgcctgcgtgatttgggcaaaaggaacgggggcttggcagtgacaagaggctgtgggcgaggagggggagctggtgggaggcggccaatgtcgcccagccctcctgggtagcggcggctgctggcgggactggggtctcctggtgctgggtcctgggaacatcagcccggagttcagggaacccaaggaggcctcgaaatttcagagaaaggagttcatgctgccctggctcccgggccatagtcacacttcgaacaatcca

SEQ ID NO: 155072 - DNA, 1107 bp, Homo Sapiens
aacgggtgatgcggttgttccatgcggagcaggagaagttcctgacgtgtgacgagtacaagggcaagctgcaggtgttcctgcgaactacactgcgccagtctgccacctcgggcaccagctccaatgctctctgggaggtggaggtggtccaccacgacccctgccgtggaggagctgggcactggaatggcttgtaccgcttcaagcacctggctacaggcaactacctggctgctgaggagaaccccagttacaaaggtgatgcctcagatcccaaggcagcaggaatgggggcacagggccgcacaggccgcaggaatgctggggagaagatcaagtactgcctggtggctgtgcctcatggcaatgacatcgcctctctctttgagctggaccccaccaccttgcagaaaaccgactctttcgtgccccggaactcgtacgtccggctgcggcacctctgcaccaacacgtggattcagagcaccaatgtgcccattgacatcgaggaggagcggcccatccggctcatgctgggcacctgccccaccaaggaggacaaggaggcctttgccatcgtgtcagtgcccgtgtctgagatccgagacctggactttgccaatgacgccagctccatgctggccagtgccgtggagaaactcaacgagggcttcatcagccagaatgaccgcaggtttgtcatccagctgctggaagacctggtgttctttgtcagcgatgtccccaacaatgggcagaatgtcctggacatcatggtcactaagcccaaccgggaacggcagaagctgatgagggagcagaacatcctcaaacaggtctttggcattctgaaggccccgttccgtgagaagggggggtgaaggtcccctggtgcggctggaggagctgtcagaccagaagaacgccccctaccagcacatgttccgcctgtgctaacggcgtgttgcggcattcccaggaaggactacccgcaagaaccaggagcacatttgccaaaccagttttgggaatgatgccatccccaaaattgggctaacgaacttcctgggcccgaaggaaccccattcaccttggccctgggtg

SEQ ID NO: 155073 - DNA, 1108 bp, Homo Sapiens
  misc_feature (964)..(964): n is a, c, g, or t
gagtgagcaggctagtgccggttttgaccacctgtggagcagtgctcactcacgaaggcattttgccatcacatgaatgtgcagaaaggaggccaaaagcattctgtgcttctccaccacagcacagacttccctagtctcatttgctgagagtagacattctgagggccatcagtgcaggtgtgatgtgcctcaaagggtatgaagcccttagtcagccatctggatatcagctgcgtgggcatgatatctagaaggctaattgattttttcactttcacctgactctcttgccaacctgcagagacagacattgggtgtaggacagtgaactgagaaggaagctattaagattctggccttggcttagctctcaactggccattggtcttgcagtgacttcatggtcatgacgattttcttcaatgtgagcaggcggtttggctatgttgcctttcaaaactatgtcccttcttccgtgaccacgatgctctcctgggtttccttttggatcaagacagagtctgctccagcccggacctctctagggatcacctctgttctgaccatgaccacgctgggcaccttttctcgtaagaatttcccgcgtgtctcctatatcacagccttggatttctatatcgccatctgcttcgtcttctgcttctgcgctctgttggagtttgctgtgctcaacttcctgatctacaaccagacaaaagcccatgcttctcctaaactccgccatcctcgtatcaatagccgtgcccatgcccgtacccgtgcacgttcccgagcctgtgcccgccaacatcaggaaagcttttgtgtgccagattgtcaccaactgagggaagtgatgggagaggagcgcccgtcttgctcagcccagcagccccctagcccaggtaagccctgagggtccccgcagcctctgctcccagctgccctgcctgtgaatggntgcaaccgtttttaaaaagtacttctgcatggtccccccaattgttgagggcagtaccctgggcagcagggccggcctctggcatccatggtctaacgcctggataactaacctccgaaaagttggtttttcccaggggccttt

SEQ ID NO: 155074 - DNA, 1123 bp, Homo Sapiens
  misc_feature (1060)..(1060): n is a, c, g, or t
  misc_feature (1062)..(1062): n is a, c, g, or t
ctcttcagatattctggactcagcagaagaattctcggcaaaagttgatatcgaagttgacagcccaaaccctacgcccgttcttagaagtgtgagtctccgagcaagagcaggaatagctaggatccatgctcccagggacttgcagacgatgcatttcttggccaaagtggcttcctcaagaaagcagcacttacctttgaaaaatgctgggaacattgaagtttatttggatatcaaggtcccagaacaaggaagtcacttttcagtggatccaaagaatctattccttaaacctggagaagaacatgaggttattgtttcatttactccaaaggatcctgaagcctgcgaggaaaggatcttgaaaatatttgtgcagccatttggacctcagtatgaggtagtgttaaaaggcgaagtcatttcttcaggaagtaaacctctgtcacctggaccttgcttagatattccatcgattttgtccaacaaacaatttctggcttggggaggagtccctctaggtagaacacagcttcagaaactagctttaagaaataattctgcatctacaactcaacatttacgactgcttattagaggacaagatcaggactgctttcagcttcagaacacttttggttcagaacagcgattgaccagtaactgtgagatcagaattcacccaaaggaagacattttcatctctgtattatttgcacctactcgattatcttgcatgttggctagactagaaatcaaacaacttggaaatcgatcacaaccaggcattaagttcacaatacctttgtctggatatggaggaacaagcaatcttattttggaaggcgttaaaaaattatctgacagttacatggtaacagtgaatggcttagtacctggcaaagaaagtaaaattgtttttttctgtccgcaacactggctcccgagcagcttttgttaaagcagtaggttttaaggattctcagaaaaaagttttgctgggatctaaagttattgaagattttttccagataaatttgtactcaaggaaagaacncnaagaaaatgttactttaatatataaatccatcagaacagaggaaatcaataataaaactgc

SEQ ID NO: 155075 - DNA, 1205 bp, Homo Sapiens
  misc_feature (45)..(73): n is a, c, g, or t
  misc_feature (1020)..(1076): n is a, c, g, or t
ggaagagagtagggagagggaaggcttaagaggggaagaaatgcnnnnnnnnnnnnnnnnnnnnnnnnnnnnnagagaaggaggctgctgcagggaaggaggcggccaacccaggggttactgaggctgcccactccccagtcctcctggtattatttctctggtggccagagcttatattttcttcttgctcttatttttccttcataaagacccaaccctatgactttaacttcttacagctaccacagcccctaaacccgcaacagttgttacgggttctggtcatgcaagctctaccccaggtggagaaaaggagacttcggctacccagagaagttcagtgcccagctctactgagaagaatgctgtgagtatgaccagcagcgtactctccagccacagccccggttcaggctcctccaccactcagggacaggatgtcactctggccccggccacggaaccagcttcaggttcagctgccacctggggacaggatgtcacctccgtcccagtcaccaggccagccctgggctccaccaccccgccagcccacgatgtcacctcagccccggacaacaagccagccccgggctccaccgcccccccagcccacggtgtcacctcggccccggacaccaggccggccccgggctccaccgccccccaagcccacggtgtcacctcggccccggacaccaggccggccccgggctccaccgcacccccagcccacggtgtcacctcggccccggacaccaggccggccccgggctccaccccggtccccgggctccaccgcccccccaatccacggtggcacctcggccccggaaaccaaggccggcccccgggctccaccgccccccccaaccatgggtgtcacctccggccccgggacaacaggccccgccttgggattcaacgccccctacaattacaaaatgtccactttggcccccagggttcttgcgccagggctcaagccttcatactcctgggcgccccaaaagtgcnnnnnnnnnnnnnnnnnnnnnnnnnnnnnnnnnnnnnnnnnnnnnnnnnnnnnnnnnttctctcgaatttcacaagacaatcactttctggaatacccccctaaccaacccctatgtaagatacactacccaccataaaactggattgccctagttaacacctcatccaataagatacgcgtaccc

SEQ ID NO: 155076 - DNA, 325 bp, Homo Sapiens
tgcaagtctgtcacattttttgccaaacattatctctatggaattcccctcatcacttaacattaggagtcctttcagtaaggaaatctggtatgtttcacacttggtgaagtcacactattttccactgatgaccattaagctttttaagtacaagtcatctctaaatctgttctaacattttgctggtaatcaatgtaacaataacagctgcaatcatttataatgcactaaatactagcattatctaaatgctttatatacactaactcacctacttttcttgatagtcttttaaatttatttagctaggtagtctaggcgg

SEQ ID NO: 155077 - DNA, 344 bp, Homo Sapiens
ggatcattaatgatagggtgatggtagaggtcactaaagggcaaagtcacaaatggtttgaatgagaagaaatcccacccttgtttaatggaatatagaaattagagcaagcactctaagccactggcttatataagagaagtggggtgtggaaaacattactgaatacatggagttttctttaaactttgctcagcaaatatccagtttatggagggataactctcaagttaaagtgtcaatctagcagttgtgaaatatcaccattctttccatctttcctacactagattatcttctccccatcactgcttgctactcttatctctgtggcttacctatat

SEQ ID NO: 155078 - DNA, 600 bp, Homo Sapiens
gtcagcttagtttttccatgataaaagtcatatagattgtactaatgaaacttgacaaagagggaaaaatagctatttccccacccttacaaagtcacaaatagcatctaaggcacagtatcattttcagtactgacaaggtgtttcattttatatggttgtcataataaggcaaattcattttgtacgctttatattttcaaacccagcaggctctaaaagggacataaaataacttacaaattgggaaagatgggcatgtgtatgatcatgatattcatcccctgccccagaacaaatgggaggaacacattgcccaaaactcacgtctggagctctttcaacatgtctccctgatgaccctggacagcatcatgaagtgtgccttcagccaccatggcagcatccagttggacaggtcagtgacaaaaggaaggtaattgtttgccaataactgtgtcacccactaacatgttgttccatcttcgctattccagtaccctggactcatacctgaaagcagtgttcaaccttaggataatctccagccagcgcatgaacatttttctacatcacaacgacctggttttcaattcagct

SEQ ID NO: 155079 - DNA, 153 bp, Homo Sapiens
attcttaacagatatgttgaggtattcatatttgtttccttttgtggttttaatgaagacaatttgtaaagtaatactgttatgtatatgctaaatgttggtaaatactaattaatttccatcatttgtagacttgttttgcaatgggatata

SEQ ID NO: 155080 - DNA, 231 bp, Homo Sapiens
gcccttttattaggtgttgaggggcaccttagtgtggattctagggaaatactatactttttttcctttactttcctaagtgctctgactggggccctgcgaattggacaagcagattaacaagaggaatacagagtttattaacatacataacgctaatcacacaggagaaacatcaatgatgagtaactcaaaggggtggttagcacttggggtctataaagcatctta

SEQ ID NO: 155081 - DNA, 198 bp, Homo Sapiens
agttaccaacaatgaacactggagattttagataaaaatacagatttctgtcttaccttgaaaaaatgaaagaattgacaataattagcccctattccaccatggtaacagtgagggatggctgatcttttaaccagagaatgaaatgacttctcctgctgggcatggttcatgtctgtaatcccattacaggttcat

SEQ ID NO: 155082 - DNA, 682 bp, Homo Sapiens
  misc_feature (589)..(612): n is a, c, g, or t
ctgtcaggaggtaagggtggcacaggcttggctccgggtgacacccatgctgctgctgcagtggtgcaggacttggtgacataggtcgaaacactgttccacctcctcttcgaagagtaagtctccaaacttggggatgagagcacggagtgttgcaaagcagtgagtcaggtaggtggtactctgatcacagttcagagaattcaccagcaccctcagaacacctcccagcaggctgtctttacagtccagagccgagctcgcctggataatgttttcctgcatatccaggatgattaaatgtgcttctgtagccagattgccactgatcaaggcttcttgatctaactcggcctttgttttatctagcttctcattagcttgccgccaatgtgtctgctctttcttccatctcaaattttcatttaggcctggaaatcggtcgttccctggagcccggcggcgcatcatctcccctctggccccttccccacgcagcaaagcctcttccagccgggccttgacatcccttgacttctgcaggacttgggtactgactttgtcagaactctgttttcccttatactcnnnnnnnnnnnnnnnnnnnnnnnnggaccgggtatgcggccgcaagctttttccctttagtgaggttattttagttgcactgcctctcccgaca

SEQ ID NO: 155083 - DNA, 666 bp, Homo Sapiens
  misc_feature (227)..(339): n is a, c, g, or t
ccccccgcggagggttgtgttttgccccccagatattccacattttaaaagttgccacagtttttggcccaacaggacccaggggttttttccccagagaatttgagaaaaacgcccgggccctagtttgagccgcccaaacccacaaattttaatttttgaagtttaaggccccacttcattttaggcccacccccagggcttttacacttttattgctcccggcnnnnnnnnnnnnnnnnnnnnnnnnnnnnnnnnnnnnnnnnnnnnnnnnnnnnnnnnnnnnnnnnnnnnnnnnnnnnnnnnnnnnnnnnnnnnnnnnnnnnnnnnnnnnnnnnnaagaattcggcacgaggcttactggattagagtgggccttaaatccagtgactggtgtccttataaggagaaaaagatttgaaaacagagacatggagacacagagcagaaggccatgtgatgatggagtcagagattggagtgatgcagctatgagccgagaaataccaaggtgctggcagcccccagaagcaaggagagaggcaaggaacaatctccatcagagcctctggaagaaacagactctgccaacaccttgatttcagacttttggcctccttcactgtgcgagaatacgtttctgttgttttaaactactgagtcacc

SEQ ID NO: 155084 - DNA, 945 bp, Homo Sapiens
  misc_feature (655)..(655): n is a, c, g, or t
  misc_feature (737)..(737): n is a, c, g, or t
  misc_feature (745)..(745): n is a, c, g, or t
  misc_feature (759)..(759): n is a, c, g, or t
  misc_feature (810)..(810): n is a, c, g, or t
  misc_feature (876)..(876): n is a, c, g, or t
gcaatcatgagagcaaatatttattatgttccagacactaaatcgatgcattacatttagagacacttagttttacacagtgatcttaatagttaggtacagtcttaaatcccaatttatatttcaggaaaaagaaactgagaaagtattcatcatgattagaaaacaacaggcaaggtttgagctcaaatactctggacataaaatcttcactctgaatacacatattgctcatattttcctctccttgattccttgatgtacctggggtatcctgagcaacacactgacataccctccaagaacctttagttgatgttggtggtggtcatgggggtggttcctatggactacctaggtagcatggatggtggctaacaggctttgggcctcttcatatcagtgataaagtgaaacatggataaatgggaaggcaaggatgttatacccatactgctgtgtctttaggagggattaggtaactttctctgaaaatatgaaaaagagtaaatgaataaataagcatctctcataactcaagccaaatacaccatacatctcaaggatgagtaaaagttctaaagaagggaaaccacaaggaagcaatggtgtgaatgttgcagatgagtcagttgcaggagataagtcaagacanagggttgtaggtgaagaaatgagaaaattcaagagcttggtgggcatagagtcatgggagctggacagttccaaggattganatatggantaacaggctgaganaagcaacatttagagaacttgtaatgagggagcatgggctgtgacattganaatgagacatgctggctctagtcgaggaaaccccacacggcagggaggacagcatggagagagcanactcgggatagagacaagactctcaagaacatactacattatctgtacctataccatagcaatagagcg

SEQ ID NO: 155085 - DNA, 599 bp, Homo Sapiens
gccagtgacctgggtgcccagtcctatcagtagcatgggatgcaaataatcacccgcttgagtctttccacctggcctgtggacagctctgtgctctcctctcacctccctggcctctcctttttggcctcccttgctatggtgtcctcagcttcccagcctcaaaaccctggaggactcggggctccagcctctaatatagcctcctctctccccacactcagccctaaagggagctcactcggccccatggtgtgaaatgtgctcccctggggagacttccctcctagtaaatgcaaactcggttcttcagttccgaggccgaaaactggggaatcctcctcgattcctgtttctcttgtacccaccatctaatccatgagcaaatcctccaggcttatcctgacagtgccttgccccttcctctactgcgattatctcttgtctggatattgcaataggctcctaattatccctgctcccaccctcttctccctgtagcctgttctccactcaatagccagagatttttcagagctgagcagatcgtgttggattgctgatccaaactgtgcatgggaccgggtaacggctcgatt

SEQ ID NO: 155086 - DNA, 918 bp, Homo Sapiens
  misc_feature (134)..(134): n is a, c, g, or t
  misc_feature (156)..(156): n is a, c, g, or t
  misc_feature (179)..(609): n is a, c, g, or t
ctcccgatggtactacggtgattgagagcccacttccgagagaagcgcagttcgtagcgcagtcggacagagaccagaggagtccagggaacctgtatctatgtctgtcggttcccacctcgactggctcgttntttatgtcgtcaggggcgagcntatgaaaaccccagcaagcgccnnnnnnnnnnnnnnnnnnnnnnnnnnnnnnnnnnnnnnnnnnnnnnnnnnnnnnnnnnnnnnnnnnnnnnnnnnnnnnnnnnnnnnnnnnnnnnnnnnnnnnnnnnnnnnnnnnnnnnnnnnnnnnnnnnnnnnnnnnnnnnnnnnnnnnnnnnnnnnnnnnnnnnnnnnnnnnnnnnnnnnnnnnnnnnnnnnnnnnnnnnnnnnnnnnnnnnnnnnnnnnnnnnnnnnnnnnnnnnnnnnnnnnnnnnnnnnnnnnnnnnnnnnnnnnnnnnnnnnnnnnnnnnnnnnnnnnnnnnnnnnnnnnnnnnnnnnnnnnnnnnnnnnnnnnnnnnnnnnnnnnnnnnnnnnnnnnnnnnnnnnnnnnnnnnnnnnnnnnnnnnnnnnnnnnnnnnnnnnnnnnnnnnnnnnnnnnnnnnnnnnnnnnnnnnnaagaattcggcacgaggggtttttgatttgtcagttgcttggctgaactgatcaagtcgatagttgcttgacaaactcaccaactttagaatggccaatcgtttaaacaagtgtcagagctgattgaaataaaccaagcattgttgggttgaattatggagagacccgaggagtgactcagcctaaagcgttgacccagttgtgagcagctcacaggccctgcaggaggagcaggccagcgagggagacacaagcagattgtcctgccagggaggggcgggagggcccacccaggccacaggggccccc

SEQ ID NO: 155087 - DNA, 765 bp, Homo Sapiens
agccaaggaatgcccgaggttatttcttttgtctagcaaccatacgtgtcagtgatgagagtaaaatgtcctctttcaatattacaattctctctctccctcctaccacccagttccagtgtcctcccacaagcatcgtggcagtgttcattttgtggaaaccattccggtgtctacaatagaaggctcacagcaccttacatgccaggaggtgaaataggggattcccaccgactcagattgcctcagaccgcgccctgtggcttttctcaatggagggaagtgtcctgcagggggcgctgttggtccttcaggcaaggtcgggttccctcggaagtctctgtcttagcagttgctggtcttcagaaacattgggcaccaattttctcatttgtgctgtgtatctttaggcaagttgcttcctgtctctgagcgtcgtctttgtttccgccttcctgggcctacggcaggcctgattcctccaggcagtgtccagagttccggacagatggaaaaggaagagagaatgggtgtcacaaaggtctgtccactcctgggcctcaggcttgggggccctgctcagggctagcctgtttgggcctcggtatggactcctgcctcctggtcaggacctggaaacctgggagcaggcaaggcaggaacaggagagggaggcaaaggcccaccaggcagggatgcaggggccacctggagacggaggagacggggctcccgggagggaggccagtgggagtgagagcttga

SEQ ID NO: 155088 - DNA, 969 bp, Homo Sapiens
  misc_feature (638)..(638): n is a, c, g, or t
  misc_feature (732)..(732): n is a, c, g, or t
  misc_feature (734)..(734): n is a, c, g, or t
  misc_feature (798)..(798): n is a, c, g, or t
tgatatgatttttttattaacatataataatatatttaataaaaaatagtatccactctggctctctcctccactgcaaggggaagagtggtgaggaggggctggcactgcccacccctaggcatccggtaaagccctgcttccagggctcccctctacccctgctttccaacaggctctgacctccagacagacggttcaaagttacaagtgctttaggccctcccttgagttcccccaggcccatcccttgcgcagaattcaggggccacctggacaaaccccttgctttttctcattcttggcatccttcattcatgctagaaagaggatctggggacagagagtagagtctctacttgccaaagggggaagggaggaaaggaatggtggtgggggaatgtggggccaagaagagggatggtgatggaggtgccctcattggagccggtcactgcggaatgactcctccacagcaggatcaggcagcagggcacaggggtcactcagcatgtttagcccttccaggcccagtggctccatgcgcagctcatcttctagcccaagccctagctccaatccagctgctgacacctcaaagccaggcactccggccagggctgctgcaatctccttanagaacctggagaggagtccctgtgaggatgatgttaggccctgagccatggcgggaacagtgggtcaagttctggtggttgaggggtggggtcngngggggggcacccattggccctcacccctaaaatcaggccttcagaaagcaggggatcagcacangctgctgatggctctcatgctgactgctccaatcccaggttgattcatcatggcggtggtagactgtgccatgccatgggcaggtgtgacgttccatatgaatgctgctggggtgcactctctgcgatctggctcgagcattctaatgatcgttaatccgacatcaatgtc

SEQ ID NO: 155089 - DNA, 762 bp, Homo Sapiens
  misc_feature (528)..(528): n is a, c, g, or t
  misc_feature (530)..(530): n is a, c, g, or t
  misc_feature (550)..(550): n is a, c, g, or t
  misc_feature (592)..(592): n is a, c, g, or t
  misc_feature (596)..(596): n is a, c, g, or t
  misc_feature (644)..(644): n is a, c, g, or t
cggatgcttagctcccactgggtggctgggcatccagtatgagccactgcggccagcacatttccacttttagatcctactccataccacaggtttcatttaagaagaaagagctagataaatgtgctcttctggttaccccaccctgacagagtgcatttttacacggctagcaggggttgagactgcagcctggcctgccagccattggaggtgtttaaggaagggcagataatgtgactctttgcggggtgccatctgcttacccattagcgagcagagggggtttctgcgggtgacccccagcatatttctaggttacttatgggcagatttgtaagtgacaaaactccagctgatgctgggaatggggagagggcccttgagggactttgtggttttgtgcttctggtttcctggccaaccccaggttcacttgtctggaggcccagctgggcactaatgtctgccaccgactatgttacagtgtataactgatcctctatttgggaagaattctccatccanangagccctcctggactgctgngttaatctgatagcagagtggtgatgagtctctgagaattangccnactcccacctgccctcctgctccttttgtggtgctctggtaccggganatcctgggaacaactcctgggtccaagcatcgtggggtgtgccagctatgatctgtgccatggagtgtgtcctggggtgcacaatacgcttttaggcagaggagcactctggggagct

SEQ ID NO: 155090 - DNA, 978 bp, Homo Sapiens
  misc_feature (719)..(719): n is a, c, g, or t
  misc_feature (817)..(817): n is a, c, g, or t
  misc_feature (825)..(826): n is a, c, g, or t
  misc_feature (847)..(847): n is a, c, g, or t
  misc_feature (880)..(880): n is a, c, g, or t
  misc_feature (903)..(903): n is a, c, g, or t
  misc_feature (937)..(937): n is a, c, g, or t
gttggtttcttttttggagtcctgagttcaaaggggacagaactaagggcaggagaagagaatggatgtgtcttctctcccatcttcccctcatcatcgaccgaggagcacaaagaagttctgtttctgtttttttcagaaactttattttagctgtcaagcagagaatagcttgaactattcagactattgttggcactgtttagtagtgaccacacgctcttctacccgggaaggaacatatgacgacatgctcctcccatgtcccctgatggtgtctgttcccacaatatccttctagtctgcatcgtgaagtggcttaggccaaagcttcctgtgtgatgacgcacgtccgagactgttccatctcattcctcgcaaatttgagctcttctgatcaattctaaatatttgattaattttaattctgaaagaaaattttgaggatttaagcttaggggattttatttttataaataccagattattgttagacttaataaatcactgttaaatttaaagatgacagttaccttggaaagttcactaatacttcgctccaaggcgtctgtaaaagaagatatctttattggagcaatgttcatgtgactgggaatgacagaagaatgggagatgacgtaggggcccctcaagcacagctgtcactcagaaattttaaatttgacaaagaatatcgattttcatctgtatgccgtcanggaaggattcagttacagggcatctggtaacttaatattggtagaatactcatatggaagttcaagctattttatacataagagagttattattttanttgttganntatagtacactgtcatctcanctaggtatgtggtgatgttgggagaggactcantggtttaattgctgggtagatgnaatacttggatacagcaattcattggaagctggngggcatgattccgacaatgtcctacaactagtagaatagat

SEQ ID NO: 155091 - DNA, 995 bp, Homo Sapiens
  misc_feature (684)..(684): n is a, c, g, or t
  misc_feature (732)..(732): n is a, c, g, or t
  misc_feature (943)..(953): n is a, c, g, or t
gttacacagtttttttaatgaagctaaaacttttagacattagcattccaagcaaagtttattctagcaataagacacaatgtgacagctaatataaattactgtggaaattacctcagatctgagaaatctggaaaatagttgaaaaagctcatgggtctattcctaaaggacaacctgtgaacctgtcagtgctaggacagatactacctagctgttcctgcctataccactcttcttactttagagctatggtagccccttcataatcctttcaggttctagcagaggaggaatatcaatttaattaatattctcagatttacaacatctgggaaataacagcatttataaatcatggacattatcaaagatcattcataatatattcttactatctaaacttggttttctgtacatttaacttttctagaggtatgtgaagtggggaaaatgggtactttaagaactatgatttgtttaattttcacctacataactggcaaacattttcattattattatcattatgtagaaaaacatagatgtatcaatatccatattttatctttagtatctcacaggaaaggtattttgggttaatgactatttacccggaaaatctggagaaaattctgcaatcttgacaaaaccctatttttttaaatacaattttttctctanaaattagttaacttttgattatctgtgtgataaagaggttgggaatangagaatgaaaattgctggtactcagtttggcttacatgtatgcatattacattttttcagagcaatacacaatgaaatctatttgagttcactttttttgtcaacctctggtaaggacaataatggagtagaagaaattgagtataagctcatcgatacttgactcagattataattgtatatgtcaatacatgtgtatataaatgtcaannnnnnnnnnngacgatctactgtacagtgacgatggcaccatcagactcgcc

SEQ ID NO: 155092 - DNA, 996 bp, Homo Sapiens
aaagttactgatagtatttaattggttactgtgatgtcatttaaataccaagactcataaaagtaaaaaaagctgctaagttgtacataatgtttccggaatactaagaagttgctgctggtctacagagccctgggaggtgacggtgaggatggtcccaagaggcgcagctagggtcactggccccggtcctggtgcctcttgcctttgcctttcttcttcttgtcctctggccgtggctccagggcgcagacacaggcggacccgccagcgatggccttgggcaggtcgacgcccctgctccacttgtcggcctcgcggtcgtacacctgcacggtcttggagaaggcagtgttctcccagctgtatccgcccaggatgtagatgcgggcctcccacactgccacgcccgactcgctgttggcgtgcagcatcggcgccacgcggttccactggttgcactgcgggctgtaggcctccacgcccagcacgtcgaagcgctccatggactcgatgttgtcatcgctgcccccgatggagtagatgctgtcacccaggctgcacatgctgtgccatgcgcgcgccgtggtcatgggtcgccgctcctccacacgtctgtccgtgggtctaaatagcaggttctgcggtaggggcaattggtattccagtccctcgagatgtcactaagtcttgttgatggtgccgcgtggcgttcttgaacttgggaaccggtcaaatgacatgagtcatcttggactgtagtttctactgataaacgttcgtttctattcggcgccatggcaccacacggcttcattgtggcaagtaaaatccacgggcgggttatggggcacctgtggtgtaataccggacttgcttcccaaccggaaacataaatctgtgttggggtcaatgtgttgggattaatcccgtaatttggaaggacttcctgtacatggttcctcggggatcggacccaaggtataatggtagacc

SEQ ID NO: 155093 - DNA, 916 bp, Homo Sapiens
  misc_feature (549)..(549): n is a, c, g, or t
  misc_feature (636)..(636): n is a, c, g, or t
  misc_feature (658)..(725): n is a, c, g, or t
  misc_feature (818)..(818): n is a, c, g, or t
taagggcccacgcccagcctaccatactgattttcaaggcagggtctaacccttcataagatgtgagttcttccaacccaataagcaggcagctttgaggacaaaaaggcaacattaaaagataagaccctagaagtcagaacatctgtattccaaggccaccccttctccttttagtcatgtgactttgggcaggtcaccctccctgtctgtaaaatgaggttggactggataatctttatgtgccctttccttttggcttaaaattctgtgatttattcattcttaggaagatcagcatatttattgggatttctgcttcaaaaattctttctaacctcaaaaatccaagtccagaattttttgttttcttctggatttaaactgtttaatatgagcacatcaaggttgacttctcatcctttttgggaagtgaatttaatattgagggtaattgaatgatgttgcaatgggtttccctcctgctggcttggtaagaatattaaagcctgcagaggtggaaattggagctcatggagaaatggatanaaagcaatttgttgcaggcagcctttggacaagttgttttcataggaaatagacctgctgcttcataggtttcctcctcggtgcganttccttggctcgagggccaaannnnnnnnnnnnnnnnnnnnnnnnnnnnnnnnnnnnnnnnnnnnnnnnnnnnnnnnnnnnnnnnnnnncacattcacacaacaatgaacccggagcataagtgaaagctggggtgctatgagtgacgactcacatattgcgtgcgccactgccgctttcantcggaaactgtcggccagttgattaatgaccgccaccccggggagaggggttgggtatgggcgcctccgctctcccaacgaccgctgcgtggtgttgg

SEQ ID NO: 155094 - DNA, 517 bp, Homo Sapiens
aacgaccactatttatttttatttaattaaaaatattatgcatgttgttgcattttcatggaaaatattgagttaaaaacacaagcagtgttaattttcagaaaccttcatgcaccccattctgccacctgctgccttcttctgtccatggcattaaccacatgtttgtaagaattgggcccatcgaactggagcttcctagaaggtcatacctgtgggtctcctggagtaagccattgtcttcaagacagtgttctgtcaagtcaacttcagatactaccggctgtggcttccttgcaaaccattgaaaggaactggtgtaaaagccccaaagcacatgttaacaccaactcagcacaattccacgcaatcaagcactgctatgacctcatccagtttccaagctagttagcaaatgaccttgtgttctacctggtgtattagtgtgctgagctcctccacaaaacttccctgggacccaaggtggaaagacactgccatatagtgtttatattca

SEQ ID NO: 155095 - DNA, 645 bp, Homo Sapiens
  misc_feature (600)..(600): n is a, c, g, or t
  misc_feature (615)..(615): n is a, c, g, or t
gctcacgaggtctttattggaataaataacagcatactgtgacgccacgtggcattgtcctaaccgcatccctggcggaagaagtgtttgcccggtgttgcagtgagctcctgaaaagcgcttgcttcctgcactcagccaggtgggcctgacaaacagcatggccagggttttcgtggcttttatataacatccagaaatccaaagtaaacattgcttaaaacaattaagaagacagtaaaatactggcacacaaaacagggggaaaggattcagttgctttaaaatagaattgctctttgtcaccaagacaattaggacaccacggcccagcgggactctgggctcggtgcttgcataacactgtgtgggcgtcaataggggaatctgaagctgcgggaggctcccctagtctggtgtgggttgagagacacgtcacatggagaaggagaatcagcaaataccttcctgcccttgtccgagcgtccactttgggccttgcaggcctgagacccctttgtgctgggacgtttgtccccatgggtggacatacttggccttgctttcactcagttcctatggaccagggttcctcttcanagaacattcactganaacgtggtgccgggaggaggaaggggtcca

SEQ ID NO: 155096 - DNA, 436 bp, Homo Sapiens
atgagccaccacacctggccttagaatagttttagagttgcagaaaaaattgagaagatagtgcagagagctgctgtataccccacgctcagttactcctaatattaatgacatctgacattggggtggtacgtttgtcacaattaatgaaataatatcgatccattagtattaactaaagtctatagtttattcagattgccttagttttgcctaatgtattttactgttccaggatctcatatgacattatgttatcaaatttgataacattctggctccagacatttatattgacaagtaaggagttgtcgtgtctccttaggttcctcttggctagggcagttgctcagactttctttggttttgatgcctactttgatagtttcgaagagttctggtcagacatattatgggatgcccctcagctgggatt

SEQ ID NO: 155097 - DNA, 554 bp, Homo Sapiens
gtgcatacatatgtatgtatgtgtagggaatctattttcaaactataattagaaggtaatgtgtgaggagcaaagctttaaggattgtctttgtttttaaagatattattaacaaagcaaggtcaaaatgacccagcaccaaatacagtgaaatgtgggcaatattcttctgaatctgggcagcactgacagccaaggaatgtcaggaatcaccatcttgttttaaattttacactccagtgatgtgaaaaggtgacggtatactttctaataccacacaggaggctcaggttacctaatgttatcctgctttctcacataatgattcatagagccggaagatgtactgcacctgctctgaaaatgtactcctcgcaccactctgcagcagtttcttatgctgcatgttctactcctttccaaacactatatcattaattaaaagcgcatttagttatagcacttactattttggcagtgaacatttccaaataatcaactggtttaccaaatgggagtttggaatctccctttctaaagattgccagaatatt

SEQ ID NO: 155098 - DNA, 890 bp, Homo Sapiens
  misc_feature (655)..(677): n is a, c, g, or t
  misc_feature (811)..(832): n is a, c, g, or t
tagctactcattgcacccccagcttacacttttgttcccgctcttatggttttggaatgtgagcgaataacaattcacaccggaaccagtatgaccatgattccgaatttatacgactccctatagggaatctggccctcgagtccaagaattcgccccgcggaaagaacgaacgaaagaaagaaagggaaagaaatctctttgctatttgtataaaaatggaaattttaacagcttagcctctagagagttactgaacgtggttaccttgggaatgtaaatagaactgcaaattaaaatgactggccacttcaactgggtaagggaaacagctgcaataaagcttcgtgaatatatatctccatcttgaaagttgtgttccacaaaggtttcgacctctttgtccaaaaatgcatattactcatttactcctttcataccttcattgtgaaattaaataacagactcacaagcacctggcactggtggcagacaaaaaggcctcaacattctgcagcaggccagaggaggaacgacgctgctacagtctttattagttccagtgctcaagcccaggtttctaaggtttgacaatattctgtaagttaaaatcatttccacacatacagagtagaatcctgtttttgtaagtatnnnnnnnnnnnnnnnnnnnnnnnttcatggaacattgtctggaaggatatacatgaaaatgttaagagttggggggggttgaattttaggcaattttaatttttttaacgtcttctggtttttctacaataaacatgaatcagttgtagaacctctnnnnnnnnnnnnnnnnnnnnnngaccgcgtatgcggccgcaagcttattccctttagtgagggtaattttcgcttagcac

SEQ ID NO: 155099 - DNA, 876 bp, Homo Sapiens
  misc_feature (44)..(60): n is a, c, g, or t
  misc_feature (746)..(746): n is a, c, g, or t
ccctcactaaaggggaataatgcttgcggccgcatacgcggtcnnnnnnnnnnnnnnnnnaagctaggtattgagtacatgtggattttgctgtccacaaatacttgtttcagagttttcatggatacagtggcatggttgaaatgaagctgtgagccttctgctttaaatctgatgtaagaaactcctgttaacaaatagtaagtatgggttaattagccctttgatcaaagcctagctttacattgtttaggatctttggaaaacaattggtttggttgcccactttccgtaggatcaagagcagaacctttcacatggcacagaagaacccaggttgcgcttcatacctgcatattccagccttagcctgccatttctctccttggcactttgtgctccagcaacactggtctcagttggtcatcctcaaacttgggttccatatccagcctcaggacctctgttcctgttactatggttccttgcatgtcgcctgctcttactaaagagctcgtgtgttttccagcacacttcggtttatctcttgatgatgatgctagtctctccctccgcaagggcggaaaggctgcctgttggtttgtaccagtgtttcctaacgtgtagctgcagtcagtattttggctaagctgttcccaggggctcaacagatgcgtttcggatgaggcttaactgacccatccttttgtgatgcgggagagattgcaaggcctcgctcacctggncagaacaagggaagaggcgcggttgcacggcatccaagcctgggcgtcatggcggggtggcagcctcccgggcgggggggtcttgtacggcagggggggcacagcaggaatgggaagcgggggcgcagga

SEQ ID NO: 155100 - DNA, 626 bp, Homo Sapiens
  misc_feature (65)..(85): n is a, c, g, or t
  misc_feature (407)..(560): n is a, c, g, or t
  misc_feature (592)..(592): n is a, c, g, or t
cgggcagtgccaagctaaaattaccctcactaaagggaataagcttgcggccgcatacgcggtcnnnnnnnnnnnnnnnnnnnnnaaaatatgctatttactttttttacagttataaaaataatacattatcaaaatagacaacttacaaaacacaaaaatccaccaagggaaacacagcaaaggcccctgatcccaccatttagaaagaacgagagtctttctggcccgaaggcaccagctctgatgaaggcacaatgaggagatgccagcacagacttccccagacctgaggtgacgctacaaacgagcggtgcacagccacacacgcaggtttagagttcgggaggaggagacctaagtcctgtcttcaaaaacaaaaagcaggccgggagtggtggctcatnnnnnnnnnnnnnnnnnnnnnnnnnnnnnnnnnnnnnnnnnnnnnnnnnnnnnnnnnnnnnnnnnnnnnnnnnnnnnnnnnnnnnnnnnnnnnnnnnnnnnnnnnnnnnnnnnnnnnnnnnnnnnnnnnnnnnnnnnnnnnnnnnnnnnnnnnngaccgcgtatgcggccgcaagcttattccctnttagtgagggttaattttagcgttggcacttggc

SEQ ID NO: 155101 - DNA, 374 bp, Homo Sapiens
agcgatgaatgacatagtgacttctcagcagggatctagcacttggctccttatatctccactagttccatatatctccactagttccaacaaacaccaaggaaattctgagctatttgccactgccagtagatgagtatgatgagcaaccaagaggcagtagcaattccatggactcaagtagggcccaaactccctgtccaccctctctccacaggccctggggacccaagcctgccccatcacctgctgccccgccgctggggtggcacactcgtggtccacagccaccgtgccctctccatctcctcacatttggcatgcagggcggcaaaggctgcatcggatagtcctcaactctgcaatagagcagc

SEQ ID NO: 155102 - DNA, 123 bp, Homo Sapiens
cagcccttacttactcagttttgtctgtagagttgtcccaagaattatggagatgagccaggcatggtggctaacacctggcactttcgaggtttgaggtggaccgcctcgtgccgaattctt

SEQ ID NO: 155103 - DNA, 797 bp, Homo Sapiens
tttgtcttgtcaaataatatggtctttattctgaaggctacagagaggcttttgaggggggcagtgttaggtttggaattgtgctttacctgaagttaattttcgactggattttggcagtagtgtggctgctggcctgggggagtccaatcaggagaccaggagcacaggcagcaggcaagtgcagtaactgaatgaaggcagtgccctgagcacgggccaggcccagagatatttaggggtagcgtcaataggatatgactgattggatgtatgttgcacgaagtagggcattaagaaaaaaaaggaacaacaaacttcttcctgcttatcaaagaccataatgagggcaatggcctttcctgaaacacgttccttgggaagtcaagcatgagcatcacaatagtttggaagctatctgcacccagcaagtgagtttccagttagcctcacgcatggcaataggtgcttaagatgcacgatgcaggttcgtggccccggccctgtctggctcgcctgaaatcacaccacaaaagcagctgccttttcgtaaacacaagggatgcaatgttacttggtccaactaaacctcattctttctgtcacccgggggctgtgccacggaggctgctgaaagattggactcccacgggtgggtgaccaagagttcaagtgaaactttgaattttcccttcttcccagtcccctcgtccggcccagaaaaagtaaggagatgttggtttgggtcgggaaaaagaaggacatgactttttaattgtgtcccgggtggcgaaaaa

SEQ ID NO: 155104 - DNA, 570 bp, Homo Sapiens
cacttttctaccaaatgggttacataggaagaatgaactgaaatctgtccagagctccaagtcctttgggaagaaagattagatgaacgtaaaaatgttgttgtttgctgtggcagtttacagcatttttcttgcaaaattagtgcaaatctgttggaaatagaacacaattcacaaattggaagtgaactaaaatgttatgacgacaagggagtagtgttttgatttggaggaggtgtatattcggcagaggttggactgagagttgggtgttatttaccattattatggtacttgggaaacatttataaccactattgggatggtggtaaaatacaaaagggcctatagatgttagaaatgggtcaggttactgaaatggggatcatttgaaaaaattttttaaaatagactcacggaactaaattccccttcaaggcccagggaaggccatttcaaggttggtttccgggaaaaatgggtttcccacaagggggcaattttccaaaagggggaacaaacaccttaaaagggggttgttttaacacaaaagggcggtgttaatttggg

SEQ ID NO: 155105 - DNA, 889 bp, Homo Sapiens
  misc_feature (50)..(50): n is a, c, g, or t
  misc_feature (60)..(60): n is a, c, g, or t
  misc_feature (693)..(829): n is a, c, g, or t
aatataccagtaactttagtgtacagttaagagacgtctaaaaggaatcntgtgtcatcntgcctggggaaagtctgagagccacactgaacatggctagtttaagtactggtcgtgctttcattgggaatatactgttttgagggaatgaatcggagagaactgtgttggcagcacggcacagtctcaggaagcttcactcaaactgtgaacccttatgctaactcccgtgaatatggctggtggcgcccaccacccacgccactcccattttataaggtggaacctgaactgcagggccagaaagcaaaatacccacatttccctaaatctcttgtgctagcattctgggcatgcatgaggttttaccagttgaggtttggaaggtggaggtaaacttgaggccaccttcttcactttggccgtcttccgctgccagagctgtggatgagcttgactctcctccctctcacacctgacatggaatctatcagcagatcacgtgtgtgctacccttgaaatcagtatctagaatccaatcacttcccagtgcccctgctgttagcggcctggccaagccactgccatccactgtccagggactccatcagccctgcttcccgcctcatctccacaccagctggctcaccaggtcactttaagaataaagccgggctgggtgtggtggctcannnnnnnnnnnnnnnnnnnnnnnnnnnnnnnnnnnnnnnnnnnnnnnnnnnnnnnnnnnnnnnnnnnnnnnnnnnnnnnnnnnnnnnnnnnnnnnnnnnnnnnnnnnnnnnnnnnnnnnnnnnnnnnnnnnnnnnnngaccgagtatgcggccgcaagcttattccctttagttgagggttaattttagcttggcac

SEQ ID NO: 155106 - DNA, 426 bp, Homo Sapiens
  misc_feature (53)..(127): n is a, c, g, or t
  misc_feature (411)..(411): n is a, c, g, or t
agcacccgcaaccacgcccagctaatttttgcatttttagtagaaatggagtnnnnnnnnnnnnnnnnnnnnnnnnnnnnnnnnnnnnnnnnnnnnnnnnnnnnnnnnnnnnnnnnnnnnnnnnnnngtgtgagccaccgcgcctgtccgaaaggattttataacagatgcatgtccctgttcaccccaaagtcaagttcaggcgggatgccaataataagtccatcagtgtttccataaaaagtaaaatcatctacaagttaaatttctctctaaaaaggccacacccttatatacaatttactcttttataaaaagacaaatgtacatatttacacacgtccttatgtgttcacacatgacttaatggttagatgacatgtcctattttaagtcatacaggcgcgcacnccaagatttactcat

SEQ ID NO: 155107 - DNA, 636 bp, Homo Sapiens
  misc_feature (608)..(608): n is a, c, g, or t
aaattttactataattttattttgagtagatggggaggtaatatgctattctttgtcaggttaggaacactccattatgatgggagatgctccgaggatgtcacggagcatgtctggtgttttcagtgcacagaaaaacacatcagagagatcagcaacacccacgttgccaccaagaactaaggtataaaacagggctgtaagggacccctttccttaggcatcagccaaacaaactcagaaacagaaattcagaagccaacctgcactgacatactcatcctggtaatcacaggcgtctctacatttggcctgtattttctaaaactctgtttctttcccaggtcgaatggctgctgaatgcctttggaacaggagctatgaatcaccccggctccagggctgggaaggagggtgaagaaacttcacagagttagcactaccgcactaccgaggagcctgtcctctgagttatcatgcatgagagacacaacccgcatcaagatcgcccccatatcagttccctttttctgtttctgtttttctgtttatcagttctgagttcaccacaataaaaatctttgaagggctgaatgcttttgagacanattcctcaccggtacaggctgtgaatag

SEQ ID NO: 155108 - DNA, 577 bp, Homo Sapiens
gatcttggtgctcaggctgcctggctctccgagtgaggacgcagcctccatatttggtgcactcaggcatggctgggacaagccagctgccccagggttcttcccctggtgattctcgcctgctttctcatctcaggggaggcagtggcacctccctctccctgctgacatgaagagagctatgatatgccactgctgccaactcatcctctgcccccacctcgaaacccacagtccccagtggagggccactactcatccccattggtttccccaggggaggggtgttgtctggaagggcaggttcagatgcagccttccagatttagaggcactgggaggacagtggctgagtggaggcgcccagacctgggcaggcagcaggctcaggcccacaccttgtgatttttgaaaccaaagcccagaagatgatgtttacttctctctccctggctctgcccttcttactgcaaaccatgctgtgccttagggcccttctcatagctgttcctcatggccatgactggaacagggatgcaacctctttctacacaagcacagttagttgggtgaagtc

SEQ ID NO: 155109 - DNA, 633 bp, Homo Sapiens
agcttagtgccattatgtcattttgatttgtattcaagtactcttcaagtatctttgtaatgaaggtttggctacttgtataggtctgcctgcagggtgaaaatgccagtgtgaatattctagctaccaaacattgttttttgttgaaaaactgactttctgttgtctacctcaggccttgtgcatttgggttatctcaagccagtcaccacagagggtctctagggtctgcaaaatagaggccaaatccagggaccaggccctaataatagaagttgtaccaaaatgcctgtggtacttgatggcctgttggtcaaataggaagtacaagtgtgtgatgttagaacctccctagttgctgctatatcaaacactgcacacttgacaagtgttttcattccccgccctctgacagaacaacattcctaattctttgaaggcaaccagtgcaaaggctactacacttgtgtaatgatatttagcagatgcatacaggactggatcccagggcactgtcagttcttccctccctctcgtgctgctcagtttgtcctctgcgtcccatgtaggcctaaagtcaccccactccttagtgcctgcacctcaccacgatattgaggaagcacaggacat

SEQ ID NO: 155110 - DNA, 419 bp, Homo Sapiens
  misc_feature (50)..(112): n is a, c, g, or t
agtctccaaaatggaattttatttatttatttaattttggagacaggatnnnnnnnnnnnnnnnnnnnnnnnnnnnnnnnnnnnnnnnnnnnnnnnnnnnnnnnnnnnnnnnttgggctcaagggatccccccacctcagccccccaaaaagttgggattacaaatgtgagcccccctgcccggcctcttttcattcttgaaaacactcaataatacctcaaatttatgggaaatccatggatgtttggatacatgagtcacatcagagaagggtcttttcaaaggctagcctccagtgccgtcataccaagttaaaacaaactaacaagcaaaaacacattcacagcatatataaggcctttcttctttgggaaatcttgtgttaaatgtcacaacacaagccggacatggtggctca

SEQ ID NO: 155111 - DNA, 309 bp, Homo Sapiens
cggtaccctggaagacgggggcagcgtcagctacagccaacctggcctgagtggggtagggagcctggccgggaggatgggccgggaggctcacagggtgggcatatggagagagggcgaccgggcaggcacccctggggccgcctcctgtccacctctgttatcatggttcccagtgggtgcgccgtgaacagactccactcccatccaccctggcaatctgccttgactgtttgtgctcaaccctacagcctacccgtcttccacagcctacccgtcttccacagcctacccgtcttccacagccta

SEQ ID NO: 155112 - DNA, 601 bp, Homo Sapiens
gcacgagggctgatcccatgactaaagtgcaggccgaactagatgagaccaaaatcattctggtaagcaggaagatggagagcaagcccaagaactgaggcgggggtgcgatttccactggccaggcatgcacagatccatcctcgttttaatataatagtaaccacggcactctccagcaagtgggattgcccaccccttcccccaccccgggcatcagactgtctttcctatacccttctcttggttaatggcacccattgtttctaggggaccaagctgggaaccagtggaaccctcaagtctcccttcctcatggctactgcctgtctgaccatttactgggttcctagggtttggcttctgaagacctggattcccaccctggtgcctttgttagggtttcgggtgcctccacaccccacaggtgcctccccttgcagcgtttgcattgaaggtgaacagattgaagcaccgtgcactgaccacagggcagcttctggaatatgggcccagggttgtcacataggcccctttgaaaagagccagaaccctgcattttgagctgaaatctcctgatttgtaactgttgcttcaactc

SEQ ID NO: 155113 - DNA, 800 bp, Homo Sapiens
ggccccggagggagagtaacccggcccatccatccgtcgcccggttcttggggaactactttcaggggcttcttgccgtcccctcatcagctctgtgcgaaccctctgtcggcagccattgaggagaccctgccccctggaccctgaccacatatagattgaggccgaggagtggctgccctgtcccttttatgacagcccgcaggagccccggggtgaggcatggaggaggcaggcgacagctgacagggaccctgttggcctccagcatgtccagccagccgggcaggatttctctgcttctggctggcagccaggaactgagtatgacaatgttgtactaaagaaaggcccaaagtgacagaggcagcagagggatggtccaccgccccttggcttctgctggtgactcctcctggccactgcatcagaagaacctcctctgccccttctggagcccgaggcctggcctgtcttcgttggggctgataaattgcctctcccagggcctgctgggtgagtcaccatcccaaagcaggaagggtgccctggagagaaccaccctcctcctactctttttccacttcctcctctttctttccccagctgaggaggaacctggggcatttagggcagaggacaaaaggatgtcagcaattgcttgggctgcttggctatgcaagcctcctgcctgctgatggccacttcagggacagcctgggccctaggcaccctagggggatggcggcagcttcctgcacctttcagatttcttggtggcattaaagcattttcagaac

SEQ ID NO: 155114 - DNA, 654 bp, Homo Sapiens
gcacgaggttcattttcagaaatgggttttattatatttcataggcaccactcactttacttttggtgggttttaatacttgaatcaaaataaaataatacatgagttaagtattaaaccaacagattaaaaccccaggcccccgagcccctcattttggttgtagctcttggtgtagatgctatggtgtgagggctgctttctttcaatggctggttgtcattcaggctgggttgtcatgtgactgcctgtctgtgcctgctgtacaggtgagcggatgttctgcacagcaagtgtagacaggcagacacatgacaactctgtccagccaggcccttggttccttcaggtttcctttgctcatagacagatacaatcagcctgttttccagatttggtgattttggagagtaaggggaaagggagaaaaatacacaatataattaaacattaaaacattatggaactataaacaagttagacttttgactttattcagaaagtacatttatacatttgttccaaatgtgctaacatggataatttgcgtaacagaaaactcacacttatattttataggttaacgagacttatacatctagctttattcttattccaattcatattatgactggcccacatctatgtcagact

SEQ ID NO: 155115 - DNA, 395 bp, Homo Sapiens
ggtgtagatgtttttattgtgtgggttagtttaatgaatacataaagactaccagtaccattctgtctttactccgtggcatctgtggaataaccctgctaatgtaacacgtgagaaagcctttggtcatgccgcccactctaccagttgtccccaccatcccccgccctcctccctgtgagacactgggccaaaggctcactacccctgtgcgttgtccagcacacagacactatgtgcattatttgtacataaggataatcacatctacctgagactgctatcatggaaattaaatgtttggtacatgtaaagtctttgaaagtgtaactggaatattgtgtaattttaataaataataactattgttgtttttatgatcattactaccaaaa

SEQ ID NO: 155116 - DNA, 576 bp, Homo Sapiens
gttttgattcgagcctcaccctggccttttggcttcccctgcctgagagagacctgaggaggggacagagcccagcccctctcctgtggctgagcaggcctctgtgtccatgacacctgtcttccgggcctgggggctgtgggtgtatgtcctccctactggcttccccggcccctgctgcatgatgctcttggaactcttccccaaggagtcagtcccccaggcctatcaggggatccttttgtatctgcactttgggttttagtttcaaagctccatcaggtacagcttgcatttcaggatgtgtggaaagctcgggtgagggctgccctggttcatcatagctccaccttcctcggaaggagtgggctgttggagaccccccatccatggcacactagctcagcactgcatttcccgagatgattcccaagacagctggtgcctcctggctttcctgtgccaggccaaggggcaccacagaggaccctggatcctttgcctcttcttggttgaaggatctctatgtatgtgtgtatataaatatagttttttatctataaacctcgtgccgat

SEQ ID NO: 155117 - DNA, 443 bp, Homo Sapiens
  misc_feature (13)..(13): n is a, c, g, or t
agtccatggtcanaattttttatcagaggtcaaaagagtcaaaacaatattgatgattgatgttcctactatacctacatattagtatctatcagaggtagcacgcaccgagtcctcaccaagggcctggccaatttctagtctattattattattgttgttattattatactctttcacggatgagaaaattaaggcacagaagtcaattaagctgtccgagagcataggaatgtgttgcagaaagcggtttgcctccatactgagcccagcagggaactcaccgttcccacttctcacacagcaccgtggcacacaggaacacgggagccgacagtttagggttcaagtctcagctttgccactcagtcactcctttatctcgggcgtgccacctctgcaagcctcacttccctcatttctgaaatggaggttaatccaac

SEQ ID NO: 155118 - DNA, 629 bp, Homo Sapiens
  misc_feature (546)..(546): n is a, c, g, or t
gcaaaagttagcagtctgcagggtgcttccccctggctggctggagaagccccatgtgccgagcctggtccgaggtcctctgagcccccacgtcgcctcgctaagttgctgtgccctgaccccagtgtgggaggggccatcagagcacatgtgccttctacttggtgagggcggcattatcttggggatgcaactgcaataatcaagaaacttagaaatatttcggatgaattaactgagaacgcagtgcactcactggcatggccacctgccctcacctggggcgtgcctccggccctggcactgctctgccccacccagttggtggaatcatggaagcagaagaggggtggtccctgactcgtgtttgtgctgtggagacgcccgcaaaggccaggacacttgcatagaatgctcccggcactcttccgtctccagggctgtgtgtaagagtcagtgacagaactgtacgcagcgtgcaagagacacttgcatcactggcaccttgaaaggcagcttggcacatactgtcgagggacaggaacngctgacagcaaagcttcatgcacatgctcggccttataagccaatccgcaaatggacgcacatgtcaggggtcatgacatgga

SEQ ID NO: 155119 - DNA, 253 bp, Homo Sapiens
aacgtcacggcaggacttgttactaggaacccatgaggttgccttcatgaacagctatcactgagaatatgttcatggcaaccccctagaaagcttttgttttaggctatttcttcttgtctcttccggaataacccaagtatgagcactccgatgttatagtccagggagggactttgcaggatcatctagaccatcaccctgctgctccttgaaaaagaaaatagatggctgggcacagtggctcatgccg

SEQ ID NO: 155120 - DNA, 432 bp, Homo Sapiens
tttcataggttttgtcttggtttattcaggctgtattgagattgggaggatgggcaaaaacctgggggtggggctggcaaggaggcagttggcctaacaggacagagctgagggggccaggtgggttcagggagggcaggagactcggggcttcatatccggtttctgcacacgggcagtgagcgggaacttggtgatgccacaggtattgctccctcggtgcagccggaaatagcccttctctccccattgggccccccaggagttcttcaggatccagtatggggtggggtgtggaggctgaggctgagactgcgatgagactgtctctgcccatatcccctcctgtgactgggcgctgccaaaacccaccaacaagacagaatggtccacaagctggaggtcacaggtgatggatgtggccttaatcac

SEQ ID NO: 155121 - DNA, 239 bp, Homo Sapiens
ttcggctccctaactggtggtgttttcttccttactttggcagatcaggttctctctgtaaatcagaactcatgattgcaaggttaggtttcttagctaatccttccgctttctcctctccttcctcccttttcctccacctgatgggttaggtatcatttatgtaatggctgaattctaggtcactgaaactttattttaaaaagatcttacttggggctgggcacagtgcctcaccc

SEQ ID NO: 155122 - DNA, 329 bp, Homo Sapiens
ggggttcgtgctgggggtcgcccaggtcgctggctgcattctcaggtgtggaggtggggagctggctctggctagacatcacagttaaactcttcaatgactgagagattaagccaggctctgcaggagggtctggctacttctcagtgccccgcctctgctaggaacatgtcgtgtcaagtattataatctctattctaatacactcatatgataagccaatattataatttctgttccagtaaattgcacatgacacaagttttaaaaattgtggggaggctgaggctggggaatgggagactgaggcagaagggtcgcttgaactc

SEQ ID NO: 155123 - DNA, 208 bp, Homo Sapiens
gaaatcctaaattttcaaaatggttttctataacctctttcccgatcatcatccaatgaacttcctgcaaaagctcaatccctttctggggaccgctgcatcagtaatcaaactgccttcctaaggtgtgtgttgtagcaggagagaagtggggaagtagagtcaggctacaggccacagttgcaacctacaactaatccagaaagtt

SEQ ID NO: 155124 - DNA, 419 bp, Homo Sapiens
tttaacccacccctggtcttagttccttttgccctgggagaggttttccctctcccagaccgaaagaagcatcctttgctttttcaagaacttttcgaactttttcaagaagtcttcaactctccaaaaacatcttctctcccaactagacgggccttgctcctaaatcttggctccaggctgagggccattttgaagccgagttaattgtcctccagcgagatgacttgggatgagatcagagcaagagctgtgtcggttaagtgtgagaaagaggccagaccggctaccgattgaggcttacaccgggtttctaaggcctcttgggccaaagcagcccttacaggattagaggcttcaaccaaggcccatgctgcagcccccatctgggctctttccagacctgagcaagccagggg

SEQ ID NO: 155125 - DNA, 588 bp, Homo Sapiens
  misc_feature (295)..(397): n is a, c, g, or t
ttttaatggatgggggtgggaggggcggggttggatggtttcaggatgaaactgttccacctcagatcatcaggcattagattctcataaggagcatgcaacctagatccttgcatatgcaattcacaatagggtttgtgctcctgtgagaatcttatgaggccactgatatgacaggaggtggagctcaggcagtaatgcttgctcgcctgccactcacctcttgctgtggggcctggttcctaaaaggccagggactggtatgggtctgtggccaggggcattagggaccccnnnnnnnnnnnnnnnnnnnnnnnnnnnnnnnnnnnnnnnnnnnnnnnnnnnnnnnnnnnnnnnnnnnnnnnnnnnnnnnnnnnnnnnnnnnnnnnnnnnnnnnaacaacagtttccctcagaggtttgtaaggcttcagtgggttaatatatgcaaaacactgaaaacatcactcggcaaattgcaaatgctatgaaagtgttagctatttttgccggtcacgccaaatccctggttcctaatgcaatgtcttgaaggtggtaggcagtcaaacacattgtctggatggacaat

SEQ ID NO: 155126 - DNA, 519 bp, Homo Sapiens
gatgcttggaaaagctggagttttaaaaggcattcatccatttatgaactttcttccagcccaggatccctgcagagaaccagaggttacaaatctgccctcctttctcccctaaaaggtggctgaggggaggagaggtgcatgtagctccagctatagcaaatcagtgccctgactcactggggagaccagggggttgggatgttgctggcacctcatgggccacctcatcagcccatctttgtagcttcaggttcagctctgggtgctgcaggcagggacccctctgctccctgcctgaatgcagggccagtctccaaggaactctgtctgcagagtagaaagagctgtgggctgggaatcaggggcctgagggagcccctgcctctgcacattgctcaccaacacacacgggtagaaaaccactagctcttcctggagagaacagaacatgcatcctccaccacgtccccagatacaaccgcatcacccgttcggtaccgagctcgatcgatcatg

SEQ ID NO: 155127 - DNA, 696 bp, Homo Sapiens
tctagaggatcccgcaggtggttgtgggtagccagtgtgggaaggtcctggaagagggtggcttctttgaggagaagggcgccatcttctgcccaccatgctatgacgtgcgctatgcacccagctgtgccaagtgcaagaagaagattacaggcgagatcatgcacgccctgaagatgacctggcacgtgcactgctttacctgtgctgcctgcaagacgcccatccggaacagggccttctacatggaggagggcgtgccctattgcgagcgagactatgagaagatgtttggcacgaaatgccatggctgtgacttcaagatcgacgctggggaccgcttcctggaggccctgggcttcagctggcatgacacctgcttcgtctgtgcgatatgtcagatcaacctggaaggaaagaccttctactccaagaaggacaggcctctctgcaagagccatgccttctctcatgtgtgagccccttctgcccacagctgccgcggtggcccctagcctgaggggcctggagtcgtggccctgcatttctgggtagggctggcaatggttgccttaaccctggctcctggcccgagcctggggctccctgggccctgccccacccaccttatcctcccaccccactccctccaccaccacagcacaccggtctggccacaccagccccctttcacct

SEQ ID NO: 155128 - DNA, 678 bp, Homo Sapiens
ggtatgtgggggcatataatttgtttctttatttcataggtcctgagatctagaggctctgtactcaaggagcttcactcgaggagcctcatctccacctagacctgatttagctgatgaaatcctggtcctcagatctaatcctgatgttaaaataggctgagacttctgggggccttgggggaaggtgaatgtcttttgcatgtgtgagaaatgcaaatattttatggttagagaggagaagtgtggtagacctttaaaatggctgcaaattcccttgtggcctcctcccccattgaatctggactggcctttagtcactgctttgactaaccagaatacagtatatgtgatgttgtagaattttagtcacaagatcaccaaaaaaccttgatcttctgccagggactttttgaatgcacctgccatgctgtgaggaagtccaggtaaccacatggagaaccacacagagacagaatttgagatccccagctggcagccctagtggagctcctagctgacacccaacaccaatttgccagtaatgaagataattcattctggaagtggatactcagttccagtggaggcatcgggtgacgctgtgtagcgcagaaatgagccatccccacccaaattgcagacttatgagtaaaaataaattactgttttgagcta

SEQ ID NO: 155129 - DNA, 856 bp, Homo Sapiens
ctaataattacttttgtccatgcttatcttttcactagattattattcacattaattttggatcttccatgtctaggaatgcaagtgggtcatactttacacataataatgttgattgaatgactggataattgaaggaatggatgaaatgaatatgtttgatctagaagatttggccgctgattttatatgcgatatataggagaaagaaaagacaagaccattctggaaaggaaaatgacagtttcgttaaaagagagtttaaggagaagtttcatgtaatagacattagaaaatccttcagctacaatcagtggaaatgcttagtaactatattacatatcctttaaaatacctctaaagtcatttgaggtaggggttaacaaaattggggaaattattttaagaaataaagagcaaataaaaatacttatctctggcttttgatggactgtccttgcagttaggatgtgtaggaaatcctcagttctgtttctttagtcccaagcatgctcatgttttcttagcttttggcatgattgattcagcatgagagaggcaataggggataagtaggagtacctgtgccttaataaagatttgtaaattaagtggaagatggttatagaagagtagactgggtccagattgtgtaagaccaagaatgtcaggttcataacttttagagcaggagaattgtcaagtaaaagtgatggtgttaggaatattaccctggtaattaagtatatcagggtgtccaatcttttggcttccctggaccacattaggaaaataattgtcttgggccacacataaaatatgctaacactagtgatagctgatgagcttaaaattg

SEQ ID NO: 155130 - DNA, 587 bp, Homo Sapiens
cccaaccccacacactgttttgttctactgttcactttgtacatctgtagtagaatttttcacattttgccttgtatatagtttcattgttcttccaatactgtaaaactccttgaactctggacccagactgcctgaagaaagaaaccgtgtctttttcacctaccctccaagcaacaatcagcgaggctatcgaggtcaactggacttgccccaagaacacttcatggtcaatgtctgggtcaggaattgactttagccaactgtgccctctgttgtgaagccatcctagaaaccagtgcctcccatctgtgtgtgctttctagctctgaaaactaccaaaaagtccctgtatctactggaatatagctttgggaaaccaagaatgcctgcagcccctcgttcagcaggtacttcaatgcagaggaccaatgtgggcagaactgcactaccagcttgtgaatgaatgttcagatgggaagtgagcatcttttcccttatgttttgtgctaagaatactgtgatgttgaagcccagatactttaagatacatagacatttggcaaataaagaaaaggataaatgag

SEQ ID NO: 155131 - DNA, 484 bp, Homo Sapiens
tttggcaagaagcatctttattgtattataaagggaacacttttggtttgtgtgtactcttagtttctgttttaaaatacccacagattatcatattaagaaataaaacttccaagtttattttcccaaaatcttaatgaaatacagaagttagagttcattgaatgccttgttgtactcattttggtaataatgaaatttttagtctttttccacttaatgttattaattgggagcttcccagctggtgaactgcagaggggttaaggtatggatgcatgaggctgaagttctgatgccgagtatctccagccaggagcagcttcttcagttcaaccagctgactttccttcagtattttctaagtgagccattacatgaaaatcttgagttaaaaattcttgggactcactgtcttaatggtttgctttgtagtgtgtctggcttcaggacacaagttagatcctatatagttagaaagaga

SEQ ID NO: 155132 - DNA, 730 bp, Homo Sapiens
caggtccattagatggtcagatttatttttggagagatcctgaatgggaacggattcgggggtggatacggagcaaaatggagacaaggagatcagttaggaagctgctgagatgatgcagaggagagatgttttttaaaggcaggagtcctgaggatgagaggagaaaacaaattcaagacaggttcaggaagtacatgggcagcctgtggtggttatttgttgtcagagcaatatgggagaagacactaggatgatcccagatatttagtttcaatgaccgggtggtgcctacaattcactgaaagaaagaatacaagaggagaagcaggttggctaggaggatggagaactaagtcagtggcagccctggaattcctctatggaagagattcagtcagaaggcatgtggtatttgtcttgaaattatagttacaattataagcattctgcatttatttagcatgcatgttcagaaatgatagcatggatggcggattatttgaaggccttctcaatagaagtttaatcaccctgttcaagcagacaaggatatatgaacaacataaatgccccgcattcaaagggaatttaccagccaaacaataaaccgaagacctcgtctcgcactacattctccaaaggtttgcctagctacttggtggtcaaacatctcagtttatttccgttctactccaaatgacctcatctccagaaaagccgccacata

SEQ ID NO: 155133 - DNA, 707 bp, Homo Sapiens
gctcaccctcagcagctcctcagggaggtccccgccctcgttgatgccgcggttcatggcgatgaaccgttctgccgtgggcttgtcacgcacgttgtggttgtggaggctggtgttgagcatgatgatggcgaatgacagcacgtagcacgtgtctgcaacgagtccggggtgctgggctcagccagaacctccagtggacagtgggaccccgcgtgctgggggcccgcctgcaagaggtgcccggcccacaggtcgtcctcgctcagggaaggcaggtccccaggaacacacgctgggctgtgcccacaggggccgccccctccagagctggaggctgtgcctggcaaggggccaggctgtgggctctgcactgacctgtggactggaagaccccggggttgcacaggcagtagcgagaagcgaaagcctccatcatgcgatcaatcttctgcgcctccccgggcagcctgaagctccataagaactgccttaaggcttgtacaaggttgagatcagcaaactcatggagttcaacaaaggcttgaagaactttaatattaaattcatccctttcacccaggtagtccccaatgacggtcttatttaggccttctcctattataaaggaactgggcgacgtcttctggggaactctgtagcaggtcattttgctattagaaactgaattccctttttgggatcca

SEQ ID NO: 155134 - DNA, 695 bp, Homo Sapiens
  misc_feature (564)..(564): n is a, c, g, or t
  misc_feature (582)..(583): n is a, c, g, or t
  misc_feature (601)..(604): n is a, c, g, or t
  misc_feature (606)..(614): n is a, c, g, or t
ccgggtattaacatcccagatcaaactgtaattaagaaaggtaagccatttccttctgcattccaagcatgtccttacaggcagagtgctatttaaaagaacttgcagagatgtgtttattttttccaaataggatttcctaaaggctcagaattagcaaatagataggcacagaacagcaatgcttaaataatcagccttcagtatgttggtaatgccaacaggctagctttgttctgactcatgatttgaccatttaatttagtttaatgatatttggacaaacacacaaaatgtacagtagttgaactgatttggaagtggcatttcaattttgaaacagtttgatagtttaatccattgcctggatgaaggttaagaagtgtataatggtaaaatagtacaaataatttaacattaatgtaagaacagatgatacgaagcactctttagtagaggaaaaaaacattcatgttgttccatttagtttcttgttagctgtttaagggtcttagaactttgtgaattaggttaacaaaatcctaggtttgggttaacaccagnatccccacgcaggcgagnnaaccccagcacgtaggtnnnnannnnnnnnntaagaacattataaagccctttgtcggatttggatagcattgtgcgaaatcaattcatgcgttggggggttcaccaccaac

SEQ ID NO: 155135 - DNA, 810 bp, Homo Sapiens
tggcagtcaaatttatttattaaagaaagctacagcaatagtgttcgagcactaaattctcccatccaagtactaaccgggcacgaccctgcttagcttctgaaatcagacaagatcaggcgcattcagggcagtatggccatagacctgagagttaaattctacgaagacaataaatcagagtaaggaagagcgggaggggtgatggctggtcaggaggggtctctcagagctagggccgtttcagtgactctctactcccgagtgttgtacatacgattccctgggaagcagtctaagatgaactcgcatgcaggaagtttactggggtgtgccctggactaacaacaaatggtaaagtaaaggaagcagaaccaggcagagagagaagctgatgcagtcccaacatggcgccctcaacctagacgaaactcggaagctaggatgaccccggagccaccgccatcactgttgaggctgggggccaagacttaccccctccccccagcattaaccaatcattagatccaagtgacccccttggcaagagggtggtgaccttgggcaaggtggttctctgtagctgagacgattccgggagagggcgtacgtccttcagtcctggcccagcagtcaagacacctcacaattctacacaattgtgagccacttccctgggcctcagttttcttaacaagtcggttgatgagatgatcgggaatcctgatgttgaaggaatcttaaaaccgcctcactccctggcaccttccaaccaggggagcctggagctcacgcgtgaagttgcagcag

SEQ ID NO: 155136 - DNA, 650 bp, Homo Sapiens
  misc_feature (71)..(84): n is a, c, g, or t
ttgagggcagctccatgtttattgatcagcagactatgtctttttgtttgaaacttctaaataagattacnnnnnnnnnnnnnntagaagcattgcgtattaactgcattggttaaccaacattggaacccaatactcttgtattaggcccgcatttacctgagtaaactcagtggttttctgtcctaagcatgcttgcctgctacatcccatggagaaaataaacagtgaaacactttcctcatcttcaaggcaaattgtctttaggccatcctccaggcatcatgaaggagggtgagcgagggtgcgaggtggaaaggtccaggccgcggctgtgactcccgcgggtgaaccacagctccacagccccaaatccaaagatgctcttgctgcagcacgacaagtgttcaaaagagaaccaggcccagcccggagaaaggaaagccaaaagccaactgaatgaatgaccctcccccagaagagcaaccctgcccccaggccatccaagtgcggtgagttgagaaatgaattgacagacgctgcagggctggagcaggaggcggaagcaggttggaaggctgttgtgtgccacccctccctgggagctggggagattcccaagtcttagtgcagtgtttctctacaaacgg

SEQ ID NO: 155137 - DNA, 599 bp, Homo Sapiens
  misc_feature (65)..(112): n is a, c, g, or t
gcggccgccgccgccgccgccttctcctcgtacgtggtaagtgagcgggatccgcggcgggcgannnnnnnnnnnnnnnnnnnnnnnnnnnnnnnnnnnnnnnnnnnnnnnncctaggcgccaacaccgacctcccccgccaagcttcgcggccccttcaaacttgggcgattgtctccgccagcttcgcccaggccttggactcaagagttgctcggaaaagagagccgcgtcttgctcggatcgctgagctggcgggaaggggttctgtggggagaggtagctgcaattaaagagcagcatttggtgtaaacgtaagctccgggctgccctgcaaattttatatttttggttttgccattttggaaaagtagttcaaaagaaatagactcgaaatttgagcagaagcgtgctaagtctatgtaaatgtgtttggcctagcctttaattagtcctccaaaatgttgcaaatccgtaatcctatcttcgcaatccgatttgggagtattaaatttctgaaaagtcggtcgagctgcggtgcatccgggatttttcggccgggttgtaacttcggtctggggtagtatttttggaggggg

SEQ ID NO: 155138 - DNA, 808 bp, Homo Sapiens
tgaacttaaattttaatagtttccaattttatcaccatcaaggaagacttcccctctaagacagggaagttaggagtccagtaaaagaaaggctttacatccttgagaaaagcaggtaggtggggaatgttggggtgaggggaaatagcctctatataagcccaaggagaaaacaagtgccaagaggtatcttgccatcagcattctcaacgtagcacttccctgttagcaggaacccctgcctcaggtcctgagatatcaagtgcttggttttgcattgtctcttcccagatggcttctcactgttattggtgtatttctgcagcttgagtgagtcggcttttggctgcttgcattgttggataaaaccttattctttcggtggagggcctatataaacctgtttttgcttgttttttaggaaaagagtcctctggcaacttctctgcagtagtctctgtctggttgctgtcacttgagactttgtgtttcctttccagttggaggatggggctgtgcatcacatccatagctacctggtcggcagctggctcacctacaggctgcctttccattaaatacttctctacaggaagatcttcatcctttagggctttaaaggaattgtgctgtttgtttccaggactatgcttgcatctctcacagttattctggctggcaatatcctcctccagaagacattttggctttttgtcctgatttcctttccacctctctgagtcagctgtgctgaatttgtatggcttggcgtccttggtttttggtcctcgtagagtaggaggattcc

SEQ ID NO: 155139 - DNA, 521 bp, Homo Sapiens
atgggcatgagccactgcgcccagtctctttggcagccacttcttggtggctgtccttgagttgggtgaccataaggtccaatcagtggatgctagtgggccccggggcgggattatgtgcttccccccacggctgtaaaacgcaaaacaaaaccaactagcaaaaccctcaaggtgggctctgcgggcactttgaggcttggagcctccaaaagactcagtggttctgtcctgagactctgttcttggtagattttctgctttctctgttttgattttgtttctgtttttgtgtgtgtgtatggtggtgggggtgagttacagagtctggttgtcccaggagaggcacatgggggcctgttttttctgaggagtccttttctctgggtgccagttatcctagagcgatgtggtcaaagggatgtcatctgggcctgtgttcccctgggatttagatggagacgctgttctcgatgaggggagggtctaggtaggtgtagggcagcaccaggccccggttc

SEQ ID NO: 155140 - DNA, 720 bp, Homo Sapiens
ctcattctcattcttttattcattatttaaaatcaaataacattaataacatacttcaaaaagtttacacttatcctacttccattggctgttatcctgaaaaaaaatgccaagagatgatgataataaaacatgtctattcttccatggaatgtataaattgaaaccaagtatgtggaacccacatttaataggagtaattcaacacaataaccatcaattagtagtcactgaatgtcacatagataagacaatgttttaggcactattttttaaaagacaaaaaatttacccagaaataataatgaggtacactaattttttataccttaaaattttgttttcatttattttctaccatgattatgtgcagtaagtgaactagattgtgtaatgattgatatagattgtcacagctcatcactcatgtgtctacttgcatcagtcattagcagtatagaaacaccaggtcatgcagcagttcattaaggttcagatcagtttgttattttaagatcaagtgaagatcagtagctcagaaagatttggtgaaaacattcagttaagaaagattctgaagcagagatgtctatttatcagctgtgaaatttccaagagttagcttctggttgggattgtatcctaccatttaaaatacatagaatctaagattaaagcctttataggtctgggcgtggtgactcatgcctgtcatcccag

SEQ ID NO: 155141 - DNA, 585 bp, Homo Sapiens
tttttacctttttcgtctacaagccacacttatccaaaattctgttgacaactcacacttgctattatacctgcttctattctcctagttagtccctgtgggtttatacctttttattctttcattgttattttaatgaggtttctgtaggaagcagagttaaatgcctatgtttactccatcatggttatctgtaagtctgaggtgaatttcaaaatactcacgacatgatcaaacaagaagggtactcctaaagaaaaaggaaccggttggagaaaaagtacaggggaatgaaagagcatggtataaataagtaacaggaagtatttgcagtagaagaacctcagtgaagtggcctgagcactagggcaaaacaagccagagtgtgaatccaggctctgctatttagtcgtcatatgacccaggatatgtttcttcccttctctgggtttctgtttcaccacacttacctccctggtggctgaagcccaaatgacataattaaagctctaaagtattctgaaacatagcaatgattactgtaatcataaatatttctgcaaaagaattattttttaaaaaaat

SEQ ID NO: 155142 - DNA, 206 bp, Homo Sapiens
tttattgtaattttttttgtaagaatatgttctatccaccgttgctgaattctccagtgtggtacccacagatacagagggccaactgtcctaacttgcagatttatgagctgaataaatgactgttgttttgagcctgcagtgatttgttacacagtaagcgctaacaacaacaaaggcttactatgtgacaagcactactctaa

SEQ ID NO: 155143 - DNA, 645 bp, Homo Sapiens
cgcagttgcaaaatcttatttttaataattttgttagcagggaaaggagtccaccgaggcgaaggcacctgaaattttcccagtgcccgggaaattttaacagaagcctgttaaccccagctgagcttcttggagtaggcgctagctctgggccacagcagaggacgcctccgggctctcttgtttgaattcctccaccaatgtccggttcttctactctttacaagctgggctccgaaggaaaaaagaagaaacaaagaacgcacgctccttggcaccaacttcactttctcaggcttctgcaggtcccaggcctcccgatgtctccccctccgccctgagcatttccagaccttggagagcctgacttgggaaggggaaactggaatcaatcggttgaccgacccccttttcccaaccgccgcctccccaccaatcactccatgtccggaagggggctgggggctcccgactataggagactctgggagtcctatgaggcctttgagacaggggcgcgagcgaggctggaaggaaaggctgggcagagagcggaggggctcgcgcgcatctctcccggcgcggcagaaggttggcactgctgcccccctgcgggtcccagagccgctgggcgcccgcggccgc

SEQ ID NO: 155144 - DNA, 631 bp, Homo Sapiens
ccccaccgctgctcggcttctccggggccctcgcctacccgctggccgccttcccggccgccgcctccgtgccctttctgcgggcgcagatgcctggcctggtgtgagccccgcctgccgggccctctccccacgaccctgtggacctgtgtggacgcgcgattcagcggcaggcgcagggctcagggggcgttagggaagggatggtcgctcctgcggcctcctagatacctcgggagcgcaggccgcggccgggcgggcctcagctcctgtggggagcgcctctagaatgtaatgggacgccccacccatttgccaggctggatccccactcgaacagggggccatgcatagactctgggctgcgcagcccccggcgccacggccaccccccggcctcagcgaggagcggtcggccatggccacccggggcagctgccctcaggccaagcccagcgcaacaaaggaaaactacgaaccggctgtccaaggctgagcggtgactgtccccacagactgcccccaacactaaacgtccctttcctgggacccagacagcaggccggcccggagggctgtgctacccctctcgcgggtgctggtggagaaaggaccctggacctgtgggtcc

SEQ ID NO: 155145 - DNA, 556 bp, Homo Sapiens
gtcagcgccgggccccgctgtcgccgctcgtggggctttcgggctccgggagccccgctgtcccgggccggaggcacccctcttggaccgcggggcagggtctgtgcacgccggctccgctgggttcgcccctttggcttccgcctcacaacccgggggctgcgggtccgggacccgcggggaaagtaaggaccggatccttcccaagtcctctttcgtgccccagcattgctcccggctctgggcgagggagggaggcaggcgacgcggtcgtccttcctaaatctgaaccccacagcgcggtctcgtacatgccccgctcttggggcggtggggaagccgcgggggacacgtgcaggctcccttcacgcctctccaggcgactcgcttagttctgcctcggcgggcgagctcacctcccagaccctaagaattacccatggaggggaacggcagttggggatttgcttactttgagagcgtttggcataacgagcatccagagttccccaaagcagtggataccggtggtttcccagaagtagtttggggtcgg

SEQ ID NO: 155146 - DNA, 665 bp, Homo Sapiens
atgatgaatcgtggagtttatttgaacacgaagttggaggatagtcacataggaaacacagactctcaaaatggaaagttaaagtctcatttacatagtcagaggcagaggtttaacaggttgcagcattttccaacaagatcaagacataggttatagcgatttgacttgattggtcacagctcgctacactaaggaagcttgttttaacatcccataaggaagggtaatggtcttgaggcggtctcacctctggtaccattcagtctttcctaatcattacaggacaagaatgaggaagagatttgacccagaataaagaagcagaaggtgcagcttcacaccatgcgacgcaggccccacagccacgttcctctcaaggctcaaaatcaggtacggttccaacagctttcagtttggattaatttcacatctccccttttcaacatcaacatgatccttttgaagaaagcttagtagctgaatgcagatggtttgggaatctctgtatgtttaggggcttagccccagatacttaggaaggttcactcctaggacgttgtctcccatgtctagggccatgtgccaagctgtacagaactgacggggcataggccgaacctggagccacatgaaggaagtgacgtggtgaccttggtcaggct

SEQ ID NO: 155147 - DNA, 960 bp, Homo Sapiens
tttttgagaggatctgcaatttatttaaaacagcacagccagcaggtggcagggtctagacatgaattcaggttttcatcccattaagaattcctaatggtactctcctatatactggtgaggtataatttctcaactagcctcactgttcctaatgaaatgtcacgctccagctatcacgtattaactgagactatgctaggctctgagggatgcaaagactgagtccccatcctcacagagcttgtggctgagttgggaaggcagacattaaacatttctgttcacacaagaaatacttgttttcaacatataagggagagctcatctagttgtgaaaattaggggagtcttccagaaggaagtaatcattaagatgcagtctgaaggatgagtcagagttagctttggaaagcggggatgaaagaaaatcacatgtacagagggaaaagcatgtatgtgcaagggcctgtggcagaaagacccaatgtgctgaaattttgaaggccagcttgactggaatatagacaatgaaagggagccttgcacaggatgtggcccagaccacacaagactttgtagccatgataatgatttttacttttagcttaagagcaaagggaagccacaagtcaagagaatgacatgatgaactttgattttgattctgacttctgcgtgcagaatgaattgtagaggagcaagagtggaagcaggaacagctggaaggcttttgcagttgtccaggtgggaattgatggcagcttagaccagctttgtggtggtgaaaatgaagagaagaaccccacaggtaccccctgctctgctcaagcccatttccttactagatcctgacaccagagtgtgctcacgaatttgcagtgaatggaagcttgtccacacttcagggctctgctggagtctcctcttccaggaagccgtctccagacaatgccagtc

SEQ ID NO: 155148 - DNA, 484 bp, Homo Sapiens
  misc_feature (464)..(464): n is a, c, g, or t
tcccaagacttccaggatttattatgtatcattgtacacactcactgattcagcttcaatactggggaagtaaggattcctatagtaacaatagtccctcaagtagaggccatgctcacctgaggttgggattggggtcattggggttggcactggacaataattccctctctcccccaccctcaccccattaaagagacatgtagagggacagagtcaagttcacagatgagacgggccacctagtggacccgaaataagtggagccagtggctctctcttcccttgtatgagacgatctgagggcctctggacactgcgggtggttatttatgtttgggtggccactgcacctcctgcttctgctgctggtgctctacaggaagcaatacttctccctttgtgggcagggctggttgaatgtcttggacctggcctggagctggggcaaacacaggctgctnccagctgccccttctgctgc

SEQ ID NO: 155149 - DNA, 558 bp, Homo Sapiens
ctgggcaaaaacattatttttaataagacagataatgtatgcaaaatgccgtcttagtccattttctgccgctataacagaataccacagactgggtaatttataaggaaaagacatgtatttctcagttctggaggccggaagtccaatagcaaggtgccagcatctggtgaggggcttcttgctgtgttatcccatggtgaaaggaggaagcacaagctaacatgagagacagacagcaagagaaaagggggtccactactgcgataagggtattaatccattcacgagggcagagttctcatgacctgatcatctcttaaagttctcaccttgcaacactgttgcaatggcaattaaattttagcatgagctttggaggggacattcaaaccacagcaaatgcttatctcaggcgtggtgcttagcaggcacacaatatactcgtagtgatgattatctgttcacgcaagcttgtgttggaataattaaggtatttgacttctccatcctccagaggaggttcatagtgacatacatggtaacaaatatgtatca

SEQ ID NO: 155150 - DNA, 504 bp, Homo Sapiens
aatctacttttcaataagacttgtgacagaatcctttaaataaaaagccaaataaatatgattttaagtgattcctgtcccccaaaagttgcacacacaagttttcaatgtcatataaaacggacaaactagaccaataagtgtggtctagttggcctggctgccttgactacatatttgctgatgtgacagctcggtgatcactttctcttgaacaagactctgagccatgttgttcaaccttaatgtgggaatcagtatcacatgagtagtgaactgaagaattaggtgtctggattacagtttatcttaacagtttccagaaaacctgtctttcagccgtcttgggaaatttgggttgaatttccttatttccttccatggtcaaaaatatgttaatttcgatctatcacactagatcactttggttagatgactgtgaccactaagaacaaaacaaaacagaaaactggagcaaacagatgaatagccctttagaaaaac

SEQ ID NO: 155151 - DNA, 487 bp, Homo Sapiens
ctcatctcccctgtcaccaggatccagccagatctcaatccttgcccatcctaactgaacctccctcagatccgtccactgcccccttccccaggaccacactccaccatctcttgcctggaccctgcgagaacttcctgcctccctgcctctatcctaccccctgccccccgctgaagctgatgatagttccggaatgcaaaaccccttaatgattcccccattgatcaaagtcttccacatgctttcaaggtccttggtgatccaggaccctgccgccttctgcagtctccctactgatgccatagttttggcttctggcctcatatgtcccgggtcatttctctggtcactggctcctcttacccctgactcagctggctcactgctttcccattggatctcaaccctgtgtacctggggagagtggaactctgtatgtcttgtcttgtgctagtagtcactcagtgtgtatgtgtggatattc

SEQ ID NO: 155152 - DNA, 472 bp, Homo Sapiens
tctccagcgtctcttaaataagctcttcctttccattttcatctttccattgtatagcacccacccatttacttatacaaatataaaatagatttatatagatttatataatatagacctttgtgaggcagagtgcaggggggccgggagcaggccctccgggctatttacagatgtactggtccacgatctccgtgcacttcttacacctgacgaagcagcaccagtggaacttgcagtggcagcgctccacctgcacgctcttgaactggttgtagccacgcccgcagcacatgagctcacagccatccatgccctccgaggtcttgttgcagaggcggccctgcgtgcccagggagcccgtgctctcgttgcgcaggcagtagtcggggctggggtccacatagaccaggtcctccggggtgggctgggtgaagcggctgttgaccagctccagccggcccttgcgggt

SEQ ID NO: 155153 - DNA, 460 bp, Homo Sapiens
gcggccgcggcccctgccggcggcaatcctgagcagcgactggactacgagcgggctgcggcgctgggcgggcccgaggacgagcctggggcggccgaagcccacttcctcccccggcaccgtaagctcaaggagccggggcccccgctggcctcctcccagggcgggagccccgcgccttccccggccggctgcggcggcaagggccggggcttgttactcccggccggggcggcccccgggcagcaggaagagagctggggcggttcggtgcccttgccctgtccgcccccggccaccaagcaagccggcattgggggggagcctgccgcagccggagccggctgcagcccccggcccaagtatcaggcggtgctgcccattcagacgggctctctcgtggcggcggccaaagagcctacgccctgggctggggacaagggtggggcggcctcccccg

SEQ ID NO: 155154 - DNA, 324 bp, Homo Sapiens
  misc_feature (130)..(143): n is a, c, g, or t
aacgttttcaaataatttattaggaatttaaaactgaaaataaaacctggaaaaagaagttacagatgtggagagaagagacaccggaggatggtaacttgctggcttcgaaacaccatgtaacatcttnnnnnnnnnnnnnntcccaaagcaaatcagaaaacggaattccagggtcctgagcccatggttgggcccagtggggtggaagggtccgggaatgagggagagggaagctaagtgtctcaggactcagctcaaacgtgtagaaaattaaaaataaaaaccaataaaatgcagcttctcttttattaggaaacatta

SEQ ID NO: 155155 - DNA, 986 bp, Homo Sapiens
  misc_feature (222)..(253): n is a, c, g, or t
gcggccgccgccgccggggggcagctgctgggggacggcgggagccccggccgcacggagcagccgccgccgtcgccgcagtcctcctcgggcttcctgtaccggcggctcaagacgcaggagaagcgggagatgcagaaggagatcttgtcggtgctggggctcccgcaccggccccggcccctgcacggcctccaacagccgcagcccccggcgctccgnnnnnnnnnnnnnnnnnnnnnnnnnnnnnnnntgcctcgcggagagccccctcccgggcgactgaagtccgcgcccctcttcatgctggatctgtacaacgccctgtccgccgacaacgacgaggacggggcgtcggagggggagaggcagcagtcctggccccacgaagcagccagctcgtcccagcgtcggcagccgcccccgggcgccgcgcacccgctcaaccgcaagagccttctggcccccggatctggcagcggcggcgcgtccccactgaccagcgcgcaggacagcgccttcctcaacgacgcggacatggtcatgagctttgtgaacctggtggagtacgacaaggagttctcccctcgtcagcgacaccacaaagagttcaagttcaacttatcccagattcctgagggtgaggtggtgactgctgcagaattccgcatctacaaggactgtgttatggggagttttaaaaaccaaacttttcttatcagcatttatcaagtcttacaggagcatcagcacagagactctgacctgtttttgttggacacccgtgtagtatgggcctcagaagaaggctggctggaatttgacatcacggccactagcaatctgtgggttgtgactccacagcataacatggggcttcagctgagcgtggtgacaagggatggagtccacgtccacccccgagccgcaggcctggtgggcagagacggcccttacgacaagcagcccttcatggtggctttctt

SEQ ID NO: 155156 - DNA, 608 bp, Homo Sapiens
ttttttggggtattttttaatagtacatctccgtgaacatattatatcacttctgggactacatatttttgagagcagaggccatatcttacatacagtagataccaaataaattttaacaccgaacatttacatagaactatgttctagcaattttttaaagcagatgaggaaactgaagactagggaggttcaggttacacagatggtttgtggtagagcccagatctgaaccttgcctgttgggccccaagggacccaaagttcaggctctatcccagaccgctctgttaggttgcatggagaatgcgatgcattgtgcaaagattaactgtgattgtgtctactacaggagaaataaggagcagcttagcttgctaaaaagtgaacacatttaattggtttaaacttgcattcattatgcaaactttgcttgaaatatttcatttgacaattctagtaaattaatacctattcttagtctagatagtgcataacaaattactgacgacaaatcctaagtgcgttaaagtaaaattttaagaccaaaagcacatgaatgcactcagttatgataatgtgagatgatacagtattttctttttgct

SEQ ID NO: 155157 - DNA, 689 bp, Homo Sapiens
ccaggatcacggacgactccagacaaagcccccaagaagacctggggccaggatgcaggcagtggcaagggggggcaagggccacctaccaggaagccaccacgtcggacatcttctcacttgccgtccagccctgcagccggggactgtcccatcctagccacccctgaaagccccccgccactggcccctgagaccccggacgaggcagcctcagtagctgctgactcagatgtccaagtgcctggccttgcagcaagccctaagcctttgggccggctccggccaccccgcgagagcaaggtaacccggagattgccgggtgccaggcctgatgctgggatgggaccaccttcagctgtggctgagaggcccaaggtcagcctgcattttgacactgagactgatggctacttctctgatggggagatgagcgactcagatgtagaggccgaggacggtggggtgcagcggggtccccgggaggcaggggcagaggaggtggtccgcatgggcgtactggcctcctaactcacccccttccctgtcccaggccctgccctggtccccccacaaggcctcagcccagtcacaactgccatttccagtctctgctgagtgtcccagaccctcgaggctgccactccgtcgtggttttatttttaatatagagagtgttttgaattcta

SEQ ID NO: 155158 - DNA, 433 bp, Homo Sapiens
cgatgtgaatgtgatcattctctgagtctcagttttccatccatgaatccttgtgatttttaatttttcatgtaggactgtcacgagaagtaagatttttaaatttccagaacagaaataggtaagggaaacatctaagtgtgactcctccaaaatcactcttgcttccaattttgtctgctgttatggaggtcagcaactagtataaaatcctgaggtcagcccttccctcaaatcttcaaaacacagttcgctgatgatgctgcttcttaaaccttcatcatctcagggcgcctggctggggccaggaaggcgttcgcgtcagacaaccccagcggggaagcccccctctcccgcgggccaaaccgcagcttcttgcagccactcgccccggccggtttcgggaggagggcggcgctccgaaggcggccgc

SEQ ID NO: 155159 - DNA, 446 bp, Homo Sapiens
  misc_feature (248)..(258): n is a, c, g, or t
ttttaaatcaattactatgagccatccactattctctgcattaagggtaaactggtaatgaaaagagaagaaagaaacacttttttcaaagagcttatatattattgtagtagatagatactaaacaatacatgtgataaataaaaaaagtccattgaagtgacaagagctccagataagtaaacacaatagagcaaagtaaggcagattggaagtctttttctttcttgaaaatgggcaaagaaaannnnnnnnnnnaaatactagtacatctttaaatagccatcacgcttggctatttaaccattgcctgacatagctaagatgcatgctgaaaacaaggaaatggcctttggccttgtgttttgggacctgatgctcacaagttctataccaagtccctgtgctgaaaacaaagtggggtcgggtttgtgttttgggacctg

SEQ ID NO: 155160 - DNA, 517 bp, Homo Sapiens
gcggccgcagctgcgcctgtggtccctctggtgggtcttcaactcggccggctactacctggtggtctactacgtgcacatcctgtggaacgaggtggaccccaccaccaacagtgcgcgggtctacaacggcgcggcagatgctgcctccacgctgctgggcgccatcacgtccttcgccgcgggcttcgtgaagatccgctgggcgcgctggtccaagctgctcatcgcgggcgtcacggccacgcaggcggggctggtcttccttctggcgcacacgcgccacccgagcagcatctggctgtgctatgcggccttcgtgctgttccgcggctcctaccagttcctcgtgcccatcgccacctttcagattgcatcttctctgtctaaagagctctgtgccctggtcttcggggtcaacacgttctttgccaccatcgtcaagaccatcatcactttcattgtctcggacgtgcggggcctgggcctcccggtccgcaagcagaatgaagaactg

SEQ ID NO: 155161 - DNA, 576 bp, Homo Sapiens
ttttatatcatttttagctttattattatataaatacacaaagtttatttaactttaagattacacattacaattaggacaaaaatgatttaacttaacacaagaattatttttgtttacaaggtcttaatgctaagaaggttctattacacacaatgaggtatattggcaacatataaagactggatgatatcatcccaagagggaataaagcaaaacagaaacagagatcagctctgtgctagtcatgccatcgtgggtaacgcgcatgagctctgaagcatcttcatacccacccctagaagaaagctcagtgtttggtctttgagtcttaaagtcactcatgcagatgccttgtggcctacacagcaccagcttgagaggacagccttataccacccagctctcctgcttctgaggccacatcctgttcttcagttgctatgaagtaattgcttcttcttcattataaaatgagatgataacagcagccttgctcctgtctcagcaccagcgtgaaaatgacactaagaaaatgtagacgaaaacacattgggaaccagaaactttaagaca

SEQ ID NO: 155162 - DNA, 558 bp, Homo Sapiens
actcattttttcaatcaacatttattgatcacttattatgtaccaggcactgggataaagatgactgttagtcactcacagtaaggaagaaaactagcaaataagacgattacaatatgatgtagaaaatgctaagccagagatatagaaaggtcctattgggtccttctgtcaccttgtctttccacatccctacccttcacaggccttccctccagcttcctgcccccgctccccactgcagatcccctggatttttgcctagagctaaacgaggagatgggccccctggccctggcatgacttgaacccaaccacagactggaaaggagcctttcgagagtggatcactttgataagaaaacacataggaatgaagagaagtccacaaatggccacccgtgctggtgctcaagaaaagtttgcagaatggataaatgaaggatcaaggaattaatagatgaataattgaatggtggctcaatagatgacttcatgaatgagtcagaaaataaacttccaatcttgaggcaaaactgaattttagcatttccaatg

SEQ ID NO: 155163 - DNA, 470 bp, Homo Sapiens
cgctgatccggccactggacaagagcagctgtggccccgtgctcagtcacctggacgccacggtcggtagggggcccagtgtcggccaccttggcagaagcagaggcagcggagggtggggtgagagcatcaggatccccgtcccgcggggggtcacagctggtgctgttggctagctgaggaggtggtgggggacccacagtcagctccacagcagctgtggcctcgccagctgcattggccgcaatgcaggtgaagatgccaccatcacccggctcggtgaccagcagctccagcgtcccattggggaaggcgcgggcacggcttgagttgcctagcagccggccctggggtgacacccaacgcacacggggctctgggtcccccactgcccggcagcgcagggcagccggccgacctgcgggcacagccagaggtggtgagcggtgagtcaccacgggcggctcgaa

SEQ ID NO: 155164 - DNA, 740 bp, Homo Sapiens
  misc_feature (150)..(150): n is a, c, g, or t
ccagcattttctagacatgtcattccgcagcttgggcggctcacgggcattcgtcagctcatcctctaggtaagtcatcacgccattctgcagtcgagcacacaaggtccgtcgaagccatcgagcaggtcctgcagctgcaggtagctntcgccgtcgcgctccaccacgccgtggaaggcaggcacgcagccgcgcagcgcgtcagccatcagccgcgccaggcagtagcgctccggctccgagcagcgcttcaggatcagcccgctggtgcccgccgccttaaaactcccagtgtgccctgccagctgcacccaggcgtagcgcttcttgaaagggcttatgaccggcagattgaccatggtccggatcttctgccagtggtttttctgacccacgtcctcgcccgcttccagctgcacgttgccgcggctccggctctcactgtcgctcagcaggtcgtcctccgagtcctcgagcagcgacgaggagccagtggaggagaccgacgaggtggaaaggcggcgcggctgctgcaggtgcgaagagcccgctgccgggaggcagtccctctcccgctccggcggcccagggctggtcgggggcacgtcgggctcctcggctgtcacggtcagctgagggatcaccggggccgggggagcccgcggaagcccgttggggacctgtcccccacgccgcttggccccgcgggcccggggctcccccgcggcggcggccgc

SEQ ID NO: 155165 - DNA, 540 bp, Homo Sapiens
  misc_feature (43)..(43): n is a, c, g, or t
  misc_feature (74)..(74): n is a, c, g, or t
  misc_feature (87)..(87): n is a, c, g, or t
gactcctctccagacgtgggatcccatgttatacttggagtgnatctggtcgctcgctccccgtccccgattcncactttgcttgcnttctctcccatccattctaccccacacgcattttccagaaatctccccaactcgacgcccactcagggtactgaaccccaataacgccacccttttactaagaggagcctccgtcgtcccaaccccttgctccgagcgggaagcttggtgcagcgcaccaaggtccggtagaggggggcggcgccccctgcgccgtgggccagcaggccgcggacgcgcagacagcaagtagaccccaagggctggagccgcaacgcaagttccccctgactgggggacgccgcccagctcctggagcctgcgaaggctcttgaagctgagcttcccagggataccagaagggacactctcgtgcaattccggctagggaaagcgagggaaggtggcggctccgggcagggagcgagcgagtgctccacgccgcccgcaggatcgagtgagtcacgcggccgc

SEQ ID NO: 155166 - DNA, 729 bp, Homo Sapiens
cctcccaaagtgctgggattttaggtgtgagtcaaaagtgaccttttcatcatccttaatccaggtcactttctcttgacaaacttgctgctggacgagctgaaagcctcaaccccttcgcggatcatcaacctctcgtccctggcccatgttgctgggcacatagactttgacgacttgaactggccgacgaggaagtttaacaccaaagccgcctactgccagagcaagctcgccatcgtcctcttcaccaaggagttgagccggcggctgcaaggctctggtgtgactgtcaacgccctgcaccccggcgtggccaggacagagctgggcagacacacgggcatccatggctccaccttctccagcaccacactcgggcccatcttctggctgctggtcaagagccccgagctggccgcccagcccagcacatacctggccgtgccggaggaactggcggatgtttccggaaagtacttcgatggactcaaacagaaggccccggcccccgaggctgaggatgaggaggtggcccggaggctttgggctgaaagtgcccgcctggtgggcttagaggctccctctgtgagggagcagcccctccccagataacctctggagcagatttgaaagccaggatggcgcctccagaccgaggacagctgtccgccatgcccgcagcatcctggcactacctgagccgggagacccaggactggcggccgc

SEQ ID NO: 155167 - DNA, 551 bp, Homo Sapiens
aactggaaaggccaacatgtcaaaaagttactcctccacctccgtgggtcaaaacgcaacaggttccgaagtgcaaagcaaacgccaactgctgccgcacacaaccgcctgctttcgagttggctgccgaagtgcgggtctgaaatgatcctgcgaattcacaggcctgctcgcccgcgcccttgcgcgcttggccactcctgccccgcctggcctctctgcctctacctggcacctatacattctatgtacatacaaaccgggcccccggtcgcgggagggcgcacggggaggccgcagcgctcgtacctatacatatgtacacgtgtgcacaccggtcctcgcgaggcggccccgcggggtcatagcgcggcagcgtaggccgcggggtaggggtccagctggggcttgcccatgcccggcagcaggatgtaggcgagcggcggctgcagcccggggctgggccacgcgctgcagttgcacgggatcatgtagcccgggttgcccgggctggggtgcgagtgcgtgtgccccccggcggcggcggccgc

SEQ ID NO: 155168 - DNA, 549 bp, Homo Sapiens
ggccattctcctcctgatgttgttcgctttattatttcatttattgtgttttttcgggaatccggatctacacgggacaccaaaactggttgcacagcccgtaacagtctgccaatcagagggacttgtgcattctcatttcgagatactatagaaggtaacccagctacaacacaggcaattccatcaaagaatgttgaatgaggggcagcaacaaaaactggtgcttccaaaggacttgcaatctttccttttacagcaactataaatcccattgaaaagaacatagcacgacccagaaatttcaaagctgtttgagtaattttcctcctccaaccagttattgggtgggtcagcttttcaggacagcatactgttgaaattgcagcaaatggccatgcaagtaataaaattaacgcaaccaataagacacgaattggaagcaagataatcccaagaaggacaatctggacccgcctcgcggagccgatctgcgtctgctgcacgaaggggttcggcaccgaaagcgggaagaaggacgcctgacgg

SEQ ID NO: 155169 - DNA, 886 bp, Homo Sapiens
  misc_feature (638)..(834): n is a, c, g, or t
ttaaagtttgacatgatgaaatatgaaagatcatggaattagtctgagctgtattattatattaaactattaatctgagagttttataatttataactaattatcactgacatttatgactgtcacacccaggtaccatggagttatatctaattcattcttggatgtgaacattacctttctttaaaattcctaagaggaaaagacaaaatgcttcccaagaaataaaaccaatgggaaaggcaacaagtaacataaaggcatttgtcttcattaaccaaaattgagaatacagtgtgtgaactaaacttccaagacttttaatctagctaatgctagaattgtaatgtgcaatatcatcaaatgcttctttttgggtagcaatctttaaatctggaagaaaaaccttgccttattttttatattcttttttcataatttctgaaaaatttaaccctttattttgtgagttactggtttttgtttttccttctgatcttaaatgctctgtgtgtatgaagggtattatgttgtcaagtaagtcacatatatatttttagttgtaggtagcttttttatataaactataaaagttcccaatatatattaaaggtcattaaattccaaatgagatttannnnnnnnnnnnnnnnnnnnnnnnnnnnnnnnnnnnnnnnnnnnnnnnnnnnnnnnnnnnnnnnnnnnnnnnnnnnnnnnnnnnnnnnnnnnnnnnnnnnnnnnnnnnnnnnnnnnnnnnnnnnnnnnnnnnnnnnnnnnnnnnnnnnnnnnnnnnnnnnnnnnnnnnnnnnnnnnnnnnnnnnnnnnnnnnnnnnnatacctgaaaatggaattacttatagaatatacagatattcagatttactag

SEQ ID NO: 155170 - DNA, 549 bp, Homo Sapiens
agaacaagagactatacagccccacaacgtgtgtcttcaagacacagtgtacctgagtgtgatgtgagaggtgtgtcttcacctgtgtgtatgggaagacagtgggtcaggggccaggaggaaggacaacacactggaagcccaaggagggagaagacagttccccgtttcccacgtgacacgcagggtcctctaagttccaaactattccaacttctcacgtgcgctgaccacagacggtagacagagtcaggcaggctgtgtgcccggccaaggagaagattatgacccgatggaaggtcgcagcccgatgtgggagataatgttctgaccacatttattttttcaaactggctgagtaacaacccctgaagctaggaaaactactgcctcgtcgaaggcctcttacgttcttcttccctgaggtgggtacagccccctgacttctcctttcctgaaccctgtcctgcacaggtgctggcctggacgccaggtcagagggctggtacatgccctgccccctgcgctgtaaacttaactcctcgagag

SEQ ID NO: 155171 - DNA, 511 bp, Homo Sapiens
  misc_feature (446)..(458): n is a, c, g, or t
gctcctcttctcggaggaaaacagcacgcaccgcgccaggccaaggtccacggggatttgatttagcatttgggtacctggccgctaatggaactgaagacagctgggcctaacaagtgcccaggtgactcaggtaagcgaggaaaccagatcgaggttctcttgcgtgggacaggttaaactctgaccaaaccacagctgagccgggacgccttcctgtctaaagtccaaagtccggacgtggttggcagggcgcaccggcgcgtgccccgcaggccatttttctgactggaatgacggcggcggctggcttctcggggctgccggggtctcccggggtacgccgccgtcaggacttctgcagggcgcagacagcaggctccagcgaggctgcggaaggaaagccttgggtgtcggggctgggcctggcgtcggcccctgggtcnnnnnnnnnnnnnttgcgccgagacgcctctaggagaagtctcgccgccgccgccaccgcggccgc

SEQ ID NO: 155172 - DNA, 420 bp, Homo Sapiens
cctacagtttatggaaacttttttattggtaacagaaccctactaactcatcagagccccactattttctcccgtgtactttccttctcctggcagcctgtcccccttccctgggaccccctcccaactcattcccgtgaactttctgacttgctgcctctctcccttctgggaaaaagtgtcagctgctgcactaataatccagcacatgctacgactgtccctgagacagctgtctactgcccctaggcacttgggcaggggatctccttggagccggaaagttaataactggtcttgaagatacaaacaatgtcatggtctatgactttgtgacacgatgcaaaggaaagcgtttgggctttgagtcaggcagacccagattcatacctcagctcttctaatatgtgtgtgactttg

SEQ ID NO: 155173 - DNA, 471 bp, Homo Sapiens
ttttttttgtgtctgcattgagtttatttatttatttattacttgtttgtttggatgctctttccagcagactcatgtcaggaggctaggaagggattccttggggaccactggatgctggtagttaaatgccaggaggctgaatggacctgaagatggaggagactctgcagtcttggtcagccacccttgggtgcttgcctccctgcactctagcaggattgatggtctctggatttgtagctgtgaccggtcatggtggaatgctcggtggtttgcactggagaggcccacatggtggcgactgaggccctgtgggttgaggttggctcatgatagctctgaaagttgatggcacaattgagacaaggacgtggggagttctgggaactttcccaggggtccttgcagcccgagatgaagccctccaacattgcagctcactgctgtgaaggctgaaaggggagacag

SEQ ID NO: 155174 - DNA, 665 bp, Homo Sapiens
tccatcggcgctgtctgagcaccgaccccggttaaagcaaggccagtccgcacaggtcatggcactcaattcacagattttgcagtagaagccgggtgggcaggtacaggagtagctgttctcgagatccgtgcagctccctccgttcttacaagggctggggtcacactcgtcaatccccagctcgcaggtggcacctgtgtacccaggccggcaagagcaagtgtagctcccttggcccgtgttggtgcaggtggctccattcttgcagggcttatggtgtgtgcagtagttcaggtcctggttgcagaaaaggcccccccagccttcctggcagttgcactgccagggctgctggcaggtgccatggagacagcctggatagcggatacactcgtcacagtaccggccctgccagcccactctgcacttgcattcccctggtttgtcacaaaatccatgctgctcatcacatccaggcaggcagatcggctctgtgcagtagggccctttccagccagggttgcacactttctccccacgctccccacaggtgaagtggccgaaggcatcgtcccggggacggcagaaaacggagcagccctctccgtagtagtgttcgtcacacacgaagcggtaggagtacttgaggtccgtgcggccgc

SEQ ID NO: 155175 - DNA, 273 bp, Homo Sapiens
ttatagtgaaaacattatattataacatgcttttccaaacaaaatattaaaattaataatttttaacatattctttaaattctacatgcatacttttgaatatctaaactacatgttaaacagctgaatacattctactcacacttcagatctttaaacaccaacaatctatgaatattaatctattactacaggacaaatttggatatacgtcttggataaattttaagctcactttaagagcaccaatcattaacaatcatttttgtattt

SEQ ID NO: 155176 - DNA, 437 bp, Homo Sapiens
gccaccgcacctggccttttcctctcatttttgagtggtcagtgggttgtgtgcttctggactgtttatgtatctgtgagactatgggttgatctgattctgggcatcaaactcaataatccgctctttccctcgcctcaccccccaggtgagtctcccaggtgacgtataagggccactgacaagatgaccaagtcccgcccagaactcaccttaggtgtctgtgattccttagcaacaccatcatgagcctggaggaaggggagctcgccctttgtctcctacccggatcgtccccgcctccaggaaaggcatacgcccaggcgcagctgcgggcactcaccgaggatgcggatctgcgtgatggtcccgtgcaggccgaagagcatccaaagcggctgcgaggcgtccacgcacagctgcatgccggcggccgc

SEQ ID NO: 155177 - DNA, 675 bp, Homo Sapiens
  misc_feature (608)..(622): n is a, c, g, or t
gtctttgatgatttgtataatttagattttgaaatgggctctctgattactcagccaacaaatatttatagggtaccttttatatggcaaggcaccaggcacagtgctaagaggaacataagaaaaacgaacatggtctgtgccttagggagcttatatagacaaaagcaaacaaataatcattaacctttatttttgtaggtgacaaatgagcaatgcataatatgcaaaatctgggttaagggagagaatcaagatattcagaaaaaaaatctcattacctgctcctcatgcctcaaaaaaaatccagaagattttgaaatgcaggagataaacatcacatattccttattaatctttgtattccaaaaataatttctgaaaatcacaggaaagaaaacttttgtgtatttattagcagaggcaagctatactatcaattggacacctcaagggcacaaaattgcctggaactacaaccttcaagttcaaaatttctacctccagaaagcaatgatgtttctaaagattctcttattttttaattgtgattagtagatgtgtattcctaagtattctacagcaatgagaaataaggagcacattcnnnnnnnnnnnnnnnaatcaaatcgattctgacaaaaggagtttattgtcttgcttgttaaaaggctg

SEQ ID NO: 155178 - DNA, 430 bp, Homo Sapiens
tttttttagagttaaccagtttattttggggagcaaagagaaagggtccctaaccccagactgcctgcgaagaggtgaaatggaattgaatgggattatggtcagccaaggcttcctagtggagctgctacctgaactgagttttaagaggggtaggaaagaaaaaatgtagtgggtcataatggcattccagatacaggggacacaaacagctctgtgtttatgaactacaaccagttgttgacttttgtttcaagtggctccccattccccagtgctgtgtggacgatgggctgaagaggagaaggctgggagcaagggaccagtaagctgttgcagcagtgcaggtgagatatgaggcctcaactctgcagtgttgacaaccatagagacgcagagagcagaattcatcaatatttatcagcaccaa

SEQ ID NO: 155179 - DNA, 452 bp, Homo Sapiens
gcggccgcgcggagcggggagcctccagcctgcgccccgtccgcgggtctatgggaagttcggggacttgacagccgctgccgccgcagggcatttttggtcgaagagagctgaagtaatgagaagacatcatggaggcccagtcccacagctccacgaccactgaaaagaaaaaagttgagaattccatagtgaagtgctccactcgaacagatgtgagcgagaaagccgttgcctccagcaccacttctaatggcaaccatttggaggcccaggccagaggctggaccaggaaggattggatgcatccgcgctgtccatccctgctgctgcacaaacgactcagccacagatcctcttggatgggctaccttgaaagggggaagctccaaagaatgcgtacaaacccatacatttacctaggtgcgggatgattgcaagaccactttatt

SEQ ID NO: 155180 - DNA, 597 bp, Homo Sapiens
cgccgtcgcccagcggtggcaggcgcgcgtctagaaagagattggtcgccgcgagatggggacgccacaggcctcacccccaggaggtgcgctggccggcccgccccgcagcggggcgctggttctggttccctctccaggatttgggggggaaacgtgggtagagagcgagggtcgagatgcctatcccaaagcttggaaacagcgagaacgtgttatttccgtggtctcccatgcaccccggtttacgaggcgttccttgtaggtcggacgggcatccctgtcgcagggcgcctgagtgtgtccttttctccgactgactctcggaggcttggggctgctgtttctggggaagccactcccgggctgaggatttccttgatgtggagccccgagctcgcggggacgggggcgaggagtccacgggacccgcactgatgcaggcggggaagcagcagcctcccgccagcggctcaagacgccgcgctcgacctctctagcccagtgccggaccccgcccagccaagttattgcggggttgcggggccgggcgggggagagcagggccgcccgagggcagagcgcgcgcgcggccgc

SEQ ID NO: 155181 - DNA, 544 bp, Homo Sapiens
ctgtaacttcttgagggtagaatccatgtctaatttatctttgccaacatctggcatacagaattagttcaagatgagagagtatccaaaatgaatgaagaatgcttctcagcacaggagtgaggagaatgagcttccatatatggccctcagaatacaaagcccagtccttcttctcactcggttcagtaactgccagaggcagcatacagggttggttaagagcacagtctgggggcccactggcttgagttcaaatccttccatgagatgttttgtgtctctggataagttactcaacctctcttacccctcaatattctcatcagtggtgtgggaataacacaggagtagcttaatatgaggagtagcacctacttcatagagttgttggggagattaaatgagttaatatgaataaagcagttgaacagtaccttgcacatagttagcagtcagtagatagtagctagtattattatttgtatgcactgcttctctgtggctctgattgccaaactttttaaatcatgaacaccatagt

SEQ ID NO: 155182 - DNA, 463 bp, Homo Sapiens
atttccactttatttattatgcaccaacaatatgccatgccctgttctgggcaccagggatgcacagtaaacaaaccaatctctgttcccaaggagctgacagtgtggaggcagcaaatcaacaagacgacaaacagaaagatggttgcagatggtgagacatgctgtgaaggaagcaacagggtgatgcggctgagagaggcagaggctgcagggctgctttacggggaatctgggagacctctctaaggagctgacctgcgagaagaagccctgtggaaccatagcaggagcagcaccatgaagagctagatagaaaatgttgaatgaagcccaggcttgagaaacggcaccagagctgtggtcagaacacgggagcagacagtggaacagcagcgaggtggtatagcggggtcccctctgcccactgccacctgtgggcctcataagggcaagctcggcc

SEQ ID NO: 155183 - DNA, 442 bp, Homo Sapiens
tcagctacccccagacccgttttcagaggagggtgttgaggccagagaggggagggaccttcccagtccctgagcctgccaaggtgggcccagcttggggtggggacagaggggctgctcctggctggggcaagagttggaggggtctccgatgggggcatggccacgccctgtgccatgaagcccctcacagaaactagggagtcgtgggcaacaccctgtccctgtgacaggaggggaaactgagtcacggagtgcccagggccccatggcaggagtgggcagggcctggttcttgtgccttggcctccatctgggaggaggcagggagcagagctcagactcctcccagtgagggccccccatgtggctctgctgcacggccccagttggggggctccctgggtgggggggctctgggaagcccacagttacccccagg

SEQ ID NO: 155184 - DNA, 474 bp, Homo Sapiens
  misc_feature (281)..(407): n is a, c, g, or t
tgttttttttgagtgtatttgagcaaaacaaaacagattcccgaatggggcagccctccaaaccagagcagataagagaactccaatcaggaacctgatctgacagcacctataggaaacagaagtgtgtgatggagacagctaatttgattataacttcattgcttaactggttacagagtttcctgccatgaagtaaagctcagttactgtagttaaactccttactggtttggtctggtaggtgtagttcagggtttcactctgttatcagaaagggnnnnnnnnnnnnnnnnnnnnnnnnnnnnnnnnnnnnnnnnnnnnnnnnnnnnnnnnnnnnnnnnnnnnnnnnnnnnnnnnnnnnnnnnnnnnnnnnnnnnnnnnnnnnnnnnnnnnnnnnnnnnnnntggcactggctgcttgactgaatatacttatgagacttgaagccagctggacttcctgggtcgagtg

SEQ ID NO: 155185 - DNA, 703 bp, Homo Sapiens
cccccagctcctttctccgacttgtctctccaggcctagaacttcctcatgtttacctcaccaggcccacctcctgccttccagtagcgtctacaagtttggctcctgcctcccatggatctctccaggccccaaactttctcaagtcaacctcaccaggcccggcttctccctttcatcagccttccaaaggccagcttttgcttcatgtctgccttccgagtcccagctcctgttttatggcagcctcctgaggcccagctcctgcctcctagtggcctcttttggcccaactctttcctcaccagggccttccagaccacgttcctgccttttagcagccactacaggcccagctttgcgtccttttaagagtcctgcctcacagtggcctcccaagggcaactttttgcctcatgtcagcctcttgtgccctggtcctgcttcctggtagactctgcaggccctgctcctgccttacgttgccccttttataaagatccagttcctgcctcctggctgcctctatgagcccaaatcctgcctaacaacaacctgtttttgcccagctcctgcttcctggcagcctccttaggccaaaaatttccttcagttgacctttccaggcccagctcctgcctttcagcaccctctttaggcccagctcctgccttaataaatttgaataaattattgttatgtg

SEQ ID NO: 155186 - DNA, 633 bp, Homo Sapiens
  misc_feature (467)..(467): n is a, c, g, or t
  misc_feature (488)..(488): n is a, c, g, or t
  misc_feature (509)..(509): n is a, c, g, or t
  misc_feature (527)..(527): n is a, c, g, or t
  misc_feature (573)..(574): n is a, c, g, or t
catagaccaacagatttaatattatattgcagttttcagcgatgcagaatgcagctgcaattgtgttttaaggagaagccaaatggggatggttgtccctgcaacatggtgccactcctgggccatgtgcagcctcagtggacactcttccatagcgctgaggccctggccccgcctccagttaccctgtactgcccactgccttacagttcagtgcgcaggccttcaccttttcatcaccagcctctctgctcagtgctctggagttcttgaccttgtcctttatcatgagatttgctgaaatcactaatgaaaataactcccaaaggcaacaaacaaaaatattagtttaactggcactgtggtatattaaaaggcacaagggcattgtggcttaacacttttgctggatcccaagagacgcacatgatgttaaaaaggagatctggcagcagtactaatactancatttcagtgtatcatcttgngggtggtttggccaggatttnccaaattcttgatatctnggagttcttcaccattgtccgggcatcctgcgaggctaatatacanngcgtaggtcagcagcaatttgctaataagtgatgagatcagtagcctgaagtctctaag

SEQ ID NO: 155187 - DNA, 463 bp, Homo Sapiens
gtggacagtatttattgggcacgcctactctgactgaaggcattttggacttgctaggacagtgataagggccttgggtacaaaatgctcctgattctggtgtagctccatggcgagtcagaacactgaacaggaatatgaagccaagctggccccatctgttggtggagagccaacaagcgggggcccatctggttcttcacctgatccaaatccagattccagcgaggttttggacaggcacgaggaccaagccatgagccaagatccaggctcccaagataactcaccaccagaagaccgaaaccaacgcgtggtcaacgtggaagacaaccacaacctttttaggctctccttcccaagaaagctttggacgattgtggaggaagacacattcaagtctgtgagctggaacgatgatggagacgccgtgatcatcgacaaggatctcttccagagggag

SEQ ID NO: 155188 - DNA, 563 bp, Homo Sapiens
ttttttgtttgacgcctgctcaaatatggaagcacctttaatgagagttgacatgacttgggggatttcctaaccatcatgctcttaacacaggtgcctggttaggcaggttccttccacctggctgagcccagacaccgatctgtgagagcagcacagtgcaagggaaggctccctgcaagggagggctgcaggctaggctggcccttcagggtagtgttttggttctttcctgaagcaggaggcctcgcttggagcattgctttgctcctaaattacttaaccaaacagcgacttattttccacagtcaggtagacaaacaccacaatgatgaaaataccaagcacagcaagcttcaagcccactgggaaaccttcttctctccagctctcgatagtctggtcttccgcgcagtagtctctctctttggtgatagtcccatatgtgattctggtgcttggtgctcttgcagcccacctgtgaaaacatcagtggctcttaggattgtggacagctgtggtgcacttgagtagccccttaaagtgtgtgggtcttgaagccc

SEQ ID NO: 155189 - DNA, 510 bp, Homo Sapiens
gcggccgctgtcgcccgagacccggcggcgccggagcagctggcgccgccacaccgtggtggtgcagagcccgctgactgacctcaacttcaacgagtggaaggagctgggcggagggggccccccggagcctgcgggcgcgcgggcgcacagtgacaacaaggactccggactcagcagcctggagtccaccaaggcgcgggccccgtcgtccgctgcctcgcagccgcccgcgcccggggacacggggtccctgcagagccagcccccgcgccgctcggccgcctcccgcctgcatcagtgtctgtgatccccacctcccgcgccgctcgggcgccacccctccctagagcccctttggaaccaggaggcttcaccagcctgcacctcctcttctgtggcccctgggtgcatggtgtgggtggagggcgcagcaggcagtgtctctagttggtgtgctggaactggcagggcagaggagaaggctggggccggactaattgaatggaa

SEQ ID NO: 155190 - DNA, 518 bp, Homo Sapiens
  misc_feature (207)..(215): n is a, c, g, or t
attagtagttcagcttttatttataaatttattgcctgttttattataacaacattatactgtttatggtttaatacatatggttcaaaatgtataatacatcaagtagtacagttttaaaattttatgcttaaaacaagttttgtgtaaaaaatgcagatacattttacatggcacatcaatttttaagtcatcctaaagattgannnnnnnnngaaatttaaaaacacatttaatttcaatttctctcttatataacctttattactatagcatggtttccactacagtttaacaatgcagcaaaattcccatttcacggtaaattgggttttaagcggcaaggttaaaatgctttgaggatcctgaatacacctttgaacttcaaatgaaggttatggttgttaatttaaccctcatgcataagcataggcacaagttagctgcatgtgctctagactgtagatcgagccaccgttgagaagcaaaggacagcagcaggaagagcaatggaacct

SEQ ID NO: 155191 - DNA, 616 bp, Homo Sapiens
  misc_feature (551)..(551): n is a, c, g, or t
  misc_feature (564)..(564): n is a, c, g, or t
gcggccgcggcttgccccgcacctcgcattgcagctcggcaggcgatccctcgcgcacggtcaccacggccctacccttgggcacactgatggtgggcggcactgtctcagaggagatgttgacctcgacgctgaggtcgggcacgggtgcccctgggaaagaagccatgcacaggtaggtgccatagtcactgaagtgcaggtcaatgagctctaggctgctggtgactgcgggcagctcaggatcattgcgggtcaccagcagccgcttggacatgcgtgccggcttgccattcttgaaccactggtaggtcaccttctcctggggcactgcatccacgtggcacgatagcttcaggtcctggcccagctggatgttctcactctctttgatcacgtcaggagtgatctggaatgtagcgttcttcatggatcgcaccagcaggttgacagtcttcttggcagggttgcccacattgttggtggctgtgcagttgtagtagccagagtcccgggcctgcactgaagggatgctgagggtgccaccctgngccagagcacccnagggcagtgggccaggcccatgggaccactgcagctggggggagggatcacc

SEQ ID NO: 155192 - DNA, 485 bp, Homo Sapiens
agaggggagcacaactcaaaagtcacacagcagagctgaaaggctcaaggctccctcccgataggctgggcaggagcaaaaatgtcctaggtccttgtcagggactggggctccagcaggagtgtctgaagcagtgtgcatcagctggtcaggccagggtttcatggtccacctgggagcccagaccctggagtgagatctaggctcccgggaggcaggagaagtgccttccaaaagtgccctctaccccagcctattccttcagccagtacccaggtccccttggtcatggctctgcctgctccaacccagactacctggggtcgctgacgagcagcagcaccgagccgtcctgcaggcgcgcgtcgcgcaccgtctggtggtcgtccagccgccgcgcgttgtagtagaaggcgcgcttccaggagctcacgccctggccacaccagctgggcgcgcaggtcgctgagcgtgtcccgcggccg

SEQ ID NO: 155193 - DNA, 499 bp, Homo Sapiens
tttttaggttatcatgtttattcacaaatcccagtacaacccccttcagggatttcagaaacctgtcccccacccccaacccctccaggtcatgtcagctgatgtgacaacggcgacattattctcccagcaaggccggatgccagtttagggcatgatgttggcgacgctcctccacagggcgggaaggttgatgaaaggcgtgttgaccgaggccccagaggctaacggcgtggttgtggcccctccttgatggctggaagatccgctttgatggttgccattcagcagctggttggcctccttgctggcttggttgaccccattatgagcattctgcagctccttcccggcctggccagcagcatggtgggcaccttggccaagcttctccacttgctttccagcctggtcagcagcatggttgaccccttggccaagtttctctgcttccttcccagcctggtggaccccagtgtggaacccttggaccgctttg

SEQ ID NO: 155194 - DNA, 584 bp, Homo Sapiens
tcgcagggtgccaccgccgtttccaggcacttttcctgctagacgctcaagacaagagaagggcatgtgaagggccaggaagccggggcaggggccgccgtgagagagcggaggaggagggtgtgaggcgcaaccgggtctgtttcacgctgaaacgctagggccgtgctttccgctaggcagctgcgcagagcaaccgctcctccgccgggcgcgcttcgctgctggggagggacaggcagggatgcttggtgcaagcgatccctcggccccggggcggcccagcctcgccgagctccattagttggcatccgaaacatctgccaggggctcaggctgggggcccagggacgaagccagtttggtgagggccccgcgctatgctgtccagttggccgttcatggtccgcagctccaccaggatgtccccgacgtgggccttcaagcttgccgcagcggcgggccggggttggggcggcggggatgtacccgcgtccacggtgccctcctccctgcccgcagtgctggggcgcggggcgcggctcatttccaggccctcggccggtgccaggacgggcggcggc

SEQ ID NO: 155195 - DNA, 437 bp, Homo Sapiens
tcggggctggattgttctctgggacggggccgtcctgggcactgcagggtgctgctgagcagtgtctctggcctccacccactccaggccaggagcaccccccatcgtgacaaccacaatgtccccaggcatcgcccagtgttccctgggggcagttcacgctgggtgagcctctgctgcagcagaaggctgtgtttccacggagaagccacttaactccctcactgaccaccggctggaggcctcatgcatgcctcgcttgaggacaagctcatgaggaactctagctactcccaagagacagacgttgatcaggagagatgaggcagatgcacgggagctgtgaaccaggcaccattttccaggggtgactgagagcctggccctgcagtgggtgaggctgggggctcgggagtagggacctcatccgcctgacc

SEQ ID NO: 155196 - DNA, 656 bp, Homo Sapiens
  misc_feature (411)..(465): n is a, c, g, or t
caatttcgagagtagccgggctgtctcctgggtaatctcaaaatgcttgggcagcggggtgcggcgcagggggctgccctcaggggaggcagctgcagggctgggcccccgcccccgcaaactccctctgggcactgatgtgatgggggtctcctcgcacagcttggaagccaccagggccagactggacagctggtgggttacaggcctcacaccgccccggggatacttcactggctggcggctgaagtggccacgagactgtgtccccaggagtgagtcctctgggccttggctggacacttcccctcccccatctttggtgtcttcagccacgtcctctctctggtcactctgtggagttggaatctcggtaggtgtggccgtgggatgctgctccagggtactgtnnnnnnnnnnnnnnnnnnnnnnnnnnnnnnnnnnnnnnnnnnnnnnnnnnnnnnngtcaaggtgcgggggtggcggttgggagctggttgtgaggggcccaggggctgggctggagtcttggggcgggggctcagtggcctgggggagctcatccatcccaaagatctgctcgtagtgcacgatgaggaactccacaagctgggcctgatgcccagagtccagcaggcaggtgacagggatggcgc

SEQ ID NO: 155197 - DNA, 458 bp, Homo Sapiens
taaatttcttatggtcactttattcaaggaccacagagtttacaccaactacccagaagccaggaatagcttaaggagagactcaccaccagcagcttcttttcaatcaagtttcacttcaacctcacacccaggaacccattcaaattcctacatttcggtatccttagtcgaactaacttcctgtgccggaagcttttgtctgtctcagtgacttctttctttaacaaattcccttcatctcccccttgagtcaaagcccatgggggtccccaggaggcatgcaatatttaccaagggctcttccccgttttcctgcctctgtctggcagttgtttgcctttacttttaggtttgtagtcacagcctgttttttcttccttggacacaccagcttttctgaatggtaggattatttacagtagaattaaccttgtccttcaccccgagaactgagc

SEQ ID NO: 155198 - DNA, 622 bp, Homo Sapiens
  misc_feature (60)..(61): n is a, c, g, or t
acctgtttacattgcatattttagagttgtttggcaatgcatcaaaatttcctccacatnntgtggttggtctgccaattcccaattatattcttggagaagctcattaggataatggacatcaatcactttggttgatctatcgaaacttttcaccacatactgaagtacaatgttcataacatcttgcagaaacgccaaagtgggcctttctccatcacacgccggcagcaggtctgttgcatggagaaacgcgtagttgacatccactttggagcagctgcagggcttctggtcgcaggcgcaggcggccttccgggcggcggcccgcgggggttggctcccgccgctctccgccggcttctcggcgtctccgtagagcatggcgcacagtttgtttccgatgccgcccgtgaacttctgagccacttggcaccaggctcgcgctgtgccgggattctcggaatccccagagccatcttccgacccgaaagaccaaaagccagagcccggagatgccatcggctttggagactggagcaggtcgcctgcgagtgcgagctgcgggcgagctgcctcgggcttggccctgcgcgcgcgtgcgtgcccgtgtggcggccgc

SEQ ID NO: 155199 - DNA, 900 bp, Homo Sapiens
  misc_feature (862)..(862): n is a, c, g, or t
gcgcagcacgcatctttaatctaacacctgcaggctgaatcactatcttgagctattttccagacttaaaacatctttgtagataaccgcaaattatactgcacctaaattagacatgcatggtgctaacatgaaacaatgagttgagaaagtagagaaccagcaccacaggactccctgaaggccacctggctacattttatttcaaacaggacttttaaatggggcactctgtcaaacaaggtggtgagtagctgtcaattaaaggacacttccctgcagagttcagggtagtaaaatcatagttaggaattatcgaggtctgctttaaacttgtggataaaagtgcgcacacacacatcaaaaagaaaatgatagccaagacgtgaagattataaatcatttatttgaaaaagatacattttattaaaatccattttccactttaatggtagttcaatccacatcgtttttccagtcttaaaatgtttctttatcgactactataaccctttactgtaattaaagccacattttgtaaaactacataaactggggtttgactatgaactatgtcctaaatcccactgccaaatgtagctagcgtcactaaaatcaatcaatggttttaggtctgagtgatagtggacgagtgagcttggccataaggtgaaggccacccttgcttttactggatatccaaaaacgaagtccagtgagcagcaaacgtctccacgttaaccacacagcccactagctccagttccagccctggacagctttctggcccctcgccgggcccacttcctctgcagccccaggtcccgacgcgcagggaaggccgtctggggccgaggtcggngcgagccgctgcccgggccagaggaaaggcgcggcgct

SEQ ID NO: 155200 - DNA, 474 bp, Homo Sapiens
ttttgaatatattttatccttaaaaacaatcctgtaaactaggcgctattttcctcattttaaaggagaaacagaccagaagggattaaaacacttgccgcaggtcacacagctgcttagggaatggagcccgggatgtgattccgttggtatcgcactcccacctcactcccgcctttaaccacaattaagtccaactgtccagcattgcttgagtgtggtattgtgttcttatagatacgatcctacttaaagtattctgtcaagaggtaggccagacgatccccatttaactttgtgtagcttgaagaggttgatcatttttccaaggtcacgcatccagtgagtggggaatccggagtcggaatttgaacccgggcattatctgtagtgtagacccctgtcggggctggatgtgtaagaagcttaattgccgggtttggcaggtgcatgggtagttgtgaggggctcgta

SEQ ID NO: 155201 - DNA, 537 bp, Homo Sapiens
  misc_feature (65)..(97): n is a, c, g, or t
gctaagtataaagtaattatcttatcttttctttttgttttgagacaaagttttgctctgtcacnnnnnnnnnnnnnnnnnnnnnnnnnnnnnnnnntgagccttaatagtggtctgatttgtctttaagggagtttgttttagatcttgacaatattatccacaattgttcatcaacttttgaataccctgaaaaagttgatggattctacagcccaccaaacgtgagataacagacaaggactgtggataatccttctattttgttctctaattgcaagctgtagcacccaaaatccagatgcctgttagagagctacatgaatcacttactcactgaataactcctctttgcaaacctcttgctgggtactcttgagaagaatatgataatgtccatgaaacagaggtccctgaagtcttctcgcactcggaacagaagaggaaggtgaatgctaggtcctgtcacagtggggctctgctgccagaagccaggatgctctccttcctcctctcccgcagcattctttcagaagt

SEQ ID NO: 155202 - DNA, 733 bp, Homo Sapiens
aggtgaataatgtcatttcgaactattttaagtatgggctataacattttctgtcttcttattggttcttagaagattaccccgggagctttcgagaagctgggattacctgcagcaaagggaatagccgataggtgtcgtttctagtgaaatgaagccagaccgagaggtcaatgtaacccaccaactaaatcccaagagtctgaagcgtcagccagtgtatctcagagaaccagggagccttcaagggcatgtagaaaatcagctgttcagataggcctctgcaccacacagcctctttcctctctgatccttttcctcttgtacggcacaacattcatgttgacagaacatgctggtatgcaattgtttgcaacaccgaacgatttcctgcggtcgcctcttcagtaggaagcactgcattggtgataggacacggtaatttgattcacatttaacttgctagttagtgataagggtggtacaactgtttggtaaaatgagaagcctcggaacttggagcttctctcctaccactaatgggagggcagattatactgggatttctcctgggtgagtaatttcaagccctaatgctgaaattcccctaggcagctccagttttctcaactgcattgcaaaattcccagtgaacttttaagcacttttaacttaaaaaaatgaacatctttgtagagaattttctggggaacatggtgttcaatgaacaagc

SEQ ID NO: 155203 - DNA, 662 bp, Homo Sapiens
  misc_feature (14)..(14): n is a, c, g, or t
  misc_feature (21)..(21): n is a, c, g, or t
cttcttttcaagancatcccnccagcaattcctgaattcctctctataggttcaaacactgaaatggtgtcatcaccgagataatatgaatataacaaacatcctgtccaagtcaacacatttgtctgtgactatttttgcaaaataaacggagtatattgcttttggagccatagctgtctttttccataaacttcttgaagttcctccgatgaggtgtgggcttgaggtctatgcagttacggagagaatcctcttcagaaccaaaaccgttgtaaggtggaaatttcctttctatttttggaggaggagaaggaggcttgcatgaaactgaggtaaagttctcaattccatatttagacttataataagacttcgtaaattcatcacagtcataaaggagcacttttcttccccacacattgatggtgactcctagggacaggtcactatctgttgtaaaactcttggtctacttttcctagcttatatctatcgaacaggtagccatccgcttggttctttataaagtcaccatatgaattgagaactgctcgatctgttatctggcctggttgatagactctaggtgggccattcttgggtagcttactcctccggaggaacatttttagagcatactcggtcttgctggtgggaag

SEQ ID NO: 155204 - DNA, 717 bp, Homo Sapiens
  misc_feature (344)..(377): n is a, c, g, or t
  misc_feature (387)..(387): n is a, c, g, or t
  misc_feature (698)..(698): n is a, c, g, or t
tttaatagtgcaaggtagacggtttttattagtaacaggcagcagcggtatggaacatatagatttcagtggaggagtataattgctaaggggaaaatacacacaggacgggaagaggccatcttcaaactcccaacactgagctaaagagaggggaagggcaggcggcgtttctggagatgcaccctgggtgaggggaccctccccgccactgcacgtgtctggttatatatttaattgatgtcagaatcgactgtatccagagcagacactccagctccaaactgaggatgtttgtataataactggctgttttctcttctgcccctggcagaggtccggcnnnnnnnnnnnnnnnnnnnnnnnnnnnnnnnnnnaaaaagaatnaacccccaaatgctaatgaaaccacagcgggaaccgctctttagaaatggaaatactccaggccagtgctccctggtgataaaaattacacccgatttttttcatttaaactgatctgatcgtaaaggaaccctaaaggttgccatctgatctgacagtgtttgtgtttgccatccagcgtgtgggcctctcatttacccctcttcttggaggaattccctcccaggaagcgcaaaaatgtcgcagactgtcgacggcttgcccaacccggctgctttctctctctctgtttttcagctctatagtaattntattaaaaatatctgtcct

SEQ ID NO: 155205 - DNA, 711 bp, Homo Sapiens
agaaggtttttatacaatggtaaaaatacgtttatttttagttttaaatataggttatggagtgagatatcattctttttaaaatcagaaatgactaaaatctgaatcttgaaataacagggggaaatatatcaccccagcaaagcactatgcagaaaataatgcaccaaaagatttaaaatgtaagctatctatttaacctatctgccattcaaaggaaggggtggcaagatggtggaaagaggtcaagtgagcagaaaatgaagaaccaatcacaatattggaggatcagaagaattggaaggggagtgacatgattttaagtgggttccaattgcctttgtgtgaatattaagaatgcccttataatgattgtaaagatgcttaatgatgtggtctcctacttagatctctagcttcacccctggttagactcctacacaaaccttatgccagtcatactgaatattgtctgaatccttaaaaattaccttatgctttgcacctctggaaatcctcatgttctgtttcctctttctgtgaagatctggacaaactgactcacaaccttatttatttttatgacatattttagcctttggtccagattgctggtctgtaaggacctcactgattggaccagattctaaagagttacttatttcattttctgaaagttcatagaatcatatgctttcttctttttatttt

SEQ ID NO: 155206 - DNA, 423 bp, Homo Sapiens
  misc_feature (166)..(177): n is a, c, g, or t
  misc_feature (185)..(313): n is a, c, g, or t
tttaaatttttaactggtgactatacatcttaatttttcaaggcaaagaaaggtgacaataaaatgatctgaattcccagcttattcaaacttgcaagataattttacttaaaaaaatctgcttctaactgaacctgggaaacagagcaagaccccgtctctattnnnnnnnnnnnngtagctgnnnnnnnnnnnnnnnnnnnnnnnnnnnnnnnnnnnnnnnnnnnnnnnnnnnnnnnnnnnnnnnnnnnnnnnnnnnnnnnnnnnnnnnnnnnnnnnnnnnnnnnnnnnnnnnnnnnnnnnnnnnnnnnnngagacactgcctcttaacaatttttttaaaaagtattctaacttatttaaccaaatcatcttttgctataaaaattatcactaaaggaggctgggtgtagtgtttcaccc

SEQ ID NO: 155207 - DNA, 460 bp, Homo Sapiens
  misc_feature (437)..(437): n is a, c, g, or t
aatgcttttaagcatttattgggaactttccacatgtcaggaaggcactgagttcagagcttaacatccactatctcctttaagacttttaataatcctttaaggaagagactatcattatccccattttacagataaggcaactgaggcttcagcagtggaggaccttgatgaaggatgcccagctagcaggagctggaattcatgttggatcaatgtggaatgaatgaatcacttgggcgtggggggaggtgggaggacaaataaccgtatcttataatcatatggttttagagctggaaactcttcaggtgacttagtccaggggttcttaatttgggatccatgagtgggaagactgatgggttccaaagccagacagataaggtccccccatcttgcccagtggtttctgacccctctgtctcctgccaatnccttgcatccactcaagtgcctg

SEQ ID NO: 155208 - DNA, 321 bp, Homo Sapiens
ttgccctttaagtagctctctttagtaggaaagggaagaatattgacttgggttagttagttctgatttcaaatttcccctttatcacttacttggcagtatttaaccttttcagagtgtttcactgtcagaaaataggaattcagggttgtgaagattacataaaataaatacataaagcacagtgcttgtgacagagtttctttaacttcattagcaccttccctgtgacttcaagtatagacaggacttttatacattagaatggaatatttgtttaactttgtttatgtctcttgttttctccttccttttgcttcc

SEQ ID NO: 155209 - DNA, 503 bp, Homo Sapiens
tagctgtgttccaataaaactttatttatggatactgaaatttgagctgcacataatttccatgtgttatgaaacattatactcctttcaattttttaaaacattgaaaaacgtacaaatcattcttagctcatgggccatacaaaaacaggcggcaggctattgacctgagggctagaagtttgctgacccctgctgcagaccttcaaggtagagtcagatctatttcatctatttccctcactggctagtggcagggcctggagaaaataatacaggttttggaggagtgtaagtttgaattcaagttcaagttctatattacattgtactcagcaataacagatactaaataacggttgctttcatgcccttttaaagtcatattttttattggtactgctcagtttttatcttaattccatcttatcccaataatgcagtttctcaagggactcactaaggaccaggggaacggggcagttgtttgggtaaatgttggt

SEQ ID NO: 155210 - DNA, 596 bp, Homo Sapiens
aatgttgggatgactttatttaaccaggacaccgtgtgcatgctctctggcccatttcaggccttggttctggactcagaattggttagaatcagtcttcagtttaaatgcctataaagtgagaataatcattgttccttcttcatctggtgaacgggggcagtaggtgagatagggcctgcaaagggcccaaacaggatttatctcgaagacccctgagtaccaggggtctgaattcttagtgtaatgctgagtggctgctcgcagagcgcttaaatcagggaaaagttcttctctgctgccatctagtggcattttgggaataacacgtgcgtgaaggtccgcagaagctcctgtttccaggcttctgagccaataaccaaagaacgtgttgcacttggggccgcgctctggctgccatcacctgtgtactggaaactgcccactggcatatggactcatggggcaagacctgccacagggcctggcacatcctgcacggaccaccttcccacctggctctgacctgcggatgttttggagtcaacagtgtgcttagagagcctcttaagtcaccacatctttgggaagagggg

SEQ ID NO: 155211 - DNA, 803 bp, Homo Sapiens
  misc_feature (567)..(588): n is a, c, g, or t
aaatattttcattctgtgctttatttaatccagatgcacaaaaagccatttgctgctgcattgttggtttacattttttgaaaaggcgactggtgtaacctgtggaatttgaaatgcaaataagagcctgtgggagtagaggcagaacagatcagcatttataaagtggaaaagatttaatgtctttgaaatcattgcaggggaagaaactggagggggagtgtgatttttcagggagtgaattgtgacgtcaggtctttttggaaaagatgttatttttaaggtctgaaacccggctaggtaaagtgcttacaggaaaaacagattacaagattaacatctgttaacatgatcgtttatctccagccaaaaataggtcagttctttcttaaggaaacacgattgctggcgcatgcttaaataataaaatcaaaacggcgagttcataaattaggaacgagtgtttgttacaatctgacctgtgaagaaacgtttttgaatttcgagatcaatggaaggtcaaagtcccttttcggtgtagagagcaactctttcccctgcgtcggnnnnnnnnnnnnnnnnnnnnnngcggaatgacccctccttctttctcggagctccctttccgcctccactcccttcgtgaatttccctttccatcctttgtggaagtacaaaatatatttaaatggatatcgtctgacgcctccctccttaaagaaggcaaactctgcgcagatggctaactttcagagctctgctgttgttttaccattaaatgaaacggtagggaggagaggagg

SEQ ID NO: 155212 - DNA, 604 bp, Homo Sapiens
atatagaatccccagtttattaactcatttatttactcaacatcttgagttaagtagtagaatatgtgagaaatccaatgtaacacatatgcaaaatagcatttagcctattatctcttgcattccataaaaacagatacacaaaattgcaaaggaaaatagctttgaaatgttaactgatgtaagtttgctgttgtttttcttggaattacctgttgctccttgactctttagccaattcagtttctagttaggactttgctaatttagtatttcaaggtagtgatgatccagacaaaagagagaaaaaaaaggaagtttttctcaggttttgagttttaaagtctaggtcttccagatgataggaaggaaaacagcaatgctcctcagaactgatactagaaaaagtctctcagagttcaagaaatggggaaagtcagagaggacacattttcagtagctatttgggcttctgcacaaggggagattgcatgttgctcaacccagaagatagaagaaggaatgacagggcccagaaagcctggaggagctgtgcaaaaggaatccatgcctgctttcttgtgagaacctggagaagcagtaa

SEQ ID NO: 155213 - DNA, 763 bp, Homo Sapiens
ttttttttatgataaaaacaaaattttaattgtattcaaaattatctatgagacatttccattattggcaaagtagacttaacttcacatttctgttgcatttttaaaattaattatacaactctcaagataaatgcataaaattataacgtgtgtgtatgaagcctgcatgcagaatttttgtgttgcagttatactgaatttattgaaaacatgcttggagcaatctcttttcacttgctatcatcaaaaggaaaaatataatttctaatttttataacttcacttctagaaatctgtggctaatatgtgaaatatttttaaataccttctttaaaataaaacgtttgcaaatatggtttcttgcaacttccgtgaccaaagtatgacttcacagatttttgaagctgtgagtcaattataggaataaaaaggaattccactcttgatgagtagaagcgttttcccagatgtaaattcttgttcaagctttctgtttgtttgctttgttttgggttgtggtgatggtaggtggtcgcagtgagaggtgtgtgtggaaaaattaaagcagaaaagttccaaaatgctgacccgagatttgaaagtaacaggaaagcgggctttcgaactgtgcagacatcacacagtcgccttagtcctgcacatctcctcattatcaaacacttggagcaagagtcttcagaagttactgcagagttcatgcaagattgctgactgagctcacaatacagtaattagacgg

SEQ ID NO: 155214 - DNA, 592 bp, Homo Sapiens
  misc_feature (406)..(414): n is a, c, g, or t
atgcctcataatttttttattaaatgccagacattgtgtgtaaagaacagtgaagactaaagtagaaagggtggctgttagtatacataggtcgagtaagcttagtctatagttgaactgaatctgggctttgaatgagctcaccactactttcagattatttaagggtgggattagaagcttccttttagtaggacttgggatctaagaactgagtgacccagttttcctgttctaccctcatccttcagtaagccccacataactgcactgtggggtaggggtgtgggtttctttctcaactctccagctccttcaccaaatatagatggccactgttcccgtttaacctctctgtcctgatgtcagttacctgtcttttttggtaatcctgagatcaaataannnnnnnnncttctagccactgtagtctgcagatcaaagctctggcgaaaatccatgcctttgttcaagacacgtgagtgttgcccacttttcagaaaccacctatttcaagggaagatcttgcttttcctccccacaagctgtttgtttttttcatttcaacaaacattttaaaacacctgctttt

SEQ ID NO: 155215 - DNA, 648 bp, Homo Sapiens
aaataaataaaaagaagggctttgtttcctctcctatgtattctgccaacctgtgtccctcccatcctgttacctctcaaagtcagattaatatagcaatatataatgtatgtgtgctatacaatccctgttgtcagtattaacaactaatttcattgaacacttttcattgcatgttgacaacttttgaatagctgcatgaatataatttatttaaaattgccaaaccactggtcttgttcaagtttaaactaagataaagcttaccaatcagtaattaaggggaaggatccacttgatttggccagttagaatacttcaaatataagagacatttccacaagatattacttatatcagaattgatacctgaaatttaactattaataaattctctaatttagctcttttgattctgaaatgcagatataaaaaggcaggaagcatctgaagagtttctcattctggagatcaacctgtttctccaacctcatttgtttggaaggaaagtacacagaagcagcaaacctcagcctctgaaggggcccaactcctgactctacatggctcaagggttatttcttagcaaagaatatgtataggttacaaccaacatctatcaaaaataaaaacaaagcaaattcctag

SEQ ID NO: 155216 - DNA, 435 bp, Homo Sapiens
ttttgataatatgttagatacattgtaacaattacattaaaataatttttgtatctgttcttaacatagagatggaggaagtgcaatgacaattttattcacatttattcaggagatgtagaaaccttgattagttctataagtaaattatggttgtgccataattcttatggttattaaatggcagtaatttaaagggggcctttgttctttaatccagagaaatatcctggcttttgactcataactttgaggtaatatgattgcttgtagtcaccacattgtaagttccctaaaggatataagctctgtgtcttgaaggttttaggtactagtgcctagcacagaatgtggcaccttttatatttgttgagtgaatggctgttatcttacataaatgttatttccaggcttttaataaagtggttaaaaaca

SEQ ID NO: 155217 - DNA, 638 bp, Homo Sapiens
aatcaggttgtctttttattgctgagttatcagagttatttttatattctagatacaaatcctttatcagatatatgatttgtcaatattttctcccattttgtgggttatctttttggctgtttaattcttctactcatattttcatttacaaacaactaagccagaaggctgctaagccttaaaatgttctcagtatctttctttctttatattagaaaagctaccacagatggaaaagcctcactgatgagttctgtgatcattggaggctaaaccaaagcagaagaaccagtgagtgtgagtgggaagatagggatgggagtggaggggctgtgggaaggagaagggtcactcagggacctggctgtgccccttgcatcctgacaatggatccaccacagctctaccagtctgtattaggggaacatgagcaaatggcatcgtgtctgtgccagtcaccaagcactgaggggaagctctggaagttgccgcctgtacctgccctccagtcttgcaaatgctgagcaggagccaccagccttggactgtctgtgcttcttgctagagcatgtgggtcattccagcctttccccagaacgtccattctctccacaccttcttcattccaaatgggg

SEQ ID NO: 155218 - DNA, 425 bp, Homo Sapiens
  misc_feature (256)..(312): n is a, c, g, or t
aattttccaaagttttattcccccaaatcacatgcaacaaccccgccttttgatgcctttaattgctctcccaacagatgtcagtttttaataaagagtgtaaccaccgcctttccaaaaatggcttattatggttttactacactcaaacatcacaggagggcaagagaaaaatcaacgatgaagtgagggagggaaggaaatatggcatggagcataaaatgtaaagccagccaatcaatatttaccctttcannnnnnnnnnnnnnnnnnnnnnnnnnnnnnnnnnnnnnnnnnnnnnnnnnnnnnnnntgcgcatccgagtgagccagtgttagccaagaagcagggagcagggctcgaaagtcgccgagcgccgagtgcgaggagctgttgattgttttctggttgaaagaagaagtgat

SEQ ID NO: 155219 - DNA, 730 bp, Homo Sapiens
  misc_feature (341)..(393): n is a, c, g, or t
  misc_feature (463)..(514): n is a, c, g, or t
gaagtttgacaaaaagttagctttattacaccaaaggcagtaacacgtgcataaacgtaaatatacatatagtggaagtacctactactttacagatgggaagatgatcaaaagttgagatcattattccatgccatttaaaactttaaattttaattcctctcaaaataaatacgggacacaacctttaaaagacattatcagactagtttatggataattaaacctagaaaataagtttgactactaagacagctggtagctgatagttgagtttaagggttggtaatcaattctagcgtaggattcttttttttaaagacagggtctcattctgtcannnnnnnnnnnnnnnnnnnnnnnnnnnnnnnnnnnnnnnnnnnnnnnnnnnnncacctcagccccttgagtagctttttgtattttttgtaaagacagggtttcaccatattgcccaggctgnnnnnnnnnnnnnnnnnnnnnnnnnnnnnnnnnnnnnnnnnnnnnnnnnnnngagcacaagccaccgcacccaaccaaattctagtgtagtattattgggtttgaatcttaagtcttctccctagctgctacagctatatcaagctatttatcctctgctttgactcagttttgttaaattcaacacatggtgtactaggaacttaagtgacatacatcatttggtactacccattccccataccacagtgggtatcatcagaattaa

SEQ ID NO: 155220 - DNA, 545 bp, Homo Sapiens
gtttcatatatactgttttaatattccaaaaataaaaataataaaagaatagttacatatttttggttgatctcctgggggaaggtaatagggtcattaatgtgatcacttgcttggcaaagactgactgagaccctgctttgtgccaggctatacagaaagaacactaacatgaggaacatggtccctaccctcagaaatcttacagtctagggaaaaagacattaaataaatcatcttgtaaccacatacataaatgcaaactgtgttaagtgctacaaaaaaacaacagggtacccaagttagactggggtagtggtttcagttatttaattgtggaagcgatatttgggctgggccctgacaggtggagaactgagccctaggggtggaggcacattccaggaagaaggactagcatatgcaaaggccacagtctgaggaaggagaagcgagtggataccagttatgtgtccactggtctggtccaggtgtgggtgaaggggcgcagactggaatggtaacaaaggggatggagacaagcg

SEQ ID NO: 155221 - DNA, 751 bp, Homo Sapiens
  misc_feature (121)..(137): n is a, c, g, or t
tcttctatagtagtagaaggctcatgtgatatgcagacatgtgcttaatcaaatttagctttccttttcaagttaagaaaatgtatatgaagtatttctgagataaaaagaggcacagtcnnnnnnnnnnnnnnnnnagcataaacatctcctatgctgctgcatttgttttaattccttatttgaaaatttggctttgtttatgtaatgtacaaattcctattcacttaaaacaggaccagaatagcctggaaccctatagagctaaatgatattttagagtgctgatcctcattttctcttcggtaaagaacacaacacgattattagtatttatcttgtcgtacacacactcaggattactcactgaggaatggggctcaagtttggttgcaagacttccatttactaggctgtgtgatgttgagcaagtcacttaatctctgaggtaaaatgaggggcctgttgcctaaaattccgtgcttctgtaatttaagtataattgacccagatgtttgatgattactttgaaaattgaaaaaagatgctagtggccataagaaatttgtaccactgtgccccgagtagtgcttctgaaatagtaacacagggagaaggttgggaggccccttctttgtcatttacatagggtttgtctgtctgaagtagcagatgccaagtgttaggggtccaaagatgctaccagaattagaggagatggagaaaaggctaacggaattttcttaattcg

SEQ ID NO: 155222 - DNA, 492 bp, Homo Sapiens
tttcaaatgcacaccggtatgggggaattttattgtattttcaaaggaaaaagtgggtcagaaatgagaggattaactggatccagttgcattttggctacaggtagcccgggtcacaggaggaatcttcatccctgggagttcctgctgtgcttctgcagcagggccaccaggatgctctccaattccatttgcttttgttctgcccacatgctgtctacctgacgaccaagccgtgcccttgctcctcgctcttggttgctctctccctgctgcctgctcatgatgtcctggagcagcttgcgggcggacagctggcccagcaccttccggtagctgttggtgaagatggcatctgcataccgccgcatcctgagggtcaaagggggaggtggggagcagtgggagctgttgctgagggtgaggatcacaaagaagaacacccagagtggcatccttcacccggggtggcacctgatgcggcagatatcc

SEQ ID NO: 155223 - DNA, 695 bp, Homo Sapiens
agtgtggcttctttttggataatttatgataaaaagggagatctggttgggatctagatacggctgttaaagctgcagtgttccatacctcagagggaccactttggaaatgaattgtccattgctgagtatgaagagatgtccagtccaggcaaagccttcactgaagttccatcatcgccacttctccctttttagggtcattcaaagaagataacaccaaacctaaataattctgaaagcattttgcagatcagtgctactcattcaaagggctttgcaactcaaacagattgttagtgtgctagtgataagtttatttggtagaaatgggtatactacagctttaactagccttagtgagaaaagaaattttttgttgttacaaaacaccttttttaacaaaaaggtattttgagcctacaaaaagtttctttaaactgtcagattctagcattgttaaccaaattagactagtgattgcaatatttaagtgtaaatcttgttctacaagaaaggaaacttgcttacagtttaaaacaatgactgtttctacacatgatcttgtatactactacacaaggaaaagggggttttgtaaacactgtagaacagtctcatattcatttttttatagaaatgttattccaatggtgcattttttgtttaataaataaagttttgatacaaaaaaa

SEQ ID NO: 155224 - DNA, 587 bp, Homo Sapiens
gaatgaaggtttttaatgttatattttgtataaaattaatgcattaatttattattatgaaatcaaaacaaccctaccttaccccgaaaataacacctgtaggtttttgtcagttgtcagatgggcatcttgctatgttgcccaggccggtttcaaactcttggagctcaagctaccttctgcctcagcctctagagcagctaagactacaagtgtgcaccaccatgtccagcttaggtgtcagtttgatatgagtcagtagcataagtagtaaagaaaacctaagggggccttgggctctcctacggtccaggtctacaagcaagcaggtaatggtttagttctatttggcttggtgaggccacatctggaccaaagttagacaggcacactgacacatttgagctcatccagagagtagacaaggtgatgccaggagtccacactatgtcaaggaggactagctaaagggagggaaaatgtttaggctagtagatgtagaaagaggtggtcctcaaactcttgacgttttcatgagggtgaagatagtagatttcaagacactggagttattcaagagactaaat

SEQ ID NO: 155225 - DNA, 472 bp, Homo Sapiens
aacacaagttttgtttgtaatattagccaaaaacttacaaaatgcatcaccaagagtctggagaagcaaatcgtgctgtgttcacgtgatggaaccgttatcagaaactgctgggtcgtatgaaaacacaggtgagacccagaggcatcaccccgactgacgggaggcggacacagaaggctgcgtgcccgtgatcccacctcggcacagctggggaaggccctctgctctaggaagcgggacccgggtcctcgcagggtcgtcgcggggccgccacgggagaagggggcccgagggagctgtctgtgtgcaggagcctgctctgtcaacgtgctggtgggttcatggggtgaatgtgtacaatgttttcctgtgtgcacctaagacagtgcatttttcagaaggaaggaaggaagggaaggagatgtaagtcacgggcaccagagcctcgtagagcagaggaagcggccgc

SEQ ID NO: 155226 - DNA, 379 bp, Homo Sapiens
ataggaattaagctttttaatggtaggttctaccagacgtgtttgtttgatttttaggtttggttaatgcattgtttcccgtacaatctcaacccgcggaaaccccgaaactctagaattcgtgccggtctctttcgcttccaggtcatccccggggcaacggccgccgctctaattcttgtcagaacctccaggccagtttcagcaacgtgcaggcagaagctggcgcctcggtgggatgcgagggcgtgtggagcgcggggaggagagccccacaggcctttcctgggcacccgcggtggatgggaaggctccttcgggcgcctttcagggaagttgtttggctgagggaaggtggtccgtcacgtgaatgtttaaa

SEQ ID NO: 155227 - DNA, 490 bp, Homo Sapiens
agcataagccaccgtgcctggcctttttgatatatttttgaatggctaaggccatgcagtatgtttaattttacatcttacttttttcaaaaaagcatttcatgttattaaaaaccctttgagaactctggttaatgagtgtaagatgaagtgttggggtaaggggaattggattgatgtgggcaactttgaaatgcattaaaaaaagaacattggggggatagaaggatagaggcagaatgaaacatgaatagtaacatataaattgtagaattgggaggatggttggtgtacaggtgttcgctgtacaattatttcaacttctctgaatgtttagaaatgttcataggttgaaattcttcacggacaacccaatggcagagaacaattcacttagtgccctttccctagtgttggctactgaaggttttcaaaaatgtatatattttgctttttaaataaatgatgaaataaacatcttttgcataaa

SEQ ID NO: 155228 - DNA, 477 bp, Homo Sapiens
tagaaatgacaactttcctttccactgcccatttatttgaaaaaaagagaacagtaatttaaaatactcaaccttttaaagtaacgtaagtgatttgtgttttgtcttggtccctttgttgctcctttttaaaattcattgtagtatgttgtcagtcctttcttcctttttacattttccatcaaacatttttaaaagtaataatgattacatacactcattataaaacaaaagaccaaaggctttcctcttcccaatctcctccatctcaatccccagaggaacactgttctctgcttattgtatatctttctacaacagtgctgtccaatagaaatataatatgaactgcatatattattttaacttttctagtagccacatttaaaaaggaaaaaggaaaaggtgaagataattctaatactactttttatttaccccaatatatccaaaatactatcatttcaacaattcttt

SEQ ID NO: 155229 - DNA, 812 bp, Homo Sapiens
  misc_feature (137)..(202): n is a, c, g, or t
  misc_feature (235)..(299): n is a, c, g, or t
  misc_feature (686)..(713): n is a, c, g, or t
aaatctattaactttttatacacaactttcatagaaatgtgattgggatatttgagagacaaatatagtgaattagttaagagcacagactatattgagagccaaactacctgtgtttgaattctggctccaccatnnnnnnnnnnnnnnnnnnnnnnnnnnnnnnnnnnnnnnnnnnnnnnnnnnnnnnnnnnnnnnnnnntaatagtaatagaacaaactcaaaaaatcctcnnnnnnnnnnnnnnnnnnnnnnnnnnnnnnnnnnnnnnnnnnnnnnnnnnnnnnnnnnnnnnnnntctaatgtaatgcttaccacgatgatgatgataaaggtaaaggaatcacaggaaagataactggacgggttctagacctaccagttagcttcccagagactcagtttcattattcagcaaacaggatggtgatatttgctttgtccacttaacaagattgtgagaatcaaatgagcattataaataatagcatcattattctacatgactgtttttaaattgtgttaatttcagtatctaagtttagttttataacttaacagagaacacagaaacccatttcgtctatttggtgaattgatgacatagttgtcagttttcctctcagtctgggctacaaagccacagtacttccttaaaacttggctttcattatttgtaagaacnnnnnnnnnnnnnnnnnnnnnnnnnnnncataataactaagtgaaaaatttttcttttcatctagaaaagaaaatttatagcaatacctctgtcaggaagatactgatttttaaatctactttttgt

SEQ ID NO: 155230 - DNA, 372 bp, Homo Sapiens
ttttattatgaacttttcaccgccgctacctctactaacttttttccaagccactgtatcattttcttgtattccaacttcctaattctacccttgctccttccagtttattctccaactagcaaccagcgtgatcctttttaagtaaagtaagatcacatcacttctctgctggcaaccctcctgtggcttcctttctcaaaggctgactttatagggcatgagggagttttgaaggagtgatagagctgctctgtatctttagtgtggcagtgcttacacagccgtgtgcatttgtcaaaacccatcatattatacatgaaaaagtaagattttactttgtgtaaattacgcctcaataaacctgacttt

SEQ ID NO: 155231 - DNA, 498 bp, Homo Sapiens
aaattcgtcattttattaaattttattttacatgttagagaatgttgctacagtttttacatacatgataaatctctcacttttcttatttgttggcaactgatgaaagtcaaaaacaatttatcacctgctgaggccactcgtatataaagactaagcctgctcttatccactgtgctttaaatcaaaactacatatctaacacactctcccttgcacatccacactctgagaaagaaaaggcaaacataataaatgtattcccagaaacagaggcagtccctcattcagccaaagcacggtgttctctcccacatttacctgtattgtctttcttaaagtataatggagaagcagtccagacttctgatggtgtcatccaagtctggagactgtttcatttaccatttagttagttgccaacctttgcttaagagtactcaaaacacataaacatgaatcattgtctaaagcacaacatagagttctttttctgtt

SEQ ID NO: 155232 - DNA, 487 bp, Homo Sapiens
tttctggtaagtaaaattttattaaaacctttgaactaccttggaactttatccatattaagatatacacgcaaaaaggcacatttccaaagaacatcattacggtaattgaatctttctagaaacaaaatttctttggagttagaaaaagagtgtatacagagctctcttttcaaatctgatcaaatgcgttaataaagcagcagttctttggcacaatttcctcagtgacaagatatgtcccaacttctcaaggtcttctttaaaaaagttataggtaaccaatgaccatctgagagccacttccaccctcccaagtgattttcttgctatgagcaactctaaggcaccactcacaacactggacagttctttaccctgtattctcagccagccatcaaagacagagaaagttctaactcccccttccccaaacttcaaccaagttaaccattcgttagctaaaagataaaggcttccaaagttg

SEQ ID NO: 155233 - DNA, 392 bp, Homo Sapiens
ttatgtttaacacattttattaaaagttggacatttatctggctcttaaaataccaaataataaacaaaatacaccaaaagaattttttatattacaattatcacattggagcaaaaatctagcaagagatatttcaggactacccgaatacagagtcccttcaagggaggatttgactgcttttgtggatataaaggagatactgttatcccttttgaagaagagtaataacataaataaacaggaagaagagaacaatagttctttcccagaagtctatttcagtttagaaagttctcaaagtaaatcctttggtatgtttttccaatatattcttcaaagttttaaaaacaaaactcctcctgctttatagtaattcaggatactgcca

SEQ ID NO: 155234 - DNA, 364 bp, Homo Sapiens
gcacgcgggggaacttggcttttaagggaggggatagcatgttaattgagatttctgtcctcagatctctcatccagccactttcctaacctggcaaccactgatttccaagcatagccttggtgcaagggcagaaatctgggctagtggtttaacatgtctgaaactttgggttaagtgttttcccagaagcttatctttccttccaggggtgggataaaaggagttaatcacccatgcttcttttccccatcctttgcccatctttaccacctgagggattcaggaacttgcccaccctcaagagcctcaaaggataggccagaattaaagtcagaaactttaatttccaaatatattgatc

SEQ ID NO: 155235 - DNA, 671 bp, Homo Sapiens
tttatttaaaattttgttttattaccaaagaaatacacattcaatatagaaaattaaaaaaatatgacagaaccatgggaaaataattaaaaacacctataaaacccaccacttcataataacctcagtcaacatcttggtaaatatgattaatctttttgcaatgcataaaaaatacatttttaatgagatttacaatgttactttttctaacctattactcttacataagaactaccttttgcttatcctcttactctacctttttaatggcagtaaagtattctaccatatgatatataatccatcaggctcaccctcacttgttggactgttagcttaacagtgacttttattaacggtggataattgcagcccctaaaatttaaagcaccttctcagaaaattttatttcaaagcttctctgagggtaaagtaaaagtcctcatgattcaaaaagatttttccattaaacacttgaccattttaacatttctaaatttttacatgctgcctgtccctcaaaaatctagctttttaaaaaaatttcaaaaaggtatagcatatctagaaaaatgtgcatttgggttgatacagacaggaaaatctagatgcttctttaacataaggtaggcaacttgtctctgcaaagatctggtctcagactctgg

SEQ ID NO: 155236 - DNA, 479 bp, Homo Sapiens
gggatttgatttttttattgtacaatcactttgtgccttgtgatatttatctcacccagctcagaggcaggcgattagcagctcagaggaaggtaaaataacgcactgtgtgaaccaagcatacaggacaattccagtttgggaccttggaaccttctacgccaccctcttccaccaggcccccaagaagtagggctgtgacacgtggccaagtcactcctcagctgaatattcactgaagtcactcctcagccgaaatactgctcagagctgctgcacgatgagtctggggccaaggctttctgcccttcccaggattccaggagcccccatgcacagcacctcgggcttgcccaaatgatccccaaaaccaagggcagaaaatttttggaaaaggccaagttctgctttcccagagctatcgggcctgcaaaacctcgaagacctgtacactctcatgccagcagacagagctgtag

SEQ ID NO: 155237 - DNA, 707 bp, Homo Sapiens
  misc_feature (393)..(401): n is a, c, g, or t
tttctctatatcttttatatattcttgctttttataaaataagataatctaaaataaagagaagccatgttttctgtggagcctgaatttgtagttaggaacatcagcagctccacgccgtgaagggttcagatattattgagtctccaagggaaggctatgttgctggtggtgccattaagtggcgtgtcctgatttgtgggcttcacagggccagcctggcaactgcagttgtgttctccaggtcagggagcacactggtgaatacgccgggtctgtgagttcccactctttcatgcccttatattgtgatcttttctttatgtggtgggatctcaggaaatatactccaactgtgtaaattctgtcattttcagattatcataacttagnnnnnnnnncaaatatagaaaacaagagttcatgtgaagtgggatgccttattctaccacgtgcttcatcacagactatttctggggagcatgtccctgaaccttggtagtgagcatggaaataccctcactcggggatggagactgctttttcaattggataaggcactcctgttgcatgcctgtgcagttgggagaggagggagcgtaatcactctcatcactccagataggaatgctgagcatacattgaatacataaattaatatacatatgatatgcaaatgctcccagagagtcctgaaggccgctcca

SEQ ID NO: 155238 - DNA, 864 bp, Homo Sapiens
  misc_feature (769)..(787): n is a, c, g, or t
tttcctgttttactagctgcattatgggttcatttgttgctctaatggagttaccagaatccttttagttgcttaccactaaattctccattgttcttgagagcaatcttaggctgtcctttcacacactctatttcaaataaagttcgttcctgtggggacagctttagaactctgttcttttggattatctctccccgctgggcaaaatatctgagctcctgttgtagagaggtaggcagggaaagcggcccatttatctcagaatgacacccctactttatgagtcagacactgagtggaagtgggagcttggtgtggaatctctgccgtatgaatgagctgggataagggcaatcaaggctctaatattctcaacttgtggcacctggagtagagtctccactatatgaataggcggtgggtggaggatgggaacctatgatcccctggttgcactcacgaggattttaccttctgtggtttggagctaagagaatacagggatgggtgggggatgggcattggttgtccctcttggtgggctgctgtagcccttccttggaagctgatgggagagagaacagtattttcttggccatacccacctagagtggaacttccatttttcttgtgctgataggaaggggaaggggagggctgaaggagttatgactcaaatatcatagacttcactgttcttgccaaggtatagtcgactttcttgaataaatatatgcccttaggacaacttccagagactctaaannnnnnnnnnnnnnnnnnnattttcaccagttatggctgtttcactgaggagctggtctatggcgctggcgctcctcacactgctaacttcgaagt

SEQ ID NO: 155239 - DNA, 734 bp, Homo Sapiens
  misc_feature (212)..(212): n is a, c, g, or t
gggaaaagaaaacctttactttagagcaatgtgtgacacaacacttgggacagaggaggtggagagaatgggggggagatgaacatctctctgccacacattgactaataggaatagtacattgagggcttaggaaaggctggggctggaggctagggaatcgaggagcaaaggcccactactgttccactttggcctgtaggaggtggtgntggggtaccagcagagagcacaggcactggagagctaggcttggctctccatcctggcaccaccacctgctaaccacccactactacctgctgagagcctgcagctcccaagacagacactcaggtgccacacttccctccactcagtgaccaagcctcagtggttctccttgcaaatgctcccatatccacttctctctagccttgccgccacacctcattcatgtaactatcatctcttcaaatatttattctgcctcattctctctctcttcaccttctgaggctggaatcacatgtatattagactgttattgtcccatagctcttataggttttgctttgttttgcttttcccccatcccagtttctctttgtgttttagttcagagaatttttattgaccagttcaagttcactggttcttcacctatgcctacctactgaaaagcctgtggaagcaattcatctctaatatcatgtttatttctagcatttccatttgactttattttttctttt

SEQ ID NO: 155240 - DNA, 543 bp, Homo Sapiens
  misc_feature (419)..(419): n is a, c, g, or t
  misc_feature (474)..(492): n is a, c, g, or t
aaatggtgaaggggttttaattacaccatgaagttttacaattttttaggtttttagttctggttttagaaaacagagtagaaggattacagagaaaaacttcaccattagacaagaagtcaaaatgattctaagggccgcgcaaacaggcttttccaagaattaatcatgaggtggtgcttggagaattcctttactccagtgactttgaaacccccttctcactctccactagtctttcaaaggattcatggtgaattgggtctaacgagtataacacggccggccgaaggcatgaagctcacgctaccctttcagggcggagaagttcccaggaggaagaatggagaaaaagatcgcagttaggcagtcctcccaacctcaccaaggctccacctctctccaaagccgcaaggctnctgccacctgcgccgggagaggctgcaatcactgtctcctcctctttctttctcnnnnnnnnnnnnnnnnnnngcctggggtgcccgaccaagcgcagcccgcagtctgggcactgccaactga

SEQ ID NO: 155241 - DNA, 398 bp, Homo Sapiens
taaattgctataaagacttttatttatgaaagcattattcacttgctattacataagaggcattcaaccagtacagctttgtgaactttgatacctctcaaccatctcataagaaaacacatccatgacagagtcagtgttgcaactctaaatgactgcaaagtcaatttactttcctaagtggctgtatttgcatcaacctattgaaaccatgatggcttggattatgacaagttttatgttcaaacgcattttgaaatatgaagggattaacagtaaaagaattattgaaaatactgtttgaatgagcttaagatctagaatagagctggctacactgatcggaagaggaaatgcagttcaactaccttgctctgctggtatatgttagtgaatat

SEQ ID NO: 155242 - DNA, 650 bp, Homo Sapiens
  misc_feature (492)..(492): n is a, c, g, or t
aatgagaatttgctatttactcagagctgggaagagttagccgcgacccatcacttgatttaacagactcataggcaggcaggggagtggaaaagctttacatatactgaaaaaagggagaaacttcaggttggctctgattggaggatgttggcatcgggaagttggaggagggctatactagaagcagggcttcttacgcgattggtgtgaggagcacatttggctttctctgattggcccagagctggaagcaggggcaagaaatagggaagctgccggttaaagattaagtcctgacccttctggccgattactgaagaggttatgggtaggaggtcatggttaggtttggccattctttgtatattcagtctctcaattgggtgaggattagattttgtttctcttgacctagctagcttttagctccaaagttttgtttaacttggaagaagacagcagttctattatttctgtcaaggataaacncagacattgggatctgaaaagtattatgggaacatacataaatatcttcatagtgagggtcaggccggagagtcaccctttgccttaagcttctccatttccttactgaattcctatttctattataactgacgcttcactagcttccctccctttag

SEQ ID NO: 155243 - DNA, 566 bp, Homo Sapiens
  misc_feature (268)..(307): n is a, c, g, or t
  misc_feature (332)..(357): n is a, c, g, or t
atgacatacctcaaaattatcctttttatgttactattttctcttgttctttcattaattattgtccttgataccaatttctaggctaaattggttactttcttttaaaaaatttaaaaatagatgaataaccacttgtttcatggtacttaattgagactttttcaagattcccctgatggcacatttgcagttgcttcaagactggatgatgtgcattgagttctctgttctcccaacatggctgttcctaaatcaggattctggnnnnnnnnnnnnnnnnnnnnnnnnnnnnnnnnnnnnnnnngtgacagagcgagactccccctccnnnnnnnnnnnnnnnnnnnnnnnnnngaacctaagccaacccagtgaaatggtagcaaaaaataggaaatataatgatcacattttttgaatcctagaccatcagcctaattcactgaggtgtgttgtgtatccctctattttatagatgattttatataagtaacagtggattgttttaaagctgacgtcattgtatgtggatacattctatatggaataaatgttatgtaaag

SEQ ID NO: 155244 - DNA, 840 bp, Homo Sapiens
  misc_feature (113)..(136): n is a, c, g, or t
  misc_feature (780)..(793): n is a, c, g, or t
gaaaatcattaattctttcttttaatcaaaattctctaggtctttcccaaccagattttcctggatgtctgcccaagactcacagtattatgcatattgtctccatcaggagnnnnnnnnnnnnnnnnnnnnnnnncactatacattgcattggatgcatgttaactcccttatcattcaagctgggaaacaaccccttgaggtgggaccagcattgactccactttgttgatgagaaacctgatgtcaagttactcccttaagggcaatagctggtgaatagcagtgttgtcagattcaaacttaatcaggctcagatcaccacaccagcacattgagtgctgtaattttctgcaactgttgagctaaattgttcctcgggttgggtcaagacaatggaaagcaacagcaacctgatagctctctgaaaacttgggacccaggcccagcaaactgatagctctctgaaggcccatgtatacccaggaagtggtatacatgagaggcatttagaagctccacctgtatacttagagaaacataaacccaataatagtaaacttcctgaaagagtgccttagagcttagattgtgagaggttgagaagcttcccaggcaccaaggttggaagaatccctttctgctttgttttcttttgtgttacccattttccccatatggattgaagtcctggggaaaaaaatgcgctcaatatgtaggttatcaggaaggggattgtcaatctcatcaacatttgccaaattgagaagtaggcatggnnnnnnnnnnnnnnactcaccactatacaaatgaggataggcatattttgaatggcttatg

SEQ ID NO: 155245 - DNA, 470 bp, Homo Sapiens
gttgccagtatttctttatttggaacatgctaatgccaagtcatgggcccccagttgggggcaggtgagagagcgtggaaggacgtggtcagtgctgctgagtcccatgatcacaagagggacagctgtggactcacccagcggagcctgttagcgctttgagaagtcacctcccaggggacacgtgagggagagatgggttagtaagagaggcagagtggtcaggctggtgccaggaggacgcccagagccaacaccaggccttccactgtgctccacccaggtggcacgggtgccttccacctctgtttccccttcatctgccacacagtgggacctcaggttatcatatggcaggtgcttaacagaactaggcacctgccagccacttcacacgcgtgccctcaccaagtccacccaacaagcctgcatagcaatgtcagccttgcttaaaagatgaggtcaggggg

SEQ ID NO: 155246 - DNA, 619 bp, Homo Sapiens
  misc_feature (396)..(437): n is a, c, g, or t
ggattgtatgaattcagcttttatttcagtcaggaaaaatgtatcaagctccaattgtagatcaggcagtgatacagctgatgttatagagagattcagagaggattccttctggggagaacccaccccaaggatatacggtaaaaatgagtacatagaagaggacagcaaggccactaaggagggatttcattgttctttcaattaatgatcctggaaaagtttcactccggttttagtttctctggtggtcagcaactgagactatagagtaaaatactgatcactgagatttagttttaaaaatacatatatatatatgttttttttaaatagaaagttattattccatggttcttggtgcttattaaaatgtgattcctattcattgcagannnnnnnnnnnnnnnnnnnnnnnnnnnnnnnnnnnnnnnnnncacatgccagctcattactcagaactaagaggcagaaacgttacatgctcaggctctgaggccaaatggcctgggtttgaatcccaggttcacatcttattagctctgtgactttgagccattgcctcatctgtaaaatcaggataagtagaaggatttaaacggtgtgatacttcccctcc

SEQ ID NO: 155247 - DNA, 471 bp, Homo Sapiens
ttgagttctacatcaagacactttattgctggggcctcagagaacactagagactaggggttggcggcctcaaagatccagggggggtgagtccaaactggcgttgctgctccttgtgcctggcgtgaagtctcagtgctgccccatcccactgctgcttgatggctctcagcttggccaagagcctgtccagactgtcgtgtaagatttcctcatacttcgcctccatgtctgccatgtgggcccgaagctgagccagggcctggtcccgctctccgagagcttgttcagcctcttcccgggcagctgcagcctccctttggcatgcctctagctgcccccgaaggcctttgacttcttcctccagctgcttgctgcgggtttgcatatcctcctgcagggcatggcactggcgactcatctctggggtgggggcagtgggccaccagggacccaggttggaggcggagg

SEQ ID NO: 155248 - DNA, 690 bp, Homo Sapiens
ccctattgaatatttggattattttcattgttttgaaaaatagatattaagcatccttatacataaatctttattttcttatattacatttctgaaaatgagactagtggatatgaacttttaaaagatcctttaagatggaaaaactaaggttcttggaaaacattgccatattgctactcacaaagcttttcattttcattcctgctagcagttcatgagcttagagcgatgggatgcatttacctggccttaagatgctcctgctgcaatgggaagtgaagccttggatagctttcctcctcctgtgcaatactttcttgtcattttcccacctgcactgagtcccaccgccagtcagggctgttttcaggtgtatgtgaattcatcccagcagtgtgccttctgctgccttttcctagggaactgaacatgttaaatcacagacgcgatgtggcactgattattgttcctcaaaagaaatgcgtgtctgaagatagcctcttacagattcctcacgggagtctctgttcagtgtcattgtaagtttctcagaataatcgcaggcgctctgatgcagcctggtaaagaagactcagtgatttctgggaactgcaaatgcttgccagctttccttctgtctgtggaaacactgaataaatgtattcatttctcctttaccagcaaaaa

SEQ ID NO: 155249 - DNA, 782 bp, Homo Sapiens
  misc_feature (348)..(384): n is a, c, g, or t
ttgtctatggataatcttttattttcagtcaggactattgaattaagggtttccagggaatcacaaaagacggttgtactgggcgggtagtatttaatatgatcaggtcttaaataagaagccataaacatgaacatttaaaatcaaatatataataaataattattaagttataaactacatagttcatattagctaaattctcagatgcatatgtaaatacaacagagcaataatatagaataataatgctacaattttatacaagtgttccaagaagacactttgaactaaaataataaagatcatgattaattttccctgaactctcatgacctataataatgnnnnnnnnnnnnnnnnnnnnnnnnnnnnnnnnnnnnntcttggaatatgtcccttgttcctgcagtgagtgttgctacaaatgttattgaaataatactgagcaactgaacatcagactcagtagaaagttttactcagaagtatgatcagatgtttctgtaagaatacccagaactttagatattcatagacatttaaagctttaaaaaagaaagaatagacattagagattaagtccagcactctcattctacagataaagaaatggaaacccaaagagtttaaacagtgaccactatttcatagtcaacaaaatttcacgtctcctgtattactgtccatagatgaacagttatatttatgggttatctttatattccttttaagaactggccatcttgaacatagagcagtgaagatggagctgttcaagt

SEQ ID NO: 155250 - DNA, 705 bp, Homo Sapiens
gttcccaagattaacctctggggacgtctagactttatgtctgattcaaagaatgaagaggaatgtgagtgaaatgccaacattttgtccccactcaaagctccaaaacaaaggccttctgtgaggaggcggcagatcagagcaacatgaacacactgggccccccattcccgaaagttccctgtgcccacacctgtgaataagaggggctaagctgctgcctgagcatgtgtgggtgcatgtgggctccggagacccagggtgtgttcattaactgttccacgattaaggcgggcggcactcattactgcacacatcagcggccatgggggaccattcttctaagacagttgccacagccaagagcgcccaggcctatggggacggggactgaggccaatgacgtcacgactctgctgagactgagcgcctcttaggaggtggatttctccggcctcaagtactggggaccctcggggactggccaggccagcacatggggcaattactgcgtgtaatgtgcccttacagaggcagcatttcctaaacacgcttggtaatcggctccttcgagagccccagctgcctcccgaggctggctccttccaacctcttgaaagagacctggaggcatttcagggcctggttattttgacaaagccttctcttcaggccattatccaccagacagcgttctctctagtt

SEQ ID NO: 155251 - DNA, 876 bp, Homo Sapiens
acatacatatgaggtattttattttttctgattattcatataaaatagagtttttcaaccccagtgctgttgacattgaggctgtatgagtttttgttgtgggaggctatccagtgcaccgtggcatgtttatcattatccctggtctctaaccactagatgccaatagcactttcctacctcaccaccccaagtcattaaaataaacagtgtcttctgaagttgtgacatatcccctgggggtgccctagttgagaaccattcataaagaatctattactttacagcatgttagagagaattaaattcattttcataatatattttattattcaatcatctcaagcaaccatttgaagtcttcaaccaaaggaagacaacagagttttgccaaacagataatgcaagacatcatatttccccaaaattattaaatgaaaccatgtacactatcatttgatgaagcatagaaaatatcagttacctctgtgtcatattcatgctactcatagatgacagagttgactaatcaatttccttcagaaattcaacaacagcaagtatcaggtgatttttgtccactcagtagagtctatgtctcattaagctgggcaacgggcagaaagattacagatcggtactggagaactctgttggtttttaatctgtttacagataacagcttttacctttgtgcgcacttctaatactagtatcttttaatacaattatctttcatgtcaggcattttttaaagttatatgttgattgtgtagatttccatttcaaaggggaaaagcaacggttagaaacttctgaatggaacataaacaaaaccaagcattttttcatattggtccattacactgcacgagg

SEQ ID NO: 155252 - DNA, 560 bp, Homo Sapiens
tcataattaatctatatattcaaatgttatttattaaatgccaaaaaaaactacactctaaaactattatcccaattacattttacccccatctccctcagaccccgcacctacccctcctcccacgcccccaacttgggcgaggcccggggtcaggtgagacctcgcaggtgcctctccttccttctgctcacctcaccggggccgccttgcccagaagccggaaagaggccttcgggtgcgggggtgcaggttcacttcggccggagcattcacaccaggcccccacctcggggcttgggcaaggggagagggcagagggagaagcggggcgcgtctaaagaggggtctgagggatgcgcatgaacctttaggggcaggtcactgtgctggaaaacgtgtaaaagtcaaagtttaataagccccatttaatcctgcttagcccccataactttgttcaccagtgagcccctagaacctcgtccactgacctctcggtcccccatcactcaacccccaactcccacttcactcatcccacagaactccccatcactcag

SEQ ID NO: 155253 - DNA, 490 bp, Homo Sapiens
ttgcagggaaaccaaatttattccagttgacaaggtgcgtgggcactgggaacaacgtgggtgggggcacagcctcctctgtcccggccgaaatccagtcctgcagagatttggagcacagagcatcagggccgcctgtgaggcacagagcgaatggggcaccagcctgccctcggcctcagacacggagaggctcccacggcactgagccacgcatggccacgcgacagagggacagaatgccgtggccgtgtaggggagctgcactctgcgtggccctgggatgggaaaatccagggaaacagacactgttatggatgtgagcatcggctgccagaacgagaggaagcagaagaggggaaaaggccgattatcgtagaagagttaggaaaatcaatcaaagatacccccttgagaacagttaagttcacagctgtgagttctggaaacctttatgttttaaaaatgattccgaggactcagagggtaa

SEQ ID NO: 155254 - DNA, 794 bp, Homo Sapiens
agccagagatgtttgtatttatttagtacagatttaatgacaaaggcttggagcaaacacaatttgtgggtaattaacattgtcgaccccccgagtagagagcagtcctgtgtgcaaatgatcaaaggttgatacctggagacataagtaaacaaattcatccaaataaattcctttacattcccttgttatctaccctttgcccttccgaagttttgcaaaacgtcctgaccttctaagaaggtttgcgtctttccttataatttctcccgccaccctgacacatctcctatacgtgggcagaaggggcaactcaggcccaaagaatgtccacacaggagcaggtcagttcagtacccaccaagcaaaggacaggcatgtggaacggtgagccgggtgtctgtccaacatactgatatgcatctaactcaaagcattcctaccagcttccctccctgtggaattccatttaatacccctgtttattttatgcaaaatccatcccgaaataaaacttgtcagatcacataaacctcagatagaaatcaaggcaaattcagagcttttcttgagaaccgaaagattctgaaacagaacaaagagccgtgtgtaaagtatggagtttatctgtcatgagaatacactgggaaattatttatagaggggaaaatcaagggagggagatgcatttcccattagctcatcaaaactgtctcattgattgcaggggctcgaaactcagcctcgtgccgcctcgtgccgaattctggcctcgagggccaaattccctatag

SEQ ID NO: 155255 - DNA, 265 bp, Homo Sapiens
gctgactcttgaggaacaacgaccgctagtgtgtgcccattctttgggcctgatttgccccgactgctacgaataggagatgtgtcagggtggtgggagaaattataaggagagacgcaaaccttcttagaaggtcaggacgttttgcaaaacttcggaagggcaaagggtagataacaagggaatgtaaaggaatttatttggatgaatttgtttacttatgtctccagatatcaacctttgatcatttgcacacagtagcgaa

SEQ ID NO: 155256 - DNA, 468 bp, Homo Sapiens
ctatgattagttctccttcatatggttacggtttttaatttgcaaggatcctgattttctctgtcctggtttatactggccctgctgctttccacagcatccagatgccaggatgactatacaacagccgagaaagatgacagaggtgcaaagggccacagaaaccagccaagtctttgaagtcacagatacctcatcttcatttgcagatgtgtggtttctgctattgtatcctttggttttgtttagtaattgtttgctactgttgagtccaggtggaacaggcatatgagaaagttttgtgtctatgggttcaaagaaaggagaaatagtcttattatctggattgctgatgaaatcagtacttggtaacaccttatttatctttgtggtaatggactcattcagggaagtaaatcttgcccaaaaatctgtggttaattccttagaataactggtactgtttgt

SEQ ID NO: 155257 - DNA, 660 bp, Homo Sapiens
  misc_feature (50)..(59): n is a, c, g, or t
cgtgtaaagacgtttattggttttaaagttttattttctagaatcattgnnnnnnnnnnctcattagggcagtgcctctagattatttgactcatgcactcaccatcttccagtggtaaacatttctttcctgttgatttatgccacatgcgtttttttctcttcttttgaggatcacagaagaggacaactctggaaacaggatacaccaaagtctccccatgaattgcggtgagagtctgaaagttcgcagtcactcatggtgtacagatcagcatcctagcactgtcataatggcaaccacattcatgaaatgaagtcacgttgtagagaaggcaggcaggaatgaaaccaagcacatcaggtgacagcagtttctgtgttagttcaattagtgtcatcaccagtgactgcccaaggtctagaggtacaaaacgattgcatgtctacaaagtaggacagtcacttaatttaccaccagtagaaggaaagagaaagccacctcctggctttaattctgcgagagacacagggtgaattggcggttgggggcagtgcagggatctctttatccctccatgcggccttactgacctgggaggacggcctcgcacctgaccccctcattgcactctatttgtctagccttatcatgacctt

SEQ ID NO: 155258 - DNA, 446 bp, Homo Sapiens
  misc_feature (255)..(267): n is a, c, g, or t
gaattacatatttttcttcacatgtcactgttagaagtaaatcccaatagtaagatttccctaaacaaagtatttcttgtaacatataactcataatatttagaaattacagactttaacctttagaataatcatggtttgttttgtttttgaacttactacctcagagtcacatggtatatatcccctatgatacctgtaaaagacatctaaattggtcaattcttaaatattttattgtgctaacacaaaagnnnnnnnnnnnnnggagtgcataagatacagaaacaattctttatgatcttacatctctgtttttttaatattgcaaataacataccactttgacataggcagtttctcacttacaaaagtaaaatttgaaatgatcagtggtcaccccatctgtatatttttgccaccactaccagaagagccatgtcatt

SEQ ID NO: 155259 - DNA, 266 bp, Homo Sapiens
catattagagaaaatgcttactaataaatatgggaatttttcacaaagagcaatgactttattttgcattggagaactcctggagataagctgtacaaattgaatctatgtggaaatgctttcagtcttgttactatcctattgcacattagagaattggtcctggaagggaaagaaaccacagattttatttcagtacacaaatccatcagattttcttcttttcatgaattcctacagaagtaattggcctgagagcattcttg

SEQ ID NO: 155260 - DNA, 540 bp, Homo Sapiens
  misc_feature (417)..(478): n is a, c, g, or t
atagttaaacgtttatttctgctgtttcatgttttatcacaaggaccaaaagacccagaatgatttgaatgtagaactgggaacacagggagcctataggagaattcccccaaatgaacaggtggctaaaggcaaatgcctctcctgacacatcagagctggggcagtcccaaatgagagctccctggggaggccccaggctgtggggcggccacctctggagtgtggattccacaggaactcagaggagaggtaagggggaggccttaaggccccggagctgagatgatggaaaaccagagtctgtgctgtttcatggagcacctgggggaatctggaatgggatcctctatcccatgtcacctataagagagatcattggcttggctttctttccagaagctgggaaatattccnnnnnnnnnnnnnnnnnnnnnnnnnnnnnnnnnnnnnnnnnnnnnnnnnnnnnnnnnnnnnngtaaagagtgttctgaatggtagagagaggaggtggtgtgcggtgtttcagcttgtactcaa

SEQ ID NO: 155261 - DNA, 396 bp, Homo Sapiens
gggaagtctattacatcctcgggatgactgaaaggttgcctcctcccaatgccactgtgcctggtgacatcacctctccaatcctactcagcccctctcaagtttgtctttctgttttgtcctctttgatttccatcttgatagaaagtttatgatactcaagagaacaaattgccccttgacagggtgtcagaatcgattgtactaagtcacgcacctttggcagttcaaccgtgttcctaatagttaaaaccataacccattcgggaggtgtccacaccgtcccttcccatccttccagtttgccccacacaactggggctttggatgactggactggtacagggaagtcagccaacacgatgccttgggtcacttcacctctcaaggagatta

SEQ ID NO: 155262 - DNA, 527 bp, Homo Sapiens
  misc_feature (323)..(323): n is a, c, g, or t
aaatttaagccacatggtttatttccttctgtggtgtggatgagacaagccatctcatctaccaggcctggtgaacaccaggctgacagtgtctccttgtcccctggagacgaagcccaggtcctgtggtaaccttctgtggtagccttgtccttgggctatgggggtggggaagggagtgctgagaggcacagggaggtcccaaactgccactgctgtgcccctgtcgatgctgactgtggtggtgcctcaggagtgggttggcggcagctctcccctgcaacctcccctccactgggagatggtagggggtggggggcggngccaatgctgacttcatattacagacaaggaaaatgagggtttccaggaagcagggggacaatgccttgcctagacccaggacttcagggagcctggggagctggaagggcctgatgaaccttatctggttcaacactctagtttccaaataggaaacctgagttccatggatgtggcaacagatgacaaaggacagagctgat

SEQ ID NO: 155263 - DNA, 424 bp, Homo Sapiens
tttaatttctgtcatttattcacgtcataatccccaaagctacctttattccacgactctttccaccattttcctacagtcagctttttttaaggctatagcctttaaaaacttgaaacagaaaattttaaggatgcaaccattagaaaatgttcccatactaccatttaacattccccatttatcattatgtttactatcgtgtaatttccaacataatattatgaggtcaaaggctctacgaacgccgttttacaatctacctagggaggcaatggctgtgaaacacaccacaccaatgacaggaatgcgggtcactgtgacacaacggatccctctgcaaagtcaaagctaagagttcactttacgctgacggagcttctttccaggacccccacccccacccaaggacaggagagtgtcg

SEQ ID NO: 155264 - DNA, 403 bp, Homo Sapiens
  misc_feature (300)..(317): n is a, c, g, or t
atgtttcttcggattccttcaaactgctacagcttctgtgtctatccctgtcttccatgtgcttgacagctttgaagagtacaggtccttcattcagtagaatgaccaccaagccaggtccaccagatgtttcatcatggttttagtgaggttataaattctgggcagtaattctacagaagtgctgctttgtttttctcagtgcctcacacccagtggcacatatcatcaccactggtgatgctaacctcgattgctcaaccacattgtctgccagctcctgcctacttaaattcaacnnnnnnnnnnnnnnnnnngtgttttgtgggaacatattttcatttctgaaattagtcaatatcctgttccttatcaaacttccaactctggtcttagcatccat

SEQ ID NO: 155265 - DNA, 661 bp, Homo Sapiens
tttaattatgataccgaacatatgtatgggagtgtatataaggtgcgcatacagtttcaagagtaaccgagaatgcccgcgcatccacctctcagctcaagaaagagagtgtgactgttgaaggcctcccggtcatgaatgaattcttgttttttaaacatggcagcgtccagaataaaacacaaaagccgcctttattgccctctttcttctccaaggtaattgttgttaatgtttcaagtacgtgcttccagaatttgatctttaaaattgtttggttttatttaaacaggaagtacgcacattcaaaatgggcctcaaaagcagagtagcctagagggcgaagcgcacccctcttcccagcagccttgtcagcctccctcattgcgactgcttaaatgctgagcgttctctgggggccgcccacacacgcacagcctaaatgcatgtcccccagcacacacctgtgcgcacggctgccagtcagcctgtgtagttctgccccgggtcccactgtatggatgtaccataattgctttaactagcactcagttgaagagctagttaatcgtgtcacctacgtcattccagttcatgacagctaaaatgtgtctgatttttcctgtcagtctaattatctttccttaataggtaatgtctt

SEQ ID NO: 155266 - DNA, 522 bp, Homo Sapiens
ctccttttatgggtaggacttgggtgggtggagatgatatgatggggatggacattagaggggaagtcattagtgagcagagagctaaagatgggaaaacgcggtgtgtgttccggggtatggagagttattttctccagctagactttcagaagaaggaaagaaagagagacaaaaccagaagagctgaacaggatcaaattgtgtaaaatgatgactgctaggaccccaggaccagtgctcagtgtgaaccacagtggcactgggagggcctgggagtaggaaaatcagtgaggaggctctgagcttgggtggggcagaaagggtaacttttttatatttgctgcttccgaggctgcagtaacaatacagtccctcagtcacctcttccctcatggttgttcccactgtgtgtcttgctggtttctcctcttggtaaacctccaccatcccccggagttgtatcttttgtcttcctctcctccccaaccatctcccttcattacatatcttaaaaatgtc

SEQ ID NO: 155267 - DNA, 795 bp, Homo Sapiens
  misc_feature (22)..(22): n is a, c, g, or t
cttttgatatttactatcaganagtttgtaaggagacaccttaattttgcatatctggttgacaaagataaacacgtttggaaacataggtgattggtaaaaatgaaaaactgggcatcttgtatacatcagtgtaaggtaatttggtattgtcaatcaaaactgttacaaactttggtcaggtgcctctgagccttctcaaccgtgcctcggccttggcctgtgatatggtttggatctgtgtcctcacccaaatatgttgaattgtaatccccaatgttggagttggggcctggtgggaggtggttggatcacaggagaccaattttatttagatagtgactacctatcttttaactggatctctgagctctgggaagaggccacactgaatcctgggtctgcaaaaagggagaattattatgaggctcgaccacatggatgcttttacagtgtacttaaagaacattaaaaaaatatttctaagtgtctaaaatatactattccttaaaaatgcaggagtagcttctgttgcaataattaataaacaaaaaaatcaggtaacacaatacaaaagcaaacagtttaggagctgacatgaacttgtgtgtttacactcttggggatacacaaggaaaaacaattttctccacaaaagggagtctggtgccttctccattttctttaaggagcctcaggctattataaactattttaggtccctcatgcagcagagcgttcaagggaaaggagagacagcagaactatatgaagaaaatagcattcagtcaactg

SEQ ID NO: 155268 - DNA, 623 bp, Homo Sapiens
  misc_feature (560)..(569): n is a, c, g, or t
aattacaaacttactgttggcaggattgatttctttcttttcactgcatctctgaaaaatggagtggaagaagagaaccggcatttattaagtgccaaccgtgtgtcaagtcctatgctttggcacacgttagatctgtcatttcctaattttctcaacttctctgtgagataggcattattatcctccacttacaaattcaaaactgaagctggaaaagaaggaatcggtaagcctgtttcaaaccttttcttattctctgtcacactaaaaagtatcttccacttatattgtgctttgcatgtacaaatgctcaattaatgttttcaatatttaatttatgaatttgaatcttaataaaaacactccagagctatatgttactttttcgtaaagataattctaaaacattaacaggtattctaagaacttgaaagaatatttattaatatgaaaaggaggaatttgccttggcttttggcaacaaataatgaaattattttaaaatgtaaaaatttgtaatttttactttttcaaatgggaggcagtatagtgtgatnnnnnnnnnngcctcgtgccgcctcgtgccgaattctggcctcgagggccaaattccctatagt

SEQ ID NO: 155269 - DNA, 538 bp, Homo Sapiens
aaggcagattaggagatggccctaaagtgcttaagtctaccatttttgcactcccttgacctacggttgtcaaatgtttcttggtgaggatggagatacgtgacaatgaacaggcctttcttgctattaaacagatgggtggttcatgtttcatttagcatttattcaaaagggtttcccccacaaactcaagcaataataataaagatgtattactcctttatgctatgttatctggaatttattcctaagtatcactgaagcaagactgcaagtggtttgtgcatttatatatcttgaatcgctatacattagaaaagcatagaattgttatttgccctattacaactgcttttgtattaggtttagaaatcttctcagtttttgtgcaatcctgaaaagaaaaaatgaccctttaaattctattcactgtctgatgaaataaatccttgtgtaatttgtgagggatgtaccagatgaaacaattaggttaccagtgcctatagcagaacaatatttgttaatgttttgtttcata

SEQ ID NO: 155270 - DNA, 724 bp, Homo Sapiens
  misc_feature (650)..(658): n is a, c, g, or t
cagaatggtatattttatttgacaccatttataaataactttgaagacacaataacaatattattgtccagacatacaaattaaaatatatgtaaattatttaaaatttattaaagtaattgcctttggaatgagagatggtaatgaaactattgaggacttcaacttcatctgtaatattttataactttttattctaaaaagatttgaaggaaatgttaaaaattagcagatctgtgtgggattattctttgatcacagtcagatttcttggaggcaagaaatacattttcaatcattttaaaaatagttatgttttaagggcatacaggtttatttcaagctaatttttgtcacatatatattttctttgtatttatacagtttgtgacattatgttcgcacattttacttaaatattactgattaaatagcaattttttcaattaaatgctgtttttcaattaaagcttctatataatgagaaacttttaaggtcaaattttgaccagcagtatttacctagaaacttgcattttgactcaataatatggacagtgctttggaatctatggaggtgatggttcaccagtaaaatcaaggtatattttgcatctaactgaaaaacacatgccagagctaggagagcnnnnnnnnnggctgagtatatctaaagcacaggccaaataaaatcactaaagcactaacatctgtgaaaaagttt

SEQ ID NO: 155271 - DNA, 505 bp, Homo Sapiens
accattttaaccacttctttattaagaatgaaagttggcaatataaagttgagtgcttcaagttatgatctgttctccttcagctccctaccttttgtcctttgggtaattcatcaccaagctctctgtgcttgattagagaatgcatccttaagtcttatattgttcttgaggagaaggagggcagtggaaaagagagggaaggtatggaagtaagagtcaccaaaagtcagaagttggaaggaaaagtggggagacagagactgaaagtgtaaaagtaaggaagtctttgcttaaggtagttgaggtttatctgctgagctgattgaggaggcagtgcgtctgagttaaaaaggcttgagagagtcacttggcataatttctccatcttcaatgatttactactgaagtgcaaacatcaattttggattctctcctgagaaacgtttaacaaagtcagtgaactactggtaccctgatatctttttagatttgccaaactttg

SEQ ID NO: 155272 - DNA, 701 bp, Homo Sapiens
  misc_feature (611)..(611): n is a, c, g, or t
  misc_feature (613)..(613): n is a, c, g, or t
taagcagtgttatttattataatgtttatatgaatataatttattaaaaaatggagagctccacaattcaaaatttaagaaatgtctcacctcagattcacagagtaattgccttagacaaaagctctacactcatacattttatatacctcttttatatcctctcattcctaataatgacagattaataagaactaatagccatcctggttttcagtatgaaacaatgtgatttcatgtgaagaagaatagaatagtaagagttaggaccaaaattacttagttctttgggcatgtgagagaataggaaagagctacccagaattttccagagctcacttgataatgtcaagagctgcagctggcagtcactgattctgaaaataggcacacatcatgttaatcaaaaaactaaataaaaggatattgggataaggcactaaaataaagttccttttgccctttctttatagctgggttttgctgatcaattctgcattttttggcaattctacctctttacagggagaaccaccagtattattttctctttaagtaactgaatatatatttcctatctttattgagctgtctcattaaagtaacagacngngctggatcactggggatatgactttgggatatatgttttaaaataggcacagaggctgggtgcggccgctccaacatcagaatggtaa

SEQ ID NO: 155273 - DNA, 587 bp, Homo Sapiens
acagcagttatcgtttattgagcactttctatatgctgggcactttgccatgcgcattacaactattttgaaatacttctatcccctactcctccctccttaataaccgaggggtgccgctgcgtccagggaggtcaagttcttgcccaggatcacacagccgggaacacacattccaaaacccacgggtttaaccgcgaaaacccgtttgctccttcctcagctccccatttaaataacgttttaactttattcagcaggtttgctcatctcccaccccaatcgtgactccccagaccgggtctccacagggaccaagaggcctctccctcccccttcgccgcgggagcagggaagggccttcggcagcaacttgttccacctccccaaggttcagacgcgaaactgagttccagaaggaagggcttacgcaaaggcacccagcgcgccagaagaggggtgtccttttccgtgcccggggccagtcccggggccagtccggagccgcggcggtcacacctcggactcgcgcggcggtccgcgggcgcgctggcagccgtacagccactggatgacgcgcgcgttgc

SEQ ID NO: 155274 - DNA, 337 bp, Homo Sapiens
ctgaaatactattttattaatacagtctagatattgaaaagtaatcacaatcttgatagcataaatacacatctgtacattttaggaggtaccatggcactgtcctcacaggaagacacactttaggcatgtagactggccatgacacaggagttctggaggagtttctcaacttgcctttacttctcattcgcctccatacattatacatgggaagtcaacagaatgaaataagatcttatttctaaggttaattttggggcaagctcaacataacattacaaaaataaagagctatatttagagttacgggctgtccgagacctttagtacattt

SEQ ID NO: 155275 - DNA, 722 bp, Homo Sapiens
attcctgttaattttgacaagctcagcggctgaaatctaggaatggttactaccaaaagcccacccaatccagctcattttgctatcgttttataacaattaatctgcattatatttggatccagacaaataaagcaattataaatgtatctcactttagaacagacaaaaaaagggcatgctatggaaattgtttaaatctcaagcaacaatgctgattaatttctggtcaataatcgttctatagttctccttcatgaagcctggtgaggttccaggaaacagcttgatttgggaagcctcagcagaaaagaaagcatctcagaggacacataaaatgtctggcaacccctcttggcggccctcatccagcaaagcttgtgtggtcttggcaactgtcctcaggactctgctttcaagatgaaagaggtgtagcttacccgctcaatacaccaagtacaagatttagtacgaaaaatgacccaaagatgacgagactgacaaaatacacccagggcaattcaaatcccatagcatcattcatctgcaagaaataagatggtctcataggagtgggttaataagaggatttaataaggagagagggtcacattagagacagcattctatacatttaattaaacatttacttagatttaaatcagaaacaacagtagccaaatcagagacaacagcagccaacacacattaatcacatattc

SEQ ID NO: 155276 - DNA, 469 bp, Homo Sapiens
  misc_feature (458)..(458): n is a, c, g, or t
tttggttttgtttttacatttatttaataccgtttttcaataaatcaggaaaattattgattggaagatacattaggtaccactaagaaaattatatatataatttcaagatgtactataaaatggattaaaattcacttatattaaagggtagaaaacatcaatattagaatctatgacatgtagactagctaaagattcataattgaataatgcttaacaagtcctccgtgatgtagcaagcatgggtactattgtctacactgcagaggtaaggcatgagagtcactcagtccacaagtacttattaagcatccagcaggtgccaggtatgatgccaaggtttcagcctggttgatgtccatttttcttaagacttcttgggaaggctaggaaaggaggcacgtacggagggtacagattgaccttcttgagtccagaatagcagatattaactntataacagctt

SEQ ID NO: 155277 - DNA, 499 bp, Homo Sapiens
accttgacaaatatctttattttgaataggtttatgttttcccatctcaaattgaacattagaaatactactgtaagtttgtccaatttatacacataagatatatttttgtaagaaagccttggcataaatacaacttaggaaaaagtaaacttggcttaaaacttaaatctgaacattgctcattgtgtaacatgaaatattttaaattataaaaatgcatgtgtgtttgtttctgttttatttctaagtaaactgtaagtcttaacaagtgcataaatattaatttgggaataggtatttggaaatgcctaatagataaaatcatattctttgatatcatgttacgtgtaatgatatataaaattgacttagtggacattctatttaattagaacatggtttaaatggatactttaatatgtgtaggcattactcttgctgatatttatttggtgttatttgttattcatgctattttaatataagttgcaacaaa

SEQ ID NO: 155278 - DNA, 547 bp, Homo Sapiens
gtagagatgggtttttgctctgttgccctgcctgcttccactttctcttcagcttctcccttgccacctgctggcttccccagtcccatcccgcctgttgcatcccatagccccactcccacgcccctgaccatgacttgaagccatgccaagtgaccaagatgtcccatcctgagttatcctctggctgacttgtatcttcttctgtggctcctcctctttctgtgtccctcaggtgggcatcaactaccagcccccgaccgtggtccccgggggagacctggccaaggtgcagcgggccgtctgcatgctcagcaacaccacggccattgcggaggcctgggcccgcctcgaccacaagttcgacctcatgtacgccaagcgggcctttgtgcattggtatgtgggagaggggatggaagaaggagaattttctgaggccagggaagacttagctgccctggagaaggattatgaagaagtggggactgattcgtttgaagaagaaaatgaaggggaggaattttaaatatataccttccccttt

SEQ ID NO: 155279 - DNA, 360 bp, Homo Sapiens
ttaatttataggagttttattggcaggatacagtggactttcaggtaccccgagcataggaagtaatagccacataatctggaaagttagcaggtaatggcttttccatctctttctgatttctggcctcagttcatttagatatttatggattcctcctgcagaatcacttcctctgaaaggctcttggttttttattctccatatctttggctcgtacggatctttggcttgccatggtattcgctctgaagcttactatgatcttacttctccagggtcattatcacccagttcccttagtctgtgtcttttatttgtttgtatgtatgtatgtgtgtatttatttatgatggagtc

SEQ ID NO: 155280 - DNA, 497 bp, Homo Sapiens
  misc_feature (148)..(166): n is a, c, g, or t
agctgcttttaatttgcctttgttctgtagtactgcttggtgaatcatgcactagtttgttgtaaaattcatgtaaacttttatgtatacaaatgtcagatcaagcacaggttttattaattatatatattttaaactgccaacagcnnnnnnnnnnnnnnnnnnnccccagaggccaataagtgaaatgcaataaaaaatgaaatttattcttttggctcaataatgacgtagctcaccattctttttagcaatagcaattccctgcatgcagttcttcaatacactacagtaaatagttttgtaaaaagaattaacattaaacttttggtttgtgcaaaaaacaaaaatttatatcatgttaggtaattgcacaactttgccactttgttcatggctaaaaagaacaaagtccatgttatatttgtaatagctttagtgcagcaggaattaaaaaaataagactagtctgcatacgtaaatactacaaaagttga

SEQ ID NO: 155281 - DNA, 212 bp, Homo Sapiens
gaagcaccccaacttgacatccctgtgagcctaaggacaatgagctcaaagaagagtgtgctctgagaacgggtgccttcgttatacttgtatgctttctattttcacacacatacatagacaagcatatcagattctgcacccttgcgggtaagtcacctggcctgtgtcatcaaaatgtagcatatttctgtacactgtatgttattctg

SEQ ID NO: 155282 - DNA, 429 bp, Homo Sapiens
aacttgataaccacagaaaacaaaacagaatttctattatagtaggtactttccttgctgcagcaggaattattcagtctgaactgggcatttcaatgcgtggtatttttttcctttcatttttgcaagtaaaaaaatcatatttttatgctgttcttcagtaacacacagtctctttgaataaactatttcttttgcatatttgacacttgcatatcttttgagtctacactagtgatgtaaagaaagcgtgttcctcctccaaccctaaaacaatgctctgagttcatgctgttggctgggtgcccaccttctgaacccttcccagattgccagggggcaattagaattgagtacaagtggtgcaactcaccctgatggtatctcaaaataaaatctcaggtactatgaaataccgaagtcaatgaa

SEQ ID NO: 155283 - DNA, 485 bp, Homo Sapiens
atacaattactgttacctctttttaatattgttgttcatactgtgtgttgtttctccttatgaaagcctttcagagctgagagaatatacagagggtctcacggaagccaaggaagacgatgatggggaccacagttcccttcagtctggtcagtccgttatctccctgctgagctcagaagaattaaaaaaactcatcgaggaggtgaaggttctggatgaagcaacattaaaggtaggtttcctttgtaagcatctgcagtaaccaatggcttattatggctgtgtggccaccttagttgggccagaggggaagtagcttgagtagcctgctcacatcagacccaggttgcgtcctgtgatggtgggacactgtagcacttgaccacagtaagaccttccatttgaagagagccttttagcttgtgaaccactttcagtagattgacttcttgcatcttcttttgtcattttataaatgagaa

SEQ ID NO: 155284 - DNA, 432 bp, Homo Sapiens
ctctcgggccctgttcgtccttgtaagtgatcattagtgctaatgccaggtcacccttctcccgacgtgtgccttcacataagaggggatgttctgcctcgctcactgttgtcttcatgcccaaggcagcaactgctgcttcaaatccaagctcctcatccccaggtgtctcgctgttccagttgcgacttgggggccgggaacctggagcacagagaacgtcaaagatgaaactggccagcatgagaggcaacacaggccgatagtcacagagtgtcccctcccgaagttcctctgcccggcaccgcatggtactcatctcacttggacccagagggatcttcttgagcagggcagccacctcagactcctggtatgccagcttcacctccaaggccttggtagaagctggaggcctctgtagctccaagg

SEQ ID NO: 155285 - DNA, 353 bp, Homo Sapiens
ttttttactttttcctaaccgaatttattttaaaagtaaaacccaaaggaggaaacaaactcttcagttgtttcaataaattgttccttaaatatccccaattcacaaacaaaaccccacaagtagcaccgatttacaacaggatgtggcccagaaagcaggaagggggccaagagcgctccagcaggaagcttaataggtggtccatggagaaaaacacgatgggtgcatcacaaataggtgtaaacagtacacttttgtaatgtgtagacaccagtttctgcaacccccatgccacgcaaagtttcagggaaagtctttgaaagtacaatccggaaaactcagcaattctt

SEQ ID NO: 155286 - DNA, 457 bp, Homo Sapiens
ttgcgaactatttttggaagagaaaatatcttaaaaggtcaaatgcatgtgtctgtcaaacatgtatgtgcctagttatctgccaattcaattgtaacttcctgaaggacaggaacgcagtctttttattcattttggtgtcccctcccccaaccccagtgcccagtgccaacaacattaggaagttgcccacatggtagcatctctccctccctcacacacctgctccagccattttatagaagcagggatcagtggaatcacccagcctcacacccgcattgttcacacaagcagcctggggcctgggaatgcttgccaaaagacacaggattagtggctgtctaggactcctggcccagcactgcttttcggggaaccctgcttctctgcaacttgcttatgcatcttgttgtaagctggctatgcatgctatcaactcattaaggctatttag

SEQ ID NO: 155287 - DNA, 530 bp, Homo Sapiens
  misc_feature (128)..(175): n is a, c, g, or t
  misc_feature (197)..(205): n is a, c, g, or t
  misc_feature (486)..(486): n is a, c, g, or t
tttgtgtgtcatgttcaaaaataaagcaaatatttattttggtattgttttgagcacagctgatttttaacattttctttcataacactcagaaatcattaacaattgtttgctcatttggtatgggnnnnnnnnnnnnnnnnnnnnnnnnnnnnnnnnnnnnnnnnnnnnnnnnaacattggtcatgtttcacccnnnnnnnnncatcccccctgtctgcaatcaacttcttcattccactaaggctgggcacagagtaagtttcttcacttagctcctactaacagtggtggttgggtggctgtttactgactggatttcttacccttttaaggtctgttgaaaggaagtaaccgaattcccatgctttgattgggttggctctttattttaatttaataagactgccatttccaggatcttttgctttcttaaaggactctatcatctatgtctatcccgatttgtcaaagtgtggaatttgngcgggaacatgtttcaaagtatgacacgtgttatgtaacactat

SEQ ID NO: 155288 - DNA, 574 bp, Homo Sapiens
cagcattttgattttattaccatcctattattctatgacaacagctaattaagaatttaatatgaagttgggaaccatttgcacaaaatccattgattagcttaattttatgttcacttcttttgtctttctacctcaagttccttaatttgatcattttcaaacaaggtccatgtggtgctttgacacccacttgttgaaatgacaagtgacgcatacataaaaaataaaacacttgttaataaaaatcaaactgaactcatttaactgcctgattcatttttcttctttggaaggcttatccttgggttgttctcaaagaaaacatcaaagatatcagattaaattttgattcattaaattccaccctcgtttcaaagaaaaaaactaaaactaaatttggaaatcacacattctaagtgacaaagaggtgttttaaagagtataaacatctgcagtaggacacgctgtacttcactaaaaagttttatgatatttctattattttttttagttcatcttatttccaaagaggaaatttttcatagatgattaatatacttattcagctgct

SEQ ID NO: 155289 - DNA, 483 bp, Homo Sapiens
tttttttggaggagagtggtgctatggcctgagtgatttattttagaatacagtcatgcattgtataacgaagtttgtcaatgacaggctgtatatccagcggtggtcccataagactacaaagcagctgaaaattcccgttgcctagtgaggttgcggcgtgtaatgtcacagtgcaacacgttatcactcgtttgtggtgatgctggtgtgaacacacctattacactgccagtcacatacgagtggacagtaatgccctgggccctcacactcaccacacactgactctcccacagcgactccagtcccgcaagctccattcacgggaagtgctctatacacctgtgtcattttaaaacatcttttataccgtatttttactgtaccctttctatgattagctacacacataattccacggtgtcgcagttgctacatgctgcacggtttgtagcccaggagcccaggctctcccacata

SEQ ID NO: 155290 - DNA, 546 bp, Homo Sapiens
ggtcttgggaattctatgcagggtagcagggtagatacctggtaacgccatctttcagctcttcccggttgatgtccaccgtcccctcaccttcccacagccttccattccagtggcaggctcttaactggtcagcctactccctttcagtcatcatgtgttacacacaattttctgggttttagaagatggatttgagaggtgctggctccaactgacgtaagaaatgacaaaagtcacatgagagggaaaaattgtccaaagtgccattcggtggtggtgctggtggtggaggtgggtgacggggatggcattggagttcaaaggctctgacttccccagtgtctatgtgtcgctcttctggaagcttagaaatggaatctgacagtccaagccctgagctcatgcagttattctcaagttgtttactccttggttttgttggtacaaatcttctactagcttcctcctctcgcaggctgggagggggtgcagcccgcgcagctggcccagctgcagcagtcgccgccgcccctccaatacatt

SEQ ID NO: 155291 - DNA, 517 bp, Homo Sapiens
aagagcagacttttaatgacgtgaggacacaggttcaggcgatctctatatctaggctgtagctgcattctgattataacagtttcggcaaacctttcttgagtgttccctctgaggggaatccaccctgatcaagcgcttcctacctggtccctgatgattacaaggacacactactttacatttgccacagtgctcaaacctttgaaccaccctttgatgatggtgttattatcctatttcatagacaaggaaagggaagcagagagaagtgccagttcctcaaggtcacaaggttagtaagaagctgagccctgggccattctgtagtacagctgccacttgggaaacccaccactctggcctttgtgactcagtccttcctattgttttctcattctctatcttcaactgtcccttacttggttagtgtcccctagtcctctgtcctcagccacatactctctgagcactgcattttctcatcaaaacccacagcttcaaacaccttttactg

SEQ ID NO: 155292 - DNA, 332 bp, Homo Sapiens
atctctttttctgtatatatctactgatttttttaaattaatgcatataaacacattactaaactcttgaaaagttctaaagccctccaaaatacaaacaggttatattactaatgtttatgtattagactgatcattggtactaattagactgataattggtactaataatcatattgcctatgaaaccagtgttacaaatatgttctctaggttctattgcaaatcactataataatacactgaaatagtttcacattagaacttatttttttaaaaaagttgactgttccatttttttccaagcactagatgagaggttctgattcatt

SEQ ID NO: 155293 - DNA, 548 bp, Homo Sapiens
tttctatctccacacattcgagaatcagctcatccaggtcggccatttctgttgaccataagagctctttgcggaagaattccgacaggcctttgaggaattggttttggaggcggcagtcatcccaagacaagaattgggccaggaactgaaaagcatctgcatagctgccgagggtacagtggccctgcttgagcttgcgaatggcctttttagccacacgtggggggatggggccacagaattccttacggatttcatccaggaagcgcgggaagttggcatgcaaggggcttccttcctgggtgaccgagatggcccagtccttggcttcgccagtgaaaaaggagatcagaaaggccacccgctcggcgcccccggggaaatgaacctcatggtcggctatgaaggtctctagctgcatcaggaattcagccaggtagactgggtctcctgaaaagggctctatctcaggccgctccagcggtgccagagggggttgcgggggcggatcctttgacgcgggcggaggcagcgccggcggccgc

SEQ ID NO: 155294 - DNA, 443 bp, Homo Sapiens
aatggccttgcttttttatttttactaccataaatgaaaaacctgtctcagttgtcataactgggcaataatggcaacagtaaatattacaaaaacagagcaatgttaataaatcttgactccatgtgtcatttgccaaaagctttgagcctttgaggcctgctctcctgttcaaagaggagatcagcaagtgttgaagggatgctacacatgttaacgtcacgccaagccttcgtctttgagatactcagaagactggaaaattgaaaagagatgagctttgttacagtgtgtttagtgtttaatcctgaatctgagttccacctaaagtcctgagcccagagctcaacctgtgctttggggaatttattttgggaaatgctgccttaacctgagaggtgctggctctgtggcaggcccttgtcactggagcaggtgtcctg

SEQ ID NO: 155295 - DNA, 645 bp, Homo Sapiens
tttcatgttgttcttattatagtatattgttacaactgttctattacattattagttgttgttcatctcttactccgcctaatttagaaattaaacatcataggtatgtatgtataggaaaaacataatatgtatatagggtttggtactatccatggtttcaatcatccactgggaggggggggtcctggaactactgtagatagttccaagtgggggataaagatgagaggggactactgtaaagaacttaacataaaactacaactgtaaaccttcatgtggcaaattcttgttcaactacacaatacaaacatttatcaggtatcaaaaacttcaaatgcagaaggtaagacaatattgtatatggctaaacaatgaccaaaaaccactctcatattcctctctccaaatttgaatttaaaatgctttaagagatatttaaagcaagtttagttattgtccaattatgcaaataaaacaggtaataaaggaggatccaaaactattccttcacctatacatcccaaaccagaagtaaccagaagtggatgatatccagtggaatttgggcataagagaaagctacataggaaataatgttgacctcatttctcccattagctcctgatacatcctcctgct

SEQ ID NO: 155296 - DNA, 429 bp, Homo Sapiens
tgtatagggcagctgatagagtgccagtggcccagcatctggggggtggttagtagtgatcatgagctcatcaggggcaaagcccagggggtccatctgtacctgttttgcccatcagataccaattggggaactttttcttctcttgaaaccatagcctataaccaggtcaccatgattaatgtgcatataattagcaaagtacagagaagccatagaaattccctgtgagaagatgcaaaactcagtgtgggaaagcagagtcctcaggaatacacggaagtgggaggaacccggggcttacctcacacatcttggccatagccgggaatatcacaggcaggccgacaactgtgtgacaaagggctgtcttctaatcacacaaccaaatggcaggagaaccaccctttctccatcgcctgctttaaa

SEQ ID NO: 155297 - DNA, 674 bp, Homo Sapiens
  misc_feature (267)..(296): n is a, c, g, or t
catgtatttaaaaaataggagagtgaatagggacgtcagaatgccatgaagttatcttcctcttccttatatcccctaagtttgggttgcaaataactttccaattcctaataacctgaattattttgaaatagtgttttcagtgaaatgatgaatgtttgaatgtttgtttggtaatcaacataacaatgctaacaaaattcccacttagattttttaacttttaaaagtcagcgtggttttgataatttgatattttaaatgccnnnnnnnnnnnnnnnnnnnnnnnnnnnnnnagcacatgttaataaactgataggatggagtgagcaaaattgttttcagggaagatggcacattttagaaaagacttgcccagatgatcttccatattgctcccccaatgtcatttatcgctcatgccaatcctcctcttgttacctgtggctatggtaaaattcctttaacaagcttcattgtgtccaagtatttcagagacttttaaaagctgggcatgacatagcgttttgtgctgttaagaccttagcagagtcaggtagtttacgggtaatattcaaccttgtgcatctgaatctgtcatggattcccttcactcagcactttgccactaatttgtattacactctgtggccatataatacttgcacattatg

SEQ ID NO: 155298 - DNA, 478 bp, Homo Sapiens
ttttttttagagagacggaggcccgtctgcctcccctgccagctcctgctgattgctggtggctgcctcctgagttctggggtccctctcttgacagtggtaagagtgccaggaacggagcgcgtttgctgcacaccatttgccattggtgcatcgagcacactcccagctccaggattatgggaagacctttttggggtacagacttcccctccctgcaacaaagaggagctcttccatggcccccaccctgaggggcacaggaggtccacggcctggaaacttcctatttcctggggctggcccagggcttctagtctggccttccataaggcatgggccaggatgctggccctgggggcctctcagctcagccccacgtgcccctctgtggactctcagtctcacgtttgtcagggttctgccatttagaaatgatcagcccacctctagaccaagtgcctgcctggaatgtacc

SEQ ID NO: 155299 - DNA, 461 bp, Homo Sapiens
tttgttatattaacagtattatatacacaatactactattgctagattgcgcagtagttctgtatttcaaataacctctattggtttttgtaatgactccatcaatttataactctccaagaatgtacagaatttttttcttcaaagtgttgtcaacacttgttatgtttcttctttttacattatccattctaacatgtttgaaatgatactcatcatggttttgatttgcaattgccagatatttggtgatattgagtactttatggcttatctcttggccatttgtatgtcttcattggacaaatatcagtttagtttttgcctattttgaactgggttactgttgtttttgcttttaatctgcttgcatttcttatatattttgtatatcaatcttttatcagatgtatggtttgcaaatattttttcccattctacaaatttttttattttattgt

SEQ ID NO: 155300 - DNA, 386 bp, Homo Sapiens
gtatcataaaaagaagaaatttatgttgtctgtgtactggcctcccaaaagatcgaaagcattaacaatttcaatttttccttaaggtttcaacctagtgttatacttttatgaagttattgtatcagttgttaaaaagttgaagtacattttaagtaagcgaggaaataacattctaatcaaagtataaaacagaaaaggatagtcgtattagttccagttctgaagaaatagctagcagacaattgtagtttgtctttgagcatgttgtgacaacttcccaatgttgcttgttcccttggcatcttgaggtattcagcatctacttctttccatatagacactggtacaaagtgcattttaaaattctgtattatctcagcctg

SEQ ID NO: 155301 - DNA, 492 bp, Homo Sapiens
agcgatacatttctgaatatttatcaaacactatggtattctcatcaaatacaaaatatgtcatgagcaagccattcatagccagtgaaagaaaataagacaccacaggtaaccagccaccatcatagcagcacactggaaagaaagaggcgtacatccaccagcaccctgatattgtcacccaatctgttagggctggaataagagatgcacctaacagaaggatcatgacaaaatctgagtcaacatgttttgtgaaaggttatttgcaaatccatcctaattgtttcaaactttattttgatacccaaataacgcaaaactgttttcagaactataatactgtcagctctattttacaagttatgaaaaatcaagtttagaatcattaaccacattctcaataggcctgaaaaagtgcttattatcaagcagttatcacacccctccagaagaaagagggcatcatgttgaattatgtccataggtgct

SEQ ID NO: 155302 - DNA, 338 bp, Homo Sapiens
cccaaacagggtagactggcgaaaaagaagaaaaacggggagaagtttatgaccaggaagttgagtctttgaagagcttagctgtcccaacaatttcctctcttctatttgatacttcttcctctgcaaaaaattttaacaggatttggcttcgttgttcttcttgattatccaggagcaagagcttggtctgtgcacagagttacccacttgcctgggaattttaaggctccttcctgcccacgttgctgaaagtccggatttattcctcactttgggtggacccgatcctccgttccttggggcactgcaacaaggcagtgggacgtgtctcacga

SEQ ID NO: 155303 - DNA, 471 bp, Homo Sapiens
  misc_feature (241)..(264): n is a, c, g, or t
ggttagtacctttttattgggatatcctcctgtatttccttttagaagcttgttttagggctcatatttagatctatgattgattacatattaattattgtgaatggtgtggtacggggctagagctcattttttttcgtgtagatatccaattgacctggcatcatttattgaaaagcatcattttttttccaccgaattggaggagtccccaacatctcaacataaatcagctgaagannnnnnnnnnnnnnnnnnnnnnnnctcggaactctatcccactggtttatttctttatccttggattcaaccttacacagtttgaacaataggattaaccaacttggcctaattcacgtgtgtacaacactataaaatacttattcttcccatgtgcacataggatgtttatcgaaatagaccatatcatggaccttatacaagtctcagcaaatctcaacggattgaaat

SEQ ID NO: 155304 - DNA, 476 bp, Homo Sapiens
tttcgattttttcttgacattcagatgatttatactttttagacatttgttatacaattaatttctattcattgaggaaatttagaagatgcaaataattttaaaagggaaaaaaatcacaagatgaaagatttgaaattcctacattgagagtatggaataaaatactatgattactttttccaagaaaaagaggaaagataagccctaggggagaggtgtatacatggcatagcagtagagaattaagtgagggcttttctgtttcttacttaggggtttatgcatggattggaatcaactttgtttttgggaggattcgaccacgaggatggtgagtaatattgtctttttatgacagtttacctaagggctgaagatttaagttataacctatcagtagcatgtaaatgcaaattttgagttgtttttcttttttcaaacataagatgcttcattttccagtcctaatttgc

SEQ ID NO: 155305 - DNA, 537 bp, Homo Sapiens
tttaattgaacttttatattttatcagaattatgtttcataagattattttaaaaagtcaaggtacagcattttctagaaaatagcagcctaacaatttacgcttgtatcttcaacatggttctgatttggaaaacatctttaacatgttattacattaaatttaaggatgtacacaagaattatacacgcaagttctgtagataaatagaattttaggaaattgaggaaaaaagataaataggagatagtttaaattatacagtacaattctcattgctctgacttggtttgcttgatgtgtgtgtttctccactggtgagaaagtcttgggatgggtgaatcatttagttgaaagtttgtctactagaacaaatgagaaccagtatcagaaggtgacacaggagagtttgtgacagtgccgatttcagctgacgaattaccagaagatccagcattgctgtcgtttccatcaaaagtagctggaagtagatacacattattttctgacagttgggaagtatcagaagaaagcatg

SEQ ID NO: 155306 - DNA, 539 bp, Homo Sapiens
  misc_feature (17)..(17): n is a, c, g, or t
ctggagaacattgtatntgtgcttttcctttgatatgtttgtaattttcgttagaaaacccttttagattctaaagcttctacattcagtatttcaatcaatgataacaaactggtgtaagactaaatataaaatacaaacacatttccataaatcaacacatttccataaattgctgttataatgtctgccacaaaaagttcagttgtttgtatgtttttcaaatgtgctttgcttgtcttgatgatttacaactgttggcactgctgtttaagtctgttctgacagtgagaaagtgactcatttggcaaagtcagctgttttttactaaaagtgaatagtggtgagtggaaaggggcttgtatacaattttcttgtcaaagaacgatgaccggcaaataagcaattttagttccttggatttgagcaccactcttgcatgcctccaccaaccagcttgtctccacagagcttccttcctcactttacactgaaaatctgttatcagtgtgtggaaaataaaaattttacacatcaaa

SEQ ID NO: 155307 - DNA, 417 bp, Homo Sapiens
cactaagaaatccttaaatagacaactgagaatggtatacattgggttgtaagagacaattctacgtcctgatcactcaggaagtaatgaaaaccagttcattatcagttagtttgagttctgatgtgttcaggtttctcttctagagttgctcaagattggcgacgccttccctgtgggtgggctgcctgcccttgcatcttgccagtctgagattctgcttcttgcctccaacacgccgcaccatgctagctgccagctgggtctccacctctcatttgaagattagcttctcgtacaccctctctttgccttgagagctggttgggcagtattttctggctcaataagcactttgttccatgcttcacactctaacttcatcttgtacaatgcaacataccagctccgcgagct

SEQ ID NO: 155308 - DNA, 410 bp, Homo Sapiens
ggagacagagttttgctcttgtccaagaattaaaggaaaccagtcattcacttctgcttaaagcttatgactggtttcctttaattcttggataagcacaaaacttctcggtatggctaaggctctgcttcctccggctccagcttcaactcacaccacactccattcaggtcgattagctcaaacccctcagatattcctcagcctttgtactcactgtgcttcctcctgccatccagcctttgcacgcctgattccctctgcttagaggagttccctcctttctttgtaaaaggcatcagatctcacaccaagctctcattacaaaagcctttcctgtcctacctctcaagatctcgttattgtaaatactcaaagtatcattaacctctaatgtttcaatttacagc

SEQ ID NO: 155309 - DNA, 606 bp, Homo Sapiens
cggaatatacatgcatgtttattcggacacgtgtgctggataaacatgcatgttacatatgacccatgttcaccttggggtgaaggcagcatgtaagcgtattacaattaggtggtatacctcaaaaagtactttcaggacatgaaggcacatgagggtgcaatctctgtaaaccagccagaacccgtctatggtcagggtctcttatcagggaaaagttactgaaacgagtctcttgtccaaggaaagctctagttacggctggtggagcaggggtgtggggccagggtcggcagggggaggagctgcggttgtttcaatgctgcttatcttgaggctagtgcttgtttagctgctacagaaaaagagaaacctgcggcctttagaacagagttgattctttacgtgcagggatgcacgacttactttcaccaggcctggcctgaggtcctgtttataatttggtattttattgccacagagcctgttcttagtcttatgatctctattttaacatgaacaccggtcaattctgtctaaaccacacaagggagggggtagaatgaggtgcctctgacctaccatcccgtcacggctggaaactca

SEQ ID NO: 155310 - DNA, 514 bp, Homo Sapiens
  misc_feature (350)..(350): n is a, c, g, or t
  misc_feature (485)..(485): n is a, c, g, or t
ctaatgtttattttagcctcaggtctgtgtgcaggcttggtatataggtaaactagtgactagggtttgtcctacagatcatttcagcaccgggtaccaagcatgggtacctgacagttttgttaaaatggttttctgagcctctccctcttccctcaggccggccccagtgtgtgttgttggcccctttctgtccctgtgttctcatcattcagcttccacttgtaagtggggaagtgtagtgcccgggattctgtccccgcattagtttgcgaaggataatggcctccagctccatccaagttcctgcaaagggcatgatcttgttcctttttatggctgcatagtanttccgcggtgtatatggaccacatcctctttatccgtctgccgctgacaggccccagcttgattccatgtcggtgctgttgtgagtggtgctgcagtgggcatttgagtgcgtgtgtcttcatggtagaaccatntagagtcctctggacataacccagtagtg

SEQ ID NO: 155311 - DNA, 562 bp, Homo Sapiens
tctgaaataatattttaataatagtctagtaaaaattatgataacaatctactgaattattttttaaaaaaaacttagaatgtcagaagtctttgtggtctgcagagaaaatgaagactaaatgttatagctttaattataattttaaaaatctaaatgttcactaaatctgaaagattagatatattgggttatgttgcattgctgctcacagtaaaatcttgtaagtcagtataaaatccactagattagaaaaagaaaagtaggctaggaagtttggtttggcttccctatctgtaaaaccacaactgtctatgcttgacacaaactaaggtaaataaataatgtgtcttaggctaattgctaactgtgaataggagataacctggcatagaagagtagaaagagcattccaggcagaaagaatggactcagcagaggtactaactggtgaaacagcatgacatggtcatagtcacaccagacgtgagctcttgagagcgtcgtggattaacattaacatttttaaccaacaactctgataatctctccaggatccctg

SEQ ID NO: 155312 - DNA, 434 bp, Homo Sapiens
gaaagattttttgacagtaattgcacttttaatgctttcattaactatgaaccttcttatgttgagtaagatgtgagtaggcattaatgggttttccatattctttatatttgtacaatttttctcagggataatagctttcctgcaaaataagatgtacacattgattaaaggttttgccacattcttcatgcttgtaggaattttgccagtatgaattatcttactatcaaatgtggcaaccatataaaggctgtttcacattttatatatttctagggtttcacactagtataaattttttatgtatagaaaggatggaagtgttgaaaaaagcactgtcacatctttcaggtttgtagagttcctcttcagaatgaattatcaccatgtctcttaatagtaagaacttgtggccaggcatggtggctcat

SEQ ID NO: 155313 - DNA, 563 bp, Homo Sapiens
tctggttcttttggtcatcactttcattgttctccagagtctctggctgatgtttcagtggcgaaacccgcttcactgggcggaacttactgtacacatcagcgattcctgtgggcttttgcgtgtttgtaataagagttgagatgccacaattccagctagagctagaaactgatctgtcttcgttttgcgtatcacatcttcggcacagttctgggatcgtcttgagtgatgtgactgaataagatatgtcatcactaaagtcaatttcatccaaatcaaggtattcaggggcttccattattcttccttgcacattttgagtacggtcaaatacttataaattcccggggcgcccggcgcgccggcggctcaggagcgcgaagggactgactgaccgaccgacggaccgcagcggcaggagcagaacagcctcagccgaagtaggcgggcggtggaggcgctgccgcggccccgctacgtcacaatgcggcccggccgcgggcgccgctccccgggccccccaacgggcgcgcgcgggcgggggcagcctgggcggccgc

SEQ ID NO: 155314 - DNA, 328 bp, Homo Sapiens
aaatcaacagtctacctctaacaataatcttcaagagtaactgcattgtaaataaccataaacgatccgatcagaatacattcaacatagcatcgctatagaatgcaattaaatgtataatgtaaataaacaacttaaattatgcaactcgcaagatgtaaatgtcatgtggacacagaaaagggacagagacaagacaaactattgcctggcgctgaagagacgagccctcactcaacacagcccagctgcggggacctctctctagccccaccatgacgtagacacaggagcccttcttttgagatggagtctaactcagtctcaa

SEQ ID NO: 155315 - DNA, 594 bp, Homo Sapiens
ctaaacttgccttttgaagtgccatgtggaaaaaaatatttctgaaactgttagcacacttctatttcatttttaatgtataatttcagtaggcatgcataattaaatgaaaatttgagaataaatgctatttgacatttctattagtaagacgagcacttaaaacatgacatcttttaatatcttcttaaactgagatcacttaatattctatcactttcaatttacttctcagtgtcatcatatgatgtaacatacatgtcattggtgcatgttacacttgtaacatacatgtgttatcctgtgtgataacacagtccttctgcggccttctgaaaaaatgtgtcttatctcctcttttgatgtcaggctgcccactggggttttttgctagtctagtgtacacacttgcattgggtgaatttctaccctttttctcttcttgtttttcctcaccatcacaaacaccaagatgatgctgatgtcagtaatttcccaaagcccctccccaaagtagcagttttgctttcctatcaatctatggattgattcttctgtataactaaatctggagccagttgaagagcaaagtag

SEQ ID NO: 155316 - DNA, 898 bp, Homo Sapiens
  misc_feature (248)..(381): n is a, c, g, or t
aatggaaactatgtaactttatttatatgtatagaatatacatataatgtgtatacatatgtatatatcctacctttgtctgcagaacctagaccataatgctccagggataataaccaaccccactgcccaaatgttggtctctaaatgctgtttcccactgcggataccagggattcttgaaataatggttgctcctaggtatagtgtggagaatttacaaggtgagcttgaggcatctcattgtnnnnnnnnnnnnnnnnnnnnnnnnnnnnnnnnnnnnnnnnnnnnnnnnnnnnnnnnnnnnnnnnnnnnnnnnnnnnnnnnnnnnnnnnnnnnnnnnnnnnnnnnnnnnnnnnnnnnnnnnnnnnnnnnnnnnnnctgattggtatgcacttactatataaaaatccacaagtcaataataatactctttacaccattcatagaacaaggcatactgaatgtcactccaaaatgcttttgtgtccgttgtctgaatggttgagcaagttttcctttttctgatggaactgaacttttccaagatccagctcagatgctgcttcctctgagaggccttccctaaagcctccacgtggttcattcattctctgaattccaacagggctcattgtacatgcctctttaaatgcacctatcaatactgtactagcattacttatttaactgtatttttctctctagactataagtttataaatataggatctgtctgggttttatttattttgttatcctagtacctaccacttactagagatagttttatatacggtattacataatatttcacatgttgtgaataaatagagcaactacaatagcaccctctgtttcttcttggtcatgcaatatagatttgtctctattttag

SEQ ID NO: 155317 - DNA, 484 bp, Homo Sapiens
agatttatcctttgtgtgcttcagtagtttgctcttattgatgactagtagcccattgcatgggtttactgcaatttttttcattcattcacctgttgacagacatttaggttgtttcaggctttttgccattataaacaaaggtgcattcaacatttgtatacaagtctttttgtgatatatgtttatgtttttatttcttttgggtaaatacataggaaagtgatggctgggttttaatgtaagtgtgtttaatttcttaagacactgtcaaactagtttccaaactggttgcactcctttacattcctggaagcaggatatgagacttccaatggctccacatcctcaccagcacttggtatgttagttttaaaactgaagacatcctaatatatctaatcatctgtggaagatattgacaaagcatctgttgaaatgttttgcccatttaaaaaattcttcttattgaattgttaaagtt

SEQ ID NO: 155318 - DNA, 790 bp, Homo Sapiens
  misc_feature (100)..(112): n is a, c, g, or t
aagaagaggaggggatgttatttatttgggtcacgttttggcctgccagaggtaggactgaaagacatcttagagatcctatagtccaactgtcttgggnnnnnnnnnnnnncctccacagaagaggaaacaggttctgagatgtcaatgatcagccccaggtgctctgtgagcttgtgtggagagaggtcctggctgtcccagctcagagctccttcttgggcctcgtagcactggtgtctggactggctgctgccgacccatcctgagggtgtgtgttggtttcctagggtgactcaggaggacccctggtctgcgaggagccctctggccggttctttctggctggcatcgtgagctggggaatcgggtgtgcggaagcccggcgtccaggggtctatgcccgagtcaccaggctacgtgactggatcctggaggccaccaccaaagccagcatgcctctggcccccaccatggctcctgcccctgccgcccccagcacagcctggcccaccagtcctgagagccctgtggtcagcacccccaccaaatcgatgcaggccctcagtaccgtgcctcttgactgggtcaccgttcctaagctacaaggtattttcggggcagaaaggtagaagatgatgtacgtgcctatcttgatttagggagaacggatatcgtcatagtatcttcataattttggatcttcctgttcaaggaaaggtcacatgtgtatccgtttattcccatcttacgttgcgtgtaccctcatggtatctttctgtccacaggt

SEQ ID NO: 155319 - DNA, 590 bp, Homo Sapiens
  misc_feature (31)..(31): n is a, c, g, or t
ctgggaattctttgagggagcagtcggtgtntgtggtctctgaggcctctggtttgttcagcctggtatatgtttctttgtaagactcagttccctctcaggcactagatagtcccattttttagtatcttctgttttctcacgttgtgatctcttttcctcttcctctattttagtttcccattttggaaccatattgtatttccatgcttcttccatcatcatttcttgatgctattgatagtagtacgcctctgctttagcaaactgtgaaatggggctgataacgcacagctgtgggaagcaccggcccaaacgcagggcttggggacacgaccaccatccccgcccacgggtccccgcgccaggcttcgctctccacccctcccgccgcgggccccagcgcttcgccgaggtcggccccgggcgccaagaggcgtggtcggcccgagcggaccctcgcggcggccatggcgtcggtggtggaatacaagggcctcagggccggctaccactgcggctactgcgattccaaggagggcaaagcgtcctgcggtgagtgttcccgacgccggagttggcgcggccgc

SEQ ID NO: 155320 - DNA, 516 bp, Homo Sapiens
caagcaagatgtattctgaagctaaaagatattttataattagaaaaaaatatatgtaaggttataaaaaaaattttattttatagaaggagctggtgttattttagagataggctggctagctgtatagtaggtgtttaggtggaggtattatagcttggtatcctgtgtttaattctgtagatttagagatttaatgtattagtttatttagagtaaattaggtggaattttcatgataaagccccatgagcttttttatatctgttcagtctgagcagtgttacaagtgaagggactgaagtattttgataaacttaggccaagctgaatgttgttcattttttgtccagtttgggtcgtggacacttgattgttccaccttgttgggggtatcacatggaaccaggaaattttcaagtggcttaaggatctctgaaatgccagtaactcagatcttgtggtatttgacatgttaaacttggaatctgaatatgccgttgcctagtttggaca

SEQ ID NO: 155321 - DNA, 410 bp, Homo Sapiens
aaggtccacaggctttttaatggtgtgatggctacttccctttcgagacccgatctaatcattgacagtggcttccagggtgttggggtggggtggacaggtgcaggatgggcagaggccatgcagtgactgggaagggcttggggaggggtgttacattctgtttggcatgtaaacattcttaggtggcttcccgagggaggggaagggcaactccctgctccccaccccatgcccaccagggctggtccctggagttcagaagactgagcaaaccaggcctctgtgaggagctgggaaatggggagcctggggcacagcccctctcctctcctgtgcccccttcgtgcacggtgtggctggggagggaaggcatgtgtttgggtgagcagaccctgcatctgagtcag

SEQ ID NO: 155322 - DNA, 519 bp, Homo Sapiens
  misc_feature (411)..(419): n is a, c, g, or t
ttttttggtttagcaagtgtttatcaaaatctggaatatgcacagcagtaggggtgggtgtatgagggggagaggtaagaaaatatcaggaataatgtcaccttatattgtataagtgggtttttgcagcaaaatatacataacataaaatttaccatttaaccattttaagtgcacagttcaagaacattaagtactttcacattatgtatggcacagccatcaccaccatccacaccatccatcttcagaacatttttatcttccccaactgaaactctgccctcattaaacaatatctccctattccccactgcccccagctcccgacaaccaacattctactttctgtctctatgaatttcactactttaggtgcctcatataagtgaaatcacgaagcatttgtcnnnnnnnnngctgggcacatgtgtctagtgttatgagaggagttgggaatgtttaagggttggccagggatgccccaccccctcctaggggctgggctcgggcgtttct

SEQ ID NO: 155323 - DNA, 319 bp, Homo Sapiens
tttaatttagaaattttattttgtcaaggttgaggacacactcccatgacacagcctcaggaggtcctgaggacatgatagagcacaattcggttttatacattttagggagacatgagacatcaatcagtttatgtaagatgaatattgatttggtctggaaggtgggacaacttgaagcaaaggaggacaacttgaagtggggagggggcttctaggtcatacatagataagaaacaaatggttacattcttttgagtttctgattagcctctccaaaggaggcaatcggatacagatatatctcagtgagcagagg

SEQ ID NO: 155324 - DNA, 681 bp, Homo Sapiens
  misc_feature (607)..(607): n is a, c, g, or t
  misc_feature (611)..(611): n is a, c, g, or t
ttatgtttttcctttatgtttaatagttctgtgaacattgacaatatattacttttagtggtacacagttcttgagaaaatgtcttgatttttacattgccatttgtgatatttttagcagtccaccacaatatcatttttataataaaaataaaatatactcattgatgatagagaaaatattgttaaagacctcttgggacaggaaaaggctcagtcataaaatcagatgcttattcattttcagctgtgtcattttgactcattactttcaagaataactataatattgctagacagttcattacactgagaagaactttccttgaacttcacatggagattgagtaaagctcttctatttgttttttgaagtactctctcagctcaggtctcttagcttttagtgttggtgtcagcaagccattttgaactgagaacatgtcagaattgatgtgaatggctttaacctgctcaaaagaatggagtccactttcttttcctaacctcaccatatcttccaaaatggctttcttcagatccttatttgtgcaagatctgcatatgttcctttcattcctctcttctgggcccaggaaggcataancttncaggttaggcaccacaatgcctaccaaaaaaggccttttagctgtccccatggacattagattgcgccac

SEQ ID NO: 155325 - DNA, 492 bp, Homo Sapiens
aatttttggaatatcaaaagaatattacattttctaaattggtcagttgggttaaacacaacaatggagacacacacaaaagaagcaatacctgaggcttatagtcaacagttacccaatatggacactcagaaatcgttgcgttacttatttttaaccacatcctatcttctttaaatagtggtatctgagatttgagaaggcagtgagttgcagttcttcgagagcactgaattcctacagatatattcattttgtttgttttctcacttaccttttttattcttgttcatcaaagccatgacataacaggtccacagatcaggaaaacagctcattacataaagggggaaatcagattcacacactacctcgactttagcccaaacccagatggcagagtctcctccagggtgggaaagtagccataagcatccgtttcagtcactccacatgtgtattcacacgacctgcggggcgccccagaggcca

SEQ ID NO: 155326 - DNA, 548 bp, Homo Sapiens
  misc_feature (69)..(69): n is a, c, g, or t
  misc_feature (82)..(82): n is a, c, g, or t
  misc_feature (93)..(94): n is a, c, g, or t
  misc_feature (110)..(111): n is a, c, g, or t
  misc_feature (143)..(143): n is a, c, g, or t
aattaaggtattttccaatgattaaaataaattgtagggatgttcaattatttactttcaaataaactnctgaagctaaaanatgtaatgagnnccatgacattccaatnnagttattacatcgtaggcataattaacatccntttcgggctgactcataattatttgagcttgtcatgctgtaatatgtacatggctatagatactatatagagtaattcatagctgatttcaaatctctagtttttcttatgtgtaccaagcttccaattacattagcagggactctgagcactcatgaacagagctgatgtcagatacaatgtttgttacttcaaaggattcatctaggaatgacaatgttatcttccatcataattaaacaacagtagaaaatacccctacttaagagctaaaccaaaagggtccacaaagggttgtacaggatccccattttcatctcatttggaagaataggaaattaatcaggtcacttgaaattcactttaaatcaggtcctagggtaaatctttaaaaaaggcaatggc

SEQ ID NO: 155327 - DNA, 451 bp, Homo Sapiens
tttcttttctccaacattccactcttaagataaagaaattggctgccttaagatacaggctaacagtcaaatacccagacaatgaaagcaggcaaatcatattttagagggctagacaaataattctttcttattggcccttctctgtatgaaattcaagcaacataatgcctgctctgcctaagtcagtattttaacactgtagggtagtgttgctcagtcactttcaatgcatgcccctgcaatgctttctcactatatcacctttgtattgctagaagccaattagagtttgacttagttgtatttgcctagtttgtactatgaaaataacagacatactgaataggctttttcaaactacacagacctccccagagattccgatatgctcctctaatattatatgaaaaggactctaattaaatttcatatttttatgctttttaat

SEQ ID NO: 155328 - DNA, 435 bp, Homo Sapiens
cctgggcgtgggctttgggttctcctaagcgccatttgtgaatgtgcctactccacagcccctcacggagctgggccctggcaggtacagaccttgtgccacctgccgctgagcagacagcagacaactttggaggaagggcccagggcttcttgggatcctaaggaaaaggtgccctgcgtaattggtcatgttttgatgtagaaatcccgttgcctgggttgtgggtcttctggtgagggctgccaccacctcctcctgctcacagtctgggaagccggttctgcagcatattctgccctattaaaatcagcccaggaggggcgtggggctcacagctgtgattactgtgcgttggggggccgaggtggggggatcaatggagcccaggacttttgaggccagcctgggcaacatagcaagatcccatctcta

SEQ ID NO: 155329 - DNA, 548 bp, Homo Sapiens
tttggcttttggacataatttttatttaagcatgggcttttatagcttggttcaccctagagtgcaacctttcagttacacaaatagcattcagagctacagggccattataatgttgctggtgttgtacaacttcatcagaaggtatgaatatgacccgcagaaaaaacaatccacgaagaaaacacaatgaaaaaacaaccactgttttacaaatcactctgttatcacagacaaaaaatggcagttactgttagtaaatcagccacagaacacttaaaaaaagatctttagacaaggaaatgggaacttatttgtgggagatagggtcttcatccacaatttaaagtagaaaatatttcagggtcaagcatttttcttatccacaaaacaacgctaaaccaacatacatttttaaggagtatattaaaggagatacaatatctttacaactatcttcttgaataggtatttcaattaattttctgcagaatataagtagccccaaattcagcagcaaaatattacaacataacaagtaaatacag

SEQ ID NO: 155330 - DNA, 220 bp, Homo Sapiens
gcggccgcccggatatatgctgcaaactagtgagaaaaataaggcaggaagtaacataaaacagagttccactcttatatgttactgtcacctaaaaaagatgtttccaaaagatgaactaatagattaaatggtttctttccaattgaagatcaaatctgtggtgtcagtgaagagaaaaccaaagttggggagaaagataggctggaatgactgattt

SEQ ID NO: 155331 - DNA, 261 bp, Homo Sapiens
ggccaggattcgctgggagtgggagtgctcgccctggggaccgcccccttttcccttttagggtggctcctgtcctccctccccatccctgacctggcgaaaggcctagtcctggggaccctcccacctcaggggctgcaggcggactgccccagctcccccagccccacgaaactgggcctttcctgctgagaggaagtgactttttacagaagccactgaacctggttattttggcaaatcgtccgtctcgagggcctt

SEQ ID NO: 155332 - DNA, 564 bp, Homo Sapiens
caaagttttatacataaaagtacaacatatgtattatacattcagaatcccaccactagagataagtagttatatgtcctctcccacatctttttttctctgttgctctaaacatacacacagaaaaacatactaacaaaatggggtcatgctataattgttgttctaaaactctcctggttcactaaatacttcatgagcaacctgcattgtcattatctgtgtgcctgaagatttctagtggctttccattgcatacatatgcctgaacttatctaaaaaatttcctaccaatggaaactggaatattaacatttgctattttaaaaatgttttaaatttaaaaactccaccttctgcatgcgtttttgcccaagtgggcaactatctcccaagtatcaattactacatatttactgccacttcaaaggttatagaaattgaattgatacgttaatgaattcttttgaaaacaatgcacggattttctctctcaccaataagtacataagacttattacgtccatttttgcactgctataaagaactacctgagactaggta

SEQ ID NO: 155333 - DNA, 536 bp, Homo Sapiens
tttagaaaataattttttatcttaaaatcaagacacttagaaatttatatagcagatacattggaaaagcagggaggtaactgtcagtaaaattaattattaaaatggagattatgttttccccagggtctcccagcaagctaaatatatctagagtcgggtgggctgttttctgaattttgtggcagtcaaagctttcttcagtttaagaatttcaggcatgtggttcttgactgtagctgtgggactcatttagaacttcacgctttccttgggaggggatggggtgcggtgcaaatgcctgtttgtgcaaggctccgagcggctgaccttcccctggctgtgccgcaggtgcagaacaagttggacggctgctgctacgcagtgaagcgcattcccatcaacccggccagtcggcagttccgcaggatcaagggcgaagtgacactgctgtcacggctgcaccatgagaacattgtgcgctactacaacgcctggatcgagcggcacgagcggccggcgggaccggggacgcc

SEQ ID NO: 155334 - DNA, 433 bp, Homo Sapiens
gccaagtcatctttagaaattttgttttcacaatattttggtttggaggatgtttttgcacttcactgcatcagaacagatgaacgaaattatggaatatcacatgtaggccctgaagaagaagaattttggaagtttagcaattatttgctacaccttttcccacttaccactgaaaagtattcttcccgggtctgcttcatatgatcaggtttgagaaattagctgattatctcatttcgttgctgaggtagcattatgtttatgccattcataaactaatttctatgatctaaatatctgtataatttcctgattactatataatcactaacacatagcggggtttcttctcaaacagtaaattaacacgattacacatcacaaattccaacatgcataatagcttttccccctggtctttatgtatccg

SEQ ID NO: 155335 - DNA, 465 bp, Homo Sapiens
  misc_feature (306)..(392): n is a, c, g, or t
taccatggctaagcctaacagtgtcaacagagactgtctggagcacaaagcctaaaatatttactatctggtcctttacagaaagagtttgcctacctctgttctagagcgaagcctgagccttgggtgctcactatgccacaggtatctgttactgtggtttgcagaagcttcaggtgagagggagagcttctaggagaatgcctaccacgaaaagtgaaaatcccttccttcttggcatcactgtttcccaaacccacctcccactcttcccaaggtagcttcatggtttgcttcgtcacttcnnnnnnnnnnnnnnnnnnnnnnnnnnnnnnnnnnnnnnnnnnnnnnnnnnnnnnnnnnnnnnnnnnnnnnnnnnnnnnnnnnnnnnnctctatagcacttatcagatatattccatgcttatttatttatttatttttaatttgttagagacagagtctc

SEQ ID NO: 155336 - DNA, 492 bp, Homo Sapiens
cagccaacagatatttattgagcatctgctatgtgcacggctctgggctggggctacaatggttgttttaggtcgggtcccccgaaacagactccgatagcaagatttgagtgtaggtttatcggagtgctcttgcgaatatcaccagtaggggaatgacgggttgggcggaagaagaagctgaactgctgatgtagtctcaacagaggcctcagcctgacctaatggaagctctggaactgagatggccctgcagaggtgttccaaagtaaggcaagggggtggggtctttacacctcatagcaactcgtcattggctggcggcttctaggagagccttcaagtgaggtagctccctaggctcagagcagttccaagagaggctgacggcagaaggctgaaaactttcttcagtgtccaccagaaacccagactcttctgagtcccccctcacttcatggcagactccttctcagtcccttttgctagacc

SEQ ID NO: 155337 - DNA, 409 bp, Homo Sapiens
  misc_feature (234)..(249): n is a, c, g, or t
  misc_feature (359)..(359): n is a, c, g, or t
tttgcatgtttttacttctgtagaattgttgcaactgagctcccgtccccttcctaaaccaaagtataaaggaaaatcaagccccttcctcggagctgagagaattccaagtgtgagccacctcttggctgccagctaaataaaggacttttaaattcgtctcaaagtgtggcgttcctctaacttgctcgggtacaacacagtcactgttcaatagttttctcataaatatcnnnnnnnnnnnnnnnnacttcagtggcaaaaatcctaataccttttgaactctgggattctatcaaaaattttctaagtttcatgttaatataaagggttggtgacaaatgcctgaggcatactanaaaagttgatttagacatgcctgaatataagatacattagtacattttgc

SEQ ID NO: 155338 - DNA, 529 bp, Homo Sapiens
ttttgacaaatctatcttaaatgtcagtccaatatccacggcgacgagccacagcgggtgagaaacctggaaatgagcctgaagaggtgaagctgcagaatgccagcaaacagattgtgcagaatgcaatcctgcaagctgtgcagcaagtctcccaggagagtcagcgcagagaagagagaatcagtgacaaccgggaccacatccaactgggcgttggggagttaaccaagaagcacgaaaagaagtaacatggtggatttggctcttgacatgtgcttggtttctagccttcctcttagtataggacgcattctccaaaatgttgccagtgaagcaaaccgaagtgtcaccggcacctagctgtagaatgaattcacactagcccctggctgagaagcactgttttgaaaaagtgcattagacgattctgttcatatttatgcagtgcctctgagacatagtggggccaaatatgacactgtaattgcaaaagtagttttgcaggccaatttatttttaaagttct

SEQ ID NO: 155339 - DNA, 550 bp, Homo Sapiens
ttcagtactggtgctaaatttaccaagatttaccatcttgcttagtgaacactaggtggtgctcttggtaagccaaacttctggctgagccaagccaagtggataaaagaaacttgcgccaactggaacactaattaccagttgattcatagataggaaagaacaagttatgatctcaagttctgtgaggggacacggcaggccaagaatgtgtgcttgttcaaacaaggactgatctacagaacactttagtctccctaaacctgttttcaagcatttcacctttcactctaaacatgtaacatagtagtctcctgcaagaaagaaactggtacccagacagggcaaaacaagatcatgctcaaccggctatctatctactagacaaggcaagacctgtacttttgtactgtttcttatagtactctaaactatgtctttttgcctctacctgagaggtctgaaagagccaacaggcagcttttggattcttggtgttaagtgaatgttagggctgggtattctcatgttccatggttatacacctttg

SEQ ID NO: 155340 - DNA, 127 bp, Homo Sapiens
agtatgtttgcccctgataaagcacctcacccctgaagaggaaaacagggaggatgggagcagcagaatttaggggaaatgggtttggggaaataggttaggggtactgtgtgaagtacaggacact

SEQ ID NO: 155341 - DNA, 291 bp, Homo Sapiens
tgcaagcttagtgttctctgaagtcctctataatttatcatctattgcagctcacatttagcataagctacaagcttatattgttaatcattcttctatgtttatgtgctgactcacaaataaatgggcctatgtggactttattttcataatcttaataatatctacataacttaataactttgttataaatctgatgtttcataaaattttgtgttatcaactatgttctggtagaagaattacacatttttgcttaactttttctgactttctattgcctatcaaata

SEQ ID NO: 155342 - DNA, 315 bp, Homo Sapiens
taagaaatgtagattggggcagattttcagccatagctgctactcctttcccccagatagtaccaaaggggtctttctttgtgatctctgatctttcctgtggcttcctattgataacagctgcaggtggctgcaaccccacccccatatttgaaacctgaggggattcctattctcaggccagcccacacttggcctttagcaatttattgtaatttctagttaaatctttctacctgcttttatattgattttcatggcatttgtcccagtaatcaaatgctcagattctgttttcccctgcaggcacctacc

SEQ ID NO: 155343 - DNA, 351 bp, Homo Sapiens
ctatttttaattattatttcaatagtattgggggaacaggtggtgtctggttacatgggtgagttctttagtggttatttctgagattttggtgcgcctatcacccaagcagtgtacactgcacccaatgtgtattcttttacccctcacccgactcccatccttccccccaagtccccagagtccattatcattcttatgcctttgtgtcctcaaagcttggctgccacttataagtgagaatgatgtttggttttccattcccaagttccttcacttagaataatgacctccaattccatccagtttgctgcaaatgccattatttcattcctttttatggctgagtag

SEQ ID NO: 155344 - DNA, 195 bp, Homo Sapiens
tttattttaaaagtaaatattttcactttattgagtcaaaaatacaattcctgacatcattaaccactctagagaatgaaagggcacaattctccactctgtggatgggtcaatgctgtgaactagaaatgagcttatcagatagatggccctgttgactattatcagtaagaatggctgaacagcaattctcct

SEQ ID NO: 155345 - DNA, 513 bp, Homo Sapiens
accaagaaagtttgacattttaggtagcttgataaatgctctcaattcatcttttagaaattgaaagtccctcaaaattcccttagaatctgacacttgagttttggatccactgctgaaatatacattgaaggacttcaaggaacctctgtagttgtgcaatgtagggaatgaggtggactaacctcacattcacctatttggcatttagcaccttatttctctttaatagtaagcatgtatccacctgctctgcaacacagtagtgtttatatattatgctagatactttgcatacagtgtttcttatttactttttgtaacaacactgtcaattggctatagttgctgttttcctaaggaggaaactgaagggcagaaatgttaaaacttatctaagctgttaaattgcaaccaagatatcagaacttatctacctgtttgcaaagtccaccccgtctccactataccatagtatttcagagtatgttttgaccaggaaattcgaaaaaa

SEQ ID NO: 155346 - DNA, 617 bp, Homo Sapiens
tgaggctcagagtggtccagtcatttgtccaaagtcacacagcttgtatgtcacagactctttttcagtggtcttttgactgtaacccctcactctgaaactacatatccaccacttcccaagtaacccagcccccacaaaattggtgatgatgattattttcatcatatccacattccaaaggggactatcttccccaagtgcattcagagatgtggctagcgatgggagcatttctaagtagaacagaacttggaatcaatattcatgttccaaagccacaatcctgggaaaaaaatgtagcaaagaatagggcacacacacaaagaaagctaaaccaaatttcagcaggagattttatagctctctcctgggtggcttgctcttacccaggcgtttaatcgaatgtggacatcaaggcagcttgcagcacgactgggaaactcacatggggctgccatggctgcaccaactctgggaaacctcattaatttctgaacgagaaatgatttcctttcttggccacagtctgagatgatggtgtgtggggggatggattttaaaggactaggtttttgcatgagctgtggtacttccctgcccaagacttttccctg

SEQ ID NO: 155347 - DNA, 520 bp, Homo Sapiens
  misc_feature (436)..(477): n is a, c, g, or t
tgttttgagctcttgaattcttaaaagcaccttttggatcttttcctcctatcctacctttgatgtaaaaacgctgtccgattaaatttccacttagaaggtttctcttggagttcctgggtgagagaattcgtaatgggcacgaatgacgggtctagaaacttcagcgcaaattgtgaccggaatcccgcgtggaacatgtacattcggggcgcccccgggctggcgtacttgggagtggtgaagatgttctcctttttcagggacacgtagctgatgagcgataaaatcagcagggcgacgctgagcatgaccagccccagcacactggcgacccgggccattttgcagtttctcatcccgggctgggctgggttcagggaaaccggggaaatcggtccattgagcggccagcagctcgctggcgtgtatatannnnnnnnnnnnnnnnnnnnnnnnnnnnnnnnnnnnnnnnnnagcgcgcgcgcgtgtggcggaggagggggacccgggcggccgc

SEQ ID NO: 155348 - DNA, 301 bp, Homo Sapiens
cccactggtctaaatccaaacacttcatacattgcctggatcccatctttaacacccttctaggggacttgcattatcccttctgtatcttaattttctccttccctactgaacattacacattggcattttaaatatattcaagtttctctagtctttaaaatactctctgagtctgaattcttctccagataccaatgtatttcttattccttttacagccttttcattctttacaaatttcttgagagcctggatgcagtgagccagtgagcctgggtgacagactgagaccctgtct

SEQ ID NO: 155349 - DNA, 340 bp, Homo Sapiens
tttatattttcactatatttttaatacttttttaattagcacatgtttacagcaggcctgatgatgtactttagatacttaagactcctttgtccttctgagcttgtctggcaggtatgggcaccactggcttcttagttttcttatcagtaggaaagcaaagaatctatatccacttgatggaggtatttgtctacagaatgaatggctctaatcttgctggtaagaatgaattgtttaccatcttcctagaggtgcataaacctctcactcagagagacattaattagaatatcttcataagtaatttgcttaaagggacttgggaaactagaaaaaa

SEQ ID NO: 155350 - DNA, 530 bp, Homo Sapiens
  misc_feature (185)..(217): n is a, c, g, or t
ttttatttatacctgggttttattagtgcttccagtgtaacagtatcacttcgtctaaacaagaaacagcatcttataatgccagcctttcatgcgtcattttgggtcaaccctggggtggtggagccgacagacctgggcccccaaacagctctgccacttgctgtgtgcagatcacagaacannnnnnnnnnnnnnnnnnnnnnnnnnnnnnnnnactgttgcaagcactgatgttgaggtaatactcataggatgacggtcaataaatgagacgatgttttttaatattaactagctaaaagactggacgcgtcccttcactttaggcgctgttccttatcgggaatacgacgaagctgatcccaaaggcctctccagcccttttcagcagacagtcccgtgggtcctcactctaaggcattctttgaagacttggtctctcttccacacacccctcccattccccatctcttagtggtggtctaacccgccccgccatccccttccctctcacttctcatatccat

SEQ ID NO: 155351 - DNA, 519 bp, Homo Sapiens
agtagctgtctaaaggtggatgatgccctccatgcactttcagcctgcctggtggctgggcagtcgaaaacgtcgccgtctattaagctcctttgattgggagcaggtgacgggtagagacggaagttctgggaatcaccggagaagggagggaagggctccttccggccgcctgctcccggagtcttcgtggggaacgtgaggtgagagcaggcggtgaagagtagacacgactgatgacttcagggatgctacacctttctctcctgcctgggcaagcctcggtagtaagatttccgtagtccgttttgtatgtggttttgcagaaacataccccctctctgctccagcttcagtcgtcagtatccagctacttccaagagtcttgcccatgtcttgtgggatgttcagcaaatgtataaacacttaatatcccgacaaagcttggcctcttccctcccaaattacttcccaggctatgcacccgtttttgttaatacaaccaacttggaaacttta

SEQ ID NO: 155352 - DNA, 488 bp, Homo Sapiens
ttatcacgcatgacagttaggcagcaagagttgtagagtcacagagcccgccgagggtggggagcgccatgagtccatcggagagagggtgagcgggactctgaggcctggggcagtgccacaggtgcgggtgtgaagctggcggtgggccactgaggtcctcaggctgaggggcggccagagtgagggatggagagaagccttccatgaacagcaactcaggctaccaaggtccctttggggtggctccagtgacagagaatgggcggggacgctggtctcaggactgcttcttcccatcctgaccttcgggccccttacctgcgggccttttcttccaggtgagccaggccagcagcggggggacgacgccatcccccatgcctggcccctcctggctgcctcgcctgcccgcccacccctcctctctctgtgtgcacctctctgcctgtttgaactgcagcttttaaagctttttgccttttgaa

SEQ ID NO: 155353 - DNA, 592 bp, Homo Sapiens
tgtgaccccgggagtaatccaattgcctcgatggtgtggatacttgtgaggtcaccgccttccttcctgcaggtggtcagagcatccctctggatgtttttctcatctctgtgaatcttgtaacagtgaccggcatacggccaccactgactaggacagtgagtaggcacatcacttttctgagggaataacaaaagaatttaaagtggtgttgccctttttgcaaatatagcccagtttctgaacacattccagattttcccatttagcattttttccaggatttagtgacacacagctttttccaggttcagctgatggacttcctggtaaccagttcaaatatcggaaaggactgcggtcactccactgccaaccgctgttgaagctcagactgttaagtccaatccagagtcctgaggtcaaggaactggttaatcctgtcaggtatgtttgctcatgtatctctgtgatgctcaggagctcagcgttctgttgttggcagcttttcctcgcctggtgccacgttaaagcggatttggagtttatctggtaggaaacgctgtcagcgggtctttggacgtactcccgc

SEQ ID NO: 155354 - DNA, 631 bp, Homo Sapiens
ctcaagtgtgcctgctgtgactccccctgggcgaggtggctccaccttctacaccaaggccaacctcatcctgtgccgacgcgactacctgaggctctttggcaccacagggaactgtgctgcttgcagcaagctgatcccagccttcgagatggtgaagggggcccgggacaacgtgtatcacctcgactgcttcgcctgccagctctgcaaccagagattttgtgtgggagacaaattcttcctgaagaacaacatgatcttgtgtcagatggactatgaggaagggcagctcaatggcacctttgaatcccaagttcagtaacgcccggcgcctggcctccaggcccgtctgtccatctgcccgcctgcccacctgcctggccggccagccagccactctacgagtgcaggctggccagccgctctcctggcacattagggcttctccgtcctcgatgggagggatggcccttcctcctccaccaccgcccgtctgtgtgtgacccctcctggggccaggccgggcctgtacagtctgtcttctgtatataaatggggacctttattttatgagaaatgtaatgcgattttattactggcgtggattaaacttatgaatgtttccggg

SEQ ID NO: 155355 - DNA, 452 bp, Homo Sapiens
gaacttcgtggctttgctttttcttagaagtactggttttcctcaaaggtgactttctgagtatttaatggtgtgaaatggcagctacatgtggtttccttttgtgcatttgccacataatcaaaaaatcatgaggcaattgcagggaaggggtataggaaactgacaagtgcccaatctaaaagtttaagggctattgcatgtgtttgtctggggttaagtatactgacatctaaaattactctgcatattcatatatttaagaactaaaattgactaaacatattcttgtatcagaaatgatgctatgcacttcacaatacttctatgaggctaccatcatcatctcctttttatacatatgagaatatcgagtctcaaagaagtagagaaatttactccaggttatactgcagaaagaggcaaaactgaggtttgaactcaggaatact

SEQ ID NO: 155356 - DNA, 552 bp, Homo Sapiens
tttctttccttccatttgggtttcccgctggacgaccaaatacagatgaccccctgaatatgccaggccttgctcctgaccggctttattacctttaagaaaggtaacaaagacacctttgttaaggtacaaaaggaggtgggccaattgcggggctgcttcaccctgactggcaccctcagcctgtagggcctttctcagtaactcaccaggcattcaggacctaggccagaatctgcggaatccggcccagccgaggcctgcagactcctctcctgggtccagagggcctgcaagtaagaatttggtccaaggcttcaccccaggccagtgcctctgcatgtccactcccacgggccgcccattccaatccctttgggctgctagaagttcttccttctgttgaccttcatcagtttccctggagcttctgctactggttccttccctggggtatggcagagggagtcggcatctcaggagtcagaagacagtgagcacctccccggactctgaaactaaatgcagcttgaggtttcaggatcccacatg

SEQ ID NO: 155357 - DNA, 527 bp, Homo Sapiens
tttctggtttttagtttacttttcatcatattcagcccagtgacctctggtcctctcttgggctctttcagcgttattcggtgttttgtgtttgtgcaccttaactgcgtggaaaagtgctcggtccttgggaacaagggccacagggcattgcttccttccccagggcctggcacctaccgggcactagcaggcagtctggccatagtagctgagtgatgagtgaactgcttggaggctgtgcatgttgcccagactcttttaggtctatctcccctaaaggcatctgtgaaaacacataaagcaacaccctgaggcagcaacggctccagtctgggagtctgaggagcagaaagaagctgaggcggccataggagccccatgggcagtgaggtgaggccagggagatgggccacggccggtcagccagggccttgaagggcacggtaaagcgtatggattttgtcctgagaaacgagaagtcagctttgacaggggagggccatgctcctgtggcccgagtcatc

SEQ ID NO: 155358 - DNA, 420 bp, Homo Sapiens
acatgggccaaagacagtgtattggttatctattgttgtgtgacaaattatccaaaatttgcagcttaaaatgacaaatattcattatctcttaggttctgtgggtcaaaaatttgagaggggctaagctgggctgttcttgtctcagggtcgctcatgaggttgcagtcaagttgtcggctagggctgcagtcatctgaaggcttgactggggctggaggatccattccaatactgctcatgcacatggctgtgggtaggaggtctcagttcctcaccatgtagggctaaccctagagctgctgcttgagttttctcatgatatggcagttggctttccccacagtgagacagaagagagggcaaggaggaagccacaaacagtgcctcttatgacccggtcttggaagccttacactg

SEQ ID NO: 155359 - DNA, 462 bp, Homo Sapiens
agaggcctgcatagagagtggaggcagcaactgtctagttcagaggagcacagtagatacttaaacctgtgtgaagcacagctgtagatcagatcctggttcaacaacaaattcttaaaacttttttggggttaaattggagaaatttcaatgttcactggatattggactatagaattattgctgatttcttaggtgtatgatggttttgtgggtagacagaaaaatgccattattttaggagatacatggtgagttatttagataagctgtgccttgatgtctgcaacttaaaaatggcttaacaaccaacataatagattgatagatacatacatacataggaatagttaacagagagaagacaaatcaaattatttaaactaggtgatcagtatagggttatccactgtcctatttgaacttttctttgcatgaggaaaggttcataattgacagttc

SEQ ID NO: 155360 - DNA, 616 bp, Homo Sapiens
  misc_feature (15)..(15): n is a, c, g, or t
  misc_feature (48)..(48): n is a, c, g, or t
  misc_feature (91)..(91): n is a, c, g, or t
  misc_feature (100)..(100): n is a, c, g, or t
cctttccacctccgnctccatgcaccagcaggaaattcggggagccanaggctggactaggactcttttaagaccaccctgtgtcaccagnctggagaanaccagagaatgaccactaatcctgacctaggaccatctgccaggttttgtttttggtaacaactgtgctgtcttcatcaactggcagacctgagtcaggagagtcagggagctctctcagcatatcttcagagcttgctgtcagcacccgggagtgggggcacgagtccagaactggagatgagctcagacacttgcactgagaaaaatgcatctaaagtcacagtgttaactcttcacttaactctaaggccaaggagccctgtccaaggtttataaatatgatcacaaagtgctaaaactgagaagagaagggctggttcacatcatcagggagtccccagcctccttctaatagcaggttctacaagtacacaagatgaagtcatttaactcagccttcaaaagttccagacggtaatgtttgtgaaatactagccctaatgccaaatgtgaagtgtgaaaatcaccctttctgggaccccacaaaatggggacaggctctttctttcttcca

SEQ ID NO: 155361 - DNA, 510 bp, Homo Sapiens
taaaagtgttatacagtttgcttttatatttaggtctgtggtgcatctcaaattcatttttatgtgcaaagttggggtcaggattcacttttttccctatggatattcagttgttctgccaccatttattgaaaagactattttttccttttgctgtttgattgttttggtacctttgttgaaagccatttgtccaagtgtggggcctatttctgaactctgttctcttcctttgatctacttgtctttatcctaatcctgcacagtcttgattacagtagtttcgtgctgagtctggaagtcagctagtgttaagtagtgcagctttgtttcatttcaagattcttttggctaagtcctggcatttccacattaattttaaaaattgcctcatccatttctattaaaaaacgagtttatagaaacacagtggttttcatatattaattttatgcccggagacattgctttattcactaagtttttaatgcatagttcctgaacaccctg

SEQ ID NO: 155362 - DNA, 530 bp, Homo Sapiens
aatggcttgttgtcacgctcttgtatagccagaatgggaggtgagaatttggctttggagagtttgtctttgttcctgctgttttatgtccctcatgtttccttttataattgttttctcaggtttgcaccttctgctccatctcctcaccacatcagcccccggagagttccagctccttcttcaatactgcaaagaacacagcctccctatacccagcagccatcaggttcacacctgaagtcctatcagccagaaacaaactcttcttttcaaccaaatggtatccatgtccatggtaagcaagaagctggcagtcccttgagttttgaaaagtgacattgtgctgttgcttttcatcttagttacctgtcgtggatttcagatgctctgttctacaccaggcttaggctttcatgacttgcctctaaaatttcacacttgataggcatgaaatcctatggtattttcctgactttggcctgatgatggtatgatttatgtcacatcgcactggtcagctcaagttg

SEQ ID NO: 155363 - DNA, 498 bp, Homo Sapiens
gttccagccaaattagcagtgtataaatggcacctaggtgagagcagagctgcggctcggtgacttgatacttggggcagcccgatgctgtgtgtggggcaggggaggcatccttactggagaggcagggcccagccattgggcacctctgggaaggggaggggaccatgaggcagccagcccctggcaggggcgactgtgccaccgcaggcagcgctccagtcgggaatggccaggatggcgccctcttgttggagtttttggttagcttttacgtttttttctccacccacggcacaggtgataaaataggatccttggtgcggagcttaaaattatgccagaaagccaacagctcccctcgtggggccttgccttaaacttgcctggtttgtacattttttgccggacgcatcaagaagcaatctgtgacaaagtctgagggtcttcctttatgcttgccctccacactaagagaagttggcgtctccctcctgg

SEQ ID NO: 155364 - DNA, 265 bp, Homo Sapiens
cattttgtttctgcttccagccccactgcctgctcccccgcattccaccagggggcattgggccgggggtgcccacacccctcctcacggttcgcttttttggggatttttaaacctgttcctcctaccccaggccccacctaggtgctggggaggcctgggcaagggggtctgggagggcaccccctggagccccccaagccatcccatcgggggtggtcgagggtgggggtgggggcacatctttgcattctttttagccgaa

SEQ ID NO: 155365 - DNA, 471 bp, Homo Sapiens
  misc_feature (84)..(92): n is a, c, g, or t
  misc_feature (306)..(316): n is a, c, g, or t
aagacatgaatgatcttttctttccattctcccttttcttctgtagattaccatggctgttttcactctaacagattttcaacnnnnnnnnnaatcaataatgtaagtttaattcttcccccctccctccaaataacttcatgaactggaggcacatgtgcgcccatattttccgctctgttttcctttgttggtcctccacagatagtgccctctgttggatgtgccggttcattttagcttccaccttcccttaaaacaattagaagctcttaatttagatggtactgatattaatgatgatgnnnnnnnnnnnatgcaagttttggccctctgcttgtctaaaagccttgaggcaaagagttatatgcagtttctctgcgggtgtctgattacgtggagaaattgaccagaaatgggatttttaaaatacagcacacgcctcggtgcggcttccagtaagcgccacca

SEQ ID NO: 155366 - DNA, 505 bp, Homo Sapiens
actttctatttttaaaagtaacttgaaataatatagtataagaatcctattgtctattgtttgtgcatatttgcatacaagagaaatcatttatccttgctgtgtagagttccatcttgttaactgcagtatgtattctaatcatgtatatggtttgtgttcttttactgtgtcctctcacattcaagtattagcaacttgcagtatataaaatagttagataatgagaagttgttaattatctctaaaattggaattaggaagcatatcaccaatattgattaacattctctttggaactaggtaagagtggtctcttcttattgaacaacctcaatttagtttcatcccacctttctcagtataatccatgagaggtgtttccaaaaggagatgagggaacaggataggtttcagaagagtcaaatgcttctaatgtctcaaggtgataaaatacaaaaactaagtagacagatatttgtactgaagtctgatacagaattag

SEQ ID NO: 155367 - DNA, 485 bp, Homo Sapiens
cccaaggattattcccaaactatgtacaattaatgggttgccttgcagagttggatcaataatacctgacacacttgtatagcaagcatacactttacatagttcctcgcatctattctttgaaacccagacacattctagtattgggcactagaaactggtgataaataataacaattacatatatttcctgaagaattatgtggcattccttgttttaagcacctttgatgccttagctcaatctccattacaatactatgatataagtaccatttaatatttctttttgacagatgggaataatcgaggcctagggagattaaattacttggccaggttcatgtaagtggcagatctaggattcaaattcagccggtctgaatctagagcctattcttttagctatgatgctatactttaatacagtaatacactgttcaaatgaaactgtaacatgtcattaaatttgaacttgtcaataa

SEQ ID NO: 155368 - DNA, 408 bp, Homo Sapiens
ctgtggttaatctcattaaataaatgaattttaataaagtttttttgggacaaatttacaaggatgcatcataacaatgaggatcaagagcctaaaataaactttttaaagtttttcctcatctttcacttgcagaaagcctcccaccttttgaaccaggcatccctttggatcttgtttgcatcagtataagcactaccctgtgacccaaaattatagtggcaaccttgagcatattcactgacagatcttcagctgtggggtgaaaactgatggcttcagctgctgtgctccttgcatccagctctgcatacacattgagtctatgcttctcatgggtgctgccaagcagtgactgggagtggcagaaatgctatggtaggtcatttcggggaagacgcagatcac

SEQ ID NO: 155369 - DNA, 576 bp, Homo Sapiens
tttctcttccatattttaaagaatttattttaattgaatgaaaactcatatcacatattacctctttcattaaatactgttgaatcctctcaatcaaaaaagaattttcccctatttgaaagtctgtgggattgtacacttcttttatttcaaaacctgttttgctgtgaatgtgttttgtgaacatgttttctaccagtttgagattccaagtccctgaaagattgggaaaatatctcatataactttgcgttccattcaaggtctattgcagtatcttgaatttggaaactagttttctgtcttctctgcaccacttccaagtacatggaaaagggtgctaaaatagtactctttctgtttccatttcagccaagaacaagggacaatagatggcatacacccctcactttcagtgaggtgctagacatgaaaagcagatgactgaaaccttgttttcagtcccacagtttgacatccaccttaattgaataaaaggattgaagttgaagagaacaaagcagggaacttgtttgaagaaagctgattgaactgctacggcattccctcattcat

SEQ ID NO: 155370 - DNA, 357 bp, Homo Sapiens
ggaaaatatttggagagatttattttaagccaaatttgagtgactataacccatgacacagccctcaggagaccctgaaaacatgtacccaagggggtcagggagcagctgggttttatacattttagggagacatgagacttcaagtccatttaaaaaatacattggttttgtccaaaaaggcaggacaacctcgaagggcggggaggggaggggagcggagtgcggagcttccagtttataggcagatttaaaaattttttggttgacaattggttaagtttatctaaagacctgggatcaataaaaaggaaatatctgggttgaagtaagaggttggggagaccaaaattttat

SEQ ID NO: 155371 - DNA, 529 bp, Homo Sapiens
  misc_feature (108)..(116): n is a, c, g, or t
ttgttcctggtattgggatgatttatttacttcaaaaatactcattcaatatttattgaatgcttgttacatacctagcactgaacaaagatactaagggtatgaagnnnnnnnnngacatggttttggtctgcaacagtttcgtctagtacactcaagcatcataagatcttgatttatcttctcaattatccaaataagtttatattgtgctcaattgttattctgtatatggtatacatgacagtttttctattcaaatgaattgatgcatctggactatcgatgaataagcataatgaggtagagtttaatgaacgttagtcttggcatcagccctggcatctcatcttatttctgctacctcttcattgtatgacctttgtaaatgagttaacttttttaagcctgatttccatagctgttatgtgcaggtaatagctacccgtgctgttgttgtgaggataaaaggagaaaggcatataatgcacctggctcagttcttgatagttctgtaaatcgatggctg

SEQ ID NO: 155372 - DNA, 592 bp, Homo Sapiens
gatcaggttctcaaagacaaggcctagtttaagaataatttttcatgtaagacaagacagggagtatttgtttctacatcatgaaatgagtccatctattcccctctgtcccttactaaaatctggaaactaaatgactgtaaaaaatgaaacaggtgttaaacacccccagacaataaaatagaagcaatggcaaagcaagattttgggaactgaaaaataaatggatcagtgttaactgactcaatagacaacagaaatgaaagtatcagtgttagatagaggtgtttcactaaaaaacccagaagtgggttgaaagaagtcaaaacacacatggcccgcagtaccttcccgtgtaaaggtaattgaccactaccccctacacgagtagtaagagaagtgttcacagactaatctccactgaaagagggatgcaactcagttcgtggagatagggggatatcctacactatatgacagggtaagaggtatttatacttgaaagactgacggaaggtctcacattattgaacacagaaaagatcttctagagtacgacgtgtccctccaaacctccaccgccaagaaaaaa

SEQ ID NO: 155373 - DNA, 608 bp, Homo Sapiens
  misc_feature (514)..(514): n is a, c, g, or t
tttctttcactttataattacttatttgatgagctcctccattttcagggaatcaggtaattataaaatctgcattatcaaacattataccttatttttaaaccctgacctctaactcagactctgtttcccaacactgacacttctaattcagtatatcccaattgaactccttttccaacataaactgggtagccctttttaaagaccatttcagaaagtggcattgctgtttttccattttcccaggttctttagtaggtttgtcaagttgccaatgagtctcaattctcattacttattgccctagctgagaattttatcacctcattgctaccgaatgattatcaccatattccccaagataacctttcttatctttcactctaaactgttttactctttgatatcaaataaatgttcttaaaataccactttccaattgccttcccctgcttcagaacagaaaatagctccctattaactccaaactctttggcttactttaaaactntataatctgaaactacctcacacattcaaacatattttccactatatattcaaccaacacttacctcatgtagattatcactgcatgataatct

SEQ ID NO: 155374 - DNA, 605 bp, Homo Sapiens
tttactttcataattgtaacattgaaatctttaatctggaatatgtactggcataaagagtgaggcacatacatggctttactattttccagagggccaactgcttttactgaataatccattttactcgttaattggaaacacctctagcctgtactaaatttccatatttatttggcccgtttcaaagtcctctattctctgctcatctgtccacatctaagtgctttaactattgtggctttataaaatattccaatatcccataggcgcttatccttagtacttcctattttaaagttttccttgcagacaggtactttaaataccatctcacagcacccatcatgtcctatcttcaggaaataaaatctctgggtatttccaagggaagtgaaggactgacaccatgattagaaagcagagccagcaccatggcccgtccctgagcatgtccagcaaaccctgccaggctctgcagctcctgagcaccctgccttcgggtctgccagtgtgtgggggcaccaagagaaaaacaacccagggggaatgcctccttcccccagcaggaaagcagcttggtcatcatctgtctgacgtacaat

SEQ ID NO: 155375 - DNA, 234 bp, Homo Sapiens
cagaaatagagttaccattagaagggctcagttgtgtgtgtgtgcatgtgtattagcagtgtttcagaaaggtctgggtgtcactggaagactcctgtaaggagcaacaggggttcaatcagaatggtctccagccccctacctcagtcagaagcagctcagtgtggggctatttgacatattagggttccacataacacatcactcaactaaagggctctattgcttagcagg

SEQ ID NO: 155376 - DNA, 170 bp, Homo Sapiens
  misc_feature (82)..(94): n is a, c, g, or t
tcagcttataagacattttattggttattgcttggtagatttcttactctgcctggttcaaaaggctcatgggcacatgggnnnnnnnnnnnnngtctggagtggcaaaaaggtgaggttactccaacaagaaaacaggcattgccagctttcatctttgctttggctcc

SEQ ID NO: 155377 - DNA, 154 bp, Homo Sapiens
tctatatagatcatatattacttttataataaaacattataaaaacaacattctgtttaccttttcaaggctgtattggttggagtgtagactgaactgcctggggtctgtttctcttcagtgatgagactcttaggaaggcaggaatggatag

SEQ ID NO: 155378 - DNA, 475 bp, Homo Sapiens
ctttcttaagtggtctccgactttgtagcatttttatttaagctaaaacagagcacatgtatatgtacataagacacattaaatctataaatactatttattcattttatataaactaatgtaatggaaaacaaattcttatgactttgtggttttatagatgttctagaaactttgtatgtaggtatctacaaaattagttcattcccctgaatatttttgcattcatatttttgaggtcttgatgttttcagcctctggcgaatctttttcattgaatttgaaccatttgtaaaatctgtgatgctgaagcagagtgtgtcacaaagtgatgagaacattactaaaatccacggacgcactgcgacctaagggctcaacggctgactcggcagcgggcagccaccccacgctcccctgcggtcactcgcacaccacagcctgaagctcccccagcgcctgcacctcgcacaca

SEQ ID NO: 155379 - DNA, 464 bp, Homo Sapiens
tttaaaatgttttggttttaatttatatcatcataaacatgaagagacagaacgcacataagcaaacgctcttaggggcagacaatactttttagggttataaagcttcactggagaggcactcctcacccacatcccctatgacgcaggaaggagatgcagcgcggtgctgtcctgtgtgtgagaccccaggcccctgccacgcctgtgtcctgcaggagccagaccccaggccagaccccagaccccaggccagaccccagatcccaggcccctgccacgtccacgtcctgcaggagccagcgatcctcacaccgtgttctcgggcctgcagttgggggagttccaggaacagatgtacgtccacctgccccacgagccacacttcctcctgggcatgcaccctagagaaacctcgccaagatgtattcttggtgtacacaccaggaaacacctgcgcaccc

SEQ ID NO: 155380 - DNA, 662 bp, Homo Sapiens
  misc_feature (240)..(288): n is a, c, g, or t
gtttagttagggtgtccctatgttgcccagattggtctcaaactcctgggcccaggcaatcctcctgcctcagcatcccaaagtgcttataggcgtgagctatcggcacccagcccaatgtattcttttaaatgaaatctactccaaaaattgtctctatgagggatgacataaagaaaaaatggtaaaatatatgtaaaatgctaaaaatgtagaagataccagacttccagacttcannnnnnnnnnnnnnnnnnnnnnnnnnnnnnnnnnnnnnnnnnnnnnnnnattaataaagggaatcagcttagcactgaattgaactatttaagataagcttcctttcctttactgtgtgacccatttgtttctttgactcaagaccacggtccctgccaggctgacatcttgccccttacccaggtaagtgccataagtcacgtttctgtactcatcccaggagattaagccgtcttgattcatatcaaactcctgccattggttttcaacattgtcatatatgtatttcttctgggcgtgcttaatccaggatttcagctccccctccgtcacaaacccatctttatccacgtctagctatttgttatttatttatttttagagccaaggtcttgctgtgccacacagcacacagtagcgaa

SEQ ID NO: 155381 - DNA, 442 bp, Homo Sapiens
tcaaaattttgatcattgagaattactttataaaaggttggacatcttgcattacatgaacaaaggattttgttcattttgcatgacatgaacaaagcattttgtattctaaataggaaaaaaatctctcacaagaaaaatcagaactattctcccattcagtgtatacttgatccacacaaagaatatcaatatgcaataaaggggaagaaaaaaatggaggtgggagataacagggtatgccagaaagccaactggttcagaagttaatggacttgaattgaactcccattgtgaaattaaattaatgggcaaatcaccatgagaagtgtttttgttccttccctcttcttagttttcctacctcataagtgatttttaagatcccttcccaatataatactaaaatatttggctttcacatcactgcttcctccttaac

SEQ ID NO: 155382 - DNA, 544 bp, Homo Sapiens
taatgctgatcaacagcgtaacatgcaacacagaaatttagaaagctgctttctaaagaacctaatccaccaatagatcaagttatacagaaaccaggagttgtacagagatttgtgaaatttcttgaaagaaatgaaaattgcactttacaatttgaagctgcatgggcattaacaaatatagcatctggaacttttctgcataccaaggtagtgattgaaactggggctgttccgatttttatcaaacttcttaattctgaacatgaagatgttcaggaacaggctgtttgggcacttggtaatattgctggtgacaatgcagaatgcagagattttgttttgaattgtgaaatacttccacctcttttagagttattaacaaattcaaacagactcacaacaacaagaaatgccgtgtgggccctctcaaatttatgtagaggcaaaaaccctcctccaaactttagtaaggtttcaccttgcttaaatgtcctgtcacgactgttgtttagcagtgacccagatgtgttagcagacgtgt

SEQ ID NO: 155383 - DNA, 538 bp, Homo Sapiens
agaataagatttttattaaagcacttgcacccttttgtatgtgagctggtctcaaacaaagtcctcacccacagcagtttcagcagctgaacagtcccatggaagttctgactggcaggcatcaacagggctattagcacccagcatagtttgccctgagtacggaggatggatgctttggctctaactactcaccaataattgctccttccttaccttctttgttaatggtaaactgctggaaatggagtagtacaggtaacaattatttttaattgtctttccagaccagtttttggttgtgtgttcagtaaatgatagtctgtatcacagccttcaagtctggattatttttctaaatgcatactctacctgttcagttacactcgttgtggaacaacattagcttatataccagtaagttgtcgagaatggataaccatctgtcattatcactgaccttcaaagactcatcaagcagtccctgcataaggattggagtggtttgaagtttctcttccaagcactaacatgtccc

SEQ ID NO: 155384 - DNA, 166 bp, Homo Sapiens
cacacacactcttaaatttatttaaaaacatacaagcacctctgtaacttgggatctggcattcagtgctgcctcagtggggtgcataaccctcaacatccattctcatgattgatgccatgcaggctccagggaacgcttcttctcatctttagctcagtgccct

SEQ ID NO: 155385 - DNA, 321 bp, Homo Sapiens
ctgtctgagctatcataaagcattctctttagttgtgatttgattctatagtctgtttctaaatgacatttgtctgtttcttaaatgatctcacagccatggtaataatagatgtgtactcagaagatcaataaggtaatattggaattcatgtgttttttgcaattaaggcaggcatttgccaatgtcttcttttaagcagtagttggaaacatctcaattacagtgtaacaccttagagctaaaaacatttgttcaacacaaactagaatcacaccttctcactagatatcaccaagggaatgtggttttaaaaataaa

SEQ ID NO: 155386 - DNA, 110 bp, Homo Sapiens
aaataaactttatggctgtttgttctacaatgttctagaaattctcactcaggtacacagtgccaacaagtggcttgtgaatgtgttttgttgttttgtgctacaatttt

SEQ ID NO: 155387 - DNA, 550 bp, Homo Sapiens
tttgattcgaggaatttgtatttggaggataaaatagttgatcaaaggtacacatttttacaattttgggcagtattaatatacagtagggaacctacagtgagagagggagagagatgtggacaggtggtgccagagaaggaagactgcaggggagccgggtatggtgggggagccggatgggagttaagaattttgttgcagggatgacttttagctgctagggcagaaatcatgagtcgtccatcctcccttatctccaagttagggatcattcccaccagcaacgacctccacttcacttaaaagagaacaactgatggacatttctaaaaacttaaagtttggaatcatgccataaggacgtcattcctggccctgccccactggagaatcattagggtaaaaactgcattgttaacccggggtgaatggacatgagctgctcttctttagtgctcctcagtctgtctctaggacaggttaatccccttcccatcctgccccttcagaaaggagtaaagtcctaaacatcaaaaggaaaagaaat

SEQ ID NO: 155388 - DNA, 325 bp, Homo Sapiens
agggagtgagtcatgttcacgtgctgtcacagtgactgcgttcatcagttctcccctgggtgctgctccatgatattgtcatgtgggcgaagaacttcactgagcacaggcctggatgctctctgctcctatagggtctaatatgccaccactgtaggccaatcatcgctttaccgactaatagttagcccacataagtggcattgaactctagggcacccagctaataagtaataggcctcaggtgaatgtccgcattccaagatcgtgtattttccacggtattccctttgaccccaagatgttacagtgcgtgcgtgtggtg

SEQ ID NO: 155389 - DNA, 498 bp, Homo Sapiens
ttatcttgcctgggagagttttcatcgatgccactgttatgtgttggcattggccaagaggcaggcctgggattgcttgggatgtgcctgtttaacaatcgtagtcatttgctgactactgtggttaagaaatttttcattagagacaaatttccaaactaggaaggaagaacttcattgtcatttactcctgatgcagacttttaaaatttcatgagtgaatagacatgattccatataaatgattacatcacatgcaaataccatttcccatagcgtcatgattaagggctcctatggattacccagcggggagtgatgttggtgattatggaaggtggccttgtttccttgtttaggaatgctgggatttgatctgattattagaggcctctcttctagaggccaagcacctccccaggccacagaggatttgaaggtgatgctgtgtttgttcattacattttggaagatattcagatcaaatcccagcattcc

SEQ ID NO: 155390 - DNA, 160 bp, Homo Sapiens
ttttttacatacagactgtatggaaaatgaaaactgggaacagtcaacagaaaatggacattaaaacaaaaacaaaacgaaacaactgtaaatgaattggaaggctgccacaagttttatcaacatcccctattattatgaacttcatttgcttgagttt

SEQ ID NO: 155391 - DNA, 508 bp, Homo Sapiens
tttatggccatttagcattacataattttagcctatattcttgaacatgaggttgttcataattgttatattttatgtgccacagtgaaaatcctggtacataaatcttggtgtgctcacatgtttcctaaggtgcagttcctataattggaacaactggctcaaaggttggaagggttttccgggcgtgggtatcttgtctctgggggcatcggttctcctactgcctccagggggtgtctgccctccaccctgctgcctcctgtccggccactgcccagggtttctgtctttctgctcagtctttttcagtttggccaataacggtaccttgttgttttcacttctttgattcttagcggggctgaacattttttcgtaccctctggccatttgtatttcatagaggctgcttgtatgtattaaatgcatttcttttctgtaggaaactccgggacgttttacagcagaggctgatcaaattcttcattgaccagagtaaaaaagt

SEQ ID NO: 155392 - DNA, 532 bp, Homo Sapiens
ttttgtttaaagtgattctttaacacatcatcatttccaagcttctgtgtcttcactctttcctgtcacattgaaacacttttctactttcattgttaagtaggacggtttacagtttgcaggcatgaggatgaggatgaggatgagaaacagtttctgtttactgagcagctactatggccggccgaatgccacacacatacccagttccagtctcctaacacctggcgcccatcacacgacgggtcagtggtgagctcagatttgaacttgggactgcctcactgcaaagccaggtctttcttctgctctcacacccccatccatcctctcccagcccctgcttcgaagctaagcccaagccttgcccaatgaaaactgcccccagcccagctgagacccgcagaccgcttctgggaggcactgagtgagcccttgctactggttttcacctatgatttacagcggccggaagcaaacagcattatctggagttttctctacatttgaaaatcactcctgattcagtctt

SEQ ID NO: 155393 - DNA, 467 bp, Homo Sapiens
ttctttcaaagaagcatccacagtgcaaacccccaaaatctttaataaaccaataggttcttagctataccgtgatgaaaatacctaatgctttcagtgtttctctaacaaggagaataaacatctattaactttctcatacgacagtggatgttatttgccagttacaaaaaagagattactcaactgaataattttgaaataagatgagataaagtattttttagatagatcaagttatttactagacatataagcttactaaatgtccttgtaacaaccatagtaatcctaagaatttctgtcatttgaattacatccataattagcaggcagaataaaataaaaatctacagttcctcaatgttgtcattattacattattattgataccttcacaagtaacaagagaccatcagagtcgggaaaaaaacatttttaatctcgaaatggcatattaaatttag

SEQ ID NO: 155394 - DNA, 489 bp, Homo Sapiens
ttttgccacatttcacatttgagaacccagaattcagctcctgttatacaaaatttgtaaaaatttattgccttggcgtaaagtgacaatcatgccttggcgtaaagtgaaaatcttcacagaagggtatgctttgtgtcaccaaatgggggtgcagctgtgtgatatctgtgcagtttgtgataaaattaaaaattttctgtgaaagattcttaactggaaattggaagggaaaacaagaagaaacaatgtaatgtagcagtggaaacaaaattctcacaatgaatagcagtctttccagcttctttgacacggatttcctcatcatcaatggcggctctcctgaactagggatgagtgtgaatctccatttgaggaaggggaagaagagcttggagggtgacagcctccccctgagagagccagttgcgttcatgattttggttccttcttcctcctaattaagcatctgcccaggagcccaggagc

SEQ ID NO: 155395 - DNA, 275 bp, Homo Sapiens
tgacttcttcacttttgggaagatcatgcaagggactggtctcattgcggctgctttaggtatagtctaggaagctgctacggtgttgggatctagccacctggttcaactctgtctaatgcctgggattccttttctctgttactctgtctcttccttcccactacacattcacattcacatgcagtcctatatactgttttagactttagactttacataaacctttttggggacattcccaaaagaacatatgatactattctctttaatgc

SEQ ID NO: 155396 - DNA, 522 bp, Homo Sapiens
gggagcagttgtcagatgctgaccggcagccacccctctcccagtggccccggccctgccacacataccagcagccctgccacacttgactcattcctggaaggaacctggtgcctggacacctgagtgtgcagcgccactgaagctcaacgcttactgtcgctcagggcctcgaggctcagaaagtgtgtgacttaaacacgtcacggaggccaggcacacagtggggccaacactacggcttcctgagctgtccagcaggtttctgcttctcaacgcggccctgcctggttctgtaagagcaggagcaggagcaggtgattaggacgtccgcgcaggagccgtggcaaaaacgcttccagacaatggggaactcagacgtctggaagggacgggggcagaacgtcagcgccacagacaaatgtgaatcaggcttattacacatctattgagtgagtcagctgcacacctcaagccttttcctgattctgatttttaaatggaatttcaaattctttcttt

SEQ ID NO: 155397 - DNA, 427 bp, Homo Sapiens
gcggccgccgggctggagaccccgctttgggagcccccagcaggaacaatgctagcctgcctgacccgagggaacttactggacgtcctgcaggagggcttcaatgagcaacagctgcaggcctatgtggcctgggtgaatgcacagctgaagaagaggccagcagtgaagcctgtgcaggacctgcgacaagatctccgggatggggtgatcctggcatatctcatcgagattgttgcaggagaaaagctgagtggggtacagctgagtcccggtaaccaacaggagatgaagaataatgtggagaaagtggctacagtttgtggcctctaaaaagattcgtatgcaccagacttcggctaaagatattgtggatggaaacctgaagtctatcatgaggctggttcttgccttggcagctcatttc

SEQ ID NO: 155398 - DNA, 468 bp, Homo Sapiens
ttttactacacatcttcctttatttaaaatagagggctatatgcttcacagaaacaagtgcaagaagtgcttgatttattatctttcccactttacaaaacaatacattttcagaaaatgcatacataaaaatataacatttaggcagataattatttacatctgaagacagatgaaagttacacgataatattaaaaagctttaaaataaatacttttatgacttgctgttggtaaagttaaacattttggtataaaggctatcactgagtttttaataaattctaaaacactattatttctaaataaaataagtgtatacatattactataaaatgcatattttcacagactagaaattaatgaaacatctgaatatcattcatttctctttggagtttgaaattctcttcaccttccacatttaaattacaactactaaaatccatctacatatttttgatacag

SEQ ID NO: 155399 - DNA, 592 bp, Homo Sapiens
gaaattttgggtacttttattctacatcaactagtaatcaactacaggcacgactcaaagatgttgggggctcagttcacattaccacaataaagcaagtatcacaatatagcaaatcactgaagtttttagcttctcagttcatataaaagttatgtttaccctatacaatagtatattaaatgtacaatagcattatgtttaaaaaatcaatgtgcataccttaattaaaaaatactttactgctaaaaatggtaacaatcatctcagccttcaacaagccataatctttttcctggttgagtgtcttgcctctgtgttgatgactgctgactgattatggttgtggttgctgaaggccaaggtggcagtggcaatttcttaaaataagacagcattgaagtttgccatatcgattggcttttcctatcacaaaagagcatgaaatcttgttttatagcatttgatccacagaataactttcaaagttggcgtcagtcctcttaaaccctgctgtttctatatcaactaagtttatgtaatattctaaatcatttgttgccatttcaacaatgttcacaatatcttcagc

SEQ ID NO: 155400 - DNA, 313 bp, Homo Sapiens
cttggggacatcgctcggggacaggagagccccgggcccccgccgccccgagccgtggccgggaaggggaacacagtccatgcgtgcggcgcccgacagcctcataccccgcacgcccgagccccagtgcaggcggcggcccggcccctttgtgcctggagtgtcacgcgcgggcgctcctgccgccgcgcctgggagaggcctccggcaccccgggcccctttccaagcacaacagcagccctgccgcggccccgcgctgacccactttccctcctgcctcctcagcccgaggccgagaatccagcggccgc

SEQ ID NO: 155401 - DNA, 518 bp, Homo Sapiens
tgttttggtttggttttatctcccttcatattttaacttattaaatcttctattattatgtactatgatttattcctactaaaacataaattagtcaatttggggagctattaaattttgatgttgcctcagttattttcattaataacttttgctaaaatttaccttttaaaagttctgaaatttggggttggtattgcaaaatgaattgaacggatggtgctttaatgagagaagtaaaggaatatatgcctcctgtgtacttttggagaaaactgaagatttagtttccatttttctttataataaaatatttgagccactgtataaacatgagggtgcacatgtcaagtacttagctaaaatcaacaaagtgaggactgtgaagataactttcatgtagttggatttttttatataaattagagcgtcaattcccttttattcttacattctcttgccaaaatggatcctttgatttttgtcatttgctgctaaaatatattatatgaaggtaa

SEQ ID NO: 155402 - DNA, 764 bp, Homo Sapiens
  misc_feature (591)..(591): n is a, c, g, or t
  misc_feature (594)..(594): n is a, c, g, or t
  misc_feature (607)..(607): n is a, c, g, or t
  misc_feature (678)..(678): n is a, c, g, or t
  misc_feature (731)..(731): n is a, c, g, or t
  misc_feature (752)..(752): n is a, c, g, or t
tccggcctgggttctttattaaagcaatgaattctggatgtcctggcttaactagattaagagggaatgaagcttcttctgaaggatcagtgttaccacagccatttccttgcattacaccgtccttctcaggacgtctatgagaagccctgggcagcctggacagggactgccccatgagtgctggtggctcacttggggctttctgcaggtgaaggaagcagccctgggagcttcttcctttggcacacagtgggcttcagctgggactgcaccaatcctctgctaacagcaaccatccttggggggtccgagggagcagctgcgtgacttttcagcagtggctatggtcactcctgaggcctgggaagagggtcactgtccagcagagctggcctgctccagagtgatctggaccttgtgccccttaacacaagaaggcccgactccaaaggccaacactgtcctcgtaagtttccaggacactaaatggccacttggtcctggttaactcatttctaaacacaaaggggacaggtctgagaaagtgcgttctctaccctaccctgagctcatctgttctgaggacanaangggacggtgtgtncaggctggtgggcaaggctgcattttcggggtttctttgctgtggaccccatgtctgaggaaactgccccngggccttttgcttctggctttcgacttcaggttctttctctgtctctgttcangaacggggcttcagagtcccnttgaaccgtgtt

SEQ ID NO: 155403 - DNA, 436 bp, Homo Sapiens
agatccctggggccaggccttgctggtttccactgatgctggcgtcttgctagtggatggttagtgagtagctgctcctacaaatgtctttttcatgtaacttgtagtacttctaagatgagtgaccaccaaccaactccctttgggccataaatgtgtgatctgcagagagtttagcgaagttttatttccttatgaaattaaacccttgtttccagggcaagcagaggaaatatactctgaaccaagcatgctggagggtgggccataggttctcttcccaaaatatatgatgggactgtggatatcaaatgacctgcaaaaagaatctccttttcagccaatacttattatcactccaacattttactttaaatcaacaaggatacattatttagaaccactgtctctgggacattccctctctagaagtctt

SEQ ID NO: 155404 - DNA, 550 bp, Homo Sapiens
  misc_feature (516)..(516): n is a, c, g, or t
  misc_feature (519)..(519): n is a, c, g, or t
gaggtaatcagcctttatttttagattattctgacttcagtggacaatatattggaggtgtgcaaaagctgaggtaaagagagacacagtaggaggctctttctcagtccagcaggaagaggttggtgccttggaccagatctctccatgggcactgtcagggtttgaactctggctgatgagggtggctagcaggagaaaacagaccttttagcaacaggaatccctgtgttctcttctctgctccctcctgctgcagaagatggggtccctcgcacggcacggtccatgtccctcacgctgggaaaggtatgcatgttcaaggaataccagggctccttggagcccaactgttgaccaaaccagggctctcagtgcggccttggtcgccagcggggcgctccactttccgctccggagatggcaccaggagagatgggagtctgccaggctgtttccatggccacctcatgaagcccctgctccgggagcgtgacaggcgagactctccttcgncgncacctctcgtctcagatgaacccctcgtgcc

SEQ ID NO: 155405 - DNA, 498 bp, Homo Sapiens
  misc_feature (82)..(82): n is a, c, g, or t
  misc_feature (90)..(90): n is a, c, g, or t
agatggccaatattttgatttataaattatgggtcacaggccagccaaacttgaatgtgatttattctgtgaaatcattctnccaaccanaccatcccctcctgtgtgtttccagacactctgaatgtatttggggttagttatgtacacatctgtcttccctgctaggctgtgagatccagaagggcagggagcacctatcacacaagctggtacccccacctctaagcactgtgcctggcttacaccacctgctcaatcagtattttctcagtgttgacaaaaatgactacatgaaggatggctttctttaatctcatgttcattccacgttgctacagtggcgatacaaaaacgaataaaacacatttcttgctttgagaaggatacagtctaagaatattagaaaacatgaatacagcttttaagacagaacatcatgttgtgtctgcaatctctagcccctaatatgtactaaactttaaatattttgtgata

SEQ ID NO: 155406 - DNA, 501 bp, Homo Sapiens
catttaataaatctggattaattttaataaagtagacaaattacctaaaggttagaccattagagaatcagtgtaacaatcaaaaaggataaagacagaggagaagccttacaactacattttaatcttttggttttcctgaattttgaattttaaccaatgtctctcaaatgtctgggtattcttctacatacactgtagcaacaaaagaagccatcttcaactatgaaaagttgaacaggatgtcacagaatttcatagtttaaaagtctgaggtctagattcagatccttgctctaatacttaagctacttagctacttagtaagctatgcgacacctcaagtcactttacttctgcgattcagattcttcattgatacctaaaccttattaagtttactacaagaattaaacaattcaatacaagtgtagttgcttgaaatgtactcaaatccatccattaattttgttcagggcactaggcctatttttgcttggt

SEQ ID NO: 155407 - DNA, 622 bp, Homo Sapiens
  misc_feature (12)..(12): n is a, c, g, or t
  misc_feature (48)..(48): n is a, c, g, or t
caagttacaganagcccctcattgtaaacaaaagattacaagttatanaatcaaagtacacacaggccagagtcatttatacaatgcaatgcattctgctcccaagccaagttgaatttttatgtgcctgtataaaaatgcatatcaatatacctttgcaaatgtatttttcattataaagcaaatgaatacactttctacaataaataatccgctgggaggcacacctgcggggtttgaggtgggcgggacgacgggagcggggacacacccaccggcggtcacgggcagcggagtgtttttggtgatctgcaagtgatgtacacagcataactttattctcccctctttccacaaagtaccattcaaaataatgtcattttctttcttaaaatacacatttgtcattgtaaatttacatcccgtcttattaaataagtggtactctgtgtaaagagcatgatttacaaaattattaaacattcaaaagtctttaagaaaaagctacatatcaaagaaagtgacgccagcagcacggcctggggacgtgcgacagacgcactgggctgcccggacgtgcccaccccactcacagcgcccagacggagatggaatcatagaa

SEQ ID NO: 155408 - DNA, 419 bp, Homo Sapiens
gtcatgtcagaaacatcaattatgaaatactcttgtttgcagaattatacttccacaagtcttcccgaaaggaagaaattcagaacttttagtgaagcaagacatggagctgagcatgatcaataactatgtcagtgattcttttgaggtgtccactgtgtgggccttttttctggcacacccttggttaatcagtgcttctaactactaccctctttccctggcagtttggcttgctgtatcctttctctgctttctgctctaaaatcagtccgtgggtttctgctcttgtcaggtatcctgggagagagattggctccaaggctactctgccattgtggcctcttttctatcagcaggacaccttctaaagcagtctgattggagccaggggctggtgcttctgggcaggagatgtc

SEQ ID NO: 155409 - DNA, 511 bp, Homo Sapiens
agtaactcagtttactgtgatcttttgattagtttctcgagtcctgaaaaagttgactttgatcattttttgaaggccagttttattgctacctttatgaagggacaaaatttttaagttccttaatccaccatttttcctctcaccacactattacataattttacatcttaaccaaatagttaatagaacccaatcattatgataatctcagactgaacaatgtacagttgtggtttgaaactttgttttctgtgctctcaacctcttataccaaggacatccagctgaattataaaggatgatattagttcattttttcttcttgccaacatgcacaagcactctaccaaatttcatgatgtttatttacaatacatgtaactatcattgtgcaagacagggaattcctcaacgggaaacacataatttggttatatttttaaatgcttatcacaaagcctactacctagtaggtacttaagaaatgtgtttaatgataagactaatg

SEQ ID NO: 155410 - DNA, 501 bp, Homo Sapiens
tgtcttctaagtattgtcttggtctcaattttttgccctttaagataagaatctcctcattccttttagtatggaaagggggtcttttatatgagaattttattttttgcttttaagaaacagcacgaaggtcaaaataatattttttaaaatatctgctagtttttacgtgttttttacttaaattgtcagcatgccagcctagctgaggagttttggaaaaagagagttagcttagagcaagagagtaagaaggaattctaagaaggggaggggcaagctccaaagaggagagtctcaaccaactttgagatagtattttatagctagtcagtctttgagtccgggttgggtttggtttttttagcctaaagatatcccttgagatatgagtcttatttggaatgtatgattttattgccatggtcttttagtttagttttaagaacaacagactgcatgatccctgtaatgtttgaacatgttaccagctggaatctc

SEQ ID NO: 155411 - DNA, 517 bp, Homo Sapiens
  misc_feature (193)..(206): n is a, c, g, or t
  misc_feature (294)..(341): n is a, c, g, or t
cagagcactgattccgaagagaggcagcagggaggtgcatgcctccagaagtcatttgaacccgggaaagcaatgttttttcaaatcatgcttgccactttgctatgaaggagtgataacccactttgagaatcccttcaatagagtttctgtcattggtactacacgacattttgggggctctgagataggnnnnnnnnnnnnnngccaaatcctttagcatagagttggattctctaaatagtttgtcacagtttttctggagtctaattgtctataatctgaagaaagagnnnnnnnnnnnnnnnnnnnnnnnnnnnnnnnnnnnnnnnnnnnnnnnngcatcttgctaaattttgactctaattctgatacttaaaaggtggaataggggctacttgtctgttagaaaattgctaagtccttaattgtgatgaaaagtctcaaaagtgatgtgctcaactaagattataatttctttttagtttttatgattacagatttaatgatatggcaa

SEQ ID NO: 155412 - DNA, 504 bp, Homo Sapiens
ccaggttaggatgaaggttactagcattgcagaccccctgattagccttgaattgaactatcaaaaccaccacctagcctctccattaaatacatcacagtgaaaatattcattatgatcacatttctttatttgaagcaaacctgacatgatacgccactgaaagggaggacattatagatgttgataaatgtgaaggaaatacataggagctaaggatttttatatgtatcaccaaaatgctaaagtggtagataaacaactcttagctgttatatagtgtaagcaactccagctactctgaactgtcactatcctttgttttctcttagtctgataactctttcacatccaaaatctggcctgacaaaaacaatgaaacttggtgctctaccaaacctcagttctctgtttgactaagctgccattgttactgtaaagggtgtggagccaaagggatggtagggagtgggctgcacctagtgtgggggagatcagtgccag

SEQ ID NO: 155413 - DNA, 497 bp, Homo Sapiens
tcaagtacataactattttattgtcagccatctctcctccttgtgttaactttttaaattatactgataatactcattttgggaacttgttaagaggccgttgaaaggaactatgaacaattatattaatgcattgtgtatggaactcattcaggcaggcctggaacccgtttcttatattgatacaacaggaagaatctctctccttgctaagtttcatccgcgcagggcctgttctgtgcaaggcactgttgtaaggaggtgggaatactgggtgcctcctgctctctggggaagataatatggggggcaatgtgtgagcagtgaaactcacatttacggtaaagtctaaatgcagccacggagaagcgcaacgttgtgtggggacactgggcaagaagcacacgacaaaggtaaagccatcaagccctgagagagctcccttacccaaagccggggggaaccttgaaaaccccaggcaggaaagaaagcaatta

SEQ ID NO: 155414 - DNA, 232 bp, Homo Sapiens
tatgtgcccggtgcctaggagggccacgtccctgctcccgacaggtgggcactcaaaaaaagtttgtgaatggcccagggtgccaactttccaggaatagctggaaagcattatactgaaacacgtgcttccggttctctggggagcccttggtttttgttgctaaaacttgtggttacacactattggctgtttaagtgactctgtttttgtagagttaatgttatttagg

SEQ ID NO: 155415 - DNA, 406 bp, Homo Sapiens
ttattcacaggcatgatcacagcatacttcaggctggaactcctgggcttgaatggtctttctgccttagcctcctgagcagctgggactataggtgcatgacgccgcacctggccataacactccttctcagctcatttttgagtcatgaaaaatgctctttcaagaatcaccaggcctatgataagtcccatggaacaaacctatcactgtgtaagagctgagcaggagaaaaccatctctcctcatacacctcatttgttcattcaataaaaattcatgacacaccactatggacatcaggaagtagagatgaataaggctgggtctctgccctaagtgattagcctggaaagccatactggacacagtgtccatactggcctccttgtctcctttcctgccc

SEQ ID NO: 155416 - DNA, 481 bp, Homo Sapiens
agccaaagaaaacctaagaggctttgttggggaggaacaggggaccctgccggaccctgcaggtttccctttccctactggctgaaagggagggctgcacacatcagggaggagaaatagaggaagaagatgatgggcacaaaagcagaggggcaacaaagtacagatcacatcttgggggcacagggtacagttctcagaatagagaagaatgtccaggtcaaaggtttcctagaaaactcccttctctttaaaacagacacatgattttccttgggacatttttatatacaacttacaactgccagatcactcttggaaaatccgctgctcatcttggcagtggcagtggaaagaagccagtgtccttagacatatctctttgtgggccccagccccaacatgcaggtgtccatagcacaggacagaggactccatgcagccaaaaatcagtgcagttaccccctaagtcctccatcta

SEQ ID NO: 155417 - DNA, 527 bp, Homo Sapiens
  misc_feature (122)..(122): n is a, c, g, or t
  misc_feature (136)..(136): n is a, c, g, or t
  misc_feature (157)..(157): n is a, c, g, or t
tccatccataaatgttttattgaaatagtaaatgcataacccaagtctgattagaattggatttccagaagcccaatccagtggtcactctacaataacacagggtctcttcttttccaaanctccaaaccatggntgtgcctgccgtggccacacnctgtcaggctacacaagcagcaaggaccccctgagacctgaacatcagatgtctggctggaggcttcagcaggtcttcaacgccatggccggcagttcctcaaagctaaagctggtgcgtgaatgagctgatcatgatgacagctttataacatgcacctgacagatggcacgttgacagtgaggggagcttctctgggctgggacagagaatggcaaatcaaccatcaccggagcaaggctcttccagcagagctgtgaggcactggttagaaagctgatgaccggctgtaatcttgaacagttacattaattaaaagctgcatctttatcaagcaacacttcccagggagagagagagtgagaaacac

SEQ ID NO: 155418 - DNA, 830 bp, Homo Sapiens
  misc_feature (213)..(276): n is a, c, g, or t
cacaagattgacaggctcattacagcaatattaacatcttcctttgagcactcacactgtgcaattgtaattttgcatatgttgatgagcaggcaattacatcaaagagtgaacactgggctgatgtgcaaggcactatttaattataaaaacagtataggattgagccctgtcactgagtcttccattccttctatctcgcctgtttataannnnnnnnnnnnnnnnnnnnnnnnnnnnnnnnnnnnnnnnnnnnnnnnnnnnnnnnnnnnnnnnccttaaatgacagaccttttcttagatgccatttctctatgtctgcgcttaagacaagaatttttttcctcctagttgttggttaatgtctgcaaatgtgagagcatgttaacatgacaaacaccaaggaatttgaaatatacttaaatgaaacagtgtcttttctccccctactctcccccaccccccatggtggaaatgatgatatccttaccatctgcacacttgcaggctgtgagtgggcagaaaaccagctggagatgcagcccatggcagggatacagatcctcagcttctgggaggtcctagaagctcacaatgccacccagctattggactatcatctctcatcatgtatattcaaagggaaaatgtacaacatttcttctaaactattttgtacagagaacatctccactatcatcaaaaagaggctgatgtgtagtagggagaaagtgttctggactaagtgtcaggaaacctcagtgcttcaggttctcttgcaattatgagactggttctgttacttcacctctctggagtttatttttctt

SEQ ID NO: 155419 - DNA, 515 bp, Homo Sapiens
aaattaaactttttattttgagattattgtagcttctcatgcagctgtgaggaataatacagaggaatcctaggtactctggccagttccctcaagggtaggaccttgcagctacagtaatggatcagagccaggatactgacattgatacagcaagaagggaatgcttccctcccaaacatccctcatgttgccctttcacaggaacactcacttcccactgtcccaaacccctccttagcccctggcaactactaatttggtctccacttgtataattttgttatttcaagaatgttctgcacatggaatcatacagtatgtgacctctggggactggctttctcccactcagcatagttttctgggtgttcctccaggtggctcaattgcaacgtagttttttcctttttaatgctgactaggagtctaagtatgtaaccttctgagcctggcttcctgagttcagtgtaacaatgttgcaattcatcccagttgccttatggatcaatagt

SEQ ID NO: 155420 - DNA, 518 bp, Homo Sapiens
  misc_feature (365)..(365): n is a, c, g, or t
  misc_feature (486)..(486): n is a, c, g, or t
tggtgtcatatctgagattttattgccaaatccaaggtcataaagagttactcctgtcttttaagagttttgtagttttacttcttatgtttaggtctatggtccatttttggttaacttttgtatatgatatgaggtagggagtccaacttcattattttatccattgtcccagtgccatttgttgaaaagagtattcttatacttcagttgaattgtcttggcatctttgttgaaaatcacttgcccatgaatgtgagggtttatttctggattctcaattctattctgttgatctatatgtctgtctttatgccagtaccacactatcatgattacctgttgtttggttttgaaattagganaagtgtgagtcctcttactttgttctttttcaatattgttttggttattctctgtctcttgagtttttctgtgattttaggatcagcttgtcaatttctgcaactaagtcagctgacattntgataggtattgcattgagtctgtagataatt

SEQ ID NO: 155421 - DNA, 553 bp, Homo Sapiens
atggaaatacatcttttaataattcattcttatttcacaaatattcagctgccaaaatttcatgagtctcacatttttaataaaaagacccaaagttccattaaataatggagaaaaaaacttctccaccatcttaatacactgacatgagatttttcaaattttccacgattaccacctatggtattttaaagatcttcattaaaaacataaaaaatgaaatggctagggatttctattcactatagttttttcaaggaaatgtaattactacgtaagtattcctttattaaatttgaagttatataaccaacaagccaatatgaaagatttttctttacgtccttttcaaattcccccaaaatatctttatgacaactgctatcagcctatggcagtgagccatccatcatttcaacagggatgcccgtgtcaccactttataacacatgcacgctatcgaacaattctttttagggatcttggatgtcccattcacctctcaatctcccaccagctctagatgagagaaatgaatgattcagaaagtttg

SEQ ID NO: 155422 - DNA, 433 bp, Homo Sapiens
  misc_feature (228)..(228): n is a, c, g, or t
tttttgacacctcccaaaaatactcccaccagccccttggcattttcctccagccaagtgaccaaagcacagctcagggcccatttgccctggccacactgtccctactctccccacccaacctctgaccacaggcctgggagctgccccatctccaccaagttcaggctgcaggaggaaacgtctcaccaggcccgctggaaggtcgggtggtgatgaaatgtgggnggttcttcagcgagagtggaattcagtaataaggtgatcatcactgccgggcggtgcctggactcatgatgagccaggactaggtgagtgcagagggctggtgagcaggcctgatctgtgaccccggtggccctgcggctctcagacccctcacataaaatcccatcagggatattccgttccctggcccggaatgaggtcttcg

SEQ ID NO: 155423 - DNA, 445 bp, Homo Sapiens
ttgtaaatagtggcactgggtacatttttattctgcttttccttattttcaaaatactttaacaagtgtgctattttcacaattacacaaatttaaataaaacctttttgaagaaaagaatgaaccagtgaatgacaataacaacaaaaagcataaattgctcatttacagctaccaaaaccaagaaacaagcctgattctgggctttaaagaactatggtttagttaaaagaaagtttgctatcaatttttactttcatttccttgtgggcacagaacaaggcttgaggctggtgctctcatcaaatctgggaatgaagcctggatcgcctgtgcatcagggaatcagcatgttgtacaggtccagtgattctggagtgatgcctgcacagtattccaaaaactctaggttccaggaaaactgcaagtccctccatggggtccc

SEQ ID NO: 155424 - DNA, 394 bp, Homo Sapiens
tttcatgctttaaataaaatcccaaagacaccacccctttcactgctgatgcagaaaaaagggaaagggttcttgttacttgagaatttgtttctgatttaaacaaacaagacttagtttaataaaagaaagagaaaaacaaaagattcccaggttgttatgtgcttcttctgcaagcagagaggcaaatgttaatgacaattccatataccaaaagacacattttttacttcaaagttttgtccttgtgttaggcagtctgagcagcgagtgatccagagcgcagccaacaaagcagcagatagcagtgtacagaaagcaaaaaaggaactgtatgtgaggcacttgtttctgttaatatccatattcctgttaacacacaccctttctcatg

SEQ ID NO: 155425 - DNA, 517 bp, Homo Sapiens
ttaaaacaacgtaatttattctctcgcagttgtgggggccagaagtctgaaaacagtttccctgggccaacatcaagagttggcagagctgcactcactcaggggctggcggggagaatctgttacgcgcctcttccagggtccggtggctatggccacaccaactccgatgttcaaggcccgtgttctcaagcctccctctactggtctccacactggggcctcctctgtgtgttttcagatctctctttgtcgtctgattataacgatgcatgtgactgtatttacagcccacctagataccgcaggataatcttcccaacatcagaatggtaacactgacaagttccaggtattagaatgggaatatcttttgaggggccatttcacaaccttccacaaccacaaactccttacgctgtttgtttacttgccctctctgggccggtttccccacttgtgaagtgagagggttgggtgagaagcccttctgtgaccctgacttcatttaccttgt

SEQ ID NO: 155426 - DNA, 358 bp, Homo Sapiens
  misc_feature (179)..(216): n is a, c, g, or t
tacctagcatgcattttacacacattggaggagtcgtatgcactgtttttctgttgctgatggaggcaagcaggccttctaattagtctaacttaaacggatgggattcacttaacaaaagcaagaagaaaagcacacgaacaggtgtcttaatgcatttggatagtttctttgcgggnnnnnnnnnnnnnnnnnnnnnnnnnnnnnnnnnnnnnncttggcgaaggtgaggggctgtatttacaccaagcctttacataatcaagtgtgctgtgaaacaccttatggccttgcaccccgaagaacagtcccttcctaatagcagggatgctctgtcatggttctctgtaaaacggcg

SEQ ID NO: 155427 - DNA, 255 bp, Homo Sapiens
ttatttttacctcaaaaaggaagacatgttaatataatttattataaacttcaacccaatcagtcttaaatgtttttgactctatgactaagcgttaattatggacactgttaccctagaacaccacttgatagccctgcatgaattctgccaaaccaaagacatacctttttaaaataaaaataaagcaaccatttacacttactaagaaaaacaaaaatttacttcaaattgtagtataggcttttcaatcac

SEQ ID NO: 155428 - DNA, 760 bp, Homo Sapiens
aaatatcaagcgtcatagcagtctattaccttttcagtctcctgctgtaaggcggaggtcactgcttcctccagttccttctgggccacacgtgtctcttcctggagcgcctcatattgctccttagcctgatgaagcttttcccgaagagctgtcaactcacgtgggctcagcttggtctgattctcttccatgaacccctcaatgtccttgacaacagtggcaaatgaggtggcacgattctgaatgtcatcctgtaaatccttaacacaagaaaataggaatggcagagccttcgactttagtgcttctaagtcctctaatggtataaagatggaatggctaggatgacatatagtcctgtatatagtccctaactacaatttgcttcaggtttaggcttaaatcaatgcaaagaaatttgattttgttttctaagcaaatatttagtgaagccaaaaaaggaggttgtccataaacatgaacatgagagatttttcattttgcaatgcattatcctcaaagagatcattctttccataaagaagtgttgacaacatgatcttagcagagtcgaggcctgatgggcccttatactctcttgggtatcactccttatccttaatgtggcctgcggggtccagtgtgatacaggtcccacttacccctccaacttcaactttccctaattttcctcttgttttttgcagtccagtcgaactagctttctttcggttcttgaatatgttgtgctcaatac

SEQ ID NO: 155429 - DNA, 296 bp, Homo Sapiens
tttcatgatttcagagccaattgagaatagacataaaagtcacttacatggaaatcaaacattatttttattattgaacagatattggaaaacacaggatgcatgattataatgaagtttctaatatgttcctcttaactaaacaatgtacacacctagtcacaagcatgatagacaacaataggccttccccacaggaacaagctcctaaatatatggaaggaaaaaaattggaatgcatacctctgtggataggctgaatgcaaatagagatgtcagaaagcacagagctgagc

SEQ ID NO: 155430 - DNA, 397 bp, Homo Sapiens
gtaaatttccctttccatttttgcctatgactaggggcatacaaacaaaatttgggtctgcttcttgctgttctgaatagctgtctgctttttaaaaggcagaaatgaaaacagcagtcacgtgatgttctttcaaattaaagttacacaatgacacaaagctgagttgcgcacacacacaaaatacgcagcaatgctacttcctgccattgaaaacaccacttttcagatggcatttaatggttctgtttattatataattctatctcataacatacatttccttcctttagaatgaacaatacttacttttgaaaaatcctcgtacagtctacaccaagcacacaaaccaatcacatgagtgactatttcttacaatgtttgaaattgcataaac

SEQ ID NO: 155431 - DNA, 563 bp, Homo Sapiens
acaagtgactctatgtgttcatttagtactatgtcccacaaattacgtctccagtcttgtgtatacttttggacaagtaaatccccaagtcattcttttgtagttactgtgaagggccctcagcttaatactccctaagtcccagtgtttatttattttatattattttttctctgagatgccacctccaaggattttctgactactctgaccctccattatctctgggcaacaaaagggctcacagccagggatgcacagttagcactgtccttctcctcagtgtcttaagtgtgtgtgttcttccttgggagctagttggcaagttccatgactataggacattatcccaccctctccacattcttaaaagcccacatgacatactcacacacatttacctgtgtgagttattaatgagcttaagcctctcattcctaaaatttactgagtaccagaaaatggaactagggaacactacaccctgaaattggtggtgtataccatgacatttcagataaaaacataagggaaagtggagctcagggagggggctcacagag

SEQ ID NO: 155432 - DNA, 450 bp, Homo Sapiens
acctgagcaccaatagtattttctctcttatccttatcccctcaaatccaacctacagtgagagaataaatttgagccacttcatcgtagtttcagtggcataataagctcctgtattttcatcagttatcaatataaacattagatggcataaaattagatggctctttagaaataatgtgtcatgtaactgccaaactgaggtgtaatccaaggtttaatattttctaaaaagtgggcctcttactttttagaagaagtgcagcccacctgcccaatttcagttaagtttcacttttaaagttgcacaggagcccaagtaagccttcactttgtatctgagcagaacgagggcccaggaaaggaaagttgctcatgctctgcccatgtggtggtgaacagaaccactgcaggataccacactactttctcccagctgctatgatttac

SEQ ID NO: 155433 - DNA, 582 bp, Homo Sapiens
aggcagatctcattaatttttattattgggaaagggatcctgagagtcatctctatccagagccccgttacattaaaagacgagagaaacatgagcgccgcgagtgaataagaggcagtttttcatgaggtcacgagtgagattggaggctagctagcgtcctagcattccagcccagcaggaagggagtgtggggtggagctaccaatcggtcacatctgccgagaagtgaaaggctcagcgagaagaggcaagaacaaaggcctggggacctagtctgagtaaagtagttagggctggagggctcttcaggtgtctcggagctgactcagggcagacggcaaggcctgtgctgaatgaacgaacgagggaatgggcaatggtgaggaagggcagggggacaggagaaccaggccactgaggggctgctgcgaccaagggagccaggcttcaaggaggaaagaaaggagaaaaggaaccaactttggtcaccagtagcctgtccatgaccttggaatagatgatcttagtggaatgcttcaggcagagctacccaggaaggaagtgtggaagggaaggagg

SEQ ID NO: 155434 - DNA, 663 bp, Homo Sapiens
  misc_feature (386)..(386): n is a, c, g, or t
  misc_feature (521)..(529): n is a, c, g, or t
  misc_feature (571)..(571): n is a, c, g, or t
tttttacattcaagaaatatttattaactgctgtgcgtaaggctttgctacatgttgggatacagtggtgaataagtcaaacatgagtccttttcatacaaaattatgaatcagacatgaattcagcatgatatcattaacgataatatgtacatttttatattcatatgaatgtgaattctaccatgctgttagtttcttatttgggacctctttccaaaatgacttatttatttaacaaactttatgtttgttaaatattatgttgacaaaaagagttaaactctgtgaaatacttcaagagatttattctgaccccaatatgagtgaccattgggctgtgacataggcccgggagatcctgagaacatgtgcccaaggtggcncaggtactggccccaggtaccttggtggccccaggtactggcttggttttacccattctagggagacattagacatcatcatacatgttaagatgtccttgggtttcatctataaagggggggccccttgaatannnnnnnnncattccggaatattgcagattccaagaatttttgattggccntgggtggggaaagagttatttttcttaggacctcggataataaaaagggaagggcctgggttttaatatgggggggtttttggccccccaag

SEQ ID NO: 155435 - DNA, 517 bp, Homo Sapiens
  misc_feature (403)..(403): n is a, c, g, or t
  misc_feature (429)..(430): n is a, c, g, or t
aagtgcatgtgaaacatttactgaaatgtatcatatcttgtacataaaacaagcaccaatatataccataaattttaagactgaatgtattcaatcatacaaattataatctcttaacatgatggaattaaatcagaaatcaataacacaaagatatatggaaataatccaaatattggagaaaaaaacaacacatttttaaataagttgctggtcattgcaacctccccactccagattcaggggatggcctacacttctaatctagggaaataggtactccaggtgtctggagatatgcctgagcctggggcagagagggtctccttgcattaagatctctgcataggaggggttgggttggctcaggctgctgatccaggttagctgatgctccagatgncctgagatctgtctggtgtggaccannaaggtcctctctggcaacggatctatgtccagggaatgggtgtggtcctaggttgctgatccaggtgaacaagtactccagatgctg

SEQ ID NO: 155436 - DNA, 412 bp, Homo Sapiens
aaagaggtcttataacctgaattaggtaacacaattgctgaataaaaagaggaatgagaaaaagtgctaaggactagtcaccctttctatcaatcgactcagatgatcagttttggtagtcatggttaaccggtatctgtttgaatcctatcagagtcttgaatcaggctgtgttaaactgtgtaagaaactactcttgtatgcctcaaatcgacttattctcaatgactgtatttatatatacttgtattcctccaagtacttggataaatgatgatacctaggatatgactggaccctagatttacattacagtttcaagaagagacaaccaaccatgtataatgtctacataacattttgttctttagaaagtacagaggtcctgcatagatcacaggagatttgtctc

SEQ ID NO: 155437 - DNA, 307 bp, Homo Sapiens
cgataaattcttaaggaatgtatggttaagatcatctttatgaatcccattccatgaaattaagtgtcacaggccaagcacagtaaatttgggaaatgtcttgcaaacaagtagtttccacagtctcttttacaaaggccttgtgactagcaaagttggaatgtaagaagccaatgaagaaacttccagactcttccttccttaagcatatacaaaatacaaaaataggcagtattctttctagattttagaaggagcagtaagttttgtttgattttggccaagggtgagagaggagtgggtgcac

SEQ ID NO: 155438 - DNA, 455 bp, Homo Sapiens
  misc_feature (282)..(297): n is a, c, g, or t
ttttcttttttaaacaagaccaagatcttgcttattcttccatgtgcctgtgtaattttcttacagtgtggagtttctaaatgtatactgaccatcttttagtgtcttacccacattctggctataggataactctggttttagctttcatctaagaaggagatctggaatttatgtgtaccaggtcagatatgattgatcaatttctggagttgacctagcaaaggtcattttgatccaggtgttccggaataccttttccaatgtgtatacctccacccnnnnnnnnnnnnnnnnccaactaaacaactgtttttttgttcaagtcagtcactgtctccttttactgttgattaattggccagtttattttgtcctaagccaaattaagtattttggctccccaattagccaaaccttactgtacaacacacttaattttaaaccttgtgctt

SEQ ID NO: 155439 - DNA, 660 bp, Homo Sapiens
ttcaaaataacataaatcttttattgaaagtcactttactaatgttacaatgggagtaacatagaaaaccatggtatcttattagcttccgaagtgaatactaataaaactgtgccagaaatttgaaccttaagttacagtgacctttaaaaacatcaagattttgtttacctacaatgtaagaacaattttataacttgaacagccataaaacaaatcacacttgctcaggaaagcagttgccatatacatttccattggtgtttgccataaccccagtaattattaaaatagcttaacgaacctgaagtgcagagtagcagagaaatgttaaaataatgcgaatctaagtatatacacatgattacctgattaccaaaagtgaaaccatgctgctattaacacctcctcatggggtggcttccactatctatagatgcacatcacctgtcaaaggtgataaccgtggaaaacactagtgccgacctactgctggctaacatgtaagctactatgtttaggtaaaacaccccgtttctgaaagaagttgtcttttgggggtgctagtttggaggggcaagtcttccagcaagttaaaaaaggagtacatgcttatctatcctgaataagcctttttttaaagcagaaatacagttagtg

SEQ ID NO: 155440 - DNA, 652 bp, Homo Sapiens
  misc_feature (571)..(571): n is a, c, g, or t
ccaggctcatggcatattcacatacttccgctgcttctctttgtgcaagttgccgaagacatgccacagctgctcgtcgaagtaacaaatgggaactacataagtgaacacaaaggctaggaacaaggctagatagattgacatgtcgtggtgcaaacatgtgaagctgctgaaggcaagatatggcagctgcctgaacaagagaatctgaatggtcttgtgttattgcacaacccaccaaacaagaggaacgaattgtagaagttgttgctccattcccttgtagttcagggccaacagtagttattatagcacccaagcatcgacccaaacactgatgaacttctgtatgtgaaggcggaactgtcaacagcaaggtaagaactagagataatgttggttccacatagccacgatacatcggaccactagaatccactatcaaagcaagtgaatgaagagaccaagtctggacttcaagggatgtcccatcttgtgctagagccaataaaatgctgacactggtcttcagatgttgtcctgagcctattccaccaacataacgatgcanacaaccaagagccaatgaatgaccagtcctagatacaacatctcgagccgatttcaaactgtcaaagctatattgggccat

SEQ ID NO: 155441 - DNA, 554 bp, Homo Sapiens
  misc_feature (35)..(35): n is a, c, g, or t
  misc_feature (75)..(83): n is a, c, g, or t
catttaatcaatttggatggagctagtattttaanaatgtactaaaaaagttggtttacagaattcggatggctnnnnnnnnncccctttgccttaccaaattactaatggtgagatccgtgtgcattttaagttatagaacctagttatgtgtaaggccaaggaaaacaaaatcacagacccaaaatgttctgtgattaagcagcaaagtccgttattgcacagagtttcagaagagtaggaaccctgctgtcagcagtaatgctttaaggcttgatcactctgtatttcttctcctgttacctcagtctcaggtgccaaatgagaaggccagcacagctaaggcctgcgcccctgaagcagccaagacagggtcaagttaaggtcaggggttgttctctggaaacacattaacctcggtgacgcctgtatcccaatctcacagactaatctttttgtgtaattttaaaagaaacatgtgaatgtccggatggctattagaattcagccctataatgagccttctagttcactaacccatgcattctcgatgt

SEQ ID NO: 155442 - DNA, 706 bp, Homo Sapiens
  misc_feature (604)..(604): n is a, c, g, or t
aagcacaaagaaaggttatattttatcatgttaaaagtttcacagagataacaggtttacaattcaaattcccatgtcctgaaaactggcctcttaaataactcacctctcaaatcacagacgtgcaataatctgaaattattataatctaaagacttaaggaaataaccaattattacaattcatgttcactgtgaggaatatctagctatataaaatatagctacacaaaaccagaactcagtgaaacataacttttaagagcaagaaatctgcttgagattcgtatcagtagtcattaaacgaataaatgctaaaggtttacattcaagtgcttgaaggactactgcagagaaattcaattactaaaaacctttgctcagatgcctgtcaggcatattaaggatgggatgatgtgtgaaccaccagcagtggtattaaaccccaatcattttcaagacaagtaagatttagagctgttaagacattccagaatttggttcactgacactaaaagtggtattttaaaaaaagacctcatacagtctgctagcatatcatactaaccattagaggaggtagtgacacaaagtgttggaatttnaaagacaagatcagcattaactgtaaaccattataaatcactgtatgtaactctttaaaacatatgtagtgaaaaagaattagaattcatatggaatcagaa

SEQ ID NO: 155443 - DNA, 545 bp, Homo Sapiens
attctgtaagtacccaatttattaataaaacaatatagcttaaatatttatgattttttcagtcatacaattttaccatcattcccaaaatgttgtgcatttggtgacatgtatttgcaagattaggatctataattgtaactgtggaaatcatagaaggcattttatttgcttgttaatactgctcccctcttcaaacaaacaacaaattttgccttgtgatttacttcttcatctctctgaccaaaaataaactccactttgtgccttttatgcttgcaaaaacacttgcctgtttccctgcaagaagattatacaagttaaacattcgttcttttggttccagactggccagcttatattgaaacaaaacacctcgaccccagacaataattccaggcatttctgcttatagaatttgttctcagaagtgatagaaaggaggcaagaaattcccacactaagctcaaaggtcaatttagtggaccagatatcgggagctgtactgcatagccatttgccatgtgtaagtttctattgttgtg

SEQ ID NO: 155444 - DNA, 718 bp, Homo Sapiens
ttaaaatgctgaactttgtaatgaatgattaaagccaagaactccaaacccacccagcagtcttaacattaccaatagagaggcaccagcattatctgcctcctgacaggatgcaacaagaagtacccagcaccacctaggaagtatttttgccacaaaatcagacctccagatctaactaccattttataggaaagataagttcagagaaccatgtcaaatgacacctcgggatttcaaccagcaacgttcaaatgtgctaaactctgtagatggaaagagacttacagacatttcaaataaatgcaatatatgggccttgcttgaatcctaatacaaacaatccaactacaaaaacagccaaacatttgtgggacaatgggagatgcttgaattccgattgtatatttaaggatgttagaaatatttatggacaaaatgatgtaatgctcggaatttgcttcagaatgatccaggtacagcatgtggagctggagagaggagtgggcagcagtgtagataaacaggcctggccgtgtgtggatgggttgtcagggctgagtggagttgcaaagggatttattataccatgatctctgcttgtgcatatgtttggagattttcataatcaaatgtgaaaatttttgattttcataatcaaaaatcaatacaaaatatgaatgtataacgtaattcctccatcatgacggtggtggga

SEQ ID NO: 155445 - DNA, 461 bp, Homo Sapiens
acgttgacaattagtttattagagcaaaagtacagtttaaaatcagtacagttttaaaaggcagataggaaagagttcaaaagagagcaggacaggcttccagttgtcccatttgacaggagatgcatgcccagcacttaatcctttttgaatgagtgggggtcatttatgaaatattatcaaccagggaagctgagacttggtgtccaaggtttttattgggtgttagtcacataggcatggagaacagaaatggcagatgttattcagtttccacctcccccggcgattaaattgatactgcaaggggcaatgccctcaccataaatctgtagcataaactatctggtgtgatccaaggccccaggtaaacaaaggccttgcatcaggcaggatattccaggggcttagcgctgtgatctcccaggagcaagttgagggctagacctttctttgaaagg

SEQ ID NO: 155446 - DNA, 268 bp, Homo Sapiens
aaaaatccatggttttttaatttccttttcaatatttgtatccttttatggaatataagagaccacttatacgcacaagagttatctcttgtgggtctcactattattatcatcaaaatgcctgaaattacctgtgagggaacattataaagtaaatgataaagaaataatttaatgttacacattaggtaacctctaggaatatatgctggaaccataggaagacattgggcaggaagaacaataaaaatataaagaaaagaagtaa

SEQ ID NO: 155447 - DNA, 534 bp, Homo Sapiens
  misc_feature (29)..(29): n is a, c, g, or t
agaattcaggacaggattgttcttctganaatcagatgttcaagaagaaaatatctgttgtgaactagggaaattttaccacaatgcacgtctttattattgatagtaacccaaagagggtttgtgtttattgttgttaaaaatgtgaatagtaagagctcttattagtagatggacattcttttatgagaatatgaattggtgctcaaagttctaacagtaaaaactcatttatattgtgcatgtcagtgaggacgggagatctagaaaagtagatattgaattgattatttcatttccacaaaagtatacattgaatgggaagtttttaatggtttgttttagtggaaggcaatttggaggcaggtggaggagtacacaagtatatcagacatattattaattaggaagttccctcttcaacatcatattttatacgtgttagcagataccatggaaatatcagtgatttgatctcagtatattaaactcttactttttggaaggacaattgccttttgcctataaagtaaa

SEQ ID NO: 155448 - DNA, 461 bp, Homo Sapiens
ccatccctttcagctctgaagggtctataaatgaaagtgggtaccaactgattcaataggacttatatcttactaaataacgttttattgtctttgttctatgtatttgcagagaaattgtaagtatctttaaaaccaattaacaaagccctgtgggtctttcaatcaagacctttgtaaacatctctactagcccatactcccccaaacttcttgcacatggtagaagatgacattaaataaagcacattataaggtgcaatgagctttattctaaaaatattgtctggatgtgaaagtaagttcttgttcataaaatgttattagtaaaatgttattagattaaaattatggagtaagcatttggcaaactgattgactcttcactggaaagaccaggctttttagcacacatttctgttcatgcttaaggtcagaagtcaatcaaaggcaaccagaaa

SEQ ID NO: 155449 - DNA, 457 bp, Homo Sapiens
gatcaagtagcttttcctaagctgtggatctactatgggcttcctcagtaataaacaccaggcagagggacaggtgtcacagcagtaatgtcatgtgtgctgtgagcaagggcaggaggagacaggaaggagtgctgtcacttcagttctggtttggttcttgattaatgatttattttttaaaagtcagctagaggtgccactgtgtcccagttttccatgtctcagctctttctggcatctcacattatgcctcctgtcttaagtagcccttttgtcactaatgtatcaatgacactctgtattggcagagagggaaaaggactgaggtcacatactgccaagggtgttccctttcccttatcagtgtggtgccagtggccacggctgacatagctgatggggagtggggtgcggggagcatgtaacccttaggacagaattggtcaacatcggg

SEQ ID NO: 155450 - DNA, 681 bp, Homo Sapiens
  misc_feature (655)..(655): n is a, c, g, or t
tgagcaggtttcaacagtgggcttaaagtattgagtaaactgagctataaacagatatgctgtcatccaggctttgtttttccgtttatagagcacaggcagagtagattcagcataattcttaagggccctaggatttttagaatggtaaatgagcttctgcttaccatcaccagctgaattagccctaaagggagagttaacttgtcctttgcagctttagaagccaggcattgacttctcttctctagctatgaaagtccttggtggcatcttctttcaatagaaggcagtttcatctacactgaaaatctgttgtttagtgtaaccatcttcatcaatgatcttagctagatcttctgggtaacttgctgtaccttctccatcagcacttcctgcttcaccttgcactttaatggaatggaaagacagcttctttccttaaacttcatgaagcaacttctgctagcttcaaacgtttcttctgtagcttcctcacctctctcagccttcacagaactgaagggaggttaggcttttgcttaagggaatgttgtggctggtttcatctatccagatcacaaaaactttctccgcatcagccagaaagctgtttcactttcatatcatttatatgttcactggagtagcactntaaattttctttcagaactttccttt

SEQ ID NO: 155451 - DNA, 665 bp, Homo Sapiens
  misc_feature (221)..(236): n is a, c, g, or t
aaaattcacactgggtgctttggggctgttttccctcttgcgtggggattgactcaattgtgagactgtagccctcattgtgaagaagtagagaagcttctttatcctgctgttttgatacaagttgttactacagacttcttacattgtaacttaaaaaatgcaatcagtgtaaatttgtaacacatcagcattcttttaaatgttgatttcggggaacnnnnnnnnnnnnnnnngtgatttgtagactcattctccaaggttaattcctccacagccccaggctccccctccaccgcctccgccgcctcagcagcagccgatcagaagcctgttccagccgcagccgctgcagccgctgcttccggtgcagcacccgcaccacccatccccgcctcagggaatgcacatgcctccccagctagagaccccaaggatgatgatgaccccgccacccgtgactccacagcagcccaagaacatacacatcaacccgcacttcaaagggacggtggtcacgcctgttcaagtgcccttgctaccagttccgagccagccgagacctgccgtgggaccccagagattcccaggccctccagaatttccacagcatacacctgggcctgtccaaccgtttcagccagcccgcacgacagcccaaaggt

SEQ ID NO: 155452 - DNA, 495 bp, Homo Sapiens
  misc_feature (296)..(308): n is a, c, g, or t
actgatgttatttccttgctcttttgagctctgattaatagtgctgatgaaattagaagtgggaaaaggattccgagacagctttggccaattttattttctaatcacgaatcccatctggattgtagaatagcatagggcgggggctcggcctgccccattcggtcttgcatatgtaacactccttccattcaacagataacagagagttagtcaccttgtgaatcctttaaaaataacaacacccataattgtaaataagccgtggggatgggaaaccggcacctctaccaacnnnnnnnnnnnnncaactcctgcgtgagtgaattcaaacagggctctgaatttagccaagggaatctattaaacgctactgagatactgagattcaatgaatccgtttctttttctttatttgtggcttccagtcttgctagcgtaaatgaaatctgctttcagacgggtacagtcaaaataaatggaaacttgaaaggt

SEQ ID NO: 155453 - DNA, 590 bp, Homo Sapiens
  misc_feature (335)..(343): n is a, c, g, or t
ttttttttccctcacaccaagcatgtgaacccattactgtggacaatatagaaaacagctatctgaaaatactggagagcaaccaaaagcaggaagatactggaggggatgtgataattggaagaaatggtaccgagtttcccattttgacagcttttattctgagggcaaaaccagtcagtgccatgcaggactaaaccttaatagaaaacccgaagtcttgttgccttgaagaatcaaggagagagctcaggaaactatagctgttgctaagtgagaagcaacacatcagaaaagagccagtgaggggaaatccaattttttcaataatctannnnnnnnnccaaaagctctcccttagactgagattctgcctctttgtaaatttagtccctcccaaccccctaaacaaagctatttctgcttactggaattacaaagaatacttttatactttcacataagtcagtcaagcacctgaggactgttgtcatttcttcaactatactttccacagaatacctagctctgtattgagtatataatagttaaagggttgctatgactgattgctgaaacttagaaatcat

SEQ ID NO: 155454 - DNA, 640 bp, Homo Sapiens
  misc_feature (213)..(213): n is a, c, g, or t
taggacagcagttggctctttttttcatcaggatgtggagagtgggcgccttgggaagacgaaattgagtatgtgcgggggaggggtcatatgaaacaaggtcgggaagggggcggggagagctggggctctggaggagcttggggctcgcgctgcgggggaggaagcgccttccgcggtcgctggggggaagtggttaggaggaaacacggncagtggaggggactgctggagggtcccatctgggaaagcaggcacggatgcggggacatttccgcccgtcaccctggcaaagcgctcgcagggctggagggacagagttctcagatccaagtagagaaaaccgggaacggttccggctctggggactgacattcatcgcggcagtttagagaaaacggagcaagtgtacaagcacgccaacccccccggtgcccaagctcggcgctcacgcggctaggatgacgcccgtgggacgccccaggggccctgctcgcagccactctgctcagggtcatttatagtctctccgttctttgttaaataaagacggtgagacacggacgggctggagccggcaggggtagtggagggcagaggggacgggtcggggcgcccctcgctcctgccacgctgccgc

SEQ ID NO: 155455 - DNA, 479 bp, Homo Sapiens
agcttttaataaactcataagtatactgggattgtagaaatctttgtaactcttgtccaccttggacatttctgcagcacagtgcacattttgcagcacaattatattgaatttcataataaaagttacataatatcctgagctgctttagcttaaactacatgcagtggtttatgataattattgtacttcattatatcccagttcttttaaagttttaagttcatgtgtatgtatatatatgacaggttgggtcctctaggaggcagattctgagatttgcattcaggaggttcattgggagtgctgggctgtgttatggtcaaaaggcttcagccagccctgcagagaactctgaggctagagtggtccttcagagttacctcaacttggggtgagggggatagacctctatacctttattagttatctctattagtttggggtaatttgcatacagtgtgcaacagattaccccc

SEQ ID NO: 155456 - DNA, 521 bp, Homo Sapiens
tagtgaatgtttcttacaactgttctgaaccagttccagacatctgaatctgtttttcagaatgtggctcatgttagaaaatatagtttccagatggaactatggtcagccttggttaatccgaatctgtttgcaaactccattagaaaacacgcccaccccataccctcatgtgcacgtgtaaacacacacctgtgcatgtacacagtcagttctgcatttgctgtgaactttttgagattgctgccctgtgtgtgcatgcccaagtacacaaacagaggagattaattttgtggctagaaagatgttgccttgaagtgaaaggacaaacttggacttgcaacttcctgctaaaaataatctaaacaactccaaatacattattatgtgatgttttaaaagtttggatcatagccatttaggaaattttgccctcaacaccttttatggtgccaaagtaactgaattacattcagtagctcagtcttacagataacttaatatttgcatttacttgtgaa

SEQ ID NO: 155457 - DNA, 516 bp, Homo Sapiens
aatcaataaataggtagtttattaaccatattaataacaatgatgggtcaaataatcggagattcagcccatctgggaagtacggatgaaaatgaaaggagtccttttttttcttcccctccctccctcatcctcataggtttttatatctaaattatgtgagagtgattcatacacacacccattatgaatcagtaagagaaataacttcaagacctttgctagtgatgaaagtgcaagttaagctcattaagccttagtggttatgatgtcagctgaccacagtaaggagagaatgtctggttgaatttttacacctaaagtcaaagttcaagaaaaccagctaagattcagcttaaaaagcagtgacgaaaaacagccaacacccacataaaaacagatacacacattctgtatgctttgtccccacccttcttttctttagcctcaatctgagaatctgccatgcaacacaggtagaaagaattataagagattcaaggaaaaggtcacaag

SEQ ID NO: 155458 - DNA, 917 bp, Homo Sapiens
aaagaggagaggataatataaacgttttcttgaaagcttgtgaacagattgggttgaaagaagcccagcttttccatcctggagatctacaggatttatcaaatcgagtcactgtcaagcaagaagagactgacaggagagtgaaaaatgttttgataacattgtactggctgggaagaaaagcacaaagcaacccgtactataatggtccccatcttaatttgaaagcgtttgagaatcttttaggacaagcactgacgaaggcactcgaagactccagcttcctgaaaagaagtggcagggacagtggctacggtgacatctggtgtcctgaacgtggagaatttcttgctcctccaaggcaccataagagagaagattcctttgaaagcttggactctttgggctcgaggtcattgacaagctgctcctctgatatcacgttgagaggggggcgtgaaggttttgaaagtgacacagattcggaatttacattcaagatgcaggattataataaagatgatatgtcgtatcgaaggatttcggctgttgagccaaagactgcgttacccttcaatcgttttttacccaacaaaagtagacagccatcctatgtaccagcacctctgagaaagaaaaagccagacaaacatgaggataacagaagaagttgggcaagcccggtttatacagaagcagatggaacattttcaagactctttcaaaagatttatggtgagaatgggagtaagtccatgagtgatgtcagcgcagaagatgttcaaaacttgcgtcagctgcgttacgaggagatgcagaaaataaaatcacaattaaaagaacaagatcagaaatggcaggatgaccttgcaaaatggaaagatcgtcgaaaaagttacacttcagatctgcagaag

SEQ ID NO: 155459 - DNA, 412 bp, Homo Sapiens
  misc_feature (118)..(126): n is a, c, g, or t
aatcccaatgttgaatttagggatcatgtcaaaatttccaaaacaattccaacaggcagcctccttgagaaatggtgaggaagagatatttggtttcattttgtcagtgttgagattnnnnnnnnntaaccttggtaattaaagcaacaacagaaaatattccttttgtttcagaatcacctagttcctagtgttgtgcctagaatagtataaatatttcaccatagctgagtagcaatttaccacataatccagacgtatttgtcctttgagaataaggaaattcattgtttaaatgcaatgatggatttatctattataggttgctttcaattgtatagaaaatgttcaactagagtaaacagatctatccttgcgtctccaaactgtgcactaggtatgcaagactttt

SEQ ID NO: 155460 - DNA, 622 bp, Homo Sapiens
tttattatccaatgctgctttattatttggctattgggggcttcagcccattttccttagcatcccaaaattcagcttgggcagagtcccatggagctttctctcttggtgctcaaaccactgtgacaggctggggttctgggggtggatgcagatgctgcgttgagccaggtgaagcctgggtagagaaaggtccaaagctatgaccatagcttggggatgagattagggtcatccccaatgaccctaattaggggttaggagcaaggaccagatgaaaacctgagttggcaacagaattagcagttagggctggggttgggatcagcattaggggttgggactgaggtcagagtcaggggtatcaggggtgggagctcacacgaaagcctggaggtgacagtccccgtcagcctcctgcagttccacctggatgaccttcctcagtagcttgtctgagagtggctttcggtagagctgagtacagcaggcagtgctgggtggcagtaggaatgctaggggcaacagggccatgtgttcagagggatcctgaccaagaacctctctgccagacagctggaggttaggttggatttcctgggtcttttcaacttcatcccat

SEQ ID NO: 155461 - DNA, 468 bp, Homo Sapiens
ttgtaagacagcttaaatttttatgagaaaatatatcataaaacatcaagcattgtctaatcccattttatttaaatgaacatgagtatgtatatcaatatgcactggaatagacaaaagtctgtaaggaacacaccaagaatattaacagtggttacagctggatgctgacattacaggtaaatttttacttgtatttttttgcatttcgaaaaataggcattaataggaaacatcccaaattagttaaatatgcagaccctaggagattcacagagctgatttttctctgactaaaagcaagttcacagtggggaacttatcatctgggccgtcagcctatgacaggtggttgctggtacccctcacttatccatcgcacctaccaccaggaaggatccctctttggtgacaatgattacttggtccattctctgtggggacctcaaactcacctaggatacgcag

SEQ ID NO: 155462 - DNA, 556 bp, Homo Sapiens
acaactttgcaatacaactttatgagttgttcggcccttccattggccgctgtcggtcatgtggatgagaaccgtgaacatgaacttttttataatttcccttgcgagaatagagccgcattcttttgctccgctccgtcctgcctgcttcggagctctgccttccagccgggctcggctgtgctttgtccggagatggcgagcgaagggaagccccggccaggccaggcctggcggctcccgctggagattgggcgcgctccgttcccggcgccgcggcagcagctttgcaactcgcaacctggctaatttcctgcgtcctctggcaccaggaaagaggacaattcttctctcgggctgcccaagcgacagctgtcagaggggcaggagcttctgggagccaccgttaattcagccagagttctccgctcgttgccggcttcccttcgcccggtttttcgatgagagaggtgtctgaagcgctgggagggggaataggtgcgtgggtggaattcttgtttctaccaacagtccaactcggtcctggcctgcaacc

SEQ ID NO: 155463 - DNA, 366 bp, Homo Sapiens
ggtgctgccacagggacaagaggctcttgcaacctttgagcaggcgggggcaaagaagactgcggaggaaaagcagcctgaggcttcagtggttcaggaaggaaagttgaacctttcgacgtttctgatgttttgctttggctttcaggagtcagtcttccagcagatgcccgcgcgtggctctgtggggcactgataactccagcacgaggaggaatcgtcggtctggctgtactgtatccagcaggtcctgggcctgcaagtcctgcttgaggtgaaggctgactgcgtcctgaaggcggaggaggtctctgtgggggagccgggcgtgtgggaggggcgaccgggcggggcggcggcggccgc

SEQ ID NO: 155464 - DNA, 528 bp, Homo Sapiens
ttcacgaggaaaaacttgccattttgagctttttaagcagttgctgaaagcttggcagactgcctcaatttttcctaagtaggcgtcaatgaagtcaggtccaggccttggtgtgtctggaatgcttcaagcacattcgaacacttgatcgtaagggagagccggtactttggaaccggaactcacccgaggctgtggccaccgcatgggcaggctagctgggggacaagccccatatctttgggaacaagggtttgcacagccaccctgggatgccctgggactcctgaccgcacaggaccccagcagggaggccgcctggattggagggtctggtctaacagccggacttggtcttgaaccgtcgccctgtcccgcacaggcgcctgctgagcctggagccctggcagaggcgggtctggggagtggagctgccaggaggcctcccatttctcacagccttggtgttctccgggtcacccagaggaccgtcaaatgctggatttgacaaactatgtagaatgttct

SEQ ID NO: 155465 - DNA, 553 bp, Homo Sapiens
tatgtccgaatttcaaaaatagtaaaactatttcccccaaatgaaacttatcctgaaaaggcaagtaatatataaacttactttcactcatctattattatttctcatttatagtacccctgcctctagtttctatacaatagaaaatcctttcatattttgttatcaatacccagaaatcacctctaaggcttaatgattcaatgcttattattaaagtcttctgatatacagtgatacaaataatacaatgaacttccaagaactcattaccaccttcagaaataaaacattaataacagttcccaccttctctctgtgatatccctctcccttcacacttccggctaactacaaatcatctttcaagatgcagcctttctcagttccgcattctgaattagatgtttctccttcatgttcctgaggaaccctaaacataccattaatcactttataattgataagtctacttgtccttcacccccattagactgtaaagaccgaaagctccctaataattgggaagaagcctaattcatttccttacccc

SEQ ID NO: 155466 - DNA, 581 bp, Homo Sapiens
  misc_feature (357)..(482): n is a, c, g, or t
aaaaaatggattgcttttgattcctgagtcaatctgttatccttacttaagcagatcatgtatgggaatttgtctgggaaccagtttcctataaccagctataacacaatgtgattaattagacgtatattttggctcaaatcttggatttaagtgagtaacctatgtagtatacagaaatggatatttttcaggctaatggataaagatatgtgttccagtaaatcaagttacaaggaaaatattgtccttaatattgttgttattatgtagattaattttaagattaattatataactgctatgcatacatcatgacgaaagaaatgcaggatttagcttatgacttgatgtggnnnnnnnnnnnnnnnnnnnnnnnnnnnnnnnnnnnnnnnnnnnnnnnnnnnnnnnnnnnnnnnnnnnnnnnnnnnnnnnnnnnnnnnnnnnnnnnnnnnnnnnnnnnnnnnnnnnnnnnnnnnnnnaagatttaatgtggtgagtaataaggaactggcttcatgatgatcatgagtctgcattgatgtggcaagaggcactccagaaagacttctggcgacgta

SEQ ID NO: 155467 - DNA, 361 bp, Homo Sapiens
ggatcaggcagctttatttcaaagggcagctgagctcacctcccagtgagggtctgggctgtgagggcccaggtggcaggcaggggtggggcaaggaccctggagtcaggacttccccaccttttggcttacagtggcagcaggcccacctggcagtctccagggctttgagggtcccctccgatgggagcaccttccattcccaaatcccaagttagaccaggggcttccgaagctggaatctgctctttggaggcaaggctgcccaaacagcctttgtacagagtggggcgcaccttagacactcctcgggatgtagaaccagcattcttgctgctgagccactgccttgcattaggca

SEQ ID NO: 155468 - DNA, 242 bp, Homo Sapiens
tgtaagctctaaccctgttacattgtgtccttttgaaggtactattggtctgggaaacagaagtccgcagggcctccctaatgtctttggagcttaaaccccttgtatatttgccccttttcaataaacgccccacgctgatagcacagaggagcccggcatgcactgtatgggaaagcagtccaccttgttacagttttaaatttcttgctatcttagcattcagataccaatggcttgct

SEQ ID NO: 155469 - DNA, 507 bp, Homo Sapiens
cttttcaatcaggggctctgaccaacaaaccataagacctggaacagtgagatgttgaaaaggagaccactgcatggctatcccacagagctgttataaagctcatagaataaaacagcttgaaaaacagttcataaagcccaaactgttatacaagggggaaagtaatagtctatgatgggtcaaaaggggcaacaaatgctcaaatcctaaggaaagagacaacaagcacccacacaagcacgcctcaacaattagaagaaggtcaaccagaacattcaggcgtatcagaatgagaacaggctttgagtcccacagacactgccactttctcagctgcaaggctgggcctatttatttgttcttcatctgtgaagtggagataagaactgctacactgcctcccgcctccatggttgttctaaggattaaatgtatagacaactttacggcacctagttcaacgcctgacatgcttaagtcctcaatggtagccttctgcttcag

SEQ ID NO: 155470 - DNA, 481 bp, Homo Sapiens
acagagtaagcggaaggtcttttttgtaagggtaagatgactgtgttcctgcagcctggacactgactgctgcaatgaaattggatctgttgagcatgtcttccaaggacagatttggatagtaagccaggtagaaggccagagctcccacaaagctgtcaccagcacccgtggtatccacagccttgactttctctgtgggaatgtgctttggctcaggttctgtctgtgacagcaccacacatccttcagcccctaaggtaatgattaccacctggcagccccttttcaagagcactaatgcagcctccccagcatctgcagcgctgcccaccgtgaggccagttaaaatctcagcctcactttcattgcagcagaacacatctgagagggtgtagaactggggatccaggtcagcaatggcaggggctggattgaacaaggttttcactccactcctgcgggccattgttagggcttc

SEQ ID NO: 155471 - DNA, 450 bp, Homo Sapiens
acctttttttcctctgggacgtatctgtctttattgcaaccactttgcttatttgtgttggtaagtttgccttcactaagctcctatgaatacacagcagcaagaacaacattcccatggtcagtgacttcttctacaaattcatttatgtttgattaaaatttcacttccagtgttatcatttttcattgctttgctgcactttcatctttgttgaccagttctttcgagtgttcacttctatagaatgtcaagtagatgacagagagacagcataactacatgctctgctgtacgtgaactgaattaacagatgcacagggacaaaccactggaagaatttgaaagaaataacatgactggtcacaatcatgaagcatatctgttatttacatagcgatttgtagactgaagagctagcagagaggtttgtacttcatgtaattactc

SEQ ID NO: 155472 - DNA, 836 bp, Homo Sapiens
  misc_feature (826)..(826): n is a, c, g, or t
tggacacacccacctttttggataatgcccttctttcatccttggcatgagattactgattacgaattactgagggatttgttggagactgacactaggagaggaatgtgaactattccagtgaaagctggattagtaaaacttacccataagaatgcacccatttgagacaggcacaagccattacaacgctcctctaggtgtgtgttgaatagttagttcttcagctttgctttgcatttctgctgtttgcaagactgcctcacagagggtcaatccttccctttttcctctcccttttctatttattcattcaacatatatttgtctagacactgtgctaaccactaggaatatattaatcacaagtaatagatgtggtccctgctcttgagtttcattctaattttttaaaaaacccacattaataatcacacgtatcaatgagtatgactgtagtgctacgaagaagagattcctggttttgacagcctatcggcctggttaagaaagaaagggtaggctttctggaggaagtgacacaagttgaaatcgaaggatgaagagaagttaactagggaaccaaataggtggggagcatgactagtaagaggaacaaagtccaatgtggttggaacagagaaaataaggggacatatagcagaggctggacagatcagcaagggtcaggctatctctggccttgtggactgtgttaaaaagttttgtcattatcctaagggcaagtaatgccagaaatggttttaagttgagaagtgccctgattatatgtgtgttttgaaaaaaacccaatatggctgttgtntgatcaagtg

SEQ ID NO: 155473 - DNA, 544 bp, Homo Sapiens
  misc_feature (187)..(199): n is a, c, g, or t
aattattttcattttgaaaatgaatttgcatcacaatgctcttattaacatgcccattaactaacctaaatgtctttatacacctcaggcatatgcatatcttataggaggaggattagggaatagcagttttcttccttcccctgctccaaaagtgctacttagggaaatacatcctttgtgattnnnnnnnnnnnnnttgtatggtacatgtgcaagttctattcctgataagaataaaactgtgtccagtaatcaggataatgcacatgctaacatttgcacactacaccacaataaccatgtagtaaataatatactacatttgcacatagcagacacatgtagaaatcagaaaactaagaacctactcagaatatactggattttgtgtgtatatatatattaaatggaaacctataaaatatctgacccacattttacatctaaatttctcttcttcctttcccttatattttagcttaaagatattaatttttcagtcatataaaccatatgagaacactaggaatttgaactggag

SEQ ID NO: 155474 - DNA, 514 bp, Homo Sapiens
gaaacttagatagctgcaggtttattttatagatgacctttatcaggttgtgaaagtttctttgtagtcttaggttgggagtttttattatgaaagggttggttttgtcaaatgctttttctgtggctattagaaggtcatatggattttttcttttattctattgaggagttatgacattaattggctttcagatgttagcccaaccttgcattcctcagataaaccccacttggtcatgttgctggatttaatctgcaatcactttgttaaaaagttgtacctttctcattttatagttttcttatgatgtgtttgcctggctttggtatcaggttaatactggccttgtaaaatatttgggaagtgttattttgtctctatttcctgtaagattgatatcatttgtttcttaagcatttgagaaaattcaccaatgaagccatttggctcagatcttttctttgtgggcatgtagttaactataattcaacttggttacttatacatctgt

SEQ ID NO: 155475 - DNA, 435 bp, Homo Sapiens
taagaataggaagacaacccaatataaagtgggcagaagattatacagatactttaccaaatatgcaaatggccagtaagcacatgttcaacatcattagctgttagggaaaatgcaaattaaaaccacaatttgctactgcacattcctggaataactaaaatgaaaaagtctgagaatacgaagtgatggtgagaatgtggagcaactcgaatgcccatatattgcttgtggggttgcaaaatggtacaaccactttgaaaaacagtctggcaatttctcatgaagttaaacatgtacttaccatatatcccagtaattctatttctggatatttgcctaatataaaaacatttgtctacagaaagacctgagtgtcatagcagctgaatgctcaataagctgaatgtttatggcaactttattcataacaat

SEQ ID NO: 155476 - DNA, 522 bp, Homo Sapiens
  misc_feature (67)..(81): n is a, c, g, or t
ttccctgggctgggagttttggccctgccctcccgccccacgggaccgggcccgattccctttcccnnnnnnnnnnnnnnngactgcaaagaactagttattttgataaccccttaaaggcctactgtgtcccaagttattggaatataatgatgatcgaaaatccttcaattaaataaacagtacctctcaggctgaagtgaaaaatctgaacttgaacagtagttaaagtagtacagttattccttaccatccatgggtgacttggttccaggactcaacctcctgcccatggatgtgcaagtccctgatagaaaatggtgtagtatctgcatataagctatgcacatcctggatgacttgtaatacctactgcaatatcctgtgtagatggtggtcatgctgtattatttagagaatcatgacaggaatctgtacgtgttcagtcgtggttggttaaatctgcagatgcagagctcacggaggaggctggccatgcatggcacacattcataggttctc

SEQ ID NO: 155477 - DNA, 496 bp, Homo Sapiens
  misc_feature (91)..(91): n is a, c, g, or t
gagttcaatttcaatgtctgtttgtttccttcatttctcccagcacaggaaagcacatagcccatctgtggaagaaaattccagaagaccntgcagtgctgtagaccttgctcccttctccaacctttacaccttgaccaatacttaccctcccatcaccatgcgccaaacacactgagacatttttctctttgagtctatgaacacactcagctctttccagccacagggcctttgcatgtgcagcttcccctgtttgaagtctttcactcagctttttagcctggctgagccttgtcaggactttcaagaagtctcagctcaaatgtcacccctcaatctaagctaagctctcttttgtttggggccccagcattttgtatattttcttcacagagcacctcacagtgtataattatctcacatattggttcacacacatctcttttcctccgataccctcactagaatgtaagcaacacgaggtcaaggaagg

SEQ ID NO: 155478 - DNA, 111 bp, Homo Sapiens
cttttaaaagttttattagattcaaagactatgtgtaaaatatatgcaaattataaacgaaacatatcttttgatgggcaccatgggggcaagtttccagttttgcccatt

SEQ ID NO: 155479 - DNA, 526 bp, Homo Sapiens
tttgacattttgtttattttattttaaatattaatatattcctcaccttgttctggggaggatttgagactgctcatatgatatgcatgccataaattagtaaaatgcaataaaaaataaagcatcagaccacagaaactatgccatgggtggtatagcaggccgtaggcggctgtaaagttgatccggaattggccttcagtctcttagtggtcaactgaaagggtgttgtggtcacatacatggctctcattcacaagagggcaatgtaccagctcttagaagaagcaaaactttttctagtacttgactctaaggaaaattacccacctcggcccagatgaaagagactagcgtggataatgtcctcaaaacatggcagcaaattcaggctcagtttctctgggctgtgtcctgcaggaagatccaaggtggtcaccctcagcctctgctcagtgagagcactgaaatccacactcccttgagcaaagaaacgatctgtatgtttcaattctttcttcagcac

SEQ ID NO: 155480 - DNA, 444 bp, Homo Sapiens
  misc_feature (92)..(305): n is a, c, g, or t
agttgtgcctgtgctatttgttaaactctcttttctgttgaatggccttggcacccttgcaaaaattatttaaccctatgtgcaaaggtatnnnnnnnnnnnnnnnnnnnnnnnnnnnnnnnnnnnnnnnnnnnnnnnnnnnnnnnnnnnnnnnnnnnnnnnnnnnnnnnnnnnnnnnnnnnnnnnnnnnnnnnnnnnnnnnnnnnnnnnnnnnnnnnnnnnnnnnnnnnnnnnnnnnnnnnnnnnnnnnnnnnnnnnnnnnnnnnnnnnnnnnnnnnnnnnnnnnnnnnnnnnnnnnnnnnnnncagtaattctgataggattatactgactgcagatcgcagtgggttgtgtggacatcttaacaatattctcttcaatccatggacatgggatgtgtttccatttattgtgtctttttaaatttctttcactgatgtttcc

SEQ ID NO: 155481 - DNA, 527 bp, Homo Sapiens
  misc_feature (64)..(64): n is a, c, g, or t
caatatattgcaatcaattaaatatagcagataagtaagcttcttccatgaaagagatttacanaatgtaaacaatattattattctaactaaactgatctttatctgaaaaatatttttcatagaaaatatgctatttaacacataggtttattattttaaaataaattaatgcataaatattaaattttttctcagttttaatttctggttcagtatatactgatagataaaatccatataaacaaaacctctttggggtctttgttaattactaagagtttaaaggggtccttagactaaaatgtttcagcacctctaatctactatactcccatctcatctctacccacatggataatttttagcatctagtcatattccttattttctaccctttacaacaacctttgtgaactcaatatccatattcatgatccatatgagactaagaccttggagttcttcctcctcctaaacttcattccttgacaattgcctaccaggaaagccatttctttcttttt

SEQ ID NO: 155482 - DNA, 503 bp, Homo Sapiens
  misc_feature (268)..(288): n is a, c, g, or t
atgagccaccacacccagccttacattttatatcaagaaaaaagagtcacctttgtaaataatggcaaagaatacgtcctcaagggattttagattatatctctgtcatataaggatcttatttatttattttttaaaagtctcaatacataagatactctgcatggagtttgaaagagagagggatgcagaggctgacacctgtagggtgtcatataattaattccaacacctaacatttgggtctctttatttttcctgggattcnnnnnnnnnnnnnnnnnnnnnggaaacaaattctcatggttacacccaggtgtggagttgcagtgacacaatctcggtctcacgtgcaacctctgtcctcccaggtttcaagttgcttctactgccttcagcctcccgagttagctggaactacaggtgcccgccaccatgcttgaatattttttggttttttaagtaaagaagaggttcaccattgtgcccaggttgttctcaaa

SEQ ID NO: 155483 - DNA, 482 bp, Homo Sapiens
agtaatatgtggacacatttagtcacaaacaaatccaaaatataggcatgaaaactgtttattaattcctcgctgcatgacagaagtggcttaatatactctttccagaccaaagcatctttatctgcaaaatgagaggattaaattaggttatctctaagttcatttaaaattgttttaaaacaatctatgtagataaacagagtagcagtctgcaatgtatttaaaaggaaatggactagtcaagttggcaagatctatgtgaaagaattattgttgtgctatataaaaaaagaatctgcctttttaaataagacgagtaatgacaaattaattttcatgcaggttgaaaatgtggcagatgtgtatggagaatgagaaaattcctgttataatagagatgacttaaattatgaggatggtaaagaagagggaatgttttctgtcctttcaagatgtcaaagcttaattgtacatgtttt

SEQ ID NO: 155484 - DNA, 298 bp, Homo Sapiens
ggtaatccatatgccactggaactaggaaagaaaggctctccataattcctaggtgtggagggaatggcaaaggcccagtgcaaaccccaccttgcctgtaaaggtggtcccttacccacagccaccttcctcctcttaccttacattacccttccattaaaaaagagatggagccagaactgggacgtggatttcaaagcctatgccctttccacggctttcccaggttgtggtcatgtaccactctttatgcatgaaagtattttttaattgacagtgcctttgggagcaggggct

SEQ ID NO: 155485 - DNA, 156 bp, Homo Sapiens
ttaagaatattttatttttcaatttttcatcagggataccatgtggctttcatgggcttcacgagtaggatggtgattccactactgtgtacatttactgctttaatgcaaatataaactacatttcaaatatgtcattggcccattttccatgaa

SEQ ID NO: 155486 - DNA, 563 bp, Homo Sapiens
gcggccgcccagccccacactacagcatgctgccagtgaggacaacctgtccagcagcacgggcgaggccccgtcccgggcagtcggacatcatggggacggccccaggccctggctgcgtggccagaagaaaagcctgggcaagaaaagggaggagtcgctggaggcaaagagaaggaagcggaggtcccgatccttcgaggtcaccgggcaagggctctcccaccccaagacacacctcctggggccccatcaggcggagcgcatctcggaccacaggatgccagtgtgcaggcacccagcccctggtatccggcatctgggaaaggtcacgctacctttggccaaagtcaaactccctccaagccagaacacgggcccgggggactcctcacccctggctgttccccccaacccaggtggtggttctcgacgggctacccgtgggccccgcctgccccacggcacaagcacccatggcaaagatggatgctcccggcataactgaggggccctgcctggaactggctctctcacctcccaagactgaatggggtctagca

SEQ ID NO: 155487 - DNA, 565 bp, Homo Sapiens
catattttagatttcctcatttttaaatgctggcaattgttcaaaaacaagatggacaaacagaaaaataaaccaaaacactgtgaaggacaaatagcacattgtgtgaaaacacaatggagcccacaagatgcaaccctggtgccgagatctgcggaaagtgaagagaattgagaaggaagttgctgggaggactagaaaatctctattaatcagaatccagagcactccactgagagcacaatccagctgctggaaataggatttaagtggaaattcctccctctcagtgaataacaaatatgatgcgtattttcctgattatggtctttacgtcttacattttccaactctcttgatatccccattttgcacagtttcggtagagaatcattctcttgaatagtaatctaatctagttgtgatttgggtttgctttggtattgacatttcctagagagctccaacagatacagataaaagctgagctgctgcggttaaatctggggatgtggtgatgggggccctgtatccctcgagactgtccctgagacctgtagctcta

SEQ ID NO: 155488 - DNA, 344 bp, Homo Sapiens
ttataccaaagggtttatttgcaaagctgtaaaaaactacacagtgtgcagagcagagtgggaagaggtcctgggacccggttaacacaggcagcccctgcactcatgtttgcaggggaagggaggaggagagcttcttttccagccatggttcagtgtcctggagaccaagactgctgggtctggatgcctcctttgccttctactagcaaacactttatttccttgctcgtattttctaatctacctagaatctcaaacccccaaagcatggaggacttctgctatggtgtgaatgttgctgtctcccccaatatacaggttgaatcctaatcccgacacta

SEQ ID NO: 155489 - DNA, 513 bp, Homo Sapiens
tttagctttaaaaatgcttttaatttgtataaagtgcaaagaaaaagaatattgagaagcacatgaaagaatataaaatggctagagcctaaaaaataagctaatatacacgcatagggacacatctgcatatttgagcatacagagacatgtaaatactcaggagagaaatttgcttttcctcataacttattttgtgtttctccaaaacctgaagagtagataacagctgacagttacccccctctgagtgtgacaagaggtcacgcacagggagggcctctagctgccatttcctgttgcttccctggtcaaacaacgcaggcggctaagtcactttaggaaacgctcaacagggctcccattgttccaacctcaaaattccgagatacaacgggccccattaatacagacagcttacaggctgggggatggtcccttagtgtgcagtccactttttattgggacactgaattttcaaaaacactgacttgcacaaatagtgttaattat

SEQ ID NO: 155490 - DNA, 475 bp, Homo Sapiens
gattatagcatttcaagtggttgtttctgcttttcttttatactattctgttgatttttttctataataattatgtttcatcttaatgatcaggagaaataaaataagccgatggaaaacgcaagagaaaataataggaagggaaaccattaatgtaatgaggaagaaaaggatgtttcccctgctccatggaactggggatggggtaggtggttacagggaaggattgaaaccagagacttacaggattcagaggatgggcaaatgcatgctgccagagtagcattcggtgacaatgcctgacccaaatttcctccctcttttcaagattagctggatttactgttaggtttccgtctccctgactactcttaaaaaatcttgacctgagtccatggaattttaagtctgatttggttccatcatattcagcctccaattgaatcctacctggtcctagaaacttcatacactg

SEQ ID NO: 155491 - DNA, 378 bp, Homo Sapiens
gtaacaaaagttaatattagatttaaaaaattaaaataatgagaaactccatatgcattttttttccctccttaaggaggagtgacagggcacccctccttttattctgacatattgatgtgatcatttggtcagtgaataactttctgaaaactgaaaggttttcaaaaatggattcaaggtgaaggaaacaaacgaaataaatacttagccctaagtttttatgacatttatccaccaaaaatgaagtctgctatttataagactatagaactaaatgctaacatctgttaaagtcattaaggaacaggcattttctagacttttcctgtaatgatcagcacatctcttgtgcctttattttcatttgtatgtata

SEQ ID NO: 155492 - DNA, 509 bp, Homo Sapiens
tgctgtctatattcattacagttttccacttcaccctcccatagtctagagggatgcccattccatggtcctccagagaatagttttgacttaacatgtctgtttagcccacatcacgtcagttatcaacaccgccactgtgcttactgttcctacagccacaccaggcttgaagagttagtgagaccaacaaataattggaagtattggaaaaagcaaaatacatggggacaaaaaaaatacagtgaaattctttttatcaaactgatgctgtgagaaaccagatgaatgccagtttggctttatttctaagaatctgggtcttcattctctggtgtagaaggaatgcaaaaaactataacaacaacaacaaaaacatattttgaaaagacatattctgacatctctgcttgtgtgtggtaaggcaggttcctatcagacatttatccctttggtcaagatcccttttgctcatccagggtttcatactcaaaataacttaaaaaaaa

SEQ ID NO: 155493 - DNA, 624 bp, Homo Sapiens
ctgaagtttagtttgaattttatagtatctcctaccttgctgtaccttaaaggactaacagcagctacctgacccaggattagccagtcatattttttccagaatttgtaattggaacaattgagatggtagtcttctgctggtagtttgaagagaggatatgtaaacttggtagctgtgtacttagaagcagagaaagcctgttttcagagagaagaatgaagcaggtaagtcatctggaaggacaagcagaagcacaattttgggaacagttgctttcagagtcctgatggcattccagccccttgtcctagtgccagttcaggcccaagtgtttggcctttgggacctatgatacagatatcctatttccttttaattaattgcctcttaaaattactattattaagctagcttgcaagggtttctgttacgtggaatcaaggaacctcagtagagaggaaaatgaagcactttgtggtggtgctgcacagggtatcattttgcagggtatatactgtgtgttttctacgttgactggagtctggggtcaggtgtaagaagtgttacataaacattgggttcccctgcgtcagaataaagtcaactaaaaaatataaaaag

SEQ ID NO: 155494 - DNA, 482 bp, Homo Sapiens
ttttttttatctagggatgatgctcaatagctgtgatgaggtccaagctgagagaaaagagtcatgatcatgaatcccaactggattcatcattttccacatactttacttcatttagctttcaccaattctcatgttagttccattttacagataagaaaactaagacctaagctcacccagctagtagttacttgtggcagagacagactagatgccaatcaaattcagttcctcttttctgtagatacagttagattactttcccaggttctcttgcagttaggtttggtcatctgactaagttctagccaaagtaatataggccagtcccatgaaaaacatctagggcaatttagcatgttctttctttctccatccactggctgaatggaaaaaatttcaagggcttagaagaggacagagccacaagaaggaaggaacttgggtccctgggtgactatgtgaagtagaggtccctc

SEQ ID NO: 155495 - DNA, 469 bp, Homo Sapiens
tttgtttttagtagatgttattagtgattaggaaaaatgggagagattgacatctttcaattgacagagatgccaataattttaagtataattttttaaacactttgttcttaaaatgagaaagaaatgtaaggaagggatcactagcctgggcgttagcatgtccgaatatgataactaaacctgctgcaattatcttgcaaccagggaggagctagcttgaaaataaagccaacacagatgacaagcagaaagtggaaagaacctaagtcgttgatgatgctattgagctgatgaattaaacctggagtgtatgttccatgggcttctgtaaggaattaaaatatttttactgtttaaaccagtgtttcattgttttctgcagaaatcctaattggcataaagaaactattgaccgactaaccccactgcaacctcacctgaccccttaggatgtcctttcatgatt

SEQ ID NO: 155496 - DNA, 427 bp, Homo Sapiens
aaaaatatttatacagcacactttatattttctatattgcaactacccaattgtggtcttcaatgctttatctaaagttaaaagctaaattatttactttttgctaagaatagctttaatatatactctctctgaaaaagtctaaatccttgttcattcctctcttcagtattcatcacaaacacagctcctttcaagcttcacattaccctttcagtcctttctctatagagagtggtgatgtttttgaggtttggtggaatcagtctcttgtagttcattctccgcattataaaatgtactagaactcacttccctactgtagaagattgcaaaaatagctggaactgtctatatgcataccctctgaaatgtaactttgcctcctatcaagaggcaaagtctcccctccctttgactctggact

SEQ ID NO: 155497 - DNA, 568 bp, Homo Sapiens
  misc_feature (335)..(343): n is a, c, g, or t
tggaactgttagggttttctgcatataagatcacatgatctgggaatagagataattttacttcttcctttccagtttggatgcctcttctcccccaccccccactttttcttgtccaattgctctagctagaacttccagtaatatgttgaatagaagtgggcattattgccttgttcctgattttagatgagaagatttcagtttttttgccattgagtatgatatttgctgtagatttttcatataacttttattatgttgaggtagtttccttctatttctagtatattgagtgctttcatcatgaaagatgttgaattttgtcaaatgcnnnnnnnnnggcatcaattgagatgaatcatgtgtttttcccccttcattctgtttacactgatcagttttcatgtgtcgaaccatccttgcattccaggaacaaactgtacttggtcagggtgtataatcctttcagcctgctactgaatttgatttgctagtattttgttgatgattttggcatcaaccttcataagggatattgctctatagttttctttacttttagtgt

SEQ ID NO: 155498 - DNA, 564 bp, Homo Sapiens
tttagtgggttttggtgtctacagcttatattcttagtgggctaactgtagtcaacttcttggtcattttctctggaaaaattctgaagatcatggcaacttttagattaaaccattttctgggtttttttaatgcaaacttgtttattgtgttcacaaagtggccagtcataagaccataagcaacgcctgccctttcagtggctttcataccattaccatctgtaatcaataaatgtatatttattttgtaaaacataatgtttggaagtatatatacattgttaaatgcttaattctaggtaattacgccacatagttaacatttctgtggcaagagcaagtgacattgtcagcatttttcaaaactacaaatacattattttgatctatagtcactacgctgtacaaaaatatctcttgaacttctattaactataattatgtattttttgatcaacatcttttcaaaccctcctgtctcctaaataccttggtgtctggtggccaccactttactctctacttcaataagattaagttttttagaatccctttgtaagt

SEQ ID NO: 155499 - DNA, 378 bp, Homo Sapiens
  misc_feature (122)..(216): n is a, c, g, or t
  misc_feature (221)..(240): n is a, c, g, or t
actttgggaggccaaggtgggctgattgcttgaactcggggagttcgtgactagactgggcaacgtggcgagaccctgtctctgcaaaaaattaaaaaatgtgccaggggtggtggctcatnnnnnnnnnnnnnnnnnnnnnnnnnnnnnnnnnnnnnnnnnnnnnnnnnnnnnnnnnnnnnnnnnnnnnnnnnnnnnnnnnnnnnnnnnnnnnnnttttnnnnnnnnnnnnnnnnnnnnttaagccggggatgatggtgcatgcctgtagtcccagctatttgggaggctgaggtgggaggactgcttgagcccaggtggttgatgctgcagtgagccaagattgcagcctgggtgacaaagtgagaccctgtctca

SEQ ID NO: 155500 - DNA, 610 bp, Homo Sapiens
gtagagacggggtcttctcacctttattaatttcatgtcattcatttgtcaaagaaaccaagtcatttgtcctatacaatttcacacaatctggatttagcagattgatgtttcttgatgtctttaacttgttcctttaatcttctttttatttttctaagctgtaattagatctacaaggttgattacttcttcctttatttgttcctttctttctttttggcaagaacactttaagctctgctatgaacttcctagtgctgacattgggagatacataatgtctggttatctcactgtttctgatgttaggattcagcagcaggttcaggtgttgtcagcctgattgattcattataaagctccccatcaatctttcacttaattaatggttttagcagctaccaatgatcactgcctacacccattaattcattagggcctacggaatggtgatttttagactctacactcattctgcatttataagctgtaattcttccattaaaagtaacttttcctcctcaactatttgtgtattctgaaatacaattcaaaccgggaaagcaggataaatgcttgatttcttctttttatttaaacatcttca

SEQ ID NO: 155501 - DNA, 578 bp, Homo Sapiens
  misc_feature (236)..(236): n is a, c, g, or t
  misc_feature (281)..(281): n is a, c, g, or t
aatttactagttttctttttacttatgagggtgtgttttttgtgtgcttatagaacttttctaagtgttcttatagcagtgaagcctacaaagtaagagtttccagattccatccgttcttttagctgacttgaatgactctaatgcagtgggttgcaggtttggctacttacctatgtactctgtaaacatccagaggcccagggatattctgagccactgtgtgtgaatggagntttggccatctggtagatttccggcagtctctccagggtgatcgncactgtgcagcctcattgctcataaacaaaactttaaatatgcttttaatgatctttcaagtgtgttgaggatttctttcttgattttgaggaatatatgtcagtatatttttcaactttaagtgttcgtatatatattagtaaaaacattgaaactgaagtctgggggaagtttgtggaactagaatattagaatcaaaagtttggatttaaaatctaatgtgactatcgagtggcatgctggaaatttttaatttatttggcccatcttttagtatgccattcttaatctcatct

SEQ ID NO: 155502 - DNA, 327 bp, Homo Sapiens
ttttttttcggcctcagtctgttctcagaacatactccatcacctggttcccagaactcagattgcgcagtggtctcgtcatcatcggccaggactcacagtgcccgcggcagaggcctccctagacctccctcccgtccagcctcacccgctgcctactctcctcacgcccccgctccaggtcccctggccccatttcgctcgccacgttttcataatcctctcaggctccgggcaagcggcgccgcccgcaatgggacctgatcatataaggaaaatactgcgggctcatccgggggctgcaatggggacccgaaagcgccctag

SEQ ID NO: 155503 - DNA, 281 bp, Homo Sapiens
aaaaatgtgcatgcactatttgtttttttaagaaagaaatatattttccaaaaaaagttttagaaatgtttgtgtacctatgaagcaaaagtccatttatttggcagagaagttaatcagacagcaaaacctctagtgaagaaacaccactgtgaaagataaaggaaagtaacttcaaggatggaatcaacaccaatacgtgcgatcattactgaagacatcatctcagggagaatgctcctgagatatcttccagcactattcatttatgagctaaaggg

SEQ ID NO: 155504 - DNA, 272 bp, Homo Sapiens
tccgacggaacatctgaccagacaactccagaggctgtattgttattggcgctgtcctgtgagggcagtgtccaggctgccctgcttgtcatatccatgccttggcttctggccccggtgagcacttgtgctgcatgaggaaaggaggatcaggtggggtcaaaaccaaagcatcgaggctggcactggccaagacagactctggcagggaggggagtggaaggaaggagccccaaacctggagtgagacctttgactttctgatgatgtgg

SEQ ID NO: 155505 - DNA, 490 bp, Homo Sapiens
ttacataaatgccacttttaatatcagcttaggaaatatgtatatttttctttcaaaactaccataagcaaagatgctaacattttgttttttaaaattcgtacaaaataaatctatccaaagcttttggccacacacccatattttaaccaaagttactctggatagtttgaggaggattctgcttggtctgacaaaataagatgatgaagatgaaataagttgggttttttccctcctctgtctgagtgacagccactcacacatccacactattttcatttaggagtgcatttaacattctgtgagtaggaagaaacgaaaaggatgaggtaaggatattgtttttccccaatcacacatttctctttgcccatcctggtttctctgtgtcttatttcccttctaattattttccactccttcagttctggtgctgatgcggtccctggttcatttccctcctcccctcccattttcaggataactg

SEQ ID NO: 155506 - DNA, 477 bp, Homo Sapiens
tttgaaattttcaacaggaaaaactcagagctttgaagtctttgaagagacagaggcaaatggggtgaataccgctagctttgagttccaaagaaaccacaagggtggttcaggttgaactaatttcctaactgggtatataagatgtgataattggggactaaattgggctgagatggaaattaattaccatcagttagacaagacatctacctacttctacatgtttcagttatttaaaacttgtgccaaacaagtcatttttaaacaattatttattgaacacctgttatatgcaaggcagtgttatctgcattaggaaatttagcagtgtatgaaacagatcattataaagttactgtattagtccacttttacactgctgataaagacatacctgagactgggtaatttacaaaagtaagagatttattggacttacagttctacgtggctgggaaagcctcacaatcatgg

SEQ ID NO: 155507 - DNA, 577 bp, Homo Sapiens
ccgctccaggatggccacgtcaagcttgccccactccttctccacgtccagcgggtggtagccagggggcaccttgagctggcctgcttgcaccgctccctccagggattggtagatgcccttggacctgttcttgtcggcctccttggctggtagctccatctccttaaacttcaggaactgagaccacaggatctcaatctcctcgaagctggaggggaacttgcgttcctcaaaggcggccgtgtggtgtcgcatccactgaagcagcagcagcaccagctcccggtactcctgccagcgcagctgcagctcgttggccctcaccccatcctgcacgtccggcacgcggggcatggcgtcatacagcgacgagacgtaggtgatgaatggacttctcgtcgggctgagggacatccacgtcctcagggtccaggagccgcgtcactcccaggtcccgctccgccacagagaaggcctggtccaggttctccaggttggtctgccggtacaccttgttcatgtcgatgagcaggggcattgtgccggtggatgatggcattgaagaggcggccgc

SEQ ID NO: 155508 - DNA, 468 bp, Homo Sapiens
aatatttttgattagtagtaatgctgaatactttttcctgcttaatctatttgtttatttctggcttgcctgttcaaatctgttgcctatttttccattatagcatttatcttcttactgatacgtgtttttagtgatcttttgttgatcataattaccaacttttttcttcacttgtcatttggttttcaactttgtttatggtcttttttgacctggggggtggggaatgaaatctaatccatctgtctaggatccaccctcctcaagtactccaccatggctattccaggaccacaccttgcctatgattaccctttgcctgggatggaattaacatcactggttaatgttcctgactagactttaccttgagctggagagcaaccttgataaccgacttccaaatgtatctgcgttaaccacacatacatgatcatgaaacattcataagaattctaccttttt

SEQ ID NO: 155509 - DNA, 510 bp, Homo Sapiens
  misc_feature (308)..(308): n is a, c, g, or t
tttctgtttactggatttttattccaagcacctgatccagtgcctgggacatagatttaataagtatatttaataaatataatggaaataaacaattactgttaccttaatgcagtagttctttacaatttgtgcacaactttcttcaagttagccactagggggtagtctgccaatcttattccctcaatcttttaatccagtgaaattgatagaaaactacaatgcagtgtaggtcatattaataaaatgtttttcctcaagaaaattctgtttaataattatatgacatgtacgtgtgtatgcantttgcatgcacgcgcatacacacacaaatacactgaggcacgatgggagggttgttacttctgccggcctcccactgcagccatatcaggatgccccagaggcaatagtcagcattttccagagacactttttgcaatttctccagggcactcagtaaatagcagataggtctcttatacttatacttaattaactagaaaa

SEQ ID NO: 155510 - DNA, 168 bp, Homo Sapiens
aactttgatgatttcctttttatttgttcaacttcccatcaaaatagactcataaattgggaacaaaaatacagcttgttttaattttctgttctgaaaatactgttgccatccctatgttctcaaatcttgctactgctgataaagggagaagatgtagccatttgg

SEQ ID NO: 155511 - DNA, 509 bp, Homo Sapiens
agcaaaacactaagacccaggcacatagaccaatggaacagaatagagaacccagaaataaagccaaatacagccaactgatctttgacaaagcaaacaaaaacataaagtgggaaaaggacacccttctcaacaaatggtgctgggataactagcaagccacatgtagaagaatgaaattggatccacatcactcaccttatacaaaaatcaactcaacatatatcagagacttaaatctaagacctaaaatcataaaaattctagaagataacattggaaaaacttctggacattggcctaggcaaagactttatgaccaataatccaaaagtgaatgcaacaaagataaatagatggaacttagtcaaattaaaaagtttctgcacagcaaaagaaataacagagtaaacagacaacccagagagtaggagaaaatattcgcaaactatgcatctggcaaaggactaatatccagaatctacaaggaactcaaacagatcaggaag

SEQ ID NO: 155512 - DNA, 493 bp, Homo Sapiens
  misc_feature (377)..(406): n is a, c, g, or t
tttaagatttttgaatataggccctgagtcttttctggcttatagggtttcagctgagaggtctgctgtcagcctgatggggtgacctttgtaggtgacctgccctgtatagctgcctttaacagtctttctttcatcttgaccatggaaaatctgattattgtgtgtcttggggatgattttattgtgtagaatcttgcaggggttctctggtttccctgaatgtgactgctggcctctctaccaaggttggggaagttttcgtggatgatatcctagaatgttttccaacttgtttgctttcttcccatccctttcagggatgccaataattcatagatttggccactttacaaaataccatattgctcagaagnnnnnnnnnnnnnnnnnnnnnnnnnnnnnnctgactgtcttatttcagagagccagtcttcatgttctgagagtctttcctccacttggtctattctgctgttaatacttgtgactg

SEQ ID NO: 155513 - DNA, 746 bp, Homo Sapiens
tttgtttgttttggctacctatcttaatcatattttgccttggtagaatttcttacaaaaatatatcgtggctgtcatgagaatgtgcctggaagacctttaaccatgaaagcataactgaccatcggcctcagctgctgggctctgaaatccatcactgtgtttgtggtgaggccacataccaacaactggtcatggcaaagatactaaggctcattcctgtcctatgtcagttgacactggctccaggaccctcaatgccctagctgaacactccttaactgcatggcagcctagaatatgtccaactaccttttctccctctttccttcactcagatcagccttgcatcatgatctgatgacttgcccagccttgtccatctctctccccattttctgccacaggcatctcccctaataatagccttgcacatttaatcccatcttagcatctggttcttggagcatacacttctctctgcaaccaaactctgttcccttctttgttccacatcctcttttcatggcagataaaatcagctctgggctcagtgcatacggagcaaagtctgacagcaagaatggtcatgggccactgaggataacaggtttgcttgctggagcgtgtaatggagtctccacgatgcctcattggcaaagatcacctctgtatttcagcaggattggagtctgaacattcctgccttgattgcacaatgtcatggtttcattcatagggactta

SEQ ID NO: 155514 - DNA, 471 bp, Homo Sapiens
cttggaagcatgtggaaaggtttgttctttttttggatattcctactacctaggcaaatcagatggaattgcattcattacatggctaagtcaggacagttgaggccaactttagggatttttccgaggtgccatctatctgcatcgattgatttcaagaggtgtttgctcaggtttccgtttgctttcaagataatgtctgaacattaagttaaagttaaggctttaccatttgaaatgcagttgtgataacatttttagctctctccaactagctttaatttcttaagaacaacttgaacttgtatgaaatgtgttttaaaaaccaccttgtttgttttctgagtgtttcaggacttatattagagtccctggcctttagtcttcattcaagccaaacaaccattatctttaattgaagctgcttctactggaagccaaaacaattggtggagtcagtaaagaaagaaa

SEQ ID NO: 155515 - DNA, 502 bp, Homo Sapiens
taaactaagaatcagcaattaataaaagcaagtgtactctataatcacagacagaaggttcttattttcaggtcagcactccctagaggtgcaaactttatttaatttaaatgcagttgtttgtctaatgggaagctgatagggccttgctgcagttctctaaggtggccaaattaaacttggctggcagctcctgtaatcctcttgggcaactttacagccaagccccaagggctaaatggcaggcctggagctgtgagtgtggcctccccacggagggtgactccttgagttcagtgaggaaaaccacggtgcctggcagtggtcagccaggagtatgactggccactccttaggcatccagaagtaggaaacacagaaagcattccacaaaacggggaatctccccaaagagctagaaacccaggctggaaggaaatggcagcgcaggcaagagagcaagagcaccctgtgtgctcctccatcccgtttctctggggag

SEQ ID NO: 155516 - DNA, 553 bp, Homo Sapiens
cttctttggatgcctgattagtattgaaagatagaaatattctatgaactaattaggacagattgtgttgtgtttctctacctcatcttgttgatctctggagcattaaaatctatttagtgttgtcatcagtgtggtacttatgaaatgtaagctaacagcaatctcagaagggaggcagtgaagcatagcaactaggctcttgtttcttcaagatggcccctgtggggcagtgcatagatgggggtgtaaagagaagctgttggcattaaaatgagctagataatcagcccttgttgaagcatattccatggtataagagtagcacagacatgaaacatagataaagaaggaaggcttaatagactataagacttccacattgaagtattattaacccattgtatgtatatatgggcatgatcagagtctctataacttcctgattaacaatacagtgtatcttgttacccagctgtcagtctttgagagctttcagtaaaatatagtaaattctttcagcataggctaatgtgtggttactgagatgagt

SEQ ID NO: 155517 - DNA, 465 bp, Homo Sapiens
  misc_feature (77)..(86): n is a, c, g, or t
  misc_feature (239)..(260): n is a, c, g, or t
atttttggttttgtgtgtatttgtataaattttctgtataattagcccaggctgatgtaactataaaaattagttgnnnnnnnnnntattgtttccttaatggaattctcacttcatttgaatataagattttggatgaaaggatttggtataaagtttgggtttttgtctcaaggatttgatccatatttatccctaaatatttcttaagggatgtaactttttataaccattaagtnnnnnnnnnnnnnnnnnnnnnntggtaataattataactgaaaggtttaaatatactacctaagaaaaaagtacttctgtgacatatacaaaaaaatctagtggataggcattagatgaatagagaatattaattttgcagaaatgaaggaaaatctcttcgtgctagtacagcgtattcccaagagagtttattttcctttctccaattaatgtggtcataaattg

SEQ ID NO: 155518 - DNA, 446 bp, Homo Sapiens
tttatgtcctcttctggttttactattggggtgatactggccttacagaatgatttaggaagggttgcctgtttctctatcttgtggagtagtgtcaataggattggtaacaattcttctttgaatgtctggcagaattcttctgtgaatctgtctggttcttgactttttttgttggtaatttttatattaccatttcaatcttactgcttgttattgttcagggtgtctaattcttcctgacttaagctaggagggttatatctttccaggaatttatccatctctaggtttcccagttgatgtgcataaagctgttcatagtagccatgaatgatcttttgtatttcagtggtgtcagttgtaatatctcccattttgcttctaattgagcttatttggattttctcttcttttcttggttaaccttgctaatggtctatcaa

SEQ ID NO: 155519 - DNA, 512 bp, Homo Sapiens
gacaaagggccaggccttgtcttctttttctctgggcatcccagagccctggcacagctttctgctcagagacgctccaacgtgtctgctgtctgcatttccaaatgcaggagtgatactggcagctggctgggagtctggcttgggtagacagtaggacagaggtgatgtgggcactatgccatgggccacacaggacctagaggactgcagtggcaggcctcacgaaggacataccatgtgaggagtcccactggacacccgtgggcaccagcccagcaggaggagtggcgatgaggggtccttccttgctgtccaaattcccaaagcactgagaccccaccagcacccagggcatggccccctgactggccctgccttctgagctggggatgccacacccagcccccagagtacagctaaggttgtcccttaactccttagctgtcccagcccagaactgctcatctcatggaatcacggtgttccgccagttcaatctggtaagccca

SEQ ID NO: 155520 - DNA, 151 bp, Homo Sapiens
aaaacgtatttgtaatattctttcaacctgtttgcataatgggacatctcttaaatgcagcaagctttaatgcatttttgccaaataaactcaaaaactgacactcgattcagctattggaaagtttttttaatgtggttggaacaactga

SEQ ID NO: 155521 - DNA, 533 bp, Homo Sapiens
tgaagcaactgctttaaaagggcacattcatatggaattcaagatttcctatgtttttaacaaggcagtttgtactaaatccacatctgggctcacagcatcccagggagagggaggttatatgctttttctacttcctgccacaagcagcataagcaaaggactgccatagttgtgggacttccctttttccacagaccctatccctgcgtagtgagaaattataactttagacatttcagactttctgatccttcactcctctcaggaattcataagtttaaaggtcagatcctgcatagtcaagagtacaagatcccagaaggctttcagggcaaacgcgtcttggtgattggtcttgggaacactggaggagacattgctgtggaactcagtcgaacggcagctcaggtacatcatctctgaattaatgcccctaatcccatcatcagttatgatggctggaaagagatattcaaaactatgaagtacattggccaattgctaaattatgcagacacacagtaagtggg

SEQ ID NO: 155522 - DNA, 530 bp, Homo Sapiens
  misc_feature (520)..(520): n is a, c, g, or t
caggaatagaaatagtgaacttgacaatggcattctttagttttcagtttggaatttaattggaaactcatttagattttaataaaaagggaataaatatatatcttgtatcatgtggatgccttaggctgtcagtaacagaacactccagtgaagaaaagatctcccagaacaagaagtccagaggaagggagagaaggaagacaggttcggggttggttaatttagtggctcactgatctaatcaaggaccccgacactttgcatctttatactctgccattctcagaatcttctctcatgattgcactctggctgtattgaatgcagactcaacagtgtcttatgaagaaatggaatatttcctcctgtacatctctttttgttagcaagacaacaatttcatggaaaccctccagtttttccctcaggtcctattgattaggattggggtcacttgcctttcttaaaccatctggcaaggggaatgagaccattatgattggcttgaaccaattangagtcactct

SEQ ID NO: 155523 - DNA, 476 bp, Homo Sapiens
atcccaatataagcaattttacttttggagtaaaatccaatgacaatttacattttgatctcattatgtctaggttaggtaaaatgttatactgataccctcatttggatgtaaaacaaataaggcattcttgttctaactagtgaaggcaagataaacaatagatattttataagaggaaagtcctgttcactgaaccagataagctttagggactcagttctacaagtaagccatagatttcttctctccttgtcatgaacatctaccactcatgttacaaatcaatactaatagaatagcatggtgttcttgccccctttagactacatgaatcattgcaaacaatcagatttgcatttgtaaaagccatggtgtactgtaaaagttaacactggaaaaattaaagaattcaaaagccacatgtaaaagaaatgcttttctagattatacttgaattatcatgattcaatagc

SEQ ID NO: 155524 - DNA, 481 bp, Homo Sapiens
  misc_feature (38)..(38): n is a, c, g, or t
  misc_feature (61)..(61): n is a, c, g, or t
  misc_feature (74)..(74): n is a, c, g, or t
caggtcctacaataattacaatccaccttctaaggacntaattctacctccaacgtctgcntgcaccccgcaantgcaagcgctgtcagggcagcgctatggcatttctattaactgttctggtctggcttcccagccctgggcatggccctctattgtattgtgcccactgttgaaagaatgagcacattatcccctctccccatgtatctaaatcctttccaccctctatagcccagcaccaatgtctgctcctctctcggttctcccaaactattgccattcccatcacggcactcaccatgtgtttccctgcatcatgatgttccgcctggatatgtcacatcttccacagagaatataagctctaaaaaacagaaagaataaaacagacataaacatgtttcccaaactgccaatgctacaaaatatttctgcaattaccataacactgattttgcagtttccaatacacttagcc

SEQ ID NO: 155525 - DNA, 586 bp, Homo Sapiens
tctgctctccagtcccacaggggctgctgtcagtcaccctacggcctctctgcctaggctttgaaactgattcattgttcttttgctgtatttttctttgtaggtttcagaattctctgtttatttatgataatttgggaaggatcctgggagagtgaaaataaatgaagtgcgcaatctgccaagtttcactggaggctccactgatccttccaccatgctcaaatgcctgcaggaaatctggggaatcatctttcctaccctaagaccctgggacttagcactggccctgaggcccctgacaggcataaactaatcagcaaatgtgcaggaaaaatgcggagctgcaagatcaaagtcagattcccactctccctaaaggcctggattcccctggaaacccacatcctcactgcctggaaggagcgatgaggacccaggggagtggctctgggcatcaacaggtccaggcaggaggcggttccccatgtcccatctttccagcaccgaagggagcctctcaggggagtcttatcaccccccgccccaccatcacagagcagcctgctcctggcctgtatccaaa

SEQ ID NO: 155526 - DNA, 373 bp, Homo Sapiens
  misc_feature (215)..(227): n is a, c, g, or t
caaagaaatacctgtgcaagtagaatagcttgcttcaaacagatgagatttgtcctcccaacatcaaaacatatcacaaaactacagtaattaagtccctttgaggccagcactgactgagataagcaaatagataaatgggatgtaacaggccttatttcaaactaataggttgttcaccaactcctagttggataccctgctatccattatgnnnnnnnnnnnnnggtaagttctcatcttacaccatacttaaatttcagatgaattaagtattaaacataaaaattaaatgaaacatgggtttccctgggtattctaagcctaactccaaacttggaagctgcaaagtttggctttgtggctctacatg

SEQ ID NO: 155527 - DNA, 841 bp, Homo Sapiens
ggcgcgatgaggctgtcaggaaggctcacagtggggagggctgtggtcggcaggatgctctcctgtgcaggtgggttgttgggatctggtacaggtgctgaggcagatgcaggtagcatggagccaaaaatggagcggctagaagagaagaggtcctggaaaggctcaaaggtgtccatgaagtccaggttaggctgcaaaggaatcagtcccggctggatcatgtctgcatttcccagatgtgctatttcccggggattgggccaggccaccggctggtgtgaagaaagtgtgtagaagagggtgtcgctgaattccgacatgagcatgtctgtgtccagcaggggatcctcctccatggggacgggggtcttccatccatccccgtgcttgtgccaatacagcatgtcatcgtcctggaccaggctggagaggtcctcatccttgtgctgctgtagccttttcttgaagtaggttctccacttgtgatactcccggatcacaatctcgatgcggctcttccagtacttcccttccgtggtgatggcctccggccggcggtgctcgtctacgtccacagagccgtccaggggtgtcacaaagtggcacacaggattcttgcgcttctccagatactgcatgtaccaggcccgccagatggcattattgagccggatcttgtctctccactgtagcttcaggcccttgaaattcttccactttggagacaccaacttcccactgtaggccaaagtcatgcactcgaagagcttggtgagcgaggcgtcgatggacaggtggcaggagctagtcttgccgaagctgtaggtctggcggccgc

SEQ ID NO: 155528 - DNA, 405 bp, Homo Sapiens
aaagctctggatactagccattccttaggattttaaggtcacattttattccctggatgctttatgtccccacctccacctgagccctcatcctctgttccctactatactcccaacttctactctttgttttatccacctatccctattacctgaccctttgtcttccctgtctcccatccttggggggacatgtagccctgtggtcatggttctgatgacatcatcagggcagcccccctgcccaggtattatggcctgtcagcattccctgtgccctccaaaccttaggcctagaatgcggagctgccaacataacattcacccttttgaacagatggagtcaggcacactaacacagctctgtcctcaataacacagccaaccgtgataagtggagccggc

SEQ ID NO: 155529 - DNA, 488 bp, Homo Sapiens
tcacgtttaacacagttgtgtttaattaaaaacaaatgaagttcacatagaatcttaaaaagcatttcaaaatttatggtgtattaccttaacaaaatactggtgaaactattaatttataaaattcaaaatgtttccctcttcctataatgcatgtgtaaggtcagccgagagaaaggatgaggagacccaaagtcaggcaagcaagctttactgagctgcttggctgctctaccacagttgaaggaggcagacccgcttacagaaaatagcaggcttttatagggccagaaccaggtcggggttggggagctgagttgggggtgcaggagaactgggtcagggtcggggagctgagtgagtcaggggtgcaagtgacttgtccgcatcctggagatgtttttttgccagctttgttatgcgaggtgaacagatatgttgaccgcatcctgtaactgtccggacagttactggaggggtcagtgaag

SEQ ID NO: 155530 - DNA, 429 bp, Homo Sapiens
  misc_feature (83)..(91): n is a, c, g, or t
taaaatggcaatattacccaagcattttacagattcaatgtgattcctttcaaactatcaatgacgtttttcactgaattagnnnnnnnnnttgtaaaattcatatggaaccaaaaaagagcccaaatagccacagcaatcctaagcaaaaagaactaaggctgaggcatcacattacctgacttcaaactataccgcaaggctatggtaaccaaaacatcatggtattggtacaaaaacagacacatagacccatggaatttgccttatctatccatctatctgccacctatccaccagctagctagctatccatccatccatctatacatcaatctatcaacctatttctttggcaaggctatggaaatgtcatagagaagatgaccctgtaatcattgcctttgctgccaatggtatatttggggt

SEQ ID NO: 155531 - DNA, 562 bp, Homo Sapiens
tttgccttttgtaagaacatgttttatgtatgattgaagtttttacaacactccggaaaagccatccgatgttagatttaaaaataaaatcgaaagcattttctgacatagtacacatgaaaaattggaaattccaatatcttcaatagaagttatagaaagtgtatgtcttcttggagtttgacacccacttaacacagcagaaaataaggtactatactgtaaacaaaaaagtacagtaaaggacgattgtaaatttacataagaatagttcataaacattttggtctttccataacagtttttatataaaatgaataaaaaaacctttagacagctgtcatcactcttgtttgaccacttttcacttatatgcacacagacatatttatatagcaatatattgatgcaccgttacatggatattaaactatgagtactgcttgtaactgagatgtgcattatccaatcaacattatccatagttgaaatactcttacattatgtattcttgtcatgttgtatctataaaaacatgaaaatataactttacattatttca

SEQ ID NO: 155532 - DNA, 400 bp, Homo Sapiens
atttcatgcattttgcctctaaaagtctagacaaccacctacttttcaggctgcattcatcagtgaaaaattactaatatcccttatgctgatgaacactctggcgtatatttagataagtgtttaaagcatcttcctagccacctgattgaggtgcttcaaatactaacttacccccagaacaagattgaagttaaattacacagcacacatccattacacagtttatatttgaagtattttaaagtaaattattgcataataagtaacagtcagcaataaattctcccatcttttgcattactttttttaaaatctgattgaaatggactattggcctctatctattctgtgcattgaacacttaaaggcatgatggggctgggttccgtggcttaca

SEQ ID NO: 155533 - DNA, 481 bp, Homo Sapiens
agtcatagtgaataggtataacctggatttcagcccacagatattgcttgtggatctgatggaaaacaaacaatcttaaacctggacaactcccgcctgcccccgtccctggccccaaccagcaacacacatacaaagatgccctgcctagactgtggaggacaaaagccctagactaataacaaaatgacctgggccctggagccctggatctatgccaaaccctttctgaattctgggtggatggggcagtgggtttagggtaaggaatgtaaaaaacttttaaactttggcaagtatacaaatgagtcttttttgattgtcacttttataaggaaatatcattctacccttgaaaagatatttttctatcatatgtgacttccctctcaaacatttgagggcaaatttctgtaaaatacaggtggactcaaacctctattttataatggttagtttatcatttttcactttctctatt

SEQ ID NO: 155534 - DNA, 537 bp, Homo Sapiens
gcggccgccggctctgcagcccctcgctcactcctgtcctgcagccccgtgctgaggctgcattctggcatccaggatccatccggagctgccgtgattccagggcggctcatgactgtataattaaggggaaggcagaggcgtcgccaaataggaccaagggccgactgcaggagctgccaatcctccacacagacgcacgcacggcgctcctctgaggggtggggaagccgtggggcctcctgtggagaagcacatcccatctgcactgcaagaggaagcgttttggttaagaaacagcgccttatgctcttcacacaaattcacccagactcaggagtcaacagctgcttgactttcctgaaaacggctggtgcaagcccttctccaggagcacatgaagtggccagtcatggctgcctcacttagaaaggggagtaaaagtcaggcctggaagcaaaccccgaggaaggctgggctcagcctgttgtgggcatgggagggcctctctgcctgaaagccgtgagaggtgaagtc

SEQ ID NO: 155535 - DNA, 418 bp, Homo Sapiens
  misc_feature (265)..(273): n is a, c, g, or t
actgaaatgatgagccagtagtcgtctttttatgcccatcctcttccacctccctctccacaaaaataaataaattaaagaaattcagcacctgtggaaaactctgccaagaggaaattacctcctgtgtggtttgtcagattcatgttcttcacactttccatgggaacaaaggctgtctacatatttcctgtcaagtgaagacaatggtgaggctctgaaaaccattttgaatccttgggttatctggggaggaagttattgnnnnnnnnntagcctgtaggaaaatgtttgattccattttattcaggctcgggataaatttcttatggcatttcagggcagtggagaagtcacggggacaggagaacagtgggtgagtcctgtgtcaatcagagtgcagggctgtgttttctgg

SEQ ID NO: 155536 - DNA, 484 bp, Homo Sapiens
tgtataactaaaacagggaaaaaattaagttacagacttacaataacatttcatgaattgtaatatttacaacatgttagtaagagtctctcttaacatacagctgatagcttttttctttaatccttgctaaaatttccttttatttcaaatcaaacactaaagcattctcaaaggtcttcaaatatgtattttaaaactatttaatccacataacaggtgactctatgccaggagcagagcaatggctgattctactacatatgtaagttgtaggcttttttaaaaatctttcaaaaaatgtatgatgcaaaaagcttgacacaagtccattcaattttaagtgttgtaatcctttaaagactgcatatagggaaacaaacacatagaactaggaaaagaatcccttgtgctcaaacaacaaaaggtggttatggaagaactatgcttagaaaaccaagtttctacaaatcatttactagca

SEQ ID NO: 155537 - DNA, 464 bp, Homo Sapiens
tactagtcgctcgcaatctttggccttctcatctttggccgtctcatcttcctcgcagcctacggcacctggagaccaaatcaacccccaatcttgcaaccctccagggactcaggcagaaactgggcatgctcagcggcacgggcagctttcagtctttcccgaggcgcggttcagcgctgggcagggacctgcgtgccaattcagttcgggcttcggcacccaccttcgctgaacccagggatccgagctgcaccctgaggctaaatctgcacccttaggtggttcattgtcaatcttcaacctgctgagcgccaacagagcttacaaatattcctcattaagaaactgttttcccacctgtgttttccttgcagctaagggtgctttagctactgcggcgtgaggagctcagggacggagccctgtggccggtggccgtagagatcaccttcccagagtag

SEQ ID NO: 155538 - DNA, 461 bp, Homo Sapiens
tacattgttttctcattttagaatgattcagagatttcagatagacattttttaaactttaatgcttagctagaatctacattctgaggaaaactctaaaaaacttaaaaatttttagggaatttttatttttcaaatcataattttaaaatgatagataccattttgtgataacaacaattcagaaaacaattttctatcctcttagttgaaagaatgtaggtacagtttggatacttgtactttaattttagagtaaacatctgcattatactcttatagataatagaattatttagttaagaaattctttacagtaaatgagataatgtgtgaaaaagtattttgtaaatgctgaggattctacaaatgatagttgttattttccatgtgtatttgtaagatcatgtccatttcatgaatataggacttcacataaaaaaagactttctcaagacaaa

SEQ ID NO: 155539 - DNA, 528 bp, Homo Sapiens
agtacttaatagaaaattttaatttgctagagggacagtatacatccattaggtaaaagtcatatgtcatattaaaggtggagtaagtcctaagtagaaatcagtggaaagacatttccgcttttaagtacagtaaggaccagttggtggtaattataacaaatttattggaagaactatgatagcaagagatgaccaaaaatggaactggatatttagtttcaagtcattgaaaataagcagaaactagatgtttatgtaccagattaacgggtttctctgtcagcttattaggtgattttcaatggaagaatatgtttgagttcttaaatagaaacctaagaaagatagccttggttatgttcctagaaattagaatgtggctaagaataaaaggggaaaccaaaaatagcagggacggaagaagctaagtagactgcagcataaggaacgcagaaattccaactgtgttaggaactttgaatgtcaattattcaagcaagacaataaccaccacccttggtcaca

SEQ ID NO: 155540 - DNA, 475 bp, Homo Sapiens
  misc_feature (73)..(73): n is a, c, g, or t
acagttcctaaaatcagggagagttttatgaagcagtttattgaccgccagcaacaggacacatgttgcctcntgagaagcctcccgaccacctcttcctcctcctgcgaccactccaaacgctcagcaattgaggacaacaaatacatcgaccaaaaacttcgcaagtctgttttcagcatcagtgcaaggggccttctgggaaaggagaccgcagtcactaaaatcttgagcgagaggccattaccgacgagctcacccattagcatccgctgttgtctctacttgggaagatcacattgtcactctagtggagtcagaatgtataggctttttccacacccttgttctgggacattaagaaagaagacatgtagacaaagaagaaaagaaccggggaccccctgctactgtgtctataaacaactagtggtgtttaaaggctaataaagctccaaagatctttcttataaaa

SEQ ID NO: 155541 - DNA, 172 bp, Homo Sapiens
ctgaaagattggtccagccctttctttattctgattagaaacagtcccagaggtgacgtgatttgcccaaagtagcgcaacttcctggaacgagaaaccaatcctaagatttccatgtcggcgttctttccgcggtgatcgggttacctcccagacataggatttacttttg

SEQ ID NO: 155542 - DNA, 498 bp, Homo Sapiens
cattgagcaaacatttatttagcatctactatgtggcagtagataattctgccttagaagaagacatatacattaataaacagttatatgatacaatacaattgcataaactatgataaggaaatatgcaatgtactatgagagaaaaacggatgaagcagcaactaattgcctgggtattacagaataaaacattacagatgacctgacttttgaacagcatctttaaatatgagtagttgtagagggaaagtggtaatccagttagaagcatgagtgtagttataaggtatgtttaggctgaagtgggggttataaggagggatggcagtaggaaagctgttgaagtggctaaggggtggatgctcaagggatttaaacagaccagggaatgtgactgagtttcctctttaacaaggtgtccccatggtgagggaggacttactggtgatggggaagaaccagagttggggaaatatatatgataatgctccaaat

SEQ ID NO: 155543 - DNA, 544 bp, Homo Sapiens
acagagaagaactcatctagctcagttcaacctgtctgaagaagtaagcactcctcaagacagtctggctcagtgtaaagagcttcaggaccacagtaaccaatcttctttcaacttttcatccccggagtcctgggtaaacaccacctcatctactccttatcagaacattccgtgcaatggatccagcaggacagctcagcccagagagttgatagcgccacccaagactgtcaaaccccctgaggatcaactgaagtcggagaacctcgaggtgtccagttccttcaactacagtgtgctgcagcatcttggccagtttccaccccttatgcctaacaagcagatcgcggagtcggccaatagcagtagcccccagagctctgcggggggcaagcccgccatgtcctatgccagcgctctgcgggcccctccaaagcccaggccccctcctgagcaggccaagaagagtagcgaccctctgtctctcttccaggaactgagcctagggagctcatctggcagcaatggcttttactcatat

SEQ ID NO: 155544 - DNA, 190 bp, Homo Sapiens
agtgagacctggcctgccacaatgtggttaaggaaacatattaaaacatttttaaaaatcaagattttccatttcaatggccttgtaattgattgaaaagtttattttgagtcacatggtgttctagactcttgtggagggtttagattggaaaataagtaatgacagtgaagcagttgttatgttcgta

SEQ ID NO: 155545 - DNA, 445 bp, Homo Sapiens
aaaaatctttcttttcattcacagctaaagtgtccttaatggaattgctgcttatttcaggtgcttgcactgaccccttgtctttctgaagggatagaagaaatttatcggactggtctgaaaaatgggatccatcctgttgatcccaattctcctcttcttcacgatcatctgttagggaatctggtacttgtccttgagttcgatcatacacaaccccagttccaggaggtctacctgatcttggatcccagtaaccattgccttgccagtaatcacgtgtcccaccatactgttctgcattttgctgatacttgtgtccaccacaagctccatagctactgtcaggttgcatgatacgtggtagaaggcttttcttgagagaagtcccaacctaagtttctgagctcttctgatgagtgcaagccatccacatgtggtatct

SEQ ID NO: 155546 - DNA, 543 bp, Homo Sapiens
  misc_feature (59)..(67): n is a, c, g, or t
ttctgttcagctggggtatttatttcttaaaatttataactaagaatctgaaaatttcnnnnnnnnngttggcggcaaatgttctgatactaagtatgcacaacaggttatttgtcttacttcccaagtattattttaatatgaagtagccaacacaaagggcactgtgttttaaatcaagaaatgactttgtcttgggacacaactacccgtggcacagatgccacccccaggcggctacctgaatgggtcccactgacatcagcaggctcttcagctgggcatccgtggtggacgaggacagcccctccacagacaccacgcagggctggggcttgcactccaccacccgcaggttctgcttgtttggcatcaggcgcccccggcccatgggaccggccactcctctgcctcgtccgtgcatgatggccttcttcgccgggtgaattccttggatgcttttgatccctggagggacaggcgagtgtgcgtggggccccgctggcagatgtgggggctgctggaggccccccctggtcagcg

SEQ ID NO: 155547 - DNA, 443 bp, Homo Sapiens
tacgccttaaatttagccttttgcccaagctcagtgttctggaacattttctattgtcttgtttttcacaatcactggtagtaatttaactcgcatgtatacgttcccactaacgttgggattttgttttttatctgagcctagaaatgatcaattcttttaaaatatagatgctctttttttaataatgccacacttattttcattgcccttattactaaggtgacccatgtaattgtattcatccaaatcaggacattgagatgaaaagggagcattagtaatttcaccaggacaacagatgtaaatcaggactgtcccagacaaactgggatgtatgatcaccctgctcctaaccagatcttacatattttcatgtttggatatcattcttaataaagatgaaaaagatgcactttctaccaggcatctgtcatctttga

SEQ ID NO: 155548 - DNA, 514 bp, Homo Sapiens
agtcaaggattatgtcactatgtgttttagggcactgtgaagaagcatacaatttctaagttatattatatgcatatcagattctagatatgcaaggcctgagaagactgagagggagatttatggtgtgtgactcagagcatgcagaggaaagatggatgagacactcatgtgcaaacagctccctcaagtacaatgttacagagggagatcagccacctggctctattgtttcttctcatctccttgcttcatcttcaccttcttgcccctaaagcatagccttcacaaaagccttcaactcagcaaggtgcatttatcttacagggtttagtgaagggtaactttgtggaagcatataaaaaactattatataactcttaaaacctgcatttatttacgtatgtctttcagttttccctgttctagcttagatttataccttcacacttttaaaagaaaatagtaacatataaaatctatgtatgatgaactttactagcagatttacttg

SEQ ID NO: 155549 - DNA, 390 bp, Homo Sapiens
ggagggttcaagtggcttgcttcatctcggagtgtcctagagtctcttttaacctgtcttgaaccaaataagtcagtctcccctgattcagtagataaactaagttgcagaaagtagagtagattaaaaatggggtcttctattgaattatttgggtttcagaaagttagagccattcaagtggatgtaaactcagacttgtgggaagacggttgacacatggagaatgtgttaggaacagtaccactttgagctggactcttgtcttgactgttgttaggactttcatattgtgtgtctagcccaggagacagttgactgccaggcagactgtacctgtggagaaggatgctttaggacaagcttgtccaacccgggcccaacatcaga

SEQ ID NO: 155550 - DNA, 181 bp, Homo Sapiens
cttcttcatcttttaggttaaggggtacatgtgcgataaacagttattatgattaatataggctaatttaatctttgcttgtatggtcaatgtttttagcatttatcctaagtttggaagaatattctcctatgttttccttaaagtgttaataatcttatgtctataatgcattggagtt

SEQ ID NO: 155551 - DNA, 513 bp, Homo Sapiens
tgtctaatccctctcatggtctgcttcctggaggacacaatctgagacagtgggttccagagtggtctgagaaagcaggtggtaaaatggggtcttggtacaggattgccccgcatctgcccaactggcaacaaggttcccatcttcgggagtaggtggcacgcaggcggctccaggcacaagatggcaggctagttgccagacctttggtgttagaacttttgctgggatggccggcttgtggagaggaagttcctggcaggtgaggagatccaggcagggcggatgcctggaaatgaaaactcaaagaacagacagtggtgaatatatttcctggatgacccacaggggattaatgagaggccaagagcaattaacaaacatctaaaaattaagcagaaacactggaagtacgtcttccacgtggggcgtggtttacaaagtaacccccgatccatgcaatgggcgagcagcagaatctgaagacaaacccaggacttgctaaggtggctg

SEQ ID NO: 155552 - DNA, 471 bp, Homo Sapiens
gtggtcccctctctgctcagcctgcatgagctggtctgagggtcctgatttttcaccagtgccttcccttctactgttccctgaggacaggcacccccagatggaaactctgacttgccctctacctcatctccacaggaaccttcctcctcaaaaatcaaagaacacagtggatgcgaaaatattccataaatggaaaaacgtagatgtagagaagaactaagccacatctgtcgagggccctgcacttgccaggtcatgagctatgaagttgatttactgacccatgaatgggtcacaacccgcagtttggaaacagctggatggacccccacctgtgctttccagcttctcctagagcctcagggccccaggaaggcagtgtggtctctgcaaccaggtccttctcctgggagaaacacttcaacttttgcaaaagattcattaattcatcaccatggcacccaaaaa

SEQ ID NO: 155553 - DNA, 506 bp, Homo Sapiens
agatcatttatttttttattgtatttgttttatattcataagtctaaacataacacaaaacaaaaatgaaaggattatattagcctcctggggctgctgtaacatggtaccacaagctgggtgtcttgaaacaacaggaatttaccctctcacatccctggaggtcagaagtccaaagtcaaagtgtcagcagggccacacttcctctgcaggctccggggacagacccttccttgcctcttccagctcctgctgctgccgctgttcttggctggtggctgcatcacaccagtctctgcctgtgtggccacgtggcctcccttcctgtctctgagtctttgcgtggccttctggtgaggacgccagtcattggaattagggctcactctatctaatatgacctcacctgagctaatcatgtctacatgaccctatttccaaataaggtcacgttctgaggttttgggcggacatgaaattatgggggacgatattcaacccagtac

SEQ ID NO: 155554 - DNA, 409 bp, Homo Sapiens
aattgagaacatttaagaagtagcccttttaagggctgtttcatttgtcaacccacacaaactgcatgttgtattacttatttttggttaacagcaatttcagtgaattacaacattttgctactaatggaatagcctccctagctctttttcagcccttcaagggagaggattaatctgaatgaacaatatagccgacaccatgaaacacaggaatttctattatgaaattacctatctgattgaatttataatggcaatatataatggtgtaggaagcttctggtgtattggaaattaaaacacaaataagcaacaagtgtaagataatcagcctttgtggctgtatttacagctcaggtgacttcaatcacagaacaccaggtgcatattaaaagttggcggccgc

SEQ ID NO: 155555 - DNA, 535 bp, Homo Sapiens
catatggctcaaatatattattacacactgaaaccactaggtaactaatacctatatcagtaatcagaatatcactgtcacaacataaatcccttcgtccttccccagttcactacctcctctaccagagaaactacctttgttacctctaacagcatagactaatgttgcctgtgtatcaaataaaatagagcctacttttttctgtctggcttattttgttcaacatgtttatgagactatatccctttcttttgaagtagtaaaaaactttttacttggaaataattacagattcacaggaagctgtcttttgaaattttaaatcactaaagaaaaaagtttgtcatctcttggatgtgcccgccctaacatctcatggcatagtcaggtggtttctcttctgtgagccagtagctccttgctctgtggcttttgtgtagctcttaccacatatcttttaactatttgtttgtgtgtcatttcttcctctctagattgtgagcctctgtgaactgtgatcccttcactcgaa

SEQ ID NO: 155556 - DNA, 504 bp, Homo Sapiens
gttccgggcattttgcatcagaaaacaactttgtcttggggcacacttggaagttgcatgttttctttccttcccttatccccattcggtcctctttttcctctctcgctttagttttcaacctttttggtgctgagagagagaaccgagaggtcccattacaagggcagggcagggcagggaagctgccaagctccgcaccccagaggagtgttctggactacagccttgtcttatggtcaaattgatacccttaataagaaaggaaaggaaaggaaaacagatcctcccctctgctttttattgtaaccagaatcaccctgaggtcccttctgaaccctctgggcctgcgctaattgtaggagccacagcgctcctagggtgagaggcttagccatccctgaccctggcagtgcactggtaagcagacactgcactgaaccaactgctatgctcagaatgtaccagaaacccaaacattggcaagtaattttgcaactttca

SEQ ID NO: 155557 - DNA, 440 bp, Homo Sapiens
ttagtattcaccgtgagtcactcaggggaaattggtatctctgtaaacaggcaaatgaaggtgctgggtggaggtgcatgacattgtacagaaatgatgtccacacgcacctataagggccttaatttaatggcctgttagttacatggttacatacttactgaatctagtcatactatcttttgtcagctaatgacatttgttacctattaattcaatataattatttgcttggctgaaaaataaatcctttaatttattctaaattgagagattagatttgcaatcttcaatcttttaatgttaaatcagagaaaagcaatgtatgtatatagtatgcattttcctacccatgaaaattatttgtattgccttgaaaaccctaggaagccacctaaagaatactctcttcaaatcctttagccaggattttagatttc

SEQ ID NO: 155558 - DNA, 297 bp, Homo Sapiens
ttcgagtgaagtatgaactccagatgtcattcaataaatatctattgagagcccaccatatttcagacactgcactagggatacagcagtaaaatacagtcttgtcctcatggatttacacaaactgaatgtcattggtatcaaccataaaaataaagacaacaaacaaaacaaaaacccttacttctcctgactttcccaatccaacaatccaatcagtagctaagtccttttattctcctctcaaacagctttcttattccttcctatccatcatacctgaggcttcactcgaaa

SEQ ID NO: 155559 - DNA, 452 bp, Homo Sapiens
gtaccggggtttagagtaaagaaagtggcctgggctgcgaaggaaacatttatttggcataaagactcatgaagtattttttaaaggatgcacatgtaacggctgtattaaaggttctcagagtgctcctcggcagctgtgacataaacgtgtgtgtgtgacggtggggggcgtgcataaccccgattttaggccatggactttcctgtgcactgactacagcttaggagagatttatggtgccacctgtgtgtgctctcactcctatcctcagcctagtctcttcttgctcattctccagaattccactcactttcaattaatcagacaccccacaaagccaaaaccaaacataaaattgtttcgaatttgcaacaagcaagcatggacatgcgaatgtttgaaagaaggtattagacaaacacaaagtcaaagtagtcttttagtcccta

SEQ ID NO: 155560 - DNA, 315 bp, Homo Sapiens
tttcgagtgaatttggactagaaaaatgacccttcagtctaagtttgtgtttattgttttgttcccttttcatctgttcaacttgtaaaactctgcttctagaaatcagcatgctgatttcccaacacaggaaatgtcatcacttagttccagagcctcaagaatagttattagcatactcaattcaaatgaggaagttaggtttggatcaaatatctgaaatcaccatctatttctacttaaggacattcccccacaagtgaaaaatgtgtatgatctctcagggcttcactcgaaacggggagtgcctctata

SEQ ID NO: 155561 - DNA, 330 bp, Homo Sapiens
tagatgatccccgggtttcgagtgaagatgcacgtctaaggtgtgacgggaaagggccagaaagagaatgagggaagaacattccaagccacagaaatggcacatggaagagagcagagatgagaggagaaaccatctgtgacttaggtggctcagcagagctggagagagtcgggcaattgagttgaagcacaggctggggccgtgccatgcaaggctttgccagctatacaagggcaccacatgccgtggggagaaccagagtgtttttagcagggtggtgtgatcagattcctacttcagaaagatgggcacagtgtgagggatgga

SEQ ID NO: 155562 - DNA, 436 bp, Homo Sapiens
  misc_feature (206)..(206): n is a, c, g, or t
ggctaagctctgagttgttatgcattaactctgttctgtgcagtccttctaggactaaatacagcctgcagctaaatacatactgcttctccaaggctgctgctgtgctgatgtttctgtctgaactaccccagactccagtaccgtctgtttactccgtatctcggaggatctgcagaaggtccgcgttgaccctttgcaatccnagtatgcactttcaggctcatctatctaaataaatctctttcagcatggcttccgtttacgttagggctcttagtatcccaattatcgagcaattttattaaactaggagtatcagtgcctggtagttaagtacaggtgttttgggtttaaatctcgggtcagcctgagttcaaatctcagctccaacacttaatagccatgtaaacttactgtaattacctaacctgct

SEQ ID NO: 155563 - DNA, 413 bp, Homo Sapiens
cgctggggttttgagtcccaggatagtagaggttgtagtgagccaagaaagaaaaagaaaaatatgacatttttgcctttcagactggcaaagattaaaagacttgacaaaatgtatccagtgagggcatagggaccagagcaccttcttctacggtgggtgggagtacataaattgctgcaacttttctggagagctatttggtgatgcaaataaataactgagaacgtccgtatcaatgtgcctgagcaaatcctattcttaggaatttgtcataaggggataatcacatacctttataaaagatgtcatatgttggggtgattactgcagctaacaactattgaacattccccacatgtcatcttctgtgttaggtatcttatacacattaggattaatcctcaaaacgc

SEQ ID NO: 155564 - DNA, 354 bp, Homo Sapiens
gctgactccaggacttatctcgacacgtcagggtggagaaataaaactcttcaaatgcataatcttggagatccctgtgaatcaataattctttagacaactgcggctcaaaatccctcctttcccttttccgagttattccatccatcttattagaaaggaagtgaattaggtgtaggtggtctgtaacacctgcacatctttttatacgtgtagagggtatgcctgggatatataggttgtcttcaagcagtagctgctactacagctagagagaggaggagtgccaggaaactgatgacctgagaccaagagtcttgttgatgttctgacgtgtcgagatgaatcctctgg

SEQ ID NO: 155565 - DNA, 316 bp, Homo Sapiens
acacgtcagtctgtccctttcacattaaacttttagaaatagaaatagaagttagaaagcaagaaaaaaatgtggaaaacacataataatttgtttaaaaaatatgcgaactgtctctgataggatttactgacttgagccttttgcccaatttttttaaacaatcatatttaacttagagcaataaaaaatattttcaaagcggaagaaaatgtttttaacaggttatttctatctactctatacagcacacaatcttacacaagaactttcctttccactattcttcgtctatcagcccctagtcactgcacgt

SEQ ID NO: 155566 - DNA, 321 bp, Homo Sapiens
agcctggattgttttgtttttagtcgttttcagtatgccactatactaagccatttccttatattattatccctttttaagttgatgaaactgaggcctagttgaaaagcaagctcagagtcacgccatagtggtagagcacagtcttgaacaagagctcttaacactaaaatctgcgctcctaactgtcatgctgtatttctttttcctcatctcatcccctccataacccagaaatatgctgattctctttttgtttgtcctcatcttacacccctcctacgtgtcgagatggaatcctcggagtcacctgcagcaaca

SEQ ID NO: 155567 - DNA, 587 bp, Homo Sapiens
aaagtagagaattactgcaaagttttgatagtgctcttcagtctgtgaaatctttgggtggaaatgatgaactgtcaagcctacttttcttagaaatgaaaggacatttctacatgcatgctggttctctgctttttgaagatgggtcagcatagtagtaatgttcaatggcgagctctttctgagctggctgcattgtgctatctcatagcatttcaggtaagtcttccacttgtaggagcaattgacatttcactgagtcttgatgtgtttgaaatgaaggtgtgctctggtatgtaatgacaatatgtgaactaacctgtggaattaaagttgaaatagtcaatttgatacagtggaaaataactaagcatacacaatactggtgaggctggtgaaacagggatgttgaatgcactcttgttgaaaagcctgcatttgccatgatttgtttgtagacaaatttgaagagtttgatctttttactctgccatttttgggaacatgataaagatgtaatctcgtattatgggtgaagcttgaattcagaaagatgtgttacttggactactccccggggatcctct

SEQ ID NO: 155568 - DNA, 540 bp, Homo Sapiens
  misc_feature (122)..(300): n is a, c, g, or t
cggagtaaagtccaaaaggatagtagctagaaaaaaagcattccagcagtttgatattgtgtctactacttgccttcctttcttgtttttcctattcttctgtcatcttttattatttttannnnnnnnnnnnnnnnnnnnnnnnnnnnnnnnnnnnnnnnnnnnnnnnnnnnnnnnnnnnnnnnnnnnnnnnnnnnnnnnnnnnnnnnnnnnnnnnnnnnnnnnnnnnnnnnnnnnnnnnnnnnnnnnnnnnnnnnnnnnnnnnnnnnnnnnnnnnnnnnnnnnnnnnnnnnnnnnnnnaatcactatttttgccctctgtgtctgaaggtcaaatgttttagaacgtatttataaagcactagttaatccttactcttcacttttaaaagcagcttaatcttatcttggcactgagcatatatcctgtgaataacataatggctgttatcagagaataaagatgacgctgcattggatatgtcttcattaagatatattacagtgtccatgcttagcttgactactcccgtcacctcg

SEQ ID NO: 155569 - DNA, 501 bp, Homo Sapiens
  misc_feature (376)..(424): n is a, c, g, or t
tagtctttagttagacatatcctatgcagcgtcatctgtattctctgatgacggccgttatgttattcacaggatatatgctcagtgcctaagataagattaagctgcgtgttataagtgtagagtaaggtatttactagtgctttatatatacgttcttgtacatttgaccttcagacacagagggcaaaaatagtgattagtacacactagtcagctgggagaggtggtattcatctgcagtcccagctactcaggaggccaagaggcaggaggatcatttgagtccaggagtttgaggctgtagtgtgctattatcatacttctgaatagccactgcactccgcccgggtgacagagcaagaacctgccgctnnnnnnnnnnnnnnnnnnnnnnnnnnnnnnnnnnnnnnnnnnnnnnnnngaaggcaagtagtagacacaatatcaaactgctggaatgctttttttctagctactatccttttggcttactcccgg

SEQ ID NO: 155570 - DNA, 478 bp, Homo Sapiens
atcccttgtctctctgttttcccagttgccatgttacctttttccctttactttgcttagcatgatgtttgaaaggcctatttgtgttgctggatgagcccattgctgctctgtgctctatggaattccatggtgtggaatctgacttagccattactccatgacagccacttcaattggctccagattcgtactactgcaaacaacattcttgtgtatgttcctcacagacctgtggaagaatctctttgattgtacacccttgggtggggttactgggctgccctcccagaaaggcctgcaccaagcctcactccccaattcataacatgtgcgggttttccatggcccccatcaccacattcccaccaacactaggcattactcagctctcattgctattttaatttctgcttctgtgagactaatgactcttatctctctgttacatactcccgggaatcctctggagtcacct

SEQ ID NO: 155571 - DNA, 550 bp, Homo Sapiens
atgggattaatcaataaatgatgtagaaaaaaattggctccccttttggctcccctacctcacactatatacctacctattctagatgtaataaagaccgaaaaatatttaaataccatccaaatagtcaagagaatatgtttcatgaaccttagggggtgaaaaaggcttttctgtaccagacccacaagttcaagaagcccttatgcaagagtctggcagttgggactacacacaaatgtcaaatttctgtaaggtggacacttctataagctaagtgaaatgaccaagtaggaatatattttccaaatgtataaggagactagaagttaatgtgtctgtgtggtggtttaaaaatatgtccatgaattctgtgatactcttcctttttaagtaggtgagccgttattcccctccacttgagtgtgggctggacttagtgactggcgtctaaagaatagcataaagtggaagtgatggtgtgtgactttgtagactcagttaatggcagagtggctttctatcttggtctctttctctcttggactag

SEQ ID NO: 155572 - DNA, 415 bp, Homo Sapiens
cgagagtttggggttgatggtcgtcaccggggaggaagcagagtccctgaactgatcctgggtccgtatcggtgccattccgtgttcttggtagattttcagaattcccagataatggttcccaaagttttctagcttctggtcatggaaggatgcccagaagacgtcctagatcttacatacttaaacctgtctctgtaccactgctaagagtcccgtcacatccaagctgtcacctaggtgatgtatccctgttactgccttccatatttactgtgttctcacttgtaaaacagagcaatgtttgaatgctggagacctctgccatgtggaatttgaaaatgtcgggtgaggatttcttgagttgactgagtggtgttttttggactactccaaaggatcaggtagagtcacc

SEQ ID NO: 155573 - DNA, 518 bp, Homo Sapiens
ggtgaccctgaggatcccgggagtagtcaaatgaatgattgcttcgtgtcaactggtgaaaggaggaagaaaaccatgaaattgaaaacaaacgtgtttagcagtaagattcctatccgctgggttcatgacccatgttctgactagttatcacaattgaatttatctcaaggacacatgagaggaaaccgttggtatgtggggggtggctggagaggaatgatgatagaggaggaaagtacttgtagtgtgactttcctcagagtcaagagaaggaagtgcttgcagcaataaaagtatttaaatataaactgaagaacacctctggttcttgtttttggtagatggagaaacccagagcagagctgaagaggtgtcatctgctctccagatggagtcagctgacaactcagaagcagaaaccaggtcttctgactctgggcaaatgttagatgctccctttagtagcaggaagacctgggtggaaatcctgatttggagtgtggttgttggactta

SEQ ID NO: 155574 - DNA, 670 bp, Homo Sapiens
aggtgactctaaggatcccggagtagtccaattagtcccaatttgccacttggtattgagtacactggaccctgaccactggctcttgggcaacgtccttcctcacggggcgcctccgccaagccggcccagctgcacccctcccttcctggagggatggccaggaaaggagaaaacagagaactgacacctttgaaaccacagaatgtgttacatgcagactcgctcaagggcataagttattgtgaacgtttttgccaatcactgctcaacagccctgctagattttgtatgatgctgaattattatgcagactaattccacccagttgagacacaccatgcttgttcacttgtatttattgaaactgtggattcttgcccgtgctgtcccttgtatttactttaagcactgatcacttatcattcattcggtatggttttccctgtcccttgtacacattctggtatgaatttgtaaaaataacctgctacaaattggttgaatgtttctgtctgtggtgcgaaccagcattaacggatggggcacgtgcccaactgaggaacaggagaagaaatcaccaatttgggctctcagagctaagacacacttattgattctgttgcacattttgcactggtttatggcgattgtttctggacttactccg

SEQ ID NO: 155575 - DNA, 320 bp, Homo Sapiens
ttttgtgagtatgtccaaaaaagaaccataaaaattaaactaagaaaatggataggaggcaggaaaatgaaggtagagagcttataaggagcttgttctaatactgtaggggaaagatgatgaccttgagactaagaaggtcacagtggagaaggggaagaggggtgtggggttcagaggtgtttaggaggtagaatccgcctcaggcaaacttgactccgttcctaatgataggaataacaaagtgttcattattatatattattgtactaggtttggagctagcattcattagttgcttcagtggctagggagaatgc

SEQ ID NO: 155576 - DNA, 464 bp, Homo Sapiens
tctttggttctgtgatacatagagcctcctgatttggtttgtgtataaggcatgcgtctatattctatgaaggggttctgtgtcatggtgaagctaatgattatggatggggcatgtttttcttggggtaatttctgtttgcattaaacaaatatttttcctaaaatattgactgtgcctgccctatttatcattctttttaatgtacccatttatgtggatacattctcacagcctgatcctgattgccatttgtactttttgctataagtcttcgtgtgacatatcccctttgttatctgatatcccatagataatctgttatcccacagttggataacaatactgcctaattctactgagatttttatcctgaaatttttatattttggtgtctgatggtaagcttgtaaagtccttcaaaattgacttactcccggaggatcctctagatcacctcaccc

SEQ ID NO: 155577 - DNA, 390 bp, Homo Sapiens
aaaaacaacaacaaacatatctgtttagagagtcttgacttggcatttagaaacttagttgtatttccaggtttgttccttattttggtcttgtccacatcagggcacacgtgtgtgaggcaaataaacaagatcggcttgtctattctaagctttttgtccatttttacatggtggcagccaagcctattgatacagtgatacctaaggccaactgggaacaccagcattttgctcaagttttggcagtatgaagataaacacacactcttctaaatgcattccttgacacaaatagaatcctgggctaggtggatcatggggctgcctcacagtgtaattcttaagattttttcccttcatccactgttcatttctccttgacgtact

SEQ ID NO: 155578 - DNA, 395 bp, Homo Sapiens
gttgaggtgacctagaggatcccgggagtagtcaactttgctcctgggttgtttaacggacgtagtcccatgtaccacaaggttggcaggctataggagcagaaaatcagcgtcttgtgcttgcaggtgatcacaacgatgagtgctaggggtaacttgtgtcacttagagggccgaggcataaaataattgtgtgaaaaggctatctgtcattgatcttttacatttcccacaaggtattacagaggcaagcatacaaggcaatggtctgaggtgactcagaacttatgttacattaactaaccaacggagctagtaacagaactaaggaaaggaaaagaagcaatatacgaaggtataatgaaacttcagctttctttaacttcaacttagca

SEQ ID NO: 155579 - DNA, 281 bp, Homo Sapiens
ctggccttcgcatgtacaagagtggttcattgaagagagtaatttttcccttcatatagccttcacatttttatgccacttgcagattttcttggactgtatttgttcttctgcctcttggtcaggaagtttgagtttatgatttggtttccctttagctaggtgctagacatgagccctgaactggagtcagagataaagggtttgttatttacttatgttcgtagggtaaggtgtgtggagtattagagcattcagctctgtttgactactccttaggt

SEQ ID NO: 155580 - DNA, 297 bp, Homo Sapiens
gcgaggtgactctacaggatcttagagtagtccaaaaagcagatggtcagtatatgcttattgaatatatagatcgtaattagtggtgtactttcccctattgtccttcagttagtgagctttgttaataggataagttcagcagatcttgccccctttaccagctttcaaatgaacacctgacatgtagactgaaccttaaaaaaccttgtcttttttaacaaagccgcaagcagagtttccagtcaagatgacattgtaagtgtacactttgagaccttcctcagcaccaagcaa

SEQ ID NO: 155581 - DNA, 287 bp, Homo Sapiens
tgtactctgcactctgtaagccactcaccctcctccatgtgttggggcttcacttcctttcaagattttgacaaacattttgtctgcataagccttgtagtttagaatcctgatatcctgggtgccaaacagtgttgtggttaattcatacccatctctagattatcgtgggtgaggtttctgcaacagactaatagataatgaggtctcactaatagagaccatgaggtgtgcaaggcgggttgactcattgcaaaactgacatttggactactcccgtaatcctc

SEQ ID NO: 155582 - DNA, 414 bp, Homo Sapiens
atttcatggtaaatataattcccatctgtcatcagtttctgatggctgacatattctgacgtttgtatctgcaagcccagacttcggcttcctactccatattctttggtcctagcctactatgcatctccatttggaagcctaacaggcgctcagacttaacaagttcagtttccaacatttgcttcatttcattaaacctgctctttctgcactctttcatttttattagttgtagttatattcttgtaggttttcttgatgaaaggcttagagtcattcctaatttctatctttccctcacattttaattcttatgcatgagaaagtacagtgcagatcgtgagtgctaacatttttcatgacaaccattgcccggccactattggactactcctaagatcggtaggtcac

SEQ ID NO: 155583 - DNA, 411 bp, Homo Sapiens
  misc_feature (230)..(230): n is a, c, g, or t
atggaagcctggctggcccttgaagactccgccaaccctgctggtctcttctcagagtatccacccagcaacctggcctgtccattcttgacttcttctggtccagctgcctttctgtacctcattttagtgaccctttttagatctcgtccagggttagcctctagaaccctgatctcaggcacccacaactctgcgatcttcacgttcccagcacttcctcacttganattcgtcattggaaatcccagggctttgccaattctgtggacccaccaccttttcaccccctttccggtgccactcaggggactttgctgtagcctgaacctcatggtcccttcctgtaaacagccaaactgcttgtactcctgagaacccccgccccggtgactactcccaagatcctgc

SEQ ID NO: 155584 - DNA, 173 bp, Homo Sapiens
atcacaaatgagaatcagcctatagaatctcatgaaggctgatagttgagctgagcctgaagatagtgtgcagggagggagaagtgaattatgttccaagttgcaggaataccagaacactgaggtgagaatgagttcggtatgttttagaaacagtgaattgattgactact

SEQ ID NO: 155585 - DNA, 521 bp, Homo Sapiens
gcatccaccctatgatcttctttgctattaaaagccccaattgcttgctaccacgggggatacagtggacattccctgctgcaaagagaaagtgtatagatgggccatatatggccctgctacttaaattcagtgaagaaggttaggaagggagataggaaaaatactcagggctctaggtcagaaagcagtatctggagaaacattagcttccaccatcttcacagctttaaagctgaccacctggctctaatttggaaaagaagacagcacaattacacgaaaagatcagattcctaggtctaaaagcatggggagatattctgcctgaaaaaggacagaagcagaggccatatgggatagaacacaactcaagaagactggtcccagttctggctctactactacccacaatggcagtaaaccctgtcatattctcacttgtaagatgccaatccatttgccccgtttccaggaaccaattggggaaagaaagaaattttgactactcccgagtcctt

SEQ ID NO: 155586 - DNA, 353 bp, Homo Sapiens
cggatcctggggagtagtcaactactgcttttcttttctgcagagacagggtcccactgcagaagaggacactcgttcatgacccactaagatccattccccacttcctctttcctaagaaaaccctagttttattttagggaatttttatttcatctcctatataaaataatgtgaacagtacaaccaacctaatgccatttatacacgtcagcaatgaatttgcttataagcagacaggtgttattccctcataaatgtgtagctctactccattcaatgttaatgttctaatatataagttctttcctcgaattatttagggcgcctaatattcatacacaatatttaaa

SEQ ID NO: 155587 - DNA, 294 bp, Homo Sapiens
  misc_feature (132)..(132): n is a, c, g, or t
  misc_feature (156)..(157): n is a, c, g, or t
  misc_feature (188)..(188): n is a, c, g, or t
  misc_feature (224)..(224): n is a, c, g, or t
agtagtcaagaacaccacagcgacaattagcaaagctgggattccaacccaggtctatctaagagccacagcattgtattttcttttctttctttctgtgactgcacctttcaccgtagaatggcatccaanggactcagagcaatcagcaatgtnnagccactgtttttaattatttccttacatgnggaatcacataaagaaagtaaagagtatccaatttngtgactcaaccattcatactgttgtggacactaggtatgaatatattacacttctgggtctcagttacgc

SEQ ID NO: 155588 - DNA, 508 bp, Homo Sapiens
tgagatacagggacagcttgcacttccaccttcatattgggtacatgcacctcatccccatactggtcttttgtttgaacagttatggtggtaggccaaccacaacgaatatcatccttattcaggatcaaagatgttttctgaggatccgcatatgaatctggctgaagccaccttgcaagccttccaccacttgatcctgggacacaggcaataaaatcatccagaaaagactgttcattgctttggatttggagtggtaaatttccctcaagtgcttctaatataggttggtgaatgagaaagaggctagaccctttccaagaattccagaatgggttttgcacacctgcatatgcagcctcactcaagaatttcaaggtcttcttctaattcatgtacctagtaggaagtgctaggtccttcttcatcagagctgctgcacagaaccccacacaagattggctaattctttttccagttgacatactcccgggatcctgtgggc

SEQ ID NO: 155589 - DNA, 316 bp, Homo Sapiens
tcagatggacagaaatagtttctttaggattgatctcttaaatttgactttgggaagatactggcagtccaggttttgtgacagagatccatcctggagatctttgtaaatggaaaagcctgaatgcagcgtttcttattgctaggagagttgatggattacaggaaaatgggatatagtagatgtgcaatgaatttgttgacttggaaacaaatttgacacttatccctgaaaacttcaggccattttttcctaaactctaattgagtccctgtgattggagtactagccccacagtccttatcaaacttcgcca

SEQ ID NO: 155590 - DNA, 418 bp, Homo Sapiens
aggatacccatgccccctagcgggggggagatttccctccaccccaagcaaaattgtctccttacttctgtagctctttgttactctgctttcttattgaaaaagtgttagtccaaaatagagtcattctcattcccattttgtagctgcagaagcattctcagtgaccatggatttttccaacctcccaggcagtggataacagtgatttttgcacccaggtctgtctggctgtgaagcctgtgatcctatgaaggcggatggggaagggacgttacctcggagctgggtcttcagactttagaactggctttttcaggtggtgtgtgacattgagcaactccctgggatttcagaacactcagctgtagaatgatagtgtggcctttgcccgctagggggcatggggtcctcaaga

SEQ ID NO: 155591 - DNA, 558 bp, Homo Sapiens
aagttatttccattagtgtgtagcagattttaaactgtcatggtaaacctgactctatgatttcgcacaggatattcaaatgacttaactccaggagccaaaaatagtattatattaaaagatacggagtttctattcttgccaatacaagaaatattatttgtaatttctaaagcaccacatattggcaagcatgtatacaaattttccaacatttttcattttacttgtgctgaaagcaattaaacatgtgtggtcttagcaaacagtgcctccttcataaatccagaggtgcttcaaggaagctttcagatatgggcctatagttttttggctatacatttggtgaaggatactcacttccaatagaactttctacttcctgaaggatggagctggatcccctgccagagtcatatgcaaggacagaaaatattcctacctgctatatcatgtccaaaaatggcttttgcaaagcgtagacttccaaaagtatacattgctgctctttgccttaactaatgtgccttcagggtaacagccggtaacctctaggtc

SEQ ID NO: 155592 - DNA, 539 bp, Homo Sapiens
ttggtactgtggtagtatggtttcttggtatgatagtttcttgaatggcttattttgctaaaaaatgtttatgtttttgcccttatttatccatattaatggagaagagctatggaatagttaatgccaatttatgaataatcccaaatcatttatgttggacttgattaaattatttataatgccaagcacagccagctgtcatggcccatatgtttgatcacatttttctcttattgtttctttctgtttgtctctggaaatctgctgttatgtgataatgtatgtttcttcttatgcttaaaatttgttagcagattactgtcatcatgagctgtttactatcttagtctgaacatatcagatcagcatttaatatcatactgaagatgaaatttagaaagttaatatccagcgataattatatgcatcatcattactgtgttgcatgttaattaggtatatgtagttagtatatcatataaatgactgcgttacccttatggtaacagaccctcggagatcctgctagagtcgcc

SEQ ID NO: 155593 - DNA, 330 bp, Homo Sapiens
ccgacggtctttacccagctaagggaagaatgtgacaatagttcggtgatacttggctctatatacacttaggtaggaatttttaatagagctattttgttaatttcacgagtagctatgcataggattgaagaatattatccggatcaagaattattgtctctatgtatgttttcatgtgtccagttccttcagcagtacttactgtcctatttactgtccttgtcaggaattatatgctagaagttgaggctaaatatccatgaaggtacagcctcagccctcagtttgtatcattggttggcaagacgagacaggtaacagaccgct

SEQ ID NO: 155594 - DNA, 450 bp, Homo Sapiens
gcggacttcgagggcttacctctacatagtctctggctcagttagttgcaaatcttttcatagtttccacttgaacatactagtgctgaacatactttctataagctacagtacttgtggaataatgttaatgaagctctactctaaagcagctatttgaaactactcactggccagttacttctagagagaaaatgtggaccacgtatcttttaaaacaaatgtctatattactatcacgttgctagcttcattgactgaacaccctgactttgctaaccacatactggctaagtgaattcatggctgatagtgatctctacctctcatacatttttcttttctcagtcttcattgatccttctgataccttctctcaacatgagaggtatagctctgctattacagtgttgaataaaatgaaatcgattctattcaaagtgctaccag

SEQ ID NO: 155595 - DNA, 302 bp, Homo Sapiens
gtacggtctgttaccttaaagaccaacaatcgtctacaactcactgtgggtgacaaaagattagaacatacttcattgctaagcaattgaggctttttggtatggtttcttctggcagcataatctaacctatacttactgatacacttagtcaaattcaccctttatgtatgtagtctgtctctaagcttcattcatttaatcaatatttatggagtatctattacgagcaatcccctcttctaggtatctaggatacatgagggaaccaaatacacaaagatctctggtaaagaccgtcg

SEQ ID NO: 155596 - DNA, 456 bp, Homo Sapiens
tgaggatgatgttagtttccaattctgtttagcagtcagaataaaataaggttgagttatcagccttcctttctccctaactatggtgactccaatctttgcatttcattctctgggaaaggcattcagttgaataatccagtaatacaaagaaaactggccttactcaccatgacataaaataaagagattttcagagtggcacaagcatacccttcagccttgaaggccttcacggatccagggccacagcaagcagaagtatcttggatacatcacctaagcgcctaaggtcccaaaggagttaaaatagctgaatccttctatgatactaatctaactcgaagacaacactatgccacttatctctactatattgggagtgaggcggcccccagctacaagatgaaggaggagctagcatagcaagcccatcttgcatgtggttatagtacc

SEQ ID NO: 155597 - DNA, 396 bp, Homo Sapiens
caggattggggaggatgccaagaatttaggacagaagggtacttatatcacatatgggccaagaattgatatatctggggctagaaaccaaaactcattccggggcagaggtttaagaaaaagtccacctacagaatgtaacagaggatttctaattatatttgtctttctagagtatgtagacatcttgatccagagtcattggagcaagtaatgtaatcttaattattttctcagttgtgaaatagaattaattgctaatactcacttttcttgtggaaaccttgaggtttatatataacacacatatttatatttatgtaaatgtatacctggttcttttttaaaaaaacgatgtttacgtatcatatatggtaagaccctcggggatcctct

SEQ ID NO: 155598 - DNA, 556 bp, Homo Sapiens
agctcccattctgtcaagtaagatttatcgaccaatgttcggaaaaaggtgagcctcaggcatagttgtcaatggctgagctaatcacaaaggtgcctgggcaggaatactggcaccagccaaatttgcattacttgttctgagcaattgagctttgtttgaagaatgggaggggataaagaagataactgatcattttctcaggtgactgacctggtgattaggagcagccttcttggatgcagttaggcaaagtctgaatgtcttcccttctccccccaccgctctctcctgccaccccaggagcaacatataaaaatgtgtagctccaggcatgaaagtagcttctgtctacacaatgcaggtcaaagagaaggaactgaccaggtgtccaggcaccaaaataccaggctggtctagccccaactctccttctcacatgcccacgttcacgcaactaactcacagggttttggggaagactaagacggagtgaatgtaaaacccactcccttctgcccacgttcacatggtccatgctgagaaattcaggaaa

SEQ ID NO: 155599 - DNA, 546 bp, Homo Sapiens
caggatccgacggctgtaccttttagtgattattccctactgtcctgtgtaaccagttgatgaagttgcctgaaatggtttcagatcaggagaaaggcaagtatggcagatgggttgagaacacatgctttgcaaactgcagcagtatagtgctaacccatccagaaataacccattccttccagaacagcgtgctaataatttcatgtatatagtgcttaactctaacacggtaaatttccctttttttagtatcattgcacattcaaaaaactcttcgttagatggcaggttacaaggtagaacaatgatactacagggccacttgcttactgaggaatttccccatgaagagccctccccctgtgaaatgtggccttgctggcatttgagaactgacaaagggtggagtgaatcagttggtggtatagggggcactaattgtgggaatactgtgatagaatcacatgattggatctttgtggtttcagagacttggccctctcagatggtaaccggaccggggtaccggagctccaattcgga

SEQ ID NO: 155600 - DNA, 528 bp, Homo Sapiens
ggagactgagaccttactgttgaaagaagagagaacatttagaatacagatgaagagaccaccagtgaataatagttgcctgttgactaaaacgaattcaacagccagtagcagggaaatatggtctttcaaggcatcaggaactcatttaccaaaattatagagctgccaggaaaaaggctgcaccaccaaagtagttgagtaaactagaaacatacactgggaagagagtatgggggcaagttgttagctggatagataggactgtgctttgacacctctgtggtctatgatctctgaacctggaatagggttcattttaatagcgataaagtcattatcccagtgcatccaaattgattagttcatgctttattaggaaacagaagttacccaaaacttagcaaacctaagtaccaagtatcccaaacattcttttcctacacaatgtttggggtattgtcaaagttggattgattcaccagccagtcttaattggctgctacgtaacagaccctacaagatcct

SEQ ID NO: 155601 - DNA, 489 bp, Homo Sapiens
  misc_feature (389)..(389): n is a, c, g, or t
ccggtctgttaccaattttaggatgagttcagaaaagaatacctgggactcccaccatccttaggcatgaacatatggaaattataaaagtggctctaagggacaaaggggtgccaggtggcagcacaaccaaagcacacacagcccgatgtggtattttctagggatcgcccccttctctgagtgtgcttgcgtgcgcgtgcatgcattgcttctggttcataaatctgagccaagtcttacaatgcagtacagaccctgtgcaattagaattcacagggtcactgggctagttcaaatatctaggttctgatcttaagtcggggctgggacgaagagacagacctgaactggaaggaaacctttggcctggagtgctctggtcaaangtctccgagtcctcctcttacttcccaaaccgagctttgaaccggaaccaacagcagcggaaaagtaaagttagcagctcttcccaagggtaaagaccgt

SEQ ID NO: 155602 - DNA, 483 bp, Homo Sapiens
ttgggaggctgaggcaagaggatcacttgagcccaggagttcaatgctgcagtaagctgtgatcgcacccctgcactctagctcaggtgacagagtgagaccctgtctcaaaaaaaagaaagaatgaaatacttagtaataaatttaaccaaggaggtgaaggatctgtatgctgaaaactataaaacattgctaaaagaaactgaagacataaataaatggaaagatatcctgtattcatgggttggaagaattaacactgttaaaactgttcatactccccgaagtgacctacagatttaatactattcctattaaaattcccatgtaattttttacagcggaaaaaaatattgtatggaactaccaaatgcccccaacagcccaagcgttcttgagccaaaacatgcatgacatttaaaaactggaaagttttcagccagcatgatggcggtaacagaccctctaagatcctgctagagt

SEQ ID NO: 155603 - DNA, 545 bp, Homo Sapiens
ggtgatctacaggatcttatctcgaacgtcaggagggcagcagtttattaccgcttctgctctgtgtactccatgggacgtccatgatggccgtgcctctcccggttcataatgcaaagagaaagtgcccggagctggaagaccacgtctaagtttttgttttgtgcttagtacttgatttctgtggatttgtttaattttctactctgtttactatttaaagcattttaacagcatgagtgaactttcagtggaagcctgttctatatactttggcacagactgtgatgccaaaggcattatttttcttgtaaatttaggaaattataatgtgggatcgtgtcttcattgttaatgaatggcagggttggcaaactgtggtacaggctgttgctcttgtgtaaaagtttgacacagatgtccaactgattttggccaaatacatttatattttctctcattctttccttttctttcattcacttcattgatttgctactgacgtgtcgaaatgggatcgtctagagtcacccagcacaggtcgt

SEQ ID NO: 155604 - DNA, 230 bp, Homo Sapiens
agaagctccagagataatatgaatcctagggtaatgttatgttcctcaagatctgatttctatttacttttggtagttccaggtcattttcattagatcagggtattgagatgattcaaagctgggcttcagcctttgatattagtttagtttctactttagttgtattacttacaaagcttgtgacgggtgtttccaggaccccttttctacgtcctgcgaatgctggg

SEQ ID NO: 155605 - DNA, 358 bp, Homo Sapiens
tgcatccttcttcctgttgtcttgatttctttgtctcttctccttaaactcagaaattgttggtgctttcagtatcttggcgaattgtgattttgttgatacagatgtgtaaggacccacatgggaaatttagatttttaggtaaagaacaagcaggaatatgagaccttgtcgtaaacgaacttctcgttttcggcggtgatgtcagtgctgaagatttgggtgggtcaggtttggtgacctgtgtcccaccaaaggcagctcctgctcctgacacgagcccggagcccatttgaaatcgctcccggctctttcaaggcctgggcaacgccatcagggaaacatcctgcgatgttgg

SEQ ID NO: 155606 - DNA, 311 bp, Homo Sapiens
acattgcaggatgcataacaagggctttcaagtccgacaagatcaggggatgatgatttatagtagaagtcagcgaacttatagcctgcttagcgttttagtaaacaaagtttcactggaaaaggaccatgcccattcctttacatattgtctatctatggctgctttcctgccgctattagccagggttgggacagagcatccgtgtggcccacaaagccaaaaacggtcactatatgaccctttaccaaaaactaaactctggctgggcatggtgtctcacgcctcctgcaaatgtagggtagcgagcc

SEQ ID NO: 155607 - DNA, 268 bp, Homo Sapiens
tccattttgttaagtcatttatttcttctgggacttgcctagtcttatctgtccattttccttttagttttttaaaatttttcttagtaattggagtagctctatgtgtttcaagtatatttaacttttgttgtttactaatgtagcacttaattttatgttgtctttaccccattgagaacattctgtgaagtaaaatttgttggcttttgatttcatatcatgctttggagactctcctgtcccacgatcctgcaatgattgggac

SEQ ID NO: 155608 - DNA, 339 bp, Homo Sapiens
gagaagctcccctgagccttgatgtccaaggtttttattgggggtcagtcatgtaggcatgcagcacccccaggactgactcagctattcaggctccaggctgcatcagagtaaaaacaggcatccccgctaggctgtcccttgttgggattaatgtatctggtcaaatgggtatagcatggcccaaggtctcagacttacagaaacaggcagaatattccgaaggccccagaaatcaatcccagaagccagccataggcctatcctaataataggaatggagaatgtgcagggtttgataccaactgtgcctgctaagtaaccccttccgcaatagtg

SEQ ID NO: 155609 - DNA, 436 bp, Homo Sapiens
aaaagttttggaaaggacgtctgggaatgagtttgttgtactagtatgtacttgtttcagtagtactccttcctctgatcccagcttattctgcctgcatgtgagtgtgttgctgtgccgactgtcatctccctcaataagctatgaggagttggttttaataagaatgcctgagtttgttgtactaacaggaattctcatccaaactcctactcaggttcattctgattcctctcatcttttagtaagaatatgcctttgaggttaatgtgtattgcattgcttacattgatatcagttaacactgacctgcaataagatttcaccttaagataaatgtctgagactaagcttttttgcactgaagatgatgccttccaatagcatgaagtaggtgcatcttggttcactctaccttgcagtaagcatgagggct

SEQ ID NO: 155610 - DNA, 406 bp, Homo Sapiens
ccaacattgcaggaatgtcaataggtattgttgctcatttctataaagtttcagaggtaagctaggctcaggcatggctgagttccagaacttcaactactagttttccatattctagttgtccacccattcctcttttcagcttgacatcattctctccccttgacaggttttctccacgtggagataacgtaacatctggcagctccagaactgcgtaccagtcacatttttatgatctttagataaaaggttatgcttcctccagccccaagcactctgattatcccttcataactacacctgataaaaaatcatgtggcaaatatatagagtctgtgactgactagccccgagttacatgcccacctctgcagtcagtaagaagcatcctgcaaatgctggg

SEQ ID NO: 155611 - DNA, 500 bp, Homo Sapiens
atgcattgcaggaacatataactgtcgaccgacacttctctccgtgagctcaggccttatctctgataagcttctggacatcgcacaagcaccccttgctcaacataccccagccagagttctcttgctctccataaaaagcaatctgaaatgttcgaattaaattgaagagaaagaataaaaagtcctgatgagtggaaccatgaaatgtttcatcttttttccctaagtttaaaaagatcatgaaagtaatacatgtttaatgttaaactatttaaataatataaaaataaaatctaagaagtgaaaattccttcttatcttcccaaatctcattctccagaggtaacactgtttgagcaactttggtaagttatctttccaaacttcttcgagtatataagcaaatatacagacacatatatactttttgtcctctcggaaagaggatcatgttacaatcatcctgcgatgcttggggggatactctagagcgacta

SEQ ID NO: 155612 - DNA, 249 bp, Homo Sapiens
  misc_feature (97)..(110): n is a, c, g, or t
cttttgattataggatacaataacttctaggatttgtctgaaaatgtgtagggtaagcactactttatagagactattttccttttaggattttatnnnnnnnnnnnnnngaggatgggaatggtggtggtggtgtgtcagtttgaggttaagttttaatcaagaagctaaaaggtcaaggataaaattcagtttttacaaaatagggctatttaatatgtttttcctgcaatgatgggtaccggctca

SEQ ID NO: 155613 - DNA, 366 bp, Homo Sapiens
cttacctttgttctacagaggaagaaactgagtcccaggcatatgaacatgtgatttgccagagtgataggacgaagttgagggggcagaaccgaggctgggcgtcctttctccaaactcttgaaactgtgctcctggccggcacccagggcctctcggcttccagcaggtggcagttcgtggtgctggtttcctgccatagcctctttctggcattcctttcctacctcctcctgttcgtctctcctcctttgcttttgcttgagctttctctcaataggtaattcctcaatctctcgtcctgtcttttattcttccctctccgccttgctgtattctcagatatcctgcaaagctggggggata

SEQ ID NO: 155614 - DNA, 478 bp, Homo Sapiens
atatttatagactccttaaagatagtcatatgcctaaagcctgaataatccagtactaatctattataatatactccacttataagtgctcatctctcttacaatgttgtcttgtaaatgatgcaatgagttgaaagactggttctggttcaagaggaaatcctgataaaaatggatataaaaccccactaagatacacaagcatgtttcaaagagaaatctgaatccccaaatcattattcaccatctattattaattaccatttgagatatatcccccgttaacttctaggttgtccatatgtctcactaatgacaatcttgtacaacatatcagaaaaacaatgggcaattcctgaaagtcactggacgataaaacatagttacatttggtttcagaagattcagaaaagattaggggaaattttattattttataaaaccacttacaagatattccgtcctgcaaatgtgggta

SEQ ID NO: 155615 - DNA, 210 bp, Homo Sapiens
tgagccggctcccccgtttttggaacttttcacacatgcttctagacgatgtgtctaatacttcctgctgggcaaaatatccacaaagtacagaccactgataactccacccatgaagctcaccaaaaaggaaagaagagcagaatacaacagctgtggctagggtacgcctctctgatttcacttttcctcctgcaaatattgggagcc

SEQ ID NO: 155616 - DNA, 378 bp, Homo Sapiens
gcactgctgcactctgggccctgaggggtccttcccaggctatagcctttactgttaggctgctccatgctgcttctcagggagatgccccagccgaagctccctggctctcagggtcagatcagctcaggaaacgtataccctcccgtcttatgcaaagggagcagcagatgccgccagggtgcatgcacatccaccacctggaggacaagggtttatagagtttttattgtgggaggagcaagcccttgcaaagccactgttgcttttggctacctcaaaattcatcaccacggagaatccttgggcaggagaacatgacaagaaattggacagggtatgtgaagaagaggtttgtacataatgggtaccgagccc

SEQ ID NO: 155617 - DNA, 167 bp, Homo Sapiens
aaagccagatcctgcatttcaggaagaactggtctctgggagaatctggtggctaggaggggaagcttgctagagcagtgactctcgactctgtcacaccaaatgcccccttttgctaacaaatatttgtattccccttttatgatcctgcaaatgatggggtagcc

SEQ ID NO: 155618 - DNA, 299 bp, Homo Sapiens
  misc_feature (285)..(285): n is a, c, g, or t
caaactgggcagaagaaagaacgaggaaagttcaacgtgcagtgatccctactgtctagattggacacggaaagaaagctcagaactctagtggaggaggatgatttcagaagggcttgttcatggtccagatctattcttagctaaaggataagatgaatacctaaaaggttataatgcaatccaaaaatccttctagatttagccaactctcagtctgaatcactccctgagtcagggtaggacatggcaccagctcccgtccttgaacatcctgcaatgatngggagccggctcag

SEQ ID NO: 155619 - DNA, 369 bp, Homo Sapiens
cgagctcggtacacccaaaatttgcaggaggatagtttgatttttcagtaggaggagttgctggggtctttgaaaaggacagagttcttatggcgcccagtttcaagtgactgtaccagttaacaatagacagggtgtgatcatagaacttaatgttccccttaatgtcacctgtgacaatgtagctatcaattgtggtaagtaccgtgataccctctttctgcaaatgaaccaatttacaaggcttgatatagggaaagcccaaaaaggtggaggcagatgagggtgggcggtgtatgtcccagacaaccagcttcccttccattgtggctgagagtatttgtgttaaattcaagtcctgcaaatgtt

SEQ ID NO: 155620 - DNA, 180 bp, Homo Sapiens
ttgtgtcccaggaacacgtactctctcccttgcctcatgttaaaaggccacagagctgttcaatcccaggagatccacttagaaaagccttagaactaatcctatgtctcgcctataaccaaattcatatttgtaacccaggcccagcccaccaccagttgcattgatcctgcaaatgtt

SEQ ID NO: 155621 - DNA, 167 bp, Homo Sapiens
tgtatagtgtgaaagaagatctagttgaagactagcatattttagcataagaaaatatgtccaatggttatgatgttcttatgcatctggtatatttttcagggtatacatagatcagccattataagtttgaactctgtataagtacatacagtagttatcattct

SEQ ID NO: 155622 - DNA, 379 bp, Homo Sapiens
gaatcgagctcggcacccggagacacttacgcggtcattatcagtacctttattctgcaaaaaaatgtgactggtattatcttctacttggttgtgacggtttacgttctcctccagttctgttgttctccgtgaggaatgtagttttttacatgccttttccattggagacgttacaacaaaaaagcaaaataaatctatcttttctctgatatggcctccttatttgttttaaaagcatttttatgtttatttggataatatttagaaaatataatagatttaaacataattttaaaagcatcgaaatgcttacgtttctctaattgtgcaagaatctttatatacatagtttttttgtttaacgtaagttgtctcc

SEQ ID NO: 155623 - DNA, 455 bp, Homo Sapiens
catgaaacccaaaaccacttgtaccccaaaagctattgaaattcaaaacttaaataaatgatgccacatcgttagccacgggagcttatttctcaactacagtgaaatgccacaagcctccccttctcccgagtctcccttctgtgatgtggcatttgagacagcatcccagggcagtggtggtgcccaacttattactaagctgcattatttggtaagtcagagatggatcgcttctaaacaagcttacccttttccataaagattaaaacaccaccaccaaaaaagaacgagatttttttgaagaaacaaacccaggctgcaggccgagggagctgtcagcatcgttcatcctcatgttcgctgggctggggggaggaactggcagctgttcgccagtgattcagttttcttcgttgtgtgtttcgtaagtgtctccggtaccgagctcgatt

SEQ ID NO: 155624 - DNA, 110 bp, Homo Sapiens
gtgtttgtgtttgtttttgtttttgcagagttggattacagaaactcctatgaaattgaatatatggagaaaattggctcctccttacccgtaagtgtctccggtaccga

SEQ ID NO: 155625 - DNA, 586 bp, Homo Sapiens
  misc_feature (68)..(184): n is a, c, g, or t
ctcctggagacacttacggaaaaaaatgtggatcgaggaacagaaagaggaaaagaggaaggagtcannnnnnnnnnnnnnnnnnnnnnnnnnnnnnnnnnnnnnnnnnnnnnnnnnnnnnnnnnnnnnnnnnnnnnnnnnnnnnnnnnnnnnnnnnnnnnnnnnnnnnnnnnnnnnnnnnnnnaggctgggttttaagttgaaaactggaagctgtgtccagaccttgcctgaagctctgttgtctggcctacattgtatctttaaaatatcttgcatttgttccattaatttaataacagggaagtttgtataataattcagattttcagcatcttttgaaaaaaaattcaaagaatcagcaaattttagcaacaatcaacttaggctgagtggtgactgcttcctttcgatggcaacaggagctctcctgttcacctcattttcagcctttccactttgctcatgtatgttacctgctgagcctctctgggcacgtgagcctctagctcctgccaccaatgttcatcttgcatgaaaagactctatccacgtaagtgtctccggtaccgagctcgattctatt

SEQ ID NO: 155626 - DNA, 357 bp, Homo Sapiens
aggctcggaccggagacacttacggtggatcaaatgaatcagatgaagtatatcaccgaagaagtttgcttctttttgctttatttcccattacccccactgatcacattatttttctttaacaatcgttcaggtttagctcttcctcgccttgcccagaccactagcctagttctgaactctacgccatggacttcacacaaagcctcttggtcatttgtcctcttttctcacttccctttaccccctgagttcagccactcagttttcccaaattaccggctttgtcagggtgctcctgtgctaaagacagtacatcaagtggaaacttctgtcgtaagtgtctccggtccaggc

SEQ ID NO: 155627 - DNA, 328 bp, Homo Sapiens
cgatcgagccggtaccggagacacttacgcagcactgaataaaaaatagaatatttttctaatacttctacaaatataataaacacagtaacagtttttgctgcagcgattttctttacaaagaatatttgggcccagtgctacagaaaaacatgaactacatcttatcgtcacaaaatagccattataaaatgaattttgcagcctctgtttttttgaactttgaaataaaatgttcagacaaatattcaactttttaaaaacctccattcattgatagcctgagaaatgtacaatgaacatgtttaggcagactgctagtattttg

SEQ ID NO: 155628 - DNA, 353 bp, Homo Sapiens
ctagaggacttccatcccccttcgtgtgtcatcccccttcgtctcaaacaaacaaacaagaagcccagaataggtgcatgggcttaagatttcattactgtgccaaattacaaatctagttgaaaaattgagtctaataccagttactgcttactgttaagctgacaaatttagttacaaataagagacacttgttcagggaaggtagaaaactgatgaggttcttaaaagcttccttgactcccttactatgctgaggggattggccacccaaattctctaattagattcttgtgaaatacaagattgccaattgtcttatgtatagcttcacaacctcttcctcgtacgtc

SEQ ID NO: 155629 - DNA, 601 bp, Homo Sapiens
ggaagacctatattttctggaagacgtggagtttctggaagacatggcttgggtggaagacgtggattttctggaagacgtacctttgttggaagacatacctttcttggaagacgtaccttctgttggaagacgtacctttgttgtaagacaccagtagcctggaagaccttaatttgatggaagacatggctttgttggaagacctggatttgctggaagacacggatttcctggaagacctggatttttcggcagctatggatttgagggcagacaaggattttctggcagactaggtggaagacacagatttttcaggaaatccatgtcttccaataatttccaggtcttccatccaatacagatcttccagctaatccatgtcttccagaaaaatctgtgtcttccacccaatcccagtcttccagtatatctagttcttccagtaaaatctagatcttccagtccatcagtgtcttccagaaagaaatccaggtcttccagtcaatcagtgtcttccagaaagaaatccaggtcttccagtcagtcagtgtcttccagaaaaatctacgtcttccaccaaatccaggtcttccag

SEQ ID NO: 155630 - DNA, 220 bp, Homo Sapiens
gggtcttgtctgagagagagttctggggatggaattgtttcttggcaaatccagctatatagatctaactgctgtatgtataagacaccacctgtaggagcgggaaggtatcagtgcttctaatatagtaaagcattggcctaggaaggcaaacagttgcctttattgaaggatttttttctgctggtcctttgggtttgattgatattttacgctcccc

SEQ ID NO: 155631 - DNA, 232 bp, Homo Sapiens
gaagaaaaattaacggatatggtaataataatgggagtaatttttgacttaggcaattgttttctccatcttatactaaatatgacttaaaacatcttttgaaaccttttaattgaatttctaataagtaaggcttaaagtttttatagcagttttaggttcacagctataaattaaaacagacataagatactccccaatatactacgttgccccctctgttgggggtatc

SEQ ID NO: 155632 - DNA, 564 bp, Homo Sapiens
  misc_feature (382)..(433): n is a, c, g, or t
catcggcctctatttattgcctactagctctgtgaaaggcaagttacaaattttgcaaaaccacagttctcttagctgaaaatgggataaaaatgctacattataagattgttgtgagaagaatatgaaataatacattaaataaaatcagtacagtacttgccacagagaaaacatgtaaatattacctgaataaaagactgttcttattctttggtgtggccagagggagtgatgcaattatcagaaatccagcttaggaaaataatagtgattgcatgcagtgacttccttaagctaatatttattcaacttgtaggactgtgcttggagttttcatacccactaatctacattaagcttctcatacttcacataggannnnnnnnnnnnnnnnnnnnnnnnnnnnnnnnnnnnnnnnnnnnnnnnnnnntctatcacttaatcacttgggttgaataacaactaagtgtaaaacaggatttcgaagccaacatccgactgcatgaatccagaaggcatgtcattccttttccgggttatacgtccgcccatgaatacctt

SEQ ID NO: 155633 - DNA, 520 bp, Homo Sapiens
cgatgacagacacacgtgatcacagaacacgcattacactgtttctacactgttaattatctccttaggagatgctagatacagattctcagctcaggacacagtgacgtgaatcttgttgttcacggatattgccagccgtcggccacacaggaagggtctggcctcacccacacttgccagcgctgacctcaaaaagctcatacttcacctgtggccggcacacaggtgcatcagcatatggggaaactgaggcccacagcagtgctaggacctgccctaaactcacagttaatgagtgatagagctggggctagagcctggaagaattaagagtgaagttcaactctgatcctctttagtctgtattcagagcctgagaaactgagaggcgtctgtggctgggggaaaacaagacaaaacaagacaaatgccagcaaggccacggggcagcaggggctgccaggcaagctgggcagggcccgagagtacagggcccgagagtacagggccagagagt

SEQ ID NO: 155634 - DNA, 662 bp, Homo Sapiens
  misc_feature (194)..(204): n is a, c, g, or t
tgggtgggtgatcgaaggatgtggggctcactgagagcttatcacgggtccttccttttcacggtatcaatcttcttctctgatcctctgcagtgaaagtggggaatgcagtaaaattatgaactattttgcaaccagtgtgaaatcccatgtaaaggtttttaggtggtctgctgtcctgggggacctcccannnnnnnnnnncccccactaggatgcaaaactgcttacaggctacctgatcctctattgtccacagttggaaagtagggacattaacagccacaacagtagccaccttaccagcttgccatgaggacagagttaaagaacatgcacactttgcttggcacctaagaggcattcgataaatggtagtggttgttatcagtatgttctagttcccttccctctcctctagattcactaatgtgatgctaagaaaagcaagcagtttgtacttcttgaatgggtgagcagctggaagagtgagagagcctggctctgccctccttgggcaggctactttgtcgagtgtccacggtgggcaggaaaaaggcttgcttggcgggctccaggccgacctccctgtgggtccctgacctatagcctttgccatgagccctccgggctcagcaaggccgctccctttgtctcctgtg

SEQ ID NO: 155635 - DNA, 219 bp, Homo Sapiens
ggtccacttgatgtgggagtggtgtggtaggctaaccacttgactttgaggaaagggagatatcttcctgtcccttataggggagtgatacagtgataggcccaccaggagggagtgctattgtgggatttctgctgcacatgcatgttcttacgcgccgacatatttgcttatgaaccattaatactgtatcactatcacattttcctgtctccctct

SEQ ID NO: 155636 - DNA, 352 bp, Homo Sapiens
ataagcatgataacaaagtcaatattaatctgaaaacttaaaataattctgtaaacagtgcctattttgcagtaatcatgaggtataagattgagtcaacacccctgaaagtacaccttctgtagtgaaaataccagctgagaaactcactgtgccattttatcattggaaaaaataatacaatgctgttccctgataaaagctcagaagaattttttaaaataatttttatttttaaaagttaaggtgggttttggttttgaggaagagtatttgacagttaattgtaggaattgagatactgccttttaaaccatcttatagtcatgtatgtcattaaatgcgtgattag

SEQ ID NO: 155637 - DNA, 596 bp, Homo Sapiens
tctctgcaccacattcatgatggatctgtaggcgcccacatattcccgtcctgaagattcacgatatgacagatcatgctataggagtctccaatgatgtgcccagattgccttggaaggtgttctataggactggaatggcgttgacgtctatgattatgtatggcgtcgtacgagatactatgggaccctcttattgcctgtattagaataggccatcttttgccagaagagcaagtatacctcaatcagcaaagtggcacaattcggctggactgtttcactcattgccttatagttaagtgtacagcagatattttgcttttagatactctactaggtacactagtgaaagaactccaaaacaaatatacacctggacgtagagaagaagctattgctgtgacaatgaggtttctacgttcagtggcaagagtttttgttattctgagtgtggaaatggcttcatccagaaaagaataacaactttattccacagccaattggaaaatgcaagcgtgtattccaagcattgctaccttactctgtggatagaattgtgcgacgtagcagagtcactgattgttcctgtcaga

SEQ ID NO: 155638 - DNA, 444 bp, Homo Sapiens
cccataagaatgtacagtctagtgaggcagatgtatatgaaactaatctgtacatgtgtatacttacacatacacacatgttcgtataacatgatttacaaaaagggttaggatgcaagagtcagagtgagggatctgtccctggatggggacaataaggggtcagttcagggggacttccttgagctctgaggtttcacctgagaatgggagactcagaacttggtgacagagtttgtggagctcactgtgtctttgctgatccttcagccatggaagtgagattgtttctagcttttctgtttggggtgcttctctgtcaactaaatagtcttcatccttctagtattgcatcatttgtgtatacttcattcattcacttactcatgacccactcctcgagtgcctgccatgggcagcgtcttcctaggtccgtgtgctgcc

SEQ ID NO: 155639 - DNA, 262 bp, Homo Sapiens
aacaaaggcaaggcagagaaaaagatcaaggatcctaagtttctcctgtagtaaagagtcaaatgctactgcatttttttactttttcaatttgatacttaggtaaggctcaatgatgtttttagatacttgtttcaaggtcataggacctaaagtaaaccctatgtaagaggaagagctgaatgaaacatggataggtcaggcacacgtggttcacgcctgtaatctcagcaccttggcagcgcagcaggaggatcacttc

SEQ ID NO: 155640 - DNA, 227 bp, Homo Sapiens
tttggacgcccattctgtttgtggaaacgtattcactgcacatttgcgcttagaactcaatctgggccaaaagttcccagtacagtcccactggcctccttgactaacaacttcaaggcagctgcattgctaacgtcacaaccctaagcacacttggaggcaggtaagaagaaacacaataatcctgcatcggaataacacttccatgcgtccaatgtcggaccgca

SEQ ID NO: 155641 - DNA, 236 bp, Homo Sapiens
gctaaaaccgaaaagaaaataaaaattgaaagaatatagcagctgaacaaagtttaaataacttggaaaacagcatattaatctattgagtctcaggaacattttttacccttgactctggagacttagaatacatatggtaggattattttattgttttacgatttcttagctgtagtcctttcccactataaccatgcacaatgaaagtagatataattgaggtttcacgatgc

SEQ ID NO: 155642 - DNA, 407 bp, Homo Sapiens
ccgtccgatctgacccttgttgacagatcacctggaggcaatttacttaagcatctgtgttcctctagtatatcatgggataatatacgggataattacgtggcaccttgcctcccaggcacattctagacgtgtaaccgctatataggagcccactggctgagtagctaccatcatcgctggtggggaaactggtggtaggggtgtgagggtagtgggggtgtcagccccccaggtgtttcagaacaagtcctcgggcactcccaagtctgcctcttggctcccaccctcaaagcccatgttctgtgaggcccaagagaacacatggagtcttagcaaatgcactaatgtattccgggggactgtcacctggcaccactggggcactctgctggctacaactcata

SEQ ID NO: 155643 - DNA, 681 bp, Homo Sapiens
aggtgatgcggttggactctgtgctctatggcctggtgacctggtacatggaggccgtcttcccagggcagttcggcgtgcctcagccctggtacttcttcatcatgccctcctattggtgtgggaagccaagggcggttgcagggaaggaggaagaagacagtgaccccgagaaagcactcagaaacgagtactttgaagccgagccagaggacctggtggcggggatcaagatcaagcacctgtccaaggtgttcagggtgggaaataaggacagggcggccgtcagagacctgaacctcaacctgtacgagggacagatcaccgtcctgctgggccacaacggtgccgggaagaccaccaccctctccatgctcacaggtctctttccccccaccagtggacgggcatacatcagcgggtatgaaatttcccaggacatggttcagatccggaagagcctgggcctgtgcccgcagcacgacatcctgtttgacaacttgacagtcgcagagcacctttatttctacgcccagctgaagggcctgtcacgtcagaagtgccctgaagaagtcaagcagatgctgcacatcatcggcctggaggacaagtggaactcacggagccgcttcctgagcgggggcatgaggcgcaagctctccatcggcatcgccctcctcg

SEQ ID NO: 155644 - DNA, 366 bp, Homo Sapiens
cttaatgtaatctggcctttgggtcagggctttatctaataatgctttggctttctcctgtgtcactgggtcttcaagacaaacggtggctaaaagggtaagggtctgtgcatttgctcccagagttttgtaaacgttgttagccattaccattgcttctcgaatactgttggaggctaagtaacattcgataagacctgaaaaaagtaaaacacgtgaagacattcaatgccattaccattccaacccatgcttccactctgacagctctccaaattgctaaccttcaaagtttctagacaaagggcaggccacgggatactgatggtgagattagagctgacaagagtgtttgatgttatagct

SEQ ID NO: 155645 - DNA, 285 bp, Homo Sapiens
tgtggaaacctgcctatgattttctgtatacctggagtgctcactgtggaaataactacacagatgtgttacaagaccttcagtcagctttggacagaatgaaaaaccctgtgactaaacactggagagaattaactggagttttaatactagtaaattctttggaggttcttgagagtaactgcattctccacttactgaggaagtatagaaaacaaagcgtgtgtttttgatgggagcgaacactgagataactggatgtgtgtgtgtgtcttgttaccaagt

SEQ ID NO: 155646 - DNA, 144 bp, Homo Sapiens
gtcatacagaggcttagatacatggctggtccccaacaagacccatacccaccacacacaagcaagactggtaggttgtactgggccatattatttcaaggcccagatccttgccgttaatagtaggctggtaataatttctag

SEQ ID NO: 155647 - DNA, 560 bp, Homo Sapiens
ggcactctagtccaggtttcatttttttgtccattccacggcctagaatacactccattttatctgtacttactgaagttctttagtcttcaccttgaattctacttctcccacaaaacttttcctcactaagccccttctcttctgaactctgtagctcttcaagacagtaaaaactctgtcatgtactctggcacatataaatcattcttacactatttcatcatccctactataccgtaagattcttgagggtaggagccatatagtcaggctttattgcttatatcaactagaacaatcttcatttaatacctaggtatttttataaatacctaactgaataaattttcttgcgattatttcaccaaccataataaagtcaatggtcaataactcttcactgaataaatgattggtccatggcaatacataaagtcaaggtgtcaccattgatcacagcaaacactagagctactactgctacttattataagaaaatgactcccctttaagcgtccaactagggtccattccactgactagagtggccggggatc

SEQ ID NO: 155648 - DNA, 135 bp, Homo Sapiens
cctgactcctcaggctacttcgtgtctcttcactgcacctactccccccattttatgccatggtagcatcaagtatctctcccgtgtggcacttcacatggcaagatttggtatttacttatgtattttttgtag

SEQ ID NO: 155649 - DNA, 145 bp, Homo Sapiens
gcttcataaagtgtattttttctcctcctctattgtgtagacttttagctacttgtgctattcattttccagaatgattcactcattccatccggtctctcccagtttaactttcttgggtgggttttcttgggcattattggcc

SEQ ID NO: 155650 - DNA, 265 bp, Homo Sapiens
gcaccgtagtcagcaatcgtcactataattttctgcagaaataaatgttttcgtttgtcctgtaatgtctgaaattactgctaaagctggaaatgtgtttagctttctcagcaaaattcttaaaaggatatgtcagagccaacaatccagaattatctttactctttaaatggttcttcacccactttggtttgcctttttgttttgttgtgtctgtttttcgtgggaaacaaaggggcgggggactcttaaagacgaccagccg

SEQ ID NO: 155651 - DNA, 651 bp, Homo Sapiens
  misc_feature (45)..(57): n is a, c, g, or t
attatagacatcagccccccagtaccagcttataattaaaatttnnnnnnnnnnnnnctactttagggttatttgctaaaacttcttctcaagatgtagaaggatgtgagaaaacacaagtcagctagatttctctctcttctagatcatccttaagtctatttgctttggccatcctgaacattttgaatatttcttcttctttgcttatttgtatttctctatatttcagttcccttagcattattttgatggggttttcacgcccagtaaagaaaacatctgccagaggacaagactaaagcacttgctgagagcacgacaatcctatgaattctcaactgggtttctccagggccaggaagatctatcccccaggttggagggcacatcgcagggattgttggagggctctagatcccaacctcaaacttggcttcactacattctgcacacgtggcaggggtcgagggttgctgaaaagaaactacagccaccagtaaactcaattgttcatatcaagaagtaagtatcagcacagaggaagatgacaaaatactgaactcaatgtatagcttaaccacgtaactgagaaacacatcaccaggctcatgaaattatttgaagagactatcgaatgcccagaccccg

SEQ ID NO: 155652 - DNA, 198 bp, Homo Sapiens
gtcacataacatacgcccagcaatatgtcacaatacaccgtgtgggcagcaccaaggcagaagaggagactcaaatcacctaggtgcaatgcccagcgatgtcacaatgacccctgtgggctgtatcaaggcagaatagaatcacattaccaagggtctggatccagtgatatggcactgtgagctggactagagtgg

SEQ ID NO: 155653 - DNA, 215 bp, Homo Sapiens
gtagacggtgttaaacttgaagacaaataacgatttgacctgtgatatttgtttttccctcttatcttctaagcccattcatccagatcattcatcacctttaaaggcatccccagagggaggcaggactggacagagctgaagattgcacaggccatttgcaggctggattagttctgtgtgacccacctgtctactagagtgggtccgcctat

SEQ ID NO: 155654 - DNA, 204 bp, Homo Sapiens
ccactctagtcccaaaacaaattcgttatgatgaaactcaaccttaaagattacaggctctctgtaacatataatcctaacccatctcccttcttctaagtgtttttgtattttctctgtatatctagaatccacccacctcttactgtctgtaccactctcatcaattcatcacactctccctcctgacatagagtgccggtc

SEQ ID NO: 155655 - DNA, 271 bp, Homo Sapiens
agattgacataccactcctttttcctctgctgatttgagttaaaacccttatggatctcacccttaaatccttgcaatggcctcctacctgatctctgcctgcaccacgtcttcccagcagtcctataccggggtaatcttccttcagctcctgctcagaaaccatcaatagctcccagctgactactcaacagagtcagcaatcctgtctgttctaccttcaaaataaatccaaaatctgaccacttctctccgcctctactgcttcccc

SEQ ID NO: 155656 - DNA, 240 bp, Homo Sapiens
gccgactctagtccaagggaaaattttgaaattatctagagaataagtgatttacaaatgtccttaacctacaagtaaccatttatgtaaaccaactgattggttttttataagccattcttattgatacctctgatagttctgagtatgtctgaatggtcctgtttatcctctcctgtcattgtaaccaatcacgcaatggcagctggacaggctgaccaggaaacagactgcaggatg

SEQ ID NO: 155657 - DNA, 253 bp, Homo Sapiens
ccttatatgcaggtataatgctggacactgcacacttattcattttatcatagaaaattaaagagaaaattatatgattattaagagcctgaatctcatactaggggaagtagtcctctgggttttatgtgatggtgggatgagataactgatgttaaaagacaaacgtggtatctttctggcatattagttttactcagagattttgagtgggaggagtggaagaacttagacaatttaatgactagagtgg

SEQ ID NO: 155658 - DNA, 255 bp, Homo Sapiens
aaagatgtatgtgtaaatggtctttatggtctttttgtgcacaattacgtcaaggaaatttcagagcccaaaggtcaacctgcaactataaggttcctaagttatctatctctttcttttctgcctgctttaagtctgctgttacttttttgctgagatagaatccactgtttgtattcaaccatttcgtttttgttattgttaattgtttttgcaaaccaatgagtttgtattaatatctcctgactagagtgg

SEQ ID NO: 155659 - DNA, 413 bp, Homo Sapiens
ccactctagtcatcgactttaaagatcctgaaaaggcaatctgaatgctgggtgcatctattgaattagaaatgatcggaatggctcctaagtcaggatgttatgtcctgaaaataggtgacaacggcaaaccatccaccctggtgttgactgactttaacaaggttcagttcacagagattgagggcagaaaaaggaaacggcctcaaaagggtaagtttgctgtgttgccctcacaccacttgattcatggtcctgatcctaaggatctcacctgatacttggttttataggaaggatgtgtaaaattcccagaacgctaggaaacggggacgaagacacttcaaagagaaagttaatgaacttgtttctgaccacagggcatccttcagcacatgctgaaatagactggc

SEQ ID NO: 155660 - DNA, 311 bp, Homo Sapiens
acttatctctacgttggtcctgagcagagccaatgccttaattttgctgtcttcctctctcaattcagtttcatataagaaaggttttcaaatgagccaagattgaagaggctgacatttttatttccgcaaacaacaattcttcccagaaatactcatttgagtcagaaatatctaacatcatggtgaaaaatactaccagaataattgcaaaggagtaatttacctctctggaatgtcccacgttaggcctaagtattaatgatgcagctggtgatgttttctaagaccctatacatccgtcgtccgac

SEQ ID NO: 155661 - DNA, 414 bp, Homo Sapiens
cggcttttttactgtagtgccccagttgacagaatcatgcatcagaagcttttatgtgtaagtggaatctttgttctggagtaaatcaaagtgtgactgtatttgaaagccagctcgttgaaggattccgtcttctgtatgaggctgcgccagtagtaactgaggtgtggtgattagcgaaaggtcactcctgccgtcctaccttccgtgccgatttctcctacctgacacggggccagggaaggcagcgagcagcaataaatcagaacacaggtgccctattaacctgccgtgtaggaacggtcagagtagccttttccttgtgtcattccaatataggtggggggtagagagcaaggagtacaggtttttggcatattagaatcatagcacgtttagtcttgaccagaacga

SEQ ID NO: 155662 - DNA, 317 bp, Homo Sapiens
gcccagctatagtggtttttgtattcatttctgccaatataacttagtttcttacctcttaggtatattattgtcatagcctgatagccagttttcctgtctctagcctttagctcttatagtctgtcagcttagagtattcatcctacatttatcacttacattttgtcatgctaaattcagacttgaaaccctttggttttccccactatctacaaggaaaagctcagactctcttgtctcatttaaaggccctctgtgatctgactgctctccatctttccaattcattttctggtttcctgcatgagccctta

SEQ ID NO: 155663 - DNA, 297 bp, Homo Sapiens
gtaaattaagtacaaaatttttaccaatagtggggggagaaatccactcaaaattctaccaccctaacacaactatgtcttcatttttctatattcccttgatctctcctcacatgcaagcacattctggagttacagtcatgtggtacatcctgctttcacacaagttcttccatgttgctgcacagtaaccattatcatttgcatttgcatcatagtacataaagtaggtcatcagcatttaaccatctcctgtatttggggaagaaagtcaaattaggtagccgagctcaatta

SEQ ID NO: 155664 - DNA, 344 bp, Homo Sapiens
ataagtagttcctgaatgaatagatgagtatgctgtttagaaggttcatgaattggaaaccgtgtattgctagggaggtctttgagttgatggtattgtgttgaaccatgtgtttacccaggatctatttagatttttactactttgttttctctgttcctttttatagtaattttctgtatgtggtgttttcaccacaccatgagattgtataccatttctcagcgagtactgtgtgtatatgcttggtggctccctcatggtgccttgcatggatattggacttcagtttcatgtggatctgatcccagttatgtaatgctgcgatggagctaagtctatca

SEQ ID NO: 155665 - DNA, 253 bp, Homo Sapiens
cgatcgagccggctaccgtattggacgacttcatataaggatgaaaaaatgcacattttattacatcatatggcaaatatttgccaatattatctaatattggatgatggactctatgactgtattcaatgtcatttcacaaatattgagtatgtactatatgtaaatattgtgcatatttacaaaaataagatgcgtattctgcataaaattgttgtaaaaaagtagaatttatgctctctgaaggtaggga

SEQ ID NO: 155666 - DNA, 340 bp, Homo Sapiens
taatggactttcttcaggtatctcaattttttgtagaaatatgcctcttcctatataaaaattaaaaggaaccattatttctgatttgttaaaatatgtaagaaaaaagtgacagtttgttttatcttactagagagatgcttggaatcaaagttttgattatccaagagttatatattaaagtacttgatgaaaatacagtaattcagcactcaaagggtgggaagctcaattattcagaaagcctcaatcctaaaagtaagctttaaggattttcaccaacaaaattctcttaaatacgtacaagatgaaccttcctcaaattttaacccaaacaatt

SEQ ID NO: 155667 - DNA, 613 bp, Homo Sapiens
agcgtcagtattgctgattgtcccttttgcctcagattccagtatggctcaggactgagtgtggctgtgtagaggagatggtggtgaggggatccaggtggaggcatgttgagaagtgaattgtggttgaagaaactgaagcactgagtacagactattccttcatgaggtcccagctttatgtgaaagggaatgaagtgaaaggatggtaggtttaggggaccctcaggcttttttgagggtttggctttattttttaagatggaagagacttgcgcatgtttacaagctgggaggagccgtctctggaggtagagaggatgaagagagtagacataggggattagtagagacaggagggcacacagggaggcttagccctaggccagcagagggaccggagggaccaagctgggtcagtggaaaggtggaaggtggcaggagtttgtgcctgatacatggatgagaaatggcactgggggtggtgttgggatggaagagagttgtggagtgttggaggtttcccacactccttgaagggtgtgggaaaggagtctgaacagagtcttcctgttaatgaaactgttgagcaaccagtgggagtccagatcct

SEQ ID NO: 155668 - DNA, 398 bp, Homo Sapiens
tttcttctataagcaatagaaacccaaagaagtcttttgtgcagaagagtaacaagcttaaagtcatgttttttgactcagcaatgatgtgaagaacagagtagagtgggcagagcgagagaggcacaggaaagtaaaatggctcctccaattgttcaaacaggaggggataagttcagatgtggatggaaggtgagggaagaaagaaaagtacatccctgttgggacaatgaaaccagattgtgatgttcatccatcggcaatagagaattctcagtgtactccattaccatgttcagagaaagacataggcaaggccactgtctgaccacaaaatgctaaatttacctttctctgattcatatcatcttcctctgagtgttccctgaagcaagtcc

SEQ ID NO: 155669 - DNA, 343 bp, Homo Sapiens
taatggactttcttccctaggtgaggagaaagatcacttctatacacatgaccatcggtagttaatgactctatgtaacaaaaggttttccattgaagatctattgatatacagcaggacacacaccaaacagaagtactgtattcttaaaaccaggcttaggtcagtatggtctaaccctgaaatctttcagctgtgccagtttgagattagtgacgtgatatatgcaccctcacgtcacactccccactttatttaagacgacagatgacatttcttacacaccacgccataatgatgagcatgcatgaatgattctagttgagaggacagaagtccatat

SEQ ID NO: 155670 - DNA, 908 bp, Homo Sapiens
ctgtaagagtgtccaaatactcaactgactggcttagaagaaaaaaaatccatcaactttgtttctttttccacatacctcacatactatcttttctctatcacagaggctcttacctgaggtccatgagctccctagagggtctataaatgaacttcggaggcccatgaccttcaagctgaacaacaatgcagaggtttgcaattgcattattctggggaaaggtacttagccttcgacagcttctcaaaggcatgtgtgacctaaaaatggctaacccaatccacttcttttaaatctggaatgaaacccaaacccaaagccaaaggagatactattctgggattcaagaggtaagaaattaacaaaactgcccaatttatgaaatcttcataattaccacttgatgctaatgacaaaaccgagatgactttatctaaaaggaaaagtcaaagcttctcttagttaccatcatagcctcccaacacaagccacgggaacactggtcccccaaacgtacccagacaagggtcatggagcaaacttgtatcattcagagaggcaggagcccgtacgcagtacagaaagtgcgtgtggtaatcggcatacacaaagaagtcgtcccctttcttgtggtccagcacggaatggctgttctggaagtagagtttaacacactcaaaatggtgcagttcgtgttatacggtgaaagaggggccaagcagatgtcttgaagtgtcacagtctcattgtcataagaggcagtaatgttttcgatggctatttgtaagtcaagaacctggtgcagtatctgtatgtcgagcggaggtccaaagggtacatcagctcccgaagggtatggctggtaaatgtgttcgtcagtgagagggccccggatgatgagctgc

SEQ ID NO: 155671 - DNA, 547 bp, Homo Sapiens
ggtggagacaggtctcattttgtttcccaggctggtctcataaactcctggaagattttaatttttaggaatgtctttctaataacagtatggaaatggtgtagaggaaatgagattggaagtaggagattaataaaggagatattaaaatccaagaaagaataacgacctggcttggacaaaggtaatgctatgagattagagattaggaggtaaaattaggagcatctcaggatggatgtgataaggtggacaagaacacagatttggcatgattgctggtttctagcttctgggatagggatagatattggggaatgaatgaagggagcagattatagtttgagggtgggaaaaagaatattttaaacatcttggaggtattcaaggaacattcaagtataagatgttttattaagtatctgagtactatttgcacaatcattacgcttctcgggcatatagggatgtactaaacatgtcacctgccctcctaatattatagatctttgagggcagaaagtccattaggtagccggctcgatca

SEQ ID NO: 155672 - DNA, 424 bp, Homo Sapiens
ctcggccctagttggactttcttctataatcacatccttatcccatgcaaaactactttctgaataaacgacatccctgacagcttttccaatagagactggtctaggagaaggaagacttctaagttctcctagctccttgcatactcaatgactgctctattactccaaactcttcctcctcacaagctgatgatctacattctatttctcagtttttgtcatcaatagatctctacacccttctcccagattcactgagtatctacagcaaacccacccaatacctgagatcacaccaaggtatggtgcagccatgttccattcaacagagttctttgctctctactcctagactttcacttgtccacacccatgaccatgctgctccatactagaagtctgaattgcaacactccactct

SEQ ID NO: 155673 - DNA, 376 bp, Homo Sapiens
gagacgagatgggcggctctcaagtcctggcctggatttatgtgccagagccttggccgtgtgacttagggaaggtcactttgcctctatctgttgtcatgcaggacccagtgggaagtgaccttctggtttctttttcactgcgtttacttctcatggaagaatttgcccatatagtcctttgtctggggtggagttgtctttgtggagctgattgctaatattaacacattaacatggaggaaggggcatttcccctgtgaatccctagttctggccagcgtgtagcttaatacttatgtgccaggggagggacgagagacctgggaacctgatgacaaatgacagatagtgcgtccgcccactcacatatcgt

SEQ ID NO: 155674 - DNA, 275 bp, Homo Sapiens
ccgtggatgaccgcagacggccacaggtgacatttcaagctgtgaatttggagagcgagggcgctccaggcaactgtggggtgactgctccccctggtggccatatatggctaaagcaagtagaagtccagacacacctggagaacaggtgccatcgcctgaaagcaaccgtaaccacgacaaccaggccaggtgcagaacccaggtctcccccctttattagaacctgtggagagatcatgaatgtattctccgcgatcgatacagtggggccg

SEQ ID NO: 155675 - DNA, 328 bp, Homo Sapiens
agagaaagaagaaggaggaggagaaggaaatttccaagttgctcccaactcaacaggtttatttcagtcctccacaagagatcaaactcaggaatcccaagggaaatggcgtcaggccccagtcagggcacttctgagaagagctctctggggagggatgagggatggactcagggccaggaggggaggcaccaacctcctgtgcatcacactctgagcgctgtgatgggaccgctcggactccaagctccccatcaggtgggtcccatccactttctccaacagccttcctggggatatgcttttttctccgcgatcgaatatggag

SEQ ID NO: 155676 - DNA, 376 bp, Homo Sapiens
gtgccttaaatatttaatcttatttttaatgaaagaacaaaaatagaatagttaagttaattgccagcactgtctattgactttctatcacagcgggtaaaagcgtatcttcctcgctacaccatgatcttatgtttctccctgtgtttcttccaattgtagcacactttttaattaaatcagtaatatttacatgattatgactctgcaaatattattcactgctaagtcatatggtgttttcactgtgcctctgcattccatgtccttcatcctgtctctgaaacagttctgaagtctgagcacttctgcaaaacacctgcctcttcttttttcctagcccacgttagttagactatccgaatatcgttaagta

SEQ ID NO: 155677 - DNA, 448 bp, Homo Sapiens
  misc_feature (303)..(380): n is a, c, g, or t
  misc_feature (389)..(400): n is a, c, g, or t
cacacttcgatcgcggagaagaatatgtgggagttttttgtgttattcttacaacttttccacagataggatgttatttcaaataaaaagttaagaatacacattctctctctcttcctattttaacttggttatccctcttcctatagatgtcaatcataaattggttaattcattcataatcagaaggaatcccttataaactggttctatttatatcctaagtctttcataaactggttatatataaaggttacttgtacagccgggtgcagtggtttcaccgtgttagccaggatggtnnnnnnnnnnnnnnnnnnnnnnnnnnnnnnnnnnnnnnnnnnnnnnnnnnnnnnnnnnnnnnnnnnnnnnnnnnnnnngtacattcnnnnnnnnnnnngggggatccctctaaatccacccggcgggtttgcagcttgggcagggc

SEQ ID NO: 155678 - DNA, 379 bp, Homo Sapiens
cacacttcgatcgcggagaatccaagagcaatgaagccaccacaggacgacaagcttcactcaaatgtgaggcctcggcagtgcctgcacctgactttgagtggtaccgggatgacactaggataaatagtgccaatggccttgagattaagagcacggagggccagtcttccctgacggtgaccaacgtcactgaggagcactacggcaactacacctgtgtggctgccaacaagctgggggtcaccaatgccagcctagtccttttcagacctgggtcggtgagaggaataaatggatccatcagtctggccgtaccactgtggctgctggcagcatctctgctctgccttctccgcgatcgaagtgtgggggatcc

SEQ ID NO: 155679 - DNA, 418 bp, Homo Sapiens
agcatctgtttgtaaaattaggctagctagactgtaagtttaaaaacaattcatgttcaaaggagcttttcaaattacccagtccaccacagaatcagctaatgtgacagaagtaaatatagtgcgtcataattgctaaaaacagggtgaatttctttcacttaagttggaaaaccagcctctaaaaaattaggtgctggtaatgagagcttaataccatggttccctgcaggtctcagaaacattagtagttcctttcttggccctcactgtccttccagtgttggcctctggcctcttcccctcacatttatgttcattctccgggcttatattcattctctgctgctttctcccttcacccgtgggactctcacccttcttgctcattctccgcgatcgaaatgtggggcaggct

SEQ ID NO: 155680 - DNA, 255 bp, Homo Sapiens
aggaaactactaatgtagtcaaaagtcttcagtaaaccaaaaatctctaattatcgttgttttatatcatgtgctatgatgatcagagactaaacagctctttcgttagaattctaattctgagaaatatcagaggaagtgttttaataccctccagtctcaacaggaatcgactatatcttataagatacatttgtattttgcttgtatcgtttctttcttctccgcgatcgaaatgtggggccggctcgatga

SEQ ID NO: 155681 - DNA, 485 bp, Homo Sapiens
catacctggaccttctgggggcaggtggatagtggatctattttgcaggtggatcagacaggattgctgttggactggggtgtggatttgagaacaaggtgtcaagggatactcctgggtgtctggcttaagccctggtagatggtgagaggtgccgttttcttatatgagggattttttggggaaggggcagagaatcagatctggctaaaggaaggaccagagatgttgttctttcagtctccaagactgtttctgcaaatgtctcttcactgcttgctcttggtctctgcccctctgctgcctttgcatctcaggggttctgactccctctcgcctgatcctcttctacttattagggcctgagccctttcccacaagggaagcagtttcctggaagaggagaccaaatgtcagtgagcaaggggagtgggccaaggaggcctgagagcaggagtacaacctgccggtggggtaccgagctc

SEQ ID NO: 155682 - DNA, 319 bp, Homo Sapiens
tctccctactgtatcctaggattgctgaccatatagagaagttcagaaggggaaatggtttggacgggaagagcgaggggtccagctgtcgacgttttgagcaacaggtcccaggaggactttcagctggggccgtcattcagctagaaatccagggccaggtttcaggagagggccagagatgtctagcatggtagtggggcacagtgacactgtgacgctggagggtcagggtcggagcgcgaggagcttcccagggagtgcagaccgctgggacccggaggtgcgggaagaagagtcaggagaaggtccaggtatg

SEQ ID NO: 155683 - DNA, 144 bp, Homo Sapiens
atacagtgccctttctttaagagctcagcaggaccttgccgtctaccccaaccagagtggttctgcccccctcctctgttcatcttcgccatccgtgtgtccggtatgtcctgctcacaccttcggtattaacccgagcgacta

SEQ ID NO: 155684 - DNA, 878 bp, Homo Sapiens
cgtgctcggtacccagttatcagcgttaggggcagaagcccctggaggctatcaggcaggtggcctggaggtcggcactgacgtgcaggtagtaatggctaaggaagacgcggcgctgcagcagcaggaagaagaagcagacgctgtcccagatgatgccagcctcctccacaggcagcaggcagtcctggtctctgtccatcatctccttggggtcatagtagcccttgacggtgcatacaaggctgaagagctggatgacccagcagaagccggtctgcatctgctccacgaagacgcaggccaggagcgacagcatgttcttggagatgatgacggtgacgttgtacagaatgaggcagtcccacagcacgaggcgggcccgtgtgtccctctgcagcagggccgtgccgaagagcagcaggtagaagcaggccagcaggtagcccagcccgaagatgctgatgcgggtggcccccgtgacaaacaccaccaccagcaccagccagaacaggtatcggaagacggccaccttcagcatgtcaaggtaggacctgcagtggataaagttgggcacggggttgggctccccccgcagcggctccaggcggtcggtgttgacgccagccatgcgctgccactcctctgtgcgctcagctgagaacacctgccactgctgggaggcgcacagcagcaggagaaagtcgctgatgaggttggtggagttgggggcccggaagaaatcaggcaggtacagccacttgatgagtgcggagttcatggggacaggcccaggctccagcagccagggataatctgggggaaggggtgtcatgtcaggaagggccgggcctgcctggggcctgaacacccggccg

SEQ ID NO: 155685 - DNA, 380 bp, Homo Sapiens
tcctggtagcgactcgggttaaacccatgttttaactgagcatcaggttggggtccaaaccaagaagagctgggcataggacgttactttctcagtagctctgagagtagcacttttctacataccacaggtgtactgttatggaggcctattttgtagggtaattttgcataaagtttctgtcccgagactcttgaggcattatcctaccatttattcagacccaggagacaactgctgatgtcatgaggcacatctatgggcttccctggacccctaacccagcaaccagcttttggtgtctagtctcacactcattttctcccacgttgactagtggtgctgtaacccgagcgctagcgaggggaactgtagatgag

SEQ ID NO: 155686 - DNA, 310 bp, Homo Sapiens
tcggtaccctggtagcgctcgggttaattcctataagttcagattgttaataggcattgctatctttgtatactgaacttataggaattaaccagtgcagaaattattgttcttggtttatggtgacggtcccatggctgccagtgcacattactgtgaacagtaagtagtatatttttcagagtgtattaacaggtacatttgcagtaattgagatgatgtgctgtagcaggaaggggattagactatggatcctgagattagggttctggttctcagtgtatgtcttaacccgagcgctaccaggggt

SEQ ID NO: 155687 - DNA, 641 bp, Homo Sapiens
ttcaggggttgtaagacatgggtcagcaaagttgaccttgagcagataaaatttaagaggttggcagtaggtaaatgcccttcttttgtagggaaatcctttattcctatgtagttacaggggcttctttttacccagagagataaactaatttcaggctagcgttctggctttagctagaattgcaggcatctgggattccagcttctttattccattctctaagcccaaggcccttgctgtggccaccacagttaggggacagagattctggactgtgttgtttacagacaacataggtgggaaatagggacccaggatgtacaaggcctagtcacaagttggggactgcctagggaagaaggagctgatgactatgggggaagctaaccaaggaatcactgttgccatgggagaagggaataactgaatcccctgaaagtttagccctgcttctcccagcatcacttgttctacttggtattaagccctcctctccaactctcatgccctgactctgcatttcacacccatcctgcctatccccttacaaatacttccctggcctttaactctcccatgctcatcttatcatccgttcccatccttagttctacctacccgtcaccaagcctttaacc

SEQ ID NO: 155688 - DNA, 309 bp, Homo Sapiens
atttcctactctttaattaaggagttggtatgctgtatactcttgtaggatgcgggtgtgttattgctgagtccctggttctggaaggcagtcttgtggctagttggaagttggtagagtgacagagctcagcccctttttggcactctgctctgccttaatccatttgttctttgcagtctggctggttctagtttgggatgtgaccgatttgggagcatcttgtattcactgagttctcaggctggcacatgagtgaacttggtttacctttgttcctggcatggctgataccagcgtggatgaaca

SEQ ID NO: 155689 - DNA, 382 bp, Homo Sapiens
gactataaataccattaattagccatgcgtggattgccgcctggcaatccacgcatgggccaccgcgcccggctgaacaagttattgttgaaataaaaatgaaaatttcaaatcctcaaggaatttgaagatctctccaaatgcattttcacgtccctgttttgagagccatccctgggaaatcacccccgcccacacacagcaagaccccagggtccagggccacctcattgtataacgtccaggacagagcaagcacttggtaaatgctaacaggtgattaagtgaaggaaggaaagatctggagtgcaagcaggggatgaagacacatgcaaaacgttggttcagaaggtgccccttcccacagtggagtgaggatctg

SEQ ID NO: 155690 - DNA, 526 bp, Homo Sapiens
ggaatccggattgcttcggttttagggttctctgtctctacggtcagggactggagagacagaagtcggatccccccaccctgagacttcagccccagagacgcctccgcgcaaaaccacgccctcagcaacgactaggggtgagccaggtatgggggccacttccgcctccaggcagcctcggtctgagaaaagttctccgactttccacttgcatgggccgccccacccatgtttgagcgaagagccgggtgtcgcgggttccattttcacctccaaatcaccaagctggtctgagcgggaggcaggggccccaggctggagggcgcggcgctagggagccccagttggagaagggaggcaagcgtcccgggctggagtttgcggcgctagagaggtggggactcggactcaggcatgcaggtaccggggatgccgtgcggcggggactcacctcgtagatggcagtcagatccatggtgtaacggttgaccatgaggggtgtcggccatgcgtggattgccag

SEQ ID NO: 155691 - DNA, 245 bp, Homo Sapiens
agattcaacgggtctcttaggacattcttttagaaagaaatatgcatttatatcataggcatagatcaacacttcctcaaaagcaatgtagacaacattagtatctcatgtcacatttcctcaccctgcttttatgacaagttaggatagagaaaccatcagttccttaaagggatttggatatatttttttaggaaagcagaaaggataagaaatttagaggagtaaggatgagtggcacaagg

SEQ ID NO: 155692 - DNA, 978 bp, Homo Sapiens
  misc_feature (876)..(876): n is a, c, g, or t
cagcgtcagggctctggagctgtgacagcctcagcagcaagccaggcccctgctcagatccttctgggcaggggcaggacagacggggaagtggtggggagaaggcaagagggcagatggagtgcagggagatggcgtgacttccatctatcttcttactgcactttagaaatgacacacgggaatccatgtttaagggattctaaggtggtgccaagagacaaatgtttctgggatgggaaatagggagttagtggcagatcccccaaaagaaaaggagtcagtgtgctccaagccgccagaggaagcaaggcaggaggcagctgtaaggcagagggtatcagccacactgggcagccacatggccacagagaggatgggaggagggaggcgtacctccaaagtaaaacacaaaacaacccttaatggtaaagacagcctgtgtcgggagggagagagagaactcacaggaatccctggggccaagagcctccaggagggccatggaggcgcctcatgcccaacctgagtctctgaggggagcccagtctcccacttctggcaccaacagggacacagtgagcagcaaccctgacgtgtcagacgcccagaagaacctcctctctcgggcaggccaagcaagaccagattcagaggtggatggcgggggcggtgttgggggttgccacagaaggaatggaacagaacaaggaggaacaggagagccagagaacagacaagaggaatgacagacggggccacggacaaggcacggatccctccccgcaccgccctgctcaccgagctgctgcgatgggcgacttcttggcagggtccagcaggctgcccaggccaccaactggttcctcccccagnggaacgcgtgtccttgttcagctgctgcaggcgggagctgagctcactgatcacagttggtttgtcgtcttcaggcccaggagcccccgatccccacgggtt

SEQ ID NO: 155693 - DNA, 417 bp, Homo Sapiens
ccacagtggagtggaggaatctccaaggcaggggtccatgccatgcgtggattgccagctggcaatccacgcatggcactctgcctggcctcccttttggaccaccagggctgctcacagcttggcaacaacattccttcctcccagcttttgcacaagctgttccctctgcctggaatgacggaaccgtggcacaggctccactggtgttttaagagggttaagcctcttcttcaaatggtgccattttctctccagagtgacccccagcctcgagtgttttagttgttagaagggagtgaggtggacacatgggcctggcatagagccagcagccccatcctcttcttcccggcctcttttgcatccacttggcttccctgccccccatgcgtggattgccagctggcaatccac

SEQ ID NO: 155694 - DNA, 340 bp, Homo Sapiens
ctcacgcatggccatcagtttccaagacttccgctcaacatctatatggtcatctttggcacaggcatctttgtcttcatgctcagccttatcttctgctgctattttatcagcaaactgcggaaccaggcacagagtgagcgatacggatataaggaggtggtgcttaaaggtgatgccaagaagttacaattatatgggcagacctgcgcagtctgtctggaagacttcaaggggaaggatgagttaggcgtgctcccgtgccaacacgcctttcaccgcaagtgtctggtgaaatggcttgaagttcgctgtgtctgccccatgcgtggattgccag

SEQ ID NO: 155695 - DNA, 404 bp, Homo Sapiens
  misc_feature (112)..(127): n is a, c, g, or t
caaacatgccactgcatccatgaaacaggatgccgtaaaatacgttacaccccaaaataaaaatggaaaagattggattcagtatgtctaatatctgtcataagaattctgnnnnnnnnnnnnnnnngtaacaactcacaggattttataagaactcaattgtctagtacaataatgacccgcaccagggcacagctgaaatggcactgactgatatacagaataatgaaaaattctgcagtttggcataaaggaaagaatacaggccaaatttaaaagaccaagaagagagaatgttatggaatttcaacaactctgaaaacttaaacaatggaaactctcttaaagatgcttcatgccgggcgcagaggctcacgcctgcaatcccagccatgcgtgataac

SEQ ID NO: 155696 - DNA, 404 bp, Homo Sapiens
ctttagaggatcccctggcagatcaacgcatggcgtggcagtgtctctaactgtctactccagccaacagaggacaaaaccactgagcttctcaatgacgctgtgccctctcacagatgcacttatccctttagtgaaggaagcgacctctcggccctcctgggatcatggtctgatggttggctcttctgatctttcataagagatccacactacatgcccactcttgagccttttgacctcctcaatattctgccaaggcagtaccagcatctccagtttaatgttacaacgaggccatctgtgctacagcccgacaaggagcacatcccaacgtgccgcagaccagctttaggtgtctcgccgggataatatactacaagtcacagcagagtgctcccatt

SEQ ID NO: 155697 - DNA, 373 bp, Homo Sapiens
  misc_feature (269)..(269): n is a, c, g, or t
ctggcaatccacgcatgggagcagtcatctgcacacctgcaccactgacaaaggtcttgcttctgaagtatacaaggactgaccacaaatcaatacgaaacagacaagcctgaagaaaaacaggcagaagacccaaactggcgcatggccaaagacgacacacaaacagccacccaatacatgcacagaaaggtgctcggcctcagaagtaataagggaaccgcagatggcaatcacaaccatatcatcatcgcacacgcagcacgtcncgcagcggaagggcccgtcagtagtgagctggtgacacgtgggcaccattacttttacagactaaatgtctgtgaccccctctagatacacggacggcaatgtc

SEQ ID NO: 155698 - DNA, 298 bp, Homo Sapiens
ctggcaatcaacgcatggcaaatgctctttgaggttgttgctaaagtagtttttttataatagagtgtgtgatcaatccttttggggaaatatgggtaacataagtcaattgtgaagagtaagtttgatggcaaacgatcgggaacttagaactatttcttgaagggaaaaaaactgaagttagtagacagtttgaggtttaagttgatggtttttgacttgtagaacttagcaaaaactttaaatgttctttatcctgtggcagcctctgctaccttgcctactcagtatccatgcc

SEQ ID NO: 155699 - DNA, 324 bp, Homo Sapiens
  misc_feature (59)..(59): n is a, c, g, or t
  misc_feature (79)..(79): n is a, c, g, or t
ctgttgtggcaagttttgatccctaacaggagagaaaaggctgaagcggggataagacnctggtaaaaagacacacacnttgtgcaacggaccccagatgcattgcagaggcttggtctcaagaccaagagcttcaaatcctagaagctctcaagggcttcaaatcctagaagatgttcactctaatctctattcacatttatcctattctagatttccagaaaaaatctgaacatcactttgataccaggaggcatcccatcttggctctgggacatctctcaaggcactcgcctccccccatgcgtggatcacagggccgaa

SEQ ID NO: 155700 - DNA, 464 bp, Homo Sapiens
ctggcaatggattgccttacctggcgccggcctgattcttataagctgtttttctttgttgctggtgttttctttttggactcctcttccttgctccatatccctacagtatttcccaccattctaggtttgtccctttctcttcttctgggacactctcatcaacagtcagtcctcagccccctcctctgcaaatgacactcagaactctctctggctcagatctcagatttgggattaacaaacttccacttagacattctgcctgactgacctcaggcatttcgcactctgaatgtcaaacccaactcattgtcatctctgaagctgctcacttaattctcctctgtattctctttaacaacccagttgcccaacccagaaactgggagtcacgcagacctcctttctctctactcccacacaatgagccatgaagtccagtcttcataacaacatcgctt

SEQ ID NO: 155701 - DNA, 595 bp, Homo Sapiens
aggtccttggcagcaccgttgttgattcggcatggagagagtcacctgagcagggacagtgttgggcgcagggctggagagtgtctctgctgtgcatgcacccagagtgcacccacccattcactgacttcatggagctcccaagcctctgctcagtcacggcaggcacagcggcttgcagccagtggggagggcatggggatggctgctgtgggagggccaggtgcatggggttttcggcaggtgtgccgttgaggatgtgtgtgcttttaggcagggcaccgtgggctttgaggagtgtttctgagagattcgagtctgagggccctgagatcacgggtgcagtagtgagccccagggcgcatgggagacacctggggaagctgcaggtctgtggtggggggcgctggggcatgtactcgtgcccactgagggcacgtgcacccaggctctcggctgtctgtgtggctccaagtgaggagggtgaccagggtgagggtaggggcaccgagggcatggatgagccctgaggggcgggtgtgacatgaatgtgtggggtgcctgccatgcgtggaatgccagggggatcctctag

SEQ ID NO: 155702 - DNA, 502 bp, Homo Sapiens
tccacgcatggtcagcaagcttctcgggttctccggggaactcctccagcttggtcagcaagttctcggggttctccggggaatcctccagcttgttcagcaagttctcggggttctccggggaatcctccagcatggtcagcaagttctcgggtttctccggggaatcctccagcttggtcagcaagttctcggggttctccggggaattctccagcatggtcagcaagttctcggggttctccagggaattcttgccagtcccttaagattatgctcagagtagggcttgcccagctagcaagatatgctttcctgttgttgaaggagaagttcagcaaaactatgtagctaaatgacacgaaaagtttttttctcaaagcctgggagaacagtagtttggcctctgaagaatcccaaacttgtggttaataagagaaaaatagacagtttacacgtggaagatagaaaagtctaaacagccatgcgtggattcacgggg

SEQ ID NO: 155703 - DNA, 454 bp, Homo Sapiens
atgatcccgcgagagctcatgatggtgctggccagcctggtaggcagctgcagatccgtgccctcttctcacagatctcctcggctgtctccctgcgcagggtggcactggaggtggctcagcccaggcaggccagggggccctggccagcaatgtggacgctgtgcctgtgccccgctagctaccggggggactcatgccaggtgaggttaggacagcaccagactgcgaggcggctcacctgtgcactcccttccctccagcatcctccctgtgttcccttcctagctgcctccacttcctgtcaccttactcacctctcttcctgcccatgctatttcgcaggcagctggccaactcatgggcatgcctgtctcctgcatgcactgtactgcactgcccctcgtctgcctgcccctaatccgcctgcatgcccctcatccgcatgccccta

SEQ ID NO: 155704 - DNA, 480 bp, Homo Sapiens
tttgtcaggggcttagcacagtgcctgacacataggggctcagtaaatgtcagccgtgacactggtgattttgggggagacccagcgctctccacccatgcctgctgtcctgcccctgcagctccctccggcccaggtggtctgctttgagtggggcactatttggggtcataagagcactgccctgacctccctgtcatctgaggcagctggaaactccaataggcagagaccaagagctgagctgtgcagaactctgcttccctaggcacctccaccctgtccatctctcccccaacacgcctgtacctggcctgaagctgttcaagacctgcagggcagtagcaaatcagtgcagtgtatggaaggagaaggtgtctagacgtgcggcctgggcctgactcctccagcccttcatctttgccttcatccttcctcctgcccaacatgcgtccagggcatcacccaacatgcgtggtt

SEQ ID NO: 155705 - DNA, 403 bp, Homo Sapiens
  misc_feature (55)..(55): n is a, c, g, or t
  misc_feature (349)..(349): n is a, c, g, or t
gtgaatggagactgatgttaaccacagcctctgggcttgttcagaggcggtctcngcctgctcattgtgagccaaggtctgtgcacctccctgttccccttggcgcccatggcccattcctgtataataagccttcctggctgtccctggagaggcctagccatgcttcctgggtccctgcacacaccttccagtcaatgaaagagcagagaggtgtggcacttctggcccaagagggtgctgggttttagtcaccttgctcttcaggttctagaaccctctgagaagtgtaattccacttccaccttgctgcacagggctctaggaaacgagccaagaggcatacctnggaaccactctgctgggagctgctccgtgacctgggtgagcacgcctggtagag

SEQ ID NO: 155706 - DNA, 388 bp, Homo Sapiens
  misc_feature (325)..(325): n is a, c, g, or t
tgtgttgtgctgatgggaatgatccagtgtggcagctggatttctactgaacaatgaggactttctctggtggtttggagtggattggagtgggtctaagagatgtggagaaagagagcccctttcatccacaaagacgttctctaacaaagccttcccaaagatttcctaaagagaaaaggcataatatacattttcaggatcactgtaagaatccagactaaaaagagttatctgtacccaaacagttcaaaacccccaggcgctctagaaggcccctttccattagagccagcccaggtctatgtcttcctgttatagtagnttctcataatctggcccacaataaggtcccagactggctattagaatcacccacagagctttt

SEQ ID NO: 155707 - DNA, 155 bp, Homo Sapiens
tcgtgtaagggctctacttcatcttctccagagacaccactgctggtgctcaggaagcccagagcaaaggcattgacctcctctgcctctcctgccagaaactgggctggtttcccaggcctgagtgaaggggagcagcagcgatcctctaatca

SEQ ID NO: 155708 - DNA, 498 bp, Homo Sapiens
taggctcggtaccgtcacgccacaaggactccatctcaggaggtgttttttctcagcccggggctgccttccagcagcaagtccaagggagccatgacccgagtttcccggtcactgacatgcttttttctccttcctctctctcttctgtgacctggcctccctggcctcaggagacagatcagttggaggaagaaaaagcagagctggagtcggagatcgccgagctccaaaaggagaaggaacgtctggagtttgtgctggtggcccacaaaccgggctgcaagatcccctacgaagaggggcccgggccgggcccgctggcggaggtgagagatttgccgggctcagcaccggctaaggaagatggcttcagctggctgctgccgcccccgccaccaccgcccctgcccttccagaccagccaagacgcaccccccaacctgacggcttctctcttacacacagtgaagttcaagtcccttgtgggcgtacgga

SEQ ID NO: 155709 - DNA, 441 bp, Homo Sapiens
gcgggaatctactgtccagcatcagtgggtcaggtttcgttcacatttctttgaacagatctttgctggtagtgtttgggtatactttagtaagccggtctaggtaatgtcctggacacgtgaaacttagattctagctgagggcacagacacagagcagatgggcacatgaggtttgtaggatcacagatgggtgagcgctgtcgagtagtacatggcaagtggcctgccccaggctgtcatgtgttgggggatgtgcttcatgtagtgtacatatcctagacctgagggtcaacaggggagggaggttggacggtggtgggtactccttgagcagctcagacaaagccaaggtgggagggagtaagtattggtttgaggagcagaagggagttcactgtctgcctgcaatgaacagaggggtgagtgaggagaaggcgg

SEQ ID NO: 155710 - DNA, 387 bp, Homo Sapiens
acttctggcatgatcttaccgtccccttcctagagttctccctttctcccctgccaggctgcacccctggagagcccagctcaggcccctggcccctatgaagcctctcctgaataatccatcagcctgccctgagctcatccagtctccagtgacgattgtgctctccaccagcaggacacaccggagcactttctctgtccctgagaattggactccattccacagttaggtcctgggtcacatacagacatttcacatcccctcctcagtattccccagcagcgtgcagcacagtgcgggcttctaggaggcagtcggtggatatttacccatgattttaagaggtctgtcttgaccaggaatgttgagaagtgcgcctgggtg

SEQ ID NO: 155711 - DNA, 754 bp, Homo Sapiens
  misc_feature (152)..(152): n is a, c, g, or t
tctctgctcccagattccagcctcccttcctctgttcccaacttacgccactgccacactgacccatctacatcacagacaagatgtgctgctcctcggctcaacgtgctgcaatggctcctgaccacctttatgctaatgtccacaccctnttagcacggcagacagactcgttagggcctgactcacctgcctccctcaccatcagacccactgacagctcgtgaccacctttatgctaatgtccacaccctttagcacggcagacagactcgttagggcctggctcacctgcctccctcaacatcggacccactgacagctccaaatgtgcctctgggcacccccaggttctgctccctctgaccatctaactccacctcaaaggcctggctcagtctttgcctcctcaagatgtccccactgcactccatcccccaagctgcccccatcctttgagctcccacaagccttgtgcacatcctgacagcacacttcgtcctctgcacgacaaccctgagggacggggcctcgctgcagggagcggtgcagacagagctgcaggacctgcttccctgcaggcaatgtcctcctggggacactcatgctcagtgactgatgggatggggggtacaaagtcccagccacgtgattctgggaggccattccagctcacaactcctgggccctggggagtcggccgtgggacctgcctcacagctcagctcctcctctcggccccattctgcctcct

SEQ ID NO: 155712 - DNA, 475 bp, Homo Sapiens
actaggcgcacttctgggtcgggcctgaagcctggggctctgtgggtcagccttttttggactcggttggagcgtggtctgggcctggagcctgagcttgaatgggccagcctgaaatctggggccacgagggatggcgctggagtctgtacccatgagggctgtattggaggctgaatgtttggatgctgacgtggtacctgtggccatgggggccagcctggagctagagggtccatgggtgtcgacgtggcactgggacagacccaaagcactgggagtgtgaagggcagccatggagctgagttggtctggatactgggtctgtgggtattggccttaaagtggggtctataaggtgctagtccttgtgatggagagggccctgaaagctgagtctgggggtacagtggctgtcctgaagcaaaggggctgtcgttggagaagtgcgcctggtgcggggatcctctaagat

SEQ ID NO: 155713 - DNA, 292 bp, Homo Sapiens
cacccaggcgcacttctgcacccttgcgacttctgtcatcctctcatttgacagagaggatgaccgaagtgtgcttaggatcttcttgccagtgctgtttgggcagtgctgcagtttccctgactggtggcacctagcacgggggccatttgccctgggcccatccttgcgtggggtcatggctacccaggtcctgcatacccagcagtaggtcctgcatacccagggcccccggagccacggtgccctgactgtgggtcgggggacagtttctagaattgcgcctggtgcc

SEQ ID NO: 155714 - DNA, 423 bp, Homo Sapiens
ctcatgctcggccgatgcgtcgcatccactcgctgcctccatcgtcacactccatgtgtgtctctgtctccgaatcacattttcctctaccgtcaggtcaccccatcaggaacagacagatgcaggattgcaaccaccacggcaacttcaaagccagtgcacctgccatgtttccttccctcttggcatgcctggaaggacttccatccctgaagtcaaaactaggcacttgcaagaatggctggattcaactaggtcatcatggcttaactttatccattcctttccttgggtatccataggtgttccaagagctcttttagtgcagtgcttcagagctttgactttagggcaagatttggccactgtgagcaatctgatgactccgtttctgtttcagaagtgcgcctggattgcggggag

SEQ ID NO: 155715 - DNA, 241 bp, Homo Sapiens
gacgtactaggcgcacttctctcatttttaaaaagtaaaactccttttctcccaaggtagtttcagccgacccaacaggagacagacccaaagaagctgctgtggttgagggtggtgtcacctgcacagccactcagaccctggagtttcccctgaatgccttttggggctgggactgaaatgctgaataactgaggacttgctgccctccagagtctttcaccagaagtgcgcctgggtg

SEQ ID NO: 155716 - DNA, 558 bp, Homo Sapiens
ggcagtggttgggcgggcctccctttggcgaaagctcaggccgggccctttgcacaaatgacaaattggtggatgccacagtccgcccatcccagcccctgggccttgactgtgtgctggccagctcgtctcactccttttccttctctctagaattggctgtgaaaggactgaggcagctatttgggggtagcgggcactcttatcagagcggctggagccggacgatcgtcccagagagctggggcaggggggccgtgcccaatctccagggctccgtggggccagtgctgacctggtaagggaaactctggggccgagctggctggatgtagcactggcagctctggttttgcctccagtaagaagcagtaatttctagtccccaactgcaggcgggatgcatcgggcagtggaccctccaggggcacgcgctgcacggggagcctttgcccttgggggcatgagctgtgctggggcctggagctcctgcccagcgtgatccccgtcctcagtagcgcatggctgcctggaggcaggtaagaagtgcgcctggtg

SEQ ID NO: 155717 - DNA, 482 bp, Homo Sapiens
gcactctgtagcctgatgtgcctgtgaagtgagaggtgtgggaggacagaagctttgttcacagaggtttgggagaggctggatacttagctcccttcttgtaagtttgccacacacattggcatattaaaggttctgagaagtcattcaggtcacgtgatctgtttaggtgtcacccaaataacttggccaccaatcacgtctactcctggacattagttcaataaactagtgtatcgcagatgtgctttgcaaaaagcttcatgaaaaagtacacatgtgattccctccagggctttcctcgaggcgtcctgggtgacctgtctgaccaatggctggagaatcagcacagcaactcccctagcctcacctcttcaccccatttggctgtggaaatggagaaacacagtcacctcctgaacttctaaacctagaaacagaaggagactgtacacaggggaatacagaagtgcgcctgggtg

SEQ ID NO: 155718 - DNA, 444 bp, Homo Sapiens
gagcccaaacaaaatgcagactgtgctctttggcttgcacagtatttttctttaatttgggattcgttagcaacatttttaaatcaggagattttatataaaagtcagaacttctaacttgtctctaaagagggcaagttctggtgacactgggcacacatcctcacctgccaccatcagctgaggcacttagagtgccagcctcaaatgggctgtgtatcctgcagttaacaccatcagcatctctatgtacagtctcacagccaacctctttccttcatctggcttcctgcccagcccctgggtgcacctgagcatgtggtctgtgcagagtggacagtgggctctgatcttgaatctcacatcccctcttgttagaaccaaaggagatctactcttttgctgtttgagacagggtccgagagtacaggacccgagacggta

SEQ ID NO: 155719 - DNA, 465 bp, Homo Sapiens
tcgagctcggtaccagttcgacggagactctcttctttcaatattcatgggtttaaatcaccttttccaaaacaatgccttaattctgagatattgtctatgtctaataatctgtttacagattttgttttcatggcagtttatttccatttcacctaaagtgcaatttcaaatccaagaaccaagatatatgagtttagtattccaaatgatatatagaaataacttaggcaattattccaattttgtatattttaaaataaagcctgcctcattaaaataataatagtttgtgtgtttctagtccagtcatcccaagagcatagctgcatccaaatgcatatgtaatagaattatcttcaaatatgctctaagcaaccagaaatactctctagacaagatataccataacactttaaaaaactgagttatgatatatcttgtctagagagtctccgtcgaact

SEQ ID NO: 155720 - DNA, 816 bp, Homo Sapiens
agttcgacggaggactctctagaaggcaggcgccgttcttagtccaatgtgtcgccgggagtgcagcccacgtttctttctcctccgtccagattccccagcttcccttcggcagctgatggcctcaccaacgtgcattcgcagcggtttattcactgaggccctgcggacgttgtcactggaatgcagaggcttggagagacgctgagcacagcttcccgttcagccgctgcatggcctcaagtgcccttctcctctattggattatctgctgattacggggaggtcaggccttggcaggtgcagaatcagtgcctgcaggacacctcaaaggacagtccaagcagacctggtcatgctattaaggacgctggccttagtttctctgtcccaaggatgtatgaaagccaggatctctgtcacagatcgaaggccatggggacatagcccaatgcaaacctcaaaagtaaaccaattagtggtagccagaggcgggggcaggggcaacgggtgtggtcatgtagcgagtacagggtgctcttccagggtgatgacgaagttttgaaacgagagagaggcggtggtgacacaggaccaagaatgtactcaatgcccactgcagcggtcagctggaggttatgtgactttcacctcgaaaccaaaaccaacaaaccaaaagctcaccacacacacaaagggataggaacttctggacaacctcagtctgacatgacccctgaagacttttcacagtggtccaggcacggaggatgtgcaggcagagcctgcagtgtccatctggagagttctccgtcg

SEQ ID NO: 155721 - DNA, 356 bp, Homo Sapiens
gacaaagaccgtaagtccttcaagatcgggacggatcggagaggtgccgaaacgcagacaggacaggttagaatttggaaaatggaaagcaggtgggcaagtggtaaagtggcattcagcatgggctgtgtgttgaagtgcgtagatccacgactgagttcgagcaagttagttaactctccatgtcatgataaattagaggacatattatcataatacctacccacagacttgaaaggagtcacagataacatctccacggttaatcgcataggacaatgcctgactgagttggtgctctagtctatagcagccattatatgttatactgatgctcttccagagagtctccgtaa

SEQ ID NO: 155722 - DNA, 553 bp, Homo Sapiens
  misc_feature (165)..(198): n is a, c, g, or t
  misc_feature (202)..(316): n is a, c, g, or t
agttcacggagactctctgtactcttgctcggtcacccaggttagagtacagagagtacaggcttgcgatcatggcttacatggcttactgaaggctttacctccccgggctcaagcgattctcccaccatcaggcttctgagttgctgggacggcaggccagcnnnnnnnnnnnnnnnnnnnnnnnnnnnnnnnnnncctnnnnnnnnnnnnnnnnnnnnnnnnnnnnnnnnnnnnnnnnnnnnnnnnnnnnnnnnnnnnnnnnnnnnnnnnnnnnnnnnnnnnnnnnnnnnnnnnnnnnnnnnnnnnnnnnnnncagcctcatttaactattatttattgagcctccgtatgtggaagaaaatgggggtggagggggaactgatatgttaggtgctaggaaaacatgggagaataacttagagtttacttagctagatcccgcagcataactatggaggcagtaggaagatgggaagatggtgaaaaggcagattgggttcggcttatgggagggttctaagtagagagtctccgtcaaccgggccgagcc

SEQ ID NO: 155723 - DNA, 486 bp, Homo Sapiens
ttgagctcggtaccagttcgacggagactctccttcttcagaagcttcattttcagatgttcacttagaagaaggagagtctaacagtctgacaaaatctggttcaacagaatccctcaatcctagaccacagaccacaatttctccagcagatcttcatggaatgtggtatcctacggttcgaagaactcttgtctgtctctccaaattatacagatgcatagatagggcagtgttccaaggattatcacaggaagcattgtctgcctgcattcagtccttacttggagcgtcagagtctatcagcaaaaacaaggtttgatgaagtgttaggtgaaatcctgtttcctggtaaaatattgtggaatatagcatttacttataggcacagaagtttaaagctgttttggcagtaggatttgtttaacatgattgaattttgaggctctttgagagtctccgtcgaactggtaccgagctcgatga

SEQ ID NO: 155724 - DNA, 569 bp, Homo Sapiens
tatcagctggtaccagttcgacggagactctctttggctgtgtctgaatccaatatctgctctgaggcagtccaaagtccctgaaaatgaaaggtgttctcctaaagtacattcggtagcatgaatggcattgtatcctgtgactggatcccttgtatgactcagaagaggcttgaaaacaacctgtgcatcagcaagctgaacagcaggaaacccttggtttgcttcttctacacctgccacatcatcctgactggtgctatgctgagaatgtgtcccatccaaagtattttggtcactagacaagacagtgttgaaatctgaggctgagggtattgttggaagattgggtgcaacacctgtgggaagactattgtgtcctgattttgtaacaggagattcttgtaacacacttcctcgattacccacagtatttgacatccaattatagaaactcacagatgatggctcagatagcaagggatgttcagataacatatcagtggctactgtatttcctgttctcgttagggagctacttttcacagcagcactgcttctctgaggag

SEQ ID NO: 155725 - DNA, 607 bp, Homo Sapiens
gtcatcagctcggtaccagttcgacggagactctccttcccttagctttctgagctaggggaaggagaggtgtctttttgttgtgtctttgggtttgaaatagtattcttcatcctaggaaaaagggcttttagactataattgagacttgcattaaatagctgcaaaattcttgcctgagaaacgtttaaatgatgtctttaatctgaccaaattgaattgaatatttctattattggaaaaagctacgtattaatttatttttaaatagccattgctttcagatcttatctttgtttattaagtataaaaagaggaaaggaaacttttacctaaaatggaggtatttgatattcctccaggaaatgacacaggattgggcaccctttggggtttaagtgactcatagatattggtactgaaaacaaaacaaaacaaaagatcagttagaatctagctaatgatcaattatagcacagaatagaagtatttccagaaaaatgaactcatttcttaatagctatgtaggggtgaaatcacaggatttctgagatttgttaaaataattcatggaagagagtctccgtcgacactggtaccgagctca

SEQ ID NO: 155726 - DNA, 552 bp, Homo Sapiens
  misc_feature (203)..(343): n is a, c, g, or t
taatcagctcggtccagttcgacggagactctcttgcctgatctgggaaacagtcagacaagagagtgaaccatgaaacaccaggccctggcaacaaactggagcacaaagccatgacacggctgccatgggctgaggatgccaagctggcagctgagccctccctcacttagtcctcactataaccctgaccattaaggaannnnnnnnnnnnnnnnnnnnnnnnnnnnnnnnnnnnnnnnnnnnnnnnnnnnnnnnnnnnnnnnnnnnnnnnnnnnnnnnnnnnnnnnnnnnnnnnnnnnnnnnnnnnnnnnnnnnnnnnnnnnnnnnnnnnnnnnnnnnnactttatgtaaggctgctgggctcaggatacttggggcttcttcaggacaaagttactttgctaccccttttcccaaggaatcattctaaacccagccacagcttaccaagaatgtgtaagcccctctcttccgggagactatctgcagcaccaagcatcttggcccaatcctgcaagggcccaggagagtctccgtcgaactggtacc

SEQ ID NO: 155727 - DNA, 540 bp, Homo Sapiens
tcgagctcggtaccagttcgacggagactctcttgtccaagactaagttatgattcctggacaagagagtggcctaagaaactggtacattttctaactgttcaggcttctagtacttatcacccacagaccttattactctagtatacaaactcactcctctatatcatggaggttttaacatcagagaccatgtttctttcctttcattctataaatatgtatggtaacaatatgtcttggttgttccaatttatacttgttgtcttgccttaattattgataatagcttttgatagtagctctttcattaaaaagtgtcctagtttgtatgatcaattatatggccatcttataaatttgtaggtgctcaataaacatttgaatagaagaataggctgggattacaggtgtgagccaccacaactggccaggcaggtcatttttaacttctaaggactggtcatcagtcctgtgaattattatccagtcccagttgttttccctttttggggggtaggggagagtctccgtcgaact

SEQ ID NO: 155728 - DNA, 448 bp, Homo Sapiens
tcgagctcggtaccagttcgacggagactctcataccaactttgtctattgaaatgtatttttgttgtttctctgcttgacaaagttggtatgagagagcaggcttttgtaatgatgctgtaagaggctccggatttctgggcatgatgggagtacattctggacattgtgtgagttgaaaagaggcccatgctatgcagatctctgggacatctctagatgtgatgttacttttctcttcccacaggccaatggccatgtgtctcaggatcaagaggaacccgtctacctggagagcgtggccagagtacctgctgaggatgagacccaggtggggcctctgcttgggtctgtgtcttcacctttcctctttcactggtgttcttcggaacctcttagcagagtcgagtggagagtctccgtcgaactggtaccgagctcgatcaac

SEQ ID NO: 155729 - DNA, 534 bp, Homo Sapiens
  misc_feature (230)..(269): n is a, c, g, or t
ggctcggtaccagttcgacggagactctctcagagttccagatctcagtctgcattggttgagcacccagtccatgcagtccctgggaactctgagatgagtccctagtctggagtcaggcagctagagggagaaaggtgcttccacagaggttctgcggaagtcctgcccggggcttcctgaatgttgccccagggagtaaggagtgactgagctgggtctaagatgannnnnnnnnnnnnnnnnnnnnnnnnnnnnnnnnnnnnnnntgtgaatttcaattaattaaagggatgagttaagcttatccttggcactaaccacattcaagcactcagtagccaccgaaggctggtagccgccttgttgggcagctcagactctagaacatgtccaccacaacaggaagctccatggacgacagacagcgctgtccaggaggatagacttaagacagaggtgcagtgaggacactagctcagagcccacaagtgtaacagtgcaggagatctccgtcgaactggtgccgagctc

SEQ ID NO: 155730 - DNA, 456 bp, Homo Sapiens
gtatcgagctcgtaccagttcgacggagactctctggctgcatgccctatagccttgagtcgcagccagagagccagccctgcttgttgtcttggaggccagtgctactggagagattgtgtctttgcttggcctggaaccagatgtttggaggctttatttagcctctcaactctgtggaggaccaggcctgagctggccacgccttatctctagacattgttcctaccagagtgacctgacgtctttggtttggcggcttcaagctgccacactgtcagcctagcagattgtgcaggatgctgaggataaacgaacccaccaggactgcatttcacaagttctggctgggaggaagtgaggacaggcagcttcccggtgctggagacaggtaggcagcgtggcagaggctgtgggacctggaactctttagagagtctccgtcaacctggtagc

SEQ ID NO: 155731 - DNA, 438 bp, Homo Sapiens
  misc_feature (119)..(119): n is a, c, g, or t
  misc_feature (141)..(141): n is a, c, g, or t
  misc_feature (174)..(175): n is a, c, g, or t
  misc_feature (246)..(246): n is a, c, g, or t
  misc_feature (260)..(260): n is a, c, g, or t
agttcgacggagactctcctcagagccatgagccggaggaggagcatggcactgaggagagcactggggacgccgacggcgcggaagaggacgcgtcgagcaaccagagcctggacctngaggtgatgtggaggctgcttnttgcctttcttcacgtccccagggtcatcttgnngtcctcctgggggatgtaacaggtggtggaggatttgggccgaaagaagtcctcactggtttggggttcanggctgctggcgtgnggtctagcccattcccggcgacatccctggcatgggcgtacctggtggtgcccctctgagccctccccgctgtgcttgccccacagacagtcagtcggatgcggagactgcagccgccgcgggcgaagtgctacatcacctcacgggacagagagtctccgttaactggccgagctga

SEQ ID NO: 155732 - DNA, 574 bp, Homo Sapiens
taatcgagctcggtaccagttcgacggagactctcgtcattgtcctattatagcacaatgacgagagtgaattaatttttagttagcatctacaggtgcaaagctgaagcagagttcccaccatcatactgtgagctccctcgaaggctatatgtaccctatcttcccatccccattgctctcccacagaaggaaggctgcgttactaatgacagatcagcatcagtctgtcagcctcagtcttagcatttagcacctggctagtgcaaaaagagctcaggaaacagcccagccaggagacaggccctcaggagagagaactgcccaggtctgtggcaggcatgagggcagtggcattgccaccaaatgaggaatccgttattggaactccaacctgagaggtagtgagcttggagggtttctttgtttgtctgtttgtgtgtttgtttgtttgagaattgcacacaattacgacagtcatttttcccagaagtcctctcttagagcctgtgctcattcatggtaagttgacgccctgctctcagtgacacccttcagagagagcgagcctggg

SEQ ID NO: 155733 - DNA, 517 bp, Homo Sapiens
ctcatcgagctcggtaccagtttcgacggagactctctaagaccaagtctgtcattaaagatagccttggtcttagagagttgtggtaggtgttgtgagtaaaagtttctgatatttcaaaaataagaaaattgggtatatttgtagttctttgttctctttattcactgaagtgagtacctgttgtctcttttcctgtatcctgtctacgttggctttggtgatgtgggttgtgtgctctataggaaatacacattagcagtgactattacacactggtgaaatactcaggagtagtacaagaatttctattggttgtcatgtgtaaaaatacagtgtttccctccataatgttttatggatgaagcaggcttttgaataatagtacattcttagtccaaatgaaagaaaaagagaactgaggattaaaagggaatgagaacacttgggtaagttccagagaggattctacacattcgggttctgagagtctccgtcgaactggtaccgagctcga

SEQ ID NO: 155734 - DNA, 577 bp, Homo Sapiens
agttcgacggagactctcatatacaccctcaccatactaagaacttgacgaaccaaacaatatcacagctttaaaatttgcaggtaacttaccaaatgctgtttaggggaaaggtgagatttgaacccaggcagtcaggatttgatgttactctgttctgtgctgtgccaactgtgtgagggtgtatatgagagtgtgtgtgtgtatgccagtggtgccagcccatgtcacaggcttatttgtttattccataatctatactgtgtgccaggcaccaggccaggctctagtggtgaaaagagagacggacagatggagttgtggagttctcagaccaatgagagattgtcctaggtgccaggaggagaaaagagaggagacagactaaactgaggtgaagcagtgtggaaggccttgctgaggaagtagcatttacaccaagtcctgaagggatcctgtcggtaccgagagcctgggaacagtgtttccagcagcaggaacagcatgtgcaaaggccctgaggtcagcacaagttttcttgtttagagagtctccgtcgaactggtaccgagctcga

SEQ ID NO: 155735 - DNA, 593 bp, Homo Sapiens
agttcgcggagactctctgtatcccagcattggtcaggctctttagtgggatacagagaggtgtgaggcacagccctgccctccaggcatggacagtctactcaaggagacaagatcctcaaataacctaaagaacaagagcgccaagcctcctgaaaccagggctgtaggtacacttcccagagggagccaggtctagacctgctagggttgaggtgggtaaggcggaattgtgaacattactgggaggcaacaaagccttgtgctctctacatagcctcttttcacagacaaattttgcttccaagattgtaggtcccattattttttagggtggatatatttgtccttttccaaggtatgggatcaggaggggaggtgctgaaagtggacaagagcctggaaagatagtatgatgggggcgggagactctgtctgcttcagaatccttacctgcccctgctcactcgtctcctgtcagcagaagtgataccccacccaatgcagatgcgacagaagattgtacctggtttcaggttggagccagcggggtaaggagaaaggaagtgagaaatgagagtctccgtcacacc

SEQ ID NO: 155736 - DNA, 582 bp, Homo Sapiens
agttcgacggagactctcctagtagtaggggagcaactaccccctactagggagagaagggtatgggggctgtaccaaccacttggcaggattgccgaggaggaggatgagggatggaccgcttgcgggggtagggggactatgccctcctaagggaaaaggggacatggaggctgtgctatgcgagctggacacctttggggaggagagtggctgtgaagattggtctgctcacctttcacatcttcaagggtgaggagctgaacgtttcaaccctgccatctacctggcatagggctctgggcaggtgggctctgccacttgtgggagaggcattgccacaccactggcaggtgagcaggctacagctgccagaaaggggcttgtaggaagacacaaggctgtaccctatctctccagggggcaggctacatcacctggttccccgacgggcagggcgaagtaggctgtgccacggggattgtgcacagggtcatttcacacctggaggagccagttgtatctcgttgggcaaggaacttcacggagagtctccgtcgaagctggtaccgagctcgatat

SEQ ID NO: 155737 - DNA, 544 bp, Homo Sapiens
ttgcacagtatctaaatgcacacgctttgagtcagagacacatctgggttacccaggctctaccccttactagtagtcatctagactaagtaccttaacctcactttcctcagttgtattagggggtgataacagtaccaacctcatagggctagtgtgatgcttgcatagactactaaagtggtacagtaaggacttagcatgtagtaagtgctcatacaaaatgttagctagcactgactactgctataataggcccattccaaagttaaaacagctccaactatcaggaaggtcaaaaccagctgtctgcttcctccctctcatgaatcctagtctgccctacagaatttcaccagtctctgagttgctgtcaacagggagggtggatggggccatggcccacctgagtctccttgttaccaagcagaacatgcccagcttcctcgacggttcctcaggtggcctccatgatcaatgtgctctcccctgatgtgctcctgcctgccaggggagagtctccgtcaactgggcgagctgatga

SEQ ID NO: 155738 - DNA, 177 bp, Homo Sapiens
gggttgacttcactgtttttgtcaatggggaagtctcttcctggaagcttttggcatatttttccctcccgctaccaaggtctcctcccagctgcctttaagataacagtgaagttgaccgccacacttctttggttcacaccaaggagatctccgtcgaactggtaccgagctcga

SEQ ID NO: 155739 - DNA, 512 bp, Homo Sapiens
ccagttcgacggagactctccagtacagtttccgctgtatatgccccgagggaccccatcaccccagctgctactcacaggtgaacgaatgcctgagcaatccctgcatccatggaaactgtactggaggtctcagtggatataagtgtctctgtgatgcaggctgggttggcatcaactgtgaagtggacaaaaatgaatgcctttcgaatccatgccagaatggaggaacttgtgacaatctggtgaatggatacaggtgtacttgcaagaagggctttaaaggctataactgccaggtgaatattgatgaatgtgcctcaaatccatgcctgaaccaaggaacctgctttgatgacataagtggctacacttgccactgtgtgctgccatacacaggcaagaattgtcagacagtattggctccctgttccccaaacccttgtgagaatgctgctgtttcaagagtcaccaaattttgagagtctccgtctaactggtaccgagctcga

SEQ ID NO: 155740 - DNA, 285 bp, Homo Sapiens
taaacaacatcttgagagacagataggcactcggagtcctactgtggagtatattagtgctcatcctcatatcctgtttatgctcctcaaaggatatgaagccccacagattgccttacgttgtgggattatgctgagagaatgtattcgacatgaaccacttgccaaaatcatcctcttttctaatcaattcagagatttctttaagtacgtggagttgtcaacatttgatattgcttcagatgcctttgtctactttcaagggatttactaagccacgaccat

SEQ ID NO: 155741 - DNA, 189 bp, Homo Sapiens
acaactatcgcacattactgaaataacttaatttccatttctaacacaaatgtagtaaaagaaaaacagaatatgcttaactctctgcatctatttgtgctctcaacaatacacctaggtatttgggaaggaggaaggagctcttacttaccatatatatgaatagcacagtagatgcagagagtctcc

SEQ ID NO: 155742 - DNA, 343 bp, Homo Sapiens
ttatttcccctttttctgctttgaaattccataacaattgctgaatagacaagtaggcattaagattagcagtcacccacatgagtacttattttatttctgctatgtggaaggcactgtgtttggttccagaaatataaagatatgtaagatttcttgtcctcagaaagtaaaatgccaagtaaatcattccataaaaatagaacagtaaaacattgctgccattctgatgatctgttttatttggagagttatgctatgagtataatctgtagactgtgactttgttgatcagctctcctgttttaaatatcgagagtctccgtcgaactggtaccgagcc

SEQ ID NO: 155743 - DNA, 581 bp, Homo Sapiens
cgtcgtattacatcgcggtcgttgacgtggcgaaagatccgtggccgcaagcaagcgagaacaagactccggttgacactgagcacatagctacatactgttcaaagctgtgcaacacagcagagaaacacaggtgctccttacacaggtaagtgataaagtcagcagttgagcgcagaagcctttgtgtctacggttacccttgaaacatccctcagatggcttacatgccatctgcagacatgctgtcgtcctgatggcacagctgttgttctgccatttaaacagatggtagtttatttggacgagcaccagatgaagtagatagcttgtactcaggattacactgtaccagaaacacatacctggtacaccagaatcccgtataggaggggcacgtggggctgagacgggctgagggaccagcagatgagtctgcaccacagttggcagtgctgcctcctcctcttagagtgcacacaatggaatgcaagtgaggtcattgtgcctggtcacaactgcaccatgatgccagagaggcgtcctctgagacacagagagtctccgtcaacggtaccgac

SEQ ID NO: 155744 - DNA, 489 bp, Homo Sapiens
ttatcgagctcggcccagttacggagactctcagcagacagctgagtagatgggccctgccttggtctcagacgaggccgcgccccacccacaggtggctgcacccagaaggaagcctggcagggctcctgggctgccgcagctctccgttcctctatctgaaaatgggcccagcagtctgcagcttccttaagaggggtcagtcagtgggacagctttcctggtggcttcaggccaaagatggccctgcaaagtaggggttccaactggatttcctgagggatgggggactggggcttggggctcccaggtaacactaggtgtcatggaagagctcctaggaccagcagccccacgtctcactgccccctcagtgaacagcttagactctcgtatttggcaaataaaacagaataaatgttacgcaaaagaggcaagtccagggccaaatacgagagtctccgtcgaaactggtaccgagctcgatag

SEQ ID NO: 155745 - DNA, 233 bp, Homo Sapiens
aaacacaaatattgttacaggttgaattgtgtcctgcctcccccagaatgtcaaagttctaacctccagtagttatgaatgtgaccttctttggatatagggtctttgcagatgtagacaagttaagatgaagttatgacgtgatggtgggccctaatccaatgtgactggtatccctataaggccgacaatgccatatgaagagagtctccgtcgaactggtaccgagctcc

SEQ ID NO: 155746 - DNA, 471 bp, Homo Sapiens
agtttcgacggacactctcttttttactcctggctggtctcgatctcctgggtctcacgtcagttctcctccctcaggcttgtctgcctgggttacgggctgatctatacgcaggcctgtgctatctatttctaactgctattcttggcagtctgcctcttgagacctctgaataatattttcttatgacaaattttcaacatacccccaaacagagaacctgaattaaatgaacccacagtcggccaaccatgcatttaacatgaacattgtgcccatcttgaagtatttacccctgagtactctaccagtgatgttccgcatgtgattttcgagcgagtgcttagttatcatatcatttcacttgtagatttcttcgctatgcatctataacatcaagctcgattcaaatagtattagaccttggaaacatgaaggataatctcttcatcctatttatgagctactccg

SEQ ID NO: 155747 - DNA, 479 bp, Homo Sapiens
  misc_feature (399)..(407): n is a, c, g, or t
agtcacggagactctcctaggaagcatgctctgtccccaagaatgcttcctaggggagtctttgggatgctgaaaatggtgataatcatatcaacaattgctcatgttgattgagtacctagtgtgtaccaggcattgtactaagtacttgataactcatttaatcctcctaacaaccgtttgacctatgtgctgctattttacagataaggaaactgaggcactgggaagttaatgaactgcctcaaagttatgtagcttgtaagtggctgagctgggatttgaacctctacagtgtggctccttaatccaggttcttcattctcatagtattgtctctaatggatctgtatgggctcataaatagggtgttcaaggaaccttaactgtagttttggnnnnnnnnnaaacacaaatattgttacaggttgaattgtgtcctgcctcccccagaatgtcaagttctaacctccagtagt

SEQ ID NO: 155748 - DNA, 203 bp, Homo Sapiens
agccggtccactagatcacggttggctcctcatcgctcaggtctcagcttaaatgtcacctcctccaggaggcccttcctgactgcctcccccacttattctataacaacgatgttaccccacataacacgactaagtgttcaagctaatgtgccaggacctcttccgagcccaatacatacgttatctaacctagtcctgaa

SEQ ID NO: 155749 - DNA, 417 bp, Homo Sapiens
agttcacggagactctctgctcacaaccatcctgtgtctgtacagtgcagaggtctggaggtgagcagagagacccaaggtgctcatggaggacttgtcaggtaggaggtgtgaacattaggaccatgtcaagcaggggagaagaaacaagggaagcatgtgacaatgagatattctaaggcaggtggaacctctgggacccccctcagtatataaggggccaccgatttcacaaagaactttttaacagaatgaattgttcaataatagaacaacagactacacaggatgttgcttcaagggtttctccttggagaacgttagggaggagctagaagtccatggatctgatgtcgattcaccatagaccatgatcacgcacagttccaaacacatatgcgtcacgtttgattctag

SEQ ID NO: 155750 - DNA, 564 bp, Homo Sapiens
ttggaaaaccgctggggtggtggcattcattgcccatggaattctaagtgttcgagagtgctatatcttggacttagagggtcagaggctgatgaagcttgtgaagaagcaggtgtggggggtttatcccctgcctcacctccacctttcacaacagtcagttctctgtgcttagaaatcagcaatgtgctgtgcagcagctgtctgggaagaacattgaacaggaatgtagaaacagctcaggcccttatgctgggtgggaatggaatcacttcctttagatggccattttgtgaatttttacagaggaagttgaatgagattgagaaagcttgggtccccagaggtggctgggggccgggggagagcttcctctttctaataaacaggagcttctgacagggagtgacatagcattgctttccttctgtgatagcgtcggtttctgaaaacaggaaaatctttactcctaatgtgaaaattgaaagcttgtcctttgtaggaattgtcgtctgacctgtttgaacagcatggacgagtctgcgtcaaactgggccgagctcc

SEQ ID NO: 155751 - DNA, 317 bp, Homo Sapiens
taaaagaaaatgtaaataagcaagcatctttaaaataaacaggataatatacacaataacagaaacacttctgttgttaatcggtcttccctttccctttggcaactaatgaataaatacaacagtctttatctttggctttccctttctagactgtagaatatatctccatagaattaatccattcattactcagaaatggtaaaatacaatttaagttagacctttctttcctgagactctcagcaatctcagtggaatactggtgttcctaaatctctccaggcagtgtgactatttgcctggagagtctcctg

SEQ ID NO: 155752 - DNA, 492 bp, Homo Sapiens
actagtccacggttggctggtactggtgtggagtgaagcagggccacttctatggagagactgcagccgtctatgtggcagttgaagagaggaaggcagcggggtcccgcgatgtcagcctagcgaaggcagacgctgctcctgatgagaaggtgctagactctggttttcgggagattgagaacaaagccattcaggatcccaggctttttgcagaggaaaaggcggtggcagatacaagagatcaagccgatgggagcagagcatctgtggattccggcagctctgaggaacaaggtggaagctccagagcgctggtctccaccctggtgcccctgggcctggtgctggcagtgggagccgtggctgtgggggtggccagagcccggcacaggaagaacgtcgaccgagtttcaatcagaagctacaggacagacattagcatgtcagacttcgagaactccagggaatttggagcaaccgtggactagt

SEQ ID NO: 155753 - DNA, 396 bp, Homo Sapiens
ctcaccttgaagtacttgtcgattttggataagtttattcttttcttggcatccaacttatagatgttactgacactcccatccatcaggtacagaccgaatcccatgacctgaaaagccacaaaatgaatgatgcgacaaagctcagaactgagaatttcactacccataaggacttacactgttacagctgatgactttgaaggcacaatttgaaatagatcacaaagatctatctttaggctgcttgtctggtgcttgaaatgcatcattttatcctcagtgaaactgggatacaaagcggggctgggcttccaggtcagtcgctaaaagcggaaaaaacaaatcctctcccctagcctaacccaagcggtaggggagagtctccgtcgaact

SEQ ID NO: 155754 - DNA, 632 bp, Homo Sapiens
aggctccagcttaacgatatttggaggtcagcacggtgctcacgtgtcgacggaacttgtacagggaggcatgcaccgcagtggtgaatacacgtcgaccaggctccagcttaacgatatttggaggtcagcacggtgctcacgtgtcgacggaacttgtccagggaggcatgcaccgcagtggtgaatacacgtcgaccaggctccagcttaacgatatttggaggtcagcacggtgctcacgtgtcgacggaacttgtacagggaggcatgcaccgcagtggtgaatacacgtcgaccaggctccagcttaacgatatttggaggtcagcacggtgctcacgtgtcgacggaacttgtccagggaggcatgcaccgcagtggtgaatacacgtcgagctggatccagcttaacgatatttggaggtcagcacggtgctcacgtgtcgacggaacttgtacagggaggcatgcaccgcagtggtgaatacacgtcgaccaggctccagcttaacgatatttggaggtcagcacggtgctcacgtgtcgacggaacttgtccagggagcgcatgcagcgcagtggtgcatacacgtcgtccggcagccattcaagcatgctcgggtactgga

SEQ ID NO: 155755 - DNA, 334 bp, Homo Sapiens
tctgttcagaggatcccgagcatgaccaagcatgcatgcgatgcctgcgaggtcgacgtgtattcaccacgtgcggtgcatgcctccctgtacaagttccgtcgacacgtgagcaccgtgctgacctccaaatatcgttaagctggagcctggtcgactcttgagcgatcctccagtaccctagcttgctttactggcttgtcgcgtcgacgtgttttctagctgctgggtctgcgtgccttccctgtgcttagttccggctagacgtgagcaccgtgttgagctccaaatatcgtttagctggagcctggtcgacgtgtattcaccactgcgt

SEQ ID NO: 155756 - DNA, 592 bp, Homo Sapiens
ctgtgctttgggacggcgggtggaggggtcgggaggaacggggggcgggaaagatccgccgggccgccgacacggccggacccgccgccgggttgaatcctccgggcggactgcgcggaccccacccgtttacctcttaacggtttcacgccctcttgaactctctcttcaaagttcttttcaactttcccttacggtacttgttgactatcggtctcgtgccggtatttagccttagatggagtttaccacccgctttgggctgcattcccaagcaacccgactccgggaagacccgggcccggcgcgccgggggccgctaccggcctcacaccgtccacgggctgggcctcgatcagaaggacttgggccccccacgagcggcgccggggagcgggtcttccgtacgccacatgtcccgcgccccgccgcggggcggggattcggcgctgggctcttccctgttcactcgccgttactgagggaatcctggttagtttcttctcctccgctgactaatatgcttaaattcagcgggtcgccacgtctgatctgagtcgcgcggcgttgatgcaatcggtaccgagctcga

SEQ ID NO: 155757 - DNA, 289 bp, Homo Sapiens
ggcactctagagcatccgttcgcgggattcctgccgtgcacggtgtaggcggtatcggcccacgggcgcgggccgggtcttcccggagtcgggttgcttgggaatgcagcccaaagcgggtggtaaactccatctaaggctaaataccggcacgagaccgatagtcaacaagtaccgtaggggaaagttgaaaagaactttgaagagagagttcaagagggcgtgaaaccgttaagaggtaaacgggtggggtccgcgcagtcctgcccggaggaatcttggcggccga

SEQ ID NO: 155758 - DNA, 153 bp, Homo Sapiens
actgcatccaacgccgctgactgcatccaacgccgctgactgcatccaacgccgctgactgcatccaacgccgctgactgcatccaacgccgctgactgcatccaacgccgctgactgcatccaactccgcctccgagcgcgttgatgcagtc

SEQ ID NO: 155759 - DNA, 447 bp, Homo Sapiens
ctttcttcccttctcctgctttagacaacagcccggagacgcgggctaaagtgaagtttgtcctggacacttctaagtattggtacaagcctgagatctccaggtagcaggccatcgcgctcctcaaggaccaggagccgggggccttcatcatccgcgacagtcactccttccgaggcgcgtacgggctggccatgaaggtgtcttcgccacctccaaccatcatgcagcagaataaaaaaggagacatgacccatgagctggtcaggcattttctgatagagactggccccagaggagtcaagctcaagggctgccccaatgagccaaacttcggatcgctgtctgccctggtctaccagcactccatcatcccattggccctgccttgcaagctggtcattccaaaccgagaccccacagatgaatcgaaagatagctccggcc

SEQ ID NO: 155760 - DNA, 376 bp, Homo Sapiens
cctcatccgcttcttcgtcaatatcttctaatccttcctcctcttcatcatcatcatcatcttcttcccttctcctgctttagacaacagcccggagacgcgggctaaagtgaagtttgtccaggacacttctaagtattggtacaagcctgagatctccagggagcagggtgagtgctgggctctgtggtgcatcagaggccatagctggctgaggcctgctgtgtcttccctgggcaaggaacagaggcaaattcagtcctctttgtagcagggggtcatcacagagggggctggggttgaagctggacagtaggaagcacttcctgcagtgaagtgtgggaacacagaagcagtagttgtagacacctctgaa

SEQ ID NO: 155761 - DNA, 467 bp, Homo Sapiens
agtcggtaccaattcatccagcgtacaactgtggtttgcttttattctctttatacattaatctaacacagttgtacgcagttgagtttataatataatagagttttgtgtcctgctttttaatttacttttcatgagcatcgttccatgctactagaagttctttgttatcattttaatggctctttgtcagtatctggtaccatactatgccataaatctcactggttgcagttgaataaagaagtttatgaaggctcccccctactctggaagaggcttcctcacagcacactcatgtccttaggtatcactgggggcaggtagcatcgatctccttgtcccatttcttcccactcctcttaaaaacacagagtatagtttttctgtatctgtaccatcagatgccactgagatctggccatgatgttccgttacgctggaatggaattggggtaccgagctcg

SEQ ID NO: 155762 - DNA, 535 bp, Homo Sapiens
gaaggctgctgcggggagtgcataggtggcagtggtcccaggggcccagtcatctgggtgccagggggcagagcttgaggaggtgaagacacatggttgggctggctcactgagggccctccaaaactctgtccaggcaggagtggaccagtcatcgaaggcagccgaggaccccctgaagctgggggtgtgaagctggaggcctgtgatggggcagatcgctggggagtctggatcccaggatgaccttgggcctggctaaggggaggagcctggccctgaggataggagccatacagaccagagttaggaagaggactgggagatgaatcaggaaggtgccggggcttgtaggctcagatgaggaatttgaggactcttggtgctgagggaagaacgtgaaggagatgattgatcagggctgacttctccggagaaccactgggctggtatggaggcagcatgagattccgagtggtcaactcagaggcgagaatcagcaaccccagcatcaacttcagttcgttgagagaag

SEQ ID NO: 155763 - DNA, 674 bp, Homo Sapiens
tctccccagcccgggacatctggtcttgacctttctggcctggactctctggcccgggtacaactctggctgggcgtccattccccacgaatgctcagctacacctatgggcccggcccagcaagacagtcccaagataaacattcacgatcaaacatcagtggccactgccacaacaggatgcttggccaagcacgcacgccacagcagactgggctgcttcaatcctcaccctccccaggacgcctcccaacacattatcccagggctcaccctcgtgtggtggagtgttaagctgctctgcattaaccatgtgcacctcatccaccagaccttgccctggaaagagagggctgccaccatctactgccacctagcagtgggaagctgacaaccttctctctggcagcaccagagtacaattagtgagaaggccccccagtgaaaaccctaatggctacacttcaaggttcaggagggggcaccttctttgcactgctcactccctatggaagggtcggcactctgagcaaccacctcactgggagaagaattgggccatggcccaggaggcttagaaacagtgagttactgactagagacgggcaagacctccccaattaggaatccaatcagagattacactgatgatgcacgtggatgggtggcatcga

SEQ ID NO: 155764 - DNA, 496 bp, Homo Sapiens
gtcatggccagccaggcccgacagagcagtcctggattaggtttgataaatagcatggtcaaaagcccaatgacacaggcaggcttgacttctcccaacatggggatgggcactagtggaccaaatcagggtcctacgcagtcaacaggtatgatgaacggtccagtgaatcagcctgccatgggaatgaacacagggatgaatgcgggcatgaatcctggaatgttggctgcaggcaatggacaagggataagtgcctaatcaagtcatgaacggttcaattggagcaggccgagggcgacagaatatgcagtacccaaacccaggcatgggaagtgctggcaacttactgactgagcctcttcagcagggctctccccagatgggaggacaaacaggattgagaggcccccagcctcttaagatgggaatgatgaacaaccccaatccttatggttcaccatatactcagatcctgacagcagacaggtgtcac

SEQ ID NO: 155765 - DNA, 580 bp, Homo Sapiens
gcaatgccagcaatctgtcactgagcagtctcttctttcagactcacggctcagtcctcctgtgcaagttcagggatgtctccatcactgtttctctacttgatcttagccaaaagtccaagaagcaatctatcagtattttttccaacggaatgactgtcaggtgctggggacagaaagctatacaacagatgacccttgtctttaaggggatgcaataaaacccgaattctgatgactgcagccaggaagtggaaatataatagggagagtctgaagcaagtggcaggattttaaagaggaagggatcctccccagtcagggaaaggcttcctggaagaggagcaggcgactcagaacagtgcgatggcccgattgcaaatcacaggtggcttgattcgaagcacatgctccacagactccctgcacatctcatgaaagacaagactgcaaagatcgggggcacacagaagggtctcacaggctagagttcatcctgggctgctgttccagggttggagaaaggaagccacaggacccaagtagagtcccgtgcatcggtaccgagctcgatcgacat

SEQ ID NO: 155766 - DNA, 434 bp, Homo Sapiens
tcgaggcagcacgcccggcctagatgcagattaacttcaactgggccctctgtgtcacttgataagtctcttcttccattgagtcagctccctcttccacttctcaaaggagttatacctgaccttcagatacctactttatcacaacagcattaaccactgcttagtgtgtatcacctagatgtcgcatgcttagttcaaattcaacatatccaaacactaaacttctatcttccatctctaaacgtctcctcctgtccccagccagacaatggatctctccctctctgcactctgtccctatccaatcactcagccctgtactttttacctcctaaatatctctggcatccactgctgcctttccatttcacactgccactatcatctcttaactggactataacaggagatgatagtggcatcgataaaca

SEQ ID NO: 155767 - DNA, 466 bp, Homo Sapiens
tgcctgaaacctagagtgtgggtttttctcacaaaccattatagtcatcaggtatgaattctcctaagacaaggaaaactacactggcacttaccattataaggaaaatgacaaagaaggaaagaaacactgattctgaagcattgtatttaatgccatgtgcttctatataaagctggtttcaagttgttgaccattctttctgaatcaaataaagaatacatattcttatctggtttaaaaagcacaagatgcttcgaagggggtaaaaagtccctccccaaaaaagattataatctggtggaaaacagagacaaatatactaaaaactaacctacatgccaaattcaccccaattatgttccagggaagacagttaagcaaatgtcacttaaagatactgacttagctggtttacagggaatcactgctgtaccatctggaaagcagatgagagccaccaacg

SEQ ID NO: 155768 - DNA, 566 bp, Homo Sapiens
cgttgccacaggcaactcagggagagtccttctgactctcacatgttgtgtttccctggcttcacatgactccacttctccactagtaaagaagctggtgtcaatatggaagctatggagcagagagagaacaagatattccaaactctaagtgattcttctttgacatcgatagaatatttgagtctggcttgggagaagaatgagaggcttacaacttgattacacgggaagcatgtgatgtagagagagcaatcaaggagtgtggctacagtaaggctagatgtaagagggagagtcggactgtagtctctcagtgtgtttgaagagaggggttggctggcttcttctcctggagaagcagatatctggtccttgtttactgatacttctgtggatcagcttctaccttcagctcagtgactgggcctgaggcttagatctatgtcactgggtgggatccagaaggctagaacctaagggggagatacgattgtgcctaatacacaaataaagatggccacaggaacctcagacagacacagttgcttcttgtccaaggtgac

SEQ ID NO: 155769 - DNA, 402 bp, Homo Sapiens
cattttaatgtctgtggagtctatagtgaaatcccctttcattcctgttttagttcattttctattgctatagcaaaatacccgagagttggtagtttataaaggaaaaagatttatttggtttatggttctggaggctgagaaatctaagatgggttgccgcatgtggtgagggctttgtgctgtgtcataacatggcagagaagtgcaaggggaagcacatgtttgcaaggagaggccaaacatgagaggcatcctcactttataacaacctactcttgtgggttcacttctccaagagtgagaactcctttcagaacgacattaatccctcttaacaacctaatcacctcttaaaggtaccacctctcaacactgctacattgcagaccaagcttcaac

SEQ ID NO: 155770 - DNA, 291 bp, Homo Sapiens
gtaatcgatgccactagattcatattttgttaccaacatttatccttatcaaatatgaatctagtggctctttttaacagttgcataatatcctatggtatcgttgtaccatagtttattcaattattccccagctgatataccttcaagagcattctaggtttttaccattcctaacaacactgcagttaaattcttgtacatatattcatgtgtatctactttgatatttgaaggatagattcctaaaaacggagtcagtgactcatgcatgatgtcagatgatactcc

SEQ ID NO: 155771 - DNA, 465 bp, Homo Sapiens
tgtttatcgatgccactgcactcagccagaaaagattatttaaaattaattgaatgcatgcaactgcagcatcttttgaaatcaaaagcaaattaatatctgaggttttctataattaactgtcaaggcccaatacttctgtttttattatttttgttttctacttttctgaggttatcgataaatgagataacatgattaaataatgctttatctccacttctcgatggcagtcagctttataggaaatatcttcctataaactaaaataaattacagaaaaccactctgaagtttactaaccatgacactgaattatcctttggattcccgcaacctgttccagcgtgtctatgttctgggtatagttgcgaagtagttttccttccttatctgacaaggctatgaatttgtgacagagagatggctggaatgtccagatatatttcctgatcaagcaaggcc

SEQ ID NO: 155772 - DNA, 603 bp, Homo Sapiens
ccgacggtgttatcgatgcactctctagtcctagagagtggcttaagcgaataccataaggcctgtgtgtagggagctgccagggagcaagtttagggccacagtcctggactgctctcagttttctgtgcatttcacccctttgaaagtttctccctatatccctgtgcacgtgcctttctcttgatgggcacacacagtgagtaccagtgaagaagggcaagccaatgggctcctttcccagtgacactgacacctagccttgcaggtaaggaaacgacgtgctatgagaacattcgacctggaacatgcagtggggcctccctccttctcacggatcccagagaaccatctgtaggggaggtacagggggttgagttgtgttcccccgaaattcatgtccacctgaaacccctgaatgtgaccttatttggaatgatgacagagatgaggtcatgctggattagacttgggccgtcaggccatgaccgggctcgagcgaagaagaggagacggaccacagaccaacagggacaaacccacagggactgacatgaagacgggagcccgagccaacgcgacgccaccccaagaacctcagct

SEQ ID NO: 155773 - DNA, 565 bp, Homo Sapiens
acccctccgcgtacgtgttatcctcagcaccttattctttactttagattctctgccacttattgagtgaaccttgagcaagtcatttggcttttctatgcctcaagtttccgtacatgtaaagttacgaaggcacctacctcacagagctgtattgtgaggattaaattatgactgacacaagtaaaagcacctagaacagtgtcctggcagatagcatacactgcattaaatgccattcagagtttcattattactagcactacttaggacatcatacaccattactactgatttcacacatacatcttctaccccacctcaagaaaagttgcctgaagacaagtattggcatccagagggagtaaggtgcatattagtacccttccttgccctcctccctcttcctaccccttctgcactctccacccgtatcccaaatacacacactgaggagtactgctatgatgggttaggtttacagacattttcttggccagtgcactgagctgaaggttcaaggacatgtaggcatggtcgttatgggatacacgtcgcgaggacg

SEQ ID NO: 155774 - DNA, 452 bp, Homo Sapiens
cgaacgtgttatccccacatgatgtagcacttagttctgtagtgagaagcagcctggcgtcctggaagatccttggagcaggaatcagcacaccctgactgcactctggccctattccctcaattaatgaaactcaaccacagctttcccctctggagactaaggaatcaatcgtctctgacctgactacctgaatgtgtgctgaggatcaaatatgataaccctaagaagccgcacacacaaagggactgttatcatttcaacctgccaactgagcttcacactccatggtctttccttctagaaggtcatctgcattgaaggcaaagaggcaagcatcagctctgtgttccctgcatccccacacccagtgccctgcagaggaggggcatacatggatatgcttgtaaatggatgaatgtcagccccaaccccacggagccctacgagca

SEQ ID NO: 155775 - DNA, 224 bp, Homo Sapiens
cctttctcccttcacacgcttccctttttgttctggtgcaatataccaccaatatgctccatctatggctatagaaatttagaaatcatcctctgaatctaggacatacaaggatcaaaggataaattaaaagagggactaaagaccacagttgaggaggaaagacaactggttgaggaggctctggagactgataggataaatacaacgccaggttttcgcag

SEQ ID NO: 155776 - DNA, 601 bp, Homo Sapiens
cgaacgtgtatccaacctgtctctcgccatccctcctggccaggtcatggcaacctgctgatcactcagtgcacttcctagtgccaaccccagtgagaaacaaactccccagatttctgtctcccacctttttaagaaacacgaaggaaaaggaggagccaggcccaggtgcaggctggtgaacgggattagagcgattgatatctgccaagctggtgctaatcttccttcccacctcttcccctccaaaatcaacaaacaactttcctctctctgccttgttctctgacctttgttccctccacacaggtctcagagctcagcatcctagaacagtttgagcaagatgtcagtcctgggggtgccaacctcacccacctccacttgtccaaagttggtgacccagaggacaggtgcaaccctaaatggtccaaccaccacagcctgtcctgtggccatctggggcccctctcagggtctggctgaggctcatctcagacccacataggaccaatatcagcacctgcctcatgctcatgtcacagcccactgggaccaaccctcagaccctatatgatacacgttcgcgaggtacgcatga

SEQ ID NO: 155777 - DNA, 793 bp, Homo Sapiens
ttcgacgacatgccaggcactgacactgtagcagagcagcattgtcatatccaacgtaaacaagtacacggcaacatcaggccctgagagatgctgcaggaagataaatgaagggtctttagttcacttccctaaaactgtggttgccaattcggccaatgagctaattctccctccttgtcccatttttttagtcttttctctcttggcttctgggtcccaccatgtgctcttggttgccctcccacctctgtgcccactcctccgtctccttccctgggcttctctcttccatcctttcttctcccttaatgctttctccctgagcaggatttctcatctaccagtggctttgtctgccacctgtgtacccatgacaccaggattcctggttctagcccgcttttctcctgagtgacagtcctgacttatatttccaactacctgaatgcatttctaccatgtcacctatttctaaaaccaaatgaacgtgtttcccgtcatccgttcaaacatgcgtacttctgcgttctcgtgtcccagtgcagatcacggcacaagaatcatgtgccctcttccccagcccatcatcaagtcctggttgcttctgctgtccggaagctcgtcatggctcctctcccttctgtccacccctctgtatcccaactcatttagagaccctcatcatttctcaacaggactgctccaatagcttccccacgtttgcactcctgctatcgtccatccttctgactgatggaatggttttcttctagatgcagatcatgcctac

SEQ ID NO: 155778 - DNA, 551 bp, Homo Sapiens
tgtgtatcgagagaaccaggcagagaggagagaaatacatgaatgcccaccaacaaagaaaatggttgagttataccagttggctaagaaagattttagagagggattattgaatgaaaatggcaaaatggaaggaagcatattaaaatctactttggaaagataaataaccaccaaagagaggaatatgggaaaggaggaaagcaagcaaacagaaagactatattttaaaaaaatgcaaacatgatataattatacacatctttatgtcaaattatatgggtgtgtatgtctttatgtggcatacatagcctctggggagtggattcccaaatcacctataaccacccaatgggttcttcctgcgtgctgcccagatagggccgatttatcaagacagaggaattgcaatagacgaagagtttaatatacatagagtcagctaaatggaagactggtgatttactgtcacttgaatcagcctccccttaaatttgaaggctagagtttggttatttttctgtttgttgtttgagatacggtctcagtgt

SEQ ID NO: 155779 - DNA, 537 bp, Homo Sapiens
aacgtgttacccatcgtgaaagtcgtcgtctcgcaggatggataaatgcgttttctcttccttgccgcaaggcaaatggaagctagtaatttctagtcccatagcagtgaatacaaaatcaaaagaggctaactcaatgcagtgacagcttcaaaaggaattgtttttgaagattcttttttcccatagtgctggtttatttagcactgaaggtcatctgctaacccagctttcagcagcctccaggaaaacctcagtgtagcttgtgtcatgtattaacagtcccccaatttcacttatattttgctaagcagatacacatttgccatgacagcttaaagtgtcggtgcttttgaatggagactattttatctcgatgtatctgtaactggagggtcctcatgctcaggactggtaactcagattttgttttgaaggaactaatttttaaaaagatctggtaactcagattttgtttgaaaggaactaatttaaaaaaaactttaatatgatcttctgataatttggatacacgtt

SEQ ID NO: 155780 - DNA, 547 bp, Homo Sapiens
ctcgcgaacgtgttatcctgcatgagctccccagacgtaagctgaactctcttgctgcctctccctcccttgcaactgtcatttttttaacactgaacgttttgtttttctaaagcaaccttatatgaagtctgcatatataaaggtgaaagcagtattttacagctataaacagcaatccaaaagcacgacatttacctattataaagtcaatcagtgaggataatagggctgttggaataatcctgacaaagtgaaaagtagatgacagatcatggtgatagtctcatgtcagcttcagaccccaggttatgcctatattttgtttggttttgtgattgtgaaaaaaccctagttactgctgatagacaactgcaaggagcagcagagctttccctctcttctgtacatcaggtacaatccaaggatgctaggatcctcggaatacagtttgaaaatcacagaagcatcttagtgctatttagacatctgtcttatctgctgccatggcctcctgagggggatacacgttcgcgaggtaccgaca

SEQ ID NO: 155781 - DNA, 491 bp, Homo Sapiens
ctcgcgaacgtgttatccatgattgccctgagggacaatgggagctaggaaagttctctgcctcgggcccaggggttgggagaagaggcgataggaccactgattccttctttgtttcttgccctatcacgggtagattactgtgttaagagcctggatggcagtgctgagttgttcctactctgggatagttagacctgctgaaaagctcagcataccatttagaatataagcttgtttgtcctcagaggccaaagccactgatcttgagtcctcctgagacagagaataatagaagcctatcaagtgaattccccagtaatggcatgaaagacttaggacccagaactggacaagattttgggcagagttcccctgagtgtgacttaggcatggagtctcagagggtggctactggattcccttttattcctccagatctgtgctgtgcaattcatcgtagcctctgcatacacgttcgcgaggtccgc

SEQ ID NO: 155782 - DNA, 476 bp, Homo Sapiens
gagtgcaagcgttgaaagagtgatagcagatctagagtacaccctcgcgaacgtgttatcctcaattaattaattaattaattaattgaggataccattggatgcattcttttcttacacatattgcaactgtcagtatacaaggtttcctgccagggtatttggatgacgttctttaaacctaaccacttgctctgtgctgtctaaatcccatcagccgtacatgattcctttgcttccctctatttcccagcttttgttgtcagagggtagatgaaaagttggggcgaagggatttaacaaaagttactgcatccgtaaagatttgtgggaagatttaggtctgaaaccataccattagaaggtgtttagagatgatctagataaggaaatacaggaccatttggtcattctttcattcaccagacagctatttagccttctgctagtggctccgcagatacacgtcgcgagga

SEQ ID NO: 155783 - DNA, 758 bp, Homo Sapiens
taaataagtttaaatgataaggtaatcctgaatgttgtttatttgtagcctaagtaaattatgtttcaaactggggcaaggtgataaagtttaacttgaagagcagagtcctgagaccctgggagattcagcttcaccgtcactctggatgtatggaacccactgttttttgtttttccaaagataatttcttggaccttttctcagaggtcttctacctaactcttcaattatttctgttgctagatcagactttcaccaaatgctcatgctgcttgagttgtctgggctatatgcctgactccatgctgagatacacagaaacctcaggccaaaagctgggtctccccgtcccccacatggttctgtgcacctgtgcattactcattccgcatgccattctctaagaacagaaatgcttgttctcttcaatgtcattgtgtccttggcatcctgcacaaggtctggcagttacgttgggttcaacaaaagtttgttgaactgaacaaagcaacaaccaagggttctaaaaactggagttgaaggttatattacaagcctgtctcctggtacctgatgtctttgacagtcttaaagcttgcatttctgtagccctgaatttaaatcaagttctttttgaaaccatgttaggtcatcatgcctgctgtgaatggattcaccaactttctgtaccattcattgctagtcactgaattttgatattcttcccccaccagtctaagatacacgttcgagga

SEQ ID NO: 155784 - DNA, 597 bp, Homo Sapiens
  misc_feature (575)..(575): n is a, c, g, or t
cgcgaacgtgtatcctctataccgctaagtctgatcctcctctctcggtcgctccccctcatccctgaaacagcattttcttcactggtttcaaggactcaagcttctcctgggcctgctcaacagctgtgatgtctgggccttgtctacagactttgtcaattgagctttgcatttattctattttggatccataaatcttccctcttctggggtgagtggggtcagacggtcccgaggtaacggttacaacagcatccctgaggctacatctcaggagaaggtttcaaacagcaaggaagccctcacggggcctcacatttgaaccacagttttttggcaaaatcactacggatctgcttttggcactgcaaggacactgacaaggacagagtggcttcacagcacagcaaccgtgtttcacctctgcattttatcattgggaagggccaaattacatgcacactcagtgcatgtataagaagtcaaggagtaataggatttaattgccacagtgaagagaaacaagccttcagctctatgtggtccctaaggattaataaagcgagtacgtntttgcatacacactctcgagga

SEQ ID NO: 155785 - DNA, 650 bp, Homo Sapiens
tacctcgcgaacgtgtatccaggcgtaagccgatacctgcccgagccccggtactcctatatgttagtattcttattgctctactcctagttccagcaagcagaggggtggtctggttgaatgggaaggtcaacacttgggtttgccatttgtttctcgttctgtctgttttataaccgggttatattccttggtactttgcagcagtttccttcttcttttaccctcagagagaaacacaaaatgtgtatcatcttgatgtcttgggcttggcaggtaagtactaagtttccgtggtatctgcctgtctttctgattgagatggactttcagtgaagcatagtggtcattttcccttcagaagatagagccttaatctgaaaaaaataatcgtggtaacgtggacacctatgttcttggaaatgaagtcactccacctgggttcccagtaaacgataaattgtagtatattaaaatcctaagaaaagctttgtggccaagagctcatcctatccatctagggctttaccagtggcttctgaaatactatggcaacatgccattcatagccatcctagggacattccaatcttgtttacttttagtcccccatgccaaacagttaactgagggatacacgtcgcgaggag

SEQ ID NO: 155786 - DNA, 665 bp, Homo Sapiens
tctctcctcattcaggctcagacacagctgggtacagtcattcttactcctgctgaaggcctcttctagcttctctaattcagccattcgtttctgaagccgctcaatctcagatttcagctcccgggtgaggttttcttcctcttcaagtttctccttcatcagacgacacagatcctctgctctcttaatttcctcgtctttgccttcaattctcagcacccgctggcgcagcacttcaatctccgccaacatgctggagttgctaccttctgcctgaatcaccttgtcctggagatccaggagttcatcctctgctttctggaggtttttatgtggcttcctccaactcatcaaggcggcggcttagactctgtagcttaaaccgcaagtggcggctggaggccgtctccttgtagcttgtaaattcggccatgtctactgccagccaatgtgggctcctagaggcatccaattccactcaaggggatgagaaatggttacctttctcttggcaaccacaatcttctttgacagctggagaccatcatcaatcatgtaggtaattcaagctttccgtcaatacttccggcggctctccctatgcttgctgttttggaaacagtcactcactctctttcaaaggcagttgtctcttgacctga

SEQ ID NO: 155787 - DNA, 570 bp, Homo Sapiens
cctccatgataccgaggatgactgtattgttctgtgaatttttgtcccagctacatatttgtatgtatgtatgtttttggtccggtataattgtgtaatatttcttactagtgggttaaacaactttataagacattgtgaggaacctggtatgctcgtggactagatcattcccgtagacagttccattgtgcacacatagtatttcgttaaaatcaggtgactgtttaaaaattaaaaagattttagataaaaatctagatttttactttctcctgaaatatcagaagatggggtctaaattcacactgaggccaagcagtggtaggctcattttaaagaagggctttctgctctctggtttaccccattgtatactaattagcctggtcttacttttatatattacctgaatagccacttagggcattttgaacacgtggcttgcattgctttgtctttttgaaatccgctgtggcaggcccaaccttgcctttggtgggcttaagtaaggtctggtttccagtacaaaggcaaaggcaaatgaggatttagtattcccctgtgcct

SEQ ID NO: 155788 - DNA, 753 bp, Homo Sapiens
tgctgggaatacaggcatgagccactgtaccaggccgagtccacacttctaagcttgccgttgctctcagacttgcagaacaacctattaaacagaagtaggtaaaagttgagaaagggaagtggccaccacagaaccagttctgctgagaacgaggactcgagtcaggctatgctaccctccttccatggccatgggaaaaaggggtgtgtgctgttggtgtgagagatctggatcttaacagatcagacttaaactaatttgcccatgatgaccgtgtggatttggagggacctgggaatctcacagacctatgggatgtcccagcgatatgtcctgggcttcataccagccctgccctgcctgacaagttggatgaaaactgataaaggactcatcatagcttcagatggcaaaaccaggccaggccagaatgaaaaaggataaggaatttaacatgggcaaatgccaagctctgcatttaactaaccaaggctgcttggcgtgaactaaactgagacagagctatgcatggagaaaagggttgggcatttgtgggctacaagtttggcatgacatggatgcaaatgtcaatgggtgcacccccagatgcctgtgactcactctggtggtttctgtgcacaacttcccccaaaataggccctacaactccatgcagaaacctagcctggggctcactggagcttcactagcctgcctgccagagagcagaagtgctgagctacacgccag

SEQ ID NO: 155789 - DNA, 588 bp, Homo Sapiens
aaccaggatctaaatgatcccgggagcccaatttcctgaccctgctattgtcgtggttggcaagataagaggagttgcatcacagatgaaaaagtaaggccgaagaagaccagagaagagttggttgaatgtgtagatataagatccatctgtgacattgtagaatgaaatttcaccggcttcatagtccaagaaaatcccaatgcagcgaggactttccagttggagaagaggcactgatggggaggcaaggaccatgtactcattccctttcagcagccacagggcccagaccccattctcaggagatggcgtggtttccccctttcttggcagtgtgtcttgacagacccctaaaccccactctgctccttctcccaccagaacctcccagtaatgcctccctgatgagaagctctgcaaacccaggatgcagggccatgtgtcaaatcgctcagggttgttggggacatccctccatggttctccatcctgcacactgcgcaggtcggcggtcaagagcagactcgggtgcgccgtggcgggatctagctttacacacttggaacgttcaggaagatcgcatca

SEQ ID NO: 155790 - DNA, 706 bp, Homo Sapiens
ctgatctagagtatcccctcggacgtgttatcctcatactgctgagtgagctacacagtgagaaagcccaggtcgtctcaagcccaagtcttctccccatttctcgaccgtcctcacccctctgaccttcatgtacccaggtttagctctcctgcattctttatactggcactgacctttgccagctacctgggggagggcttgccactggaaaacctttcaggccgcctccatcagtgggctccaaagtaaatggctgaaaacaaaaatgtttcacttcctaacagttttcctttttccactgtgtgactgaaagctcctatatcattttatatttctgaatctataaaacaaaacaaacaagcctgacagtgtttggaggagccaaaggtggcctccctgtccccaaatatattggctatatgagagtaattttacccctctacgtacctaaaggcacccagttcactagtctgtggggtcctggagcctgtctcttctttctggaggttcaaactgaatagcaataattacgttacccaaagcatgtggaggaaaagtgaaaccagccacggagacgccggcccacgggctcggcctgcggtgtggcctgctttgctcaccagcgtcagccgctcatttccttctcatgaagtcccatctggtcatggggacgaggccgggcaccggtagccctccaggtctt

SEQ ID NO: 155791 - DNA, 561 bp, Homo Sapiens
ctggcgcttttcatacatgtgtgaccttgccctatgaccctttggctgaccttaccggaagccatgacgacagcagcctttgccattagacgcaggttgatggtgaggattccaagggttagacaaaactggttaatctgaactaggtgactgttaccttgcgtgttttgtggccaaaccaccaccaaaaacctcacactgtgatgtaagtacttagtgtaaaactagtaaacatttttgtaaaatgtagaaatgcatgtaatcagttaagttttatattttacaatgttctgtaaaataaaacttagcgaggtaaatcgaataaaggagcagtcactctctaacagattgtaggagaggtttagttggatttagtctatttgacttgcccttaatttaattttatggcaaatcacaaatgtgtcgaaggtttagcaatataatagcaaagtcctactccagtaaataaaagttgatatgtttgtactaactttcaaagacattatgcgtttttatcattacaaggcatctaattgttcccttcatgtgataaaggtggtg

SEQ ID NO: 155792 - DNA, 676 bp, Homo Sapiens
  misc_feature (64)..(108): n is a, c, g, or t
  misc_feature (178)..(241): n is a, c, g, or t
atccaggctgaagtcagttggcagtcatagctcattgctgtcctaaaactacagggttcaaacnnnnnnnnnnnnnnnnnnnnnnnnnnnnnnnnnnnnnnnnnnnnnaccaccatacccggctaatttttacatttttcgtagagatagggttttgccatgctgcccaggttggtcnnnnnnnnnnnnnnnnnnnnnnnnnnnnnnnnnnnnnnnnnnnnnnnnnnnnnnnnnnnnnnnngtgtgagccaccgtgcctggccctgttttgttgtcttccatttttgagagagcagtgttggctggggacctagcttgtgaccatgaggcaaggagattgacttttggctatagtaatgtcatgttctcattttgagaagtggctacagataagaggcaagaaagcactcttgctgagagaaaaaggctgtttgaaactaacatgttatggggagtcctagatgttgatgaaatcaggactcttgtattttcatatccttacttgaattataaactggtcagtgattcaattttggaatttgcggggcaggggttagacattgttcttttaggaaacttgttgctattttgtttgcttctgaatagtgatggtattattaatattttgaattgcagttacaagtatatatgtgcattattgaacatagaacatgtt

SEQ ID NO: 155793 - DNA, 560 bp, Homo Sapiens
  misc_feature (64)..(99): n is a, c, g, or t
  misc_feature (139)..(198): n is a, c, g, or t
attttcatggattgattgccttagtgcacttattcttaaactgtaacgtacttcagtaatgacnnnnnnnnnnnnnnnnnnnnnnnnnnnnnnnnnnnngatcctgactggcttctgtcccatgtttatcattcagttnnnnnnnnnnnnnnnnnnnnnnnnnnnnnnnnnnnnnnnnnnnnnnnnnnnnnnnnnnnnaaaaccactgatttgcaatgatgaagatgcatccttgcaccacacacctattagaatggccaaaattcataacactgccacacatcaaatgctgggaggatgtggagcaacaggaactcttatttgttgctggtgaaaatataaaaataggtgcagcctgtttggaaaacaggtgggcagtttcttgcaagagcaaacctactcttactgtacaatccagcagttgtgtcctttgacattcacccaaaggaacttcagacttatgtcaacacaaaaacttgcacaccagtgtttatagcagctttttattcataatttctaaaacttacaagcaatagagcccctggtgttcccagtcccga

SEQ ID NO: 155794 - DNA, 548 bp, Homo Sapiens
  misc_feature (37)..(37): n is a, c, g, or t
agcgagcgtgtatccctgtggagggcgtccattgtcnatcatgccagcttgaatttcattgtgtcccttgtggccgaggaggctgttattgaaaatcgagccctgtggatgatgattaaaagatgtttcggctatcagtcaaaaagccagtatcggatatggcagagggacttggcaaatgaccctagttggcccccgctaaaccaaacctcccactctgacatgccggagtgtggcagaggagtgtcttacagcaatccagtatttgagagcaatgaagaacaactctgaaggacatgtgatatccaaagttgatattacagagaaacaatgacaaaagggaccagtttcattgacttttaacgagatgagaccttgtaacatcagctggagttttggggctacctatcaaatcatggtgacaaactaaagtctgtttgataaaatactgtctacagagaagaacattgacccagaagagtgctttcctcttggcttctgaaggtattagaggcattcagtgaaggcaagaatgggacaagaatttc

SEQ ID NO: 155795 - DNA, 675 bp, Homo Sapiens
ctcgcgaacgtgttatccatgagaacaaatgtgagaatgaaaccgtgtgagaacaagtctgtgagaatgagtgcggacaagtgtgaaagaacaagtgagagagaacgagtgtgtgggaaggacaaaatgggtgtgtgagacaggaggctccaaagcccagtctgaggtccacatgagggcaccgtggagaagccaccagcagggcccgataaaggcctggctttagaaggcgcctttggaaaagcaactaaaatcagcgtgcccctccttccccatggacacgtgcctcaggatgctgggagcctcgcctctggaggactgagctatttcaggaaactgaaaagccagtggaacaggcatttccaaaggacaggaagtcacctctgagctgttgcggcttttctacgagaagcagaacgtgtacggcactccaagatcggaaaacaatgtcaggtttcaactggaatgacacagatgtatccacgtgtttcatgaagcgcacagatgcccctcttctctctacgttccctaatccgttgtgacgggtgtgggtaacgtttacaattccagggcagctgcttggcacctgaccagtgctgtatgcctggcatcctggctgcattgagctccacagttcagaacgatcacccgggaagtctgttgcatacacactcg

SEQ ID NO: 155796 - DNA, 242 bp, Homo Sapiens
tttttaagcaaaagtaaaaagtgccagttactgagtcaagaccatgaggcagaaacaaacttctgcctatcggtgaattcttgccttaatctgtagttagaaggtgttagtgatgattcccagttttgaattatttcttgggatggacatgttgcatatactagatcaaataaaacagtatatgtgtatatgtactgcagctatatctatctagatagatttttaaagacatatatactttt

SEQ ID NO: 155797 - DNA, 543 bp, Homo Sapiens
  misc_feature (53)..(387): n is a, c, g, or t
tctgggcttttcttgcttagattcaggctcatctgctgtcaagccttgttacnnnnnnnnnnnnnnnnnnnnnnnnnnnnnnnnnnnnnnnnnnnnnnnnnnnnnnnnnnnnnnnnnnnnnnnnnnnnnnnnnnnnnnnnnnnnnnnnnnnnnnnnnnnnnnnnnnnnnnnnnnnnnnnnnnnnnnnnnnnnnnnnnnnnnnnnnnnnnnnnnnnnnnnnnnnnnnnnnnnnnnnnnnnnnnnnnnnnnnnnnnnnnnnnnnnnnnnnnnnnnnnnnnnnnnnnnnnnnnnnnnnnnnnnnnnnnnnnnnnnnnnnnnnnnnnnnnnnnnnnnnnnnnnnnnnnnnnnnnnnnnnnnnnnnnnnnnnnnnnnnnnnnnnnnnnnnnncatctcatcctgatttctgaatagaggagaggagctgagttggtgttcactaacaagcatggaagctttgttacatttacagtgtcattcttggcaaaacctgaatggtatgtttgtggggtgatgagattcagtctcctgtgacctgtctctggc

SEQ ID NO: 155798 - DNA, 580 bp, Homo Sapiens
  misc_feature (71)..(79): n is a, c, g, or t
caggaaattcaaatcaaaaccacgatgtataccaccttactcctgcaagaatgaccataatcaaaagattnnnnnnnnncagatgtcggcatagatgtggtgaaaaggaaacacttttccactgctggtaggaatgtaaactagtacaaccactaaggacaacagtgaggatatcccttaaagaactaaaagtagaacaaccatttaatccagcagtcccactatgagttatctacccagaggaaagaagtcattatacaaaaaagatacttccacacacatgtttgtagtagcacaattggcaattgcaaaaacatggaagcagctcaaattcccaccaatcaaaaagtggataaagaaattgtgatacaggaggttccaagatggccgaataggaacagctccagtctacagctcccagtatgagcgacgcagaagatgggtgatttcggcatttccaactgaggtaccaggttcatctcactggggcttgtcagacagtggatgcagcccaccaagcaagagccgaagtggggtgaggcatcgcctcacagaagcccaggtttcagcatacacactc

SEQ ID NO: 155799 - DNA, 112 bp, Homo Sapiens
gaacagaagacatagctaacacatgctttttaggatatttctgccataatataaatgatggtaaaattatgaacataaagacaaagtccactgaagcaggatacacgttcga

SEQ ID NO: 155800 - DNA, 590 bp, Homo Sapiens
acgtgtatcccagaggcacaagtgaagtcaacatctctctatcactctgctgaactctgttggcttcactcttagacaggttctctccgtgaggcactcagcatgggtcctactgcaggcccatatcacagccaaaacacagcacctcttgccctgtgcgtgatgctcactgggccaccttggtcagatggcagctcctgagcccatcgctgttgcaaaggtgacaggaaggcctggtgatgtgcgcacgctggagccaggctatgggcccggtcacattgaaaccatatggggcaaagtgtgggtgaggaaagtcaagatgaggtgacaggggaagggagaatggattttcgtaggcccaagcagcagctgtgctgcagggacacgcagcagcaccatgtcctgtgcagaagggaccctccctggccactttgcacaggggcatggaactggcaggaagaagacatgatgtgtttttgaaacatttgaagccagctcacttggaattccagcatccaagtcagctggaagagggggagttacccttgagcggcgaatcgaccattgatacacgttcgcgagggtaccgg

SEQ ID NO: 155801 - DNA, 335 bp, Homo Sapiens
tgttatccaatgagtgtgcttaagtgtcggcttcctgtccttcttcaagtatgagactatacaattcaacacagtaattcagagagtaacccaacaaacattcctaagtcttcctagtggcgctgtctgtagccagaatcccaaaaagggtaaaaatctgactcctcttaataatctgtctggaaaggaacttgaaatatagtaaaaggaaggacaggcatcagataatctgggtctgaactgtgaaggcattcaaacccattagccatttagttttagataagccacaaccttaccaagcctgttccttgagcactaacactgaagtaacacct

SEQ ID NO: 155802 - DNA, 393 bp, Homo Sapiens
agctgttctagagtatcccctcggaagtgttatccgcttcgtccgactgagatgcgaatcgatcccttgttcagcaagtctatgctgtatccgcaaccacccactagtcacctaggagccatcttggttatcagatcgagaaaacacagtctatagttcagtactatccacagtttccggcatccactgggggtttggaggagatcacctgaggataaggggtcgactgtaggatcatttacctcagaggctgctgggcatattatatgtaggaattaatctacattaagtgcttaagacagtgcttggtacatagcaaatacacagcaaatgttcagtgtgaggcataatcaaaatgcactgcagccttgacctcctggactcaagccctct

SEQ ID NO: 155803 - DNA, 528 bp, Homo Sapiens
  misc_feature (104)..(129): n is a, c, g, or t
gggaatcccctggaacctgggggcgaagggttccatgagcccggatcaaacccccgggagcccacccgggggaaaaaaggagaatcccatttcacaaccacccnnnnnnnnnnnnnnnnnnnnnnnnnngagaacccaccatgctcagctagggaaggactcatcatttggctaatttcatgaggactctaatgaagagggtctcccccttgatgaatggacccacagtgtcctttggtcctcagcttctaacagctcttaatcctgcccacttattttcctttccagatttttgtgttggggtggagaaaaaggcagggtaattacagagagcactgtgttccctggacaattcattttggcaaacagccaagaagctcctgttttctctcttccatttaaatgagggtggcaacaaccaggaatgagcaaagactgctctgctcagcctccttacctctcttggccaagttcaagttccttttggaaagagctaagctagaagtcagagtaagaggacacacgagg

SEQ ID NO: 155804 - DNA, 576 bp, Homo Sapiens
ggacctcggctctaccttgtctgtgctcccgaactatgctgtgacatgtactggatgtgaccgaggcgcacggcgaagtcactgagggtccagaggtgaaagttgaagagcaaatgctggtagagtaggtacaggaggggcccgctgccctcagctgccacctgctccatcagcagctgggcggacatgagcacgttcatgtccatggcccagcttgggacctttcgcaggagggccccgatgatggcaggcccctggcactgcaccaggctctcttggttcaccatgtgaccctgaaggaagttccgcagcatcagcagaaaagcagccactgcgttcctctccatccgttcctctgaagatttacccaatgggagaaccaggccctgggtgttgtgaccagaggtcagttcaggacccacgaggtcatgcgtttcagctggacctgcttcagcctctttgggctgtgcagctactcgctccagcaggggcagcagggcacccatacccccaacgcagttcaccacatccttcacatcccaggtctccactctgtggagacaaggtagagccgag

SEQ ID NO: 155805 - DNA, 422 bp, Homo Sapiens
  misc_feature (327)..(353): n is a, c, g, or t
ttcggtcgtacttgtttgctgaggggaacggtggagttcctaactcaggagaccaatttctaaatacaaaaaaacactcctaatggggaggggtcaggggcacagggatcttcatatctcaaggcttctgtaaaaacagaccttcagataaaatgtggaaagactagcaaaagcaaatatacaatgtgtgactcaggttgaagctacgtaacttctcaatagtccagaggccctaagacctaatagtggccaaacaattatttcaaaggccagacatatgccctttaagggctgtttataccctactggtcacatgaaaagatatannnnnnnnnnnnnnnnnnnnnnnnnnnaagagaaaggagcttgaactggcagataactttttaaaagccataaagaggccaggcgtagtggttcat

SEQ ID NO: 155806 - DNA, 641 bp, Homo Sapiens
tcggtacccgtacgctactgtgcggggtagtccacccttctaatgaagtactgagttcagatatcttgccccggtgggccatcattggttggctcctgacaacgtgcacgtcaaatgtcgctgcctccaatgccaagctggctttgttttatgactggctgttctttagtccagacaaggatagcattatgaacatagaaccagccatcctggtcatgcaccactccatgaagccccacccagccatcactgccacactcctggacttcatgtgccgcatcattcccaacttctatccaccattggagggccacgtgcggcagggtgtcttttcctccctcaaccacattgtggagaaacgggtcttggcacacctagctcccctgtttgacaaccctaagttggataaggagctgcgggcaatgctgagagagaagtttcctgagttctgcagctcaccctccccacctgtggaagtcaaaattgaggagccagtttccatggagatggacaaccatatgtcgttttacacagcaggaaagatatgaacaatacggagacggctttcagtgccgtatgaagttaggattttaacagctataggataagtgagagggagatgcgattccctctcatttcgg

SEQ ID NO: 155807 - DNA, 552 bp, Homo Sapiens
cctggtcttctggcccagactggcttgctcctagctcctcttcttccctccctccatcccctactcggtacccctagtcagctcctggaaatggtttcagtattggtgggacctcagaattgcctttcgctgcagtccatgtcactatcacttcttgaacatccactccccctcttcttcaccgagcctaactactccgacccctccttcaaaacagctctgagccactgcaccaggaagccttccatgacctctccaaggtactgccatgaccttctacttacttcttgtaattgtttatgggtctgagcgtcttggaggtggggctgtgtctttatctttgctatcctgagtacctagcacagcacagcagtgctcaatacacacaggatgaataaattaacggatccagcagttcctaatgataatgagtcagatgctagcttaagaggaaatgacagtgcttctaaatcatttaacagaagtagttttaagtagagtctctgtctctctggctgtctctatgcctgagagacagctagatcgaggacc

SEQ ID NO: 155808 - DNA, 442 bp, Homo Sapiens
gtcctgcccattttctgagcctggttctttggcttttctgggaatcagtgagatgccaaaggcctttaagtaaactcgatttaaatcagctgaagtctgtttcatctgcttaaagctaagaagtcgacttttatagagatgttcctctgtagttatccaaacatttgtattcattcttctggcccctgaaagttctacttcacctgttaggcacctccgtgagctacagaattaacaggagaatcccaggttgagtgggtggcaggactgtgggctcagccgtctcccttcattattactgtgacccgggtctccatcatgccccctagacggtgacctctgtggggacacaactgagtccttcatctctatcctcagctccttgagtaatgcttggcacacggtgggtgcttgggaaggtttggatgaatggggcaaggaa

SEQ ID NO: 155809 - DNA, 454 bp, Homo Sapiens
ggtaccccgggagccccttaaccctgagcacaacatggcacaaagggacattaactgctcctttcctctgccctctcctgcagcttctgttccctcctcaccgggtgtccttgtccttacgtcctgatatgtcaccaccctcagactgggtctatatcatatgtcttatattcatgcttcgctcagggcccagcacagagaaagcactcagtaagtgctggtggacgagggaagttagttagcaaatgccctccttcaggtgctgcttctctgaaggacttccactgggagagagccgtacagtgggtggtgatggttatatcaaagccttccccctcagccaccaccgagtgcccagatgtgcacccaaagtgctctgatctctaattgtttcccctggagcagggcagggctgggcagcaatgagcaggaggatgcagtgaccgtgcggcgc

SEQ ID NO: 155810 - DNA, 567 bp, Homo Sapiens
tagaggatccccctcggctctaccttgtctctcaggtgtcagctgctgcagtatggaagcatcaccaccattgacgtgccactggaacgtggtcccggagcaagcccatttgctgagccttgtggacgtcactgcagtcgggagggaggccccagccaaatcgaggtgatgaccttgggctttgctgtgcgatacttgacttcagaactgcatggtgccaggccgggagcctacaaagtcggtggtcatcctgttacacggacgtctctgtggattcagtggaatgacagcagctgatgccgccaggtccaacagagtgacagtgttccctattggaattggagatcgctacgatgcagcccatctacggatcttggcaggcccagcaggcgactccaacgtggtgaagctccagcgaatcgaagacctccctaccatgttcaccttgggcattccttctctccacgaactgtgctctggatttgttaggatttgcatggatgaggattggaagagaagaggccctgggacggtctggaccttgccagacaagtagaccgaggtacc

SEQ ID NO: 155811 - DNA, 574 bp, Homo Sapiens
ccccctcggctctacctggtctccagagagacaggggatggacgatgtctcccttccctcactctgcactgggaggctgggcgagtgttggtgctggggccacagggccagtacacgtgccttcatctttgcacgtgtgttggtgtcagtgaatctgtgtgtgcatgtttccctccatggatctgagtgtctctgtgaatgcaccaacgtgtgtttgtatatctgtgggggcctccgtgctaaggcaccccgccttggctttgggattcaggaaccccaccttggccttgggatggagggccaacataaagctgcccacctgtcagccacctcctgacggacagttttctcctacagaactatgcccagcgccttggggctctcaccagtctactcattcgctcaccaccaccagtgttttctgtggcaacgccgagtttactcagcacagggcctccccttctcattccatgcccagcatgcctacaacacaggtgagtgttcatgtgaacatgtgcatgtgtgcacattgggcttggggcaggcaagtgaccagacaaggtagaccgaggta

SEQ ID NO: 155812 - DNA, 710 bp, Homo Sapiens
ggcggacctcggctctactgtctttctgttagaggttactgcgtttatatgtaagtgctaactcagcacagtctacatcacatagtaagagctcaaaaaattagttattactacaacgattacactactgctgctgctgctattattactgtgagataacaaaaggcagaatggttaataagacaattttttttgtgaagtcttaaagcaatatacatttttttcctctgacaagatgcagaccgatggaggaacagaagaaaactgctgaaccaacccataaataatgcaaataattcagagaaaagagtatacttgtacaatttgtacaagggacttagcagggtcttcagtgctggcccaactagctgctgatcttctgaatgtcactgtgaagggggaaggactgaaggagccttgacagagtagcagggcagtggcctagggtggtggccaaaggctactcgagtggtagggggctttctccttggccacactgcacaccagactgacctgatgccctcccacgctgtcttggctgtcaggttactccagcaattctgtaaatcccatggcagtctggagatgagactccttaaaccactggtttactgactgccttgaaaaagacacatttacaatgggatttggagccaacaaagggcttaaattctagaatgccacttatttttagtgtggccttggatggg

SEQ ID NO: 155813 - DNA, 333 bp, Homo Sapiens
ttcggccaccgggattcctacagctctttgctctgctgctttctgagtgttggcctctctctcctactaccgctcatccttctcgccatgacgatgtagatggccagtgtctgtgtgtccttaaagttagctatccctcagcaagaaagaccacctctcccagcagctgtatgtcaaacatcatcaaggcatgattctcatcggggcttgggttttgtgtacacatctgaaattgatcgtcatggacaggggttcacgttctgtgcttcgtgagatctgagtcctgtgtggttagcagggccctgatcacagcccggctttgtaagtggggta

SEQ ID NO: 155814 - DNA, 212 bp, Homo Sapiens
ccccgactagcccgacagcccggtggtggtgagcagcgggcagcctgccagagacaggaggcgcaaactccccagggccaggaggtgcttcagcccgaagtcttgcacctggcagcaccatcgcaggtagaggctgcggagggacagacatggtggacagatagcttaggccagtgtccgtaagcgacacaccttcggctagtcggggaagc

SEQ ID NO: 155815 - DNA, 374 bp, Homo Sapiens
tctgaggatccctgtgcgcgggatcctcacacctgcttggagccttcccctcctcgttaacttcaacacagtgaggtctcaccgcaggtctccctgctgtagaaagccttcctaaccgcacaccaggctcgacgctcatctctggctggcatgtgactctgcctcctgcactgggcgtggtaactgtctggctcctcgtctgttccctgcatgaacctcgagttccttgagggcaggaaaccagcccaggacctgccctatagggccaccgtggtaagggaacaggtcagggaaagcccagcccaggtcctggtggtcctggcacgtcccctctgcctagccatccaggctcgcatcctggcagcccctccccc

SEQ ID NO: 155816 - DNA, 640 bp, Homo Sapiens
cggagggtagtacttgaccgtggaaggtgtcatggtcatggcggatgatgtcgaagtcgatgtcagcttcggcggggcctaccactccagggcacacttgatgccgatgctgacgtccccctggccagcctcggcgcagtccacagtgaagtaggtgggctcgtgggccttgagccctgtcttggctactccggggccgtatactttgaccttgttggggtggctgccagctcccacattcaccctgaaggggctgttggggatgctgacgcctccccaggacaccatggctgtgtgcttcacgggcttcctgggcacgtaggagcagctgtaagtgccattgccgttgtccttgaccaacgcctccacagggcagccttcattgtcctggacttggacccgaagtggggccttgccaccgtgcttggcatccactgtgaactctgctggcttgttgacggccacacctgtcttctccaatccaggcccgcgtgccttcaccctgtctgggtggaagtcctggggcgcgtcacggatgtcagccatgaaggggctgaggcaggatgtcttcgctgttgcacagcatcgtgaggaatccctgcggccgaaggattacgcgccgaagaatcccgcgccataa

SEQ ID NO: 155817 - DNA, 277 bp, Homo Sapiens
  misc_feature (164)..(232): n is a, c, g, or t
aaaaggtgcagttgggttcttaatgtgaaatgatgagaagcacaactcccaggtgtgtctcgtttgtgtagcaatgtcagcagacaccccctgctagatgtgctggatcatgggaaagcatttccatttgttaccagattgttcagaagttttaatttatgatnnnnnnnnnnnnnnnnnnnnnnnnnnnnnnnnnnnnnnnnnnnnnnnnnnnnnnnnnnnnnnnnnnnnngccaagagttcaagatcaggctgggcaacatagtgattaccctat

SEQ ID NO: 155818 - DNA, 255 bp, Homo Sapiens
acctcgtcccaccgtggattcctctacattggttcctacacctctcacccctcaccccacagaggaaggttacccaggcttgatgtttcccgacctacaaccacccgatagaagacagcccagagaggctcgttcctacatgaagagggcaactgaagtctggtcggtaataaccagattagtctggctctaccagcacgggggtatgtcacggatccccggccgaaggaatcccgcgccagggatcctctagat

SEQ ID NO: 155819 - DNA, 305 bp, Homo Sapiens
agagtcagagggaggggatccctgtcgtgacaagagcgcctgtctgcgaccccatggatctgcgaggcccttgcggggatctggtgcctgggctctcaggagcagggggtgtctgcttgtgtgctggcgtttcttggagagatacggtggctgtcaccctcttctccaggcacacacagacacattcccactccctctgctcctcatgcccggttcctccggtgtgtcccaagacaggagctagaaccgcgaaccgaagggcaaccagccaggtggtctccaggagctccgccccctctgtcctc

SEQ ID NO: 155820 - DNA, 203 bp, Homo Sapiens
aattagacatccgttatgcggggttcctccggctcctctttaaaacaggccgtagtggacgatgagagtatcgatgacgcgggctgatggggataatccaccaggaggagagggacacggtggcctcgtgtgggcctgtggctgatgcagcgtgggcccgaacacgatgcccaggaatcccggtggccgagggtaccgagctc

SEQ ID NO: 155821 - DNA, 129 bp, Homo Sapiens
tgactctagacgatcgcttattatgaccctggatatgtaggcgtctaagggtttaatgagcctgaatcctgatacttccaaagactagttatttgctctctgagcttcagtgtcctcactacatgccat

SEQ ID NO: 155822 - DNA, 381 bp, Homo Sapiens
cgatcgctaatactgtggcggctggctgtcgctgctttttgtctctgccgtgtttggcggctcagtgcctccctggtgcgtctgcgctggggccctcagtgctcggggccttggggtgcatgggtgccgccctgggcagctagagtgtctcagcccggtgctgggcctggccgaggggcggagggcacagctgcttccagcagccagcattcagtggccttgtcaccaagctccacacctcctcctggtgctggctttggtgacatcacaaggcccctccaggtgcaggggcttctgtttggccaggcccctgcctgggaggaccttggtggcctcctcattctcttttgccattggaattgtcctcactaattgcccaat

SEQ ID NO: 155823 - DNA, 262 bp, Homo Sapiens
cttgtaaccgcacgctagttacatccgttgttctatgtatacaccattccaaatttaaaaaggcacccggcccacaccccgaagtctcctcaccccggaaatattcttcctttcccacaggaccaacctcgctgtgcctaacaagaattccagaagtcacccatccgaaaggcactggcccatgacactctccacttccaatcttaaatcttttactctcataccttgtctcagatctctcctggtaccccttccccacgcc

SEQ ID NO: 155824 - DNA, 225 bp, Homo Sapiens
tgatcaatgtactttgtaatctgccccactcttaagaaggttctttatcatctcccccacccttaagaagtttctttgtaattctcctcacctttgacaatgtactttatgagatccacctcctgcccccaaaacactgctcttaactccaccgcctattcccaaatctagtaagaaccagtgataatcacaccaccctttgatgactcctgtttcggactcagc

SEQ ID NO: 155825 - DNA, 561 bp, Homo Sapiens
caccccctcagccctgctgctttgatggcaggcgtgcgtgcacacacacagacaccaccccacgcaggcgacctcccacaccgtgcccactcacgcaggcccctgctaaggcagacgcggatcacgggcactgcaacgggacagctggaaggacggagctgccgacacaccatccatgctcctccccggggactgcggagtcggtcagggcagtgaggggctcccgcaccggctgggaggccgtggcaggacaggtgtcgaaggctgcttacagcaggagtggaaaacaagccccatgctagacctgaccacaggggcctgactcctggggccgtgtcttccggcagcccccacagaggacgcggaacttcccgagggcctttccattatatgtcccgactcccacgggtgcaagataccaattcccacacacagacacatcctgcggggagcaggtggcgggcgtgagtgtgtctgtggaccggcgtgcagctctgggcccacgggagccactcttcaccctgcaatacagtctttgctggtaggaagggtaccgagctg

SEQ ID NO: 155826 - DNA, 232 bp, Homo Sapiens
ctagcacccctgggtcatcttctgcaggatcccgaggcacaaagttgtatcctgggtcagagtttgtagggggtcatcgagaggtgtcatgtttccattcagagcggttccaaagcgtctaggaaggggctgagtgggacctgctagcttgcctttgttggaaggaggcccctgagctctgatcccagacaggctgtcaggacgcccccttagcgtgcgcgtaccagcgtac

SEQ ID NO: 155827 - DNA, 454 bp, Homo Sapiens
cctggcctgtccaaatacaaaccaaaaaacagcccttcagcttccattcacaggcagtgaagtccacctagtaacaggtaatgtcccaggctaggtcaagaagttcatcggccttttggccatctatattcttgccctgcctgtgtctagatgtggtgaggggcaggaaacgaaagtccctctccccacactggggtctgaagccctagacttagggaaagacagtgggaggcatccaaccttagcagcagaccaaagtgtgatctccaaccaaggaggacgaaaatcaaaactcatacggagaaggagaaaaccttaactggtccagaatgcgtagagaaaggtttgattacttaacatctacaaacagcaggtctggttctacgaagtctcgaataagacatgctgagatgctaccttagcccttagcgtgcggtacgaacagatcctctag

SEQ ID NO: 155828 - DNA, 263 bp, Homo Sapiens
tggcctgtactgctttatttctaaaaagagcctgggtatttgtttcgtttttcacagtttttggggagcatggaaaagcaacctttgtcctttgtcaggaacctgctggtctatgggcaacatggcagcagggcaggccgctgagctggcctgtgttttgaggtgaaagaatccataattccatctccggggaacagggcttgttgaggggtcagcaggccttatggaacagtggcactgtgatcacgaagggggatgacaca

SEQ ID NO: 155829 - DNA, 344 bp, Homo Sapiens
tccatcccccttcgtgatggagatggggtgtttgcacccctgagcgatggagagagggtatctacacctgctgagtgataaagagaggtttccaccccctaagtgatggagatggggtgtctgcacccctgatcgatggagagagggtgtctacacccctgagcgatggatatggggtgtctacacccctgcgcgatggagggagggtgtctacacccctgagcgatgaagggagggtgtctacacccctgagcgaagaagggagggtgtctacacctgctgagcaatagatagagggcttccaccctctaagtgagggagatggggtgtctgcacccctgagc

SEQ ID NO: 155830 - DNA, 527 bp, Homo Sapiens
cccgtgtctcatcccccttcatcgctcaggggtgtagacaccctctctccatcgctcaggggtgtagataccctctctccatcgctcaggggtgtagacaccctctctccatcgctcaggggtgtggacaccctctctccatcgctcaggggtgtagacaccctcccttcatcgctcaggggtgtggacaccctctctatcgttcggggtgtagacatcctctctccatcgctcaggggtgtagacaccccctctccatcgctcaggggtgtagacaccctctctccatcgctcaggggtgcagacaccccatctccatcacttagggggtggaaacctctctctatcactcagcaggtgtagataccctctctccatcgctcaggggtgcagacaccccatctccatcacttagggggtggaaacctctctctatcgctcagcaggtgtaggcacccccctccatcgctcaggggtgtagacaccctctctccatcactcaggggtgcagacaccccatctccatc

SEQ ID NO: 155831 - DNA, 312 bp, Homo Sapiens
cacttttcagaaaccaccaggctagacattatcctacttccatgagtctgcaatttattcaaaccatccctaattatgtcctccctgcataatttgaatcctatctcatccatgaccttgagcctggatccaatattcagcttaagctcctaggtatgaagccgcctggacaagtctaaggaaatcatttcagctactgtataagtgagacaacagggaaactatgttttaagaaaatttgcagagacaaatgctcatgctagataatgaaaaacaggccaggtgcagtgggtcacgcctgtaatcccagca

SEQ ID NO: 155832 - DNA, 431 bp, Homo Sapiens
ggctaacaccacactgctgcatgttgcccgttatggagcccagcagctacaccagccaccctgccccaagaaggaagtcatcatagggccggcctggaacagtgtggacgaatgtggaacctcgctctgtggctgtgttcccttggcactccttagtccccttcctggcacccagccagcctgacccctccgtgcagccgagcgaggcccagcaacctgccagccacccagtggcctccaaccagagcaaagaacctgctgagtcggcagctgttgctcatgaacggccaccaggtgggacagggagtgctgaccctgagcgggccccttgagccacatgtccctgagagcccaggacccggacccccacaccctttgggggtggtggaatctggtaggggtccgcctcccaccacgaaaggggatggaca

SEQ ID NO: 155833 - DNA, 264 bp, Homo Sapiens
gtgtccatcccccttcgtccaaggactggcggtcggggaagccggtcagggtggtgcgcaatgtcaagggtggcaagaatagcaagtacgcccccgctgagggcaaccgctatgatggcatctacaaggttgtgaaatactggcccgagaaggggaagtccgggtttctcgtgtggcgctaccttctgcggagggacgatgatgagcctggcccttggacgaaggaggggaaggaccggatcacgaaggggggtgccgagctcg

SEQ ID NO: 155834 - DNA, 347 bp, Homo Sapiens
ccttttgaggccctggaccaagaaggacgaagagaggactcgagcctcatagcctagctagccccacatggctgaagctccctgtggtgggagggataggaggggcagggcagggcaaacatggtgtcgctcacagccacaccgtgctactccggttcggcacctcccactgacggatcagggtccctagggagtgggagatgaaggggagccccggaaggcacccggtcccgtgcattcacttttcacaaggagaaacggggaccagtatggtaagcgtgctcagcttggagcccactgtgggcagtaccttcacgaagggggatgtaagggatcctctagaccac

SEQ ID NO: 155835 - DNA, 514 bp, Homo Sapiens
  misc_feature (43)..(72): n is a, c, g, or t
  misc_feature (107)..(107): n is a, c, g, or t
  misc_feature (132)..(209): n is a, c, g, or t
tctcattctattctttatcccattgcaatggatagtttctgcnnnnnnnnnnnnnnnnnnnnnnnnnnnnnnactaatagagacaggctcacgctgtgttgccaggntattattgaactcctggcctcaagnnnnnnnnnnnnnnnnnnnnnnnnnnnnnnnnnnnnnnnnnnnnnnnnnnnnnnnnnnnnnnnnnnnnnnnnnnnnnnatagcttctgactcctgtgcctattcctcacaagttgatcttatttaaatctttcatgcttcttacgtagctgtggtatgttcttttaccatgtatccattcacttcagctgagtttctgttcttctgtttttcccaattgcaaatttaatctaattttctcacgtcatccttgtttggggagggctttcatgttacaagtcataggctgttgatcagcgtgtagacatatgcctttgagtctgagctttactttcccttggtctgatcaactttggatttgacgaagggggatgacatagctcg

SEQ ID NO: 155836 - DNA, 398 bp, Homo Sapiens
caacgatggtcctcagctctccctcaaagcccggctggccaggaccgcccttgttgcccttagctccggggggtccccttcggccaaagccaccattcttcccagtttctccaggtcctccaggtactccatctctccctgggacacccatggggccgaggtcaccggtttctcctttgggtcctctctcctggctgtcttgtcctgggttacccgggtcccctcgaaatcccaacatctcctctttctcctttctctcctcgaggtcctttatcaccccttcttccaggattccctttctctccagaagaaccaggcaatcctttgtctccatcttcaccatccagaccatccagtccaatttctcctacttcgcccttctctcctgggaatcctgg

SEQ ID NO: 155837 - DNA, 603 bp, Homo Sapiens
ggttgcgaggagccggggtgggcgacacggcattgctctgagaaccagtgactgagccccgtacaggttatctccagtctcctgggccattgccatgaggttgttgtgggcaacaccgagcaggtccacaggcgccttggtcagtgtcagggcataggccgtgatggcagctgcgtgggcacccaggagcccagcacttgctttctcccccaaaaatgagtttgcctttgagatggaggcttccagtctctgcttcaatggctctgcaccctcatcctggaagacggccagcccatgatgaagggcgatggtcacaaaggctgtgagtgccacagtctcatcattgcccaccaaacccccctgcatgctcctatgtatcactggagagaggtcctggaacgagccgtcagcctgctgctgggacagaagccagttagatgtctcctgcagtttctcaggcgagcctcctacctgctcctgggccaaactcaggaccttcaacacaaaggctgtgagccaggtgctgctgccccgtgacaaccaagccgcataggaaccatccgccttccgaaactgctggatccgcatgcatccgaacagttg

SEQ ID NO: 155838 - DNA, 536 bp, Homo Sapiens
ccagtattttatgtgtcagaagcgaagcgctgtacacagttgtaaaactgtgatcataatctctgtcctgttcagatgccctatttttcacacgggctaggaagtatttttcagtgcaataatcagactgaatgaatcccagtgccttgggttaacctaacttagtggtacccatggaaatactggagtttaacttcaccctatttactgtctcagggaaaagaatggcctggatttattttggaggccagattctagtgcatagtgtaatctcttctcgatctgccattaccaggcatcagaagctatgtatgcaatccccagcagcagcacgaccagtttactgatggggtctagtcactgatgtgtgacttgtgaaggggtgacttggctttggatcaatgattatcaacgagacccattcgctctgcctttttttcagatccctttgcctgccgtcctgggaattacagctcttattttcctagtgtgtttgctttattctctgaatgaaccacacgtatgcacaggagata

SEQ ID NO: 155839 - DNA, 455 bp, Homo Sapiens
gaagccagcactttgtgagtgcacatgcccaccaagcccctgcggtggggacacgcaccaaatgcgttgtctggtgttgtccaggctgcagccagtcagctgccccatctcagctctccctcgctaagccatccccagatccactgtacccagcttagtgaatggctgaggccatggctcgccgccctctcctcgtagacttctagagcccttgctgtccctcttgtctctccctgcctaccttcccatggcctcccaagagtgagcttgtaataggcatgttggatggagctgttcccctgcccgagcctccagaggcgatggcattccagcccatctcatgccaccacctggggctcatgtagtagttcacccaactcgcgctctccattcactgccacctcaaacaacccatggctccttcccactacgcactgaagatcctctagagtacc

SEQ ID NO: 155840 - DNA, 366 bp, Homo Sapiens
aattacagcgtcgggacgtcggccatcgcacttcctccttcaagtgccatactctgttttttgctccagcctttagacatgttgttcttcctccttagaacccagctcctctctctgcactgtctggctacctttccctcattcttgaaatctcagcttagagtctcttcctcacgaagcccttggactagggactatgttatttgctaccttttctgggttcccatagcaccccattcttccccttgtataatacttcacaacccctttcctggcccagcgataggagggactgccctctttccagtatgtggcatctagtgaatgggcaatacatacgggcattccccctgacgcatgaaatag

SEQ ID NO: 155841 - DNA, 497 bp, Homo Sapiens
acaatcacactatcctgacctgactagttacaatcacacgaccctgacctgactagtttacaatcacacgaccctgacctgactagtttacagtcacacgatcctgacctgactagtttacaatcacacgatcctgacctgactagtttacaatcacacgaccctgacctgactagtttacaaccacacgaccctgacctgactagtttacaatcacacgatcctgacctgactagtttacaatcacacgatcctgacctgactagtttacaatcacacgatcctgaccttactagtttacaatcacacgatcctgacctgactagtttacaatcacacgaccctgacctgactagtttacaatcacacgaccctgacctgactagtttacagtcacacgaccctgacctgactagtttacaatcacacgaccctgaccttactagtttacaatcacacgaccctgacctgactagttacaaccacacgccctgacc

SEQ ID NO: 155842 - DNA, 357 bp, Homo Sapiens
gtgactctacaggattacagttaagcgtcaggatctcaggatccaagcctcctgggacattgacctctcatataatcttgccaggtgaaaccagcaaagtccttcctgatgtctaacctcggcccctcctgggtgtgatctcctctccacccagcagcactatcacagtcctaccgttccatcatctgcgtggggtggaagtgaggccagtgaatggcccagaaatccagcccattgaaacctgcatgctgaaaaggaatgacttcatcctgggacaggccaggtggcaggcaaaacagtcaagtagatcagggttgtttgtagtgccacctgcccctgacgcttataatcgggggt

SEQ ID NO: 155843 - DNA, 537 bp, Homo Sapiens
  misc_feature (201)..(201): n is a, c, g, or t
cagttttacagctttcagggcaccaggtgtccttgattgcgtagactctctgttggagactctactttaatgtcacaccatgtgtccatgatgtgtagaccccctgcggagacctacattaattcacaccagggtattcatgacatggtagactcactgtggagacctactttaatttcacaccagggtgtcactgatgtngtagaccccatgtggagacactacttaagttcgcacactggcatcactgacagtgtagactcactatgtagacctatttaattcacaccgggtgtcctggcgtgtaaacccctgtgtagatctacattaattcacagcccagcatcctgacctgtagacccctgtggcgacctacttaattcacacccggcatcctgacgtgtagactcctatgtagacctatttaattcacaccaggagtcctgatatgtagatccctgtggagacctacttaattcacacctggcatcttgacgtgtagactcctatgtagacatacttaattcacattgagca

SEQ ID NO: 155844 - DNA, 384 bp, Homo Sapiens
ttggagaggtgtgagtggtgagggggtgctggatggattcgtggctacacgggggatggagtatagacaggtgagtgggggataggtgatgtatggagggactcatagttaggcgcgaaggcccatagctgggcgggtgaccacagggacaggaacgtaagggggtcagtggggagagagatgactgagtacgcccacgatagggacacctgctgctggagtggctgcttcacagacccacagcagaggacggtgtgctgcagatgccttggggacctgaggatagaaccttctagatggaggctgtcacaccctcctgggatgttctgggaccatcgttccatccttgactcacatagcctgctccacttcccgacgccttcc

SEQ ID NO: 155845 - DNA, 507 bp, Homo Sapiens
cgtgactctagcaggatccttaagtttacagcgttcaggggcagctgtggtaacagagagactgtggcatgtggcccagtggtgacgctcaatgctccgtgcacccagggccatcctaggttttgtgaataagcaacaggcccacgacctgctcatcaacaagcccgacggtaccttcttgttgcgctttagtgactcagaaatcgggggcatcaccatcgcctggaaggtttgactccccggaacgcaacctgtggaacttgaaaccattcaccacgcgggatttctccatcaggtccctggctgaccggctgggggacctgagctatctcatctatgtgtttcctgaccgccccaaggatgaggtcttctccaagtactacactcctgtgctggctaaagctgttgatggatatgtgaaaccacagatcaagcacgtggtccctgagtaagtgtccaggtggctgtggctctccttctgcctctttcctcctcccctgtaaactg

SEQ ID NO: 155846 - DNA, 484 bp, Homo Sapiens
cagcgtcagggacacactccagtgcagaaacttgttgttgacgatctggactgtgcctgagttgacaccaccaggtccactgcctgttggatgggaacggggtgtgaagaggggccatggctcctgggaaacctgtctgtctgtcctggggcctgccatccctccctccgagccttggcctgttagccccagctgggtccattctctagtcccaggggaacaggccctgccccttcatctgctcacagccccccatggctccccagtggcctgagacaggtcccggacctcacctggtgcacaggacctgcagagtctgcctcaactggcaaggcatgacccaggacacatggttaccaggcagggccttccagccgcaggacgatcccaaccccgtgcccagctccccgctccagttgcattcccctgccggcctgtggtaccggagctcggaattggtactcatgggcatagcctggttccc

SEQ ID NO: 155847 - DNA, 469 bp, Homo Sapiens
gcactaggctgttctttcttctggtcctctctgtgatgctatagactagggaaggtgctctttggaggagaagggctgaataaacaaaggctgcacacctgtcactgctgggaagggagaaaatgatttgcccctttgagacggaatctatgtgtctagagaaaatggtggtaagtcaaccagcagtaaagaatagcctagtgccccggacgatgcaatagatgagaactgccactaactgtaaggaatttcttttgggattttaagactgggtctttacatcacttggtatgatttagttatttcccctagaaggacagactgcttgaatcagataagtctattccctcatctaagaccctgaagtcaagagaaagatctgttcccacattcttgctaaaaaatacactattttctcatagaaggacatcagcaatgtgtcaccagggacttatgaaacatctaaacc

SEQ ID NO: 155848 - DNA, 423 bp, Homo Sapiens
gacgctgctcttctccaacatcgatcccatctatgagttccacataggcttcctgcgcgaggtggagcagaggctggcacttctgggaagggccctccaaagccctacacctaaggcagtcatcaacgaatcggggacatcctgctcaggaacatgcgccagttaaaggagtttaccagctacttccaaagacatgacgaggttctaacagaactggaaaaggctaccaaacgctgtaagaagttggaggcagtgtacaaggagtttgagctgcagaaggtctgctacttgcctctcaacacgttcactgctgaagcccaatccagcggcatgctgcactaccgcctgctgctgcgccgcctgtgcggacattacatgccccgggcaccatgattacgctgactgccctgacgctgtaaactg

SEQ ID NO: 155849 - DNA, 503 bp, Homo Sapiens
ctcttactgcttcacgatcggcacatccagggattccttttctattctgtcgctcacgtcctggaagcactggagctgcttctctaggctccagaagaacgggtgtttgagcacgtgcttcgctgaggggcgtttctgaggatccatcgcaatcatcttctctatcaagttcacgtgcaatgacgtcttcgtgcttctctgggtgcaagcagtcaaggctgcaggcacccaggaggatgttggcctgccgctgcagggacttgccaaaagggtggctgccctcagagattacgtagtaaaagacgcagcctgcagaaaagatgtccaccgtgtaggtagggttctccttacagtcttcgctcagcatctctggagcgatccagccttctgtgccaggcaccccagatcggcggctgaaactgtgtctgcccactgccagcttcttgcagaggccaaagtcggagatcatggcctggatggccacacctgacgcatgtaaactg

SEQ ID NO: 155850 - DNA, 137 bp, Homo Sapiens
gatcagcgcatttctccgacgtgaggcagcctctgggtcttctgggcttgtgtgtctggagctgccccaagaccaccacagtggccagcgggtcagaggctcctcggagccagctgtgccccctgaacgctgtaact

SEQ ID NO: 155851 - DNA, 433 bp, Homo Sapiens
atgtttggctgaaatacagtggttattatctacaagttttctgtcttgaaacagggagatttgttggggcattttctctttgtgctccttggcatttctgagttgctggtctcctcagttccaagtctgagctatatgcagaaaaggaaatgcaggaagctcaccactgtgttgttccttggatcctgaggtcccagctggtctgccttcttcagactgccatttggagtcttcttatagtcatctagcatagaatgcccaggggttttcattgttccttagcaggtggaatccaggggaaagtgcacctgctccatcctgctgggagtggaaatggttgggggaaattggagcgtataggtcggggctagtttagatgcaagggctccgttctgtaggtgcaggaggccgtggaggctcagccctgcgctgt

SEQ ID NO: 155852 - DNA, 462 bp, Homo Sapiens
tacagcgtcaggggaacggctctgccggcccccaggtgccctcgcgcatattcatggaggcccgcaggtcagaaccgcagtctcacctgtcttggcggaaatgccctgcgatcctcccggagatagaaggcgggaagttttatgaggagccaggtacagtttccctactatctcctgcagttcatatatctagtctttcttcagactttatttaagcgactgcttcatgtttgatgtctcactcccacatcctacatccattgccaggcaactttctagatagcaccgtgacccatccttcccacccccaagcagccctttcctatttctggtgccagtgtcctccccagtccctctttcttcaggccctcgcttatcaccttcatggacagaaaatacttagttctctctcaacctgcggtttatacctgacacgcgtcagtacctgaacgcttaaactga

SEQ ID NO: 155853 - DNA, 580 bp, Homo Sapiens
  misc_feature (68)..(131): n is a, c, g, or t
tagggctggaggactgttcagggaggagttaggtcaggaggactggtcagggaggagacttagggcannnnnnnnnnnnnnnnnnnnnnnnnnnnnnnnnnnnnnnnnnnnnnnnnnnnnnnnnnnnnnnnctggtcagggaggagttagggcaggaggactggtcagggaggagttagggctggaggactggtcagggaggagacttagggcaggaggactggtcagggaggagttagggcaggaggaccggtcagggaggagttagggcaggaggaccggtcagggaggagttagggcaggaggactggtcagggaggagttagggctggaggaccggtcagggaagagagttagggcaggaggaccggtcagggaggagttagggcaggaggactggtcagggaggagacttagggcaggaggccgtgtctgggaggagttagggtagggggaccagttaggaggcagtgacttaggacttcagcagtggcactagaaaggggatggatatgaacgacattgcaaagtaaaactagagagacggccgggcacagtggctcactcctgtaatcccagc

SEQ ID NO: 155854 - DNA, 399 bp, Homo Sapiens
ggcatatattatcgcattcctttattgtcctttctatgcggcccagccggccatggcccaggtgaagctgcagcagtaaggaactgaagtggtaaagcctggggcttcagtgaagttgtcctgcaaggcttctggctacatcttcacaagttatgatatagactgggtgaggcagacgcctgaacagggacttgagtggattggatggatttttcctggagaggggagtactgaatacaatgagaagttcaagggcagggccacactgagtgtagacaagtcctccagcacagcctatatggagctcactaggctgacatctgaggactctgctgtctatttctgtgctagaggggactactataggcgctactttgacttgtggggccaagggaccac

SEQ ID NO: 155855 - DNA, 399 bp, Homo Sapiens
gcaggataactgcccccatctgccaaattctggggcaggaagactttgtcaaggacgggattggcgatgcactgtgatgatgacgatgacaatgacggttgtgaccgatgagaaggacaaactgccagctcctcttcaatccccagccaaggctgactatgacaaggatgaggttggggaccgctgtgacaactggccttacgtgctacaaccctgcccagatcgacacagacaacaatggagagggtgacgcctgctccgtggacattgatggggacagatgtcttcaaatgtacgagacaatttgtccactacgtctacaactctgaccagagggacacggatgttgacgctgtgggtgatcacatgtgacaactgccccacatggtgcacgacccg

SEQ ID NO: 155856 - DNA, 332 bp, Homo Sapiens
gttgcctcaccagggaaggacgacaattttaaagtccattttctattttgcccacttttacttgataggatttctgctggcagcctgaagtatctaatcccggaagcggactcagtaaacgtgagaggtgccctcagataactacagaaatgcctcctgtgtttggttgcttgaatgaatgcattatattttttccaccagtgaggccaaccctgactttttaaaattgtgctcccaagttttatcgataaaatgtctggctattacatacaaggagtctttttctcttactaccttgaggaactgaagtgttccgttttccctgacgctgt

SEQ ID NO: 155857 - DNA, 482 bp, Homo Sapiens
gctctagaggatctcccacggcaggtgtactcctgtaggaaagagaatgaagactttcgaatccgtcaaaacctatacagaatcaaacattttccaccccagcaagtcaactcttttctcctcatggttctaatccttcagcacctgctgcaactcctgttcctactgcatccccagtcaaggcaattaatcatccatcagcatcagcagctgccaccgtttctggaatgaacctgctgaatactgtccttcctgtgttcccagggcaggtctcctcagccgttcacacacctcagccatcaataccaaacccaacagttatcagaaccccttcattgcccactgcacctgttacatccatccacagtacaaccaccactcctgttccttccatttttttctggcctagtgtcactgccaggtccttctgccactcctaccgcagccactcctaccccaggacctacaccacggtccactct

SEQ ID NO: 155858 - DNA, 213 bp, Homo Sapiens
ggtctccgctctgggagccctcggtggccacaccctccagtcctttgctctcttcctcagcagggagttgggcatccactccgacttccagcactcggatggtctcatgacctgacatcacgatgacctgctcattgacagtcagagatgtctctgacccggctccatgatccatggtcacttgtcagggtcgggtggggccgtcccaaacct

SEQ ID NO: 155859 - DNA, 462 bp, Homo Sapiens
ggactctacacccctgaggactcggaccctgaccactttgacacagccattctgtttacccgtcaggacctgtgtggagtctccaacttgcgacacgctgggtatgtctgatttgggcaccgtctgtgacccggctcggagctgtgccattgtggaggatgatgggctccagtcagccttcactgctgctcatgaactgggtcatgtcttcaacatgctccatgacaactccaagccatgcatcagtttgaatgggcctttgagcacctctcgccatgtcatggcccctgtgatggctcatgtggatcctgaggagccctggtccccctgcagtgcccgcttcatcactgacttcctggacaatggctatgggcactgtctcttagacaaaccagaggctccatgcatctgcctgtgactttccccgaacgctgtaaactgggatcctctaagtcagctaat

SEQ ID NO: 155860 - DNA, 349 bp, Homo Sapiens
ttggaagtaacctgaagacgtgtctcccgcatggcagctaagacctcggatgccaggtgggcttcatctgactcccttctctacctcagctgtgtgatctcagaagcgttaacttagtctttctgagcctcaggctcctcaatctacaagatgggggctgccaaatgattgctcttggtcattgaagagcatgttaagtggattcatataagagaaggcataggaaatgtcaagcacgatgctggtatacagtggtgttaaccatatgggggctgctgtatatatgggtgttatgtgctgctatttgggtgatcgtattcccacgatccccaccaagcttgtgtcacag

SEQ ID NO: 155861 - DNA, 533 bp, Homo Sapiens
cagcgacaggatgagcttagaacgtcgtggatatcatggaaatggcacctacagggagagtttagaacaccgtggatatcatggaaatggcacccacagcgagagtttagaacaccgtggatatcatgcaaatggcacccacagcgagagtttagaacaccatggatatcatgcaaatggcaccgacagggagagcttagaacgtcgtggatatcatggaaatggcaccaacagggagagtttagaacaccgtggatatcatggaaatggcacccacagcgagagtttagaacaccgtggatatcatggaaatggcaccgacagcgagagtttagaacaccgtggatatcatggaaatggcactgacagcgagagtttagaacaccgtggatatcatggaaatggcaccaacagggagagtttagaacactgtggatatcatggaaatggcacccacagcgagagtttagaacaccgtggatatcatggaaatggcactgacagcgatactttagagccgtgatatcatggaa

SEQ ID NO: 155862 - DNA, 201 bp, Homo Sapiens
ttacagcagtcagggatcccaacatgcttctttgttgagatccctgaatatcgggaacaagcatatccgcacacctgtaaaagtgaacttctacgtcatcaatgggaagagaaaacgaagtctgcgctcagcactttacctaccacccagtctcagccatcaatacggagccctggagatgaatatggggtcctctagtac

SEQ ID NO: 155863 - DNA, 386 bp, Homo Sapiens
tttctttctgaggtgatgaaaatgtcctataattgactggtggtgactgtacaactctgtgaacatgttaaaaatgactgacctgtgtgctttaaagaggcaggtggcatggtatgtgaattgtatgtcaataacggttgcctaatactatatgctgtgagaatggagtcaaagccaaggtgaggcatcaactaagtttggggaagaggaggaggacagggaggggcaggtgaccaccagatcatgaagctccgtcctaaggtctggtaggaggctgccatggaggtggggacggtcagtcctacagctgcagagacagccaggccctggagccagcaaagaaagcatgggcagtgcagggctagaaacagataccgaccgttccc

SEQ ID NO: 155864 - DNA, 352 bp, Homo Sapiens
gaattagggagagatttctctttgtttcctatggatcctgaaggtgagctgccatcacctcatctctaggaggtgctgtagggagaaaaactggaggtagcagggtatttctctctcttttctcccctccgtctagccttaattaatagtttcatcttttgggtcatcgaaaaagtcagctctgattcatccatatccaataaattgcagggtcacatggatcgggtcttccgagccacctgccttctttttctcaagttcccatggtggcgcctcttcaggtcctcacatctcttctgtcccgtcacagaggaacacctcagacccatcctctctaccttggcatatcacc

SEQ ID NO: 155865 - DNA, 484 bp, Homo Sapiens
ctatgttaaggtcaggaaatcggcatgtcatgtacatggcttacaaacacgtggtgggtttacatacatggacaggcgtagtgcacaggtgtatgcttatacacatacactctagctttacaggagtgactggagtttgtgcattcttcagtagacgatttacatatctactcactagaggatttgcacctatgttcaagtaacaggcatgctcatgtacatggccttacgacatacatatagtatatgtacaccaccctgaaggatattcatatccatggcttatagacttgtgtttgtacacgtgtgtacccatattgtgtttgccagaatgtgttcctatgcatgtacacaacagggtttcacaatgctcctgtttggcccctgggcatgctaactcctttggcctgctgtgggtacatgggcacattaccaattaggcaggtttaaggtagggattgggatcgtcaggggtactgcggtg

SEQ ID NO: 155866 - DNA, 1400 bp, Homo Sapiens
ttggggaggaagtgactggtaggctggggttcatcgaggccgtgggagggttggcgggaggtgctgaggagctgctccgggggccgctaggcgggagggtaccctgttccatgttgctcagggtggtggaagagttcatgttgagaggcggctgcttgttctgggagacccccgggctgggcatggccgtcttaggtgaggcaacccagcctggagaaggcaccgccatggaaggagacttgagcctgctgggcgagccagtgggtgaacggacactgagggaggagccgaggacctggggcgacttgagaggtcctggcgggttggcagaaggcaagggcaccatctgtgagggagtctggggtgacttgaggttggcagagggcgaggtgaccaggggtgagtgcacctggctaagggtgggcgacttcaagtgccccatgcccggtgagcccatctgattaatactgatggtgaggtccgaaggccgcctgcctagcccccggtttggggctgaatgcacggtcccaggaggattggacgcagggggcagaggcatgtggctgagccgggtggtgcccacgttgctcatgggcattgagctctgatcagggctgaacatgtcttgggtattgcccatgtcctgggacatggcttggtagggtccctggcctccagagaatccctgctggccctggttgggaaactgtgaaggcatcagcatcttctgcgggccgcccatcacgccactgctgttctgggcccgaacccgggccatctcctcaggactgaggccctggggccccatcaagtccccagggccccgcatcttctgcgacatcagcatctgctgctgcggggtcatctgcacgttcaggttcatgttcatgttcatgttgacattcatgttcatgttgaggttgcctggccccatgggtgggtccacctccctcagcccagactgccccatgggagggctcaggaggccccggcctccaccaaactccatgcccatgggagtgcccgccaggccctcaccaccagccatctgcccgggaaacatggcaggatccatctgtcggtgcgcctgcatcatccgctccatctccatgctctgtcccatgccactgcctgccatgcccagggggcgctgcatgcccatcgaccgcttctccagcagctggtgccgcagcagctcctcacggacccggggagtcatgaatcgctccgcctcaccctgcccacctgggtagggcatggtgttctgggcaaaattgctgggtccccccatagggggcaagtcttcggtccagcccatgcctggtctcacgggcctctgcatggcattcatgggcacctccatgggcatactctgcatgcccccaaccgcatcacccgtt

SEQ ID NO: 155867 - DNA, 554 bp, Homo Sapiens
  misc_feature (110)..(110): n is a, c, g, or t
  misc_feature (121)..(121): n is a, c, g, or t
aaattgttcctacataatcaataatccaatcaaattctagcactttatttgtggaaatgactagctgattctaaagtgttttatggaaatgtaaagggcttctttcttcntggagttgccnttgtggacaggatttgagacaacccaggccaggtttctctggtccatgggaagcatgcgtatgctttttgccctgactatgtctgtagagaacagcccaaacaacaacctcctccccatcagagcagagagccagctagtctcttgccatttagatttttcagggatgagtcagagataccagtctactctgtcctgcagaaaatggatacttatcaacttttccaagcggccctagaaaagtcactgctagtcagaaatctcaccttggaatgtgggggtggctggcatctatccggatgtcagatgaaacagaaacagttccactgtagtagcctgctctataaacacacagagaacccctattacatgtgagctatgaagctattagaaactacagctttggggactactttgattatgtgcaagtgggc

SEQ ID NO: 155868 - DNA, 627 bp, Homo Sapiens
tattttttgcgattcattcacaaaggaacagtatgccaggattggattcgagtcggtaccccagtttcaacttcagggcagccacccacccgacccccggggtgggggggatgcacctcctcactgcacctgccctgagatcatggggagctccactgtgccaagacacagcgtgagagtacgccaagcagtccacatggcgtggcacaggagaccccctggtgcccaagcctcacagcacaagcacacactgactctgacagtcccttggccgccacaggttccactacaggaatacacccaaagctcagtcctcctcagctccacatcctctttctccagtagctgggagctccatccggcacttcaatatctgtgcgctcacgtccaggccacttcacatgggagtccccgctctcagcctggtgtcatggggccattcacaggagctgtcctggtaccaagcggcagtaggcatttttgggggttgtatataccagcaacacatgtacgcacgtggcattgtctgtacagtcagttagaattgacttgggagctgtgctggtcaggcctggggatggtgtggacctacgtggctcacactttcacagcctaagccccatcgat

SEQ ID NO: 155869 - DNA, 466 bp, Homo Sapiens
gatggccgctgccattatatgaccatccacaatgtgaccccagacgatgaaggtgtctactcggtcatcgctcggctggagccaagaggtgaagcaaaaagcacggcagagctgtacctaacgacgaaagaaatcaaacttgagctgaagcctcctgatattcctgactccagagttccaatcccaaccatgcctatcagagcagtgccaccagaagaaatccctcctgtggttgctcctcctatcccccttttgctaccaacacaccgaagataagaatccaccaccaaaacgtattgaagttaccaaaaaggctgtgaagaaagatgccaaaaaagttgtgtgcaagcccaaagagatgacaccacgtgaagagattgtcaagaagcctccacctcctattacctttattcctgcaaaagctcacgaatacattgaggtctcacactgacgcatgtaaacatga

SEQ ID NO: 155870 - DNA, 543 bp, Homo Sapiens
ctagaggatcctcagtttaagcgttcaggggggaacgtggcagtctggtgggaagaggcgtccccaccttcccctaaggcccacagtggagtccgctgaagctctgcatgacaggggaggtggctagtgtcgaggcatgcatagctgcccgtgtgcttgggaccacttccagggtgcttcccttgcaggtcccccatgggcctgcagctgggccaagggaacaaccccagcattacttaagctctcccagggcgcacctgcagatgtggggctgaacgagtgtggcgaggtcacacctctcggggacaggtgactccgtatctggacatccctgagtggtttgccctcagctctgccgaattctagcaagcgatctctttgcagtaatgttatatgtaaacatacctccttcctcccaggagagcagactattttcggatcaagttgtggtagaatctcttttaaaactctggactgtttgggtgatgttaaatccatgtcaacagcgtgcacccaccagatggaaactagaccccctgacgc

SEQ ID NO: 155871 - DNA, 863 bp, Homo Sapiens
  misc_feature (577)..(577): n is a, c, g, or t
  misc_feature (843)..(843): n is a, c, g, or t
caccacaaacccagaaaggggcaacctgcccagactgccagtgaccagatgggcactccatggcatctcagcaagtctccttcctgccccaggcccctgtgggcagcaagaaagccagagctatctgggataaaacccaggaggcagcatgcaacttcccattatactccagggaaacaaaaaaaagacaaggccaggaaggccgatgctggaagtaggaagtgagaacttgcatattaggaagacaatcattatcagccattttccttctctcccttgggatcttctggatgcttcttgcaaactctcaactcaacagggccaggagcttgtgcctttgggccagatggctgggtcctgggccagcatggacatgattctccaaatcttccatcctcggccaaggaaatgtgccaccagggtcaacccagggcaagcccagggactacactctcaccccaattagagccacttctgccactcttgactcaagagctctcacacctggatctgttcctgcaaagggcagtaggggcaaccctcaaaggaaacaggacagacccagggcccggccccntgtgtggcagggggcagcagtgcagccactaaggcttgtggacagcaacaagtctgcatgacagaaaaactggacagggtgggggaaaggcacaagtaaacacagcagcactcaggcccacaggagctggtggggcgtgccgccaaagagctggctggaggggacccagaggcttaggaaaagggagggtttgatccagcacattcaaatatgtctctgacagatgggaaggcgggccaggacaagagccagctcctccagctgtncacagcagatgcgagatctt

SEQ ID NO: 155872 - DNA, 530 bp, Homo Sapiens
gcgctctgtgaccccttctgtcagcaatgtccccacctgtcattgatcttctctgtcagtgccccccatcagtgccagtgcctctgtcagtgagccccactgtcagtaagtttccctcataagtgtctccctcatcctgcctgttgtggcccttccgctctttgctatcggcctctgtgttagttgcctgtcagatcctccccatcagttctctcctgttgtcagttcctgtcccctttcatgctacctccttcatcccttatctgttagggacccattagtaccctgccctgctgttagtgaccccacctgtcagtgtctccccactgcttctctcctgcctgtcagtgggagaactttcagtgcccgctgtcatcacccctcttgtccaatcactgattcccctttccattatttcctaaccctttccaacactaccttcgtcttttcctgtcgcgctccccatcacggcttgagatatcaccagtcatctaacttcaccttacccgcactgccctgacgctgtatga

SEQ ID NO: 155873 - DNA, 436 bp, Homo Sapiens
aaggggagacctggtggagtgtgaatggcaatatgctatgggagtcgttttcactcaaaaaggaatagcaaaaccctctcatacagagaaaatgacagggcgcaaggagctcaaaaatgaagaggagccttccacttctaacaagaacacactagatgtaaattggcaatgctgaaagagcagtgagtcccagagccagaaggaactttcctaaggtatccagcccgtggatagtctaaatgtcccacgtagatgtgacaagccaggaatgatcccaatttacctagctccagaattgcctgatcttcttcttgactcaatgcccccaacctcacattcatccccttgcttcccatttctagctagtaggtaacagcactgagcccgttcaaatttctcacagacagtctcttgtccttcctgacgcttacactaa

SEQ ID NO: 155874 - DNA, 502 bp, Homo Sapiens
ggcgtcagggatctggggtctggagttcctctactaacccaaagtagtaccattttacctctcacatttgggaagtgggcataatagaatccccatgtgacaggtccttttgtgaggacaaaatgcaccagatctgtcatataaaaagtactctatcactcctaactgctattagcaaagtccttctccctgggcctcacttttctctacctgcaaaaagaaaaggacacgctggatcatctcttcagtccgagccaaccgtgactatgtctgatttttccaaccacaatctagaaaagagggaggggacaggccaaaggggaagccctgtgccccagttacaggcaggaggtctgtgacattagccaggaaggggagagctgaggtcaggatgagacttgacacctatctcaggaagcagctgcccagggctgatgtctcctgcagctgatgggtcacccaggcaggactgacacagtccccttcccccaaactacatcct

SEQ ID NO: 155875 - DNA, 374 bp, Homo Sapiens
atccccagttacagcgtcgggggtcttggattcctttctcctgaatcacagcctggagtatacagtagctgctctttcttcttggttagagttcacacttgaaaatatcttttggccagaactgaagcagattacctggctcagtgtcacagggctgctgatggtggtcttcggagaatgtctgaggaaggcggccatgtttacagctggctccaatttcaaccacgtggtacagaatgaaaaatcagatacacatactctggtgaccagtggagtgtacgcttggtttcggcatccttcttacgtcgggtggttttactggagtattggaactcaggtgatgctgtgtaaccccatctgcggcgtcagctatg

SEQ ID NO: 155876 - DNA, 501 bp, Homo Sapiens
acagtctcctacccatgacccctggcggaaccctacagtcccctactcacgacccctacagtctcctacccatgacccctggcagaaccctacagtcccctactcacgacccctacactctcctacccatgacccctggcggaaccctacagtcccctactcacgacccctacagtctcctacccatgacccctggcggaaccctacagtcccctactgacgacccctacagtctcctactcatgacccgtggcgtaaccgtacagtcccctattcacgagccgtaatggtctcctacccatgacccctggcggaactctacagtcccctggtcaggacccctacagtcccctacccatgacccctggagtaaccctacagtcccctacttacgacccctacagtttgctacccatgacccctggtggaaccctacagtcccctacttacgacccctacactttcctacccatgacccctggcggaaccctacagtcccct

SEQ ID NO: 155877 - DNA, 493 bp, Homo Sapiens
ctcgcccaggggccgccgtgacgctcccctaccaggtgtacttcatgcggaaattgtggctccacatatctccagggaaggatgtgaatgcagacaccatactccattaccaccaggtaccgggcaggctgtcctggtgggcactggggccacccccatcttcccacacctgttctgaggctgtagaagcgagcaggccaggggcagggccagccttcagcccttgggtaccagcccatgtggtaggcagaccaagcccttgagggctctggaaccaggagcagaagggcagcaatgtttggggacagtgactgcactggcacctgcagcatgacttggagagggtgggacagagggtcctgtgacccatggagcagtggccgtggcctgcagggccaaccacatgggtggagcaggccatcacctccacgcagatgtcagggcctgcctgaatcagtcattccctgcgcttattaagatcttagagtcacct

SEQ ID NO: 155878 - DNA, 496 bp, Homo Sapiens
attgagccctgggtaggcttgcttgaaaagtgagtccttccagaatattctcagagctgccagaaacatcatctgagggtttgggcatcagctctgcctggctggtgttcaggccctcagtcactttggaagtgagaagaacccttcagccaaacctttgggatcccattttgaagtccagagctggagcaggcgggcagtgccctgggagaccccgctctggataagacacccaaccccaactccagcagctggactctgggcccacaaggggagggaccccagccagtattccctcagagccggcacgaccctgctgtggggcggcgggcccagtcgtgttcctgcagtgggcaccctaggcgtatgtgtatacacgcacagatatttattcctttcgcttttagtggttgttatttctgtagcagccaagtcctgcggctcctggggctgagatctccctttgtgaactccgagaccgcctgacgctgtaact

SEQ ID NO: 155879 - DNA, 440 bp, Homo Sapiens
cctcgcactctccatcgcgccctttccagcttgcttcccgctggagtcatttcattctccattgctggaaagcagatgtgagcagagctggacccagacacacagaggcactcctgattcccttgcgtttctcctcgtggaatcttaattttacccatgtagtgctgaaggaacacgaaatacagcactcggggcccgtaagcaggcctgagcgtcagctccatgagccccctctcctcatagctctagagtgtccatgtagaaaactcgtcagtgagggccagtgggctcatcttgtgtcttttctctgagatgcaagagcaccaggctctgggccagatgctgctacggcgctccgtgtgtgacccccttgcttttctgagccgtagttgttggctcacataagattagtatttacctcgtgcttccatccacgctta

SEQ ID NO: 155880 - DNA, 742 bp, Homo Sapiens
  misc_feature (18)..(18): n is a, c, g, or t
  misc_feature (24)..(24): n is a, c, g, or t
  misc_feature (82)..(82): n is a, c, g, or t
  misc_feature (128)..(128): n is a, c, g, or t
ccgagacagaaagggagncagggnccaagaccggtgcaggaccgggcccagggtgcctcactgagtggggaggacgggtggnccaggtaggtgggcccgcaggtgcacagtgtacctgggtgacaagncagttcagatccaacttgtcctgagcaaggctctcgttgagggcgctcagcttggacagggagtcctgcagggaggcctcctctgccctcagcttggtcacggagagctcgagctccatgcggccagcctcagcctgcagggtcaggccccaagagatgaggaagggcagaaaggtcgggaggaggtgaggagagacaagaagagacccagagagatggaccctcggagacaggggaggggagacaaggaggggatacggtgtgagatggaaaaagaaatcaccgcagaaagcctgctgcttatggagccatttaaaagccatgcaccgcaaaagctgtgccaaaatagctcaagctgcagggcagggccagagttcagaggatcccgagtaaggtctagggatagcactgctcagagcccaggctgcagcggacagcgcaggcccccccgccaaggaccctctgcgctgtggccacaactctcagactccaggagctgaatctcaggatgaccctgagctataggcactgcccccaggagcatccagaagagcagggatacggccataaagagaggtcagtccatcttatggctggaatacagctccgagccc

SEQ ID NO: 155881 - DNA, 388 bp, Homo Sapiens
ggatccttatttaagcgtcagggaaattgtctgtataggaggagctggatggaatgtgtctgtagaggaggagctggatgaaatgtgtctgtagaggaggagctggatgaaatgtgtctgtagaggaggagctggatggaatgtgtctgtagaggaggagctggatgaaatgtgtctgtagaggaggagctggatggaatgtccctgtacgaggaggagctggcggacagtgaagtgccggccaggcctggtggtggtggtgaggtccggcggccagagggcaggtctgagaagctgatgctctggcgaaggcacaaggagggtggcccgtggccgccaggtctatcgctagggttgtggataaagtggcagcgaagaagcggtaggg

SEQ ID NO: 155882 - DNA, 529 bp, Homo Sapiens
tcatagagtatgctgtaaccagctaggtaagattctcggcttttcttcctcttctgcaagatttgtcgtcaagtcactaatcctctcctcaaggagttttcgttcttttgatagtttattgttctgatcatccatgaccaggatctcatcctccagtttcttgatcttggcctcagccgtgaccttctcaagttgcagcttctgcctggcagcttcctcctcctccagctgttcttcaaggtccagcatctgctgggccatcttcttcctttcagcctgtagctgctggcccctgtcttcctcctcctccaggcgggcctccatctcatgcagtatctcctccagctcctgcttcttggccgccagccgcacccgcatctcctcagcctctgcatacagctctgtctctgcctgcagctgttcctgtagcaggttcttctcctcggtcagctgcgagtgcttctgttccagctccttaagctcattctatgccttctgctgccgaatgagctttgcacaaagggatcgt

SEQ ID NO: 155883 - DNA, 582 bp, Homo Sapiens
  misc_feature (342)..(420): n is a, c, g, or t
ggcaagctcattaattagcgttgtgtttcagctctcagattcatcaggcaaggagcaacttcggagctgagcatttgtacctcgggaggcagaaggagggagccaggaaatgaggagggaaagacgggggaaggcctgagtttgcacacgctgagagaggcaaagactggggattttaggtccggtcaatcagtggtcaggctgcgtgccctctgtggcccagccagctgccaaggactatggcttgattcagcccagggtcaagacaggcgtcttttcacctgcagaacatctggagaatcacagcgtcacggaaacagcattagacttagaggcagtggnnnnnnnnnnnnnnnnnnnnnnnnnnnnnnnnnnnnnnnnnnnnnnnnnnnnnnnnnnnnnnnnnnnnnnnnnnnnnnnatgagaggtggtgataaataagatgatcgctgagaactgtctcgcttcccaaaagcgcatgacttccactgtaaggagtccaacatgctgtaccaactattttaggaaattgggccatccctccctggaaccaagattggcgcagtgaccgaggcttagaag

SEQ ID NO: 155884 - DNA, 289 bp, Homo Sapiens
cctagtcgcaagctcattcctgtcaatttggtgttcatgactcataattcctgtttttgaccacaactaaaccaatattagaaggaagtgcttgcacttgtttttttccgatacttttgctctgcaaagggaacaggaagaacagcaaggagtgtatatttaaaagaaaagagcaccttaactacgtaccaaaacacaattcttttgatctaatgattaatttgtgtgtgttagaatatttaccaaccagaaagaccacataaggccgggcacggtggctcgcgcctgt

SEQ ID NO: 155885 - DNA, 281 bp, Homo Sapiens
cgcaagtctcatttaccatccaggctttgttgttccatttgtagagcacaggcagagtaggtttagcatgattcttaagggccctaggatggtaaatgagcattggctttaacttaaacttgctagcagcatgagcccgtaacacaagagtcagcctgtcctttgacaccagacattgacttctcctcttcagctatgaaagtcctagatggcatctgcttccaatagaaggccatttcatctacattgaaaatctgtggtttagtgttgtcaccctcatc

SEQ ID NO: 155886 - DNA, 396 bp, Homo Sapiens
tcccgggagccctttaaccctcactaagccctgcccattcttcctttgtaatattttgcacgtttccttcagacctttatcatgtcattaaaaaaatcttctgactcttgtcctagataacattgttttctgcaccagtcactattcaccattccatgcttctactacccagatatatttcccgcaaactaatttcttcatgtcattttccagctttaaaaggtcaataattctccattacatattggataaaattcaagctctgaaatcttatatttggtgggtcctttagtcatctgacttcactttttattttcagtcttgtcattatctatgccattctgcttgtccctgccccatcagatggctgtatttattattgagaaggagatcctg

SEQ ID NO: 155887 - DNA, 439 bp, Homo Sapiens
ctgggttcctgcagctcttccaaagagggcagacagtgaaattaccattgatcatgaattccttaaggccagggcagggtcaggctctcaatcagcatggaggaggaagggagatatttgaagtaatcatgagagtttgaggaaaccaagggcccacaaagagacagtatcggggcaccagacagtgcctgaatgattcgcttatgcatgggagatgaaacaaagccaaggagtagggctcagggtgggcccagcctgcagcaacatgaaactgggaggaacaaggcagagcagggaggagagccagaaggaatacccgtctccggcatcgcctaggacaccacgcccctgctggagggccagggggacctgggaagcaccagctgcttcttgtctggcaggcggtttgtctgtccaatatctttaaggtcctgtagtc

SEQ ID NO: 155888 - DNA, 135 bp, Homo Sapiens
gcctcctcatgatctctcaaatgcttcatacatactccaccctccagttctgtctgggtggttcttacccgtctggcctgctcgtgtgtgtgtgtgcgcgcgtgcacgcgtgtgtaactagcctgatcttttttg

SEQ ID NO: 155889 - DNA, 442 bp, Homo Sapiens
ccagtttcttagttgacgaatgggaatgaccatagccgtcttcctacaagattgttgtgagaattaaatgttatccagatttatatgaaagcacacagaccagcccctgatacagagcgttagccacccattatggtacattttcattgtgggctgatcactgaaaaagcccggtgaccaagaaagcccccagtcccttgcccctcacggagttcaaaggccactgggaggagagagagccccacgaccgctcagaggaatcagggcttgatgggagatggtctcagcgtacggcaagtcagcggcagccacgtgaagggacaaggcaaggcttcctggaggaagggtcctgtgacctcaaaccttgtaagatgagcagcagtgaccacgttaaagggcagagtgtaagatgaactaatggagtgttgaagacaggaagtag

SEQ ID NO: 155890 - DNA, 581 bp, Homo Sapiens
ccacaggtgtgtaccactacaccccgctaatttcacttttacaatgttctacagcagacagagctaatctgtggtggttgcctctggggctgtgggcaggagttgcttggggaggagcaggagggattttctgttgttatgaaaatattctttacagtgagagtggtttgagatacgcaggtgcagcatttgtcaaaactctgcatgtgtactttaaatttgtgcatttcatggcatgtaccttttaactccaaggaaataaaagacctataaataaatactgaactctaattagtgatgtgtgtgattagagggaaaagtactgatgtccgcaacttactttgaaatgtgttaaaaaaagatgatatggtagactgaatagtagtaccaaaaatgtctatattccaatacctggaaactgagaatatgttctcttatgtggtcaaagggaatttgcaggtgtgattaagttaagacccttgagatggaattagcctgggttatttgggtgggcccagcgtgattaccagggtccttatgagaaggaggcaggagggtcagagtcagagacaagtgacgat

SEQ ID NO: 155891 - DNA, 908 bp, Homo Sapiens
aaataacgggagcccctctgtaccaggctgcccaagatagtgctgcccgtattcccggtggtcgtagcctcggcgctgcccgcccacatagccttggccccggcttcggttctgccggttacgcttgtttcggttgtttcggcgatttgtccgcattctcggaggggggcagaagcgttccttgcctcctccttgtacttcgtgacaatgggctgagcttcctccttctcgagctccccatatgtcacctcatccatatagtcgcatttttcaggcaaagagaagttggctttcatctccagcattatagattcaggcacatcatctccctctacttccttcctcaactccagcctcttcttccaatcttcctcattagggacaaccaccaccactttccgagagaaggtcttgaacagcaatagcttccgccgttggccagaattgtacacattacactgatcaagaataaagttcctctttgtccgggaagcaatctggaccagcttactaaggcactgggaggcttgctgaactaaaaggtctcggcttttggggtccatctctggctcctcgagacccttcattcctcatttgattgagcacagtctcagctcccaggacattgtatcttttctcagggttttcttttgcatatttcagtgcccactgggtctttccagatccgggtagtcccaccatcagaatcacctcacattcctctatggtcttgggagggactgcagtgcgtacacgctccgtcaactaggcacagcatgaatgaacacaaactcttgctggtggtgggaagaagggctcctccttctgaccgaagtttaattctacaacacaatttttgcagaggacatggggtagaaggtccaggtatgccggggatcactctagag

SEQ ID NO: 155892 - DNA, 285 bp, Homo Sapiens
caaaaaataagaaataaataaaagaaagggaataaatagtaattttcccaaaccatcaaaagtatggaaaaaggagtaaaataacgcatttacataaaataaagtggcatagaaatgtcagatccctcagttgttccagcaaaatcagactgctttagactgggttagaaaacaaaatccagatacagttgtttacaacaaacatctaaaacaagatagtaagaaaaggttcaaaactactacattcggcacattggctcatgtctttacccagcagtttgggag

SEQ ID NO: 155893 - DNA, 459 bp, Homo Sapiens
tgggggctatgggcgcgttttacgcgcctgatagcctccccccagcactggggcctcggcctcagcttcaacttcctttccctttccccctggtgacctccccgaaggcccagctggagcaacagacacaaggtagctgtactcagcctttgggattgagtcctctggggcttgccaaaccttgggaaggacccttatttgctgaagcattccagggaatgagccccaagtctcttctgcttggataaggccagccagctgtgggagtctctggttatgcttctgctgagggctgagactctcacttgggagacagtgttgtgttgttgggtgctccatgtcacgaagccacagacaggagagactttgtacattaggatcaaatgagatgttaaagagacagccttagtggctgtatcacacaggcctggaggctatcagcgctaagcgatcctctag

SEQ ID NO: 155894 - DNA, 381 bp, Homo Sapiens
cgaagtgctgggatcacaggcttgagccagcacgcgcggttctgcctgatagctgagagcatagaactccaggtttgagacctggctctgccaacatttctccctctatgactgtgggtgccccactttgccttagtttttacctctgtgaaatggagcagatggctggcacaggtagcaaaggagtaaaagttatgtgggagggtggtacctgagtgagactctagcttggtcttgccccacccctggtgtaaacataaagaagcctccctggatggctcaatcttctccaaaaaggttagaggtgtaattcctagaggaggcgaccactagctgggctttgaagtatgtgtaggagttcataagacaagcattctggca

SEQ ID NO: 155895 - DNA, 546 bp, Homo Sapiens
ctggggcggatgtcttcgctgttgcacagcacgtgaacggcatactcgccagcctcctgcggccagtagcgcacatcacaggagccgtcgcccttgtcgtcacattcgatcttagcctgcgatggcccttccaccgagaagcccagcgtgcccacgtcgtccccgatagcctccaccacaaagtctgctgacttgccaacgacgccgccctccagcccagggccccaggcccgtaccttctgattgccacactcggtgcccaccttcacttcgaagggactgcgcccgatgttctgaccaccccacgtgatggtgacgatataggttccagggaccatggggtaatactcgaagccatacacgccatcccccaggtccttctgcttcacgcgctcctctcccttggggcccttcacggtgaccttcagctccccactgccagcgccatttgtgtacaccttgaagtcagctgtctccttcacccgcacacccttgggctggaggccccggccaaccgcccggcagcactcggttacaggcttgcca

SEQ ID NO: 155896 - DNA, 398 bp, Homo Sapiens
tctgcggcccagtagcgcacatcacaggagccgtcgcccttgtcgtcacattcgatcttagcctgcgatggcccttccaccgagaagcctgacaacagccaccagtcccctcagtgccctggagcctcagggtgggccgtccttgccatcgtctgtccccaggtgcccatgctgcagcctccaacttacccagcgtgcccacgtcgtccccgatagcctccaccacaaagtctgctgacttgccaacgacgccgccctccagcccagggccccaggcccgtaccttctgattgccacactcggtgcccaccttcacttcgaaggggctgcgcccgatgttctgaccaccccacgtgatggtgacgatataggttccagggaccatggggtaatactcg

SEQ ID NO: 155897 - DNA, 557 bp, Homo Sapiens
acccactactggccttgggaatgttaagctacagggtctgtgcacactcagaaacgttgggtctaggacagcctccaggacacagcagggctggtgccaccaaatggtgagagacgggctcagtggcgtgcaagggcctgcctagatcagacacacctcgccttgagagctggaaacaccgtggccgtgaaaccatctctggagggaaggctgcttcacggactgaaggacaggcagcttgcatgtcctttgcctggttcttcctcctggatacttttaaccaaacagggtcatgcttagccagggctgaatatcagagttggtcagaatcaggtcaggaccccagtgtcgtgtactccccatctgagaacgggttggtagtggctggtgtggctgtgtgccgagggtccgtggtccctgcgactctcaggacaccgctgcacgtgacagctctcgcccccggcaaccattgctgtgtgtgccacctggatctgcagggcctggggcagagggtggtccgagttgggacaggtttccaggccaccacaggctctcgg

SEQ ID NO: 155898 - DNA, 802 bp, Homo Sapiens
catctctttgtatacttatgtatttaatttaagtgtatttaaaaacatttttctgatagtgctgttattgtcagactgctacagaggtccatggcagaaaattaagataaagataccttgatctaagaagttagtaaatgctgtgtgacagatctcagtaatatagcgcagggatttgtacccaggtgtgagagattcaatgccagcgctcttaaactaatgataaaaataaaatgagacacaagctaaattggacactgctgtgtgccaggcacgccatttaagcagctttaattggattagctctgactcttctcaggcacctaaatgggtaagtacttttattatccacatttgttagttgaggaaactgaggtccagcctgggtgtttcttgcctgaggtcacaaaggtggagcaacgcttgactccagatctgctttgcacacttcctcccttatgcttcctctttaatgctgaggtgagatgttaaagggagctgccaagcctcagtataacagtacaaagaatgattcctgctaaaattggttgtttgtaatatgtaataatcctgagttatcagtgtggtggttcaacttgccagcaattaaaataggagaattgtgcttatttctgatcctctaccccaccttccgacatgccctggaactaggaacaaagccacaagactgttatgtctgttgttttcttagtctgtgtgtcgggagtatatctcacatttggtaaatgtgcattttctttggttacacctggaatgtggtccaagctcattcagataattg

SEQ ID NO: 155899 - DNA, 688 bp, Homo Sapiens
ggccactctgtgagccctgagcaggagcggagaaactcacttctgcatggataccgcaggcctcatcgaaagggatgtgagccgcacggacaggaccaaaaagttctacgagggtcccgagaacccggggctgggcctgctgaacgatatcctcctcacctactgcatgtatcacttcgacctcggctacgtccagggcatgagtgatcttctctccccgatcctctacgtcattcagaacgaggtggatgctttctggtgtttctgtggcttcatggagctcgtgcaagggaactttgaagagagccaggagaccatgaagcggcaactcgggcgactgctgctgctcctgagggtgctggaccccctgctctgcgacttcctggattcccaggactccggctctctctgcttctgtttccggtggctgctcatctggttcaagagggaattcccctttccggatgttcttcggctgtgggaggtgctgtggacagggctccctggccccaatctgcacctgctggtggcctgcgccatcctggacatggagagggacaccctcatgctgtccggcttcggctccaatgagatcctcaagcacgaagcacagagtgtgcgctcgggcggaggtgttgagtgccgatggcgcctgacccaccccctcccacagcacatcaacgtgctg

SEQ ID NO: 155900 - DNA, 278 bp, Homo Sapiens
tgaattgcttaaactgctgctgcctctgcttctccgatactctggggaatttgttcagtctgcatacctgtcccgccggcttgcctacttctgtacacggagactggccctgcagctggatggtgtgagcagtcactcatctcatgttatatctgctcagtcaacaagcacgctacccaccacccctgctcctcagcccccaactagcagcacaccctcgactccctttagtgacctgctagtgccctcagcccggccctgttttgcctcagtagccc

SEQ ID NO: 155901 - DNA, 474 bp, Homo Sapiens
  misc_feature (46)..(278): n is a, c, g, or t
caacgatggtcctcagctactccggaggttgagacaggagaattgnnnnnnnnnnnnnnnnnnnnnnnnnnnnnnnnnnnnnnnnnnnnnnnnnnnnnnnnnnnnnnnnnnnnnnnnnnnnnnnnnnnnnnnnnnnnnnnnnnnnnnnnnnnnnnnnnnnnnnnnnnnnnnnnnnnnnnnnnnnnnnnnnnnnnnnnnnnnnnnnnnnnnnnnnnnnnnnnnnnnnnnnnnnnnnnnnnnnnnnnnnnnnnnnnnnnnnnnnnnnnnnnnnnnnnnnnaaacattggattttgttaaggtaaacgtgggctttgaaataatatgaagagagaattgtctgttcatagcattccacattattcactccagccttctaaaatcccttcaaacgatgcatttttggaggctctggcacagcctccttatctataacaggcagtgcactgactggggactgaagctgaggaccatcgt

SEQ ID NO: 155902 - DNA, 1044 bp, Homo Sapiens
  misc_feature (46)..(72): n is a, c, g, or t
  misc_feature (794)..(851): n is a, c, g, or t
ttggtttggtgacggcagcgtcgttcatcatatgtcggggtaggtnnnnnnnnnnnnnnnnnnnnnnnnnnnattttctgactgtggctaattcctgaaagcatgctgtacttacaaaggatgcttttgctctgtaggaattcaccaaggtaaaattttcaaagcatatgaagaggattgttgaaattaattaggaggtgaggggaatcttgggatatctacttcttctagcctctgagctatggcttggaaccttggtcagccttattaaggacttccttagtttataagtgtatctcccatgggatcacaaagtgctttcttgtttgatttagttcatttgaagaaacattaagtttctcctactcatttattcattcagtcacgcattcacccagattatttattgagcacctatactatgtaccaggtaatggcagaagataagtatatatcataccttttagaactataggagtgacactctccccacgctttggctggcattctcttctttgtcctaaatattttctgcactagctagccttcagaattgggattttgttaccatgcaacagtgtatcagagtttatatattgtgacttgggaaacatactttaacaattagtttctgtaaatttgagtatgaccatctggtaaagcttatcacagtgtatattatacacaaaagaaatagttggctaattgaagtaatgtgtgttgatcattcctgttcaccttttctgtattaccattttctcaattgggaattctacctttaaaaaccacaccannnnnnnnnnnnnnnnnnnnnnnnnnnnnnnnnnnnnnnnnnnnnnnnnnnnnnnnnnaagagacctgaagcatgaatttgccaacaatgaaaatgttatccaatctgaacatttatgatctatcggttcaagatgttctagaaatattcttatccttgtgacagaagtgtctttgttttgttttctttcaatttctctctacaatctcccgtctaggagcgtcatcggtaccgagctcgactcgtatcat

SEQ ID NO: 155903 - DNA, 695 bp, Homo Sapiens
gggcaattctaacggcgatccagggagggacatggtggccaggcccttcctctgctgctgctgcctccagcttcccttgctctctcccagccccggccgaggtggcccttaccttgtgcagccagtgcaggttcatctgctgccccacggcaatgtgacatagtgccaggaccaggaggccagcgatgtatgcgaaggcagcagctgtggtcacaaggatgggtacgggccagtcgctccagtagcccatgcggttgtagaggtaccagttgaattcatcatagtcattgtggacttcccaccagaagtaaagccaggtgagcgtgaggccaaaggtgaaggtgaggagcaggaaccagaggcgctcccacggtgtggtatcatcatgggagcgctagtagcgcttccaacggcagccgtagatgcccgtgaggcaggagaggcacagctgtggctcgtagtactgcaggggctggtgtctcaccatactcgtgcccacggccctggcgcctggccctcaggcgcccatggaggcccccagcttgtcctggggctcagagcagagaaactatttgcccagaggtgcacagctatactgaggtgtcaggactcctacgctggcctgtgggactccagaaactcagtcatgtgttctgtccgtctaggagcgtaatcggtaccgagctcgattgtat

SEQ ID NO: 155904 - DNA, 630 bp, Homo Sapiens
tacgtcctagacggcacttctaggtgcactgcttcacatgcatcccccttccctctacagtgggcagcagtgttatctccggatgaaagcaaaggcttctgaggggagaaggagtcgggctcacagctgtgcagtgccagcgaccttacctcactatgcttcagtttcctggatcagcccatctataaaatgggataattcttagcacagagtgagcacacagtaagagttgatgctgctgtccttgcaaccatttctgttatggccccaggataaagtccttatagtcccttatagatttacaccaaaggatgtcgagcccttggtttgtgaagtgggactggtaactagattcaatgagatccatgccctgggcttggtgacagaatcaatgatggagttaaaatcctcacttccccccttccaaccgcatggcctcaggaagacaacatcccaaactcatctgtcacaggaagacagtaccagcatcttcatgatcagggtgactaaatggaggctaggcattgtgccaggctctcaacatacctcaagccccacacgctgtcatcacctggtgatgccaacaccagctccatgtcaccagtccaacgactgagcgtctcggagaca

SEQ ID NO: 155905 - DNA, 791 bp, Homo Sapiens
accaggatgatgatgaagacgacgggaaccccgacaccaaccagcacccgccagccggccagcgagaggccaaacaccgtcagcgggatcaggaagaagaagatgatcaggtagaagacggcgaaccagcgatacttggcagagatgttgcccagccccttggccatgcggatgggcaggcgagtgaacgtggatcgtggtaccacagcaagatgccggagatgttgaagaaaaagtggcacagggcgatctggagtgaactcctcaatgcattgccagggctggctaaggcggccaggatggcggtggtggtggtgccgatgttggagcccagcgtgagtggataagccctctcaatggttatcacgccgattccaatcaggggggtcaaggccgacgtgaacacagagctgctctgtacgatgaaggtcatgcctgccccgacgaggatggccaggtagccagtcaaccatgcaaagggaaaggggaaatcagtgtggatggtcttcttgatgacagtggcgacctgccccttgagcacagagcccaggatcttgacaatcatgatcaggctaccacagaggaccagcagggagagtatgagcaagatggtgcccacagcaagatccgggaggtggaaattcacaaagatatgctggcatttggcgatgttctccttgtatgtcacattcttcatggtccagttttggatgccatccgttcaacagagggaatggggaggtgcagttatcattcgagggaacagtgacgttaatctggctcttgttggt

SEQ ID NO: 155906 - DNA, 654 bp, Homo Sapiens
atgctgggacatgactttcctttattattcattacattggccaaccagcctctaaggactttgggcagcccaatggaaggctctcaaaggcctttgagtttagcttttgggcttacgatggttttaattagccacagggagaaaaaaagccatcctgatgtgggactcctgaagtgtgtcctactgaaagccaaatggagaactgaggaatgtcatcctctccacccagtcatgtacctacctcaaaaatccaaccctcagtcccaagcttacacatggaaaagcactgctttccctcttctccaggggtctacagatatttcctccttgcatgtcatcagatgggtcttcctcctaaatgcctctgaactttactaagatgatccattaggccaggggtccccaacccccagaccacagaatggtaccaatctatggcctgttaggaaccaagccacacagcaggaagtgagtgccagatgagtgagcatcatcacctgagctccacctcctgtcagatcagtgacagcattatattctcataggagcatgagagggatctaggctgcatgctttggatataggttgcatgctccttatgagaatctaatgcctaataatctgaagtgacagtttcatcctgaccgtctagga

SEQ ID NO: 155907 - DNA, 246 bp, Homo Sapiens
ggatacgctctagacggaatcatgatagtggtgaacacactggtgaagcagaaatagtccacagcattgagagaaagaaggtggtaaagaaactgctctctttcttcttcgccacgtagaaaagcatatcgcttataaagcttcttggtgagtggttggttagaaagcactgcttaacaccctcgcccgagctctactccaggccacgtcctaccacaccccagctcgtccaccctcgatcatcac

SEQ ID NO: 155908 - DNA, 718 bp, Homo Sapiens
acgatacgctctagacggatagcagatgggtgaaggaatgggtggatgagcagagggtgcttgtatggtgggtgaatgaatgaatgggtggaatggatcagacagggactggacttggcgaagctggggtcaaccctgtcaagacccattcaaacttaccctaacatgtcagaggacccagcccaggaagaaacaatgtccctggcccaccagaacttcaggcagccaagggctaagcctccactcccgaatatgagccctggtcccagagcataggcctaggccgcagaggccccccaggctgggtgaagctggcctctctggtctcagtctcccctgtgagaggcagtgtcaggtaaagctaagagtgtgggccatgcagccagacactaactagccgtgtcaccttggacacatcctgtgagctctccaggcctcctctgtgaaacgggaatgggaagtattgtcctcgtagtgctgtggtgaaggccacaagaatgagcccctggtgaggttcacacagtgactggcacgtgggcagctgccaggatctgggttcccaatgccagccctgtgagggcttggccacagtgatgtgacagtggtcctgaggtgcccaggttctcacctgaagtcaggtagcaggggataagtggcactcaatctgatggactgggtctgggggaagattcggcaggtaggagacggtgcgcagttc

SEQ ID NO: 155909 - DNA, 320 bp, Homo Sapiens
  misc_feature (256)..(270): n is a, c, g, or t
cgtgtaccgattgcgctcctagacggcaacgacagtatggaacggaactcacaggagggaagggaattacagcctgaggttgtcaaagtcactcctccacctctaaaaagctacagtcaagttttataacctctctaaactttgttggtgacagcacagttcctaatacacactaggcctatgacatacatttgctgaatacaagaataatatttgtatgtagacctcacactctaagaggaagacaagtcattcnnnnnnnnnnnnnnnccccctggaaagggaagttgctcaataaccaagttggggggtgtgcaggg

SEQ ID NO: 155910 - DNA, 579 bp, Homo Sapiens
  misc_feature (466)..(513): n is a, c, g, or t
gctctaggacgggggtgagcatcaaaacggcggtctgatgtacatgcccagctcccaaaccaagcatcttctttatatattttacatgataacttcctattaaggtttgacgaaagaaggttttgctactgaaaccaagtctgaaaactaatgttaatacccacggcctctagtacccagttacaagactataatcagtgggaaagcagtgcctccaacaacaacaccctagggtcacttactggtctatgcttctaattctgttccccctcaggaacgctcatgttcaaaaatagtccagtttctacttctaatcctcctcaaaatggtgcaaactctgggtaacactggtagagccaccagaatgctaacaaggcaacaaggaagggcgcaatggcagggcacggtaagagcacggcacacacaactatatacaatcaccaaatggcaacaagaacctggagcnnnnnnnnnnnnnnnnnnnnnnnnnnnnnnnnnnnnnnnnnnnnnnnntgacaatacccactaaaactcagcaactgcactcctaggactatcttaaccaaatgcatgcaagct

SEQ ID NO: 155911 - DNA, 416 bp, Homo Sapiens
ccaaagaacatttcttaagattggtggtgcaaggatcacaccttgagaaacactgatttaggccttcccacagtacaaagaaatgttgcctgccccatccttacagcacacctgatgacttacaagaggtgctgctgaattcctcccagggaagcaaccttaattcttctcagcaagacaaggaggcagccttcaggaaggacccaggagcttggtattagaggatgatccaagtctgatggcaaatttagagtgctccagggaacactgaagtcttgatgatagggccaaagggagtgattccctctttctaacctggccggatagcaggtaaccagacagaaataaggcacaagcacgctgaacttcgtctttcctccgtctaggagcgtactcggtccgagctcgattcgtac

SEQ ID NO: 155912 - DNA, 672 bp, Homo Sapiens
gattacgctcctagacggcaggcactgtcttgtaactttaaatagacatcatctcaagtctacaagaattatccaaagatggtatttaatgacatttctaggtcttcagacactattaatgcagatagtagcctctaggtcctgaagattttactagatactggttactgaaactgagctttcttgaattctttttccttccactgtggtttcccgcatttcaacatatcacctatttttgtcctcaaaggttacttaaatgttttccacagaattaaattaaatatgaatcatccctcctctgatttttgaaatgaccctttgcttcctatgataatgattcttctggtccgttttgtagttatatgttagagtttgtaaatagtcacacattttgcaactgcatataattttcttattattttttcctcttcctctaaaactgctgttatttcttttaactttttgtgggaaaaattaaacccatctttcactttgttgatatacttatttataattgaactccttgatttttgctcgaattgcttttccagttacccccttttgaggggagacattatttgggttttgtttagtgtatccggctttttttagttagttgtatccagaagtgtagacttttctatacataatatcccttttccccccgta

SEQ ID NO: 155913 - DNA, 879 bp, Homo Sapiens
gctcgatcctctatatggggcgagggcacggaggactgtgggcgtgttggacttgggctgtggtgctgggtgtggcggcgccgaggactggcctgactcggacatttcatcctgtggacactaaggccaaacacagggaggagggagagctgagtcactgcaggtccctggcctgcggctccgccgtggctgcctgaggccccgcgcaccaatgctttgcactttgcctcgcccgacaccctgcgggccagagctcctctgccgcccaccgggctaagcccttccgggcctcaccactcccgagtggctctgcttatccggccactgactccggctcctcggaagcagggccaccctcctgaaatggcttggaacggggctttccactggtgccctccccagacgattgcttgtaatgggccagtgcctcgccagggacacagcggcagccccctgtagcttgtggctgttcagaaacaagtccagcccaggtagggcagagggctctgactggggaccccagaagggctggctgtgccgccaccgctgccccgtcaccatcactgtgctgaagagctcgaggctgggcccacccgcgcctgccccacgttcctccccgggctcaggtcagggccagggagtgaccagaaggtgctgaccctgtggcttgactggaccagagctcacccctgaacatgagcaagcgcaaagaaaccaccatccctgctcacagaaagggacgccaccaagacattctggagggtgggggcagcccggattacgagaaaccgcaaccagccgtctacctcaggaagctcgctagggaggcgcattctatgtgactaatgcggaatgcgaaacccgtatagagcgtatcgt

SEQ ID NO: 155914 - DNA, 428 bp, Homo Sapiens
gatcgagctcggtaccgattacgctcctagacggactgttagggatgcttataagatcatggctttatgggctacagggaccttgagagctcttcgcatctttcttttgcccaccagttaggatggctcctgaggttctcaaactgaggaaggggtgggcagacatatcttccaggctgctagtcagatacatacacttctcttcctactgaaggcctatcttattctctgaagatgttaaatttcacaatttgcctccataatttctttttatatttctcaaccttgaggcaaaattgccaatgttgataatcttagagatggaatcctgacaccaaaagatctttggagtataaaacaaaacaacctcccattttcctgtgcgttatgatgctggggacagtctttgttaatcccccccgccctgc

SEQ ID NO: 155915 - DNA, 193 bp, Homo Sapiens
gtcttaaattttagttggtttcaataccagtagtaatttttatttccactcaggaattaaaaaaacttacacatattctaagttggaagaatagctttcactttgcgggatacaggaactcacatgcatcttctgatcagtggcactgattctaagcccgtctaggagcgtaatcggacacggctcgatgcga

SEQ ID NO: 155916 - DNA, 638 bp, Homo Sapiens
gaaacaaatttctcccatgtttaaactgtgatattctgggttctattatagtaccttagcctataccttggcttatacgcgtacgtacctggactcagtaataatagatgtactagggaaagaaggcacatttacagagagacccactcagcagatacccccactcactaactgataagcaagatttataccgaaatgttctatttaccaagcattcccatatatgaatacatgactttacgtgatactcataatgcccctgtgactgtgactgccttgatcttgctctcaaaggggcttagtgactttactaatcatgaagatggagccaggggtcaattccagatgttaccactgcactgtgtacctttcagctctctgaatgcctccagacagaagtgacaagactgcaaaagaccaatggcgagcactgactcgcacttaagccacggagcctactgatactttcatccatctgcctccaggacacacacacatctgcccaatccttttttttggccctagggtttagggacttgcagacacctgaatttccctaattcttggcaggttcccatttcctgtggtgtcactgacttgcagacccttgagggctgagagtggtcttagaaactccc

SEQ ID NO: 155917 - DNA, 471 bp, Homo Sapiens
atcagctcggtacggagacgctcctagacggcatgcagttgctggtactcctgctgtgcaagctccaggcgctgctgcttcacctggtagatctcctttgtgcactcagagcctcctgggccaccaccaggtaatccttcagcatatgttcctgctcccgccgccattgtactcgaggatcctcaatctgagtggttttggtgttgtggtctatgaagtaatctccaacctgtgggtcatatgcctcttcccatcctagcggcaactcatcactaatgcagtcagcaaaggtgagcggtttggtgtacctgtcccgcgggtcgatccagctggtggtgcggttcgtgtggtctatgtagtagaccttgccgtcgaagtcgcgcgcctcctcccagccctccggcaggggcagctccggccggggcatcttcccaagcgctggcggcgctcccccccgtctaggagcgtaat

SEQ ID NO: 155918 - DNA, 332 bp, Homo Sapiens
gatgtcctttgcaggaagatggatggagctggaggacattattcttagtaaactaatacaggtacagaaaccccaataccgcatgttctaactcatcagtgggggctaaatgatgagaatacatggacacacagagagggaaccacagacactggggtctccatcagagggtggagggtgggaggagggagacggaccagaaaaaataactcatgggtactaggctttatacctgggtgacaaaataatctgtacaacaaacccccatgacacaagtttacctgtataacatacctgcacgtgtacttctgcagttacagaagatcaaggat

SEQ ID NO: 155919 - DNA, 577 bp, Homo Sapiens
cccgattacgctcctagacgggggacgtggacttgtgcctgctcagcgccggcactgttctttcagcatctacgagaagctgatccagttctgtgccattgacgagcttggcaccaactacccaaaggtgcgtctggcacacggggctggagggtgatggggacacccagggtcctttgcttgttccatgggatttgagctgcagccacagaaaggtccacgtggtggcacggctcgttgaaagcaccgtccctgtctcttttgtttgagtccctattgttctgaaatagtcccctgaagagattccggtgtccggcctggtgcctggcccctgattggtggggacatgtgtggacctgctgctcctcggggtccgctggatgggggcttcgtgctcccatgttcttcagcacttgcgagccgccccttgggtaaaagaccaaagattacagccgagaccccgggctatgtttgatccccatggctggtctgaggactcctacctatgaggcattagccaacggcccagaaaaattgagatggacgaacttcggaaagcacgtctaggagcgtaatc

SEQ ID NO: 155920 - DNA, 767 bp, Homo Sapiens
caataggaccagactagggagtgaggctggggcatgtccttttaaacaaacgcccctgtgattcttaggcactgtcaggtttgaggacggctgcctaaatggtgtcattgaggaactgaatgaaggccctcccgcttcgggctctctgttgccagaaatctctccttgctttggcttgctgctggtttattcattgcagcaaacatttcttgagtcggtgtagagcctgtgaggcctgtgtaggatcagctatgcagactccaccctaaaaggagcctgaaaatgttcatgggtatatcctgaggagggctgagagacccccgactctgaccgggtcactgggtaccaactacccgtgaacagattgtctggcttggggtagggggtggttagagagaggaagttcctctgactgaggaccaagatcccaaggcagcaggcacactgatcctgaccctgaccctcatctcgagccctcagcagccacgggtacacatatactcccctcactgggtatttgtagattacacaaagtaacctaggtgctgagtgctgagaatatacactcccttaccccgtctcctgaatcctcgtctcaccaggcctggcagccacagatcccacacgcgaaagatgtttcccgtcaatgaatctacatctggattgtacctctgctctataatacggtatccactacacacgtctacctagttatatataaattagccagcgcagcgacacacgtctctctaatgacacagacgttg

SEQ ID NO: 155921 - DNA, 692 bp, Homo Sapiens
tcgtgggacatcctccgggaaccttcacgcggctagtgggaggcataggctggtccacagccctgagggagggctggctttgcgagcaggaggcactgcattgggagatgtgggtgatgggggcagcgaaatctaggtgtgggaagagagacgatgttagcagcagagccagtgaaaggcggcgcactcttcatgttacagccagtattcagcaggcgcctgcctcacccaggacactctcacagtgatgccccgaggcctccccggccagcagagggaagtccacgggcaccttctgagctggcctcattcacacagagaggcctgggatgccaccctaacacccaggagcgcagagccttccggggagaacgtgtctcaagtttcaggaccacagcagcatctgtccagggggcatgaggcagggaggccccgtgcatctgaatgcaatgcagcctcgggcaagagcgccacaggaactaagagcccgaggggagcagcgattctgcagtgctccggagaccttgcagagatccaggtgtggctcacctaaacccagggaggagcacgctgagagaggcagctagaaagggcaggcacctgctgccagatcatctgcagaaggcacagatccgcgagagccgaagcacccgtgccgtcccctccgtctaggagcgtatcggtccagctga

SEQ ID NO: 155922 - DNA, 331 bp, Homo Sapiens
ggtaatcgagctcggaccgaatctcgacagtggtgcatcaggttagcattatacggttggggtgttctaatatactaaaccttcagattgtttagctaattctgaagtccgtggatgttagctagaagcttatgatccgattcaccaactttcaacaatctactggtccatgaatgataagttactgtcttccgctaacaatagaaagagctgattcctttaccactccccaagatctaaacttggtttccactttaagagttactcagttgagaacacttaatatcaagtacaatcattaagttgcactgatactaccattatatcagag

SEQ ID NO: 155923 - DNA, 186 bp, Homo Sapiens
aatcgtcgaccagttgtgcaggtcatttttaacctcttcattcagccaaggatcagtcgaaggcagaccttataccccaggttctctctgccacctcagtaaacttgtgtcactcttataattttagcctgtgttcgtcaaccagtcctatcccttcagcatgtgcacactgtcggtaccgacctt

SEQ ID NO: 155924 - DNA, 569 bp, Homo Sapiens
tgaaaggcaccactgtctcctcccttttccaatccacacagaggcatcctatggtgagggtggtggctcaggccttctgttgtccagatgtggctggaagcagccaagtcctccccttctcctctgccttcctgggcagctccaagctggggtgtcccagccatctgtgtcccagcctaaggattccgggcaaaggccagggtggggccttcctgagaaccaaatgcaggggacatgccgtgcgcctgggcaggacacgtcttggttcccatcggtggccctcggcctgactcccacagtccggccgctcgctggccaaattctcagcatcctggtggccctagcaggatgctgctctcccatccacactagctctgagagcccagcttcatgggcatggaccaaggacccctccctaagccaggtgcccccgcgatgcagggcaatagcagggctggggagagtgcgggatgatgtgggacaggctagggctgcccggacagtgggcaccaggctggggtgaacagtgggggctgatgtccagccaggcagccccgagtctacaaaga

SEQ ID NO: 155925 - DNA, 230 bp, Homo Sapiens
cctgagtactacagcactatgtaatattcataaacagtaagtcctgtcaggagcagatcgattagacaagtagtccaggtacatctgcaggttaggtttaagaatgggaagctggctaagttgacagtatatgtaacatagtaccaagaatactggaccagcagccagaaacataggttctagtccgggctggttattttcttgctctgtgactctgtgtaagtgatttc

SEQ ID NO: 155926 - DNA, 965 bp, Homo Sapiens
  misc_feature (344)..(344): n is a, c, g, or t
taccctatgtctcgatcgttctcggaattaaccagacaatcgctccaccaactaagaacggccatgcaccaccacccacggaaccccaaagcaaggaggagggctcgggcccgagaccgttcacctccccttatccctgttcccctcttcaggatggagctgacctcaagggaaagagggaggggacagcctctgccctgggaacttcgactgggcctactgctaagcgtgctggctgccacactggcacaggcccctgccccggatgtgcctggctgttccaggggaagctgctaccccgccacgggcgacctgctggtgggccgagctgacagactgactgnctcatccacttgtggcctgaatggcccccagccctactgcatcgtcagtcacctgcaggacgaaaagaagtgcttcctttgtgactcccggcgccccttctctgctagagacaacccacacagccatcgcatccagaatgtagtcaccagctttgcaccacagcggcgggcagcctggtggcagtcagagaatggtatccctgcggtcaccatccagctggacctggaggctgagtttcatttcacacacctcattatgaccttcaagacatttcgccctgctgccatgctggtggaacagctcagcagactttggccgcacctggcatgtgtaccgatatttctcctatgactgtggggctgacttcccaggagtcccactagcacccccacggcactgggatgatgtagtctgtgagtcccgctactcagagattgagccatccactgaaggcgaggtcatctatcgtgtgctggaccctgccatccctatcccagacccctacagctcacggattcagaacctgttgaagatcaccaacctacgggtgaacctgactcgtctacacacgtcgcgagcacagcactgattgctgacacgccgagcgagacccggacatt

SEQ ID NO: 155927 - DNA, 347 bp, Homo Sapiens
acagctgtaggctctcattcacgattggagagacagcgtccagctcgcccactgggagggtctggggggtgtatcggccagtgaccaacagttcatagaaccgcattcgggtttcccctttggtgtccagctccacgtggataatgttgcccatggacggaagtgctgtgcaagtgctgaacggcatccgtggctccccggaccgtggcaaagaccacgttggcgatgcccaggtgcttcttggtcttggggttgtacagtgtctccacctcctccacctccctatacttcctgcacatagtccctcaggaagttttcacgatgttatcattcagcgtggctatgtc

SEQ ID NO: 155928 - DNA, 419 bp, Homo Sapiens
ccattaggcgcgttctgcgtcccgacccagtgccgggagtcataagcagtgtggcccatcggtccacccacacagcagtcacagcaatagaaactcagctgacgtggaaaacgtcagagccaaaaacagttcaagtacctctagtaggacttctgctcaagcagcttcttcacagtctgctaacaaaacaagcccccttgtcttagattcgaacacagtgactcaaggtcatacagcgggcagaaagtccaaaggggcaaagcagagccagcacggcagccagcaccatgcccacagcccgctggagcagcaccctcagcctcctctgccaccgccagtgcctcagccccaggagctgcagcctgaaaggctgtctcccgcccccctcgaaacccttacacgcagaaggcccaatggga

SEQ ID NO: 155929 - DNA, 402 bp, Homo Sapiens
acttaggtccttctgcgtcgtcttatttggaggagggaggcagcgctcccatcctagggtcttttcagtcagttcatgcaacagcctctactttctcctagcgtactgttccactattccctgttgctgtatttctccaagacggaagattcccaggacagaccaccaccacctccgcaccttgttggggtaacctggtgactcattcattggtcccttctcattctggaccctgtggggcactgagggctgcatcatcacagtcccggctttgtggaaacgtagtgtactgaggtatacaggtttgcacactaggggcatagatgcctggaggcacagataggcggatgctctttgccaccggtgtggaccgtgcagactgcagaacgcgcctaatggctt

SEQ ID NO: 155930 - DNA, 384 bp, Homo Sapiens
cttaggccgttctgcgtggtgctgccgctgctggcgctgacctggtatccggctgtgctcgccgtcaccgagcgccgctccgccctcttccagatcctcttctgctgtcttcgactcgctggagggcttcgtcatcgtcatggtgcactgtatcctccgtagagaggtccatgacgctgtgaaatgccgtgtggttgaccggcaggaggagggccacggggactcagggggctccttccagaacggccacgcccagctcatgaccgacttcgagaaggacgtggatctggcctgtagatcagtgctgaacaaggacatcgcggcctgccgcactgccaccatcacgggcacactgaagcggccgtctctgcccgaggaggagaa

SEQ ID NO: 155931 - DNA, 479 bp, Homo Sapiens
caggatcttcgtgtgcccagaacaggtcttctattctgaaaccccaccctccatcaaggtcctgcctgtagagtctaccttgcaaagcctcctgctcctacccatgctacaggccaggaaccagagcccatcatctcagaggcccctggatgtccttcgaaggaaccaggaccctcagagcccagcatccatctctgtcatcatcttcatcacacccaaagaagagccagccttgcaggagggtttacatctccaggaagatgggctgccagcaactgcagaggatgcagccacctgcttaactgtgctgtccagccaggcagccagctgcagggcctcttgctgcttaagagctgatgggccgggcatgttggctcacacctgtgagcacagtactgggaaatgggagcacagtactaggatacagtagggagatccaaaccgtatcagacgcgcctaatagatacagtaagagagtc

SEQ ID NO: 155932 - DNA, 497 bp, Homo Sapiens
  misc_feature (277)..(346): n is a, c, g, or t
cagtacattatttatcttctactttacactctaagggagggtttgacttagtctaattcactcaataaaatgaaaacatcctttcctgattcactcactcagtcgcctcatctttgtttgcatccccactgtgagcccatccgtttgcgtttgctgggactgagtgtagacagatatgcgggcagtgtgaggaaggcagggtgtgtctgggaaggttgtgctctagaactcaagatgcaaatcaggcccacctgtagaacttgctttacttattcannnnnnnnnnnnnnnnnnnnnnnnnnnnnnnnnnnnnnnnnnnnnnnnnnnnnnnnnnnnnnnnnnnnnnaaccagcctccagagtagcttagacaactggcgctagctacagtacctaggagtacagaagctaggaccaccaggagcagctatttttcgttatgttgttgttttttgttttacgtagagacaggtcttgttatgttgcagtgacatcctg

SEQ ID NO: 155933 - DNA, 413 bp, Homo Sapiens
cggaagcacactgcaacacatatctgtgggatatgtgtggctgtgtgtctttacattgcatttacagttcttttaatagtacataaataaattgttcattgcactgtttagagtcatcacttccatgagtccggacctgatggtccttcagagcagctttgtatgtctcctctcatttactataattcacctgtaaactgtccttgactgttggagcccatatatcctatgtcaagaaggtcgctggcattgcgctggtggcctgctctcaacacctcggttttcctaggtccagtggatcccttagaagaagctgttcctgatgagctgtggccacctggagatgggaaactgggcttgctatagggcaccaaggcctcctctgatccgacaccttgttgcagtgtgcaacc

SEQ ID NO: 155934 - DNA, 574 bp, Homo Sapiens
  misc_feature (1)..(1): n is a, c, g, or t
  misc_feature (55)..(74): n is a, c, g, or t
  misc_feature (370)..(495): n is a, c, g, or t
ntgagccatggtgcccggccttaccttgacatctttacctaggatttgacttttnnnnnnnnnnnnnnnnnnnngaatttcttttttaacttttagtcctgctgtgtttcttattctccactttcgttatgtagcttgtttgggatagtcagatggaacagggtatcaggtggcacatgtaagtttgttttcaactgaaatgtttgacagcctattcctttcatgatgtacaggatctatacattgatcgtcctttaccatatctcattgggtcaaagctgttcatggaacaagaagatgtaggtcttggagagctgtccagtgaaggtacttttcttcaccaaataattttgttccttaacatttcttnnnnnnnnnnnnnnnnnnnnnnnnnnnnnnnnnnnnnnnnnnnnnnnnnnnnnnnnnnnnnnnnnnnnnnnnnnnnnnnnnnnnnnnnnnnnnnnnnnnnnnnnnnnnnnnnnnnnnnnnnnnnnnatacgtaatattttgtcttgagcctatttgggagaatcatgctcatgccctgtacttctaaatgtgcaggcatccgggc

SEQ ID NO: 155935 - DNA, 484 bp, Homo Sapiens
  misc_feature (342)..(405): n is a, c, g, or t
cggaagcacactgcaacagctgaaaatttcagcacaaattatttctatcacatttctgtgggaaaaaatggcctgcttttgtaaataaagctctactggaacctagccacacccattcatttatacattgactatggttattttctccctataagggcagagctgagtaattgcaacagactgtctgccttgcaaaatttaaaatttactccctagtcctttacagaaagtttgctgactcttgttttggaggaaaggttttcagtggtctgctttctgatcaaattaatgatggaaaagacaaagtgctttatacagtcgacagagccatttttaaaatcnnnnnnnnnnnnnnnnnnnnnnnnnnnnnnnnnnnnnnnnnnnnnnnnnnnnnnnnnnnnnnnntcaaaaatagaaaagatagtattaagctagaatgttttatcaggctcagtagtgatagtgtctgtctctgatccggggg

SEQ ID NO: 155936 - DNA, 468 bp, Homo Sapiens
  misc_feature (48)..(124): n is a, c, g, or t
  misc_feature (189)..(335): n is a, c, g, or t
tggcccggtaacactgcaacaggtttctttcatttttttactttttgnnnnnnnnnnnnnnnnnnnnnnnnnnnnnnnnnnnnnnnnnnnnnnnnnnnnnnnnnnnnnnnnnnnnnnnnnnnnngttcacgccattctcctgctactcggctcccgagtagctgggattacaggcgtgcatcaccacannnnnnnnnnnnnnnnnnnnnnnnnnnnnnnnnnnnnnnnnnnnnnnnnnnnnnnnnnnnnnnnnnnnnnnnnnnnnnnnnnnnnnnnnnnnnnnnnnnnnnnnnnnnnnnnnnnnnnnnnnnnnnnnnnnnnnnnnnnnnnnnnnnctttcctgtacaattttgtgtgtttgtttttgagttaataatggccgtttttttcatttgattaaatattttactttccaacttaaatcttcccatattcttcagctcaatagagtgcttgtgaatattcttc

SEQ ID NO: 155937 - DNA, 479 bp, Homo Sapiens
cagtcttctcaggaaccatcactggtttgggatgatgcctcccagcccacctggcagtttgggcttccctcttcagacctcctatgttcctagcctttccttgggctgcttacgagagctgtctgctaccactcctggcccggtgcttacccactcgatctactctctgtccctcatgagggttgtggagcctcctctttcccctcatgaagtcagaacccacccatctcactggacttatctgcccagacagccatgctatgctccctccctacctccaggctcctgcagcactacaggttgtgtcactcagcagcataacccactgacctccaccctcatcgtcacagccattaaggtagttactcagcagatactatgtggcagattcctgcacactgcggaaaaatatctggaccatgtcacttccgtgtctgtaactctacagtgcttcctgttgcagtgtgcatccggccgga

SEQ ID NO: 155938 - DNA, 479 bp, Homo Sapiens
  misc_feature (440)..(440): n is a, c, g, or t
caacctgtcagcaagagtgtaacatcctcggacatcacactactgcaggtgctcacaccgcaaccagtcagcaagagtgtaacatcctctgacatcacacttctgcaggtgctcacacccctacctgtcagcaagagtgtaacatcctctgacatcacacttctgcaggtgctcacatcccaacccgtcagcaggagtagtaacatcctctgacatcacactcactgcaggtgctcacaccccaaccagccagcaagagtgtaacatcctctgacatcacactactgcaggtgctcatgtcccaaccagtcagacaagagtgtaacatcctctgacatcacactactgcaggtactcaccccaaccagtcagccacgacgtgtaacatcctctgacatcacacgactgcaggtgctcacacccaaccagtcgcaaggagntgtaacatgctgtgacatcacactgttgcagtgtgatcc

SEQ ID NO: 155939 - DNA, 692 bp, Homo Sapiens
  misc_feature (379)..(502): n is a, c, g, or t
  misc_feature (518)..(640): n is a, c, g, or t
ggatgccactgcaacataggttaaggtttagactgtgtcttggagggagggagcaagggagaagtagggaagctatattagctaggtgatgaggaagagcctggctaatagaaaaggtgatggggaatgcatccaggcagagggaagggaaaaggctttgatacgggtgtgatctggtgtgttcagggaagggcagaaaggccagcatggttgcggtacagtgatgaaaaaagggctggaaacgaaagcaagcggcaagattacgtaggcatagaaaacacttcatattttattctaaggataatggaatgtcatccttagaatggttttgagcaagggggtgcgttgatttggtttttcttttattttccttttcagnnnnnnnnnnnnnnnnnnnnnnnnnnnnnnnnnnnnnnnnnnnnnnnnnnnnnnnnnnnnnnnnnnnnnnnnnnnnnnnnnnnnnnnnnnnnnnnnnnnnnnnnnnnnnnnnnnnnnnnnnnnngtgcccaccgccatannnnnnnnnnnnnnnnnnnnnnnnnnnnnnnnnnnnnnnnnnnnnnnnnnnnnnnnnnnnnnnnnnnnnnnnnnnnnnnnnnnnnnnnnnnnnnnnnnnnnnnnnnnnnnnnnnnnnnnnnnntgagccaccacgcccggccagtcaaccatttttaattgttgtgttgcagtgt

SEQ ID NO: 155940 - DNA, 432 bp, Homo Sapiens
cccaggacttaaaattatgaagcaaagcaaaaaacagtcacaaaggtcaggataataactacctccactgaggggggatatgttgacaaggatggtgaggttggagggaagcacttctggcttgttgacctgggcaatgacaacactaatattcactttattatttcccttaaactgaacattttatgccttctcttgtatacagatggtccacaacttatgacggttcaacttacagtttttcaactttagcacagtgcaaaatcgatatgcattcagtagaaaccatacttcaaattttgaatttttatcttttcccaggctagcaatatgcagtctgatactttctcataatgctgggcagcagcagaaagcagcagctctcaacaggtaaacaactgatcctaaatagatatactgtgtgcagtgtga

SEQ ID NO: 155941 - DNA, 290 bp, Homo Sapiens
gttctgtcgcttagctggagtgcggtggcgtgatcatggcactgctattcttgaagcactccacccacctgggctactttttctttagtgcagaggtgcactgtcttcttttaggtgggatcgcgtaagcatgagctggtagagcacggagatggcaggcatccaggttacgaagactaagccaattattcactgaagtcatcctcctctcccccaccattcgatttgatctacctctaagccagtctgtgaagaaaaggaagcactttagaagacctcagcagtatacc

SEQ ID NO: 155942 - DNA, 223 bp, Homo Sapiens
cgagaaatgcttttttaaaaaacacacatcttatggcattcaccttcttggagctctaggacagtggttctcaaaatttttttctctcaggacctcttaaaaatcatcaaggaccccaaaaagcttttgggtatgtcgggttatacgctatctatatttatggtactagcacttaaaagtgagaaaaatttaatacaccagaatacatggcacacattatgga

SEQ ID NO: 155943 - DNA, 405 bp, Homo Sapiens
ctaccagcccccagcttcctcctggggtgggaaaagtggaggctgagctcccagaaggggctcagaggttagggcaggcccctctggaaaatgcaggagaaggacatttgcctccaagaaggacaggatgatgctgttatcaggcctttcctggtacaagggaggcctgaggaagtgaggcctgggtgatccttccagatccctgtccccaggcaggtgttccagttcctgtgatttctgtgcttgtaagaaagatgtagattctgactgtagtctaggccagctgtcacccttgtctggcagagtgagtcctaagagagtgagtgtgtgcaggcgtgacagtcgctctgcaggagggcaggtgcagctgctgcctctttctgtgcaacattggttgtacctcag

SEQ ID NO: 155944 - DNA, 366 bp, Homo Sapiens
ctccataatgtgtgcccataagtttcattaggctcctgatggagtccaagccattaaactgttaagaaatcctggattagagggttgtcaggaaatcggcctcatttgagtctacaaggaaggccttgagtatgaagataaggagcatgggcatgtgttctgctcacattgaggggatgctaaaggtttctgagcaggaggttgcccaaggtgacgctgaggtctccagcctgggattcattaacagaaatacagaagtcaggaggaagagtggattaggatagcaggagaggttctatttttaacgtatattaaatttgagactaaaaaagctcgggtatccagctgaacgatgccaccagctct

SEQ ID NO: 155945 - DNA, 370 bp, Homo Sapiens
gtttccctgttcattttttatttgattaggaaagaactataaataaaccttaacaataccatcgtttttcatgagcgccaatggctctgtgacaggatgatggcttgtgtagtgtagtgtttgatttttcttcttcctccaatgttgtttggctggatcatttagaaatattacaaaatctcctgcgctgaaggagaaagcttttgactcctttttgtctccacaaactcttaaacaacatgtgcatgatatcacatgaaagcttagtacctttcggaggcccttctaaattacccatgttcctttgtcttgtcattgttgcttttctcttgaatactcaatctgtactccagtccacagtacattcctg

SEQ ID NO: 155946 - DNA, 602 bp, Homo Sapiens
taaatcagctcggtaccatggttgaccaggctgagggggctgagccgacggagctgctgagggggagcctggtaggacatgctctcatccatgccggggactgggggctggttcagagtcccttgcgtgttggtgtgtgctggatggactgctgggcgtgtggactgtgccataggatgccggccatcccatactgggaaggggagccatagctctggtacatgctcatgggatagtagtagctgtaggggtaggcatagttgtactgctggtaccactggtagtactgctgctgctgcaaagctgaggcttctgcctgggacacgtactgtgcactggccacaggcccattgctgctggacttggcagagccgccggcagctcctgacttgctgatgctggccagggcctgacgggccttctcccactccgggttctcgtgcatcggcgtctccatgccattctctcggcctgccccagccaccatgctgtactgagaagaccaatctgtgctacgttgatcacccacgttggccgccatctggaccttggggtataaggggtggacctcgggagccagactgagtacaacctgccggtgg

SEQ ID NO: 155947 - DNA, 428 bp, Homo Sapiens
gcttttctgtatttccactggctggggatagagctggaattttcctttcttaagggaattaaatctgaaatgcagacaaaggtttgtaaagtctggaaacacaggtgaatatacatgttgttatcaaaagactgacaatctttaatagaagatattaccctctgttttcagtctttatggccatgctgtgtagagatgacttccttgcagagttcttcttaataacagaaataagttgtaggagtcttaaacgttcattggttggagaagggttaagcaaattacgatatatttttagagtagaatattatgctgtcattaaaaatctttctgcagaatttttaaataacatgggagaattactttgttaatgaaaagtgaaaaggatgatttatggatggacagtacaacctgcggtggggtaccga

SEQ ID NO: 155948 - DNA, 460 bp, Homo Sapiens
  misc_feature (21)..(21): n is a, c, g, or t
  misc_feature (41)..(41): n is a, c, g, or t
ctactgattatttctggggtntctggtgaaaaaggaaacanccaagtgtaaggagaccatggatgtttgaacagcaagtagaaagtatgcaacagttgtctgagagagtggtgggaatgaagagacagtggaaacacaatgagactgccaggtagcatcaagggcccacttaagatctgtgatcagcttagagtgagacaaacaatatggtgctgtggttttctccaagcacatttggcctcatgggtgcaagcacagaacaggtgaagagagagaaggatttaaccagaactgtgatttagtcaagcaagaatgaccaagcctgaggggtcaagggtgataaggatctatgccatggtagagattccagtggttgatcgtggactccaagctggggaaggggagaagtgaggacatggggtgagtgtgggtccgtgagtacaacctgcggtggggtcga

SEQ ID NO: 155949 - DNA, 393 bp, Homo Sapiens
  misc_feature (17)..(17): n is a, c, g, or t
  misc_feature (37)..(37): n is a, c, g, or t
tggagaggacccagacncatcgtcttgtccactcccncagccataaaggtagaaggaatcccagcctggattctccacagccatgtaaaacctaaagcatctgagacctgggaggtgagaccaagcttggccaacccatgcaagatgactttgaagaagatgacaagccctgctccagtcacacctggaagctgactggtccgtgcatggctgaagcatgaggaaactcatcatgggactcattttcctaaaattttggacttgtacagtaaggacttcaactgaccttcctcagactgaggtagggcaaaaagttaaaacagactttctgtttaaaagggacttgtgtgtataatgctacccagtacaacctgcggtgggggtcgagctcac

SEQ ID NO: 155950 - DNA, 399 bp, Homo Sapiens
aagataatgtgtgtcatatttttttaagtcatgcaaacatctgagactaccaactcttcattccagggatataagcatgaattaaaggtaggccttgcctcaaggggctcactgtttagcaggagagaccaacatttaatacataattggaacagggcatatgaaacaccacgatgcagatgtacataaagggaagtgggggcagggaagtgcaaggaggaagcaaccacctgtggctgaaaaaccacagtagctacagtggttatgaacccaaactctagaatggggctcgcaagtttcagaccgcagcttgctacttgctagctgtgtgactgcgagcgagacattcagcctctctatgcctcagtttaacacctgttaaatgagagagtacaactg

SEQ ID NO: 155951 - DNA, 465 bp, Homo Sapiens
ccaccggcaggttgtactgaggagggtgagctctctgacacgggttagcgtcattggtatatttgtacaaacgccacatagtaattgggtttcaccatgtacaagagagaagcactaaggtttttaaaaactcagctcatttggcctgtgaaatcttaccaggatgcccctcctttttccttcccacctgcccccttccttctcattactgctgtccttgtgcagcatccccccagtcacgtgctaagcctacctgaagatgctgaccattttcaataatgcaacgttagggtcagaggagagcaaggatcatcagctagtaccctggaggcaaattcttaggacagagattttctcagcctgattctagaactatgggcaagccagggattcctcccacaaatcaacagggctgctggtgtatttcatgggagaccttactcgccttctagtcagggagcttct

SEQ ID NO: 155952 - DNA, 420 bp, Homo Sapiens
cagctcggtaccccaccgcaggttgtactccagaaagattggctgggtgagatggtcagtctattgtgggaggctttggagagccatctttttgtatatttaaagctctctcactctgtgcgtggaaaagagccagggcctgagttgggcattgtctcagtttctaagggctgatccccaactaggtggctgaaaacaaaaccacagttctgttgtccagaagtccaaagtcagcttgtccaccatgctccctctgaaacctgtaggggagttcttccttgccttgcctggggttctgggggtcggctggcatgctttggggttcctcacagctgcatggctcaatccctgcctcagtcatcacacagtgctctccctgtgtgtctgtgtcttcagtggcccgctgctcgtgatgacacc

SEQ ID NO: 155953 - DNA, 381 bp, Homo Sapiens
ctgggagtactgtgtgatgtggtctcggtggtggtgatcgaagaagtgaagctgggagtactgtgtgaggtggtctcagtggtggtgattgaagaagtgaagctgggagtactgtgtgaagtggtctcggttgtggggatcaaagaagtgtagctgggagtaggagatgagacaggatcagggagaggcgcgccctcgggggtctggctgccacactcaggggcttggggctgtgtgtgagttgggggtcctgctggcggttccaggcagggagtgctcccatgatgcaagctgcgttctggctgtgcagaccgcagcttggagaggaggagcctggggtgaatctggccgttcaccgccggtcagcgacagcgtagtcac

SEQ ID NO: 155954 - DNA, 163 bp, Homo Sapiens
ccaccggcaggttgtactgtgcaggaagctgcctcatcttctcagggtgagacccaaggctgcagggtgatgacatccacatttccgaagcctgaggtcccagggtgacagttcccccagccttcgaggggcgctgcaccccatcgcggtgggggtcagtgat

SEQ ID NO: 155955 - DNA, 422 bp, Homo Sapiens
cccccaccgcagattgtactctagcttttaaattcttgcagagcctgttcctcatggccagtgatcaagacctcattagctcttaccgaactaatgtggcagtcattccctgcttttccttgcctctagtctggaccctctgaaatccatctttcccattcacgtccaagtactccacctaagaaagtgaaacggactgtgtcatcctcctgcttagcacacattcctcctgagagcacctcatatgcaataaaccctggagtccttaccatggcacagaaggaaggctctctgtgagctggcctcacctttctgcctagcgttagttcctcatttgcttaccttggaatttgcactcaggtaatgcctgatggcttttagctccctgcacacactgcagggtttatgacctccttgcgttt

SEQ ID NO: 155956 - DNA, 358 bp, Homo Sapiens
cgagctcggtaccccgtagccggtcaccggggacatctggttcccagcccctctccttgaaggatgcaaaacttctagtagctgggacacttcctgtttcccaccatcttccctgcttaaaatagcctttggagtcaacacaggaaggcacgtgggactgcagccgcctctgacagctcgttaaacaggccacggcagcagtggggcctggggcttcagacagagaaaggcagcctgcagcagttgcatggcccagctgcctaacccagagaccttccttagcacacggctgccaggaaagggagctgacctctcccctcacactcgcccggtgaccgggctccgggggttcttttag

SEQ ID NO: 155957 - DNA, 567 bp, Homo Sapiens
  misc_feature (56)..(56): n is a, c, g, or t
gtcaagtcacacaagtcaactgtaactccctgactagctgtctgcctgcaggcaanttctctttatagagaatggaccaacacccatgactgtatatagttataattaagagcacagactctggggccagcctgcctgaattcagatcctagcttcacattgtttgctcttcattggagctgttcacaaaaattccaattctcttctccctgatgtagttaatggattatattatctgctgccttgaagttgggcatggccatgtgacttgctttaattcttttgagagcaaaagtgatgtgtcacttctgggcaaaagccaggaagccctccttactcaaagtgtggcccatggtccagcactatgggcatcacctagaaggttgatagaaacatggcatctcaggccctccaggacctcctgaatcagaatgtgaatttaataagctccccaggagatgcctatgcacgtttaagtttgagaagccctgccctaaggtatgaagcattattcaccatgttctcttctctggccacagcagctgatgtccccggtgaccgggctcg

SEQ ID NO: 155958 - DNA, 408 bp, Homo Sapiens
cgtagcccggtcacccgggctgcagcacgggactgggggtgctcctctgcagagagaaaaccctgtgtgtcaggggcagcaggtgccccaggagacccagaacccagctggaaacagtgagtgttgaggcctgcagctggctgggggaggccgccggggtcaccgtccagtaccgcgtgggaagagggcagcgggggaacttgagcggggtttgggcaggaggttctttgcaggtgtgcccggctctgcccactacacccctgctactgggctggacccctgacgtggtcatagaaacagcgcagtcatgggtctccccgtggccgtcatgggtcccctcatggtcctcatgggtacaggtccccccatgatcctcacacgtcccccccctccggtgatcgggctacg

SEQ ID NO: 155959 - DNA, 370 bp, Homo Sapiens
cgtaccccggacaccgcccggtgtcgtgcagctgggcgctgggggccaggctgtaccaaggagtgcccaggttgcctacatggaggtgtctgccacgaccatgacggcgaatgtgtatgcccccctggcttcactggcacccgctgtgaacaggcctgcagagagggccgttttgggcagagctgccaggagcagtgcccaggcatatcaggctgccggggcctcaccttctgcctcccagacccctatggctgctcttgtggatctggctggagaggaagccagtgccaagaagaccggatcccccagatcctcaacatggcctcagaactggagttcaacttagagacgatgccccggtgaccggcta

SEQ ID NO: 155960 - DNA, 588 bp, Homo Sapiens
  misc_feature (90)..(90): n is a, c, g, or t
ctcctggtacgattgagcgcttgaccgggaggagatctcatcattgagtttgacaacatgttctccagtgctacagacatcccccaatcncccaggagatatccctaccgcccatccactgatggtgcgccatgcagaccacagttctctgacactgggcagtggctcttcaacaactcgtctcacccagggcaatcgggcgcagtcagaggaccctaaggcagctgacggccaatactggccacaccattcatgttcactaccctgggaatcgccagcccaaccctcctcttatactgcagaggttgcttggtccctcagctgctgctgacatccttcagctgagcagcagccttcccctacaaagccggggtcgggcccgcctcctggtaggcaacgatgacgtccacatcatcgcccgttctgatgatgagctgctggatgactttttccatgatcagagcacagctaccatccaagcaggaaccctgtccagcatccccacagccctgacccgctggacagaagaatgcaaagttctcgatgctgagagcatgcatgactgtgtttcagtggttaaagtgtcca

SEQ ID NO: 155961 - DNA, 327 bp, Homo Sapiens
cccgtagccggtcaccggggcagcttctcctcagtgttgatcttcggtttcacagactgggcaggggaaaggtaggactctcgaaacttccctttcaccttggcattcctgctggcgcgcacgacgtcagcagcacagtggctgatggtgaggtctgccatgcgcagccgccgctcttccacctcagaggcgataaaggtctccttgtcaccactctctaccttgatgagccggatcttcagctccttggggggcccctcactaagtgagcgcagcttcagcatgtcggcccggctgacacccggtgtgaccgctacggcgtaccga

SEQ ID NO: 155962 - DNA, 494 bp, Homo Sapiens
tagcccggtcacggggtgagggtggggcatggcctgcccagggtagagaaggaaacctatttctttgttcctcccaacaccgtgaaacagccttctgtgttattggacagaagctggagcttcccagtccaaagagcttgcgtttggttatttcatgaatgtcttgatcaagcccaggtataacgtctgccctaaagacagagtcattcttctaccctgagagactctctatacaatgtggttgtttagattcaccagttttttccatttccagctaaccaagagttcaggtactgaaagccatctaatctcagagaaatttaaagctaaataaaggattcttaaaacagatctttacatgtccagtttttaaagcctccattttaccgaacaggaagtttgcagaatgatcacattagcaccagagccttggacactcaagtgaacttgagcccacaaagtcagcccgaaagtccgcggcggtggccgggctg

SEQ ID NO: 155963 - DNA, 214 bp, Homo Sapiens
tgtagaggatcgcccctagcacgatcacggggacagccttctgtttactcagcagaggaaagtccacactcggtgaggcggctggtgtgacctgccggagaccaggaatgggagatacctgggagacgcccaggaaatgcccggggcagtcaggagggctcctgcgcaccctggtggccccaggtcacacatggaactcatgaggaagtccccg

SEQ ID NO: 155964 - DNA, 295 bp, Homo Sapiens
cgtagccggtcaccgggccagcaagtgggtggaattcctgcacgaattcttctgtcctaacctttgctttctcaagataaatatttatctgtcctgggcggggcggaggcctagggggctgtggcaaggctgcaggaaggggccctgaccgccctggggctggagtcccggagggcacaacctgctccaagcacagaaaccctcaatctgcccccgttcagggtgggtgtgggttgaatctcaccctgtcctcgccaagccccctgctctgggtatgggccagagccccgctctc

SEQ ID NO: 155965 - DNA, 450 bp, Homo Sapiens
ccaggcacgatgtagaggatcgcccaagtcagcaaagctgattcttgggttccttggaagcccaagaatgagatttgggtaggtgcggtttattcaaggtgggggttctcaggagaaggaaagtgagggaaggaggatgatgggggaggggacagagccaagcaagaatgggctctcaggctgaggctagccttgatctcacgtgggtctctggagtgtattctgccttgaagcaggaggactggacttttgtgtgactcctctcgcttcatatcgcttagtcattggccagttcagcatgtgagagcataactccctgggtgaaatagcttttgctagctaaggaattctccggagaaagtattggtataagccattaggcacagatcagcaaaggctgaatgatgagtggtttactggcaatgagctttgcggggatcctctatattg

SEQ ID NO: 155966 - DNA, 436 bp, Homo Sapiens
ccccaggcagtagagagaggaaccctcagatggcgacgggaagtctctcggaggtaacaaagcagagaagcggggaccctaggggacatgggctcccagaaaccttagcccagcctaagaccccagaactggggccaaaccgcacgagggcctggggagcccaggttggagctgatgttaaacgtttcccccacacgcagatggaaccaggtctctacatcagaattcatgttgatagaggcaaaggcctctgtttccctgcacctgagatgggcagaggtttgcacctctacctgctttgtgcgggtcagtaatggacatgccgtctgctggtggtcttaataactgcgtcttcccaaagaggcctggctgggaatgggcttggcttctagctcctgttcacgtctaatgaaccccaagcatggggagggtcagt

SEQ ID NO: 155967 - DNA, 441 bp, Homo Sapiens
  misc_feature (49)..(49): n is a, c, g, or t
  misc_feature (222)..(222): n is a, c, g, or t
ggcaaggtagtttgggatcctggagctctgaaggacgggggaagtcctnattcttaaagaagagttagggctatttctggctcccaagagatattgggggtggatgccgggataaggaggacttgcagccagctggagcctgagctctagcggggtggagttccagaagggtcccccaggccgggaggactcgaggattatggcgcccccccgtacacacancacacctgcaggggagactaggtcttctgtgggcatgggcactcccttccgcccgccccattgcgaggatggaagattggggtgaccaggggtggccagggtagatccccggcgggacaggcttccctcccccgggagcaggaagcagagccccgcccagcagacctgttactggaagtccgagggctgggtcgcccctcccgtcctcacttgctccag

SEQ ID NO: 155968 - DNA, 353 bp, Homo Sapiens
aacagaaggggctgagagacacagaaatgagtttggcttcggaggccctgcccgattctctggccgtggtatggctgagggctgggctgaggatcccgtaactgtcaattccagtaccagcctgggcgaaggctggggagagccacgcagactgagtgtggcgtcgcagagccctttcctgcctttcttctgctcacccatggccacagctttttatggatcaggactcccctccctgccctgcctgggccgcagctttattgctgagatctagggctctctccacgccatttcacgcctctctgcctttgctcccgctgttcctccatgcaaatgccttcctcagcgtctcc

SEQ ID NO: 155969 - DNA, 389 bp, Homo Sapiens
  misc_feature (14)..(14): n is a, c, g, or t
ctgtaggagacgangaggaggtaaaaatcaacaggagtaaagattcaggcaagcatgagcgataagctccagagatgcgctgcacaaccccatacctatagacagcagtgatgaactgccactcaagaacttatgaggagagctctgataaataaagtcaggactgactcaggaaaagggttgggccaggacttagatgagtaagacttcctagatgaagggatatgtgagtgaaataggggatatagttggaagaaactgcatgtggttatgcaaagctatcttttaagagcatagacataggccgagcacggtggctcactatgcgaggcttacgcggacggatcacgaggtcaagagatgtagatcatcccagccaacacggtgaa

SEQ ID NO: 155970 - DNA, 393 bp, Homo Sapiens
  misc_feature (372)..(372): n is a, c, g, or t
aacgggtgatgcggttggagtcctttcctcaacactgatttcttgggacgaattctctgtggagggaatcttgctttggtcagaagtacatgactgaggaggagtggaatggggtttctcactctgcttttcttcctgtggggcttcggggtgctgtactgttgtcccctcatttgcagcaggactctcaccttgagcttggttggattcagggacatggctctctacaggagccaccactttcttgtttgtgtttcgcttgcggcgtgatcgggttgttttctggcgccctttgtctttccgaacaagagtgacttccacttcttttgaccctttggcttctggcactgagtgtgaggtttcactgctatntcctctggctccttgatatct

SEQ ID NO: 155971 - DNA, 534 bp, Homo Sapiens
tctagaggacccttgggaggcaggcgcaggggtgccagctagcactcaccactacatactgaaagcagtcacttccggctgctgctaaaacacactactgactgagcatctagcacgagccaggtcctcagagctccctgaaccctcttccacagggtgcagccctaccctttccacacacacaggaacccaggcaccgagtgaggggcactaagtcctagaacccgcttctgctccaaagccagagctttcctggaagccctgggatcagagcccactccgtctcccagtctcagctggcagggcagggtcagcctccttggggggaaggtgctgacacaatgaggtcaatgacagactggcgccccacccacgaggggcactcatggctatgttcccaaccaaggccaattaggtatcaattaacaaggacactcgcccaaccacacacccctgtgtagcacagaagcttgagagccaccattcatggggcccatcatggcagcagactaagcagtgtcctggcctgccagc

SEQ ID NO: 155972 - DNA, 497 bp, Homo Sapiens
tggaagacggggaggaggggcagaggccacacccagattttcagacctgagccaacagaaggaggaacaggcagagaggccacagctttgcacctatactccctgcctgcccagacacctggggcagctcgctgttcacagcagtccccaaaggtccaaagtcctgaggctgcagatctaattgaaaggtctgagtggaagagcttcagagatcaggatgtcactcccaacccactgccccaagtgttctaccagtgtcaacccaatcaatcttaaccaccccagaaggcatctcattttacagatgagaaaaccgaggccaagagctcacagccactcaaggtcacagcgaacagtagatgcaggagccagaattccacccgcggtggcagtcacacactttcaaccacaggctcagtcagcatgactctccccagggcctgcagcaggtcaccgtgccccgccacactctcacaactgtccgtaacaggccccgt

SEQ ID NO: 155973 - DNA, 322 bp, Homo Sapiens
cccctagagcgctggacactgaccatcgcagcacgaatgggcttgtagtaagtgctctctagcacttaggctgggctctgacattctcttgagaattcagacatcagagaagaagtccccttcagtggaccccagtcatcaccgtgatcccgtcctgactcccgtcctcaccgtgatcccgtcctgactcccgtcctcaccgtgatcctgtcctgactcccgttctcaccgtgatcccgtgctcactcccgtcctcaccgtgatcccgtcctcactcccgtcctcaccgtgatcccgtcctcactcccgtcctcaccgtgat

SEQ ID NO: 155974 - DNA, 491 bp, Homo Sapiens
  misc_feature (143)..(143): n is a, c, g, or t
ctgtggaagacgggaaaccctctggcagtgaacggctttccgggattggggtgctcagggccctgcgggaggaacagacaccaggatagggtgctctgagagcccgcacagggacaggcccctgcacagctccagctcctccnccgctccgagatgccaaccccgaatgttcctgaatttccctctgagctgtggagaagtggagggaacccaggggaaaggctcatggttcaacaagacaaaaagaagcctccatccaccacaggtggaccttggctggcagccagtgcccgctgcctgctgccccgttatcttcccaccctgcaccaggccctacgatccaccttggctcaagacaggagaccgaaagggctagggcccatctgagtctcctctgggactctggggccttgtgcctgggctcctgacacccacacgcctggccctgccactcccaacccaaggttcctcgacgcacaccctgctgtggc

SEQ ID NO: 155975 - DNA, 224 bp, Homo Sapiens
tccccctagggccagagttttaggcccccccggcccaattggggaaacccccttttttctggaaaaactaaaatttgcccggttttgtggccaaaaccctttaacccggcccccccgggggcttaagccagaaaattcctttggcccccgaagccgaagtttccgttggcccggatttttcccccgttctctaattttggccacaaaatggggccccccttccc

SEQ ID NO: 155976 - DNA, 958 bp, Homo Sapiens
gtgggcaaggacgggagagtggatttctggagggatgcacagtgggcagggcttgttacatgtccccatctgggtcaggaaaggagacggtgagtgtggagtgtgatggtggcttgggagtggtgaggcaccgaggggaaggaggctgaagacaccgccttgcaaaggtcccctatttgggaggctggggcggccgggttgaaataggtgcccatctgagaaaggaggggaaaacccgtaagtgttgtcctaaagctttggggaggagcgtttcacggaagaaggagccaagaaacccaatgcccgctgaggtcagccaggagtgctggccctgtatccctggggaggaaggccctggaggccgccggtgaccctggtgggagccagtttccatttgggtatggagagaggaagtctgcccgcaggctgaggagccggtggggggcgggagaccagatggaccgtagaggtgactttttggggaaaactggctgtgaaggggggagacagcaatacatggagaagtaggggagaggcaagttcagggggtttgagggtcagaaacttcacatgcacttgggctgcaagggagcaaccgcgatggaggcagctgagctggggacagggatgaggctgcccatgggaaggatgagaggtgatggggaggtgggggtgcccagtggacagggagtggcagctggggacagggatgaggctgcccatgggagggatgaggcgatggggggcggtgcccactggacagggagtgtcggctgccgggggaaagctctgggttggggaaggcctaatccccacatgtccatcaacgtatgagatcctttagctggggccaggaagagacaggactgagagggaaactggaaaccccagttatgggcagagagaggcagtgtccttcaaacccaagtccaccctgccggccccagccccgttcctc

SEQ ID NO: 155977 - DNA, 281 bp, Homo Sapiens
ctgatgatcagggtcaagtgagccccatggaattccctggctctggcgcagggcctggctctaggtgcatcttggtatctgcagtctgattatccttaatgagaattaattggggctcaggccctggggtggcccctgcctgtcctgcctactctgggctgcacccattggaggggcagtgtatccagctctagcctggcttcacgcaaccccctcttcctttgagtctcttggatccctggtcctcagagaaccgaccagtacccgtcttcctcagccta

SEQ ID NO: 155978 - DNA, 325 bp, Homo Sapiens
ctgtggaagacggggcgggggctgctgactccggtgaggtcaccctggaggggagtcccaggaatcagcctgatgttcagaatgccttcctggcatctcagaagtgtactgggggagacgtgaggacctttcagccaagtgtcagcgttcttattgcaggaggacattaaagccacaacccagaaacttctcaggagcatggcgcacccacaccagccccgggctccgcctggacagcacctcctgggccgccctgaccagcagacaccatccttccagcctctcttggccacccggaccagcgggcaccaccccccacagccta

SEQ ID NO: 155979 - DNA, 134 bp, Homo Sapiens
aatccctccccctatctttctttctttgcacccacgatgctctgcacttcaagctaaatataatgtatctgattttacagcatacatactaatcaggtttgaaagttgtcttgtgaggctttaaaaagctagcc

SEQ ID NO: 155980 - DNA, 340 bp, Homo Sapiens
cttcctgttgcctccctcagccccgcattcagtcccgtcaggagtgcagctgggctccagtccgccacatcccctcgcggagcccccagtgccttatctagaaaatggaggtaaatcgtccctacttggggggcaggacgagttcaataaaatgggacacgtcgggcgtctaaacatagcgtggggcccacagtagagcccggcgagtccaaccagtcagcctcgcactgagagggaagcgcgcgccaggccccgtttccagcctcctgtagagtcctctctcacgcacggttcaccgtatcaccatgagtatctgccaagtcatgtatgcctgcgatga

SEQ ID NO: 155981 - DNA, 365 bp, Homo Sapiens
cccccccactggttgatgcggttgagcctgggaggcagagcttgcagggagcctagatagcatcactgcgctggagactggccgagggagcagagactccatctcacggtgctttattatgggtaaagaagagaggcagaacgtggttggtttagcgaggaaaggttcaatttgggtctcattgattgacagcagtagttaacttgcactgaggactcactctctaattgttttaccgtatgaactcatttaattacagcagtaggtgctgttaactcccctgttctgcaagatgtgaacaccaagtaactcacccagacttaagcagccaatctcccacccggattgtggtccagacagcctga

SEQ ID NO: 155982 - DNA, 292 bp, Homo Sapiens
aggagctgagcacgatctcacagtgtcagcactggatcataacccagacaaagactcacagtgtcatcactggatcacaacccagacacagactcacggtgacagcacgggatcgcgacccagacacagactcacggtgacagcacgggatcacgacccagacacagactcacggtgacagcacgggatcacgacccagacacagactcacggtgacagcacgggatcacgacccagacacagactggcggtgaccacggtggatcacaaccgcatcacccgttcggggatc

SEQ ID NO: 155983 - DNA, 177 bp, Homo Sapiens
cggcgcccatcacagttgcttctcaatttgttgggcatcagaagggagaattctttctctggctttggagtctaagaacaggtttctgcatactgcagaagcgtggctgactgacagcctcactgattccggggaatggcgagctgtcatctcaaccgcatcacccgttcgggtacc

SEQ ID NO: 155984 - DNA, 501 bp, Homo Sapiens
aacgggtgatgcggttggtgagaggtcaggtgaatatggcggatgaggcaaaacttcgcagcccaatttttccacttttgaagtgttggttgcgtgacgtgcggttgggctttgtcatggagaagaattgggcccttcctgttgaccaatgccggctgcaggcgttgtagttttcaaagcgtctcatggatttgctgagcatacttctcaagatgtaatggttttgtggagattcagaaagttgtggtggatcagaccggcacaggccaccagacagtgaccaggacctttttttggtgcaagtttggctttgggaagtgctttggagcttctcggtccaaccactgagctggttgtcactggctgtcatataagatccacttttcggcgcacgttacaatctgatcgagaaatggtttgtttttgttgtgtagaataagagaagatgacacttcaaaatcacaatttttttgatctcgctcagctcatgaggcacccact

SEQ ID NO: 155985 - DNA, 404 bp, Homo Sapiens
tgagtgagtgcgcatcagatacttcctgtcagtgccgtaagcagaagagagggagcggatcaggccctagggagtgcggggtccacctgccaacaggaagtttctctgtagtgttttacctgaaagcacgagggcacgtcacgctgagaggttgatgatgtgtccacgtgcagtgatgacagcagcgttccaggccacccgccaccacgcagttgagcgaggcagtgcccatgtggagcctggtgtttgatggtggggctgaggtgactggccttgctctagagctggagcccaggcggaaaataggtctccactggcaggctaggttgcctgctttgttgggagtggcgcagtgctggccctgatggggctccttcccccgggagagcctggagggtctgcag

SEQ ID NO: 155986 - DNA, 952 bp, Homo Sapiens
cgtctagaggatccctgcaggagagagaactgaacggagaagttacatccaaagggaagggagtgaatagcacaaataaatatcctggcaagagggcaggccagctgtgagggtgtgactactgatgatgcttcaaaggaagaggaagcagcaatattttaggactgggtaccagcagagaaggcagggaggagggagcgggggatcaggctggagggcgcgagttcaccatgaggctgaggaacgattctctctcgtggggtccaagactagcccaggaaacagggagtcgcagggggactggagaggagacctgggccagcgggaggcagtgttctccagagggtcagatgcgtctctgattcaggccagaatacaggtcccgctggcctttccggatgggctcatagtctgggttgggaacaggtggtggcctctccttgttttgtcccctttgcctgccgccagcacccgctcctcgtgtcacaggcttggccttggcctttctattcttgctccagtagtaaaccagcagcagcaagcccccagtgatgcagatgtccactatgacaattgtggccaccgacatcacatccatctccatgcagttctcacacactcttgtcctcaggtagagataaaagttcgcatcttctggtttgcttcctctggggtagcagagataataaccactttgctccaattctgaaaattccttcagtgacaggtgatcctcatcactgcctatgtttttatcatcctcatcaccggctatgtttttatcattgtgtcgccatagtatttcagatccaggatactgagggcatgtcaatattactgtggttccagagatggagactttatatggtgtctgtgtaataacacccatttcttcattaccatcttgccccaaagagcaactgataagaggcagcaggcccagaatctccag

SEQ ID NO: 155987 - DNA, 445 bp, Homo Sapiens
  misc_feature (111)..(111): n is a, c, g, or t
caagtctaaactaatctgaaacttttaaagtaacccagtccttaaacctaacctagcccaatgccaattatatctaccctagccaaaccctaactgcctttgccagtccanaagtgtccactgaatcctcaccttggtcctcacttaaaatcccagaaaagcatatttccccactgcccacatccctccttacagcacccaaccctggcctctggactcctggtatcctgggatgtccaaactctgcagtgccatcagccaacaagcccgactcgtcaaatgcacctctctcccttcctgtccccacccttgcaggctgatggaaaggcctcattgaagtccaacttttccccacctaacaccaagaacggggtgaacctccacactgccaccgttccctgagagtgagcactaaatctgcttcaatccaaccgcatcacccgtt

SEQ ID NO: 155988 - DNA, 350 bp, Homo Sapiens
aacgggtgatgcggttgtaggtacgagctaagtcccctccagcccctgggttgtcttttctatgacaacatacttcgcccacaccactccccgcacccatggcagccccataaggtcacgtttttcctaagtcagcagccagctggagtgtaagcactgaagagcgtttaagcgacttctctaacctccattcataaatatgagccaagcacgagagcagctcgacttgcagtccagagggatggcagagttcaagagcatccaggaaacaagcccttcacgtttcccatttttcatggctaaaactgcacttgtctacttttccaaccgcatcacccgttcgggtaccg

SEQ ID NO: 155989 - DNA, 586 bp, Homo Sapiens
tgtagctcccctacctccaagagcccagcccttgcccacagggccatactccacgtgcagagcagcctcagcactcaccgggcacgagcgagcctgtgtggtgcgcagggatgagaaggcagaggcgcgactggggttcatgaggaagggcaggaggagggtgtgggatggtggaggggtctgagaaggcagaggcgcgactggggttcatgaggaaagggagggggaggatgtgggatgctggaggggctgcagactctgggctagggaaagctgggatgtctctaaaggttggaatgaatggcctagaatccgacccaatatgccaaagccacttccaccaacgttagaaggccttggcccccagagagccaatttcacaatccagaagtccccgtgccctaaagggtctgccctgattactcctggctccttgtgtgcagggggctcaggcatggcagggctgggagtaccagcaggcactcaagcggcttaagtgttccatgacagactggtatgaaggtggccacaattcagaaagacaaaagaagagcaccatctccttccagtgaggaagcggagccac

SEQ ID NO: 155990 - DNA, 421 bp, Homo Sapiens
acttgaccaaagccaggatctccaacacagtgctcccaccacaagaccctgcttggccattctctagcggcagggaagaggcgattgcagggctgcgggatcagaagatcccggtcctgttctgtaggccagtgcaagcctacagttcaatgtttgcaggaggcatgactgtgggctgtcactgcatgtcctggggcaagccaggccaaagtcacctttcctaaaggccaggatattctggaagtgaagggggtgcttatctttctgtggccctctttatattccagctatccgggttcatctcctgaatgagctataaactaaacataagctggggttccccatcccttctggcagatgccagataaagatccctacagttgggaaaggggagaaatgaatgccaaccgcatcacccgtt

SEQ ID NO: 155991 - DNA, 461 bp, Homo Sapiens
cacgccagtgggccggctctggtcaggcctgggggacgcaggcaggacctctttcatgtgagggcctgccagccagtctttggagtctgcacctgatgctgggtgtagcttattttccgcggcaggtggaataggagtcgactctttgagctttttgtctttaaatggagggtccagccccggcggtttccttagcaggaatgtccagacccttcttccgcccgtcgtctgccggcttcgccttctccttgagcttggggtctccggaccggtgcctcagcttctccatttgcttcatcctctccttgtgccgcttgtggcgctcctcgatctccaggtccttctgggacagcatcctctcgaagctggtcatcatcaggtcgcggtcccccaggagcttctccctgggcctggcgtctttcttgcctgggtctttggatggcgcaaccgcatcacccgtt

SEQ ID NO: 155992 - DNA, 434 bp, Homo Sapiens
  misc_feature (14)..(14): n is a, c, g, or t
  misc_feature (40)..(40): n is a, c, g, or t
gcgttactgtagcncctcatacatgttcagtgactggtgnggatgatcccatagttaaggaaaagggacattcctaaattacacagacaaagattctttgcctggccaaactttagtcagatttctgaaccttctcctaggcccagatgtatgctttcttgtaaaatacagttttggcaaataatcttgccaagtcagtttagctagaatcctcgatcctcgtatttttgatcatcctagatctctgatcagattcttcatcctctactatcccccaggtggtgtctaagcagcctggcctgtcttcagcaagaatcccgttaggtcagcttagccagaatcccgtttactctgctccttggctacaaatttccttctgcccatgccctttttggagttgagaccaatctctctccccaaccgcatcagccgtt

SEQ ID NO: 155993 - DNA, 424 bp, Homo Sapiens
tcattgtcattgtcgcatctccagttgatgttgatacatcggccattgttgcaggtaaactgagtcagggggaagcaggtgggataggcacacgacgactgtggcgacggctcagatgagggcgagctctgtgaccagtgctctctgaataacggtggctgcagccacaactgctcagtggcacctggcgaaggcattgtgtgttcctgccctctgggcatggagctggggcccgacaaccacacctgccagatccagagctactgtgccaagcatctcaaatgcagccaaaagtgcgaccagaacaagttcagcgtgaagtgctcctgctacgagggctgggtcctggaacctgacggcgagagctgccgcagcctggaccccttcaagccgttcatcattttctccaaccgcatcacccgtt

SEQ ID NO: 155994 - DNA, 355 bp, Homo Sapiens
  misc_feature (295)..(295): n is a, c, g, or t
  misc_feature (331)..(331): n is a, c, g, or t
aacgggtgatgcggttgtgaggaccatggagagtgacctgggagggagcttagggatcacctcagccaactcttcattttatatatatgaaaaagaggtgagaagaggtagaaatgacttgcccaaggctgtctactgagggagggacccgctcactatgcagctttgcggtggcccattaccaatccctggacaagtcaggctcacagaccagctcagctataagcagaaccaagtccagaacctgccttactttcttcatggggttcaatgagaagacgccccttcacactgngtaaggagcgccatcccgtcaagcactccaggtggngggacttctaagcagcctggagaa

SEQ ID NO: 155995 - DNA, 476 bp, Homo Sapiens
ggatccagcctctggacgctctctctgtggggccctgtggccatgggaggttgcgggtcttggctccaggcagctttgagagtgagacggatagctcaccacataggagaaatcagaccgggaccaggcaggctgtggggtggagagagtggctaatttgggagatagagccgtagcacttatgaggggatgtatgtggttgatggttccaggtggcctctctacgaaccaacatggcatctctcgagcagaggccatgggccagtgggtgcgggctgccatcccccgacgacctcagagagggagttcccctaaaggtgcccatgggctgtggcccgtctagaccggggatccctttctcctccctgtggtatgatcccacccatagagcagttgtgcggggtgctggacaggccccagttttaggtgtcactctcctattcttcccagcaaggcttgccatcggccccttctca

SEQ ID NO: 155996 - DNA, 348 bp, Homo Sapiens
aacgggtgatgcggttggcgacttgggggccggcgagccccgccggagcgggggtcggctttagggaccccagtaccacaggagaggtggggggcgcgcttggcgatccgccattccaaccttcctttccctctcagctgtggtgtgagagggtgaatccagagaacaaggcggcgctggaggcgtgggtcagggagacaggcatccgcctggtgcaggtgaacgggcagaggaagtatggcgtgccacccccaggtacggtagtcccagcccctccgcctgtccggctacaccagccccctttgggggaggggctgctccgagccttcactggctagactgcgaact

SEQ ID NO: 155997 - DNA, 293 bp, Homo Sapiens
aacgggtgatgcggttggggaaggttcttggaggaggtgatacaaaggccacatcttaaaggaaaaggagcttactctggggttggaagagggatgtgagcactgaaaggtcaggtgtggctcgagggtggtgagcatggcagggggaaagcaactagaagtgaaggtagtgagccagaccacgggcctgttggacggtggttggcctctattcagagggcactgggaggataggacgacaaaggatactctatgcgaggaaggtaccctggcttatagttggaaacagcgtt

SEQ ID NO: 155998 - DNA, 288 bp, Homo Sapiens
acccctgctcagtatgaccgctatgtcaacaaggatatgtccatccaggagctggcggtcttggtatctgggcagaagtaggcacagctcttgcaactcttcgtaacggcagacgctggccctctcctacgacgcagtgacctccttggtgtcgtcctctccctagccctggtgcaggccaagcattttatacataccctcgctgccaggctgctcagagtcccgcccacatatgagacaggcgctggctgaagacaggcaactctcgtcccaaccgcatcacccgtt

SEQ ID NO: 155999 - DNA, 494 bp, Homo Sapiens
  misc_feature (24)..(24): n is a, c, g, or t
cgtgtgcgcgtgtgtgtgcgtatnaaggtcccagcacagcagccccgtaggaaggctcaggacccctgagctgccttcaagtgggacatactgtcaggtgggacaggtgcacagctcagaggaaggatgaacggggacagaggagggacctggacactcagaacatgggtcttaggacatgatgccaggagcagcaaggcccagacccccgacctctgcctgcttgcccctttaaggtgcccattgctcttaaccggtgcattaagagaaaccagccctcagagatggtcatgagccacctgcgcccgcattagaggatcctggaaacaagctccctggccaggggtaccactgcccctcattaatagcaccctgggagccatggcaaaggcctttctgggaacctcagagacctgggggagcactggtgtccagggctccagccccaaggagctcctgccactggccaaagcattgcaaccgcatcacccgtt

SEQ ID NO: 156000 - DNA, 393 bp, Homo Sapiens
tctctgctgtgtttctgtgtgctgctccctctgtctgtgcttcaaagtatatgctttctggtcgggtgtgagtgtgtctggggttcacgtgtacatatgtacctctgcaggtatgtgtcatggctggcgtgtgtcctggcctgtgtccgtcggcagtggtacatttgaaggtatgaatgtttgtatgcctgtgaatgtatctgtgtctctgtttctcttggcctgtgagcttgtgtgggcgtgtttgtttatgtatgaatggatatccatgcttgtgcttgtctttgtctctgtgtgtgtgttgagaacaaacctctccccatttgctcaagctggaacccaggatgtcatcctggcaaccgcatcacccgttcggggatgctctagtagtcc

SEQ ID NO: 156001 - DNA, 483 bp, Homo Sapiens
agtgaggagagaaagacatcgacctgacgcgcatggagtacatacccgtggccatccgcacccagatcctcttcttctgtgtgtccgacctggccaacgtggaccccatgtaccagtactcccttgagtggtttctcaacatcttcctctcgggcatcgccaactcagagagagcagacaacctgaagaagcgcatctccaacatcaaccgctacctgacctacagcctctacagcaacgtctgccgcagcctctttgagaagcacaagctgatgtttgccttcctgctgtgtgttcgcatcatgatgaacgagggcaaaatcaaccagagtgagtggcgatacctcctgtctgggggctccatctcgatcatgactgagaatccggcaccggactggctgtcagaccgggcttggcgagacatcctagcactctcgaacctgccaaccttttcctccttctcttccgacttcgtgaagcacc

SEQ ID NO: 156002 - DNA, 459 bp, Homo Sapiens
gggcccaaggggagcatggaaaaggccggctctcctgtctttccttggctgtcagagttagggtaacacacaccaagagtggagtgcggccagcaagtttgagacctgcccgccctcctcgcagctctgctctgtgtcctcaggaagtcacagagtctactgaggcaaggagagggtgattctttccccaaatcccttcttccctggttcccaaaccaaagacagcctgcagccctttctgcatggggtgctctgttgacaggcttcccagatcctctgagtctctctttccttacctcctcgatctttagttgtccacggtcaattcagtgcttccattgggggacagtcccctccgggatgacctgattcacctccagcccagggaatggaatctagaggaatacgtggggtgggtctggacaaggagcggcaggaatcacaaccgcatcagccgtt

SEQ ID NO: 156003 - DNA, 185 bp, Homo Sapiens
ctctgatacgggtgatgcggttgggtacggagctcccgggggccgggacgagggcctgggctcgggggagagggtcctgacaagacagcctccgagcaggcacggacagcgacgccaccatccggggctccctgagcggggtgcgggcgctggagccttaaccggcctcaaccgcatcacccgtt

SEQ ID NO: 156004 - DNA, 444 bp, Homo Sapiens
  misc_feature (76)..(76): n is a, c, g, or t
ttggtgacctcaacttcaccttcaaagcatcttatgatggtcttcctaccagatgggcaagcagggaccatggtcnccagtttataggaggtgaaaccaaaagggaaactgagtcatgggagctagacttccatgactaaaaactaaaaactctcatctgctccctccctggtcatagtggagattccccttcttagaactggaagtgacaccttcttccactcgcacgtgacagatgaggaaggggtgaggtctgggggcccacaagggcactccagccctgaaggccctgccgcctccctgccgtgtggcaggaccttcctgggaggtgaatccttaggcaggggcttagcaggtccttgaccttgtgggaacctgcggatcttccccctcctcctcggctgctttggaggacgtgcctcagctccaaccgcatcagccgtt

SEQ ID NO: 156005 - DNA, 567 bp, Homo Sapiens
tgaggaggtggaggcaggcgccgccaaggacaagaaagagcgtcccacggacgaggagggctttctgcacccaccagggggaaaagcagtgagaactaccagatcgtcaagggcatcctggaaaggctgaacaagatgtgcggggttggggagcaaatgaggaagaagcagcaacggctgctgaagaacatggatgcccacaaggtcatgctggacctgctgcagatcccctatgacaagggtgatgccaagatgatggagatcctgcgctacacgcaccagttcctgcagaagttctgtgcagggaaccccggcaaccaggccctgctgcacaaacacctgcacctcttcctcacgccagggctcctggaggcagagaccatgcagcacatcttcctgaacaactatcagctctgctccgagatcagcgagcctgtgttgcagcacttcgtgcacctgctggccacgcacgggcgccatgtgcagtacctggacttcctgcacaccgtcattaaggccgagggcaagtacgtcaagaagtgccagacatgatcatgactgagctgc

SEQ ID NO: 156006 - DNA, 397 bp, Homo Sapiens
gcagagggcacctacccgcccattctctatctctcgacaggccatcaggatcacctagacaaggagggtcaggggagaggaaggtgatttgggtgaggggtccagggaaactgccgagtgggtacttagatgttgaccccaccattgtgccgctcccccaagtgctgaccttgaccccaaactcccagaccagtctccagaagtctagcagggtgtgaggcaagggtccttgcgtggcaatgtaggccaggcttccatccacgccccggatgaagttgccattaatgtagtcgctgtgtccctcttcctggagcagggagaggattactcgcgtctgatcatctgtcagcagataaggtgagaaacgtggagtttgggtagataggctgatacagcc

SEQ ID NO: 156007 - DNA, 686 bp, Homo Sapiens
  misc_feature (27)..(27): n is a, c, g, or t
tcattgttcttgcagctgctctccagnaggctcactcaaatatggctgggagctgcctcctcctccaccttggccggtccttcagagggcttggtggggccactgggcgtctgtttctcgggtgttttggtcttgctgtcatccttggcttccttttcatgtaagggttcattcttcttgactttttcatcgtcctttttggtgtctgtgttcccagttcctctttttaccttctcatcctcctttttcatgtctgtgttcccacctgctcttttcatcttctcaccctcttttctggtgtctgtgttcctacgctccccttttaccttctcatcatcctctttcttggccacctccttcatctcctctctctttttatccttgtccctgctcaagcctgtgttcctgtcactccctttcttctcctcttccttcttggtggccactgccctctcctctcctctcccatccttccctgcctccttcttatccactgcagccctgacccggcccttgtcaatgccccggatgatcttctcctccttgggcttctcgccactcttgccaccagcttcatctctgtctctagagaagcttttctttaaaccacccctctttggctccttcccctactcatcgcactgatttacactcacaacaccctaggctcactaaacattctacta

SEQ ID NO: 156008 - DNA, 222 bp, Homo Sapiens
gtgtgagccaccctgccggccagtgctgggatgaatataagcaaaaggcgtaacctggcggcagagaggaaggagcctcactaagcctgtgggtagggtagtgataatgaggaggagcatgatgggtcagctgttgaacaatgaggaggggatattcaaggtggagaggacagcgtgcaccaacacatggctcttgtgatttagaaaggagcatcagcaaca

SEQ ID NO: 156009 - DNA, 358 bp, Homo Sapiens
ggtgccaggcctgttcacacaggtacccccattgaagcacggggcagacacacagtagtcagtgctggtttggcactggggccctgtgtggcttggagggcaggtgcagtagtagcctccagggctagggttgcaggagccgccattgagacatggccctgagtgacaagctgtcatctcctcactacaggtgggtcctgtgtagcctgtagggcaggtgcagttgtagccagagggctgggggtagcaggtccccccatgggcacagggtgcagagatgcagccccctagctctgcctcacactctggccccgtccaacccacgtcacacacacatgaggggtaccgagcttcgatt

SEQ ID NO: 156010 - DNA, 603 bp, Homo Sapiens
ggtgcacagtgcgtcgtatcacaacgtcttgatgggcaaatcatggacgtctgtgtttgcgcataagcactgggtcagagcccactctactgtgccttccattgacatttgaactcgctgtgattccaggttttggagagccctcccctaggagtcgacatcccacaagctgattagtcccaaacacatcccgagggcaccatgcttcaagaggcattggcgggtctctggaaggcacgctttccacatgatggatgtgtctactcagtctattgtctggtgggattggtggaggtctttcaggtggcggtggaggaggatctcttaagggaggaggtggtgctgggagtggtttatcttgttttctcaccatgcaaggagaagactttggtgaacctgttgggctgccacagggagatctaactatgcctttctgaattagatccaggcgaggaggcacgggtggcaggcttagatgtgggatctggagtgggtcaggctgtggctttcttctctgggcaaggggagaggatcctggtgatgtgactggtgagttctgcctgtcagtgcactttcggacgtttgccaaccgcatcacccgtt

SEQ ID NO: 156011 - DNA, 281 bp, Homo Sapiens
aacgggtgatgcggttgagggggaacctgaaccgttggggaagtcctcggcggccggcacgtcccaggccaggctgtggtcccacttgatgagtggggagatgaggggagttcctcggggagctgggaactccacaggtgggaacaaggcattggggttggcgtcgatgcctgagaggtgcagcctgccgatgccggccaggaagaactccaggttgtccctgtgatccttcttcatcagggggatgatggtgcagctcggcttcaggccacgcttcagga

SEQ ID NO: 156012 - DNA, 470 bp, Homo Sapiens
tggatgaggcgtggcggaagatgcgtttggctctgcagacactgcatcgggcagcaggggactctgggaggctggtgcagccagaaggcatggctcttgacagccttctagtagaatctctggaattgtgcatgtcccccccgcctccagccagcctgtgcagacttgctgcctgctgtgtcaccgggaacgcaaaggctgggaagaaggcccttctcaaaatggactggtgttgcagggtgagaagctgccccctgacttcatgccaaagctcgtcaagaatctcctaggcgagatgcctctgtgcggtctgccagagttgccgaaagagcatggaggaagatgaaaggcagacaggtcgagaacatgcagtggcgatctccttgtcacacacatcctgcaaatcacagtcttgtggagatgactctcattcgtcctcgtcttcctcctcatcaaccgcatcacccgtt

SEQ ID NO: 156013 - DNA, 935 bp, Homo Sapiens
cgaggtggttgtgggtaggagggcccagaactatgtggtgtggacaaggccatcttctcagggatctcacagcgctgctcccactgcaccaggctcggtgcctccatcccttgccgctcacctggatgtccacggctttaccacttcccctgcgcgactgccagcggttccttcctatccatgaaaacactgcagctgctatgcccagagcacagtgagggggctgcatatctggaggaggctcgctgtgcagtgtgtgaggggccaggggagttgtgtgacctgttcttctgtaccagctgtgggcatcactatcacggggcctgcctggacactgctctgactgcccgcaaacgtgctggctggcagtgccctgaatgcaaagtgtgccaagcctgcaggaaacctgggaatgactctaagatgttggtttgtgagacgtgtgacaaaggataccatactttctgcctaaaaccacccatggaggaactgcctgctcactcttggaagtgcaaggcgtgccgggtgtgccgggcctgtggggcgggctcagcagaactgaatcccaactcggagtggtttgagaactactctctctgtcaccgctgtcacaaagcccagggaggtcagactatccgctccgttgctgagcagcataccccggtgtgtagcagattttcacccccagagcctggcgatacccccactgctctgtacgttgcatgccaagggcagccaaagggtgggcacgtgacctctatgcaacccaaggaaccagggcccctgcaatgtgaagcctaaccactagggaaagcaggggtccagcttgagccccagttggaggcccccctaaacgaggagatgccactgctgcccccacctgaggagtcacccctgtccccaccacctgaggaatcacatccgactggcccggg

SEQ ID NO: 156014 - DNA, 137 bp, Homo Sapiens
ttctgtgaaaacttttgtcccgctttaatatatcccttccagaccaaaggtctggatgagagtagaggaccattttttaaatgcgaagctatgactgctaaatgggacatacgattttgtaacgagtcgagaaccta

SEQ ID NO: 156015 - DNA, 517 bp, Homo Sapiens
ctatgtgcgtcgatcgttagagagcagacaggcttccccagggaaagtaggtagagtgacagagctcaacccatagaaataaaagcttggctttaagagccgaaaaattaagattttttaaccttcttctcactgagcactcaggaaaacagtttctatgaatgtatctgaagtcctcaatcccttcacctgccacatgaggaaccaagaagagctttccaagtgcagaaaatggcaagttatgtggcttgcttggatttggtggatttcatatttcccttgtaaatgtcctttccctccttctgtctgtcctttcaagcacatgatatccccttcagctttttccttgctcctctatcaagatatgctgaatgatttatgacctgaaatttattgcattcttttctgtgcaatgatagcttccctgatacaatagtctaactgagttttagaggctctgtttcacgtacacccataagtgcttgctgagtatctataacggatcgagacatagggg

SEQ ID NO: 156016 - DNA, 552 bp, Homo Sapiens
  misc_feature (426)..(434): n is a, c, g, or t
tatgtctcgatcgttacgttgtttttcacatggtgggcaggtgtaacctactaccacaatataatctctcaattgagggctcatcaaaatagaaaatcagtcaggttattagactttttcaccagtggggtaggatttgctgttacaaaacatataggccccgaattcatatgcactgaggtccatcacttgagattcagtgttgggcagtgatctgagaagaaagacaggcatgtgagaacacctggagtcacaccagtgccctgaagacattggctctgaatgattcagatctgatcctaagataaaaataattacgtaacacagtgccaaaatagatccacacaggaattccaccacagtagttactgttaactactgacagcgctcagaatctgttttgaggaagctccactattcattacnnnnnnnnncacaactcagataattgagaaaaaactatgctcgagtaacaccttgttcttttctttttctttcatatttctagagaacaatgttcttttcttttgtaataacgatccgagaacatag

SEQ ID NO: 156017 - DNA, 673 bp, Homo Sapiens
cacccatgcatagccacccgggtatcaggggccctgccagcagagtagcttaggcttttcctagccagagtcttctttcagccacccagggctacctagttccgggggactctaggtataaaaagaagcccgtgccacagaaggcagaaagtctgagttcagatctgagctttaccacagagtggctctaaaccttcatgttcaactgtacaatgggactatccgtcctatccgcctctcaggtagatgaaatggggtaggcaatacgaaagagctgtgtacattgtcaagagccctattcatgtgtggcctgcttaatggctccctcctaatctgatttgagatgagcattctttcagcagcatttaatgggctacgtcagatacattccaacattttttgaactattaatgtcaatgaaattttacacagtctctccatatataaagtaactgacagtagggctgcaagaatcagcaggaagaggggagctagagacttcccccaaataccacccgacccatcagcctctcatggcagcatccagggcctctgcacagacccttagggctcccagcgaccaggtgccaaaagctctagaccagaccaatgcccaaaggcttattcctggctagtgcgcattacgtatcgagacataggggatcctctaggc

SEQ ID NO: 156018 - DNA, 524 bp, Homo Sapiens
  misc_feature (42)..(42): n is a, c, g, or t
gcgatcagaggatcccctatctctcgatcgttacttagtagnggcccatacctagtgagagtttcgctttaccacatctaaaagggtttctttaatgaggtgcttaaatttttaaaaagtgaactagttgagaagagcccaaacagcaccacgagtttaccagagcaattaacataggcatatccacagctgattactgatggcctgtgccaggggaaaacttcccgtctgtcctccatgctctggttggcatcatcttcctttaggtctcactttggagaccagacttctgtgctcatttaaggtcccttacggtaccagaggttaaccctattataaatagattctcccacactgatgttactaccgcttctttctcactgatttcctatttatatctctcccccataatacccgtttgttatctgattcttgtagatatatccaatgggctactgatgacatccaatctccacttcatttactttggatatatacgtatagatatacgatccgagtacata

SEQ ID NO: 156019 - DNA, 594 bp, Homo Sapiens
  misc_feature (51)..(51): n is a, c, g, or t
gataatgaaaacccaatggtggagcctcctcctagtcaacatctccccccnaatttataggaagccacacagagcaagatatcatctcatgttcacatggcccacgaagtctggccattccaagcttgggcagaggaatccttctgcaagatgggcagcttcccactgttacggaccagcctccatggtgcaccagaaaaggcactcccctcaggtgtcctcccaccttgctggatgttgccacaaataaaagaaccagattcctctatttctggcacccacagcttcctgtctcctttcaaatcctgcgtaattacccttctctcaaaggcagtagcttctctctagtacctacagcataatcgcctcaagaaacccatgcttccagaactcacacccaggaaggaatctaggaggattccagaaatcaagcccaggaatgaatccaacccagctgcactccactctggacttccacggtgcctcgcgagactggctttgctaagcccgggcttctgggtggagctaataagaaagccgcatgaaaaggtgctttgagacacgacacatcgttctgctaacgatcgagacata

SEQ ID NO: 156020 - DNA, 337 bp, Homo Sapiens
gtacgttcacgtttttgtaattccaaaaaagtatgtgcatccttctatgctgataagagtgtattttggggatacacgttgagtatcccttatctgaaatgcttggaaccagaggtattttggatttcagtttttttcagattttggaatacctgtatttgcattatactggttgggcatcctggacctagaaatctgaaatgtccccgtgagtatttcctttgagtgtcatgttttaaattttggagcacttttcgatttgggatgctccatctgtattttttccccactattttagaaatttttcctcatcagacttaacgagtcgagaacatag

SEQ ID NO: 156021 - DNA, 309 bp, Homo Sapiens
cgttatagtggtctgtgtctgcttttggttgcgttcttcactccatgcacatctaatggttcgattgatatagctgggtctgcgtctcctttgattgggttgttcactgcattcacatgtaattgatatagctggatatgtgtctgctttttattgggttgttcactcccttcaaatctaatggttcgattgatatagctgggtcttgtgtctgctttggatggggttgttcactccattcacatctaatggtacaattgatatagtggggtctgtgtctgctttggatggggttgttccctccgttca

SEQ ID NO: 156022 - DNA, 865 bp, Homo Sapiens
ctcgattcgttaggtgggaaagtgtatgtaatatttcctgaatatttcacatggcctttatctaaagaatggaaagatggtgactaggagttggtccctgagaaacaaggatgagggtaggagacgtggagcatattttagcaagattcttaatagtcagagtagatattgggtagctaattctggttttgggtttgggttttttactcttccactttatggtaggagaaaattcatggtgcatgagagaaatgaaataagtgacagaatgtcaaaatcaaactttaaaacataaactcttgagggcagagctgatgacttaatggtatgtgagtagaactggtactgtcatggttgtggatttgggagtttgaggaaacttgagcaaagaagtggcagatgatgaaaataaatcagttttaattctgataaaactggttttggcaaatgtggtttagatttaaatgtggcacaattttttcaatactaaactctagaattagtcagacttgcccacccagtaacaggtagcttttgacctccttaagcctccttatgtgagggtcttgtactataaaactccagggattgaggactagagcctcattctaaaagatgggaagaaagggaaaagagatgagtgaggcataccattcctctctcctcctccccactaagagaagcctcaccttctccccagggggagttggggagagaaggcagaaatgttataccggactggcactccccccatgcagaaggaaacctcatgagtgggaagcagcattcctctcccaccgtaagtgacggtgatatgctggcgtgggctatgtataacgagtcgagacataggggatcctctagg

SEQ ID NO: 156023 - DNA, 381 bp, Homo Sapiens
  misc_feature (57)..(73): n is a, c, g, or t
tctcgactcgttagtattggtaacatttcatatggtcatttaagtttagctaatgtnnnnnnnnnnnnnnnnngtctgggagcaggtatctcccacttagaactacctgagagaactacattacggagtggagaaacataggtttttgttctagatagacctgggttcaagttccggactcagtgctggctgtgtatatgaactagtacaagccttccttttcttatccttcaggttcaatttccagggtatctgtgaaaaccgagggaatggggaatgagagctttgccacagtgctgcacacttgattctaatttctaatcttttatttaattctaatgatcgagaacatagtaacgatcgagacataggggatcctca

SEQ ID NO: 156024 - DNA, 149 bp, Homo Sapiens
ctagtgtctcgatcgtgaagtggggtgatgggtacatggaagttcattacattattttccactttggtatatttcagggttggggttttttcatcacaaaaagtttggtgtttgttttatggtttgggggtttttttagttagcatctg

SEQ ID NO: 156025 - DNA, 704 bp, Homo Sapiens
  misc_feature (73)..(224): n is a, c, g, or t
ctcgagtcggtaatattcggtatacaacatgaaattaataacccctccctaaccatagaaactatagatgatnnnnnnnnnnnnnnnnnnnnnnnnnnnnnnnnnnnnnnnnnnnnnnnnnnnnnnnnnnnnnnnnnnnnnnnnnnnnnnnnnnnnnnnnnnnnnnnnnnnnnnnnnnnnnnnnnnnnnnnnnnnnnnnnnnnnnnnnnnnnnnnnnnnnnnnngaataactacaggcagttctactattgttggggtaatgaaagagatgttcattttatttcttacggggtttcatgtttctatatttccaaagcttttagtgttgagtttgttgggtagatgaattttgaaatttttaattgaaatggtgataggattatggatatgatagtaataaatcgtgtggatgtgtctagttggggcacttcgttgtggaaagatcataactcagtctttaacttaaaaggttagtactgattagctctacagtgatattataatatagatgctgaccagtttcgaagtgttttaggggtactaaaccagttccagaaccatgggtatgaagctatgattagattcacagatttccgagccctgactgtagaaaggcctgattgtgtaaatgtcaggattgcttggtttaaacatcctggcattgcatctgtttaggcctaatgatgtaacagatcgagaacata

SEQ ID NO: 156026 - DNA, 356 bp, Homo Sapiens
aaattagctgggcatggtggtgcatgcctgtagtcctagctactcaggaggctgaggtaagaggatgcttgagcctaggagttcaagactacagtatgctatgattgtcccattgcactccagcctctgtgacagagtgagaacctgttgccaaaaaatgtatatttatagtatgcagatgtgaaatagaagctataagcttgtaattctgttatggctgctcaggtttacactcttatagtttcatttctgaataagttaagtacatttctaaaaactgaggagaataaaaacaatgtcttgaggattgtgttatctgatgaaccttttatggatctaaggatcgagaacatagg

SEQ ID NO: 156027 - DNA, 537 bp, Homo Sapiens
tagccatatttttatctgcatatatcagaatgtttctctcctttgaacttattaacaccaaaggaacatgcttttcatacctagagtcctaatttcttcatcatgaaggttgctattcaaattgatccatcattttaattttaccaatggctcaaaaattctgttcagtaaatgtctttgtgactggccaatggcataaattatgtttaagattatgaacttttctgacagttgcagcccatgttttccctacgataccagatttccatcttggggcatattggattgttgtatttaagaccgtcagaataatgatagtgtgtggtctccagaggtagtcagaatcctgctattgagttctttttatatcttccttttccattttttattacccttttgtttgtttagactacactttgtagggattgaggggccaaatatctcttggagtggaattcctgtgttttgagccttaccacccggaaatatgagctatactagatagccgtcctgatgcagtaaccgatcgagaacata

SEQ ID NO: 156028 - DNA, 618 bp, Homo Sapiens
cgtcgtatacgagagctgatttgccttttagtggatcatagggttttttttggagcttaggttttacagatggcaggaggctttttaaaagagttatatctcacactttgacatgtaatcatcaaggaagatattagcacatttccccttctgtgtccgaaggtaggagcctaacttcagtgaatgccttgctcccagttgccaaactacttcctcgtcattaagatatgagaactgtatttttctttcagataaagtccattagccaacaccattggtctatgacttccctccacatcttcccatacttttcctctagctcaccacagaactttaaaaccctctcaccctttgtttccacagagtggagctcagactgagttctggtctctctatcctattaccatagccttgataaagtctttgcttgactgcttaactttgtcccgtgccatttttgctttgatggaagccaaaataattgaataaatatgtttggatgaaagtatttgggttaaatgttgtaaattcccccgtgcctcattaagagccggaggatatagttaatagggtcccctgaagggcaggacccttgaatgagtgacgatcgagacatag

SEQ ID NO: 156029 - DNA, 299 bp, Homo Sapiens
cgagatgctgattttttagaagctgctgcagaccatactgaaatgcagctgaattttggaacccctgttttacaccacagttttagggactgtttgtgagttaagggttcctttcggtgatctgtgaacttggtctttgcagtacctagactcctgccttggagattatttagtagtgcgggattatttagatggtatacttaaccctttttccgatgcctgaagactgaactttacgaagcatttgtaatcgattttataaaatatcttaggactttctctaacgctcgagacatagc

SEQ ID NO: 156030 - DNA, 569 bp, Homo Sapiens
gactcagtctggtgtgctgacttttcaggtatagtgagtttcctgtagagagcatataagtggatgatattttttaatccatagagtctatatattttataaagtgtggaatttagtccacttatatttaaggttattgatatgttggtatgtgaggttctgtacctgtcatactgtggttttttgatttggtgtattcctatttctttccttttctcttatggctatggtgatttggcagttatctgtagtggtaccatttgagtcctttcctattggtatgttttcttataattgagttttataccttgatgtgtttttatgatgacaaatattgttctttcattttcagatttagaactcccttgagcaattctggtaggattcatctagtggtgatgaattccctccagtgtttgcttatcctggggacgactttatttctcctgcatttatgacggaaccttgagctggatatagcattctgggctgacaggtgtctactttcattactttggttatatcgtcttatactaaccttgcctgcaaggtttctgctgagcagtctg

SEQ ID NO: 156031 - DNA, 404 bp, Homo Sapiens
tgctttttgttaaactaaaagttttagtatttgggaataagtatttaataaagttagtggctgttgatctgccccctttgagagatgcgtgattttaatatatatttgctatgttcgtagttactggatatacatctattccaacccagcacagatgttatatagatttgcgctatgatgatggaacatttgatccaagaaatgagatgcaggacgtgatttcaaaggtaacgacctctcccacaacctctcctatagtagaatgcatgttgtcattcttcagaagataaaaggtagttgagaaacataaaagatttttctagtttagaaaattcttcgactatatatacaagctagcctctttatttatttttggtatttcagattctaacgatcgagacgta

SEQ ID NO: 156032 - DNA, 131 bp, Homo Sapiens
tatgtgctcgcatccgttactatttcgatcgttaattcacacaatcaacttttttcacttcaaatagtcaaattacattaatagatcgtaagctacaaaaccaaggtaaagcttccttagaacttagtcat

SEQ ID NO: 156033 - DNA, 294 bp, Homo Sapiens
tggcatttagtttagcatagtaatttttttgttgtaatttgctgccacttcagcagttttagtgtttagatgtgggagaggttaagtaagatctgtattgccctattatctctaaaagtggcttgtccctgcaggatagtgaatgcttgtctgtaccattggagttacacatttcattgagttgataccagcagatttttttcagggaaaaataatccaatctcataactacagcacctcaccacattctccctctcctaacgatcgagacatagggtaccggctcgacctcga

SEQ ID NO: 156034 - DNA, 294 bp, Homo Sapiens
ttgagaagcactttggagaccttcctgctgttctgcaggtcctttgtgtgtaaatttagggcatttgccctaatcagtggttcttttaagttttaggtcctaattcatctgttatatcttgtttcgcaaaatttttggagttttacatacatcaggggacccccgcttcagaattctttagaccagactcttttttatttatttattttttaagagagtctttttctgttcacccaggctgccaggctagagtgccgtggcgccatcatagttcactgtaaccttgaactcctg

SEQ ID NO: 156035 - DNA, 165 bp, Homo Sapiens
tcagttattttctaatagccttgatgtaacttggtctatgttgcatctttttcatttttagtatctaataataaatgataaaattgcctgatttactaaaatggtaagctcctatgacgcaggaagatggggagaggagtggtattaaaatagatacgagtcgag

SEQ ID NO: 156036 - DNA, 474 bp, Homo Sapiens
tatgaattactttgggccgtgatggccatttacccaccgtgagatgaccatctcacaccagttagaatggcaatcattttaagttcaggataccaccgatgctggagaggatgtggagaaataggaacacttttacactgttggtgtgcgtgtcaattagtgcaacccttgtggaaaacagtgtggcgattcctcaaggatctagaacccgttataccatttgacccagccatgcccattattgggtatatacccaacggattatgaatcattctcctgttaagacacatgcacacgtatgtttattgcaatactgttcaccatagccaatgcttggaaccaaccccaatgctcatctatgacagcatgaataaagtaaatgtggcacatatacaccatggtatgctatgcagccataaaaaggaatgagttcatgtcctttgttgggacatggatgaagtgtggacaccatca

SEQ ID NO: 156037 - DNA, 199 bp, Homo Sapiens
gaaataacgcagagagctagggtaaaaagaaagaagagtaaaagcactattttattaaggcaatagataaatttagtgggattttgattcagtaggcctggggcggtgtccaggaaacttcatttttaactatcagcccataggattctgatgcaggtggcctgggaagaccttttagaaacttagcagtagatactgt

SEQ ID NO: 156038 - DNA, 254 bp, Homo Sapiens
gtaggttctcgattcgagaactagctaggttctcgatcggttatatgggagtggcatctatcattgtcaaattccaaaggtagcttttacatttcacaatcggcaagagctggtatttccatttaatggaatatataccatattttattataatagctccttatccctcactatccagaattctagttccagcactgccaccaacaggctaggtaaccttgggtcaagtcacttaacttctgggtcttccagct

SEQ ID NO: 156039 - DNA, 616 bp, Homo Sapiens
  misc_feature (90)..(238): n is a, c, g, or t
atgctcatccgtatcccacacttgagagccgaggcgacagattatgagatcagaagtttgaaccagcctggcccacatggtgaaccccannnnnnnnnnnnnnnnnnnnnnnnnnnnnnnnnnnnnnnnnnnnnnnnnnnnnnnnnnnnnnnnnnnnnnnnnnnnnnnnnnnnnnnnnnnnnnnnnnnnnnnnnnnnnnnnnnnnnnnnnnnnnnnnnnnnnnnnnnnnnnnnnnnnntgaccgagtgagactgtctccacaaataaatgaaataaaattgatttttaaaaagattataaggtctgtaagaataggagatggatctaacttgttaacagagctcctcttgaataagtgaacgaagcaatgaatgttattaccatgtgcccagccctgagaatacggagatgaaagacataagctagaaaagaaaaatgaccaatggttcactgccatctggagatgttaagtacctggagatgtaagtacagaactgctaagggagtgggagagggtaggtgtctgcccctaactgcagaaggaggagaagaggactgagataagcctcctggagttggtgatgatttaactgcatcaattacgattcgagacata

SEQ ID NO: 156040 - DNA, 228 bp, Homo Sapiens
cggtctcaccctcccaaagtgctgagattacaggttgtgagccaccacacccagcatatcgagaagttttttccatttttggggtttggggggaagtctttggtggtatgtgggttttattggtgtgggtcacaatataggttttggtttggagacaggatctcggtggcccaggcttggtcatctctctacttagtgatcagtgggcttctctgttgcccaggcttg

SEQ ID NO: 156041 - DNA, 446 bp, Homo Sapiens
  misc_feature (197)..(249): n is a, c, g, or t
gaggatcccctatgtctcgatcgttatttctactggctgtgcagaagcagtcattggttaggtcccatgttatttattttcatttgcttccggtcattttcctgagccaggaatgaaattaaaaattcctttctttagatttatagcagacaacagtgatttatttatttatttagaaacagagttcactctggtgnnnnnnnnnnnnnnnnnnnnnnnnnnnnnnnnnnnnnnnnnnnnnnnnnnnnnaaatctaattaaccttctcaaaagccttcctatttaaccattctcttccatcttcagggccacaaccttagtccatgcggccatgatttcttcccgggacaactgcaacacttcctcactgtttcccggtttccactctggccctcctataatggattctctacatggcagtgatgataatatatatacatattttt

SEQ ID NO: 156042 - DNA, 422 bp, Homo Sapiens
  misc_feature (202)..(254): n is a, c, g, or t
cctaataaatatgtatatatattatcatccctgccatgtagagaatccattataggagggccagagtggaaaccgggaaacagtgaggaagtgttgcagttgtcccgggaagaaatcatggccgcatggactaaggttgtggccatgaagatggaagaaaatggttaaataggaaggcttttgagaaggttaattagatttnnnnnnnnnnnnnnnnnnnnnnnnnnnnnnnnnnnnnnnnnnnnnnnnnnnnncaccagagtgaaactctgtttctaaattaattaataaatcactgttgtctgctaaaattctaaagaaaggaatttttaatttcattcctggctccggaaaatgaccggaagccaatgaaaataaataacatgggacctaaccaacgcacatgcttctgcacagcctat

SEQ ID NO: 156043 - DNA, 258 bp, Homo Sapiens
tgttcgctgttgctgtttggtgtctctagtcgatgaagtctcttgctccattcactatgtcctcgtatgttacttgcactgaagaggcatagttgcctttgggtttgtaggtccccacagggcatcacaagaccagcatcaaatgtaattgtttgaggaaacgatgatcaggttacccttgataaaataaaatgttcctgggtagctgagtgtgatgggtctacttgtcttaacagatcgagacatacgggatcctgt

SEQ ID NO: 156044 - DNA, 664 bp, Homo Sapiens
cacctagcacagtccctaggatgtagttgcacttgtttaataaataattattaaatgaaagtaagtaatgattgagacagagcaactgagaacttgagaaccagatgagtataatcctgcagaatagatactttggaaaaccctctgatgattaccataattctgtccattgcaccactgttgttttgcacttctctagaactatctttggagaaatgcatttttccctccttactagaaaagccccggaacctcgccaatagaattaagaaattcctcgcccattattagcgactccaaatcgagtacataagagtgttctgagtcccactgtcaaggtccctgtcaggaatggctaaggtaagtatcacccaccagcctgctctgaaactgagtaactccatagggtcatgtcctgagcagcaccggaaccagaggagctaatctatgaaagcttctccttgggaagagtagctgataaccttgagaaacacatgtctaaaacgctgcagttttgagaaggacaaggatatgaagaaaaaaacaagtcactttgaaatctacaaaagattagtaaatgttacaaagataacctgatatactaaaccactatccacatcatcctcgacatgtatcggtctgtagcttaacgatcgagaatata

SEQ ID NO: 156045 - DNA, 504 bp, Homo Sapiens
ctatttgctcgatcgtgacatttaccattatttggaaaatgaaaactcattggctggcattattgatacatacaaactgatactgtgaaaggcctcccaataggaaatggctcataaacatatatataagaatatctgattgtaccaatccacttaaccaataacctcagggactagggaccagaattctctcttattagtcattagatattcagtgagaaaagtcattccagttttaggaaccaatgcaggaagattagattaccggagttcagatttttagccatgtgtaagcttcagctctcttctccacacatgaataacacttactaaagggccagaacaccaaataggaaggactcttctgaaaagataaatgactaagcttcctaggtgttccatggctaaacttgtcagaccttcccttgttacagccaccgatagttttaccttatccactaagacctagtactctcacggatcgagacatagcggatcctctga

SEQ ID NO: 156046 - DNA, 409 bp, Homo Sapiens
aaaggactagacttagaacctttccccatactgtccatggtatacctggggtagtgcagcatgcacatttcaggattgtaaagactactacccgaatcccaaattgagagagaacctgtttatataaaactcattagtgaacactcttcttaacagctaccgaggctgcccgtagctatgatgtccattctctacttcatgcatctgtaggctaaatggaaaattaagatatgactgaagagaagctcctcttcatattcaggtctgccacttttctctttaaaaaaggagagaattaagatccatgaatacccatactggagaactttaccacgtatgaattaactcctaccgttaacggggtcactacttatacgttgatccgtaagtcacctacgatcgagacata

SEQ ID NO: 156047 - DNA, 691 bp, Homo Sapiens
tattatggttacataagatgtcaacttcagtgccatgtgggatcctgtatatgctcctggaatagagaaaggatattaatggaacactggggaaacttaaataaggtttgtagtatagttaagaacattgtatccatattaatttcctgttcttgatcattatactatggttacgtaagatgtccactttaggagaagcagggcccggagtggaaaggagttctttgtactattttgccacttttctctccatctaaaattagttagaataacgcccttcatgggacataaaggcagagcaccacactgtcaatattaccatccccaatgtttaatatatgcgtatatagaacacagactgggaggacttgcaggcatgtggtgaccttgggtctcgctgaatggtggacattatggtcaggtttgctttcgttttcatattcatctgtactttctaagttttctactcatttgatggttgaatatggtggatccttggaaataagggtgaatgagacaagatgacgtttatctctcatggagcttatcttctaatggggggaaatggcaaatgactacctgcattcaaatcttggtgcagaacattaaagctgatgtgatagatggtcagagggggcctctctgagaaggtgacattcaccggggcgatgtgaatcacgatcgagaacat

SEQ ID NO: 156048 - DNA, 171 bp, Homo Sapiens
ggccccattttcatcatatattaagtggtcattgactttgaaagtttagaaagctgtcatcacttaagttataccctgaagaggcaacctgaggtctaaataatctgaccatctgcagaattaagagtcataggaggcccggcctggtggctcacgcccgtgatctcagcc

SEQ ID NO: 156049 - DNA, 530 bp, Homo Sapiens
  misc_feature (466)..(467): n is a, c, g, or t
ctatgtctcgatcgtagtcaggctaggtaataaggaggcactcagccactgtcttcctctccaggaatgatgcgatcaggccaaagttcttgggatgctgcatgaacttctcccggaaggtctccttctcctgctcactccacatgttcatgacctggcggtctttgtacaccttcatggggtcggccataagcccgttcatgttgatgaacttgatgcgctgctggtcagcgtcgtacagcatgggcgggatcacggccagctggcgcatctgcttctccaggttctcctgctctgagaggccatcgatgatctctgacacctcgtgctcgctgcgggcggccgacatggacagcccactgccccgttggcccaccctgctctgcatgcgctcctgcagctcgcgctgcttgcggatctcagggaactgcttctcgtagtactcgcgcaccttgctctccttggnnccgccgccgggggttgttctcgatgcgctccaccttcttctcccaggcctccatgactggtca

SEQ ID NO: 156050 - DNA, 259 bp, Homo Sapiens
cttgtttgcctttgtcatgtttagatgtttggaatatctaaaataatgaccgattatgttctttaaatgcttaaaataccctaatgaatctacattactcattgatccggttgatacattctaacataccaaaatcctttatagattttttcagtttttcccgttgtttctcctgaccatcctttgcatgtctgaagctgccatttacccaaatccctttcactccccgaatgtggtctgttattcatacctcttctat

SEQ ID NO: 156051 - DNA, 631 bp, Homo Sapiens
tttgccagggtcagacgacacgtcagtccacccgtgataggcattccttctcctcgtacccacattcatgtgatgtcgcgtggcacgactgacaagccaggtaagctgagttgcctgagttttggcggtgccgtagtattgcaacgcgtctcgttcaccaactcgctcttctccatcattgaacttttttggggtcacaaccagccaggtgccccgcacgagggaaggagtggccgttgtccagtgacacagtgaaggggatgcgtccgctctcatagagcagaggtgacacacagtgcacttgcccggaggagtccacatggccgagggtctggatgctgtccttaaacctgcagatcacactggcgtctgtggggctggacatcttgaagtgccgcaccacaaagtccttgccgcccatcatggatcctgagtagggcaatatctccaggcagaagtcccggaaatccaagcagcaggtgccaaggccagagcacgtcgggtggcaggaacatggcccgtccagggcgccacagcgcatggagcagctctcttgggcatctgctgtgggtccggggcccgggccgaggcacgtcgccacacaagcgaagggcagcgacagcgagtctgc

SEQ ID NO: 156052 - DNA, 502 bp, Homo Sapiens
cgagcgtctaaaggagcatcttaccttttccaattgaccataggggttttaaagcgaaactgggcatgggagatatgggaatggtgcagggcacagagtctgtgtctttgtccccatggctgtctcaggtcattgctggtctggaggtctgatgggtgttatggtgactttggcccaatggtggtggactaatggttcatgactccccctaagcgggagtattccacagaggctccatgcctggtttgtttcaagattcgcctctggggtttcttaaacaagagcataattagataaacatgcattgccggagaggagtgtctacagagggaaggaatgaaggggtgagagtggagaggtgaaagaaaaacaaagtaggtgatttttaaaactgaggtcccagcagccaaacaaccactggcctcgagataagcaacattaaaaccatttacactcctctaatgttgactgactgaccaccgcgacatgtcatcccggccgc

SEQ ID NO: 156053 - DNA, 508 bp, Homo Sapiens
atcttcctgtcaccgcgccttcctcagcttccacaggtgacaccacccgtcgtcctgtcagcaacgcttcctcggcatccacaaggtcatgccacccgtcttcctggtcaccaggcactgcctcagcatccacaggtgacaccacccactcttcctggcaccgacatttcctcggcatccacaggtcacgccacccctcttcctgtcaccagcccttcctcagtatccacaggtgacaccacccctcttcctgtcaccggcccttcctcagcatccacaggtcacgccacccctcttcctgtcaccgacacttcctcagcatccacaggtcacaccacccctcttcctgtcaccgacacttcctcagcatccacaggtcacgccacccctcttcctgtcaccagcctttcctcagcatccacaggtgacaccacccctcttcctgtcaccgacacttcctcagcatccacaggtcacgccacccctcttcctgtcgggctagtcgggg

SEQ ID NO: 156054 - DNA, 356 bp, Homo Sapiens
aggtgggaacctggaccctgcaccggagagacagcgtcagggcatcatctatagaagcgccacgtgggaccctgggctctgtacaggagagacgggcatcaagtcatcatccgtagaaacgccacgtgggaccctggaccctgcacaggagagacggcgtcagggcatcatccgtagaaacaccacgtgggaccctggaccctgcacaggagagacggtgtcagggcatcagtctgtagaaaccaccatgtgggaccatggaccctgcaccggagagaccgtgtagaaatgccaccgtgtgaccctggaccactgcaccggagagatggcgtcagggcgttatctggacggttggt

SEQ ID NO: 156055 - DNA, 177 bp, Homo Sapiens
atgaaaaaaagacagtgatgatattcttttattcattccacaaacatttactgaacatctgctatgttctcaagcactttttaggcactagagatacagcaatgatcaaaaataaggtgcatagtttcatggtgctgatattctacagaagcagacagacggtaaggggtaccgagc

SEQ ID NO: 156056 - DNA, 543 bp, Homo Sapiens
tcagggctccggttccatgtgcgctccaagggcccgtgtaagaatttgcgacgtgtggtgaagtgctagcgtcagagccctctcgccgagactttctgggtcaccagattccagcagaactcaacagagacctctacccgcctgagctcctgaccaggttagagggcatctggctcccaggcactgggtcaagctccagaggcatctcctgtgtctgcccgcgacccatggccccgctcagggcctgccttccatctcctgggtcttccccagtgcaggtgggagctctgctcccctggtaactgcgagcctctcaagaccaccttcctcctcagtgtcatccccctcctgtctgccccctctcccccagtgcaggggccataaagccttccccggagtcccactgccaggtcccactgccgggcctccaggctttgctgctccacctgggctcaagcctggccatactttgttctaatgactctgtccccctgtggtacactctctaccacaggcaccctgggctccccatacccagcccag

SEQ ID NO: 156057 - DNA, 596 bp, Homo Sapiens
cagacacccagctggttcatccgcccccctgctctgaacctcacccagggcaacaggttacggacttccacaaagagcttattttcccatggaaagggttagtgccatagttacgactcaatttccgggggcttagagaaacaacgggacaccgggaagggaacctgtacaaggggttttctctatctaggtggaaggagggggccccacagaggttctgcacttgtcctgggggacggggactctgatgggggccacgggcgaccccactccactgcacagcaacgtgtgtcctcccgcactgcctcggaatcactttgaaaagtggttctccctgtctgtctgtcagggagacacctgtccagccccctcccgtcagatgccctccaggcacctgggtccctctgcagctctcccgtcagggcctgggcagaggctgctttgctggtgagaggctgtgatgcggaggacgggcgatttccaagaaccactgctcctcaggcacttccggagctctgcgtcgaatctgtcgctgtttctcgttgtgtggccacagctgagtgaccctgataccgaacgtcgagctccagactacc

SEQ ID NO: 156058 - DNA, 377 bp, Homo Sapiens
tgactgcatgccataggtactcttttgtgtctgctttatctgctcaacaccatgtttctgaaatcattaccattgttgtatggttctctaacttcatcatttccctttcagactcagcatatgctgagttccacctgttgaagggctatctctgtttaattcaccatcttgaaagaaacgtttacaattgagatgttttcacgaatatatagttcaatcctgaggaatcgatgtagaattgttatcagcagctgtctgaacttactcaggggaagtcttcgtcttcactcacataagagtctaatggaattaatatccacaatcttagagaaatcccacactattcatgcccttttcatgatctcccactagacctc

SEQ ID NO: 156059 - DNA, 502 bp, Homo Sapiens
attaacttccagactccaggcatgccttagccaccccgccaattcccatcgcagacatggccgagcacaccgagcggctcaaggccaacgacagcctcaagctctcccaggagtatgagtccatcgaccctggacagcagttcacatgggaacattccaacctggaagtgaacgagccgaagaaccgctatgcccacgtcatcgcctatgaccactcccgtgtcatcctccagccccttgaaggcatcatgggcagtgattacatcaatgcccaactacgtggacggctaccaggcgtcagaacgcgtacattgccacgcaggggccgctgcctgagacctttggggacttctggcgtatggtgtgggagcagcggtcggcgaccatcgtcatgatgacgcggctggaggagaagtcacaggatcaagtgtgatcagtattggccccacagaggcacggagacctacggcgtcgtccaggtcacgtcgaggtgtccacgtag

SEQ ID NO: 156060 - DNA, 624 bp, Homo Sapiens
tctagaggatcccagatcatgcagagtaacccagaatgatcagagcagactggggttaggtggaaatctgggtagcagtgttggacatgttaacttcgagatgccgtcagacctttacgtggggattccggtctggggttccaggcaaaggaacgggctgaaggataaagagtcaccaacataggcacagtcattaaagccacgggcctggaggaaatctcttagggcctgagtgtagacagagaagagaatcaagccctggggcactccatctcttagcggccagggagaaaagaaaggattggcaatgtaggctgaggaccacactcccatgacaaacaaggtcaagttagatgaggactgagaagtggttactgggttagcaatgtgcagggtgctgggggccttgacaaagggcagtctccttggtgtaaagcagggaacagtctccttggtgtaaagcagctgagagtaaagagagaggcaaaggtgtgaaatcgtcctctggagaatggagaggaagtgggctagggacaaaagtttgtgtgcatgtggttacacatggcaagattttacgtagagtcgagtctcaccatcttgggcaggttggtctcgaactcccga

SEQ ID NO: 156061 - DNA, 708 bp, Homo Sapiens
gccacggccccctcctcatccaagggcccagagctgggggtctcaggcctgcggaaggcgccttggatgggaaggggctcggggtgctgcaccaggggcctaggggctggtgagtggcgggcagtgcttgagagctgtgggctggatgagtcgtctgaagattcagatgacagggaccatgctgtcccattctccagctcctcctgccgtcgcagcatgttatagaaagcctgttcccgaagtgagggtgtgtccggtgggctctggctataggtggagaagcgcttggtgactgtggaggccttgttgacagaagaagcagctgagggctggtcatccttgtcgaaggggctccatgtgacttccaggctgagcttgatggtaccaaggtcattgatatccacagccacaacctggggcagggcggcaaacaggtccttggtctcacaggagacactgcccacaaccacatggttggccaggcccttcagttctgtcaccttaatagacagaaattccgtgagtagagggagaaagatggtttcttcactgtcccacacctgctttccactaccctccattcggccccgtagtttccagcgctgacgcccatatttcatgcagatctgggggaacaggtaggatgaggcagcctcatactgatcgcctacacacagcctggcgaagccagccagcccttcatcggag

SEQ ID NO: 156062 - DNA, 584 bp, Homo Sapiens
ccgttataggcaggacactggacatcagcctcgtaagcacctcactgacacagcagcagcatgacccatacccaccaggctgagagcacagaggccgctggacaaacacggaccagcgaaccggcctcctcagggtcacgaaccacctcagcgggcacagctaccccttcctcatccggggcgagtggcacaacaccttcaggaagcgaaggaatatccacctcaggagagacgacaaggttttcatcaaacccctccagggacagtcacacaacccagtcaacaaccgaattgctgtccgcctcagccagtcatggtgccatcccagtaagcacaggaatggcgtcttcgatcgtccccggcacctttcatcccaccctctctgaggcctccactgcagggagaccgacaggacagtcaagcccaacttctcccagtgcctctcctcaggagacagccgccatttcccggatggcccagactcagaggacaagaaccagcagagggtctgacactatcagcctggcgtcccaggcaaccgacaccttctcaacagtcccacccacacctccatcgatcacatc

SEQ ID NO: 156063 - DNA, 512 bp, Homo Sapiens
agaaaacttttgcaactggtgacatgtttgcatgctggcaggaataatccaggagagaaactgatgatgtaaaagagaagggggtaaatgttcaacaagttcttgagagggcatggaatgcagggagcaagggctgggctaggagaggatcaaggacagtttatccactaacaggagggaaagcccagtaccggtatggatggatgatgcaggccaaactagaccaaggaagaaaaccaagtttcttctgattgctttttttcctcagtgaaaccaaaaccttgtcagctaagagccatgagaggccacttttcattccccaaggcacccgttaaaccctttcagagcaccttgtgtttttccatcatggcacttgtcaccaatgtactgactcactactggtgtggttattacagctgtctccctccataactctgagaactttatgaggcccgggaccacacatttgtcacttaccactcatcccagcactggcatgtatctttctagac

SEQ ID NO: 156064 - DNA, 372 bp, Homo Sapiens
tcattagtagatggggctgtgcaagatcacacagtacatggcaaatttgcctagatccaaagcccagattctatccattcttctttctggccttctcaaagaaggaaaaggaagaggaattgatttcaggagagattgctcaccccctttgcttgggagtaaggtcatatccccttcccagacctgggtgtcctgggctcaggccccacctggtgtgagcccagccagctgggcagggctagactcatgaactcggcagacaaaggtcaccatttccacacgctgctcctcccggtggtggaggccataagtctggatctcaaagccgaaggtctggggttctctgcagctctgggtgtatctgcatcatct

SEQ ID NO: 156065 - DNA, 315 bp, Homo Sapiens
  misc_feature (32)..(32): n is a, c, g, or t
  misc_feature (82)..(116): n is a, c, g, or t
ataattagctccttttccttttgaagaaaacnattgtcttttctcagagtaatgacatcagcctcctcctttaatcaggtcnnnnnnnnnnnnnnnnnnnnnnnnnnnnnnnnnnnaacctctaagcatttcctgggtactaggagacttttattgctcaagctggcccattttactatggacagttccaatggttgcacactcctgggacattcctgtgacttcatgcttggtatgatttctaccttgttgaatgactaccataatactacttctctcagcatctgggatcctctagatcacctcagcatcacg

SEQ ID NO: 156066 - DNA, 175 bp, Homo Sapiens
cacctcttctagaagaagggtttaggcagttagcttttatttcacaaagcatttacaatctagctagtcttggtattctcatgtccctctattttcccctggtgtatcctgtgttgtaacctctctcctgcctcccattctgcaactactttgttctttcgtttcctcccttatc

SEQ ID NO: 156067 - DNA, 687 bp, Homo Sapiens
  misc_feature (163)..(289): n is a, c, g, or t
agatgatgcagagtatacccctcctaagatgcttcccgtggtccactacatatttaattgtagtattcccaaccccatcactctgtcattttaccccattttaattttactgatagcacataaaatgttacacaacatgttgatttttatttctttatccaannnnnnnnnnnnnnnnnnnnnnnnnnnnnnnnnnnnnnnnnnnnnnnnnnnnnnnnnnnnnnnnnnnnnnnnnnnnnnnnnnnnnnnnnnnnnnnnnnnnnnnnnnnnnnnnnnnnnnnnnnnnnnnaacaatgattaagtaaaaggtctcaacatttctgataagcataatagaaataactatcttccaacactgtcttcaaggggccagtactctaaactgccatgcaaatgtcaggtgtagtttattttgtccgtgttgagtcaaacgaactgagaccaaaaagtggtccttggagacaacaaatagacagagaagttctctttttttctgtgctggcaatttttccactgagctaaaaagagataagttcattagtgactgccactaactttttagaatcctggggtgcaacacctctgcatttcttgccccattgcctctgcccttgtcctgccttgccctcacccccaagaaaagcatgcacccactcttccttgacagtagggttctctgcatcctct

SEQ ID NO: 156068 - DNA, 675 bp, Homo Sapiens
cttgtttcattagtgatggagccatggagctgagggttcttgtgaactcttatgctacaaattacatttcccacagaaagaaatgttgaacaaacaccaaggctggtgttggtgtacccggatagctgcaggctcttatctattaatgaccgttgtcataagtaacttttaggacaccaggcaacataaatttatttttgtttaaacaaatagctgccaaatggtaagttcccaaatcccctgtgtctttaaaataaggcctatcctaaagccagcatttctttgtcttgctctgtttctttgttctactctcttattttactgttttgacaacgtggtacttatttttgttgttccctgttttctaccctagggataaactcttcattactttttaaaatctatgttccattaatcacgtgatttccatttcatcactcattactgtccttttcctccacttctcctccctctggttttattctgcccatctgctcattacgtaaaatatggttaatgtgatgagaggccttgcctaggaaatcaggtggcttatgagcttcagataatttcttaaatgtgtttacaacttttatgaaaacacatcctctttgggcctgttaggaagtggcctgtacacatggcacagatgttcacagaggcctaagagatgcc

SEQ ID NO: 156069 - DNA, 502 bp, Homo Sapiens
ttggggattctttccgggacccccgccagcctgttgcccgggagcccccgtccccgcgggtgtcccaccgagtctggctgtgaggtcaccgaacacgggcttgtcctgtcgtgcctgggctgcatgtcaagtgaccccggtctcccggtaccacagatgtgggcacatctggcccctcctctcctggatagtctgtcagtcgtctctggaccctgttgatggttcccagccaagcccctcacagggctttttttaggagcccacctgggtgctttgatgatttcaaccctgagtcccccccaactccggcaatttcacgggggcatatggggtgagaagcctgagaattaagtccatataagccgccgcagagtcacagagatagagagcccgaagcgctggcttgtgcctgttaatgtcagctgcttgggaggctaaggtgggtcacttgaggcccgttcagcctggaccacattgccagacccctactccctttttgttt

SEQ ID NO: 156070 - DNA, 524 bp, Homo Sapiens
  misc_feature (443)..(466): n is a, c, g, or t
ttggtaaaacacccagtttctccaatggcatcctgttgaagaagaaaacagactcttaatgcacggaggcaaacaactatattgccataagttaaaatactcacaattagtttccagattctggagaagccaggaagaatgagagagacaaatatacttaaaattttattcacagaagtatacgttactgaattattaaatgctgtaagtagctaaaaatttgactctgaaaaacaaaacaagaatcaataatgttccaagaaaaagttcaaaaaattatttcagttgtctattcattcagtccattcagttaactgttgttttccttgatatttgtgaacattttagctcttcatgagtcctgtacattttttctttattccaatgttacaatctccaaagttcttagcaacctacatttgagagcacctgtcaaagattcnnnnnnnnnnnnnnnnnnnnnnnnagagttcattgtcaccggctggagtgcagcggtacggcatcgtctctgcatcatctgg

SEQ ID NO: 156071 - DNA, 651 bp, Homo Sapiens
  misc_feature (96)..(96): n is a, c, g, or t
gaattctttggaaccttttgaaagtataagttcgttttggaagcacacccccagccaagcttccaaatagtctttcccaaactgtcatgcctgagnttctggacttactcttactcatccctgagagcacagcgactagctgaaggactgatcgactgatgagggtttgacctcatctacatacatctcaatttagcagcacatattaagctagctggcaaactgcttaaagccacatgggaaatctgcgcgttgggctatgtctggaagatacggaggagcaagccagacctgaccggtcaggtagtgaagacacggaatccgaaacccaaatatttcaggagtcaattctcagagaaagataagaagcccggttagtccaactcatgcgcaggcgcagaagaaagaccggcgcacaaagtaagacgcgcccttccccaccctatttcagtccaactcccactgcgcaggcgcttacagtgcaccaagatggccgcccccgtggatctagagctgaagaaggtaaaagagggtctttggcaggcggaggtcttctttttggaggctgaggggactatagacagaatatcagtgagccgaccttgcagaaggaaggagggtccagtgactaggatgtctctcatgctctaa

SEQ ID NO: 156072 - DNA, 389 bp, Homo Sapiens
tgtttcttctaccaaactacttccaggatatctacagtggtgttcaagccatgcctctgggcttcatgtgagcattcttgccccgggtaggaattctgcagcacaaaacaaagtactaaagattttaccctttgagaagcctactccttaagggaatattacctcccaggtttagcagttgggaagacatgaagtacctgttctcatttcattcaaatgccattcagtggtctgtgagtctacatgaaatgactccctgcggacagcaccctcccccagtctgaccacctactacttcctcccaggtcactcccttgcagccacgcaggcttctttgctctttcctgaaaatgtcaattatgatctgccttggtctctgcactgcctct

SEQ ID NO: 156073 - DNA, 539 bp, Homo Sapiens
  misc_feature (348)..(411): n is a, c, g, or t
tctgcacacacacgtgttcacatgcacccgtctctgcaaacacgtgtggagtcacggacacccgtctctgcacatgcgtggagccatgcgcacccgtctctgcacacacgcgtgtccacacgcacccgtctctgcacacacatgcgtggaatcacgcgcacccgtctctgcacacacgcgtggagtcatgcgcacccatctctgcacacacacgtgtccacacgcacccgtctctgcacatgcgtgtccacacacatccatctctgcacacacgcgtgtccacatgcacccgtctctgcacacctgcatggagtcacgcgcacccgtctctgcacacacaagtgtccnnnnnnnnnnnnnnnnnnnnnnnnnnnnnnnnnnnnnnnnnnnnnnnnnnnnnnnnnnnnnnnngcacccgtctctgcacacccgcgtgtccacacgcacccgtctctgcacacacgcatggagtcacgcgcacccgtcgctgcacaaagtgcacacacaccccgtctctgcaatgcgtgtccagacaccgc

SEQ ID NO: 156074 - DNA, 626 bp, Homo Sapiens
  misc_feature (320)..(320): n is a, c, g, or t
  misc_feature (338)..(338): n is a, c, g, or t
  misc_feature (383)..(383): n is a, c, g, or t
  misc_feature (422)..(422): n is a, c, g, or t
tcaagctattaaaagacatatgcaataacaaggagcccccaaacatgaagcaagttctgacagaagtgcagaaaaaatatttggagacttttttgtccccaccaactgtggcctacagatatttggagacttttaatgaaccacgttcaataatgaacagaacacctagacagaagatcgataagtaacagaggacttgaacaaaattataaagtagacctaagagagatatacaaggcattccacccaataacagcagaatatacattcttctcaagtatagattctccaggataggccatatgttagcccactaaaangtgtctcaaataaatttntggaagactgaagtcaataataaaacattatctctgactacactnggaatgaagcttagaaatcacgtaacacgaatgataacntagaaaattcacaaatatacagaaattaaggaagacattctttaaaatgtcggaagactcatatgtcctgatttcataacttactacaaggtacagtaattaaacacgtgtggtactggcataaggataagcatatggacatacagaatagattgacgagtccagaggattctctgcgtcatctgggatcctctagataacgcg

SEQ ID NO: 156075 - DNA, 573 bp, Homo Sapiens
  misc_feature (54)..(123): n is a, c, g, or t
tgtgatgacattgaatagggacagtcttagggccctgtgagattaactctaatnnnnnnnnnnnnnnnnnnnnnnnnnnnnnnnnnnnnnnnnnnnnnnnnnnnnnnnnnnnnnnnnnnnnnncaaggaaaatcattcacacctggtatcagaagtgaagcattgcgggtgaggagagtggaataggaaaagacagtcggttcttttttcctatctcacgcactaaggtgtctataagatttctgtatgatatatttgtgtagatgaaaggaataagggacattagactggatttactctggaaaagatatgatctaacacaagagaggacaagaggcataaaagagccatagctctgtaacaatgaagagaactgaaaaagaaccagtggtgaaagaaagagctctatacatttctggaagacagaacgtaaatgggatagggctgactactcaaatcaaggaagtagtacggcctagaaaacacatgaggaagagccggcactgaagagggcaccaacctgccaagcacacccttgagatgtagagatggcaaagcatgagtgagaaaggg

SEQ ID NO: 156076 - DNA, 675 bp, Homo Sapiens
agatgatagctgacgaacccccagtgcctcgatgcagagaaggtgctttttttgtttataaattttccaacgcagataaggctagaaccttagtcagtgtctttactctgtaatatgcattgtgagccattcgggtagagtctcagtggcacccaggtctgggtcacagaatgtgtctgtctagtgaatgttggttcagtgaaggacctttggctcaggtggttcggcgaggtgtatttctgttccagtttcaaaccaggtgactacgtgttaggacgtagcaatctgaagcccttctgaaaggaacatgttttattaaaagtgccttgtaagccaccatgtcaaatctagccaagatgctggtggacaacccattagtcactttattcagagatcagattctaactgcccatagggctgaaatctttggccagattttcccaggaggagccctcagagaacagtggcccaggtgcccaacaggaccctacacagtcggtttctttccttgttcggggacagacagagcgattggcgatagctgttaccatctcacttaaaaatacttgagcaagttattttccctcctcgggagctcttagacaagcaagttcttacttaacaacaaaaaatgctttgcttcattccttttctccttgatcttatatttccatt

SEQ ID NO: 156077 - DNA, 774 bp, Homo Sapiens
caacgatggtcctcagctcaggaaagtacagtcaatgtatgctaaaaatccacttgaacaattagctcgcttttttcccgtcatttgctttcagagtaaatgtgctttcagagtattaggtcggcctaatatatgatacattttaagaaggggaggaaagcgcattgtataccctgatgctgggacccaatagaagacaggccccctggctggcctttggttctccctggagctgacaaagggaaggggcttggaaagcagccactgtccccgcctagttagggcctttacagacacacctttccttttggcagctgctatggcacggattctctatgccagcacgaagctagaaaacctgcctacctggctggtgaaatgagggtggcagctggaggaaacaggcatcctaggagactagaaatgtccttcaaagggacttcagtgagtgctcaggggaccaggggtgactgtgttaagaagggttagaggttgagagggagccatgagcttgggtcatcaccccagtgagaccatccaggcacacagctcccaggcttgggaggccgcctccagtccaccaggaccctcagggagctgtgacttcattgaagctgggtctaaaggcttccttcaaggctcagcaaactgggttttcaaagatttttgatccctgaagctaatttacacgttatgtggggccatggcaaagacttgggcctgaagtggacagaaagaggctgtgctgagtgatgaatgagactaaacagggtt

SEQ ID NO: 156078 - DNA, 241 bp, Homo Sapiens
gcagtataacctgacatgtacgtataatttatatattacggaattggaataaattaagcacgctgtggcccgcttaggatgacttccccaagcttcacaaatgcaaggcaacctttctcattagcactttcttcaaatctccaaatgagaagaccctcagacaggagaaacacttgagaatctcccccaacccccatctgcagaggaatgaggtgagagggtcctgctgcccaggtctctc

SEQ ID NO: 156079 - DNA, 185 bp, Homo Sapiens
ggtgagcattgtttataagaggtgctgtattctttctattagttaccatcatgaggttggttcactttcagtattgctgggattggtcagtggttttagattatgttggcttgatctatcctttataaagttcttatcaactttcacacaagggttttctgcatattgggttatctgcatcgtct

SEQ ID NO: 156080 - DNA, 331 bp, Homo Sapiens
  misc_feature (73)..(91): n is a, c, g, or t
ctggaaaattctggggacagtcccctccccactcaaccctcaggtttggtttttttacatgtatttgtcctcnnnnnnnnnnnnnnnnnnntacttggtgggtcccttcggccgtgttttggctattaggaaggaggagtgtcgtgcatgttcccatagcagcctttgtgtgggtagtttcatgtctcttgggtcgatcctgagggttcgactgcccggtcacaaccatgttgtggttgtgtctgactataaaatgcggccgtttatttttcagagtggctgtgtccccttgcgtctcatccatgatttatgagggttcactgcatcatct

SEQ ID NO: 156081 - DNA, 1034 bp, Homo Sapiens
cactctagtccagcctgggtgacagagtgagactccgtctcaaaaaaaccaaaagactttatcttatttcctatatgtttgtggtttcagtcctgatgtataatttgaccctagttagaatggttatctgaggaagtggcctgtacgatttctgcttttttaaatgtgtggctccctttcttcattgattaacgtatgattatttttataaatgttccatggcagtgggaagggattctctgtcacattccacatctggatcagttcctccccattttgttggtcaaatccgatctgccatatcctgtgtaatgacaagtgagttgcattctcaccgtcactcctggggtctctccgcttcccctgagctggctcagcagtctgctccatgtgttttgatgcagggtgacccattggtattcccgacactaacgcccccgtctgtggactgcttgctgcttgggcttcactgtgtctggtgttgacagtgcagacctaaaggtgtgcacacatgtgcacacacactccgctgtcttcttgtttgcactggacttaaatatctatgagggttattttcaactgctgaatttggaatgatttttatctcttttctgctttctgcccatgtacatgtgtttattttacactgttgtgattggtagtttctgtgtggggacacaattacttgggctgaaataatccacctgttgtggttggggtcctctggggcattccagggtgagaggttgtcactgtcacctgggccatgtgggccggcaccagcattttgtggttacgaattctacagtcacaaatgtctttgggcaaatccccgttctatacctcaaggcagcttttggtttgcaaccccactggccagagggaagggccagtcacttggctctctcactgtcctgcgccccagatggttctagggctgctgttttcccttggccctgtcaactccagtgtttttacttctgctcattggctgagtgcagtggttcctggaagccagtggcacgtttccccgc

SEQ ID NO: 156082 - DNA, 648 bp, Homo Sapiens
  misc_feature (574)..(585): n is a, c, g, or t
gctgctcaaagtccatgctgaatgctacctgtgactcaatgccaggagaaaaaaggagttgctcaaataaagcgttcctggcagtaacgaatcattaactttcagcccactccaaggaatgggtggcctgagggtcacgtgctaaggaggaaaccctgagtgagtcaatcatggacacatgactgttcttagttccttataggtttgcttcctccaatagccttcctggagtgctgagcccagagatggattgggacccgtttcagttctgggaaaggggctggaccccatctagcccatggctgcgcccacgcttcagctctgtgcatgctggtggccgaatctgacaccggcccccgggacttcctccaactgggaaatggctgctcatgttgtccagagtcctcagccaccgcttgtttgccgactaaaccaggctgtcccctcacaccggcaggctcagaaagatcggggagttaatagttacatgaagaccgctcagagaaccgctccagtgaccgtcccagaccaatgcggatcgtataatgggtacctggttagattctgtttaacnnnnnnnnnnnnggatgttcctctctgctatttattcctgttccatttttaaagtcctgttttccctttcctgtg

SEQ ID NO: 156083 - DNA, 345 bp, Homo Sapiens
cttccgcacgcacggttccctggcaccccacaggcactcactcttctctctggcctctgtacttctcctctcctttctttccaagttcagctaaaactccatcccgaagctctcttgtcatggacacccctgtcctgcacttggcctacaggaaatggagggaccttcctttgttcacactatttgaggcacctcattgcccgttgggtgagtatccaatacccttcctacaagtttccctctccaggttctctcgggctgtctctctccacacaccgatgtcggactgtttcccggggcacaccctacctcagctaatcccctacctgtcaactgtgcatgggg

SEQ ID NO: 156084 - DNA, 599 bp, Homo Sapiens
ccagcgctcctggatgcagcggctgttggcacaggcaaactcgcctggctggcactggggtggaggcacgtaggatgggttcgccaagcaagtgacgccgtctgcgtccaacacctggtcctcagcacaggcgcactggcggctcccaggggtggccaagcacaggctgctgcagccgccattgttcacccggcatttgttggtgcccacttgctgctgctgggcatcatacattcggatctcaaagatggggggccgctcactgcgcagaagggtcacagtggggggtgcgcctcctacaccccgttcccagcggtagacactgccactccgatactcagtccagaagaggtagttgccatggtgacacaggccaaaggcgtggttcagctcaggaccttcatacaccatcttccggtctgtgccattgagcagtatcgtctcgatgcggtcgtagaaggcatccacccagtagaggcgcccagccgggatgtccaggcttagccccttgggccaaagcactgtctctcggaggtgacaaagatgttctcggtgtgagccatccatccacgccctctccagccgccagccaactgtac

SEQ ID NO: 156085 - DNA, 627 bp, Homo Sapiens
  misc_feature (265)..(276): n is a, c, g, or t
agtcgagccaaccatgagaacacaaaggatccctccccattcagtcccatctctgactccgcatctagaccttgtctgcaaagaaattaaaacgtcttaattcatgcaaaaataaaaacaataaacctgaaaaggtagtgaacagacacacagtagttctgcaaaagaattcagccaagggggtcaaatattttccaatactggataaatgggaacaacttcggcctcctccccttttcaaatatcatgaccaatgacacatccnnnnnnnnnnnncctgcagaagtacacgagcctaaccaaagacaggctttcctggtcccagtgagccaagcaaggtggacagcctcctcactgttcagctcctgggtttcagcaagcaccagtccccagctggaagagctgcaaggctcaacgcaaacatggcacttctctgccacctgttcccagcagccttcccgctgtgtggaaacagtggatcccagcagcctctaactcagcagggtctggccttttctgctcccaccggaaggcaggctcaaagatgctcagcaaggatggcctggaacccaggtgatcccctccccccaccctcagtgcacccttgcacactaactgtgcatggga

SEQ ID NO: 156086 - DNA, 570 bp, Homo Sapiens
aggcacatatgggagagaaccaagaacagttaagatgtaaaattgatgcagagacccaaacacctgagtgggagaaccaggataagaatggaagtgaggatgctgtggagacccagacatttgagaagaaggacaagaaagaggctggagaggaggatggggaagagatccaggctcaaggattggggaagcaaggccagactggagatgagattggtgaggagacccagacaccacagtgggagaaacaagatcagatgaagggtgatgcggatgtggaaatccagatggaagaggggagaaacgaggatcaggtgggaggtcaggatgctgcacaaacccaatcatgtgggagggagaacgtgggagacgtacaaaaagagaatagtgtagagacccaggccttggatcggggaaaacaggattgtgttggaaatgggactgttacggggatccagacaccagggggggagaagcatgatcaaggtggcagtaagaaagctaagaagacccaagcatcggggggagagaaccagaaacaattaagtcatgaaattcacttgtgcatgg

SEQ ID NO: 156087 - DNA, 173 bp, Homo Sapiens
cgtggttaagttttttacacataaatgaaaatacaccttagttctccccctcactgacatctgaatcaaacactgtgtcaaagcactaatgtcttcctaccatttcaaccaatagtccctgacctctactgcacatgacactggtaaccactccctctctgggatctgccttc

SEQ ID NO: 156088 - DNA, 256 bp, Homo Sapiens
tactgcccaggtctctcttgctcttttgattattccttgttagcctactatgctgataactttccccatgtgccccatgaacactagtatttcccaccattacatccaagctttcatctgtcaattcattcaatgaacaatcaccacctacttcattccaggaggacaactttgtcagatccccatttgtcaatggttttgcatgtgaaccaatgctccaaatcacttgcatcacagaaacaaatgctgccttgcc

SEQ ID NO: 156089 - DNA, 672 bp, Homo Sapiens
gacgtcccttctttccccacttttcatacctaatagttttcttgttggacctagccttccaaggactttaattcagttgtaaacatgacttgttcattatatgacatgttcaattacaattcgattgtatccccttccctcctgattgtcagttgcctagtcatttctaatacccactcttagggaacgctcagctctatctatctttggagaaactcattcctttctctgccagttggtttctgtagtatctccaatgacttgcagagatttccttagtcctctctacagttaattcctagttctaggctcctccaacattttcgtttgcttctctaatctctggattcctccagcatttttctttgcttctgtagttcttggttttggggtgggggggtcagttgggttgctttgtcactttgtgagtggagggtaggtgtctttcccttaattcatgacttccagaagcatggtggccagaaagccttgtcagaactttgaaatgttatagacgtgctcactatggcacattttgtcaggaatgctagaccatgaccacaacacatttactgttagagaactggggttaatttgctaatccacctttccttagtaactgcagccatgccaccagatctgttaccctctccaggactcgtccgtccgctg

SEQ ID NO: 156090 - DNA, 143 bp, Homo Sapiens
tcacggatgacgagtctctcctttgccgcggctccaattcagggcccctgacctcaacacggcgaccttcgaccttctaatctcccagggcctgtgctctgtctccctcagaggtgacctccaccctagaaatcccagccccc

SEQ ID NO: 156091 - DNA, 561 bp, Homo Sapiens
ttttgccttgtgggacattcaagtaatttcatatttagattctgcctaagaacccccctaagctcctcattttatggtttaaacttacattctcttattaaaattttattcctaatggcatggtccaatcccttaccaaggaaactccttatgaaaagatatttatgatttagggaataagttttggatcactgtcctatggattttaaagaggtgttaatgatgccctgggttggttttaggtttggagaaggcagctctcattcttggcaccgctgaggaccagctagtgtggcttcatatcatattagccgcgtgatgctgagtgaaccacacagcttagtgggcctttgtgtatcaacgatgaattgaggaggttggactataatgtttctagaatccttcccttctttgagttggtaagtctatgccatcctatactcttcactggatgttgtacactggacccgtttccaaaggagtatgtgggatggagtctttaactcccccggactcgtccgtccgtgggggtcctctagatcgaccgcagcacagctgcct

SEQ ID NO: 156092 - DNA, 514 bp, Homo Sapiens
  misc_feature (214)..(261): n is a, c, g, or t
agtcctcacggatgacgagtcctgctaagaaaaggaacctgaagatatgccaggtagcaccggattatttggtttatgaagttcatgaaagtcttcccttgagtaaaaaaccataagagaactaggtgaaaagagctcagaccgttatgccaaggccctgtggctaataggatccaaagaaaacccgtagataggcccggtgccgtggctcatnnnnnnnnnnnnnnnnnnnnnnnnnnnnnnnnnnnnnnnnnnnnnnnncacatttcatgcggtggcaaaaatcacgctgagtcgccaatattgtgacctttaagcagctgtaaaacaattacactttgaatgtttcctaaagctggaaaacaaacctatactcttacatccgagtcatctgtgctgataagggctgggggacgcttgtcttatcttttcctgtgagctttataagctgttgtgtgaacagagagcctgtctttgtatggctcagatggaaccccggactcgtccgtccgtg

SEQ ID NO: 156093 - DNA, 549 bp, Homo Sapiens
  misc_feature (21)..(21): n is a, c, g, or t
agcctttgtactctgatatgntttggttctgtgtccccacccgaatctcatctcgaattgtaatccccacgtgtcaacgaagggaccaggtcaaggtgactggatcacgggggtggttttcccaacatgctgttctcatgatagtgagtgagttctcaagagagctgatggttttagtgtggcacttccttgttcttgcactcgctccctcctgccaccttgtgaagaaggtacctgcttctccttcacctcccgccatgattataagtttcctgaggctcccccgccatgcggaactgtgagttagttaaacctcttttcttctacattactcagccttgggtatttctttatagctgtgcaaaaacggactaatacatactcttactctggtcagtcattggctatgactgttcttggggaaagagagaatagggggagtgtctgagtttactaaggctgccataacacatgacctcaaactgtgatcatttaaaataaaagaaacggctgggcgcagtggctcacgcctgtaatcccgtacttggg

SEQ ID NO: 156094 - DNA, 768 bp, Homo Sapiens
  misc_feature (485)..(499): n is a, c, g, or t
  misc_feature (752)..(752): n is a, c, g, or t
ggcaacggcgggaattgcaggtgtgagccactcactgtgtccggcataaagtagaacattcttacaagaaataaatatttcgtagtcatggagaagaacgctcctaaaatgatgaacgcacgacggaaaagagtagggaacattttgcttgatgagaaaatccgccagcaaggatgttgggctctaagcagaactgaagctctggaattaggaacacagccaaggaagagctctggactctgagtttaaagaagctgactgacttgtaaggcaattccaggtaagattggtgaatcaagttaagaatcaaaagcaactgagatcaaggtggaggcctggaaggtaagggccatattttacctagatactagcttagagacttgctacattggcactgtattttaagtatgttatttagtagtattgtgaaatcaactggtttcaacattgaaaaggataaaaatagcttatgaaaacaaaacggnnnnnnnnnnnnnnncaagggataaggtgcatgtttaatttcaattgcagaaatgaagggaagaggcactcctgccacctggtgggcatttatccaaattgtttgttcaggtcttttaggggtgaaattcgggttgttgaatctaggttgaacacacaaacattccagccccagcagcagttgggtcttatttccttccccttgacctgggatctgtacctttctgtttccacttaaggcctcgtctcgtgaggactcagtcagtccngtgggggatcctctag

SEQ ID NO: 156095 - DNA, 619 bp, Homo Sapiens
ctacagccataccattgtagaggatacctgagataacctgtcccttattgccaatagcagagctgaccacgtgcttctttgattcttacacctttataatgaatgtttgggtagttcacgatcccatctctactgaggatgcagcattagtggcccatgttgtggggtgatagatgggaccagataggttagaaaggcaggatggctacttcaggcacgaccctgctgggcacatacatcttataccgttgaatttgtgaggcaccttcatctcttacctagaggatagtcattggccaccagtttgaaaatagtcccgtttgccgttggtcagtctcttttatttaatgtttattacttgtaattggcctaaatatccaaagttgctttttaccttctacagccaattatatgggcttattttttctgtgcatttatttctgctgaaatctggaggctgatttaacttaaggggttcgatagatattaggtgtctgaaccgagactggtcatgacccaggagtcagataataaggctggttgaatcctagatacccatgggaagaatctagtttgtctctcgggttccgtgatttgctgaaggatatcgtccgtgcgt

SEQ ID NO: 156096 - DNA, 475 bp, Homo Sapiens
  misc_feature (355)..(367): n is a, c, g, or t
aggcagggaagactcatggcctaatcacctcccagagccatcatacggggattaggtttcaacataagaattttgaggggacataaacattcagatcatagcatggctggagttctgtcctgggctctcttttcactttccttgttctcatctcatccactggtaactgcattgcctcctgtctccacctaaacttccaagtatctccagcccagaacccttttgagtccaggacctgtcattcatatccatcccagaacccttttgaacccaggacttgtcattcatatcagaccaccacgagcatttcactacagcctctgatggtcttccctgtttcctcacttttgcctannnnnnnnnnnnnctattccctcttaagtgggccacacttctgttcccctggttcttatgtcaggaatgcgggtgtccttgggacacttccttctccagtgggataccaggccctttccct

SEQ ID NO: 156097 - DNA, 562 bp, Homo Sapiens
acggacttgacgagtctagcaagttgacacagtgggagcaggaccgtctgagtctaggaagtgaccgcagtgggagcaggaccgtctgagtcctaggaagtgaccgcagtgggagcaggaccgtctgagtcctaggaagtgaccgcagtgggagcaggaccgtctgagtcctaggaagtgaccgcagtgggagcaggaccgtctgagtcctaggaagtgaccgcagtgggagcaggaccgtctgagtcctaggaagtgaccgcagtgggagcaggaccgtctgagtcctaggaagtgaccgcagtgggagcaggaccgtctgagtcctaggaagtgaccgcagtgggagcaggaccgtctgagtcctaggaagtgaccgcagtgggagcaggaccgtctgagtcctaggaagtgaccgcagtgggagcaggactgtctgacgtcctaggaagtgaccgccgtggtagcaggaccgtctgagtcctaggaagtgactgcaatgggagcaggaccgtctgagtcctaggaagtgaccgcagtgggagcaggactcgtatacgtg

SEQ ID NO: 156098 - DNA, 836 bp, Homo Sapiens
ggcgccctcacaggctattgacttttctcgaagaaactgcccgactattctctccattcagtcaaccaggattttcagtcatccactgaatgttccatactatgctggttgtggcgtcactctcaacttccaagggcctctcccaaagctctggcctggtcattgcttagcctactctgaaactccatatttcaagaagagtatcttaattaagtggggaatttttccaagcagctgaaccaatggggcaaggggtctgggtttgctttcccagactgtgattcgttccagaagaatcctataccacctccagagatgagatagaggcaatgtctgtaacaacttaatacggctgttattatccgaggcaaaaatgctgtgtggcatttaatgtgtattactgtactgggacttgggtatgatgttgctttttatactcaaaaaggacaagctattttgagtacttggtagcaacactggaagaagtctgtaaggcaaactaggtaactactgtgtgaatggctacgccgccggtgatgcctgacttctgttgtggctgggttaagggaaatccatgttctttatggtcatacctgatctgtcaccctaaccaaattaccagcttcaccagggcagagattatcttagagtttgaggactcgcccggccgggggataccgggcgcgaatacgggataatggtcataccgggaccaaaatgcgcagaaaattctctccattcagtcaacccaggaatttcagtcctccagtgaatgtccaatactatgctggttgtggcgtcactctcaaattccaggggctctcccaaagctctgg

SEQ ID NO: 156099 - DNA, 174 bp, Homo Sapiens
cacggactgacgatgtctagttctctctcctaaatctgagaggtgacttgtttccagtggccaaggcatcaccaaaagcaaccatttgattgtgcacaccaggaaaaaaagtggacttgaggaggcgaatgattgggaacacccactaatttatgttaaagtcaaattatttga

SEQ ID NO: 156100 - DNA, 475 bp, Homo Sapiens
gtcctcacactgacgagtcctgtggtctctaaagaacttccaggtctgaaagactggtttcagatgccatgttgcacagaattactggaaaagatttttaaaaacatctcccctgggagagtcaccaggtgatactgatgttgtcagtccctggccagctagaggacacagccatgtaatttagctattgacacatctaactcctctgcctcttactaaatatgggacctcaggttacttgaatttaataaaaaaattttgtttctcctgagcggcaacgtggaatagtaacatgaaggatggtagtgaggcttaaatggggtaatgccgaatccagtgcctggcacaaagtaaagcctagtaagtgatacgttggtctccatagcatctagcccatggttctcaaccttatccataggtgattccataccacacgtcttccttcttctccctttgcagcatattctggtgccag

SEQ ID NO: 156101 - DNA, 398 bp, Homo Sapiens
gcagttgctagtgggtagtacagctcgaaggccaacaccacggccccgttgacgtggacctcctggactccgtaaatgtcctcagggcaaacctctaggccggagtctgcactctcccaggcaaacttggctccctggtagcccaggttctgggcgttctccagggccccgtccagcgtgcggatgcggtactccaggatggccctggcggcttctgggtggaacatcaggatactcgggaacatccagaggtcctgagagcacggtccctcgttctagcgccggacaggccgtcactgctcccgcccctcctggccacattccgccccggcagagctccatcgctggcgtcttctgggttcctcctcggctgcccactcagatctgaggactcgtca

SEQ ID NO: 156102 - DNA, 510 bp, Homo Sapiens
ctgacgagtcctggctcgcgccttcggggtgcccctgcgcacctacacccatgaggtggtgaccctgtggtatcgcgcccccgagattctcttgggcagcaagttctataccacagctgtggatatctggagcattggttgcatctttgcagagatggtgactcgaaaagccctgtttcctggtgactctgagattgaccagctctttcgtatctttcgtatgctggggacacccagcgaagacacatggcccggggtcacccagctgcctgactataagggcagcttccctaagtggaccaggaagggactggaagagattgtgcccaatctggagccagagggcagggacctgctcatgcaactcctgcagtatgaccccagccagcggatcacagccaagactgccctggcccacccgtacttctcatcccctgagccctccccagctgcccgccagtatgtgctgcagcgattccgccattgagaatgtcaaggcctcgtcccgtg

SEQ ID NO: 156103 - DNA, 677 bp, Homo Sapiens
ggtaccgggtggggagtcggaagtggtggcagaactgatcaactgcagcggatgtgaatgcagtggatgaccatggaaaatctgctcttcactgggcagctgctgtcaataatgtggaggcaactcttttgttgttgaaaaatggggccaaccgagacatgcaggacaacaaggaagagacacctctgtttcttgctgcccgggaggggagctatgaagcagccaagatcctgttagaccattttgccaatcgagacatcacagaccatatggatcgtcttccccgggatgtggctcgggatcgcatgcaccatgacattgtgcgccttctggatgaatacaatgtgaccccaagccctccaggcaccgtgttgacttctgctctctcacctgtcatctgtgggcccaacagatctttcctcagcctgaagcacaccccaatgggcaagaagtctagacggcccagtgccaagagtaccatgcctactagcctccctaaccttgccaaggaggcaaaggatgccaagggtagtaggaggaagaagtctctgagtgagaaggtccaactgtctgagagttcagtaactttatcccctgttgattccctagaatctcctcacacgtatgtttccgacaccacatcctctccaatgattacatccctggtcttacaggaa

SEQ ID NO: 156104 - DNA, 776 bp, Homo Sapiens
  misc_feature (107)..(174): n is a, c, g, or t
taatcctcacgactgacgatcctcttatccttactctgatcatttgagttcctcacatgccatatagttctctatttgcttgcaccttgaaattcttttgcccctannnnnnnnnnnnnnnnnnnnnnnnnnnnnnnnnnnnnnnnnnnnnnnnnnnnnnnnnnnnnnnnnnnnactcctgtcacagttcgtcttcaaagctcagggcttctgctttcttgtgactgtcttttcatctattttcctcatgtcttgctgtactgcttctcatctctgagcctatgatggtatccgtctttatcacaccccctgcctcctccacatttttaatctaattgttacatctccacctcccatatcagtccctaaaaatagtgagacctaagcatcctctatcaggccacatcttgttcactttcttccataatgttttcattagaccccacggtaacctgcaggccattagcccacgctcactgggtcagacccttgacctctgctctcagtactcatttctaacttgaacatagtcattccctctcttaaatttcctagttgattctccagtttctcacctgcttttggcagcctctcatcacagtgaagaccctcagcctgagtttctcccacattcgtgcttgtatgtcagtgttgggagaaaagctaagtgcttgataagctttaggtcttctctgtcttcttaactctggttctacctcactcccggactcgtccgtccgtgggggacctctagatcgaccagcagcagcagctgc

SEQ ID NO: 156105 - DNA, 643 bp, Homo Sapiens
cttatggacagtcgatcttgtgtgtcttccggctctgggctctcgatcttgtaccatgaggtcattggagctccacttggtgatgtccttggggagcatttcctactgtgtcggacagtgtcctcgtgcgcatcgcagtactcatcatctgagctctcatccgagtccctgggaatactctgcatcctcccctctgagatgctgtggcgggaaggactcgctccccgcttggacgttttagacgacttggaggatgtggaccacctgtttcttgagggcgcgccccactaggggctccccattgctgctgctgggctccgggggctccccagaggtctggtccgagacggcttcgtgcttgaggggctcagtggcctcctcaccatcctcattgaactgggccatcttacgggaaagcatgagctgtgcctccttctccagctcccggatgttctccatgctcagcccataccactcgtcctgccagcaccaggcctgccggtgagcccgcaccatcaccctccgtagtccggtgtcgtggatgaacctctcgatcttggactgcatgccccagtagcggaactccaccttgcagagcttgtatgcgcacatgatggggaagacctgcttctgtactcctcga

SEQ ID NO: 156106 - DNA, 201 bp, Homo Sapiens
agggaagagggacagataaaaccacagaaatttataaggaggtcattaagggaagagggagagataaaaacacagacatttataaagaggtcatgagttaacacatgttgaatttgaatgatgagtacaaggagctccttatattttctaccttttccctcgtgttgtgttttctttttaacgaaatgccaaattccaact

SEQ ID NO: 156107 - DNA, 315 bp, Homo Sapiens
cggggagaccacgacgctgcctcctgggcgccatgagttcctgttcagcttccagctgcccccgtaagtcctctggggtgcagggttgccctaagcctgcagccccttccagattggtacctccaatactggatatctgggcacctctgagccccaagactctccccctgggaggcccccggagtgtctgtgtctccttctccctgcctgcttgtctttgtatcttgtcgcctgaagtcccgtccctccaccctaggacctggtgacatccttcgaggcaaccggtagtgtccgctactgtatctgctcggagcc

SEQ ID NO: 156108 - DNA, 152 bp, Homo Sapiens
atttactttattcgaccctgaagtgtggtactactatctgttctgttgataaggaaacagagacaaagttgaaggcactgcaggggcagagctcttaagccactgcctagaactggccatgtacatagtcctcccgtgtctgctcggacgag

SEQ ID NO: 156109 - DNA, 715 bp, Homo Sapiens
ctcggcggtacagatactgctgggttttctttgtatgtcagcatggagtttttcccaaagaaagggaatatggatggagagagagaggttatgaacaggttatgttacagaggttattgcctttgaaactgggccctcatcattctagacttgcttgctttgttataaattagaagaaaccagagggagatgtgccaagtaaacattcgaatgactgtttagaatatggttttcttaattagcagtcatggggaaaacatgcatttttaatttggaaaaaacctgacagttaacatggttctgtttaccttgattagtgaagtaatttgctgcagtgttacagaggagcagaatcacttgggtctcaaaatagactgaaaatttaactccccaaaccaaatttaacaaacagaattggttattagagatttataggcaaaaatatcagtttggaaattaaccttggctactggccaccttagctaggttttctccacagatctgttttctccacagatctgagtacttaacacttcccagatgattggagaatattctgggctgttggggatgacaggaaaatgtgagggggagtagcctaggtaagggtgatgatgaaattgttctatctgctgtcaaataatcttttcctgtttgcatgtttttattttttctgagtccctttgggaaccaggtgctaacaagaagctgttat

SEQ ID NO: 156110 - DNA, 268 bp, Homo Sapiens
tcgcgagcagattacaccattgctgaggctgaggaccagatacaccatgctgaggctgaggaccagatacaccatgctgaggctgaggaccagatacaccatgctgaggctgaggatcagatacaccatgctgaggctgaggaccagatacaccatgctgaggctgaggatcacatacaccatgctgaggctgaggaccagatacaccatgctgaggctgaggaccagatacaccatgctgaggctgaggaccagataccatgctcgt

SEQ ID NO: 156111 - DNA, 378 bp, Homo Sapiens
cagtctgcggccgccgttcagctccagcttggtcccccctccgaacgtgtacggataaccactccactcctggcagtaataagtggcagcatcctcagcctccattcggttgattgtgagagaataagaggtcccagacccactgccactgaagcgaaaagggactccaggagccacgttggatgtgtcataaatcaggagtctgggggaggatccaggcttctgttggtaccaatatatgtaacgtatacttgagctggcactgcaggtcatggtgaccctctcccctggagatgcagacatgattgctggagactgggtgagctcaatgtcagatccgccaccgccagagccacctccgcctgaaccgcctccaca

SEQ ID NO: 156112 - DNA, 140 bp, Homo Sapiens
tcccatggagacacacccacgcaaccctcacgcagctgcgctccacactgcatctgcctctgttcctgaataagccgctctggaggctggaggcagctgtgggggaggctggcaggtcagagctgtgctgatgagccgtc

SEQ ID NO: 156113 - DNA, 632 bp, Homo Sapiens
  misc_feature (588)..(588): n is a, c, g, or t
tttctaaggatcccggctcgcgaccagatactgtgagaaaaacctttgattttcaaaggatcctgagagagccaggtgtccagaggctgtcggggtcctgtgactggctgagggtcctgtggagggtcctgtgcctgcctcatgccacatgcggaagcaggaaaggctgagcaccgtgtgagaacagggctggaagggggcattccttcccacggatggattccagggtcttctgtctgcccgggacacctgccctctccatgaagggagacagggaagaagaggtgtccccaacaatgccaggatcactttccttctagagaactccccagagccggtctggatcatgagtcaccatccatggaggtgtaggtgggggctggagggcaagtacgagggcagagacaccccaagggagggagaaggagaagctgtcacctcactctccaccaggccctcccagccccaggcatctgcgcagaggatgctttctccactgtccacaggtctccttgtggccactgaagaaatgtgtgggcaggatcttagggtcattcactcacccattcaaatagttaccaagcaatntccaacacagggacaacaggctcggatctgctcgcgacgatgac

SEQ ID NO: 156114 - DNA, 413 bp, Homo Sapiens
ctcagcctcacccagatgctctgccagccgcgtcagcacacgggcacccagtgccacccaacatcgcaggtccaggtgccgctcggttactgaagggtgtgaagcccgggggtagtcatccagcccagagggtagggtcttggggttcagtaaggttggtaaggcagggtcccgtccccgccagcggtaagatagtggcagtgggcctgcctggctctgatggagccaggaaaaccaggcatgcaggcggggcaaggcctttcggaggaaagccaagtcgtcagggtcaccaacctctagcatatgggctacaggcaaaagtagggttggggggttggcgtggactgctcgttgtactaggaattctggaggcacccgggctcgggcctcatcccagtatctgactcggcgag

SEQ ID NO: 156115 - DNA, 1007 bp, Homo Sapiens
  misc_feature (42)..(42): n is a, c, g, or t
cctgagctctctctgatgtagttgatgcacagctgctcgaanggagttcactcaaagatctcaaatccagctatatccaggatccccaggaaggaagccccttgccgatgggtcttgtccagggctttgttcacgcgggtgagtatccagcggaaaaggcgctcatatgttgccttggccaaagcctctacagcaaagtcagcctgttcttttgtctgagctttctgtaccacatctcgcgcaaccttgatacgaggagtgaggatggatctggtgaaatctgtcacattaattcccatgaggtggcaaactttctgagcagctgtgttatctggcatggacgcctggtctgtgtttctttccttcttgaagacgatatttccaagctgcaggaccgatgataccaccttcaatatggatagctgctcctcctcgctgaaacccatgattgccatggcctccacggtttcctggaacatctcatcatcctgggctgctgggatgggcacaaagccattggagaggaaggtgtagttgttgaagccctccaaaagcaagtcacttctcatcttctccttggctccagcaatcatgtagtaaaagatgtggaatgtcctctcgtctctggcttggcgaattgcccgtgatttttctagcagataggtctcaatgttggctcccacgatgtaacccgtgacgtcgaagttgatgcggatgaatttgccgaatcgtgaggagttgtcgttcttcactgttttggcgttgccgaaagcctccagaatcgggtttgcttgtagaagctgcttttccagctctcccgtgatacttgtgtctttcttgcccttgtgggaggaggccaccacggccaggtactgaatgaccttcttggtgttttcggttttcccggctccagactcgcctgtgcatagaatggactggtcctcccgatcttgaagcatgctccggtaggccgtgtctgcgatggcgtagatgtgaggcggcatctc

SEQ ID NO: 156116 - DNA, 557 bp, Homo Sapiens
aagttcactagcaaccttttaatgtttacatcgctttttgccaggagacagtttccgagtctcacacttcttcagttggtggtacattttggctgccttgtcatacagccgcttgaggttcccataggctccctcaaaggacacttctgactggatgcagcgcaggtagcaatacatggcttccacattatagtacttgctgcctgccagggtgcccagctgattgaagggcattccaatctgaggagctactgacagggcttggtagtaaaatctctcggctagcagctcggtatctacgccagctaattcattctgatatcgggacaaatcccccagatacaccagacatcggtgacatgccatctgtgcccaatccatctccttccctgaggcagacactggcttcttgcatcctatgagggggtcagtgacatgggtccagtcgatgcagcactgcagttccagctggtagtgggactggatatagagaaggagatgctggttaagcccatacccaccacccagtggaggccagatcctgctgatcactcacc

SEQ ID NO: 156117 - DNA, 295 bp, Homo Sapiens
  misc_feature (281)..(281): n is a, c, g, or t
acaaaagaatgaaataggacttctacaaatgaaaatatgactgaaatttaaaattcagtgactgaatctgtttaatacagcagattagatacagctggagaaagagtaaacacgaagatagttctagaagacagatgaaaagtaaatatccaggaagtagtccagaaagacatgaattaacaacatgactgagattaacagatacagaagacagagtaaaatactaacgtatgcttaatctgtgttccataagaagtgactagtataaactgtttggtatnctgctcggcgagcc

SEQ ID NO: 156118 - DNA, 373 bp, Homo Sapiens
ccgaagcgaagagtaaccccgactgggggccggaagggagggggccaaagagaagaggggaggagtattcagcatgacttgcataaaccatcccatctatcgctcgggaacaatttttcaaagtgcttttcgaatggaatggtttataacaatgctaaactgtgaaccagacatgccaatcagcaccaaaaattagtttttttctaagaagaaatgccaaggccacattacccttttaaatacaataacagaaaagactccattctggatcccacccttggtctccatctgcctccgtttcatgtgagttttggttatggcccatagctacatttccccattagatagcaatatgtgtatctgctcgcgagcc

SEQ ID NO: 156119 - DNA, 592 bp, Homo Sapiens
cataccttcacctaaagcaaaataaaagctctacttgtttccatactttgtttagagacagaggctgtaaacccatgaaggtcaacaaaatattctcatccacttcttgttgtccttcgttcgttttctgtgacatgttgacgggcatgttttgttttcaatgatacttacaatgggctcacctagatccctgttcttgggctggtatcacttttctaagccatctgaattaatgctctctgtatagtaaaatagtctccacatttttcttttaccttaataggcaattttatagcactgactctgatggataaaacggatttttctccctcatcccttgttcctcttgaaacaaattcctaaacaaaagccttcctggtggattatctggtatttggatatctttcatcattttgttgtcctgcatgtaagttttactagaagattttcctgcttgctctatacttttctactgtagtcctggagcccccaaatgtatcttctcccaacgtgggatgttcattcagagacctgaaactcaatcaagtttaaagctcagttcatttcccccacaccattaccatcacacccg

SEQ ID NO: 156120 - DNA, 661 bp, Homo Sapiens
ggagacgctcagagtgtgagtgcatacaattgcctacagcgacccacacacatgcagatggatgtacactctcatgcacacacaacactgactcaggtgggggtcctcgccatccttcccgggaagctgcacttctggttttacacatggggctgtggcaacacatcagcaatctaaccgagctgcttcaacttatcctcaccacttgagaggtggcccacccacctctccactttccctccagcgacagtaacagtgaggatgcttctcacctgccaatgctgcgcctaatggactctgtccacagacatgggaagagaaggctggtgcccataggacccctccagctcctgagtgagatggcctcctccttctatgccccgggaagcagaactgagccaaaagcagcttgggaaaagcacagtcagcacccgccctggagtaggacctacagaggccagtgaccggatgagacacagacgtggatgtgattctctctctatcttctatccactccacagtgtttccgcttgcacgagataaaattgacggccaaatgttacacacgaaatacctgcacagtctacgtaatgattgatgcatctcaggaatctcattcttgagacagttacatttgagtctttacgatcctttgatctct

SEQ ID NO: 156121 - DNA, 403 bp, Homo Sapiens
ttacaaaggatgaagaagggcaaatgatgaaaggtgaggtggaaggaggttatgagatggtacagaaaagttaacttctggcacttgatatgccacttccgtcaggctggtcctgcctctctcccttgccttctgattgtttcatttcctgtatatattgatcatatctgaattaagttacactggattagcctcttccttagttcccacttccttaaccaaagccctaaattaataatttcctctatgtattgcctatttctctcctaactcttctctaacatctgcagccacactctccattcactccatgctgacaaggcagtggcaaacacttttctctgctgccagccactccactgttgactggattgctgccagccccaggcaaacctgtgaagtt

SEQ ID NO: 156122 - DNA, 394 bp, Homo Sapiens
cgctgcactccatcctgggcaacagagccagaccctgtctcaaacaaaacaatacagtctagggagtttcattctagcagctatgctcttaggtgctcaaaatttgttgaacattataaagaacaaaagttgagcagaaaactaatggatagtgaagaaatacttattgacattcttcacatagaatggagttttcaaatcagaactgattttagagagatgacgtctacagtatccccagtgatgtctgcctggaaggtgccagtgacagggaccacttggtgcttccacagaagcccccatcctgttttccacgcagccgttgcacatctgtggatctgagacttgcacctgcactttccacctcgtgcatcctttgtaaactgtcgtacca

SEQ ID NO: 156123 - DNA, 522 bp, Homo Sapiens
tggccttctgcagaacacaatgagcctgaggagttttccagaagaacattccctctgtccctctgcctacctccctggtcagccacccatctgtcctcacaatccactcttagcctcatgagcatgtgggtgcttttacaaaaacacaaacacacatatgtgctggtcactgtctttctttgcctcaattcagcaaagagaatggggaaatacatcaggccctgcagctgcctcactgtagtgctatggggcaggtatgcaggacaatagggcctagactctgattccaaatccagttcaaccagttccaacccttcctcatccccaaaacacgcctctaaacacactggactttttcagggcagttatgacagaaaatgaattcagacactgagtgggtcattgtttccaagacgttccaacagtctcaatgtccccaactcctcccctgtcctcactcttccaactcagatgcccaggatttccaccaaaccagggaatgtaagtatccttgagacctgt

SEQ ID NO: 156124 - DNA, 435 bp, Homo Sapiens
cgtggtcgcccagcacctctgtagcgtacgtacccttcgctacttaccactctgatgacacgtctagggaaatgggcatcaaatatgtatcctgtcgaacttttcctcatgggcgcagctgtacgaggaagggtctctttctgctttcccaagggaaacatcagaaatcacttcactcccgtttctgcaagttcaaaagccaatgaaatctttgaggcatttattggtgttagtaccttgtccactatccacccctaaggcaacgggatctatttctagaattggaagtccctcattcactgtcaatagcctttttctgctgttagggggcttgcatccacaatctgccccttccaggggcagctgtaaccacctggacttcaaaaggagtaagggcggggcctggcatggtggctcatgcctgtaatcccagta

SEQ ID NO: 156125 - DNA, 708 bp, Homo Sapiens
cacaggtctataaatatccattaattgcagtgctatcgtaatatgaggagtgttccagtgcatcaattgctcagcaggtctgatccatattacatttgggaaggaatattctttgctgtaagtctttgagatttgttctgatctgaagagggctcctcttagctacctttccctgattctctctgatgaactagatggcctacagtttagttactgttctttaaggtatgttatcattttctaaagtgtccttaggcctgtacttccccacactgtttcaaataaagtcagttcctttggagagtacctcggagctctcttttgttatgaactgtctctcgccctgggaaaggtctctgaggcactactctgggtgctgggtgggatagtagcctcttgccttcttggcttgcttctctcagtggaacctctgccctacgagtgagctggggtgaggacgattagggctccagtattctgctgcaaatgggatgaagcctccattctgtaagtgggagcttggtggagaaagggagccctaactgctcagctgcactcaccagaatttcagcctcttcaacttggagttggaggggtagagaaatgttgacaatgtggccttcccagtgagatatggtaaacctgactgggagctgaggggagaagaagccccatcttcttgtccacacttatccttgtagacctgtc

SEQ ID NO: 156126 - DNA, 360 bp, Homo Sapiens
tgctaggattacaggtgtggtccactgtgcctggcctaatttatatatttctaaaactttgatggttttctttatggaaagatggagtgccctaggacaaatgtctccaagggggaaaagaacagaactgatcagattaaatgataggtttggctatatgcagaattgttctgaagcgcaacagttttaaatggtgatgaagtccagtttatctataagaattgcttctgctttttggtctcatatggaagaaaccattggaaaaatccaaggtcacaaaaatttacgtctcttttctactaagagttttgtagttttagtactacactttgagttgattcttcgtactggttcgattga

SEQ ID NO: 156127 - DNA, 222 bp, Homo Sapiens
acatagtccctctccacagagatgcttgagaaggctgatggaaaagccagatacttgttggtacagctttaccctgacactagtatatcatccacatactggagcatagatatacactttgggatgctcatctctcttctaacacctcctcgagatatcaggcccaaccagttagagcgaatctgtaaccttcgtacaacccgtgcgggatcctctaagtgt

SEQ ID NO: 156128 - DNA, 383 bp, Homo Sapiens
aggttacaaaggataaagagtgtaggctggtttagttttctcagccagagccattattatgttaagatcgccctctgctgttaaatcaaggtctatcttcaggttccgaggagatttaaagggcttttttcccttctgcgtatcgtcttctatatattttattagtgtcaaggcttttctgtgaaggacaagtagaacctgtgcaaggaaagtacttctgagagataagccaggtttcagctgaaagacctgatccaggaaggctttcactagagtgtctctgtgtaagacatcttgaaaaatattcaaatcaggagtaaagctttcgtcagtgtagatgatcgtatcctgagccatgtcttcttctgaagtggctctccaga

SEQ ID NO: 156129 - DNA, 215 bp, Homo Sapiens
tgatttctttttcaaaaagaatcacaatataccttggttcacaagtcatacaagctttttagaatgggatgctttaaatttcaagtttattttgatcattaaaaagtaataggcaaaattactgttgggtacatgcaacagaattcccgcacggatgttgtctctgctctgtagtcacagtggaatgttaagcacatgggctttgaagttaaatg

SEQ ID NO: 156130 - DNA, 361 bp, Homo Sapiens
actggattgctgccagccccaggcaaacctgtgaagttgtttcatactctgcttctctttgagtgcctccttctctccttcctcttcctttctgggctccagtctttctcttcacttgtgcttgtcagaacctccctgtgatactgcctccaggcatttcccccatgttggctcaccgcactattatctttgcttatcaacttgcattcagctggctggcatgtttcaaaaccacactgccctcccaggcctgtgtgccttttgagaaagaccagtgctggatgagcctctagtaatgacaacagtgttagttgttagtggtataatacggaagagatattttgcacagctgtatttggga

SEQ ID NO: 156131 - DNA, 479 bp, Homo Sapiens
tgagctggtccggcacgccacaaggactggtagatgtcagagctggaacctcaccccaggcctgactccaaaatccacactccctccaccgcacttcacattccttcccatacaacaacagaggcaacgtgggtctatgtggagagtgggtgctggaggacaatgatgtgaggcatgaagggtgtggaatgtggtcacggagcatgcagtttggccgggggaatgtggtgaggcaagaagtcaggcagcaaccacagcccggggctaggaaggggagtggaaaagtccgaggaccctcagactgtcaaacatgccaggagtacagagatgggaagacatgaccaagggtaagatgacgcatgccaggagctctgagcagagagggaagacagcaaggaggaggttgggaagttcagtccccacttgttctttggttattcgtaatcgagacggagctcgctctgagaccaaaggtgaag

SEQ ID NO: 156132 - DNA, 803 bp, Homo Sapiens
ttcacgcccacagactaatgcctggtacgtaatagttgcttgttaaatgtttgtaggatgaccgaatgggccaaatgaaagattgttcgaagatcagctaagtggtcctgcttgtgacagcagtcaccctctgttgaccttggccctggcaagctgggaggaaggctgctggaatcccaggggctctatggggcctgggcctcttcatccatttcccttggcttcctttgcagggtccgcctggcatgaggggctccccgggtcctccaggccctatcgtaagtatcagtggtgccctggtctgcttgagaagctctcaaaggggtcattacactcagacaccatcccgcggccttgtccccaaaaggctgggcaaggcaggaggagggaacttccactgccctccccatccctccgcagagcatctgcagggactgtgctctcccaccaccggatgccctggaaccgccctgctctgcctactgcctgcggtcctgcttaggggaggtcctcagaggcacctctttgcttccctgtccccaccctctgctgcgctttccacagtggccccaggccgccctcggcagggggcctaggcttcaggctcacagcctcccaaccagggaagcatgcggcatgctggccagacctctccatgcccctgtgactccagtccccacaagggctcggggctaagatggagctgtcctccattgctctgtagggccatctctagggtaaatctacaaaaaccagaccagggtatctactctggagtccttgtggcgtgacggtaccgacca

SEQ ID NO: 156133 - DNA, 598 bp, Homo Sapiens
  misc_feature (64)..(64): n is a, c, g, or t
actaacttgtcagctcagcctatctggatttgactggagccagggttcctctggctcctggaanttgggaagtcaagaggccaaatagcaagatgccctcgccccgacctggcactttctatatacagcccttctccataggcactgccaagaagcaagctggcctctgctctacccttttcaccgccaaggtgaggggatgactgaagacaagtggcctctgtgatttccgctcaacagtcacttcctcagggaagccgaggcccttgactagccattacaaaggtggcacacacagaggactgactttgtggcaagcaggggagtaagcagaagtgggaaaccagactgcgccaagtctactctccaaatcgtgcccccacttccccattacataacactcagtaggagctacttgacatctaaccgttagtttcctcatctgtgcaatggagactgtagcacttgcctcatagggttttataccatgtgtggatccagtgagctattgtaagcacttagaagatggccaggctaaggctgggcacagtggacttaagcctgtaatcccagcactttgggagtctgtgggcgtgac

SEQ ID NO: 156134 - DNA, 543 bp, Homo Sapiens
gctggtaccgtcacgccacaaggactctactcactaccctggcttgtcagtagccccaagctactggggggcgggggcccctggagtgggctcatcagcagggttctgggcagctgccaggaatctgctatgccacttgttgcagtcgtccacaagccacgccagctccagcagcttcaccttcacctctcccttgtcctgggccagcctgctgatgcactcctcctccttccgcactgccctctggctctggtacagtgcgatgtactctcctgcaggaggacaggactcagacgctggggcccctctgaccaatgtgcagctctctttgccgtgccctggcttcccactccccgatggtgtctgtctctctccagacagctagatgcagcaatgttccagttcctcaaccctctccttcaagtccaccttctctcctgcatgagctccataaagcggctccacagcttctccatggccccctgcagggcctggtgggtctccccacacatgggatcacccccagtcttgtgggcgtgacga

SEQ ID NO: 156135 - DNA, 157 bp, Homo Sapiens
gaaattcggggctgcagtgagctatgatggcaccactgaactccaacctgggtgacagagcgagacactgtctctaaaagaaaaaaattcttagaaaatatgcccaagattcagttatgatatagcagagcaggtggtccagtcttgtgggccgtga

SEQ ID NO: 156136 - DNA, 406 bp, Homo Sapiens
tggtaccgtacgcccacaggactggaaaacagtgaactagacaacctcagcgctctggcgcttccagaaaaccgcgtgtcactgcagcatcctccgcatcatccagcaaggagggaggtgactgtcatccccatttacaagggaggagacagagcagggggctctagatgggccgccccatgaagtcagccagtcagcccaagcacctggactcggatctcccaaacctcatgcgatttctactccatcgcactgcctttccacgtggctttcaaagtcattgctaagccttgtttccatgatgccacactcaagttttaggtgaaaatctattacgaaatggaaactttttttggaaactatactgctgcagaaaatgcgcacactgtctagagtctttgttccg

SEQ ID NO: 156137 - DNA, 799 bp, Homo Sapiens
cctcgtgtgcttacctgcggagccttccctccgcaggaacaatgggaagaccattccgcgttactctgggggatggggggaggtgggaggttcaaaattcaaagtgagaccataaaggtgctgagtccaaaggaccctaaaggagttttgtgaccattaacaatcacaaggctaaggtattaataggttttctgcatttttcctgataagggaggtcaccccaaggactgtcacaggcatggctgtgctctggtcagcattgagctggaagcttcggggagaggcccaagggcagggatcctgtagagttcccaagggtcatgacctggccccactgggaacggaggcttcagttccaagaggcacagatgtaggcagaagaccaggagtagggagagctgagactagggataaacaaaggggcaggaatcctggagagaagccccgtgctccactcactgactgcgtctgtactgactatgtaccagctgtgtggtcagagagaaggaagggaggcagacatgagggactcagagtccgggggctggggtgaggctggaactcagataatcatccctttccagaaagttctgagcagcctgggagcagcagggaaggagaagtcagctctattccaggggctccacagaactaatgaggttggggagggaagcttaaaagatagccagagacacactaggaacacaggggacagcataagcaaaggcacacgagggggagaacagaggtgtctgggtggagatggggagtcctttgtgggcgtgacgggtaccggagt

SEQ ID NO: 156138 - DNA, 471 bp, Homo Sapiens
  misc_feature (188)..(249): n is a, c, g, or t
cacacaggtgtttttccaggtctgaccatcttgccctccacatgaagagacatatctaaaaaaccgaaaggccagagttgccatggcatcggctagtgtctaaaggagacgccatgaggcagggggctggacttcaggcggggacccattgcctcgcagaagaaagttctcacttataaacctctgtnnnnnnnnnnnnnnnnnnnnnnnnnnnnnnnnnnnnnnnnnnnnnnnnnnnnnnnnnnnnnntgtcatgcactcaactatatttaaaatatatacgtctattctttatgccttgccttagccagatggaagaagatgaagaaggaaaccaggtgaactcagcaaggcagactggctgcttacttcagcactattggaattatttcccgctgttgccaatggaaatcaaagaaaatggatgtgacgtctgtgcaggtggacggcagtccttgtgggcgtatcagg

SEQ ID NO: 156139 - DNA, 558 bp, Homo Sapiens
  misc_feature (548)..(548): n is a, c, g, or t
tggaatcgggcctgagcttctggaaatgccaccaggtgatgccaccctgtggtgtctgcccaccacacaccacaagactcaagtggttttccccttttggccctaaaccacctaacacctcagcggcatgggagggcaattctcagcaaggcaaggacatggggaaggctcctgggagaggcacgccgtccaccctcaagcctgactgtcacaggtggaggccccgaccccaccgtcaccacacctggggaagctgccacagaatgccacagcactggaaagggacactctgagggcaggctccagcagcagctccaggacagccagccgcccttctgcccaggccgaccacgctgtgtcctgtgcacgccatcttcaggtttcccacacacccacttcctgaatacttttctccccaaagcaaggaggaacctcgccttcgttcctccaacctcatctccccactgaggtagcccttggtaagccaggctgggcagagaggacacagcggtgggcgcgcccccctcgagagcagcccagtcttgtgnggcgtgacga

SEQ ID NO: 156140 - DNA, 546 bp, Homo Sapiens
ctaccgaggaaacaaaataaaatgaaacccccggaactaatcaccaagccacgctgtctcactggaagctaacagaaggctcaaagtagagggaactgacaattcttggctccccaaagcccttaccaaaataagtgagtaagagatggcgagtctttaaaggagtggctcatctttcctctccctggggcattttggtgtgggagactacaggggatgaggttaaaaagcttggtcggcaggtagaggatggggagagaggttagggccctgggaaaggtgggagatcagccagagacaggtttcccagaacagaatgtctggcctttgtggtgaggagggactgtggtatgagccgcagaagcgggccaggggtaaaccctcctgtgcgtccttccttcagcctggtcctgagggtgaccctttgatcctgggttctccaggtagggctgtgagctgtgagttggatccttttggtgaaatggtctctctcatctggcctgtcactcaatgtggaatagagtgagtgagtcttgtgggcgtgac

SEQ ID NO: 156141 - DNA, 542 bp, Homo Sapiens
  misc_feature (237)..(292): n is a, c, g, or t
gccagtcctgagtttttgatgtctctgcctccttccctggaccttaggattgggaggaataagcctctgagagacagactgccctttttcccaagaatggaatctctgctcactagggtaaggggtacactaggtgaggtccacatgccagtgctcatggctgttgaatgtcctggaaatatggcagctaaatggaattattaaatgctcagaagtatttagctataccgtaatatnnnnnnnnnnnnnnnnnnnnnnnnnnnnnnnnnnnnnnnnnnnnnnnnnnnnnnnnccaggtcctcaaataacgtcatttctttcaatgtagcttttgttataacattgagaaaaaaaatactggttttggtatatgtcattttgttttaagtcacaggctccaagaactgattgacaatgttaagtgtggacttactgtactgcatcttctctgtgatattttagcagtgtggcatggaggtgggcctatgggttggcgtacagaggaaagaaggacctccgtgcaagcagtcttgtgggcgtga

SEQ ID NO: 156142 - DNA, 201 bp, Homo Sapiens
gagctggtaccgtcacgcccacagactcctgtgttggaaatgtggaaacgatggaatggctgggccctcataccaccatcttgctcagtcattggacagggacacccaaagaaaatcataaacttggtccaaaagctgagtagaccctgtaggagccaacagtggtaggctgccagctgagcacagccttgaagcagggca

SEQ ID NO: 156143 - DNA, 172 bp, Homo Sapiens
cgtcacgcccaacaaaggactgcaaggtggtggcttgggtgagggttccagcagtgaggctggagagaactaaaaggacctggggtagattctgaaggcagagctaacaggacttcttgaccttcatcaatgcctcccctctacagggccaggtatggtggctcacacctct

SEQ ID NO: 156144 - DNA, 649 bp, Homo Sapiens
ccggtaccgtacgcccacaaggactggattctgaaggaggaaaatacgtaagcgtcagtcagctctctcctctcctcggcgctccgcaggcacttgggatggaaaagcatccgcgggagatgccggactgcacgctgctgccgactgcgaccccgtccagggcaggcccccgactctgactgtgccgtctgaggctccactgggccacgccatgtaaggtctatcacggggctggaaatttcctcatgtgacaagtatctggaaacatggctttctaaagtcagttggcttctcttgcttaatgttcttccctgggacttggtctgcactggctctccctccagtccctgtgcgagggtcagcagtgagcattctgactttgccttctctcagtgatgctattctcctccctccagtccctgtgcgagggtcagcagtgagcattctgactttgccttctctcagtgatcctttctcctaagagcacagccttgccctctccctcctggtgcttcatccatgagagttcacctagctgttttcactgggaaagactcctcagctgcctgtcgtgacttcacctggaagacagggagaatgtgcccacaggtgacctgcgaaggtcactgtaagtccttgtgggcagtga

SEQ ID NO: 156145 - DNA, 516 bp, Homo Sapiens
tgggtggctggattagccccaggtttggatagggcatggtggagaggggagtggagagggtttggggcccaggagcagtctcacagcaggggctcccttttgagcacctcctcacttggagcacttccttcatgtccctgtgctgggcacctgcatccaaacagtgcatgctctattaacgttcactgcgcgccatcgtcctcctcagctcctccttgagccagtgctcatgctgaaatgagcactggagttgcagaagaatgtgtcctcgctccaaggcaaccagctgcacttctctcggggcctgttttaactacggaagcatctgctccagccttcccgccagggagtattccccatgccttggcctctgtactggctgaggctgtgtcatgtgacctaaagaaagccatgatccttttgatcatggatcacttgaagagaacttgtgttccttcagacctaaggaactgtagagatatatttttgtggtggaggggggatggagtctcgctc

SEQ ID NO: 156146 - DNA, 458 bp, Homo Sapiens
tatatcgagctcggcccgtttacccacaaggactcacagcaggcttggtggaaacatcttcctggttaatttctataccccaactccatcccactagaagccggaatagatatatgcccagccccacttgttcccctctccactgggaatatgaagaccagccattcccagaacagctcttgggaaagagctgcaataaaatagcttttcttaaaaaaatcattttttaccttctttctcctgcaacaagtagattacaagacctctgaatgcagggcctttgcaggctgagcctgctctgatgggcacacagcccaagagggtggaaggcaccatctttcagctcctactcctctgagcaggcctcatttggcaaagtatgcgagagtgtcctgctgtcctctggaacctcacaccacaccaacgtcagtcctagtgggcgtgagcgggaactcaga

SEQ ID NO: 156147 - DNA, 663 bp, Homo Sapiens
gctgccacgctgccaggtcatgctacggactccgccacaccccaggccacgttactgcagacgccaccacaccaggccacgctgccttttccagccacagtcccagttaagcccaccctgagtgccgctcccacctttccttccttcagctgctgcagaaagggctgcaggtatgaggatgcccacctcagccccgtgtgtgggaccaccacccagtggcaggggtgggctcggagcagccccacagtcaagtcacacacagagcagaggccagggggcaagacgcccaagcgtcaccgaagcaacaaccgcgtcagcatcccagcagctgagctggcatgccgttaacgtgagaaccacatcggcatcccagcagttgagctggcgtgccgttaacatgagaactacattggcgtcccagcagccgaggtggcaagccattaacgtgagaaccacactggcatctcagcagccgagccggcgagccgttaacgtgagaatcacatctgtgtcctggcaaccgagccaggcatgtcattaacatggatacaaagagaaatgactacaaatacacaagtgctcaaacctctaagtgaacactcagtgtcctcagatgacaaatgatcattacattcacgacagtatcacgtccttgtgggtcaa

SEQ ID NO: 156148 - DNA, 442 bp, Homo Sapiens
gtaccgtacgccacaaggacccaggcaggcaagcctgagccaaggcacctcgggctggtttcccccacaggaatcacacccagaccaccgcccccaatcaataatggaggcttaaacaaccaagccaccaagggaacgaggatctcaggataccagctgggaagcagcctctggcaccatcaggtggaaataaggtcagggcaatggaggctgatgggggcgcggcggcagcctgttcctctaagggaggatggaggggactttcaggaggaggcgcatccctggggccccaggcagaggactcaagcgggtgggcggggtccaggtgctgcggtgttgtcactggctgggagggaggctggcccggcttggtgctgcagctcccatcaactccagacgccacagtcgcgggcggcgcgagggtccagtcctgtgggcgtga

SEQ ID NO: 156149 - DNA, 369 bp, Homo Sapiens
cacactgacacaccagcactgatgcacaggcacacaaggatacaacatgtgccctggccctgcattaataggcaagtacagagacaccagccctgacatgcacaaatgcacactgatgcacactcacagataaacacagtctagcatacagacaggtgggcacgtatgcagacagacagtgctggaaaacagacccatgagcccacagggaccagacacccaaccacagacatacatggagaagaggtagaccaaggacacggccctctttgtccccacctcagctccaagttaccctcaggcagcccttggctgtttatcagcaggatgggctgctgccagtccttgtggcgtgacggtaccgactga

SEQ ID NO: 156150 - DNA, 604 bp, Homo Sapiens
ccaagactcacatctcatttttaccatgctctctgtgccaattagggcagatcttttcactgtcattattaacacatgttgccagccactgggacctgtttgtcctgggggatgccccatgagccctcggatgtttctctccctccaggctgagctgagtgagctccgcagcactatcatcaacctgctggacccccctcccgaggtgtccgcactcatcaacaagctggacttcgccatgtccacctacctcctctctgtgtaccggctggagtacatgaggtacacgtgccttcaccaccatgcacatgcacatccacatttgagcagggttttcatttttgtgccctcgtaagcatgagacttttttcaacttctcccaagacatgcaaactttctgaaaaaccaagcaaaaacaccctctacttttctcgtatgcccctccttcatgaccaccagacaccacgtatagtaacacctcccagtatctaagctccgcatcatcttctctctgataggaaacaggcttctgagcagttgcagtcagtgttgtgaactcagcccacgggctgagcgaggcccttctgagggaccagcctcgctg

SEQ ID NO: 156151 - DNA, 452 bp, Homo Sapiens
atacgcccacaaggactccaggtgccgttagtggggagcggtatttagagacacaatccaggtgccatgggtgctttttgctgctgggtggtcattgttgttaggcctttactgtgaaaaattaggaagtacacacttggggcagcagcaaagagttcctagcaattagcgtcactttcagttgaacagtccagatctttgctgttttgaatttcatatttagatctcgtcgctggtatgcttggttccgctcctcgtttcttagttgcttattctacccgttattcactgatgttattctactgtacactcactcatataattgctttagaatgagcattctcacagcacaattgcaactggagtgctgagaaaaggttagtatttctttgcaggctgggtgtgtggctcacgcctggaatcccagtcctgtgggcgtgacggtaccgagc

SEQ ID NO: 156152 - DNA, 280 bp, Homo Sapiens
aacattaacttttaaaagatgtagtagaagctgtgcctagaggaacatttatttctttatattaggaaaggagaaaggttagaaatcagtggtccgaacatctttctcaagaaattagaaaaacaacaccaaattaaacctaacgaaaaaggaaataataaaagcaaaaattaatgatgtagaaagtacacattagtgagatattcagcaatgtcaggtggttcttagactaatgagggctggacctggtgtctcacgcctgtagtcccagcggtttggg

SEQ ID NO: 156153 - DNA, 414 bp, Homo Sapiens
  misc_feature (350)..(366): n is a, c, g, or t
gaggtagacggatctgacgtacagtcctgctcagcctcttggctgggtgaccttgggtacactgtcccaccaggatctgtttgttcatctataaaatgaaaaggttggactcaggtttcttctgcctcagatgttccataagactaggaggctgcgctgcctaaagttcgtgcacctagagtgctgcctctggtttcaccaacatggaaatattaacaggccagagcccaagtcaagaactcaagaggacacgcctcttcctcctgccagagtaccttggacaaaagtattcactgctaagcacgtagaactgaattcttcagtctaagacggaggtcccatttctctcnnnnnnnnnnnnnnnnnagacagagtctcacggtttggcccaggcgggagtcctggggggcgtga

SEQ ID NO: 156154 - DNA, 158 bp, Homo Sapiens
tgagccaccgcgcccggcctaaaatagccttttaaagttagtagtactttatagtaatattaaagataggatacgcaggtagaaatttaaaacatatcacatgtaaagttgactttaaagtgaggaaggagtccttgtgggcgtacggtaccggctca

SEQ ID NO: 156155 - DNA, 410 bp, Homo Sapiens
gacatttcagttcttcctgctgagtccaagggggacgtccagtggctttgggtctgggaccgggtgcacaggcgtgtgctggccccattgtctgcagcccctccggccatgaggccatcctgcctcagcagggaggtgtttggttcccagaggcctttgacaaagccgattttgggggctgtgtgctgttaccagtcaaaacctttctctccccttctcatcttacttgtaaacttgggttttgtattttggattcagaactaaattcagaaaaggtttccttttgactgtttcctacctcgatcgagccatttgtgggtgttcatttaagtttcgacacgtgtggaacttacctatctctgccgtatttggggagtccgttgtaagagagaatgggaattccagatcag

SEQ ID NO: 156156 - DNA, 762 bp, Homo Sapiens
gaggatacatgtcgtctctggcgagcatgatatcattcatcgacagagacggcaacctagagttactgaccaggccagatactccgccctgggcaagagatctttggatgtttattttcagtgacacgatgcttctgaacattcctcttgtgatgaataatgaaagacataaaggtgagatggcctacatcgtggtgcagaaccacatgaacctttccgagaacgcttccaacaacgtccctttcagctggaaaatcaaggactatctggaggagctgtgggtccaggctcagtacatcacagacgcagaaggactgcccaagaagttcgtggacatctttcagcagactcctctgggcaggtttcttgcccagctccatggagagccgcagcaggaacttcttcagtgttacttgaaggatttcattctcttgaccatgcgtgtgtcaacggaggaggaattaaagtttctgcagatggctctgtggtcctgcactaggaaactgaaagcggcgtcagaagcgcccggggaagaggtttccttaccgtgggtgcaccttgcctaccagcgtttcagaagccgtctgcagaacttttccagaatcctgaccatctaccctcaggttctccacagcctgatggaagcccgttggaaccatgagctggctggatgtgagatgaccgtggacgcatttgccgcaatggcctgcacggagatgctgacaagaaacaccgtgaagcccagtccttgtggcgtgacgg

SEQ ID NO: 156157 - DNA, 413 bp, Homo Sapiens
cctcctccagccatacacccgcgatgacgttggcaccccggagagcccgccgcacagtgtccacctcggctacgtctcgcacagagcgctcacctcgctgcagctgctggtagagctcgcggtcgatgaccctgctctccagcagctcggcggctggcaccaggctgcgcaggccctcaaagcaaagccggcccttctgctcctgctcctccaccaccgtgatgatgatcttgatgatcttctccactgtgatccggcccgtgcggaactgccgcagcaggtccacgccgctgctctgccgtgaagtattccgagttgatgatctcaccaaatggtcaccgtcttgccctggaacttgccgaacggcgcaggcacggtggccttctcaaagacgtcccggccagtctgttagg

SEQ ID NO: 156158 - DNA, 339 bp, Homo Sapiens
agacagcgcccgtccttgcagcgtccccgctggctgcagccccgagggcagctcctcaccccacagtcctcgccagtgtagccggggttacacacgcagcgcccattctcacagcgccccctctgactgcaaccgcgagggcagctcctcatgccacagtcgtcaccagtgtagcctgggtcacacacgcagcgcccaccctcacagcgtcccctctggctgcaacctcgagggcaggagcgctggctgcagtcggggcctgagaagcctgcccggcacacacacacgccctgcacgcagcgcccacggccttggcagtccccggccagttctgatgag

SEQ ID NO: 156159 - DNA, 745 bp, Homo Sapiens
cgtcgggcgctggttccgcgcggggtccggcaggaccccagtggccgcctgcgcctccagcaggagcgcagccgttgtggctctcagcaggccccggcgcgtggcctcgtagatggacaccttctccttggtgtcctccaggtagatgccggcgaggcagccactgccctgcagcagcgtccgcacggagcccagctccgaaaggtccttgaccgtcgtcttgccgtcctagagctgctcaaactgggctctgctgaggaccccggaagccaggagctcgctggctggcacaggggcacggaggccgctgaaggacagcctctcctgccgcagggtctccacctcctccacgatggtaatgagaatcttgatgaccttctccacggtgaccttgcccgtgcggaactgacgcaacagctcctgccgctgctccgcagtgaagtactcagagctgatgagctcccacaccgtcaccgtcctgcccttgaagccacccacggggacctcaaccggggtcttttcaaaggtctcacgggcctgcagctctgagtagagctcctcctgccgggcccgagcagccttttctgagagcggcagcaggctcagcccggtcagctggtcgggccggcaccgctgctggagctcgccgtagcgtggccggctcccctgtgctggggtcactgtaggccttggcgtcggcccttggtgccgacagggccctgctggtctcctcatccagcagcct

SEQ ID NO: 156160 - DNA, 122 bp, Homo Sapiens
tacctaaaacagatccctttgtgttcctctatttctagcctcgtccttgttttccttggactgtcattgtttatggggatacctcctccactcacctgaatcctgcaagcaagtgggcggcc

SEQ ID NO: 156161 - DNA, 435 bp, Homo Sapiens
cagtaacagctgtaacaagttgttgtgtggccacagacgtcacctgtcactacgatcccagggactgtttagaccccatcttataaatttggaaatggaggccttgagaagagaggtgaccagcccagggacctctggtgtgaggagactctctgggggcctgtggattcgctgggaggagtgttctgcgatggccctgactgtgctgaactcagcagtgacccagtgaccccggtgagggtgcctgatgcctgagagagggccaggtgggggccggcgcaggggcccccaacctaacacgctaaggctaggaggcaggcctgggctctgccatgtggtctcagaggagatctgggtctctgggcctgcggtggggacggtcatgatgcccactgcctgcgaggctgcaggacccagctcagtgctaacctgcgc

SEQ ID NO: 156162 - DNA, 258 bp, Homo Sapiens
cacaaagacttgtgtctaacagtatggcaaaactggacaatatcagcacacgtcatctccactgaggaggctgtccctccacacacggactgcctggtgctgttaccagctctcccggcccagcagcactgacacaggccggtggtcactgagcctgagaaaagcccatgatgtcagtcagaactgtcacagcagacaggtgcccttgtgctgcactaggcacgtgcgctaaacacctccaaagagccgcagaggggc

SEQ ID NO: 156163 - DNA, 657 bp, Homo Sapiens
aatgatacgaatcgagctcgtgtaccgaacgggtgatgcggttgcaggctgggcatgggagtggacggacgacatggcccctgccctgggccgcgtcgggaaggtggtgaaagtgtttggagacgggaacctgcgtgtagcagtcgctggtcagcggtggaccttcagcccctcctgcctggtggcctaccggcccgaggaggatgccaacctggacgtggccgagcgcgcccgggagaacaaaagctcactgagcgtggccctggacaagcttcgggcccagaagagtgacccagagcacccgggaaggctggtggtggaggtggcgctgggtaacgcagcccgggctctggacctgctgcggaggcgcccagagcaggtggacaccaagaaccaaggcaggaccgctctgcaagtggctgcctacctgggccaggtggagttgatacggctgctgctacaagccagggcgggcgtggacctgccggacgacgagggcaacacggcactgcactacgcggccctggggaaccagcccgaggccaccagggtgctcctgagtgctgggtgccgggcggacgccatcaacagcacccagagcacagcactgcacgtggccgtgcagaggggcttcctggaggtggtgcgggccctgtg

SEQ ID NO: 156164 - DNA, 533 bp, Homo Sapiens
gtggttgagggacgtgtagcgccgcagcgtctgggcgagggcactgacgacgcccaccttggtctggatgacctgttgtgggaagtcactcatggcatttgtcaaccagccttccaagctcttggcaaagttacggatggcctgtgtcaaggtactggggaccggcctcagcacgtcggggatgagaatctccaccagcgcctggtagaggatgtggtcgcagctcctcatccacctgaggatggggtcgcactgacacagggagataagcttgtccttgggcaggacggcgccctcggggtcttcgtcactggcaggaagagaggtggggccgtcgctggaggaggccttagagttccagaaggagagccacagcttctcgatgtagtggaactggaggttcatcaccacatctacagttgcctcgcagtgccgtctgtacaccagctgcagggccttgacgtcgtgcagtgtgacgccgtcctgcagcaggaagctgcccaggtcgggcgcagtctatgaggggggttctc

SEQ ID NO: 156165 - DNA, 335 bp, Homo Sapiens
cagtcacaaccgtacacactcctcacaatcgctccttagcctgttccccacgcagcccacacaggtcgggagttcctgtcgcgccaggctccgagccgcctcacttacgcctgttcggatagggtcggctccgttctactagaatccacacaagtcgaccctagctatctcacaaagccccaaggccgcttgcccaaatccgcgggaagatcccgcccactcctcaagagacaatctagttctcgcgggagagtgccctgggcctagaggcttctgggaagtgtagtccagaaagcgacaggttgccgaaagctacagcccagccatcccgattc

SEQ ID NO: 156166 - DNA, 867 bp, Homo Sapiens
tgcgtctgggtggcgttctagatttagctttaggttgggaggatccagagcgactgcgcctgggtggtgtctgtgacttttgcttagggcatggggaagaccctgaaaggctgcgcctcaaagacaagcgagattttgctttggaccgtggtgaagagagagacctgctccgccttgaagaaatgcgagatttcttcatttctgggcttgaattggacctgcttcttctttgagatgttctggatttgtttttccgctctgaagatgagccagatctgcctcttctttgaggtgttctagagtgagatcttccacgtctaactaagcttctactgcgggatcttcctcgtcttggtgtcctagaccgagacctccctctcctggctggtgttctggagcgtgagcgaccactgcgtctagctggggttctagagcgtgagcggccacgtctggctggggttctggagcgtgagcggccacgtctagctggggttctagagcgtgacctgccacttctcctggctggtgatctactacgagacctgcgtcgtactggtgatcgggtcctagatctgcgcctagcaggtgttctagaccgagacctgcccctccgggctggtgttctagaccgagacctacgcctggtgggagttctggatcgtgatctccgcctggcaggtgttctagagcgggacctgccccggcgggctggtgttctagaacgagatctacccctagtggctggggatctagagtgggacctccctcgccttgctgacctagacctgcctcttctctgggtatttctgctcctagaccagcctggtcgctgaggagacctagagcggccacgagtacaaccggtgg

SEQ ID NO: 156167 - DNA, 561 bp, Homo Sapiens
  misc_feature (422)..(430): n is a, c, g, or t
ttttgtattttaagtaaaaacgggtttcccccattttggccaggctgttcttgaactcctgacctcatgatcctcccgcctcagccttccaaagaagctggatctttcatcatcaggattttccccctatctccagaatccagaccactctcctgcaggcctctatctttgcttctgtgtggacagctccttattcagaggagcagtttaatagggtggagagggagcatctgcttcagagaaggctgtcaagtgaacggcagtaacactgcctccaaaccagtttttcataggcctttacttattatttaatttggctgtagaggatggaattaggctaatggctgttaagtggctaaggcacaaacatggtccatctgccgagaaggctcaaggctattgtctatttcaaaggctaaggnnnnnnnnngatgagtgagacatactgttacactaagagcctcatcaaatgcctttttattccccctctgatcctattcctttcaacactagtgattttcacggtaccatactaagaactcaaaatcaagacctaaatcc

SEQ ID NO: 156168 - DNA, 415 bp, Homo Sapiens
tctgtggcgcagtaggtaaaatgtttagccctgtgcttggcacccattaagcaaccaatgcttgtcagctgtccttattcagagtattagtattcatactggtattatttactccaacctcttactgtccctgtccctcagcaccacagaaaaacaccccaggctttccttcttcaaggctctctcctcctgtctcatgaacagggcttacagtcaccacccagcctcagctggtcacagaaggagacagattgtgtacaggttcctgggagtcctgtgcaacttccctcctcccacttgcttcaaagcagattagagagtcgcttcccctctctttaaaactggccagaacaaacataggtctcagagcacttcctctgctctattacatctgccacctaaatgcgcacagagg

SEQ ID NO: 156169 - DNA, 541 bp, Homo Sapiens
  misc_feature (372)..(438): n is a, c, g, or t
tacctgtgcgatttaggtattctggcaaggagtttctgagagaggaacagaaaatggaataaggaagtcattgatactatatggaaattcaccactgttgctgccgtgactgaagaggcaacgtgagttctatgccataagaatcataatgtaaaataggttaagcataaaacacaataatataagcacctacccacacaaattaaaatttatggaagattcggcagaaacagctgagagtggtgcttaataaatcccaggccttgtgctaaagccttgggttatgaagataacatacattctgttgcctgtgaaatctgaaaggggtctgtaactgcatgaactgcaaagacaccctcacattcacagacnnnnnnnnnnnnnnnnnnnnnnnnnnnnnnnnnnnnnnnnnnnnnnnnnnnnnnnnnnnnnnnnnnntggggaggataatcataaaatcaaagacatcatgccatccttcctttttcctggagctctcttgcagttactgtcagcacaaagactgacccactacctaaat

SEQ ID NO: 156170 - DNA, 625 bp, Homo Sapiens
ggataaacttctccagtaagaatctcttatttttctcattttaatctggatgaatcttgttagtaatttcttaaagcaaaacattgatatgatttttagtgtcatggtctttagattcattactggaatgcatcttatgacaattctctgattttaaaaaaattatggtattcttatttatttagaaatgcctattctttgcagttttcacattcataactgctcccatagtaattcaaaatgtccttagccatgtggtcagtgatccctcctaataatagatttagcaaatttcttcttttgatccattttcaatttggtactatggcctcttgttcggcagtttgtacgctttgttatccaggttttgttcctttttatttgctctctttttggtgatggtttcttcagaagttatgatgtttgcccatgtaaatacagggtttgcaggtgattgtcttaggccaccttgaaagtatggccatgaaaataactcttgtggcaagccaacaaaaagaaattgcattaacgctgcttccctgtccctaactagtccagttacgcttgggcattacagagagtcgcaggtcagtgtgtaatatatgacctaaatgcgaccagagga

SEQ ID NO: 156171 - DNA, 212 bp, Homo Sapiens
atgagccactgcgcccagactacgatggtttttcttaacgagacattggaaagtagaagcaagacaattattttgagttaaagactcacttttataggaatgatctgtgattcttcatggttgaccagaatgtcttaaaggcacaggcgttttgcaaaggagacacgtgctcacttagactccacctaaatgcgcacagaggtccgagccga

SEQ ID NO: 156172 - DNA, 335 bp, Homo Sapiens
gacctctgtgcgcattaggtgctacaaagattttttaaaaactaagagcctccattttaaaggacctaataatatgaaggagttatttcccactgttgtgacaatgcaagaaaacagatgtttgggaatttctggtctcatcgaaaaaataaggcaaatccacaagaaacagtcaaatgaggtagaaatacactgtcaaaagagaggtatcaactaactattttatgaatcatcttttttaggatttttgtgacatttttaaaagacacttaagcagagagatagaattattatttttattaaaaataaaatatgaggccaggcacagtggctca

SEQ ID NO: 156173 - DNA, 601 bp, Homo Sapiens
  misc_feature (250)..(557): n is a, c, g, or t
ccgtgagctcagatctgacgttttcgagctgcagacttgtttatctaattgtctaattgacatccacttggatgtctgatagttatcccagatctaacattggccaaatcgctcttttttcccccaaatctcccttgatttctcctttaaaacccccttctcaaagctatgctcaaactaaaattcttaggagtcattctagatatttctttttgttcttaccccacttattacatcagttctgttcttnnnnnnnnnnnnnnnnnnnnnnnnnnnnnnnnnnnnnnnnnnnnnnnnnnnnnnnnnnnnnnnnnnnnnnnnnnnnnnnnnnnnnnnnnnnnnnnnnnnnnnnnnnnnnnnnnnnnnnnnnnnnnnnnnnnnnnnnnnnnnnnnnnnnnnnnnnnnnnnnnnnnnnnnnnnnnnnnnnnnnnnnnnnnnnnnnnnnnnnnnnnnnnnnnnnnnnnnnnnnnnnnnnnnnnnnnnnnnnnnnnnnnnnnnnnnnnnnnnnnnnnnnnnnnnnnnnnnnnnnnnnnnnnnnnnnnnnnnnnnnnnnnnnncaaaactctgaatcggtcgacgggcccgggagggagagccctag

SEQ ID NO: 156174 - DNA, 220 bp, Homo Sapiens
ggcatataggttttacacattttctggaaatttaaaagtgagctattaaggtaggttgtctggggttagaatagggttcccctatgtataatatggcttaaccttaggaagtgtttcataagtgctttcccattactgtctaacctgactccacaataagttgacccatatgagattgccagtattagacgatttcttactttcaaaaatactaactgca

SEQ ID NO: 156175 - DNA, 495 bp, Homo Sapiens
gaagttctagaataggcaaaaataatccacgctgtcagaagtcagagtagacgtcatccccagggtggggggtcatgactggagaggggtctcagggagtcttctggaagtgctctatgtcttgatcggagccgcggtgaaatggatgcacgcatatgtggaagagatgcgcggtgaaacagatgcacacgtatgtgaaaattcatccagcggtccacttaagatctgtgcatgttacctcatgtcaattcatcttatgttaaaaacagaaaaaactacgactgaggatcaaccactgctgcaggtgctcaggcagcacccactcactccgaacatgcacacgccctgtgctcagcaacgctgctgtgaggaacgggtataacagaaatgagcctctatgctcaccaggagctaggttctagacagtgctcagcagcgctatttgtaataaccccaaactggaaatacctaatgcgcacagaggtaccgactcga

SEQ ID NO: 156176 - DNA, 178 bp, Homo Sapiens
gccggacctcgtgcgcatttaggttgattctgtgtctttgctgcagtgacattcacaatcacaagcgtgtgtctttatggtagaatgatttatatttgtctgggtatataaccagtaatgggattgctgtgcaatcccctttttctacgtgggttgaattgactgacttctaaagaca

SEQ ID NO: 156177 - DNA, 191 bp, Homo Sapiens
tctggggagagccagccaccttgttagtgagtccctcagtcctcatctttatatttcaggagtgtcagcttcggaaatcttgtagctcgcctcctcaattactttgcccattttcttctgactctcatggagacgatactctccaaatgtgagtctgacccaagatttggaccagtcttgacacctaaatg

SEQ ID NO: 156178 - DNA, 363 bp, Homo Sapiens
ggctccgtacccggcgtcccacttgggttcggcgagggttgaccggtcaggccctttctggttgcctgggtagatatctggagatggtgcctggctctccggactcctgcccttcccccatcagtgatcctgtcccacactctttggcgatggtcagtgagctgggcagggtcgggggtctgtccctgtccctcaggtggagattgtccaggccagtgcccacaactgggttagatgggctgcacaaggctggggaccagtctcccaggctgtcggggggcttcagtaatggctgtgggtaagacccagcacgtgaggagacgggagcttagaaattttgtatgtccaggtgcgctggctcat

SEQ ID NO: 156179 - DNA, 777 bp, Homo Sapiens
  misc_feature (90)..(111): n is a, c, g, or t
  misc_feature (661)..(732): n is a, c, g, or t
caggctgaggcaggagaatcgcttgaacctgggagggcggcggcgatcaagccaatgcaggtcagcctgggcaacaaaaatggaaatccnnnnnnnnnnnnnnnnnnnnnncatccgagcagggccacaggggctgcacactatgggggaagtagactttacagttagttcagctaagtcactaaacaaaaataataaaccaccaaaaagacaagatcagtccccaaggacatgaattccagagctactgcaatatgttatctataatgtccaatttttcaaccacagattataagacatggaaagaacaaggaagtgtgacctctacacaggaaaaaactaagcaacagaaactgtttctcttggatagaacaactaggcaggagatgaaggcaggagaagacttgagcaacactgtaaactgactgtatacctcatgtctgtaaaacaacacctaacaacagcagaatactttcctctcaagtaaacatgaaacatagtcatatgctagactgtaaaacatgcctcaggcaatttaagaagattagattcttaaaaggatattctccaaacacaaggaaatgaaattggaaatcattaacatggctggatgctgtggctcacacaagtaatcccaacactttgggaagccaaagtaggnnnnnnnnnnnnnnnnnnnnnnnnnnnnnnnnnnnnnnnnnnnnnnnnnnnnnnnnnnnnnnnnnnnnnnnntatggtgccagcacctgtagtcttgctggtgggaaggtaccgggc

SEQ ID NO: 156180 - DNA, 421 bp, Homo Sapiens
  misc_feature (45)..(101): n is a, c, g, or t
aaaaggggtttacagtgaccctaagaggaagatctgactgttagnnnnnnnnnnnnnnnnnnnnnnnnnnnnnnnnnnnnnnnnnnnnnnnnnnnnnnnnnacctggactcctgcagtccagctccccgccagcctcactgaaccctgaggcttctctcaaatctggtccctcggtgcctggggacacacagcacacggcagctctaaatccaggaacctgagctgggaagcgtcactgtgcagctattcacagtattctgcaaaactagggcccttgcttgaggcagaaaaaaagccctctttgaggtggtgttcagtgtggcttgcagctctggatcttgcattccatgatcaggtcggccgctgacttgcggttggcagatactacctctgtctgctcgcccacttctgccagagact

SEQ ID NO: 156181 - DNA, 588 bp, Homo Sapiens
catagtcgattcctagagtatccccaagctctggaaaaggggctcctggcccctgtgggaagcttgaaaggaacaggaccatatcctgtttctttttgctcatacctctgtggtgagatcttattctgaccccatagtctggtgccatacctgtgggtccctgtatctcctagaattccccctatgctagtgtttagcccgtgtaatgacagttatctgtccacagggctgtatcccccgccagcttgtaaactccatgaagaccggccctgcgtctcactcactcctgtccacagcagtgcctcccacatgttaggtcttaacaaacatctgtttcttctactcttcataaaatccacgcttcttctcacccccccgtcatccctgatcccagctaactttgaccctgtgtgcgggggcgggggatctacatgtgggctccacccccgcacgcctgctgccctgtcatctctgatccctggcggtgggatgtctaccatggctctgcccaatcccccactgtcttcacccctgccacatctggcatgattttaccgtccccttttccagagcttgggaacatcaaga

SEQ ID NO: 156182 - DNA, 164 bp, Homo Sapiens
aaaggaagaaaagggggtgaagagggaatgggagagggaagccgctcctactgtcaggaaaggtaattggctgagataaggctcctgggggcaacactcccactcaaagcctgcaggctcaatgtttggtaattaattggcacaaccctttgtccagagccatt

SEQ ID NO: 156183 - DNA, 236 bp, Homo Sapiens
cgagctcggtacccctccagctgcccacactggcagctttgttcatcagtcagaacacatcaaagtggcctcacgcagaatcggcttcaaatcccggttcctccagcatatacttgctgtgtgacctcgagcaagtcgctcaacctctctgagcccaacttcatgagagctcaacagccaccaacaacttttatcctgatgattactcttctattgcacccttttccatgaccctt

SEQ ID NO: 156184 - DNA, 550 bp, Homo Sapiens
aaggctttgaaaaaggggtttatgcctggaagccctttctacactggatggctctcagtaacttacagagaaatgtgactgcaaaccctattgaagcaaagttagtttatctactcagcttatctttagcccacactggctgtatccacgccagtgccacctgatgcaaagtctgatggaaggacagtttaagtggaaaggcacaaggttagatctacagtcaaaacagctgacttttgcccattacaaaagggcgtttgtgtaacggctttgtgcacactttgttagggtcccttgcaggcaagtagggtgccttgatgcttaagcgtcattagtttcataggaaattcatctactgtttacttgtaacgaaatctcaggacaaagcagaaaacgagaaacccagcactgacctcaggactgcagacttcccccttactactgatgttggaccttgcacacccttgcaagtgttatgcttacccgaggcacggccttgcgaagtgagcctatcgtccccttttccagagcttgtgatactctaggagtc

SEQ ID NO: 156185 - DNA, 169 bp, Homo Sapiens
ggcggtaccgtacgcccacaaggactgctgtggccacagaatgtgtcctgagcatcgggccacatgcaggactgttttggagccggccccaccccatgtcgcatttgctgtttgtactcaaccatggtcctgggaaacagctcagtgagtgtcctagacacgcactcgc

SEQ ID NO: 156186 - DNA, 424 bp, Homo Sapiens
tggtagctgtgactaaggagaagacagcctctgcacccccaagccaggcggttgaggaacatattgagagaggctcagattgcagaaacccagccctgcccctgcgtcctggcatccagcccccaacatggtgccaaagcttccagaagccaaaaagcttctgatttttaaggtagtgggcatctctgtcctaatgacgaagctgctcagcaacatccacctgcccgccgacaggaaggagcagtcaccctgctatccctgcagccactcccagcacacccgcacacagccagcaccaccgccgcccacgcgtgcacttctcctctactgggccttggtcttgggaactaggtacgaaggatccggcaagcccgttcaggcctgagatcagagccagatcaagccgctagtcacagctaccgag

SEQ ID NO: 156187 - DNA, 278 bp, Homo Sapiens
gtctggagctgtgactcacggggcataactgctgcctgcacattgtttacaatccagcaagcaaggggcaccgaacagcagctcgggcagcctgtgctgtggcctgcagagaattccaggtgacgccccagagggcctaggagaggatacccttctgagaacagccgtggctcgcccggcatcaccccactcaagaggccagacggggtcccagctggggtgacacagcgccagtcacatccactcatggacactcagtaggccacactcccgatcac

SEQ ID NO: 156188 - DNA, 174 bp, Homo Sapiens
gcttctggggtacaacctcttttatttacatctctggtcactcctctgttttccttgcaagctgatcctccactccctgcctactaccttttgaagtctcttaaagctgttcttggccttaagaaactcctgtatttttctgtcctgggtgaactatgtgactagacggaccgt

SEQ ID NO: 156189 - DNA, 383 bp, Homo Sapiens
taagaggccatggggctggggagcagtgaatgggagaggaggtgagtggaatgacagtcactggggactttcagggtcttgaggggcaaagagcagactttaaattttgctctgactttgattttacccttaatatgtgaatgcttcccttccatgacaatattcagacggcttctcactagtgtagggtgagtgaagcccttcagacagtaagggagtctcttcacacactgctcagacactgcactgtgtgtccacggccactgccagcagtggctggggctctgccgtcttcagctgcaggagggatgtccttccatccttcctgcctcctgagagaagtagggttccgaacccagaactgctacataggtaaataccgg

SEQ ID NO: 156190 - DNA, 424 bp, Homo Sapiens
ctaacatattaacaataaaatgctaaattatgtagcatgaatggctaccacatatctatgtcctccatcatttatttcaaaaagaaaagccttgtccctcacttcataatcagggctcataatatattcagtatataggagctttttttatataaggtctctccccttagacttgctttatctaattaaagattccattgattacagtaaagggtctattatagacaaatgtgagtaatgtgttccagcattgtgctgaattactgatctacataattttaatactagtctagcctggacattggatgactaagttttgttactcaggcttgtatactgataacctctaaagttccaatacatagttgtgaatgcagtctttgcagaggtatacatgtgaactcaatcgatatagtcatctagc

SEQ ID NO: 156191 - DNA, 498 bp, Homo Sapiens
cttaaccttagaagttgtggaacgagagaccaaaaccaaagcttacagcaaagagggcctgggcctggcccagaaggtagatcctgcccagaaggagaaggaagaggttggccagtggctcacgaataccatcgacacgctcaacatgcaggtggaccagtttgagagtgaagtggagtcactgtcagtgcagacacgcaagaagaagggcgacaaggataagcaggaccggattgagggcttgaagcggcacatcgagaagcaccgctaccacgtgcgcatgctagagaccatcctgcgcatgctggacaatgactccatcctcgttgacgccatccgcaagatcaaggacgacgttgagtactatgttgactcatcccaggaccccgacttcgaggagaacgagtttctctacgatgacctggacctcgaggacattccacaggcgctggtcgccacctcccccccccagccacagccacaacttctaatcacagg

SEQ ID NO: 156192 - DNA, 421 bp, Homo Sapiens
tggccgtggctttctattagtgacatgtggtgatgtttggagcttaatattgtactttttttctagctcctgcccctatatcaccatgttgtttcctcaaatagacttaaattaactattccaagctactttcctactggcactgaggtgccagacaagagatgccacaatcctgtcacttttcccaaattcttctatcttttgcttgcctgttttctctaaatgatgtgaatggaaggatgctctgggatatttagatattccataattctcgtccaaaatgtgtttgttcttccatgagctattcttcacttttgagcttgtgggactactgacctggttttataaaaacatgaaagagaaatatctccaaattcactgatgtaacagcaaatgatgctacccgaatcacgtataccag

SEQ ID NO: 156193 - DNA, 382 bp, Homo Sapiens
  misc_feature (110)..(168): n is a, c, g, or t
tgacctgtggagggctgcttgctgtgtattgaataaaggaggcttcttggggtcggggcagggtctctgtaagcacagggagaatagatttcgctggggcttggataacnnnnnnnnnnnnnnnnnnnnnnnnnnnnnnnnnnnnnnnnnnnnnnnnnnnnnnnnnnngtggaaacccttgtccttgggggtcctggatagaagttgccagtgttggagtcttggggcggtgctgcctagaggatacctcccaaccattccagctccagagtgctgatcatccgtatggccccgctcccccagtagtctctgttggatcttccaggtagggtgcagcctgaggcttgttcagcagaacaggtgaagcacatgtgcaaactgc

SEQ ID NO: 156194 - DNA, 145 bp, Homo Sapiens
accgtggcatgatgtgggaggatttttgcatgtgaacagggagacgagaacaaagttgaggaatacggggaatgattctcaggggaaggctgggtgtgggatcaggggtaagccacggtcaacccacaagccacggtcaacccac
